United States Patent Application Publication US 2014/0004565 A1 - sequence listing, part 71

SEQ ID NO: 1726386 - RNA, 19 nt, Artificial Sequence
  Description of Artificial Sequence: Synthetic oligonucleotide
uucguuugacauaaggaac

SEQ ID NO: 1726387 - RNA, 19 nt, Artificial Sequence
  Description of Artificial Sequence: Synthetic oligonucleotide
auauaagaucauccugggc

SEQ ID NO: 1726388 - RNA, 19 nt, Artificial Sequence
  Description of Artificial Sequence: Synthetic oligonucleotide
gguacuaauggaucgaacc

SEQ ID NO: 1726389 - RNA, 19 nt, Artificial Sequence
  Description of Artificial Sequence: Synthetic oligonucleotide
ucguuugacauaaggaacu

SEQ ID NO: 1726390 - RNA, 19 nt, Artificial Sequence
  Description of Artificial Sequence: Synthetic oligonucleotide
gucaauguuuauuucacac

SEQ ID NO: 1726391 - RNA, 19 nt, Artificial Sequence
  Description of Artificial Sequence: Synthetic oligonucleotide
acggccuucaccaagacuc

SEQ ID NO: 1726392 - RNA, 19 nt, Artificial Sequence
  Description of Artificial Sequence: Synthetic oligonucleotide
uggagagugaacagggacc

SEQ ID NO: 1726393 - RNA, 19 nt, Artificial Sequence
  Description of Artificial Sequence: Synthetic oligonucleotide
acaccgcacauagagaucc

SEQ ID NO: 1726394 - RNA, 19 nt, Artificial Sequence
  Description of Artificial Sequence: Synthetic oligonucleotide
uuaucaaggcugaccagag

SEQ ID NO: 1726395 - RNA, 19 nt, Artificial Sequence
  Description of Artificial Sequence: Synthetic oligonucleotide
ucaccauacgugauaaaca

SEQ ID NO: 1726396 - RNA, 19 nt, Artificial Sequence
  Description of Artificial Sequence: Synthetic oligonucleotide
guaccuguucuucugagag

SEQ ID NO: 1726397 - RNA, 19 nt, Artificial Sequence
  Description of Artificial Sequence: Synthetic oligonucleotide
ugguagaaagccuaaggac

SEQ ID NO: 1726398 - RNA, 19 nt, Artificial Sequence
  Description of Artificial Sequence: Synthetic oligonucleotide
cauaaggaacuucagcaag

SEQ ID NO: 1726399 - RNA, 19 nt, Artificial Sequence
  Description of Artificial Sequence: Synthetic oligonucleotide
aacguugugggccuacugu

SEQ ID NO: 1726400 - RNA, 19 nt, Artificial Sequence
  Description of Artificial Sequence: Synthetic oligonucleotide
aaccaaauacaggaaguag

SEQ ID NO: 1726401 - RNA, 19 nt, Artificial Sequence
  Description of Artificial Sequence: Synthetic oligonucleotide
agcaaguuuaucaaggcug

SEQ ID NO: 1726402 - RNA, 19 nt, Artificial Sequence
  Description of Artificial Sequence: Synthetic oligonucleotide
caagggacgacaaggaaug

SEQ ID NO: 1726403 - RNA, 19 nt, Artificial Sequence
  Description of Artificial Sequence: Synthetic oligonucleotide
ucucauaggcauucuaugu

SEQ ID NO: 1726404 - RNA, 19 nt, Artificial Sequence
  Description of Artificial Sequence: Synthetic oligonucleotide
auacgugauaaacauauua

SEQ ID NO: 1726405 - RNA, 19 nt, Artificial Sequence
  Description of Artificial Sequence: Synthetic oligonucleotide
augagucaaagguuggaag

SEQ ID NO: 1726406 - RNA, 19 nt, Artificial Sequence
  Description of Artificial Sequence: Synthetic oligonucleotide
uucacacacucucuuaaga

SEQ ID NO: 1726407 - RNA, 19 nt, Artificial Sequence
  Description of Artificial Sequence: Synthetic oligonucleotide
ucagcaaguuuaucaaggc

SEQ ID NO: 1726408 - RNA, 19 nt, Artificial Sequence
  Description of Artificial Sequence: Synthetic oligonucleotide
auaguaaagcucaucguag

SEQ ID NO: 1726409 - RNA, 19 nt, Artificial Sequence
  Description of Artificial Sequence: Synthetic oligonucleotide
aaugcgugcgucaccuugc

SEQ ID NO: 1726410 - RNA, 19 nt, Artificial Sequence
  Description of Artificial Sequence: Synthetic oligonucleotide
auagagauccauagggaac

SEQ ID NO: 1726411 - RNA, 19 nt, Artificial Sequence
  Description of Artificial Sequence: Synthetic oligonucleotide
ugaacagggaccccuggug

SEQ ID NO: 1726412 - RNA, 19 nt, Artificial Sequence
  Description of Artificial Sequence: Synthetic oligonucleotide
acuaauggaucgaaccagc

SEQ ID NO: 1726413 - RNA, 19 nt, Artificial Sequence
  Description of Artificial Sequence: Synthetic oligonucleotide
auccauagggaacuccuuc

SEQ ID NO: 1726414 - RNA, 19 nt, Artificial Sequence
  Description of Artificial Sequence: Synthetic oligonucleotide
ucgaaaauucauguuguca

SEQ ID NO: 1726415 - RNA, 19 nt, Artificial Sequence
  Description of Artificial Sequence: Synthetic oligonucleotide
aagguuggaaggcaaugga

SEQ ID NO: 1726416 - RNA, 19 nt, Artificial Sequence
  Description of Artificial Sequence: Synthetic oligonucleotide
gaaagccuaaggaccaugg

SEQ ID NO: 1726417 - RNA, 19 nt, Artificial Sequence
  Description of Artificial Sequence: Synthetic oligonucleotide
uauguaaguuuacucgaaa

SEQ ID NO: 1726418 - RNA, 19 nt, Artificial Sequence
  Description of Artificial Sequence: Synthetic oligonucleotide
acaccaagggacgacaagg

SEQ ID NO: 1726419 - RNA, 19 nt, Artificial Sequence
  Description of Artificial Sequence: Synthetic oligonucleotide
ucacacacucucuuaagac

SEQ ID NO: 1726420 - RNA, 19 nt, Artificial Sequence
  Description of Artificial Sequence: Synthetic oligonucleotide
uggccaaaagcacaguuuc

SEQ ID NO: 1726421 - RNA, 19 nt, Artificial Sequence
  Description of Artificial Sequence: Synthetic oligonucleotide
gguagaaagccuaaggacc

SEQ ID NO: 1726422 - RNA, 19 nt, Artificial Sequence
  Description of Artificial Sequence: Synthetic oligonucleotide
uaguaaagcucaucguagc

SEQ ID NO: 1726423 - RNA, 19 nt, Artificial Sequence
  Description of Artificial Sequence: Synthetic oligonucleotide
aggaaugugucaccauacg

SEQ ID NO: 1726424 - RNA, 19 nt, Artificial Sequence
  Description of Artificial Sequence: Synthetic oligonucleotide
uuaaccaaugcgugcguca

SEQ ID NO: 1726425 - RNA, 19 nt, Artificial Sequence
  Description of Artificial Sequence: Synthetic oligonucleotide
ugucucauaggcauucuau

SEQ ID NO: 1726426 - RNA, 19 nt, Artificial Sequence
  Description of Artificial Sequence: Synthetic oligonucleotide
acaaccuggacacaccgca

SEQ ID NO: 1726427 - RNA, 19 nt, Artificial Sequence
  Description of Artificial Sequence: Synthetic oligonucleotide
ugauucacagcagcguagg

SEQ ID NO: 1726428 - RNA, 19 nt, Artificial Sequence
  Description of Artificial Sequence: Synthetic oligonucleotide
acucucuuaagacaguuua

SEQ ID NO: 1726429 - RNA, 19 nt, Artificial Sequence
  Description of Artificial Sequence: Synthetic oligonucleotide
aaugaaaggcuaacguugu

SEQ ID NO: 1726430 - RNA, 19 nt, Artificial Sequence
  Description of Artificial Sequence: Synthetic oligonucleotide
ucauaguaaagcucaucgu

SEQ ID NO: 1726431 - RNA, 19 nt, Artificial Sequence
  Description of Artificial Sequence: Synthetic oligonucleotide
aaauguuguguuuggccaa

SEQ ID NO: 1726432 - RNA, 19 nt, Artificial Sequence
  Description of Artificial Sequence: Synthetic oligonucleotide
uugagauaugugauucaca

SEQ ID NO: 1726433 - RNA, 19 nt, Artificial Sequence
  Description of Artificial Sequence: Synthetic oligonucleotide
aaggcaauggagagugaac

SEQ ID NO: 1726434 - RNA, 19 nt, Artificial Sequence
  Description of Artificial Sequence: Synthetic oligonucleotide
ugugauucacagcagcgua

SEQ ID NO: 1726435 - RNA, 19 nt, Artificial Sequence
  Description of Artificial Sequence: Synthetic oligonucleotide
aaguuuacucgaaaauuca

SEQ ID NO: 1726436 - RNA, 19 nt, Artificial Sequence
  Description of Artificial Sequence: Synthetic oligonucleotide
acaaucauaagggccaaug

SEQ ID NO: 1726437 - RNA, 19 nt, Artificial Sequence
  Description of Artificial Sequence: Synthetic oligonucleotide
aaccaaugcgugcgucacc

SEQ ID NO: 1726438 - RNA, 19 nt, Artificial Sequence
  Description of Artificial Sequence: Synthetic oligonucleotide
cauuucucccuauauaaga

SEQ ID NO: 1726439 - RNA, 19 nt, Artificial Sequence
  Description of Artificial Sequence: Synthetic oligonucleotide
ucucuuaagacaguuuaaa

SEQ ID NO: 1726440 - RNA, 19 nt, Artificial Sequence
  Description of Artificial Sequence: Synthetic oligonucleotide
gaacccuacacuucuucug

SEQ ID NO: 1726441 - RNA, 19 nt, Artificial Sequence
  Description of Artificial Sequence: Synthetic oligonucleotide
acgugauaaacauauuaaa

SEQ ID NO: 1726442 - RNA, 19 nt, Artificial Sequence
  Description of Artificial Sequence: Synthetic oligonucleotide
uguugcucggaguagcgcu

SEQ ID NO: 1726443 - RNA, 19 nt, Artificial Sequence
  Description of Artificial Sequence: Synthetic oligonucleotide
aucaaggcugaccagaguu

SEQ ID NO: 1726444 - RNA, 19 nt, Artificial Sequence
  Description of Artificial Sequence: Synthetic oligonucleotide
cugauauuaaccaaugcgu

SEQ ID NO: 1726445 - RNA, 19 nt, Artificial Sequence
  Description of Artificial Sequence: Synthetic oligonucleotide
ucugagaguugagauaugu

SEQ ID NO: 1726446 - RNA, 19 nt, Artificial Sequence
  Description of Artificial Sequence: Synthetic oligonucleotide
uccugugucucauaggcau

SEQ ID NO: 1726447 - RNA, 19 nt, Artificial Sequence
  Description of Artificial Sequence: Synthetic oligonucleotide
aaauagauucacaaucaua

SEQ ID NO: 1726448 - RNA, 19 nt, Artificial Sequence
  Description of Artificial Sequence: Synthetic oligonucleotide
uugggauuaaagugauuga

SEQ ID NO: 1726449 - RNA, 19 nt, Artificial Sequence
  Description of Artificial Sequence: Synthetic oligonucleotide
guaggacucaauuuuggga

SEQ ID NO: 1726450 - RNA, 19 nt, Artificial Sequence
  Description of Artificial Sequence: Synthetic oligonucleotide
aaagccuaaggaccaugga

SEQ ID NO: 1726451 - RNA, 19 nt, Artificial Sequence
  Description of Artificial Sequence: Synthetic oligonucleotide
ucauaagggccaaugcaaa

SEQ ID NO: 1726452 - RNA, 19 nt, Artificial Sequence
  Description of Artificial Sequence: Synthetic oligonucleotide
aaugugagugugucauagu

SEQ ID NO: 1726453 - RNA, 19 nt, Artificial Sequence
  Description of Artificial Sequence: Synthetic oligonucleotide
guacuaauggaucgaacca

SEQ ID NO: 1726454 - RNA, 19 nt, Artificial Sequence
  Description of Artificial Sequence: Synthetic oligonucleotide
auaggcauucuauguaagu

SEQ ID NO: 1726455 - RNA, 19 nt, Artificial Sequence
  Description of Artificial Sequence: Synthetic oligonucleotide
uguguguuacaaugaacuc

SEQ ID NO: 1726456 - RNA, 19 nt, Artificial Sequence
  Description of Artificial Sequence: Synthetic oligonucleotide
acacaccgcacauagagau

SEQ ID NO: 1726457 - RNA, 19 nt, Artificial Sequence
  Description of Artificial Sequence: Synthetic oligonucleotide
cauaguaaagcucaucgua

SEQ ID NO: 1726458 - RNA, 19 nt, Artificial Sequence
  Description of Artificial Sequence: Synthetic oligonucleotide
accaaauacaggaaguaga

SEQ ID NO: 1726459 - RNA, 19 nt, Artificial Sequence
  Description of Artificial Sequence: Synthetic oligonucleotide
auaguuggcucggaccacc

SEQ ID NO: 1726460 - RNA, 19 nt, Artificial Sequence
  Description of Artificial Sequence: Synthetic oligonucleotide
cuggugccaaaccaaauac

SEQ ID NO: 1726461 - RNA, 19 nt, Artificial Sequence
  Description of Artificial Sequence: Synthetic oligonucleotide
gucucauaggcauucuaug

SEQ ID NO: 1726462 - RNA, 19 nt, Artificial Sequence
  Description of Artificial Sequence: Synthetic oligonucleotide
uuuggccaaaagcacaguu

SEQ ID NO: 1726463 - RNA, 19 nt, Artificial Sequence
  Description of Artificial Sequence: Synthetic oligonucleotide
gucaccauacgugauaaac

SEQ ID NO: 1726464 - RNA, 19 nt, Artificial Sequence
  Description of Artificial Sequence: Synthetic oligonucleotide
agugauugaugauggcucu

SEQ ID NO: 1726465 - RNA, 19 nt, Artificial Sequence
  Description of Artificial Sequence: Synthetic oligonucleotide
ugucaauguuuauuucaca

SEQ ID NO: 1726466 - RNA, 19 nt, Artificial Sequence
  Description of Artificial Sequence: Synthetic oligonucleotide
gaguugagauaugugauuc

SEQ ID NO: 1726467 - RNA, 19 nt, Artificial Sequence
  Description of Artificial Sequence: Synthetic oligonucleotide
acauaaggaacuucagcaa

SEQ ID NO: 1726468 - RNA, 19 nt, Artificial Sequence
  Description of Artificial Sequence: Synthetic oligonucleotide
gaacagggaccccuggugc

SEQ ID NO: 1726469 - RNA, 19 nt, Artificial Sequence
  Description of Artificial Sequence: Synthetic oligonucleotide
aucuuguagcuucaaugug

SEQ ID NO: 1726470 - RNA, 19 nt, Artificial Sequence
  Description of Artificial Sequence: Synthetic oligonucleotide
acaguuucguuugacauaa

SEQ ID NO: 1726471 - RNA, 19 nt, Artificial Sequence
  Description of Artificial Sequence: Synthetic oligonucleotide
guggagaacuccuucagga

SEQ ID NO: 1726472 - RNA, 19 nt, Artificial Sequence
  Description of Artificial Sequence: Synthetic oligonucleotide
ugggauuaaagugauugau

SEQ ID NO: 1726473 - RNA, 19 nt, Artificial Sequence
  Description of Artificial Sequence: Synthetic oligonucleotide
caaauacaggaaguagagg

SEQ ID NO: 1726474 - RNA, 19 nt, Artificial Sequence
  Description of Artificial Sequence: Synthetic oligonucleotide
gaugauggcucugauauua

SEQ ID NO: 1726475 - RNA, 19 nt, Artificial Sequence
  Description of Artificial Sequence: Synthetic oligonucleotide
gauaugugauucacagcag

SEQ ID NO: 1726476 - RNA, 19 nt, Artificial Sequence
  Description of Artificial Sequence: Synthetic oligonucleotide
uuucuccggacguugguac

SEQ ID NO: 1726477 - RNA, 19 nt, Artificial Sequence
  Description of Artificial Sequence: Synthetic oligonucleotide
aauguuuauuucacacacu

SEQ ID NO: 1726478 - RNA, 19 nt, Artificial Sequence
  Description of Artificial Sequence: Synthetic oligonucleotide
cucugauauuaaccaaugc

SEQ ID NO: 1726479 - RNA, 19 nt, Artificial Sequence
  Description of Artificial Sequence: Synthetic oligonucleotide
guugagauaugugauucac

SEQ ID NO: 1726480 - RNA, 19 nt, Artificial Sequence
  Description of Artificial Sequence: Synthetic oligonucleotide
cauaggcauucuauguaag

SEQ ID NO: 1726481 - RNA, 19 nt, Artificial Sequence
  Description of Artificial Sequence: Synthetic oligonucleotide
guauagugcaggcgaaccc

SEQ ID NO: 1726482 - RNA, 19 nt, Artificial Sequence
  Description of Artificial Sequence: Synthetic oligonucleotide
aaccuggacacaccgcaca

SEQ ID NO: 1726483 - RNA, 19 nt, Artificial Sequence
  Description of Artificial Sequence: Synthetic oligonucleotide
ugcguugguagaaagccua

SEQ ID NO: 1726484 - RNA, 19 nt, Artificial Sequence
  Description of Artificial Sequence: Synthetic oligonucleotide
uuucucccuauauaagauc

SEQ ID NO: 1726485 - RNA, 19 nt, Artificial Sequence
  Description of Artificial Sequence: Synthetic oligonucleotide
uggugccaaaccaaauaca

SEQ ID NO: 1726486 - RNA, 19 nt, Artificial Sequence
  Description of Artificial Sequence: Synthetic oligonucleotide
gugucaacuuuaaauuuag

SEQ ID NO: 1726487 - RNA, 19 nt, Artificial Sequence
  Description of Artificial Sequence: Synthetic oligonucleotide
cugaugagucaaagguugg

SEQ ID NO: 1726488 - RNA, 19 nt, Artificial Sequence
  Description of Artificial Sequence: Synthetic oligonucleotide
ugauugaugauggcucuga

SEQ ID NO: 1726489 - RNA, 19 nt, Artificial Sequence
  Description of Artificial Sequence: Synthetic oligonucleotide
ugucaacuuuaaauuuaga

SEQ ID NO: 1726490 - RNA, 19 nt, Artificial Sequence
  Description of Artificial Sequence: Synthetic oligonucleotide
cauagagauccauagggaa

SEQ ID NO: 1726491 - RNA, 19 nt, Artificial Sequence
  Description of Artificial Sequence: Synthetic oligonucleotide
uuggccaaaagcacaguuu

SEQ ID NO: 1726492 - RNA, 19 nt, Artificial Sequence
  Description of Artificial Sequence: Synthetic oligonucleotide
agcacaguuucguuugaca

SEQ ID NO: 1726493 - RNA, 19 nt, Artificial Sequence
  Description of Artificial Sequence: Synthetic oligonucleotide
augcggauaauuucauagu

SEQ ID NO: 1726494 - RNA, 19 nt, Artificial Sequence
  Description of Artificial Sequence: Synthetic oligonucleotide
uucauguugucaucgugua

SEQ ID NO: 1726495 - RNA, 19 nt, Artificial Sequence
  Description of Artificial Sequence: Synthetic oligonucleotide
ccaucuuguagcuucaaug

SEQ ID NO: 1726496 - RNA, 19 nt, Artificial Sequence
  Description of Artificial Sequence: Synthetic oligonucleotide
uauuaaccaaugcgugcgu

SEQ ID NO: 1726497 - RNA, 19 nt, Artificial Sequence
  Description of Artificial Sequence: Synthetic oligonucleotide
auuaaccaaugcgugcguc

SEQ ID NO: 1726498 - RNA, 19 nt, Artificial Sequence
  Description of Artificial Sequence: Synthetic oligonucleotide
augcacaaccuggacacac

SEQ ID NO: 1726499 - RNA, 19 nt, Artificial Sequence
  Description of Artificial Sequence: Synthetic oligonucleotide
aguugagauaugugauuca

SEQ ID NO: 1726500 - RNA, 19 nt, Artificial Sequence
  Description of Artificial Sequence: Synthetic oligonucleotide
agaggucagacagcagagc

SEQ ID NO: 1726501 - RNA, 19 nt, Artificial Sequence
  Description of Artificial Sequence: Synthetic oligonucleotide
guuggcaggaaugugucac

SEQ ID NO: 1726502 - RNA, 19 nt, Artificial Sequence
  Description of Artificial Sequence: Synthetic oligonucleotide
ugcacaaccuggacacacc

SEQ ID NO: 1726503 - RNA, 19 nt, Artificial Sequence
  Description of Artificial Sequence: Synthetic oligonucleotide
cuacacuucuucugguaac

SEQ ID NO: 1726504 - RNA, 19 nt, Artificial Sequence
  Description of Artificial Sequence: Synthetic oligonucleotide
cugagaguugagauaugug

SEQ ID NO: 1726505 - RNA, 19 nt, Artificial Sequence
  Description of Artificial Sequence: Synthetic oligonucleotide
aguggcucucaggagguac

SEQ ID NO: 1726506 - RNA, 19 nt, Artificial Sequence
  Description of Artificial Sequence: Synthetic oligonucleotide
uccuucaucauguguguua

SEQ ID NO: 1726507 - RNA, 19 nt, Artificial Sequence
  Description of Artificial Sequence: Synthetic oligonucleotide
aggcauucuauguaaguuu

SEQ ID NO: 1726508 - RNA, 19 nt, Artificial Sequence
  Description of Artificial Sequence: Synthetic oligonucleotide
cuaaggaccauggaguaga

SEQ ID NO: 1726509 - RNA, 19 nt, Artificial Sequence
  Description of Artificial Sequence: Synthetic oligonucleotide
ggaguagagguugucaaag

SEQ ID NO: 1726510 - RNA, 19 nt, Artificial Sequence
  Description of Artificial Sequence: Synthetic oligonucleotide
ugaccagaguucccgccag

SEQ ID NO: 1726511 - RNA, 19 nt, Artificial Sequence
  Description of Artificial Sequence: Synthetic oligonucleotide
gcugaugagucaaagguug

SEQ ID NO: 1726512 - RNA, 19 nt, Artificial Sequence
  Description of Artificial Sequence: Synthetic oligonucleotide
acguugugggccuacugug

SEQ ID NO: 1726513 - RNA, 19 nt, Artificial Sequence
  Description of Artificial Sequence: Synthetic oligonucleotide
ugcgucucuccaaccuugg

SEQ ID NO: 1726514 - RNA, 19 nt, Artificial Sequence
  Description of Artificial Sequence: Synthetic oligonucleotide
ugaugagucaaagguugga

SEQ ID NO: 1726515 - RNA, 19 nt, Artificial Sequence
  Description of Artificial Sequence: Synthetic oligonucleotide
guuuaugcacaaccuggac

SEQ ID NO: 1726516 - RNA, 19 nt, Artificial Sequence
  Description of Artificial Sequence: Synthetic oligonucleotide
uggugcaugcggauaauuu

SEQ ID NO: 1726517 - RNA, 19 nt, Artificial Sequence
  Description of Artificial Sequence: Synthetic oligonucleotide
ugauggcucugauauuaac

SEQ ID NO: 1726518 - RNA, 19 nt, Artificial Sequence
  Description of Artificial Sequence: Synthetic oligonucleotide
ccuacugugcugaugaguc

SEQ ID NO: 1726519 - RNA, 19 nt, Artificial Sequence
  Description of Artificial Sequence: Synthetic oligonucleotide
ugguacuaauggaucgaac

SEQ ID NO: 1726520 - RNA, 19 nt, Artificial Sequence
  Description of Artificial Sequence: Synthetic oligonucleotide
agccuaaggaccauggagu

SEQ ID NO: 1726521 - RNA, 19 nt, Artificial Sequence
  Description of Artificial Sequence: Synthetic oligonucleotide
guagaaagccuaaggacca

SEQ ID NO: 1726522 - RNA, 19 nt, Artificial Sequence
  Description of Artificial Sequence: Synthetic oligonucleotide
gaaguagaggucagacagc

SEQ ID NO: 1726523 - RNA, 19 nt, Artificial Sequence
  Description of Artificial Sequence: Synthetic oligonucleotide
cacacacucucuuaagaca

SEQ ID NO: 1726524 - RNA, 19 nt, Artificial Sequence
  Description of Artificial Sequence: Synthetic oligonucleotide
agauccauagggaacuccu

SEQ ID NO: 1726525 - RNA, 19 nt, Artificial Sequence
  Description of Artificial Sequence: Synthetic oligonucleotide
caaggcugaccagaguucc

SEQ ID NO: 1726526 - RNA, 19 nt, Artificial Sequence
  Description of Artificial Sequence: Synthetic oligonucleotide
caaugcgugcgucaccuug

SEQ ID NO: 1726527 - RNA, 19 nt, Artificial Sequence
  Description of Artificial Sequence: Synthetic oligonucleotide
ucaucauguguguuacaau

SEQ ID NO: 1726528 - RNA, 19 nt, Artificial Sequence
  Description of Artificial Sequence: Synthetic oligonucleotide
agagugaacagggaccccu

SEQ ID NO: 1726529 - RNA, 19 nt, Artificial Sequence
  Description of Artificial Sequence: Synthetic oligonucleotide
gguaacacagcaguuuaug

SEQ ID NO: 1726530 - RNA, 19 nt, Artificial Sequence
  Description of Artificial Sequence: Synthetic oligonucleotide
cucaucguagcugcugggg

SEQ ID NO: 1726531 - RNA, 19 nt, Artificial Sequence
  Description of Artificial Sequence: Synthetic oligonucleotide
gaugagucaaagguuggaa

SEQ ID NO: 1726532 - RNA, 19 nt, Artificial Sequence
  Description of Artificial Sequence: Synthetic oligonucleotide
agcagcguaggacucaauu

SEQ ID NO: 1726533 - RNA, 19 nt, Artificial Sequence
  Description of Artificial Sequence: Synthetic oligonucleotide
cugggcuugcccuagcguc

SEQ ID NO: 1726534 - RNA, 19 nt, Artificial Sequence
  Description of Artificial Sequence: Synthetic oligonucleotide
acguugguacuaauggauc

SEQ ID NO: 1726535 - RNA, 19 nt, Artificial Sequence
  Description of Artificial Sequence: Synthetic oligonucleotide
gcaguuuaugcacaaccug

SEQ ID NO: 1726536 - RNA, 19 nt, Artificial Sequence
  Description of Artificial Sequence: Synthetic oligonucleotide
agcaguuuaugcacaaccu

SEQ ID NO: 1726537 - RNA, 19 nt, Artificial Sequence
  Description of Artificial Sequence: Synthetic oligonucleotide
acauagagauccauaggga

SEQ ID NO: 1726538 - RNA, 19 nt, Artificial Sequence
  Description of Artificial Sequence: Synthetic oligonucleotide
gaucauccugggcuugccc

SEQ ID NO: 1726539 - RNA, 19 nt, Artificial Sequence
  Description of Artificial Sequence: Synthetic oligonucleotide
gggauuaaagugauugaug

SEQ ID NO: 1726540 - RNA, 19 nt, Artificial Sequence
  Description of Artificial Sequence: Synthetic oligonucleotide
ggugcaugcggauaauuuc

SEQ ID NO: 1726541 - RNA, 19 nt, Artificial Sequence
  Description of Artificial Sequence: Synthetic oligonucleotide
augcgugcgucaccuugcc

SEQ ID NO: 1726542 - RNA, 19 nt, Artificial Sequence
  Description of Artificial Sequence: Synthetic oligonucleotide
uacugugcugaugagucaa

SEQ ID NO: 1726543 - RNA, 19 nt, Artificial Sequence
  Description of Artificial Sequence: Synthetic oligonucleotide
uucccgccagguauagugc

SEQ ID NO: 1726544 - RNA, 19 nt, Artificial Sequence
  Description of Artificial Sequence: Synthetic oligonucleotide
acaguuuaaaacagacuaa

SEQ ID NO: 1726545 - RNA, 19 nt, Artificial Sequence
  Description of Artificial Sequence: Synthetic oligonucleotide
caaugaacuccaccaucag

SEQ ID NO: 1726546 - RNA, 19 nt, Artificial Sequence
  Description of Artificial Sequence: Synthetic oligonucleotide
aauggagagugaacaggga

SEQ ID NO: 1726547 - RNA, 19 nt, Artificial Sequence
  Description of Artificial Sequence: Synthetic oligonucleotide
auuccaaucuccaguuucu

SEQ ID NO: 1726548 - RNA, 19 nt, Artificial Sequence
  Description of Artificial Sequence: Synthetic oligonucleotide
aggcgaacccuacacuucu

SEQ ID NO: 1726549 - RNA, 19 nt, Artificial Sequence
  Description of Artificial Sequence: Synthetic oligonucleotide
agguauagugcaggcgaac

SEQ ID NO: 1726550 - RNA, 19 nt, Artificial Sequence
  Description of Artificial Sequence: Synthetic oligonucleotide
uaucaaggcugaccagagu

SEQ ID NO: 1726551 - RNA, 19 nt, Artificial Sequence
  Description of Artificial Sequence: Synthetic oligonucleotide
agaucauccugggcuugcc

SEQ ID NO: 1726552 - RNA, 19 nt, Artificial Sequence
  Description of Artificial Sequence: Synthetic oligonucleotide
cucgaaaauucauguuguc

SEQ ID NO: 1726553 - RNA, 19 nt, Artificial Sequence
  Description of Artificial Sequence: Synthetic oligonucleotide
ccugcguugguagaaagcc

SEQ ID NO: 1726554 - RNA, 19 nt, Artificial Sequence
  Description of Artificial Sequence: Synthetic oligonucleotide
gguauagugcaggcgaacc

SEQ ID NO: 1726555 - RNA, 19 nt, Artificial Sequence
  Description of Artificial Sequence: Synthetic oligonucleotide
gugauucacagcagcguag

SEQ ID NO: 1726556 - RNA, 19 nt, Artificial Sequence
  Description of Artificial Sequence: Synthetic oligonucleotide
augugauucacagcagcgu

SEQ ID NO: 1726557 - RNA, 19 nt, Artificial Sequence
  Description of Artificial Sequence: Synthetic oligonucleotide
augaaaggcuaacguugug

SEQ ID NO: 1726558 - RNA, 19 nt, Artificial Sequence
  Description of Artificial Sequence: Synthetic oligonucleotide
cuauguaaguuuacucgaa

SEQ ID NO: 1726559 - RNA, 19 nt, Artificial Sequence
  Description of Artificial Sequence: Synthetic oligonucleotide
cggacguugguacuaaugg

SEQ ID NO: 1726560 - RNA, 19 nt, Artificial Sequence
  Description of Artificial Sequence: Synthetic oligonucleotide
ugcaugcggauaauuucau

SEQ ID NO: 1726561 - RNA, 19 nt, Artificial Sequence
  Description of Artificial Sequence: Synthetic oligonucleotide
ggagagugaacagggaccc

SEQ ID NO: 1726562 - RNA, 19 nt, Artificial Sequence
  Description of Artificial Sequence: Synthetic oligonucleotide
aguuuacucgaaaauucau

SEQ ID NO: 1726563 - RNA, 19 nt, Artificial Sequence
  Description of Artificial Sequence: Synthetic oligonucleotide
gcgugcgucaccuugccag

SEQ ID NO: 1726564 - RNA, 19 nt, Artificial Sequence
  Description of Artificial Sequence: Synthetic oligonucleotide
gagauccauagggaacucc

SEQ ID NO: 1726565 - RNA, 19 nt, Artificial Sequence
  Description of Artificial Sequence: Synthetic oligonucleotide
cucccuauauaagaucauc

SEQ ID NO: 1726566 - RNA, 19 nt, Artificial Sequence
  Description of Artificial Sequence: Synthetic oligonucleotide
ucucccuauauaagaucau

SEQ ID NO: 1726567 - RNA, 19 nt, Artificial Sequence
  Description of Artificial Sequence: Synthetic oligonucleotide
guaaguuuacucgaaaauu

SEQ ID NO: 1726568 - RNA, 19 nt, Artificial Sequence
  Description of Artificial Sequence: Synthetic oligonucleotide
agucaaagguuggaaggca

SEQ ID NO: 1726569 - RNA, 19 nt, Artificial Sequence
  Description of Artificial Sequence: Synthetic oligonucleotide
gcacaaccuggacacaccg

SEQ ID NO: 1726570 - RNA, 19 nt, Artificial Sequence
  Description of Artificial Sequence: Synthetic oligonucleotide
aucgaaccagcucuuugaa

SEQ ID NO: 1726571 - RNA, 19 nt, Artificial Sequence
  Description of Artificial Sequence: Synthetic oligonucleotide
ugugcgucucuccaaccuu

SEQ ID NO: 1726572 - RNA, 19 nt, Artificial Sequence
  Description of Artificial Sequence: Synthetic oligonucleotide
ugguaacacagcaguuuau

SEQ ID NO: 1726573 - RNA, 19 nt, Artificial Sequence
  Description of Artificial Sequence: Synthetic oligonucleotide
gguugucaaagcucuggug

SEQ ID NO: 1726574 - RNA, 19 nt, Artificial Sequence
  Description of Artificial Sequence: Synthetic oligonucleotide
agaaagccuaaggaccaug

SEQ ID NO: 1726575 - RNA, 19 nt, Artificial Sequence
  Description of Artificial Sequence: Synthetic oligonucleotide
cacaccaagggacgacaag

SEQ ID NO: 1726576 - RNA, 19 nt, Artificial Sequence
  Description of Artificial Sequence: Synthetic oligonucleotide
uucugagaguugagauaug

SEQ ID NO: 1726577 - RNA, 19 nt, Artificial Sequence
  Description of Artificial Sequence: Synthetic oligonucleotide
uaccuguucuucugagagu

SEQ ID NO: 1726578 - RNA, 19 nt, Artificial Sequence
  Description of Artificial Sequence: Synthetic oligonucleotide
uagcuucaaugugagugug

SEQ ID NO: 1726579 - RNA, 19 nt, Artificial Sequence
  Description of Artificial Sequence: Synthetic oligonucleotide
gugcaugcggauaauuuca

SEQ ID NO: 1726580 - RNA, 19 nt, Artificial Sequence
  Description of Artificial Sequence: Synthetic oligonucleotide
aggcgauuccaaucuccag

SEQ ID NO: 1726581 - RNA, 19 nt, Artificial Sequence
  Description of Artificial Sequence: Synthetic oligonucleotide
uugcccuagcgucccagcu

SEQ ID NO: 1726582 - RNA, 19 nt, Artificial Sequence
  Description of Artificial Sequence: Synthetic oligonucleotide
gguuggaaggcaauggaga

SEQ ID NO: 1726583 - RNA, 19 nt, Artificial Sequence
  Description of Artificial Sequence: Synthetic oligonucleotide
guugguacuaauggaucga

SEQ ID NO: 1726584 - RNA, 19 nt, Artificial Sequence
  Description of Artificial Sequence: Synthetic oligonucleotide
augggaagggcagccagug

SEQ ID NO: 1726585 - RNA, 19 nt, Artificial Sequence
  Description of Artificial Sequence: Synthetic oligonucleotide
caguacggccuucaccaag

SEQ ID NO: 1726586 - RNA, 19 nt, Artificial Sequence
  Description of Artificial Sequence: Synthetic oligonucleotide
aguacggccuucaccaaga

SEQ ID NO: 1726587 - RNA, 19 nt, Artificial Sequence
  Description of Artificial Sequence: Synthetic oligonucleotide
ucccgccagguauagugca

SEQ ID NO: 1726588 - RNA, 19 nt, Artificial Sequence
  Description of Artificial Sequence: Synthetic oligonucleotide
ggaucgaaccagcucuuug

SEQ ID NO: 1726589 - RNA, 19 nt, Artificial Sequence
  Description of Artificial Sequence: Synthetic oligonucleotide
accaggcgauuccaaucuc

SEQ ID NO: 1726590 - RNA, 19 nt, Artificial Sequence
  Description of Artificial Sequence: Synthetic oligonucleotide
agcguaggacucaauuuug

SEQ ID NO: 1726591 - RNA, 19 nt, Artificial Sequence
  Description of Artificial Sequence: Synthetic oligonucleotide
cggaguagcgcucauacug

SEQ ID NO: 1726592 - RNA, 19 nt, Artificial Sequence
  Description of Artificial Sequence: Synthetic oligonucleotide
cuugcccuagcgucccagc

SEQ ID NO: 1726593 - RNA, 19 nt, Artificial Sequence
  Description of Artificial Sequence: Synthetic oligonucleotide
agcaccaggcgauuccaau

SEQ ID NO: 1726594 - RNA, 19 nt, Artificial Sequence
  Description of Artificial Sequence: Synthetic oligonucleotide
gacguugguacuaauggau

SEQ ID NO: 1726595 - RNA, 19 nt, Artificial Sequence
  Description of Artificial Sequence: Synthetic oligonucleotide
accaagggacgacaaggaa

SEQ ID NO: 1726596 - RNA, 19 nt, Artificial Sequence
  Description of Artificial Sequence: Synthetic oligonucleotide
gggccuacugugcugauga

SEQ ID NO: 1726597 - RNA, 19 nt, Artificial Sequence
  Description of Artificial Sequence: Synthetic oligonucleotide
ugcccuagcgucccagcuc

SEQ ID NO: 1726598 - RNA, 19 nt, Artificial Sequence
  Description of Artificial Sequence: Synthetic oligonucleotide
cucucuuaagacaguuuaa

SEQ ID NO: 1726599 - RNA, 19 nt, Artificial Sequence
  Description of Artificial Sequence: Synthetic oligonucleotide
uccuuguguugcucggagu

SEQ ID NO: 1726600 - RNA, 19 nt, Artificial Sequence
  Description of Artificial Sequence: Synthetic oligonucleotide
gggacgacaaggaauguuc

SEQ ID NO: 1726601 - RNA, 19 nt, Artificial Sequence
  Description of Artificial Sequence: Synthetic oligonucleotide
ccagguauagugcaggcga

SEQ ID NO: 1726602 - RNA, 19 nt, Artificial Sequence
  Description of Artificial Sequence: Synthetic oligonucleotide
gauucacagcagcguagga

SEQ ID NO: 1726603 - RNA, 19 nt, Artificial Sequence
  Description of Artificial Sequence: Synthetic oligonucleotide
ggagaugguggagaacucc

SEQ ID NO: 1726604 - RNA, 19 nt, Artificial Sequence
  Description of Artificial Sequence: Synthetic oligonucleotide
cugugucucauaggcauuc

SEQ ID NO: 1726605 - RNA, 19 nt, Artificial Sequence
  Description of Artificial Sequence: Synthetic oligonucleotide
guuugacauaaggaacuuc

SEQ ID NO: 1726606 - RNA, 19 nt, Artificial Sequence
  Description of Artificial Sequence: Synthetic oligonucleotide
caccauacgugauaaacau

SEQ ID NO: 1726607 - RNA, 19 nt, Artificial Sequence
  Description of Artificial Sequence: Synthetic oligonucleotide
cauucuauguaaguuuacu

SEQ ID NO: 1726608 - RNA, 19 nt, Artificial Sequence
  Description of Artificial Sequence: Synthetic oligonucleotide
cuucaaugugaguguguca

SEQ ID NO: 1726609 - RNA, 19 nt, Artificial Sequence
  Description of Artificial Sequence: Synthetic oligonucleotide
caggcgaacccuacacuuc

SEQ ID NO: 1726610 - RNA, 19 nt, Artificial Sequence
  Description of Artificial Sequence: Synthetic oligonucleotide
uucuccggacguugguacu

SEQ ID NO: 1726611 - RNA, 19 nt, Artificial Sequence
  Description of Artificial Sequence: Synthetic oligonucleotide
aggcuaacguugugggccu

SEQ ID NO: 1726612 - RNA, 19 nt, Artificial Sequence
  Description of Artificial Sequence: Synthetic oligonucleotide
aagcucuggugcaugcgga

SEQ ID NO: 1726613 - RNA, 19 nt, Artificial Sequence
  Description of Artificial Sequence: Synthetic oligonucleotide
cacaguuucguuugacaua

SEQ ID NO: 1726614 - RNA, 19 nt, Artificial Sequence
  Description of Artificial Sequence: Synthetic oligonucleotide
gcucugauauuaaccaaug

SEQ ID NO: 1726615 - RNA, 19 nt, Artificial Sequence
  Description of Artificial Sequence: Synthetic oligonucleotide
aguuucucugaggugucaa

SEQ ID NO: 1726616 - RNA, 19 nt, Artificial Sequence
  Description of Artificial Sequence: Synthetic oligonucleotide
caaccuggacacaccgcac

SEQ ID NO: 1726617 - RNA, 19 nt, Artificial Sequence
  Description of Artificial Sequence: Synthetic oligonucleotide
caccaagggacgacaagga

SEQ ID NO: 1726618 - RNA, 19 nt, Artificial Sequence
  Description of Artificial Sequence: Synthetic oligonucleotide
ggugucaacuuuaaauuua

SEQ ID NO: 1726619 - RNA, 19 nt, Artificial Sequence
  Description of Artificial Sequence: Synthetic oligonucleotide
ugaugauggcucugauauu

SEQ ID NO: 1726620 - RNA, 19 nt, Artificial Sequence
  Description of Artificial Sequence: Synthetic oligonucleotide
agagcaccaggcgauucca

SEQ ID NO: 1726621 - RNA, 19 nt, Artificial Sequence
  Description of Artificial Sequence: Synthetic oligonucleotide
cugaccagaguucccgcca

SEQ ID NO: 1726622 - RNA, 19 nt, Artificial Sequence
  Description of Artificial Sequence: Synthetic oligonucleotide
gcaaguuuaucaaggcuga

SEQ ID NO: 1726623 - RNA, 19 nt, Artificial Sequence
  Description of Artificial Sequence: Synthetic oligonucleotide
ggaaugugucaccauacgu

SEQ ID NO: 1726624 - RNA, 19 nt, Artificial Sequence
  Description of Artificial Sequence: Synthetic oligonucleotide
cucucggugucugugcguc

SEQ ID NO: 1726625 - RNA, 19 nt, Artificial Sequence
  Description of Artificial Sequence: Synthetic oligonucleotide
ggccagguuucuccggacg

SEQ ID NO: 1726626 - RNA, 19 nt, Artificial Sequence
  Description of Artificial Sequence: Synthetic oligonucleotide
uuggcucggaccaccucua

SEQ ID NO: 1726627 - RNA, 19 nt, Artificial Sequence
  Description of Artificial Sequence: Synthetic oligonucleotide
caaguuuaucaaggcugac

SEQ ID NO: 1726628 - RNA, 19 nt, Artificial Sequence
  Description of Artificial Sequence: Synthetic oligonucleotide
cacaccgcacauagagauc

SEQ ID NO: 1726629 - RNA, 19 nt, Artificial Sequence
  Description of Artificial Sequence: Synthetic oligonucleotide
gcguaggacucaauuuugg

SEQ ID NO: 1726630 - RNA, 19 nt, Artificial Sequence
  Description of Artificial Sequence: Synthetic oligonucleotide
uaugcacaaccuggacaca

SEQ ID NO: 1726631 - RNA, 19 nt, Artificial Sequence
  Description of Artificial Sequence: Synthetic oligonucleotide
ggcgauuccaaucuccagu

SEQ ID NO: 1726632 - RNA, 19 nt, Artificial Sequence
  Description of Artificial Sequence: Synthetic oligonucleotide
ggccaaaagcacaguuucg

SEQ ID NO: 1726633 - RNA, 19 nt, Artificial Sequence
  Description of Artificial Sequence: Synthetic oligonucleotide
gguccaggacugcacacac

SEQ ID NO: 1726634 - RNA, 19 nt, Artificial Sequence
  Description of Artificial Sequence: Synthetic oligonucleotide
acccuacacuucuucuggu

SEQ ID NO: 1726635 - RNA, 19 nt, Artificial Sequence
  Description of Artificial Sequence: Synthetic oligonucleotide
uggcucggaccaccucuag

SEQ ID NO: 1726636 - RNA, 19 nt, Artificial Sequence
  Description of Artificial Sequence: Synthetic oligonucleotide
ugucaccauacgugauaaa

SEQ ID NO: 1726637 - RNA, 19 nt, Artificial Sequence
  Description of Artificial Sequence: Synthetic oligonucleotide
gugcgucucuccaaccuug

SEQ ID NO: 1726638 - RNA, 19 nt, Artificial Sequence
  Description of Artificial Sequence: Synthetic oligonucleotide
aagggacgacaaggaaugu

SEQ ID NO: 1726639 - RNA, 19 nt, Artificial Sequence
  Description of Artificial Sequence: Synthetic oligonucleotide
gcugaccagaguucccgcc

SEQ ID NO: 1726640 - RNA, 19 nt, Artificial Sequence
  Description of Artificial Sequence: Synthetic oligonucleotide
agcucuggugcaugcggau

SEQ ID NO: 1726641 - RNA, 19 nt, Artificial Sequence
  Description of Artificial Sequence: Synthetic oligonucleotide
caccaagacucucgguguc

SEQ ID NO: 1726642 - RNA, 19 nt, Artificial Sequence
  Description of Artificial Sequence: Synthetic oligonucleotide
gcaggaaugugucaccaua

SEQ ID NO: 1726643 - RNA, 19 nt, Artificial Sequence
  Description of Artificial Sequence: Synthetic oligonucleotide
ugcgugcgucaccuugcca

SEQ ID NO: 1726644 - RNA, 19 nt, Artificial Sequence
  Description of Artificial Sequence: Synthetic oligonucleotide
guugugggccuacugugcu

SEQ ID NO: 1726645 - RNA, 19 nt, Artificial Sequence
  Description of Artificial Sequence: Synthetic oligonucleotide
ugggccuacugugcugaug

SEQ ID NO: 1726646 - RNA, 19 nt, Artificial Sequence
  Description of Artificial Sequence: Synthetic oligonucleotide
ucuccggacguugguacua

SEQ ID NO: 1726647 - RNA, 19 nt, Artificial Sequence
  Description of Artificial Sequence: Synthetic oligonucleotide
gccagguauagugcaggcg

SEQ ID NO: 1726648 - RNA, 19 nt, Artificial Sequence
  Description of Artificial Sequence: Synthetic oligonucleotide
ugguccaggccaucuugua

SEQ ID NO: 1726649 - RNA, 19 nt, Artificial Sequence
  Description of Artificial Sequence: Synthetic oligonucleotide
guguugcucggaguagcgc

SEQ ID NO: 1726650 - RNA, 19 nt, Artificial Sequence
  Description of Artificial Sequence: Synthetic oligonucleotide
agggacgacaaggaauguu

SEQ ID NO: 1726651 - RNA, 19 nt, Artificial Sequence
  Description of Artificial Sequence: Synthetic oligonucleotide
gagccucaugggaagggca

SEQ ID NO: 1726652 - RNA, 19 nt, Artificial Sequence
  Description of Artificial Sequence: Synthetic oligonucleotide
ggcauucuauguaaguuua

SEQ ID NO: 1726653 - RNA, 19 nt, Artificial Sequence
  Description of Artificial Sequence: Synthetic oligonucleotide
cgugauaaacauauuaaau

SEQ ID NO: 1726654 - RNA, 19 nt, Artificial Sequence
  Description of Artificial Sequence: Synthetic oligonucleotide
gcaccaggcgauuccaauc

SEQ ID NO: 1726655 - RNA, 19 nt, Artificial Sequence
  Description of Artificial Sequence: Synthetic oligonucleotide
caggagccucaugggaagg

SEQ ID NO: 1726656 - RNA, 19 nt, Artificial Sequence
  Description of Artificial Sequence: Synthetic oligonucleotide
ccggacguugguacuaaug

SEQ ID NO: 1726657 - RNA, 19 nt, Artificial Sequence
  Description of Artificial Sequence: Synthetic oligonucleotide
guugcucggaguagcgcuc

SEQ ID NO: 1726658 - RNA, 19 nt, Artificial Sequence
  Description of Artificial Sequence: Synthetic oligonucleotide
ucucggugucugugcgucu

SEQ ID NO: 1726659 - RNA, 19 nt, Artificial Sequence
  Description of Artificial Sequence: Synthetic oligonucleotide
gacgacaaggaauguucuu

SEQ ID NO: 1726660 - RNA, 19 nt, Artificial Sequence
  Description of Artificial Sequence: Synthetic oligonucleotide
caccaggcgauuccaaucu

SEQ ID NO: 1726661 - RNA, 19 nt, Artificial Sequence
  Description of Artificial Sequence: Synthetic oligonucleotide
gcggauaauuucauaguaa

SEQ ID NO: 1726662 - RNA, 19 nt, Artificial Sequence
  Description of Artificial Sequence: Synthetic oligonucleotide
gaguagcgcucauacuggu

SEQ ID NO: 1726663 - RNA, 19 nt, Artificial Sequence
  Description of Artificial Sequence: Synthetic oligonucleotide
cagguauagugcaggcgaa

SEQ ID NO: 1726664 - RNA, 19 nt, Artificial Sequence
  Description of Artificial Sequence: Synthetic oligonucleotide
cccuauauaagaucauccu

SEQ ID NO: 1726665 - RNA, 19 nt, Artificial Sequence
  Description of Artificial Sequence: Synthetic oligonucleotide
caguuucguuugacauaag

SEQ ID NO: 1726666 - RNA, 19 nt, Artificial Sequence
  Description of Artificial Sequence: Synthetic oligonucleotide
ucuggugcaugcggauaau

SEQ ID NO: 1726667 - RNA, 19 nt, Artificial Sequence
  Description of Artificial Sequence: Synthetic oligonucleotide
ggccugcguugguagaaag

SEQ ID NO: 1726668 - RNA, 19 nt, Artificial Sequence
  Description of Artificial Sequence: Synthetic oligonucleotide
gugaacagggaccccuggu

SEQ ID NO: 1726669 - RNA, 19 nt, Artificial Sequence
  Description of Artificial Sequence: Synthetic oligonucleotide
augauggcucugauauuaa

SEQ ID NO: 1726670 - RNA, 19 nt, Artificial Sequence
  Description of Artificial Sequence: Synthetic oligonucleotide
accauacgugauaaacaua

SEQ ID NO: 1726671 - RNA, 19 nt, Artificial Sequence
  Description of Artificial Sequence: Synthetic oligonucleotide
guacggccuucaccaagac

SEQ ID NO: 1726672 - RNA, 19 nt, Artificial Sequence
  Description of Artificial Sequence: Synthetic oligonucleotide
ggaccccuggugccaaacc

SEQ ID NO: 1726673 - RNA, 19 nt, Artificial Sequence
  Description of Artificial Sequence: Synthetic oligonucleotide
gcgaacccuacacuucuuc

SEQ ID NO: 1726674 - RNA, 19 nt, Artificial Sequence
  Description of Artificial Sequence: Synthetic oligonucleotide
ccuaaggaccauggaguag

SEQ ID NO: 1726675 - RNA, 19 nt, Artificial Sequence
  Description of Artificial Sequence: Synthetic oligonucleotide
gcccuagcgucccagcuca

SEQ ID NO: 1726676 - RNA, 19 nt, Artificial Sequence
  Description of Artificial Sequence: Synthetic oligonucleotide
caccucuaguaccuguucu

SEQ ID NO: 1726677 - RNA, 19 nt, Artificial Sequence
  Description of Artificial Sequence: Synthetic oligonucleotide
gcauucuauguaaguuuac

SEQ ID NO: 1726678 - RNA, 19 nt, Artificial Sequence
  Description of Artificial Sequence: Synthetic oligonucleotide
gcgucaccuugccagcugc

SEQ ID NO: 1726679 - RNA, 19 nt, Artificial Sequence
  Description of Artificial Sequence: Synthetic oligonucleotide
ccucaugggaagggcagcc

SEQ ID NO: 1726680 - RNA, 19 nt, Artificial Sequence
  Description of Artificial Sequence: Synthetic oligonucleotide
ggcugaccagaguucccgc

SEQ ID NO: 1726681 - RNA, 19 nt, Artificial Sequence
  Description of Artificial Sequence: Synthetic oligonucleotide
agaguucccgccagguaua

SEQ ID NO: 1726682 - RNA, 19 nt, Artificial Sequence
  Description of Artificial Sequence: Synthetic oligonucleotide
auagugcaggcgaacccua

SEQ ID NO: 1726683 - RNA, 19 nt, Artificial Sequence
  Description of Artificial Sequence: Synthetic oligonucleotide
uggccugcguugguagaaa

SEQ ID NO: 1726684 - RNA, 19 nt, Artificial Sequence
  Description of Artificial Sequence: Synthetic oligonucleotide
cugugcgucucuccaaccu

SEQ ID NO: 1726685 - RNA, 19 nt, Artificial Sequence
  Description of Artificial Sequence: Synthetic oligonucleotide
ggguuggcaggaauguguc

SEQ ID NO: 1726686 - RNA, 19 nt, Artificial Sequence
  Description of Artificial Sequence: Synthetic oligonucleotide
uccggacguugguacuaau

SEQ ID NO: 1726687 - RNA, 19 nt, Artificial Sequence
  Description of Artificial Sequence: Synthetic oligonucleotide
caugggaagggcagccagu

SEQ ID NO: 1726688 - RNA, 19 nt, Artificial Sequence
  Description of Artificial Sequence: Synthetic oligonucleotide
gccugcguugguagaaagc

SEQ ID NO: 1726689 - RNA, 19 nt, Artificial Sequence
  Description of Artificial Sequence: Synthetic oligonucleotide
acacaccaagggacgacaa

SEQ ID NO: 1726690 - RNA, 19 nt, Artificial Sequence
  Description of Artificial Sequence: Synthetic oligonucleotide
acugugcugaugagucaaa

SEQ ID NO: 1726691 - RNA, 19 nt, Artificial Sequence
  Description of Artificial Sequence: Synthetic oligonucleotide
ccaagggacgacaaggaau

SEQ ID NO: 1726692 - RNA, 19 nt, Artificial Sequence
  Description of Artificial Sequence: Synthetic oligonucleotide
cugcguugguagaaagccu

SEQ ID NO: 1726693 - RNA, 19 nt, Artificial Sequence
  Description of Artificial Sequence: Synthetic oligonucleotide
gccuaaggaccauggagua

SEQ ID NO: 1726694 - RNA, 19 nt, Artificial Sequence
  Description of Artificial Sequence: Synthetic oligonucleotide
auguuguguuuggccaaaa

SEQ ID NO: 1726695 - RNA, 19 nt, Artificial Sequence
  Description of Artificial Sequence: Synthetic oligonucleotide
ccgccagguauagugcagg

SEQ ID NO: 1726696 - RNA, 19 nt, Artificial Sequence
  Description of Artificial Sequence: Synthetic oligonucleotide
cauacgugauaaacauauu

SEQ ID NO: 1726697 - RNA, 19 nt, Artificial Sequence
  Description of Artificial Sequence: Synthetic oligonucleotide
ggccuacugugcugaugag

SEQ ID NO: 1726698 - RNA, 19 nt, Artificial Sequence
  Description of Artificial Sequence: Synthetic oligonucleotide
ccaccucuaguaccuguuc

SEQ ID NO: 1726699 - RNA, 19 nt, Artificial Sequence
  Description of Artificial Sequence: Synthetic oligonucleotide
gcaggcgaacccuacacuu

SEQ ID NO: 1726700 - RNA, 19 nt, Artificial Sequence
  Description of Artificial Sequence: Synthetic oligonucleotide
gcuaacguugugggccuac

SEQ ID NO: 1726701 - RNA, 19 nt, Artificial Sequence
  Description of Artificial Sequence: Synthetic oligonucleotide
cguugguagaaagccuaag

SEQ ID NO: 1726702 - RNA, 19 nt, Artificial Sequence
  Description of Artificial Sequence: Synthetic oligonucleotide
aguucccgccagguauagu

SEQ ID NO: 1726703 - RNA, 19 nt, Artificial Sequence
  Description of Artificial Sequence: Synthetic oligonucleotide
cacucucuuaagacaguuu

SEQ ID NO: 1726704 - RNA, 19 nt, Artificial Sequence
  Description of Artificial Sequence: Synthetic oligonucleotide
gcaugcggauaauuucaua

SEQ ID NO: 1726705 - RNA, 19 nt, Artificial Sequence
  Description of Artificial Sequence: Synthetic oligonucleotide
cugcccauuucucccuaua

SEQ ID NO: 1726706 - RNA, 19 nt, Artificial Sequence
  Description of Artificial Sequence: Synthetic oligonucleotide
caccgcacauagagaucca

SEQ ID NO: 1726707 - RNA, 19 nt, Artificial Sequence
  Description of Artificial Sequence: Synthetic oligonucleotide
cucacugcaguacggccuu

SEQ ID NO: 1726708 - RNA, 19 nt, Artificial Sequence
  Description of Artificial Sequence: Synthetic oligonucleotide
gccucaugggaagggcagc

SEQ ID NO: 1726709 - RNA, 19 nt, Artificial Sequence
  Description of Artificial Sequence: Synthetic oligonucleotide
ggacgacaaggaauguucu

SEQ ID NO: 1726710 - RNA, 19 nt, Artificial Sequence
  Description of Artificial Sequence: Synthetic oligonucleotide
gagcaccaggcgauuccaa

SEQ ID NO: 1726711 - RNA, 19 nt, Artificial Sequence
  Description of Artificial Sequence: Synthetic oligonucleotide
gcucacugcaguacggccu

SEQ ID NO: 1726712 - RNA, 19 nt, Artificial Sequence
  Description of Artificial Sequence: Synthetic oligonucleotide
cuaacguugugggccuacu

SEQ ID NO: 1726713 - RNA, 19 nt, Artificial Sequence
  Description of Artificial Sequence: Synthetic oligonucleotide
guguguggaaggccagguu

SEQ ID NO: 1726714 - RNA, 19 nt, Artificial Sequence
  Description of Artificial Sequence: Synthetic oligonucleotide
gcagagcaccaggcgauuc

SEQ ID NO: 1726715 - RNA, 19 nt, Artificial Sequence
  Description of Artificial Sequence: Synthetic oligonucleotide
cuccggacguugguacuaa

SEQ ID NO: 1726716 - RNA, 19 nt, Artificial Sequence
  Description of Artificial Sequence: Synthetic oligonucleotide
cgacaaggaauguucuugu

SEQ ID NO: 1726717 - RNA, 19 nt, Artificial Sequence
  Description of Artificial Sequence: Synthetic oligonucleotide
gccuacugugcugaugagu

SEQ ID NO: 1726718 - RNA, 19 nt, Artificial Sequence
  Description of Artificial Sequence: Synthetic oligonucleotide
cccuacacuucuucuggua

SEQ ID NO: 1726719 - RNA, 19 nt, Artificial Sequence
  Description of Artificial Sequence: Synthetic oligonucleotide
gggaccccuggugccaaac

SEQ ID NO: 1726720 - RNA, 19 nt, Artificial Sequence
  Description of Artificial Sequence: Synthetic oligonucleotide
gcgucucuccaaccuugga

SEQ ID NO: 1726721 - RNA, 19 nt, Artificial Sequence
  Description of Artificial Sequence: Synthetic oligonucleotide
ggcucggaccaccucuagu

SEQ ID NO: 1726722 - RNA, 19 nt, Artificial Sequence
  Description of Artificial Sequence: Synthetic oligonucleotide
gcaguacggccuucaccaa

SEQ ID NO: 1726723 - RNA, 19 nt, Artificial Sequence
  Description of Artificial Sequence: Synthetic oligonucleotide
cgaacccuacacuucuucu

SEQ ID NO: 1726724 - RNA, 19 nt, Artificial Sequence
  Description of Artificial Sequence: Synthetic oligonucleotide
ccuuccacuggccugcguu

SEQ ID NO: 1726725 - RNA, 19 nt, Artificial Sequence
  Description of Artificial Sequence: Synthetic oligonucleotide
gcucuggugcaugcggaua

SEQ ID NO: 1726726 - RNA, 19 nt, Artificial Sequence
  Description of Artificial Sequence: Synthetic oligonucleotide
gugcgucaccuugccagcu

SEQ ID NO: 1726727 - RNA, 19 nt, Artificial Sequence
  Description of Artificial Sequence: Synthetic oligonucleotide
cuggugcaugcggauaauu

SEQ ID NO: 1726728 - RNA, 19 nt, Artificial Sequence
  Description of Artificial Sequence: Synthetic oligonucleotide
cacaaucauaagggccaau

SEQ ID NO: 1726729 - RNA, 19 nt, Artificial Sequence
  Description of Artificial Sequence: Synthetic oligonucleotide
gcucggaguagcgcucaua

SEQ ID NO: 1726730 - RNA, 19 nt, Artificial Sequence
  Description of Artificial Sequence: Synthetic oligonucleotide
ggcuugcccuagcguccca

SEQ ID NO: 1726731 - RNA, 19 nt, Artificial Sequence
  Description of Artificial Sequence: Synthetic oligonucleotide
cccuagcgucccagcucac

SEQ ID NO: 1726732 - RNA, 19 nt, Artificial Sequence
  Description of Artificial Sequence: Synthetic oligonucleotide
gugggccuacugugcugau

SEQ ID NO: 1726733 - RNA, 19 nt, Artificial Sequence
  Description of Artificial Sequence: Synthetic oligonucleotide
ccuagcgucccagcucacu

SEQ ID NO: 1726734 - RNA, 19 nt, Artificial Sequence
  Description of Artificial Sequence: Synthetic oligonucleotide
cagcagcguaggacucaau

SEQ ID NO: 1726735 - RNA, 19 nt, Artificial Sequence
  Description of Artificial Sequence: Synthetic oligonucleotide
ccacuggccugcguuggua

SEQ ID NO: 1726736 - RNA, 19 nt, Artificial Sequence
  Description of Artificial Sequence: Synthetic oligonucleotide
gggcagccaguggcucuca

SEQ ID NO: 1726737 - RNA, 19 nt, Artificial Sequence
  Description of Artificial Sequence: Synthetic oligonucleotide
ggcuaacguugugggccua

SEQ ID NO: 1726738 - RNA, 19 nt, Artificial Sequence
  Description of Artificial Sequence: Synthetic oligonucleotide
ggcgaacccuacacuucuu

SEQ ID NO: 1726739 - RNA, 19 nt, Artificial Sequence
  Description of Artificial Sequence: Synthetic oligonucleotide
cgucaccuugccagcugcu

SEQ ID NO: 1726740 - RNA, 19 nt, Artificial Sequence
  Description of Artificial Sequence: Synthetic oligonucleotide
ccaaugcgugcgucaccuu

SEQ ID NO: 1726741 - RNA, 19 nt, Artificial Sequence
  Description of Artificial Sequence: Synthetic oligonucleotide
acuaaauucagauucaugc

SEQ ID NO: 1726742 - RNA, 19 nt, Artificial Sequence
  Description of Artificial Sequence: Synthetic oligonucleotide
ucuacauuuagcaacauca

SEQ ID NO: 1726743 - RNA, 19 nt, Artificial Sequence
  Description of Artificial Sequence: Synthetic oligonucleotide
uuugacuaaauucagauuc

SEQ ID NO: 1726744 - RNA, 19 nt, Artificial Sequence
  Description of Artificial Sequence: Synthetic oligonucleotide
ucaugcauaagcaugacag

SEQ ID NO: 1726745 - RNA, 19 nt, Artificial Sequence
  Description of Artificial Sequence: Synthetic oligonucleotide
uuaauauuuauuuauuaug

SEQ ID NO: 1726746 - RNA, 19 nt, Artificial Sequence
  Description of Artificial Sequence: Synthetic oligonucleotide
aaacaaaccaaccaagcag

SEQ ID NO: 1726747 - RNA, 19 nt, Artificial Sequence
  Description of Artificial Sequence: Synthetic oligonucleotide
uaccaaaugaccaaaaugu

SEQ ID NO: 1726748 - RNA, 19 nt, Artificial Sequence
  Description of Artificial Sequence: Synthetic oligonucleotide
auguauauauuucugaaag

SEQ ID NO: 1726749 - RNA, 19 nt, Artificial Sequence
  Description of Artificial Sequence: Synthetic oligonucleotide
acauuuagcaacaucaggc

SEQ ID NO: 1726750 - RNA, 19 nt, Artificial Sequence
  Description of Artificial Sequence: Synthetic oligonucleotide
ucuaacuuggcacuguucc

SEQ ID NO: 1726751 - RNA, 19 nt, Artificial Sequence
  Description of Artificial Sequence: Synthetic oligonucleotide
aacaaaccaaccaagcagc

SEQ ID NO: 1726752 - RNA, 19 nt, Artificial Sequence
  Description of Artificial Sequence: Synthetic oligonucleotide
ugugaagucucccugaaug

SEQ ID NO: 1726753 - RNA, 19 nt, Artificial Sequence
  Description of Artificial Sequence: Synthetic oligonucleotide
uuuauuugacuaaauucag

SEQ ID NO: 1726754 - RNA, 19 nt, Artificial Sequence
  Description of Artificial Sequence: Synthetic oligonucleotide
auucacaguacucuguugg

SEQ ID NO: 1726755 - RNA, 19 nt, Artificial Sequence
  Description of Artificial Sequence: Synthetic oligonucleotide
aauuuuggcuaucgugacc

SEQ ID NO: 1726756 - RNA, 19 nt, Artificial Sequence
  Description of Artificial Sequence: Synthetic oligonucleotide
uguauauauuucugaaagg

SEQ ID NO: 1726757 - RNA, 19 nt, Artificial Sequence
  Description of Artificial Sequence: Synthetic oligonucleotide
agaacaaugaacgccaagg

SEQ ID NO: 1726758 - RNA, 19 nt, Artificial Sequence
  Description of Artificial Sequence: Synthetic oligonucleotide
uacauuuagcaacaucagg

SEQ ID NO: 1726759 - RNA, 19 nt, Artificial Sequence
  Description of Artificial Sequence: Synthetic oligonucleotide
acaauaaaggacucgaaga

SEQ ID NO: 1726760 - RNA, 19 nt, Artificial Sequence
  Description of Artificial Sequence: Synthetic oligonucleotide
uuguguaucagacuuuggc

SEQ ID NO: 1726761 - RNA, 19 nt, Artificial Sequence
  Description of Artificial Sequence: Synthetic oligonucleotide
uacuguaggauauauauau

SEQ ID NO: 1726762 - RNA, 19 nt, Artificial Sequence
  Description of Artificial Sequence: Synthetic oligonucleotide
uauuugacuaaauucagau

SEQ ID NO: 1726763 - RNA, 19 nt, Artificial Sequence
  Description of Artificial Sequence: Synthetic oligonucleotide
aauaaaggacucgaagagg

SEQ ID NO: 1726764 - RNA, 19 nt, Artificial Sequence
  Description of Artificial Sequence: Synthetic oligonucleotide
ucagauucaugcauaagca

SEQ ID NO: 1726765 - RNA, 19 nt, Artificial Sequence
  Description of Artificial Sequence: Synthetic oligonucleotide
acauacucuugucacauac

SEQ ID NO: 1726766 - RNA, 19 nt, Artificial Sequence
  Description of Artificial Sequence: Synthetic oligonucleotide
uugagaucuauuucaaaag

SEQ ID NO: 1726767 - RNA, 19 nt, Artificial Sequence
  Description of Artificial Sequence: Synthetic oligonucleotide
gauucagaaacgucagugg

SEQ ID NO: 1726768 - RNA, 19 nt, Artificial Sequence
  Description of Artificial Sequence: Synthetic oligonucleotide
guauauauuucugaaaggc

SEQ ID NO: 1726769 - RNA, 19 nt, Artificial Sequence
  Description of Artificial Sequence: Synthetic oligonucleotide
aaguugcaaggccacauac

SEQ ID NO: 1726770 - RNA, 19 nt, Artificial Sequence
  Description of Artificial Sequence: Synthetic oligonucleotide
uguaggauauauauauaca

SEQ ID NO: 1726771 - RNA, 19 nt, Artificial Sequence
  Description of Artificial Sequence: Synthetic oligonucleotide
ucuacagcuuuacuguagg

SEQ ID NO: 1726772 - RNA, 19 nt, Artificial Sequence
  Description of Artificial Sequence: Synthetic oligonucleotide
uucaaaaguugcaaggcca

SEQ ID NO: 1726773 - RNA, 19 nt, Artificial Sequence
  Description of Artificial Sequence: Synthetic oligonucleotide
cugaaugaugaucucaucc

SEQ ID NO: 1726774 - RNA, 19 nt, Artificial Sequence
  Description of Artificial Sequence: Synthetic oligonucleotide
ucuacugacagcaccaagu

SEQ ID NO: 1726775 - RNA, 19 nt, Artificial Sequence
  Description of Artificial Sequence: Synthetic oligonucleotide
aaacucauuuggaaaauuc

SEQ ID NO: 1726776 - RNA, 19 nt, Artificial Sequence
  Description of Artificial Sequence: Synthetic oligonucleotide
aagcaugacagucucucuc

SEQ ID NO: 1726777 - RNA, 19 nt, Artificial Sequence
  Description of Artificial Sequence: Synthetic oligonucleotide
acucuugucacauacuucu

SEQ ID NO: 1726778 - RNA, 19 nt, Artificial Sequence
  Description of Artificial Sequence: Synthetic oligonucleotide
auaaaggacucgaagaggg

SEQ ID NO: 1726779 - RNA, 19 nt, Artificial Sequence
  Description of Artificial Sequence: Synthetic oligonucleotide
guugguaaugaacagacuc

SEQ ID NO: 1726780 - RNA, 19 nt, Artificial Sequence
  Description of Artificial Sequence: Synthetic oligonucleotide
cuguaggauauauauauac

SEQ ID NO: 1726781 - RNA, 19 nt, Artificial Sequence
  Description of Artificial Sequence: Synthetic oligonucleotide
ugaaugaugaucucauccu

SEQ ID NO: 1726782 - RNA, 19 nt, Artificial Sequence
  Description of Artificial Sequence: Synthetic oligonucleotide
uguguaucagacuuuggca

SEQ ID NO: 1726783 - RNA, 19 nt, Artificial Sequence
  Description of Artificial Sequence: Synthetic oligonucleotide
cuugacuuucacuaacucc

SEQ ID NO: 1726784 - RNA, 19 nt, Artificial Sequence
  Description of Artificial Sequence: Synthetic oligonucleotide
ucuaguguuucucuaaaau

SEQ ID NO: 1726785 - RNA, 19 nt, Artificial Sequence
  Description of Artificial Sequence: Synthetic oligonucleotide
uggaaaauucuucucuagc

SEQ ID NO: 1726786 - RNA, 19 nt, Artificial Sequence
  Description of Artificial Sequence: Synthetic oligonucleotide
uuugcaaacucauuuggaa

SEQ ID NO: 1726787 - RNA, 19 nt, Artificial Sequence
  Description of Artificial Sequence: Synthetic oligonucleotide
uggaugacaucgaugaugu

SEQ ID NO: 1726788 - RNA, 19 nt, Artificial Sequence
  Description of Artificial Sequence: Synthetic oligonucleotide
aagcgacacaugcaacucc

SEQ ID NO: 1726789 - RNA, 19 nt, Artificial Sequence
  Description of Artificial Sequence: Synthetic oligonucleotide
guaccaaaugaccaaaaug

SEQ ID NO: 1726790 - RNA, 19 nt, Artificial Sequence
  Description of Artificial Sequence: Synthetic oligonucleotide
gugaauuuucuacagucag

SEQ ID NO: 1726791 - RNA, 19 nt, Artificial Sequence
  Description of Artificial Sequence: Synthetic oligonucleotide
uuugggugaauuuucuaca

SEQ ID NO: 1726792 - RNA, 19 nt, Artificial Sequence
  Description of Artificial Sequence: Synthetic oligonucleotide
aguuuugcaaacucauuug

SEQ ID NO: 1726793 - RNA, 19 nt, Artificial Sequence
  Description of Artificial Sequence: Synthetic oligonucleotide
aaggccucuccucuguugg

SEQ ID NO: 1726794 - RNA, 19 nt, Artificial Sequence
  Description of Artificial Sequence: Synthetic oligonucleotide
aucucacaaacccagccgg

SEQ ID NO: 1726795 - RNA, 19 nt, Artificial Sequence
  Description of Artificial Sequence: Synthetic oligonucleotide
aaaccaaccaagcagccuu

SEQ ID NO: 1726796 - RNA, 19 nt, Artificial Sequence
  Description of Artificial Sequence: Synthetic oligonucleotide
uccgaaucuaacuuggcac

SEQ ID NO: 1726797 - RNA, 19 nt, Artificial Sequence
  Description of Artificial Sequence: Synthetic oligonucleotide
gaucuauuucaaaaguugc

SEQ ID NO: 1726798 - RNA, 19 nt, Artificial Sequence
  Description of Artificial Sequence: Synthetic oligonucleotide
aacaaugaacgccaaggau

SEQ ID NO: 1726799 - RNA, 19 nt, Artificial Sequence
  Description of Artificial Sequence: Synthetic oligonucleotide
auauauuucugaaaggccu

SEQ ID NO: 1726800 - RNA, 19 nt, Artificial Sequence
  Description of Artificial Sequence: Synthetic oligonucleotide
ugaacgccaaggaugagga

SEQ ID NO: 1726801 - RNA, 19 nt, Artificial Sequence
  Description of Artificial Sequence: Synthetic oligonucleotide
uguacagaacaaugaacgc

SEQ ID NO: 1726802 - RNA, 19 nt, Artificial Sequence
  Description of Artificial Sequence: Synthetic oligonucleotide
agcucagaaacacaggacu

SEQ ID NO: 1726803 - RNA, 19 nt, Artificial Sequence
  Description of Artificial Sequence: Synthetic oligonucleotide
auauauucacaguacucug

SEQ ID NO: 1726804 - RNA, 19 nt, Artificial Sequence
  Description of Artificial Sequence: Synthetic oligonucleotide
uucagaaacgucaguggcc

SEQ ID NO: 1726805 - RNA, 19 nt, Artificial Sequence
  Description of Artificial Sequence: Synthetic oligonucleotide
ucuauuucaaaaguugcaa

SEQ ID NO: 1726806 - RNA, 19 nt, Artificial Sequence
  Description of Artificial Sequence: Synthetic oligonucleotide
cuguugguaaugaacagac

SEQ ID NO: 1726807 - RNA, 19 nt, Artificial Sequence
  Description of Artificial Sequence: Synthetic oligonucleotide
uacucuguugguaaugaac

SEQ ID NO: 1726808 - RNA, 19 nt, Artificial Sequence
  Description of Artificial Sequence: Synthetic oligonucleotide
aaaagagcaaacaaaccaa

SEQ ID NO: 1726809 - RNA, 19 nt, Artificial Sequence
  Description of Artificial Sequence: Synthetic oligonucleotide
uuuagcaacaucaggcaua

SEQ ID NO: 1726810 - RNA, 19 nt, Artificial Sequence
  Description of Artificial Sequence: Synthetic oligonucleotide
agaucuauuucaaaaguug

SEQ ID NO: 1726811 - RNA, 19 nt, Artificial Sequence
  Description of Artificial Sequence: Synthetic oligonucleotide
aauucagauucaugcauaa

SEQ ID NO: 1726812 - RNA, 19 nt, Artificial Sequence
  Description of Artificial Sequence: Synthetic oligonucleotide
uguucugccuauauaucug

SEQ ID NO: 1726813 - RNA, 19 nt, Artificial Sequence
  Description of Artificial Sequence: Synthetic oligonucleotide
cugccuauauaucugcacg

SEQ ID NO: 1726814 - RNA, 19 nt, Artificial Sequence
  Description of Artificial Sequence: Synthetic oligonucleotide
ucacaaacccagccggucg

SEQ ID NO: 1726815 - RNA, 19 nt, Artificial Sequence
  Description of Artificial Sequence: Synthetic oligonucleotide
aauaucuaguguuucucua

SEQ ID NO: 1726816 - RNA, 19 nt, Artificial Sequence
  Description of Artificial Sequence: Synthetic oligonucleotide
acaugcaacuccucuuccc

SEQ ID NO: 1726817 - RNA, 19 nt, Artificial Sequence
  Description of Artificial Sequence: Synthetic oligonucleotide
uggaucuacugacagcacc

SEQ ID NO: 1726818 - RNA, 19 nt, Artificial Sequence
  Description of Artificial Sequence: Synthetic oligonucleotide
aacuuggcacuguuccucg

SEQ ID NO: 1726819 - RNA, 19 nt, Artificial Sequence
  Description of Artificial Sequence: Synthetic oligonucleotide
ugaauuuucuacagucagu

SEQ ID NO: 1726820 - RNA, 19 nt, Artificial Sequence
  Description of Artificial Sequence: Synthetic oligonucleotide
ugcauaagcaugacagucu

SEQ ID NO: 1726821 - RNA, 19 nt, Artificial Sequence
  Description of Artificial Sequence: Synthetic oligonucleotide
guaaugaacagacuccaca

SEQ ID NO: 1726822 - RNA, 19 nt, Artificial Sequence
  Description of Artificial Sequence: Synthetic oligonucleotide
acacaugcaacuccucuuc

SEQ ID NO: 1726823 - RNA, 19 nt, Artificial Sequence
  Description of Artificial Sequence: Synthetic oligonucleotide
cuacauuuagcaacaucag

SEQ ID NO: 1726824 - RNA, 19 nt, Artificial Sequence
  Description of Artificial Sequence: Synthetic oligonucleotide
aacgccaaggaugaggagu

SEQ ID NO: 1726825 - RNA, 19 nt, Artificial Sequence
  Description of Artificial Sequence: Synthetic oligonucleotide
acucgaagaggguauuccg

SEQ ID NO: 1726826 - RNA, 19 nt, Artificial Sequence
  Description of Artificial Sequence: Synthetic oligonucleotide
aagaggguauuccgaaucu

SEQ ID NO: 1726827 - RNA, 19 nt, Artificial Sequence
  Description of Artificial Sequence: Synthetic oligonucleotide
aacgucaguggccaucuca

SEQ ID NO: 1726828 - RNA, 19 nt, Artificial Sequence
  Description of Artificial Sequence: Synthetic oligonucleotide
uuccgaaucuaacuuggca

SEQ ID NO: 1726829 - RNA, 19 nt, Artificial Sequence
  Description of Artificial Sequence: Synthetic oligonucleotide
auuuuggcuaucgugaccu

SEQ ID NO: 1726830 - RNA, 19 nt, Artificial Sequence
  Description of Artificial Sequence: Synthetic oligonucleotide
caugucaacucucagguca

SEQ ID NO: 1726831 - RNA, 19 nt, Artificial Sequence
  Description of Artificial Sequence: Synthetic oligonucleotide
agauucaugcauaagcaug

SEQ ID NO: 1726832 - RNA, 19 nt, Artificial Sequence
  Description of Artificial Sequence: Synthetic oligonucleotide
guacagaacaaugaacgcc

SEQ ID NO: 1726833 - RNA, 19 nt, Artificial Sequence
  Description of Artificial Sequence: Synthetic oligonucleotide
ucagaaacgucaguggcca

SEQ ID NO: 1726834 - RNA, 19 nt, Artificial Sequence
  Description of Artificial Sequence: Synthetic oligonucleotide
uuuggaaaauucuucucua

SEQ ID NO: 1726835 - RNA, 19 nt, Artificial Sequence
  Description of Artificial Sequence: Synthetic oligonucleotide
cuaaauucagauucaugca

SEQ ID NO: 1726836 - RNA, 19 nt, Artificial Sequence
  Description of Artificial Sequence: Synthetic oligonucleotide
aaugaacagacuccacaau

SEQ ID NO: 1726837 - RNA, 19 nt, Artificial Sequence
  Description of Artificial Sequence: Synthetic oligonucleotide
caucucacaaacccagccg

SEQ ID NO: 1726838 - RNA, 19 nt, Artificial Sequence
  Description of Artificial Sequence: Synthetic oligonucleotide
gauucaugcauaagcauga

SEQ ID NO: 1726839 - RNA, 19 nt, Artificial Sequence
  Description of Artificial Sequence: Synthetic oligonucleotide
caaccaagcagccuuguac

SEQ ID NO: 1726840 - RNA, 19 nt, Artificial Sequence
  Description of Artificial Sequence: Synthetic oligonucleotide
ugccuauauaucugcacgc

SEQ ID NO: 1726841 - RNA, 19 nt, Artificial Sequence
  Description of Artificial Sequence: Synthetic oligonucleotide
uaucgugaccuucuguggu

SEQ ID NO: 1726842 - RNA, 19 nt, Artificial Sequence
  Description of Artificial Sequence: Synthetic oligonucleotide
acaucgaugaugucaucug

SEQ ID NO: 1726843 - RNA, 19 nt, Artificial Sequence
  Description of Artificial Sequence: Synthetic oligonucleotide
gaauuuuggcuaucgugac

SEQ ID NO: 1726844 - RNA, 19 nt, Artificial Sequence
  Description of Artificial Sequence: Synthetic oligonucleotide
guauuccgaaucuaacuug

SEQ ID NO: 1726845 - RNA, 19 nt, Artificial Sequence
  Description of Artificial Sequence: Synthetic oligonucleotide
uucaugcauaagcaugaca

SEQ ID NO: 1726846 - RNA, 19 nt, Artificial Sequence
  Description of Artificial Sequence: Synthetic oligonucleotide
augaacgccaaggaugagg

SEQ ID NO: 1726847 - RNA, 19 nt, Artificial Sequence
  Description of Artificial Sequence: Synthetic oligonucleotide
aacccagccggucgcacgg

SEQ ID NO: 1726848 - RNA, 19 nt, Artificial Sequence
  Description of Artificial Sequence: Synthetic oligonucleotide
uuggcuaucgugaccuucu

SEQ ID NO: 1726849 - RNA, 19 nt, Artificial Sequence
  Description of Artificial Sequence: Synthetic oligonucleotide
acagcuuuacuguaggaua

SEQ ID NO: 1726850 - RNA, 19 nt, Artificial Sequence
  Description of Artificial Sequence: Synthetic oligonucleotide
caugcaacuccucuucccc

SEQ ID NO: 1726851 - RNA, 19 nt, Artificial Sequence
  Description of Artificial Sequence: Synthetic oligonucleotide
uaucuaguguuucucuaaa

SEQ ID NO: 1726852 - RNA, 19 nt, Artificial Sequence
  Description of Artificial Sequence: Synthetic oligonucleotide
aaacccagccggucgcacg

SEQ ID NO: 1726853 - RNA, 19 nt, Artificial Sequence
  Description of Artificial Sequence: Synthetic oligonucleotide
cuaucgugaccuucugugg

SEQ ID NO: 1726854 - RNA, 19 nt, Artificial Sequence
  Description of Artificial Sequence: Synthetic oligonucleotide
aacaucaggcauauauuca

SEQ ID NO: 1726855 - RNA, 19 nt, Artificial Sequence
  Description of Artificial Sequence: Synthetic oligonucleotide
ucugccuauauaucugcac

SEQ ID NO: 1726856 - RNA, 19 nt, Artificial Sequence
  Description of Artificial Sequence: Synthetic oligonucleotide
gaacaaugaacgccaagga

SEQ ID NO: 1726857 - RNA, 19 nt, Artificial Sequence
  Description of Artificial Sequence: Synthetic oligonucleotide
auacucuugucacauacuu

SEQ ID NO: 1726858 - RNA, 19 nt, Artificial Sequence
  Description of Artificial Sequence: Synthetic oligonucleotide
augaacagacuccacaaua

SEQ ID NO: 1726859 - RNA, 19 nt, Artificial Sequence
  Description of Artificial Sequence: Synthetic oligonucleotide
gucacugacgcaccgcagg

SEQ ID NO: 1726860 - RNA, 19 nt, Artificial Sequence
  Description of Artificial Sequence: Synthetic oligonucleotide
aaaggccucuccucuguug

SEQ ID NO: 1726861 - RNA, 19 nt, Artificial Sequence
  Description of Artificial Sequence: Synthetic oligonucleotide
aguaccaaaugaccaaaau

SEQ ID NO: 1726862 - RNA, 19 nt, Artificial Sequence
  Description of Artificial Sequence: Synthetic oligonucleotide
ugguaaugaacagacucca

SEQ ID NO: 1726863 - RNA, 19 nt, Artificial Sequence
  Description of Artificial Sequence: Synthetic oligonucleotide
auaucuaguguuucucuaa

SEQ ID NO: 1726864 - RNA, 19 nt, Artificial Sequence
  Description of Artificial Sequence: Synthetic oligonucleotide
gggaauuuuggcuaucgug

SEQ ID NO: 1726865 - RNA, 19 nt, Artificial Sequence
  Description of Artificial Sequence: Synthetic oligonucleotide
gcuaucgugaccuucugug

SEQ ID NO: 1726866 - RNA, 19 nt, Artificial Sequence
  Description of Artificial Sequence: Synthetic oligonucleotide
ugggugggaauaucuagug

SEQ ID NO: 1726867 - RNA, 19 nt, Artificial Sequence
  Description of Artificial Sequence: Synthetic oligonucleotide
ugacuuucacuaacuccag

SEQ ID NO: 1726868 - RNA, 19 nt, Artificial Sequence
  Description of Artificial Sequence: Synthetic oligonucleotide
uauacaguguucugccuau

SEQ ID NO: 1726869 - RNA, 19 nt, Artificial Sequence
  Description of Artificial Sequence: Synthetic oligonucleotide
cauuuggaaaauucuucuc

SEQ ID NO: 1726870 - RNA, 19 nt, Artificial Sequence
  Description of Artificial Sequence: Synthetic oligonucleotide
cauuuagcaacaucaggca

SEQ ID NO: 1726871 - RNA, 19 nt, Artificial Sequence
  Description of Artificial Sequence: Synthetic oligonucleotide
uauucacaguacucuguug

SEQ ID NO: 1726872 - RNA, 19 nt, Artificial Sequence
  Description of Artificial Sequence: Synthetic oligonucleotide
uuggccaugucaacucuca

SEQ ID NO: 1726873 - RNA, 19 nt, Artificial Sequence
  Description of Artificial Sequence: Synthetic oligonucleotide
ugcaaggccacauacucuu

SEQ ID NO: 1726874 - RNA, 19 nt, Artificial Sequence
  Description of Artificial Sequence: Synthetic oligonucleotide
uccuugacuuucacuaacu

SEQ ID NO: 1726875 - RNA, 19 nt, Artificial Sequence
  Description of Artificial Sequence: Synthetic oligonucleotide
ucucuagccauugucuaca

SEQ ID NO: 1726876 - RNA, 19 nt, Artificial Sequence
  Description of Artificial Sequence: Synthetic oligonucleotide
gacuaaauucagauucaug

SEQ ID NO: 1726877 - RNA, 19 nt, Artificial Sequence
  Description of Artificial Sequence: Synthetic oligonucleotide
cacuguuccucguaucgcc

SEQ ID NO: 1726878 - RNA, 19 nt, Artificial Sequence
  Description of Artificial Sequence: Synthetic oligonucleotide
cuacugacagcaccaagug

SEQ ID NO: 1726879 - RNA, 19 nt, Artificial Sequence
  Description of Artificial Sequence: Synthetic oligonucleotide
ugcaaucagccccacugga

SEQ ID NO: 1726880 - RNA, 19 nt, Artificial Sequence
  Description of Artificial Sequence: Synthetic oligonucleotide
auuugacuaaauucagauu

SEQ ID NO: 1726881 - RNA, 19 nt, Artificial Sequence
  Description of Artificial Sequence: Synthetic oligonucleotide
uacagcuuuacuguaggau

SEQ ID NO: 1726882 - RNA, 19 nt, Artificial Sequence
  Description of Artificial Sequence: Synthetic oligonucleotide
agaaacgucaguggccauc

SEQ ID NO: 1726883 - RNA, 19 nt, Artificial Sequence
  Description of Artificial Sequence: Synthetic oligonucleotide
ggauucagaaacgucagug

SEQ ID NO: 1726884 - RNA, 19 nt, Artificial Sequence
  Description of Artificial Sequence: Synthetic oligonucleotide
ucgaagaggguauuccgaa

SEQ ID NO: 1726885 - RNA, 19 nt, Artificial Sequence
  Description of Artificial Sequence: Synthetic oligonucleotide
cauacuucuucuuugcucu

SEQ ID NO: 1726886 - RNA, 19 nt, Artificial Sequence
  Description of Artificial Sequence: Synthetic oligonucleotide
aucuauuucaaaaguugca

SEQ ID NO: 1726887 - RNA, 19 nt, Artificial Sequence
  Description of Artificial Sequence: Synthetic oligonucleotide
ucugguuugggugaauuuu

SEQ ID NO: 1726888 - RNA, 19 nt, Artificial Sequence
  Description of Artificial Sequence: Synthetic oligonucleotide
ucucaggucagcucagaaa

SEQ ID NO: 1726889 - RNA, 19 nt, Artificial Sequence
  Description of Artificial Sequence: Synthetic oligonucleotide
uuagcaacaucaggcauau

SEQ ID NO: 1726890 - RNA, 19 nt, Artificial Sequence
  Description of Artificial Sequence: Synthetic oligonucleotide
ucaacucucaggucagcuc

SEQ ID NO: 1726891 - RNA, 19 nt, Artificial Sequence
  Description of Artificial Sequence: Synthetic oligonucleotide
cuuguguaucagacuuugg

SEQ ID NO: 1726892 - RNA, 19 nt, Artificial Sequence
  Description of Artificial Sequence: Synthetic oligonucleotide
uguugguaaugaacagacu

SEQ ID NO: 1726893 - RNA, 19 nt, Artificial Sequence
  Description of Artificial Sequence: Synthetic oligonucleotide
cauauauucacaguacucu

SEQ ID NO: 1726894 - RNA, 19 nt, Artificial Sequence
  Description of Artificial Sequence: Synthetic oligonucleotide
gaauaucuaguguuucucu

SEQ ID NO: 1726895 - RNA, 19 nt, Artificial Sequence
  Description of Artificial Sequence: Synthetic oligonucleotide
aguacucuguugguaauga

SEQ ID NO: 1726896 - RNA, 19 nt, Artificial Sequence
  Description of Artificial Sequence: Synthetic oligonucleotide
ugggugaauuuucuacagu

SEQ ID NO: 1726897 - RNA, 19 nt, Artificial Sequence
  Description of Artificial Sequence: Synthetic oligonucleotide
uucugaaaggccucuccuc

SEQ ID NO: 1726898 - RNA, 19 nt, Artificial Sequence
  Description of Artificial Sequence: Synthetic oligonucleotide
aggguauuccgaaucuaac

SEQ ID NO: 1726899 - RNA, 19 nt, Artificial Sequence
  Description of Artificial Sequence: Synthetic oligonucleotide
acugacgcaccgcaggaga

SEQ ID NO: 1726900 - RNA, 19 nt, Artificial Sequence
  Description of Artificial Sequence: Synthetic oligonucleotide
agcccuucagugcuugcuc

SEQ ID NO: 1726901 - RNA, 19 nt, Artificial Sequence
  Description of Artificial Sequence: Synthetic oligonucleotide
uucugccuauauaucugca

SEQ ID NO: 1726902 - RNA, 19 nt, Artificial Sequence
  Description of Artificial Sequence: Synthetic oligonucleotide
ucaggucagcucagaaaca

SEQ ID NO: 1726903 - RNA, 19 nt, Artificial Sequence
  Description of Artificial Sequence: Synthetic oligonucleotide
aggagaauuucugagcaaa

SEQ ID NO: 1726904 - RNA, 19 nt, Artificial Sequence
  Description of Artificial Sequence: Synthetic oligonucleotide
ucacugacgcaccgcagga

SEQ ID NO: 1726905 - RNA, 19 nt, Artificial Sequence
  Description of Artificial Sequence: Synthetic oligonucleotide
acgucaguggccaucucac

SEQ ID NO: 1726906 - RNA, 19 nt, Artificial Sequence
  Description of Artificial Sequence: Synthetic oligonucleotide
cuaguguuccuugacuuuc

SEQ ID NO: 1726907 - RNA, 19 nt, Artificial Sequence
  Description of Artificial Sequence: Synthetic oligonucleotide
uaacuuggcacuguuccuc

SEQ ID NO: 1726908 - RNA, 19 nt, Artificial Sequence
  Description of Artificial Sequence: Synthetic oligonucleotide
uguuggccaugucaacucu

SEQ ID NO: 1726909 - RNA, 19 nt, Artificial Sequence
  Description of Artificial Sequence: Synthetic oligonucleotide
uaucgccuuugcaaucagc

SEQ ID NO: 1726910 - RNA, 19 nt, Artificial Sequence
  Description of Artificial Sequence: Synthetic oligonucleotide
uaagcaugacagucucucu

SEQ ID NO: 1726911 - RNA, 19 nt, Artificial Sequence
  Description of Artificial Sequence: Synthetic oligonucleotide
auuccgaaucuaacuuggc

SEQ ID NO: 1726912 - RNA, 19 nt, Artificial Sequence
  Description of Artificial Sequence: Synthetic oligonucleotide
ggucagcucagaaacacag

SEQ ID NO: 1726913 - RNA, 19 nt, Artificial Sequence
  Description of Artificial Sequence: Synthetic oligonucleotide
ucgccuuugcaaucagccc

SEQ ID NO: 1726914 - RNA, 19 nt, Artificial Sequence
  Description of Artificial Sequence: Synthetic oligonucleotide
uggauucagaaacgucagu

SEQ ID NO: 1726915 - RNA, 19 nt, Artificial Sequence
  Description of Artificial Sequence: Synthetic oligonucleotide
cagucaguuuugcaaacuc

SEQ ID NO: 1726916 - RNA, 19 nt, Artificial Sequence
  Description of Artificial Sequence: Synthetic oligonucleotide
accgcaggagaauuucuga

SEQ ID NO: 1726917 - RNA, 19 nt, Artificial Sequence
  Description of Artificial Sequence: Synthetic oligonucleotide
uuucuacagucaguuuugc

SEQ ID NO: 1726918 - RNA, 19 nt, Artificial Sequence
  Description of Artificial Sequence: Synthetic oligonucleotide
uggccaucucacaaaccca

SEQ ID NO: 1726919 - RNA, 19 nt, Artificial Sequence
  Description of Artificial Sequence: Synthetic oligonucleotide
ucucacaaacccagccggu

SEQ ID NO: 1726920 - RNA, 19 nt, Artificial Sequence
  Description of Artificial Sequence: Synthetic oligonucleotide
gcaggagaauuucugagca

SEQ ID NO: 1726921 - RNA, 19 nt, Artificial Sequence
  Description of Artificial Sequence: Synthetic oligonucleotide
cacaguacucuguugguaa

SEQ ID NO: 1726922 - RNA, 19 nt, Artificial Sequence
  Description of Artificial Sequence: Synthetic oligonucleotide
caucucuccagcccuucag

SEQ ID NO: 1726923 - RNA, 19 nt, Artificial Sequence
  Description of Artificial Sequence: Synthetic oligonucleotide
agucaguuuugcaaacuca

SEQ ID NO: 1726924 - RNA, 19 nt, Artificial Sequence
  Description of Artificial Sequence: Synthetic oligonucleotide
uuggcacuguuccucguau

SEQ ID NO: 1726925 - RNA, 19 nt, Artificial Sequence
  Description of Artificial Sequence: Synthetic oligonucleotide
aaggacucgaagaggguau

SEQ ID NO: 1726926 - RNA, 19 nt, Artificial Sequence
  Description of Artificial Sequence: Synthetic oligonucleotide
aggccacauacucuuguca

SEQ ID NO: 1726927 - RNA, 19 nt, Artificial Sequence
  Description of Artificial Sequence: Synthetic oligonucleotide
gucuacagcuuuacuguag

SEQ ID NO: 1726928 - RNA, 19 nt, Artificial Sequence
  Description of Artificial Sequence: Synthetic oligonucleotide
cacaaacccagccggucgc

SEQ ID NO: 1726929 - RNA, 19 nt, Artificial Sequence
  Description of Artificial Sequence: Synthetic oligonucleotide
caggucagcucagaaacac

SEQ ID NO: 1726930 - RNA, 19 nt, Artificial Sequence
  Description of Artificial Sequence: Synthetic oligonucleotide
acgccaaggaugaggaguc

SEQ ID NO: 1726931 - RNA, 19 nt, Artificial Sequence
  Description of Artificial Sequence: Synthetic oligonucleotide
agccccacuggauucagaa

SEQ ID NO: 1726932 - RNA, 19 nt, Artificial Sequence
  Description of Artificial Sequence: Synthetic oligonucleotide
uagccauugucuacauuua

SEQ ID NO: 1726933 - RNA, 19 nt, Artificial Sequence
  Description of Artificial Sequence: Synthetic oligonucleotide
guguucugccuauauaucu

SEQ ID NO: 1726934 - RNA, 19 nt, Artificial Sequence
  Description of Artificial Sequence: Synthetic oligonucleotide
acaguguucugccuauaua

SEQ ID NO: 1726935 - RNA, 19 nt, Artificial Sequence
  Description of Artificial Sequence: Synthetic oligonucleotide
uuuggcuaucgugaccuuc

SEQ ID NO: 1726936 - RNA, 19 nt, Artificial Sequence
  Description of Artificial Sequence: Synthetic oligonucleotide
gguacugucuucuucuucu

SEQ ID NO: 1726937 - RNA, 19 nt, Artificial Sequence
  Description of Artificial Sequence: Synthetic oligonucleotide
aaacgucaguggccaucuc

SEQ ID NO: 1726938 - RNA, 19 nt, Artificial Sequence
  Description of Artificial Sequence: Synthetic oligonucleotide
cacaugcaacuccucuucc

SEQ ID NO: 1726939 - RNA, 19 nt, Artificial Sequence
  Description of Artificial Sequence: Synthetic oligonucleotide
uggccaugucaacucucag

SEQ ID NO: 1726940 - RNA, 19 nt, Artificial Sequence
  Description of Artificial Sequence: Synthetic oligonucleotide
agucacuucuucacuucuc

SEQ ID NO: 1726941 - RNA, 19 nt, Artificial Sequence
  Description of Artificial Sequence: Synthetic oligonucleotide
cucgaagaggguauuccga

SEQ ID NO: 1726942 - RNA, 19 nt, Artificial Sequence
  Description of Artificial Sequence: Synthetic oligonucleotide
ucucucucuuguguaucag

SEQ ID NO: 1726943 - RNA, 19 nt, Artificial Sequence
  Description of Artificial Sequence: Synthetic oligonucleotide
cacuggauucagaaacguc

SEQ ID NO: 1726944 - RNA, 19 nt, Artificial Sequence
  Description of Artificial Sequence: Synthetic oligonucleotide
uuccucguaucgccuuugc

SEQ ID NO: 1726945 - RNA, 19 nt, Artificial Sequence
  Description of Artificial Sequence: Synthetic oligonucleotide
uucagugcuugcucagcaa

SEQ ID NO: 1726946 - RNA, 19 nt, Artificial Sequence
  Description of Artificial Sequence: Synthetic oligonucleotide
gucaguggccaucucacaa

SEQ ID NO: 1726947 - RNA, 19 nt, Artificial Sequence
  Description of Artificial Sequence: Synthetic oligonucleotide
aaugaacgccaaggaugag

SEQ ID NO: 1726948 - RNA, 19 nt, Artificial Sequence
  Description of Artificial Sequence: Synthetic oligonucleotide
uucugguuugggugaauuu

SEQ ID NO: 1726949 - RNA, 19 nt, Artificial Sequence
  Description of Artificial Sequence: Synthetic oligonucleotide
aggccucuccucuguuggc

SEQ ID NO: 1726950 - RNA, 19 nt, Artificial Sequence
  Description of Artificial Sequence: Synthetic oligonucleotide
ccaucucacaaacccagcc

SEQ ID NO: 1726951 - RNA, 19 nt, Artificial Sequence
  Description of Artificial Sequence: Synthetic oligonucleotide
auacuucuucuuugcucug

SEQ ID NO: 1726952 - RNA, 19 nt, Artificial Sequence
  Description of Artificial Sequence: Synthetic oligonucleotide
aguugcaaggccacauacu

SEQ ID NO: 1726953 - RNA, 19 nt, Artificial Sequence
  Description of Artificial Sequence: Synthetic oligonucleotide
ggaugaggagucuacagcu

SEQ ID NO: 1726954 - RNA, 19 nt, Artificial Sequence
  Description of Artificial Sequence: Synthetic oligonucleotide
gaggagucuacagcuuuac

SEQ ID NO: 1726955 - RNA, 19 nt, Artificial Sequence
  Description of Artificial Sequence: Synthetic oligonucleotide
uuccaccucucuuuuguuu

SEQ ID NO: 1726956 - RNA, 19 nt, Artificial Sequence
  Description of Artificial Sequence: Synthetic oligonucleotide
caguuucugguuuggguga

SEQ ID NO: 1726957 - RNA, 19 nt, Artificial Sequence
  Description of Artificial Sequence: Synthetic oligonucleotide
acagucaguuuugcaaacu

SEQ ID NO: 1726958 - RNA, 19 nt, Artificial Sequence
  Description of Artificial Sequence: Synthetic oligonucleotide
ugaccuucugugguacugu

SEQ ID NO: 1726959 - RNA, 19 nt, Artificial Sequence
  Description of Artificial Sequence: Synthetic oligonucleotide
acaguacucuguugguaau

SEQ ID NO: 1726960 - RNA, 19 nt, Artificial Sequence
  Description of Artificial Sequence: Synthetic oligonucleotide
cuucagugcuugcucagca

SEQ ID NO: 1726961 - RNA, 19 nt, Artificial Sequence
  Description of Artificial Sequence: Synthetic oligonucleotide
augucaacucucaggucag

SEQ ID NO: 1726962 - RNA, 19 nt, Artificial Sequence
  Description of Artificial Sequence: Synthetic oligonucleotide
ucacaguacucuguuggua

SEQ ID NO: 1726963 - RNA, 19 nt, Artificial Sequence
  Description of Artificial Sequence: Synthetic oligonucleotide
caguuuugcaaacucauuu

SEQ ID NO: 1726964 - RNA, 19 nt, Artificial Sequence
  Description of Artificial Sequence: Synthetic oligonucleotide
agucuacagcuuuacugua

SEQ ID NO: 1726965 - RNA, 19 nt, Artificial Sequence
  Description of Artificial Sequence: Synthetic oligonucleotide
ggugaauuuucuacaguca

SEQ ID NO: 1726966 - RNA, 19 nt, Artificial Sequence
  Description of Artificial Sequence: Synthetic oligonucleotide
agcgacacaugcaacuccu

SEQ ID NO: 1726967 - RNA, 19 nt, Artificial Sequence
  Description of Artificial Sequence: Synthetic oligonucleotide
gaacgccaaggaugaggag

SEQ ID NO: 1726968 - RNA, 19 nt, Artificial Sequence
  Description of Artificial Sequence: Synthetic oligonucleotide
gucaucugugaagucuccc

SEQ ID NO: 1726969 - RNA, 19 nt, Artificial Sequence
  Description of Artificial Sequence: Synthetic oligonucleotide
uguuccucguaucgccuuu

SEQ ID NO: 1726970 - RNA, 19 nt, Artificial Sequence
  Description of Artificial Sequence: Synthetic oligonucleotide
gcuugcucagcaagcaccg

SEQ ID NO: 1726971 - RNA, 19 nt, Artificial Sequence
  Description of Artificial Sequence: Synthetic oligonucleotide
gagaucuauuucaaaaguu

SEQ ID NO: 1726972 - RNA, 19 nt, Artificial Sequence
  Description of Artificial Sequence: Synthetic oligonucleotide
ucguaucgccuuugcaauc

SEQ ID NO: 1726973 - RNA, 19 nt, Artificial Sequence
  Description of Artificial Sequence: Synthetic oligonucleotide
gguauuccgaaucuaacuu

SEQ ID NO: 1726974 - RNA, 19 nt, Artificial Sequence
  Description of Artificial Sequence: Synthetic oligonucleotide
cuucucuagccauugucua

SEQ ID NO: 1726975 - RNA, 19 nt, Artificial Sequence
  Description of Artificial Sequence: Synthetic oligonucleotide
ggaucuacugacagcacca

SEQ ID NO: 1726976 - RNA, 19 nt, Artificial Sequence
  Description of Artificial Sequence: Synthetic oligonucleotide
gaaacgucaguggccaucu

SEQ ID NO: 1726977 - RNA, 19 nt, Artificial Sequence
  Description of Artificial Sequence: Synthetic oligonucleotide
ggugggaauaucuaguguu

SEQ ID NO: 1726978 - RNA, 19 nt, Artificial Sequence
  Description of Artificial Sequence: Synthetic oligonucleotide
guaucgccuuugcaaucag

SEQ ID NO: 1726979 - RNA, 19 nt, Artificial Sequence
  Description of Artificial Sequence: Synthetic oligonucleotide
accaaaugaccaaaauguu

SEQ ID NO: 1726980 - RNA, 19 nt, Artificial Sequence
  Description of Artificial Sequence: Synthetic oligonucleotide
guuccuugacuuucacuaa

SEQ ID NO: 1726981 - RNA, 19 nt, Artificial Sequence
  Description of Artificial Sequence: Synthetic oligonucleotide
ucuagccauugucuacauu

SEQ ID NO: 1726982 - RNA, 19 nt, Artificial Sequence
  Description of Artificial Sequence: Synthetic oligonucleotide
caguacucuguugguaaug

SEQ ID NO: 1726983 - RNA, 19 nt, Artificial Sequence
  Description of Artificial Sequence: Synthetic oligonucleotide
ggcauauauucacaguacu

SEQ ID NO: 1726984 - RNA, 19 nt, Artificial Sequence
  Description of Artificial Sequence: Synthetic oligonucleotide
aucgugaccuucuguggua

SEQ ID NO: 1726985 - RNA, 19 nt, Artificial Sequence
  Description of Artificial Sequence: Synthetic oligonucleotide
gacacaugcaacuccucuu

SEQ ID NO: 1726986 - RNA, 19 nt, Artificial Sequence
  Description of Artificial Sequence: Synthetic oligonucleotide
ggguauuccgaaucuaacu

SEQ ID NO: 1726987 - RNA, 19 nt, Artificial Sequence
  Description of Artificial Sequence: Synthetic oligonucleotide
ucgugaccuucugugguac

SEQ ID NO: 1726988 - RNA, 19 nt, Artificial Sequence
  Description of Artificial Sequence: Synthetic oligonucleotide
gccuauauaucugcacgcc

SEQ ID NO: 1726989 - RNA, 19 nt, Artificial Sequence
  Description of Artificial Sequence: Synthetic oligonucleotide
cuccaguuucugguuuggg

SEQ ID NO: 1726990 - RNA, 19 nt, Artificial Sequence
  Description of Artificial Sequence: Synthetic oligonucleotide
ugucaacucucaggucagc

SEQ ID NO: 1726991 - RNA, 19 nt, Artificial Sequence
  Description of Artificial Sequence: Synthetic oligonucleotide
agcaccaagugggugggaa

SEQ ID NO: 1726992 - RNA, 19 nt, Artificial Sequence
  Description of Artificial Sequence: Synthetic oligonucleotide
cgcaggagaauuucugagc

SEQ ID NO: 1726993 - RNA, 19 nt, Artificial Sequence
  Description of Artificial Sequence: Synthetic oligonucleotide
ccgcaggagaauuucugag

SEQ ID NO: 1726994 - RNA, 19 nt, Artificial Sequence
  Description of Artificial Sequence: Synthetic oligonucleotide
ccucguaucgccuuugcaa

SEQ ID NO: 1726995 - RNA, 19 nt, Artificial Sequence
  Description of Artificial Sequence: Synthetic oligonucleotide
cuugcucagcaagcaccgg

SEQ ID NO: 1726996 - RNA, 19 nt, Artificial Sequence
  Description of Artificial Sequence: Synthetic oligonucleotide
cauacucuugucacauacu

SEQ ID NO: 1726997 - RNA, 19 nt, Artificial Sequence
  Description of Artificial Sequence: Synthetic oligonucleotide
gaaucuaacuuggcacugu

SEQ ID NO: 1726998 - RNA, 19 nt, Artificial Sequence
  Description of Artificial Sequence: Synthetic oligonucleotide
gccgaagcgacacaugcaa

SEQ ID NO: 1726999 - RNA, 19 nt, Artificial Sequence
  Description of Artificial Sequence: Synthetic oligonucleotide
acuguuccucguaucgccu

SEQ ID NO: 1727000 - RNA, 19 nt, Artificial Sequence
  Description of Artificial Sequence: Synthetic oligonucleotide
gcccuggaucuacugacag

SEQ ID NO: 1727001 - RNA, 19 nt, Artificial Sequence
  Description of Artificial Sequence: Synthetic oligonucleotide
cucguaucgccuuugcaau

SEQ ID NO: 1727002 - RNA, 19 nt, Artificial Sequence
  Description of Artificial Sequence: Synthetic oligonucleotide
ucugggaauuuuggcuauc

SEQ ID NO: 1727003 - RNA, 19 nt, Artificial Sequence
  Description of Artificial Sequence: Synthetic oligonucleotide
ccgccgaagcgacacaugc

SEQ ID NO: 1727004 - RNA, 19 nt, Artificial Sequence
  Description of Artificial Sequence: Synthetic oligonucleotide
gacuuucacuaacuccagu

SEQ ID NO: 1727005 - RNA, 19 nt, Artificial Sequence
  Description of Artificial Sequence: Synthetic oligonucleotide
gcucugggaauuuuggcua

SEQ ID NO: 1727006 - RNA, 19 nt, Artificial Sequence
  Description of Artificial Sequence: Synthetic oligonucleotide
gguaaugaacagacuccac

SEQ ID NO: 1727007 - RNA, 19 nt, Artificial Sequence
  Description of Artificial Sequence: Synthetic oligonucleotide
caguaccaaaugaccaaaa

SEQ ID NO: 1727008 - RNA, 19 nt, Artificial Sequence
  Description of Artificial Sequence: Synthetic oligonucleotide
caaaaguugcaaggccaca

SEQ ID NO: 1727009 - RNA, 19 nt, Artificial Sequence
  Description of Artificial Sequence: Synthetic oligonucleotide
ccuugacuuucacuaacuc

SEQ ID NO: 1727010 - RNA, 19 nt, Artificial Sequence
  Description of Artificial Sequence: Synthetic oligonucleotide
ucuuugcucugggaauuuu

SEQ ID NO: 1727011 - RNA, 19 nt, Artificial Sequence
  Description of Artificial Sequence: Synthetic oligonucleotide
ccuauauaucugcacgcca

SEQ ID NO: 1727012 - RNA, 19 nt, Artificial Sequence
  Description of Artificial Sequence: Synthetic oligonucleotide
guuggccaugucaacucuc

SEQ ID NO: 1727013 - RNA, 19 nt, Artificial Sequence
  Description of Artificial Sequence: Synthetic oligonucleotide
accggcccuggaucuacug

SEQ ID NO: 1727014 - RNA, 19 nt, Artificial Sequence
  Description of Artificial Sequence: Synthetic oligonucleotide
ugacaucgaugaugucauc

SEQ ID NO: 1727015 - RNA, 19 nt, Artificial Sequence
  Description of Artificial Sequence: Synthetic oligonucleotide
cucccugaaugaugaucuc

SEQ ID NO: 1727016 - RNA, 19 nt, Artificial Sequence
  Description of Artificial Sequence: Synthetic oligonucleotide
agaggguauuccgaaucua

SEQ ID NO: 1727017 - RNA, 19 nt, Artificial Sequence
  Description of Artificial Sequence: Synthetic oligonucleotide
aguuucugguuugggugaa

SEQ ID NO: 1727018 - RNA, 19 nt, Artificial Sequence
  Description of Artificial Sequence: Synthetic oligonucleotide
cagcuuuacuguaggauau

SEQ ID NO: 1727019 - RNA, 19 nt, Artificial Sequence
  Description of Artificial Sequence: Synthetic oligonucleotide
caucgaugaugucaucugu

SEQ ID NO: 1727020 - RNA, 19 nt, Artificial Sequence
  Description of Artificial Sequence: Synthetic oligonucleotide
gcucagaaacacaggacuc

SEQ ID NO: 1727021 - RNA, 19 nt, Artificial Sequence
  Description of Artificial Sequence: Synthetic oligonucleotide
ggucgcacggccccgccgc

SEQ ID NO: 1727022 - RNA, 19 nt, Artificial Sequence
  Description of Artificial Sequence: Synthetic oligonucleotide
uucuuugcucugggaauuu

SEQ ID NO: 1727023 - RNA, 19 nt, Artificial Sequence
  Description of Artificial Sequence: Synthetic oligonucleotide
caugacagucucucucucu

SEQ ID NO: 1727024 - RNA, 19 nt, Artificial Sequence
  Description of Artificial Sequence: Synthetic oligonucleotide
accaagugggugggaauau

SEQ ID NO: 1727025 - RNA, 19 nt, Artificial Sequence
  Description of Artificial Sequence: Synthetic oligonucleotide
uuuuggcuaucgugaccuu

SEQ ID NO: 1727026 - RNA, 19 nt, Artificial Sequence
  Description of Artificial Sequence: Synthetic oligonucleotide
cacuucuccuggaugacau

SEQ ID NO: 1727027 - RNA, 19 nt, Artificial Sequence
  Description of Artificial Sequence: Synthetic oligonucleotide
aggucagcucagaaacaca

SEQ ID NO: 1727028 - RNA, 19 nt, Artificial Sequence
  Description of Artificial Sequence: Synthetic oligonucleotide
caggagaauuucugagcaa

SEQ ID NO: 1727029 - RNA, 19 nt, Artificial Sequence
  Description of Artificial Sequence: Synthetic oligonucleotide
cuuggcacuguuccucgua

SEQ ID NO: 1727030 - RNA, 19 nt, Artificial Sequence
  Description of Artificial Sequence: Synthetic oligonucleotide
cacugacgcaccgcaggag

SEQ ID NO: 1727031 - RNA, 19 nt, Artificial Sequence
  Description of Artificial Sequence: Synthetic oligonucleotide
cagucucucucucuugugu

SEQ ID NO: 1727032 - RNA, 19 nt, Artificial Sequence
  Description of Artificial Sequence: Synthetic oligonucleotide
caaggccacauacucuugu

SEQ ID NO: 1727033 - RNA, 19 nt, Artificial Sequence
  Description of Artificial Sequence: Synthetic oligonucleotide
agcuuuacuguaggauaua

SEQ ID NO: 1727034 - RNA, 19 nt, Artificial Sequence
  Description of Artificial Sequence: Synthetic oligonucleotide
acaaacccagccggucgca

SEQ ID NO: 1727035 - RNA, 19 nt, Artificial Sequence
  Description of Artificial Sequence: Synthetic oligonucleotide
gguuugggugaauuuucua

SEQ ID NO: 1727036 - RNA, 19 nt, Artificial Sequence
  Description of Artificial Sequence: Synthetic oligonucleotide
caaucagccccacuggauu

SEQ ID NO: 1727037 - RNA, 19 nt, Artificial Sequence
  Description of Artificial Sequence: Synthetic oligonucleotide
caaacccagccggucgcac

SEQ ID NO: 1727038 - RNA, 19 nt, Artificial Sequence
  Description of Artificial Sequence: Synthetic oligonucleotide
accaaccaagcagccuugu

SEQ ID NO: 1727039 - RNA, 19 nt, Artificial Sequence
  Description of Artificial Sequence: Synthetic oligonucleotide
ucccgcccgccgaagcgac

SEQ ID NO: 1727040 - RNA, 19 nt, Artificial Sequence
  Description of Artificial Sequence: Synthetic oligonucleotide
cugacgcaccgcaggagaa

SEQ ID NO: 1727041 - RNA, 19 nt, Artificial Sequence
  Description of Artificial Sequence: Synthetic oligonucleotide
gaugaggagucuacagcuu

SEQ ID NO: 1727042 - RNA, 19 nt, Artificial Sequence
  Description of Artificial Sequence: Synthetic oligonucleotide
caccaagugggugggaaua

SEQ ID NO: 1727043 - RNA, 19 nt, Artificial Sequence
  Description of Artificial Sequence: Synthetic oligonucleotide
ggccucuccucuguuggcc

SEQ ID NO: 1727044 - RNA, 19 nt, Artificial Sequence
  Description of Artificial Sequence: Synthetic oligonucleotide
gcaacuccucuuccccggc

SEQ ID NO: 1727045 - RNA, 19 nt, Artificial Sequence
  Description of Artificial Sequence: Synthetic oligonucleotide
ccgaaucuaacuuggcacu

SEQ ID NO: 1727046 - RNA, 19 nt, Artificial Sequence
  Description of Artificial Sequence: Synthetic oligonucleotide
acccagccggucgcacggc

SEQ ID NO: 1727047 - RNA, 19 nt, Artificial Sequence
  Description of Artificial Sequence: Synthetic oligonucleotide
aggacucgaagaggguauu

SEQ ID NO: 1727048 - RNA, 19 nt, Artificial Sequence
  Description of Artificial Sequence: Synthetic oligonucleotide
ccgaagcgacacaugcaac

SEQ ID NO: 1727049 - RNA, 19 nt, Artificial Sequence
  Description of Artificial Sequence: Synthetic oligonucleotide
gcccuucagugcuugcuca

SEQ ID NO: 1727050 - RNA, 19 nt, Artificial Sequence
  Description of Artificial Sequence: Synthetic oligonucleotide
gcagccuuguacagaacaa

SEQ ID NO: 1727051 - RNA, 19 nt, Artificial Sequence
  Description of Artificial Sequence: Synthetic oligonucleotide
cgaaucuaacuuggcacug

SEQ ID NO: 1727052 - RNA, 19 nt, Artificial Sequence
  Description of Artificial Sequence: Synthetic oligonucleotide
ccaaggucuucaaugcugu

SEQ ID NO: 1727053 - RNA, 19 nt, Artificial Sequence
  Description of Artificial Sequence: Synthetic oligonucleotide
gccaucucacaaacccagc

SEQ ID NO: 1727054 - RNA, 19 nt, Artificial Sequence
  Description of Artificial Sequence: Synthetic oligonucleotide
ccaugucaacucucagguc

SEQ ID NO: 1727055 - RNA, 19 nt, Artificial Sequence
  Description of Artificial Sequence: Synthetic oligonucleotide
auacaguguucugccuaua

SEQ ID NO: 1727056 - RNA, 19 nt, Artificial Sequence
  Description of Artificial Sequence: Synthetic oligonucleotide
gccuuugcaaucagcccca

SEQ ID NO: 1727057 - RNA, 19 nt, Artificial Sequence
  Description of Artificial Sequence: Synthetic oligonucleotide
gggugggaauaucuagugu

SEQ ID NO: 1727058 - RNA, 19 nt, Artificial Sequence
  Description of Artificial Sequence: Synthetic oligonucleotide
cucugggaauuuuggcuau

SEQ ID NO: 1727059 - RNA, 19 nt, Artificial Sequence
  Description of Artificial Sequence: Synthetic oligonucleotide
gcuuuacuguaggauauau

SEQ ID NO: 1727060 - RNA, 19 nt, Artificial Sequence
  Description of Artificial Sequence: Synthetic oligonucleotide
cgaagcgacacaugcaacu

SEQ ID NO: 1727061 - RNA, 19 nt, Artificial Sequence
  Description of Artificial Sequence: Synthetic oligonucleotide
gacgcaccgcaggagaauu

SEQ ID NO: 1727062 - RNA, 19 nt, Artificial Sequence
  Description of Artificial Sequence: Synthetic oligonucleotide
gcaaggccacauacucuug

SEQ ID NO: 1727063 - RNA, 19 nt, Artificial Sequence
  Description of Artificial Sequence: Synthetic oligonucleotide
gucgcacggccccgccgcc

SEQ ID NO: 1727064 - RNA, 19 nt, Artificial Sequence
  Description of Artificial Sequence: Synthetic oligonucleotide
ccaagugggugggaauauc

SEQ ID NO: 1727065 - RNA, 19 nt, Artificial Sequence
  Description of Artificial Sequence: Synthetic oligonucleotide
cagccuuguacagaacaau

SEQ ID NO: 1727066 - RNA, 19 nt, Artificial Sequence
  Description of Artificial Sequence: Synthetic oligonucleotide
ggcuaucgugaccuucugu

SEQ ID NO: 1727067 - RNA, 19 nt, Artificial Sequence
  Description of Artificial Sequence: Synthetic oligonucleotide
cguaucgccuuugcaauca

SEQ ID NO: 1727068 - RNA, 19 nt, Artificial Sequence
  Description of Artificial Sequence: Synthetic oligonucleotide
cacggccccgccgccuccg

SEQ ID NO: 1727069 - RNA, 19 nt, Artificial Sequence
  Description of Artificial Sequence: Synthetic oligonucleotide
gccacuucuccuggaugac

SEQ ID NO: 1727070 - RNA, 19 nt, Artificial Sequence
  Description of Artificial Sequence: Synthetic oligonucleotide
cgucacugacgcaccgcag

SEQ ID NO: 1727071 - RNA, 19 nt, Artificial Sequence
  Description of Artificial Sequence: Synthetic oligonucleotide
ccagcccuucagugcuugc

SEQ ID NO: 1727072 - RNA, 19 nt, Artificial Sequence
  Description of Artificial Sequence: Synthetic oligonucleotide
cucuagccauugucuacau

SEQ ID NO: 1727073 - RNA, 19 nt, Artificial Sequence
  Description of Artificial Sequence: Synthetic oligonucleotide
gccaaggaugaggagucua

SEQ ID NO: 1727074 - RNA, 19 nt, Artificial Sequence
  Description of Artificial Sequence: Synthetic oligonucleotide
ucgcacggccccgccgccu

SEQ ID NO: 1727075 - RNA, 19 nt, Artificial Sequence
  Description of Artificial Sequence: Synthetic oligonucleotide
cuguuccucguaucgccuu

SEQ ID NO: 1727076 - RNA, 19 nt, Artificial Sequence
  Description of Artificial Sequence: Synthetic oligonucleotide
cccgccgaagcgacacaug

SEQ ID NO: 1727077 - RNA, 19 nt, Artificial Sequence
  Description of Artificial Sequence: Synthetic oligonucleotide
cccuaguguuccuugacuu

SEQ ID NO: 1727078 - RNA, 19 nt, Artificial Sequence
  Description of Artificial Sequence: Synthetic oligonucleotide
cccgucacugacgcaccgc

SEQ ID NO: 1727079 - RNA, 19 nt, Artificial Sequence
  Description of Artificial Sequence: Synthetic oligonucleotide
cuccgcucccgcccgccga

SEQ ID NO: 1727080 - RNA, 19 nt, Artificial Sequence
  Description of Artificial Sequence: Synthetic oligonucleotide
cgcaccgcaggagaauuuc

SEQ ID NO: 1727081 - RNA, 19 nt, Artificial Sequence
  Description of Artificial Sequence: Synthetic oligonucleotide
cagccccacuggauucaga

SEQ ID NO: 1727082 - RNA, 19 nt, Artificial Sequence
  Description of Artificial Sequence: Synthetic oligonucleotide
cccagccggucgcacggcc

SEQ ID NO: 1727083 - RNA, 19 nt, Artificial Sequence
  Description of Artificial Sequence: Synthetic oligonucleotide
gcaccggcccuggaucuac

SEQ ID NO: 1727084 - RNA, 19 nt, Artificial Sequence
  Description of Artificial Sequence: Synthetic oligonucleotide
agcaccggcccuggaucua

SEQ ID NO: 1727085 - RNA, 19 nt, Artificial Sequence
  Description of Artificial Sequence: Synthetic oligonucleotide
acgcaccgcaggagaauuu

SEQ ID NO: 1727086 - RNA, 19 nt, Artificial Sequence
  Description of Artificial Sequence: Synthetic oligonucleotide
cgacacaugcaacuccucu

SEQ ID NO: 1727087 - RNA, 19 nt, Artificial Sequence
  Description of Artificial Sequence: Synthetic oligonucleotide
guuucugguuugggugaau

SEQ ID NO: 1727088 - RNA, 19 nt, Artificial Sequence
  Description of Artificial Sequence: Synthetic oligonucleotide
ccaaccaagcagccuugua

SEQ ID NO: 1727089 - RNA, 19 nt, Artificial Sequence
  Description of Artificial Sequence: Synthetic oligonucleotide
gcaccaagugggugggaau

SEQ ID NO: 1727090 - RNA, 19 nt, Artificial Sequence
  Description of Artificial Sequence: Synthetic oligonucleotide
gcgacacaugcaacuccuc

SEQ ID NO: 1727091 - RNA, 19 nt, Artificial Sequence
  Description of Artificial Sequence: Synthetic oligonucleotide
ccgcccgccgaagcgacac

SEQ ID NO: 1727092 - RNA, 19 nt, Artificial Sequence
  Description of Artificial Sequence: Synthetic oligonucleotide
ccccuaguguuccuugacu

SEQ ID NO: 1727093 - RNA, 19 nt, Artificial Sequence
  Description of Artificial Sequence: Synthetic oligonucleotide
ccacuggauucagaaacgu

SEQ ID NO: 1727094 - RNA, 19 nt, Artificial Sequence
  Description of Artificial Sequence: Synthetic oligonucleotide
cgccgaagcgacacaugca

SEQ ID NO: 1727095 - RNA, 19 nt, Artificial Sequence
  Description of Artificial Sequence: Synthetic oligonucleotide
cgucaguggccaucucaca

SEQ ID NO: 1727096 - RNA, 19 nt, Artificial Sequence
  Description of Artificial Sequence: Synthetic oligonucleotide
cagaaacgucaguggccau

SEQ ID NO: 1727097 - RNA, 19 nt, Artificial Sequence
  Description of Artificial Sequence: Synthetic oligonucleotide
cggucgcacggccccgccg

SEQ ID NO: 1727098 - RNA, 19 nt, Artificial Sequence
  Description of Artificial Sequence: Synthetic oligonucleotide
gcacggccccgccgccucc

SEQ ID NO: 1727099 - RNA, 19 nt, Artificial Sequence
  Description of Artificial Sequence: Synthetic oligonucleotide
ccggucgcacggccccgcc

SEQ ID NO: 1727100 - RNA, 19 nt, Artificial Sequence
  Description of Artificial Sequence: Synthetic oligonucleotide
cgaagaggguauuccgaau

SEQ ID NO: 1727101 - RNA, 19 nt, Artificial Sequence
  Description of Artificial Sequence: Synthetic oligonucleotide
cagcaccaaguggguggga

SEQ ID NO: 1727102 - RNA, 19 nt, Artificial Sequence
  Description of Artificial Sequence: Synthetic oligonucleotide
caccggcccuggaucuacu

SEQ ID NO: 1727103 - RNA, 19 nt, Artificial Sequence
  Description of Artificial Sequence: Synthetic oligonucleotide
cgcacggccccgccgccuc

SEQ ID NO: 1727104 - RNA, 19 nt, Artificial Sequence
  Description of Artificial Sequence: Synthetic oligonucleotide
gcccgccgaagcgacacau

SEQ ID NO: 1727105 - RNA, 19 nt, Artificial Sequence
  Description of Artificial Sequence: Synthetic oligonucleotide
cgugaccuucugugguacu

SEQ ID NO: 1727106 - RNA, 19 nt, Artificial Sequence
  Description of Artificial Sequence: Synthetic oligonucleotide
ccgcucccgcccgccgaag

SEQ ID NO: 1727107 - RNA, 19 nt, Artificial Sequence
  Description of Artificial Sequence: Synthetic oligonucleotide
cccgcccgccgaagcgaca

SEQ ID NO: 1727108 - RNA, 19 nt, Artificial Sequence
  Description of Artificial Sequence: Synthetic oligonucleotide
cgcccgccgaagcgacaca

SEQ ID NO: 1727109 - RNA, 19 nt, Artificial Sequence
  Description of Artificial Sequence: Synthetic oligonucleotide
uuaaagaucaacuugucug

SEQ ID NO: 1727110 - RNA, 19 nt, Artificial Sequence
  Description of Artificial Sequence: Synthetic oligonucleotide
aauagaguugcacaaacca

SEQ ID NO: 1727111 - RNA, 19 nt, Artificial Sequence
  Description of Artificial Sequence: Synthetic oligonucleotide
uucagcauauauaggaacg

SEQ ID NO: 1727112 - RNA, 19 nt, Artificial Sequence
  Description of Artificial Sequence: Synthetic oligonucleotide
aaauggaggccauuugugg

SEQ ID NO: 1727113 - RNA, 19 nt, Artificial Sequence
  Description of Artificial Sequence: Synthetic oligonucleotide
ucaagaacuugucuagugg

SEQ ID NO: 1727114 - RNA, 19 nt, Artificial Sequence
  Description of Artificial Sequence: Synthetic oligonucleotide
uucaaagugaccuuguggu

SEQ ID NO: 1727115 - RNA, 19 nt, Artificial Sequence
  Description of Artificial Sequence: Synthetic oligonucleotide
acagcauaaagugacaugg

SEQ ID NO: 1727116 - RNA, 19 nt, Artificial Sequence
  Description of Artificial Sequence: Synthetic oligonucleotide
ugugugguuauuuucuggg

SEQ ID NO: 1727117 - RNA, 19 nt, Artificial Sequence
  Description of Artificial Sequence: Synthetic oligonucleotide
uauuguucgugcuugggag

SEQ ID NO: 1727118 - RNA, 19 nt, Artificial Sequence
  Description of Artificial Sequence: Synthetic oligonucleotide
uugucuaguggacagagcu

SEQ ID NO: 1727119 - RNA, 19 nt, Artificial Sequence
  Description of Artificial Sequence: Synthetic oligonucleotide
aucauuacugucgaugccc

SEQ ID NO: 1727120 - RNA, 19 nt, Artificial Sequence
  Description of Artificial Sequence: Synthetic oligonucleotide
uuuacauaaaggcacuuua

SEQ ID NO: 1727121 - RNA, 19 nt, Artificial Sequence
  Description of Artificial Sequence: Synthetic oligonucleotide
aggagaaugagguuucggg

SEQ ID NO: 1727122 - RNA, 19 nt, Artificial Sequence
  Description of Artificial Sequence: Synthetic oligonucleotide
cuccuuagauucuugaugc

SEQ ID NO: 1727123 - RNA, 19 nt, Artificial Sequence
  Description of Artificial Sequence: Synthetic oligonucleotide
gucaacagcaaauggaggc

SEQ ID NO: 1727124 - RNA, 19 nt, Artificial Sequence
  Description of Artificial Sequence: Synthetic oligonucleotide
gagaaugagguuucgggcc

SEQ ID NO: 1727125 - RNA, 19 nt, Artificial Sequence
  Description of Artificial Sequence: Synthetic oligonucleotide
uauucggagucauaaggag

SEQ ID NO: 1727126 - RNA, 19 nt, Artificial Sequence
  Description of Artificial Sequence: Synthetic oligonucleotide
ucgaaacacaacuugcacc

SEQ ID NO: 1727127 - RNA, 19 nt, Artificial Sequence
  Description of Artificial Sequence: Synthetic oligonucleotide
gguauucggagucauaagg

SEQ ID NO: 1727128 - RNA, 19 nt, Artificial Sequence
  Description of Artificial Sequence: Synthetic oligonucleotide
uaaagugacaugguguuca

SEQ ID NO: 1727129 - RNA, 19 nt, Artificial Sequence
  Description of Artificial Sequence: Synthetic oligonucleotide
ugacgguguacucaaacug

SEQ ID NO: 1727130 - RNA, 19 nt, Artificial Sequence
  Description of Artificial Sequence: Synthetic oligonucleotide
aauggaggccauuuguggu

SEQ ID NO: 1727131 - RNA, 19 nt, Artificial Sequence
  Description of Artificial Sequence: Synthetic oligonucleotide
auaggaacgggcccacugc

SEQ ID NO: 1727132 - RNA, 19 nt, Artificial Sequence
  Description of Artificial Sequence: Synthetic oligonucleotide
ugugguuauuuucugggcu

SEQ ID NO: 1727133 - RNA, 19 nt, Artificial Sequence
  Description of Artificial Sequence: Synthetic oligonucleotide
agcauauauaggaacgggc

SEQ ID NO: 1727134 - RNA, 19 nt, Artificial Sequence
  Description of Artificial Sequence: Synthetic oligonucleotide
aguggacagagcuugucgg

SEQ ID NO: 1727135 - RNA, 19 nt, Artificial Sequence
  Description of Artificial Sequence: Synthetic oligonucleotide
aaagcucgggguuccacuc

SEQ ID NO: 1727136 - RNA, 19 nt, Artificial Sequence
  Description of Artificial Sequence: Synthetic oligonucleotide
uaguggacagagcuugucg

SEQ ID NO: 1727137 - RNA, 19 nt, Artificial Sequence
  Description of Artificial Sequence: Synthetic oligonucleotide
augguaauagaguugcaca

SEQ ID NO: 1727138 - RNA, 19 nt, Artificial Sequence
  Description of Artificial Sequence: Synthetic oligonucleotide
uucggagucauaaggagaa

SEQ ID NO: 1727139 - RNA, 19 nt, Artificial Sequence
  Description of Artificial Sequence: Synthetic oligonucleotide
aagcaguaagcuaacgagg

SEQ ID NO: 1727140 - RNA, 19 nt, Artificial Sequence
  Description of Artificial Sequence: Synthetic oligonucleotide
agucauaaggagaaugagg

SEQ ID NO: 1727141 - RNA, 19 nt, Artificial Sequence
  Description of Artificial Sequence: Synthetic oligonucleotide
uccauauaauucuuccuca

SEQ ID NO: 1727142 - RNA, 19 nt, Artificial Sequence
  Description of Artificial Sequence: Synthetic oligonucleotide
cauauauaggaacgggccc

SEQ ID NO: 1727143 - RNA, 19 nt, Artificial Sequence
  Description of Artificial Sequence: Synthetic oligonucleotide
gaacuugucuaguggacag

SEQ ID NO: 1727144 - RNA, 19 nt, Artificial Sequence
  Description of Artificial Sequence: Synthetic oligonucleotide
ugaggguuacaucaugugu

SEQ ID NO: 1727145 - RNA, 19 nt, Artificial Sequence
  Description of Artificial Sequence: Synthetic oligonucleotide
ugucgaaacacaacuugca

SEQ ID NO: 1727146 - RNA, 19 nt, Artificial Sequence
  Description of Artificial Sequence: Synthetic oligonucleotide
caucauguguugcauacag

SEQ ID NO: 1727147 - RNA, 19 nt, Artificial Sequence
  Description of Artificial Sequence: Synthetic oligonucleotide
aaucccuggcugcaaaaug

SEQ ID NO: 1727148 - RNA, 19 nt, Artificial Sequence
  Description of Artificial Sequence: Synthetic oligonucleotide
aaaauguugguggagcgaa

SEQ ID NO: 1727149 - RNA, 19 nt, Artificial Sequence
  Description of Artificial Sequence: Synthetic oligonucleotide
aaaagcucgggguuccacu

SEQ ID NO: 1727150 - RNA, 19 nt, Artificial Sequence
  Description of Artificial Sequence: Synthetic oligonucleotide
agacgaccgauucucggcc

SEQ ID NO: 1727151 - RNA, 19 nt, Artificial Sequence
  Description of Artificial Sequence: Synthetic oligonucleotide
auaaaggcacuuuauuuaa

SEQ ID NO: 1727152 - RNA, 19 nt, Artificial Sequence
  Description of Artificial Sequence: Synthetic oligonucleotide
auagaguugcacaaaccac

SEQ ID NO: 1727153 - RNA, 19 nt, Artificial Sequence
  Description of Artificial Sequence: Synthetic oligonucleotide
aacgaagaaguccacuuua

SEQ ID NO: 1727154 - RNA, 19 nt, Artificial Sequence
  Description of Artificial Sequence: Synthetic oligonucleotide
gcaaacaccgaguagauuc

SEQ ID NO: 1727155 - RNA, 19 nt, Artificial Sequence
  Description of Artificial Sequence: Synthetic oligonucleotide
acuagccuucaccuuuucc

SEQ ID NO: 1727156 - RNA, 19 nt, Artificial Sequence
  Description of Artificial Sequence: Synthetic oligonucleotide
ugaaaggaaggggauaucu

SEQ ID NO: 1727157 - RNA, 19 nt, Artificial Sequence
  Description of Artificial Sequence: Synthetic oligonucleotide
guugguggagcgaacaagg

SEQ ID NO: 1727158 - RNA, 19 nt, Artificial Sequence
  Description of Artificial Sequence: Synthetic oligonucleotide
uacauaaaggcacuuuauu

SEQ ID NO: 1727159 - RNA, 19 nt, Artificial Sequence
  Description of Artificial Sequence: Synthetic oligonucleotide
uugucuguguaaacgaguc

SEQ ID NO: 1727160 - RNA, 19 nt, Artificial Sequence
  Description of Artificial Sequence: Synthetic oligonucleotide
ugguagaguuccaugguca

SEQ ID NO: 1727161 - RNA, 19 nt, Artificial Sequence
  Description of Artificial Sequence: Synthetic oligonucleotide
uuucccuucagcauauaua

SEQ ID NO: 1727162 - RNA, 19 nt, Artificial Sequence
  Description of Artificial Sequence: Synthetic oligonucleotide
ugguaauagaguugcacaa

SEQ ID NO: 1727163 - RNA, 19 nt, Artificial Sequence
  Description of Artificial Sequence: Synthetic oligonucleotide
uguaaacgagucacucucc

SEQ ID NO: 1727164 - RNA, 19 nt, Artificial Sequence
  Description of Artificial Sequence: Synthetic oligonucleotide
aacgagucacucuccaagu

SEQ ID NO: 1727165 - RNA, 19 nt, Artificial Sequence
  Description of Artificial Sequence: Synthetic oligonucleotide
ugggcucacagcauaaagu

SEQ ID NO: 1727166 - RNA, 19 nt, Artificial Sequence
  Description of Artificial Sequence: Synthetic oligonucleotide
gaguagauuccagauuccg

SEQ ID NO: 1727167 - RNA, 19 nt, Artificial Sequence
  Description of Artificial Sequence: Synthetic oligonucleotide
uaucauuacugucgaugcc

SEQ ID NO: 1727168 - RNA, 19 nt, Artificial Sequence
  Description of Artificial Sequence: Synthetic oligonucleotide
uagaguuccauggucaggu

SEQ ID NO: 1727169 - RNA, 19 nt, Artificial Sequence
  Description of Artificial Sequence: Synthetic oligonucleotide
aauguugguggagcgaaca

SEQ ID NO: 1727170 - RNA, 19 nt, Artificial Sequence
  Description of Artificial Sequence: Synthetic oligonucleotide
ucgcccagggcaaacaucu

SEQ ID NO: 1727171 - RNA, 19 nt, Artificial Sequence
  Description of Artificial Sequence: Synthetic oligonucleotide
ucuuaggaggcugugcacc

SEQ ID NO: 1727172 - RNA, 19 nt, Artificial Sequence
  Description of Artificial Sequence: Synthetic oligonucleotide
agaacgaagaaguccacuu

SEQ ID NO: 1727173 - RNA, 19 nt, Artificial Sequence
  Description of Artificial Sequence: Synthetic oligonucleotide
ucaacagcaaauggaggcc

SEQ ID NO: 1727174 - RNA, 19 nt, Artificial Sequence
  Description of Artificial Sequence: Synthetic oligonucleotide
agugcugggcaucuuagga

SEQ ID NO: 1727175 - RNA, 19 nt, Artificial Sequence
  Description of Artificial Sequence: Synthetic oligonucleotide
aaggagaaugagguuucgg

SEQ ID NO: 1727176 - RNA, 19 nt, Artificial Sequence
  Description of Artificial Sequence: Synthetic oligonucleotide
ucuauuguucgugcuuggg

SEQ ID NO: 1727177 - RNA, 19 nt, Artificial Sequence
  Description of Artificial Sequence: Synthetic oligonucleotide
uaagcuaacgaggccagga

SEQ ID NO: 1727178 - RNA, 19 nt, Artificial Sequence
  Description of Artificial Sequence: Synthetic oligonucleotide
caaacaccgaguagauucc

SEQ ID NO: 1727179 - RNA, 19 nt, Artificial Sequence
  Description of Artificial Sequence: Synthetic oligonucleotide
uuacugucgaugcccacac

SEQ ID NO: 1727180 - RNA, 19 nt, Artificial Sequence
  Description of Artificial Sequence: Synthetic oligonucleotide
ugggguacaggauuucaga

SEQ ID NO: 1727181 - RNA, 19 nt, Artificial Sequence
  Description of Artificial Sequence: Synthetic oligonucleotide
ucauuacugucgaugccca

SEQ ID NO: 1727182 - RNA, 19 nt, Artificial Sequence
  Description of Artificial Sequence: Synthetic oligonucleotide
auauauaggaacgggccca

SEQ ID NO: 1727183 - RNA, 19 nt, Artificial Sequence
  Description of Artificial Sequence: Synthetic oligonucleotide
gagucauaaggagaaugag

SEQ ID NO: 1727184 - RNA, 19 nt, Artificial Sequence
  Description of Artificial Sequence: Synthetic oligonucleotide
cacucuccaaguucuauug

SEQ ID NO: 1727185 - RNA, 19 nt, Artificial Sequence
  Description of Artificial Sequence: Synthetic oligonucleotide
aggagaacgaagaagucca

SEQ ID NO: 1727186 - RNA, 19 nt, Artificial Sequence
  Description of Artificial Sequence: Synthetic oligonucleotide
ugaccuugugguauucgga

SEQ ID NO: 1727187 - RNA, 19 nt, Artificial Sequence
  Description of Artificial Sequence: Synthetic oligonucleotide
acuugucuaguggacagag

SEQ ID NO: 1727188 - RNA, 19 nt, Artificial Sequence
  Description of Artificial Sequence: Synthetic oligonucleotide
aaugagguuucgggccacc

SEQ ID NO: 1727189 - RNA, 19 nt, Artificial Sequence
  Description of Artificial Sequence: Synthetic oligonucleotide
augaggguuacaucaugug

SEQ ID NO: 1727190 - RNA, 19 nt, Artificial Sequence
  Description of Artificial Sequence: Synthetic oligonucleotide
gguggagcgaacaaggacc

SEQ ID NO: 1727191 - RNA, 19 nt, Artificial Sequence
  Description of Artificial Sequence: Synthetic oligonucleotide
ggagaaugagguuucgggc

SEQ ID NO: 1727192 - RNA, 19 nt, Artificial Sequence
  Description of Artificial Sequence: Synthetic oligonucleotide
ugguauucggagucauaag

SEQ ID NO: 1727193 - RNA, 19 nt, Artificial Sequence
  Description of Artificial Sequence: Synthetic oligonucleotide
caacuugcaccauuuucag

SEQ ID NO: 1727194 - RNA, 19 nt, Artificial Sequence
  Description of Artificial Sequence: Synthetic oligonucleotide
aucuuaggaggcugugcac

SEQ ID NO: 1727195 - RNA, 19 nt, Artificial Sequence
  Description of Artificial Sequence: Synthetic oligonucleotide
agauuccagauuccgaaaa

SEQ ID NO: 1727196 - RNA, 19 nt, Artificial Sequence
  Description of Artificial Sequence: Synthetic oligonucleotide
agugugugguuauuuucug

SEQ ID NO: 1727197 - RNA, 19 nt, Artificial Sequence
  Description of Artificial Sequence: Synthetic oligonucleotide
agaaugagguuucgggcca

SEQ ID NO: 1727198 - RNA, 19 nt, Artificial Sequence
  Description of Artificial Sequence: Synthetic oligonucleotide
auaggcaugaggguuacau

SEQ ID NO: 1727199 - RNA, 19 nt, Artificial Sequence
  Description of Artificial Sequence: Synthetic oligonucleotide
gcaguugugauaguugggg

SEQ ID NO: 1727200 - RNA, 19 nt, Artificial Sequence
  Description of Artificial Sequence: Synthetic oligonucleotide
gucuaguggacagagcuug

SEQ ID NO: 1727201 - RNA, 19 nt, Artificial Sequence
  Description of Artificial Sequence: Synthetic oligonucleotide
ugucuguguaaacgaguca

SEQ ID NO: 1727202 - RNA, 19 nt, Artificial Sequence
  Description of Artificial Sequence: Synthetic oligonucleotide
gucgaaacacaacuugcac

SEQ ID NO: 1727203 - RNA, 19 nt, Artificial Sequence
  Description of Artificial Sequence: Synthetic oligonucleotide
gcauauauaggaacgggcc

SEQ ID NO: 1727204 - RNA, 19 nt, Artificial Sequence
  Description of Artificial Sequence: Synthetic oligonucleotide
aguugugauaguuggggua

SEQ ID NO: 1727205 - RNA, 19 nt, Artificial Sequence
  Description of Artificial Sequence: Synthetic oligonucleotide
uuagauucuugaugcuggu

SEQ ID NO: 1727206 - RNA, 19 nt, Artificial Sequence
  Description of Artificial Sequence: Synthetic oligonucleotide
aguucuauuguucgugcuu

SEQ ID NO: 1727207 - RNA, 19 nt, Artificial Sequence
  Description of Artificial Sequence: Synthetic oligonucleotide
cagacgaccgauucucggc

SEQ ID NO: 1727208 - RNA, 19 nt, Artificial Sequence
  Description of Artificial Sequence: Synthetic oligonucleotide
agcaaauggaggccauuug

SEQ ID NO: 1727209 - RNA, 19 nt, Artificial Sequence
  Description of Artificial Sequence: Synthetic oligonucleotide
auuacugucgaugcccaca

SEQ ID NO: 1727210 - RNA, 19 nt, Artificial Sequence
  Description of Artificial Sequence: Synthetic oligonucleotide
aaauguugguggagcgaac

SEQ ID NO: 1727211 - RNA, 19 nt, Artificial Sequence
  Description of Artificial Sequence: Synthetic oligonucleotide
acugucgaugcccacacua

SEQ ID NO: 1727212 - RNA, 19 nt, Artificial Sequence
  Description of Artificial Sequence: Synthetic oligonucleotide
agcuagauuggugacggug

SEQ ID NO: 1727213 - RNA, 19 nt, Artificial Sequence
  Description of Artificial Sequence: Synthetic oligonucleotide
uccccaugguaauagaguu

SEQ ID NO: 1727214 - RNA, 19 nt, Artificial Sequence
  Description of Artificial Sequence: Synthetic oligonucleotide
gggcucacagcauaaagug

SEQ ID NO: 1727215 - RNA, 19 nt, Artificial Sequence
  Description of Artificial Sequence: Synthetic oligonucleotide
guggacagagcuugucggg

SEQ ID NO: 1727216 - RNA, 19 nt, Artificial Sequence
  Description of Artificial Sequence: Synthetic oligonucleotide
ugugauaguugggguacag

SEQ ID NO: 1727217 - RNA, 19 nt, Artificial Sequence
  Description of Artificial Sequence: Synthetic oligonucleotide
uaaggagaaugagguuucg

SEQ ID NO: 1727218 - RNA, 19 nt, Artificial Sequence
  Description of Artificial Sequence: Synthetic oligonucleotide
aaggaccucuuguggguug

SEQ ID NO: 1727219 - RNA, 19 nt, Artificial Sequence
  Description of Artificial Sequence: Synthetic oligonucleotide
gugucgaaacacaacuugc

SEQ ID NO: 1727220 - RNA, 19 nt, Artificial Sequence
  Description of Artificial Sequence: Synthetic oligonucleotide
cuugagcggacuccgugcc

SEQ ID NO: 1727221 - RNA, 19 nt, Artificial Sequence
  Description of Artificial Sequence: Synthetic oligonucleotide
gacuccgugccccgugucg

SEQ ID NO: 1727222 - RNA, 19 nt, Artificial Sequence
  Description of Artificial Sequence: Synthetic oligonucleotide
cugucgaugcccacacuag

SEQ ID NO: 1727223 - RNA, 19 nt, Artificial Sequence
  Description of Artificial Sequence: Synthetic oligonucleotide
caucaguuuggauggugac

SEQ ID NO: 1727224 - RNA, 19 nt, Artificial Sequence
  Description of Artificial Sequence: Synthetic oligonucleotide
guaaacgagucacucucca

SEQ ID NO: 1727225 - RNA, 19 nt, Artificial Sequence
  Description of Artificial Sequence: Synthetic oligonucleotide
uuucugggcucacagcaua

SEQ ID NO: 1727226 - RNA, 19 nt, Artificial Sequence
  Description of Artificial Sequence: Synthetic oligonucleotide
ccgauucucggccagagcc

SEQ ID NO: 1727227 - RNA, 19 nt, Artificial Sequence
  Description of Artificial Sequence: Synthetic oligonucleotide
accagcuagauuggugacg

SEQ ID NO: 1727228 - RNA, 19 nt, Artificial Sequence
  Description of Artificial Sequence: Synthetic oligonucleotide
uuucgggccaccagcuaga

SEQ ID NO: 1727229 - RNA, 19 nt, Artificial Sequence
  Description of Artificial Sequence: Synthetic oligonucleotide
guauucggagucauaagga

SEQ ID NO: 1727230 - RNA, 19 nt, Artificial Sequence
  Description of Artificial Sequence: Synthetic oligonucleotide
uugguggagcgaacaagga

SEQ ID NO: 1727231 - RNA, 19 nt, Artificial Sequence
  Description of Artificial Sequence: Synthetic oligonucleotide
cuauuguucgugcuuggga

SEQ ID NO: 1727232 - RNA, 19 nt, Artificial Sequence
  Description of Artificial Sequence: Synthetic oligonucleotide
ccgaguagauuccagauuc

SEQ ID NO: 1727233 - RNA, 19 nt, Artificial Sequence
  Description of Artificial Sequence: Synthetic oligonucleotide
uagauuccagauuccgaaa

SEQ ID NO: 1727234 - RNA, 19 nt, Artificial Sequence
  Description of Artificial Sequence: Synthetic oligonucleotide
gugugguuauuuucugggc

SEQ ID NO: 1727235 - RNA, 19 nt, Artificial Sequence
  Description of Artificial Sequence: Synthetic oligonucleotide
gaguuccauggucagguca

SEQ ID NO: 1727236 - RNA, 19 nt, Artificial Sequence
  Description of Artificial Sequence: Synthetic oligonucleotide
cacauacaaggcuguuucc

SEQ ID NO: 1727237 - RNA, 19 nt, Artificial Sequence
  Description of Artificial Sequence: Synthetic oligonucleotide
aguuuggauggugacagau

SEQ ID NO: 1727238 - RNA, 19 nt, Artificial Sequence
  Description of Artificial Sequence: Synthetic oligonucleotide
accgauucucggccagagc

SEQ ID NO: 1727239 - RNA, 19 nt, Artificial Sequence
  Description of Artificial Sequence: Synthetic oligonucleotide
gacgguguacucaaacuga

SEQ ID NO: 1727240 - RNA, 19 nt, Artificial Sequence
  Description of Artificial Sequence: Synthetic oligonucleotide
ucaaagugaccuuguggua

SEQ ID NO: 1727241 - RNA, 19 nt, Artificial Sequence
  Description of Artificial Sequence: Synthetic oligonucleotide
agcggcuugagcggacucc

SEQ ID NO: 1727242 - RNA, 19 nt, Artificial Sequence
  Description of Artificial Sequence: Synthetic oligonucleotide
aguagauuccagauuccga

SEQ ID NO: 1727243 - RNA, 19 nt, Artificial Sequence
  Description of Artificial Sequence: Synthetic oligonucleotide
uggaagcaguaagcuaacg

SEQ ID NO: 1727244 - RNA, 19 nt, Artificial Sequence
  Description of Artificial Sequence: Synthetic oligonucleotide
gguagaguuccauggucag

SEQ ID NO: 1727245 - RNA, 19 nt, Artificial Sequence
  Description of Artificial Sequence: Synthetic oligonucleotide
aucaguuuggauggugaca

SEQ ID NO: 1727246 - RNA, 19 nt, Artificial Sequence
  Description of Artificial Sequence: Synthetic oligonucleotide
ugagcggacuccgugcccc

SEQ ID NO: 1727247 - RNA, 19 nt, Artificial Sequence
  Description of Artificial Sequence: Synthetic oligonucleotide
ucuuccugaugcagcacau

SEQ ID NO: 1727248 - RNA, 19 nt, Artificial Sequence
  Description of Artificial Sequence: Synthetic oligonucleotide
agagauugccucaucaguu

SEQ ID NO: 1727249 - RNA, 19 nt, Artificial Sequence
  Description of Artificial Sequence: Synthetic oligonucleotide
aucauguguugcauacagg

SEQ ID NO: 1727250 - RNA, 19 nt, Artificial Sequence
  Description of Artificial Sequence: Synthetic oligonucleotide
cuguguaaacgagucacuc

SEQ ID NO: 1727251 - RNA, 19 nt, Artificial Sequence
  Description of Artificial Sequence: Synthetic oligonucleotide
ucgggguuccacuccaccu

SEQ ID NO: 1727252 - RNA, 19 nt, Artificial Sequence
  Description of Artificial Sequence: Synthetic oligonucleotide
agcaaacauaccacccuuc

SEQ ID NO: 1727253 - RNA, 19 nt, Artificial Sequence
  Description of Artificial Sequence: Synthetic oligonucleotide
ucuuggcacuugcuccucc

SEQ ID NO: 1727254 - RNA, 19 nt, Artificial Sequence
  Description of Artificial Sequence: Synthetic oligonucleotide
uggucaggucaacagcaaa

SEQ ID NO: 1727255 - RNA, 19 nt, Artificial Sequence
  Description of Artificial Sequence: Synthetic oligonucleotide
auucggagucauaaggaga

SEQ ID NO: 1727256 - RNA, 19 nt, Artificial Sequence
  Description of Artificial Sequence: Synthetic oligonucleotide
uucgugcuugggagcagag

SEQ ID NO: 1727257 - RNA, 19 nt, Artificial Sequence
  Description of Artificial Sequence: Synthetic oligonucleotide
ugucuaguggacagagcuu

SEQ ID NO: 1727258 - RNA, 19 nt, Artificial Sequence
  Description of Artificial Sequence: Synthetic oligonucleotide
uggauacuuucccugucuu

SEQ ID NO: 1727259 - RNA, 19 nt, Artificial Sequence
  Description of Artificial Sequence: Synthetic oligonucleotide
caguaagcuaacgaggcca

SEQ ID NO: 1727260 - RNA, 19 nt, Artificial Sequence
  Description of Artificial Sequence: Synthetic oligonucleotide
gcucacagcauaaagugac

SEQ ID NO: 1727261 - RNA, 19 nt, Artificial Sequence
  Description of Artificial Sequence: Synthetic oligonucleotide
aacgggcccacugccaucu

SEQ ID NO: 1727262 - RNA, 19 nt, Artificial Sequence
  Description of Artificial Sequence: Synthetic oligonucleotide
aagugaccuugugguauuc

SEQ ID NO: 1727263 - RNA, 19 nt, Artificial Sequence
  Description of Artificial Sequence: Synthetic oligonucleotide
uccuuagauucuugaugcu

SEQ ID NO: 1727264 - RNA, 19 nt, Artificial Sequence
  Description of Artificial Sequence: Synthetic oligonucleotide
ccagcuagauuggugacgg

SEQ ID NO: 1727265 - RNA, 19 nt, Artificial Sequence
  Description of Artificial Sequence: Synthetic oligonucleotide
cauaaggagaaugagguuu

SEQ ID NO: 1727266 - RNA, 19 nt, Artificial Sequence
  Description of Artificial Sequence: Synthetic oligonucleotide
aacuugucuaguggacaga

SEQ ID NO: 1727267 - RNA, 19 nt, Artificial Sequence
  Description of Artificial Sequence: Synthetic oligonucleotide
ugccccgugucgaaacaca

SEQ ID NO: 1727268 - RNA, 19 nt, Artificial Sequence
  Description of Artificial Sequence: Synthetic oligonucleotide
gaucaacuugucuguguaa

SEQ ID NO: 1727269 - RNA, 19 nt, Artificial Sequence
  Description of Artificial Sequence: Synthetic oligonucleotide
uaaaagcucgggguuccac

SEQ ID NO: 1727270 - RNA, 19 nt, Artificial Sequence
  Description of Artificial Sequence: Synthetic oligonucleotide
ugugguauucggagucaua

SEQ ID NO: 1727271 - RNA, 19 nt, Artificial Sequence
  Description of Artificial Sequence: Synthetic oligonucleotide
gauuggugacgguguacuc

SEQ ID NO: 1727272 - RNA, 19 nt, Artificial Sequence
  Description of Artificial Sequence: Synthetic oligonucleotide
accgaguagauuccagauu

SEQ ID NO: 1727273 - RNA, 19 nt, Artificial Sequence
  Description of Artificial Sequence: Synthetic oligonucleotide
cgaaacacaacuugcacca

SEQ ID NO: 1727274 - RNA, 19 nt, Artificial Sequence
  Description of Artificial Sequence: Synthetic oligonucleotide
aaagcccagccagcaaaca

SEQ ID NO: 1727275 - RNA, 19 nt, Artificial Sequence
  Description of Artificial Sequence: Synthetic oligonucleotide
uagauuggugacgguguac

SEQ ID NO: 1727276 - RNA, 19 nt, Artificial Sequence
  Description of Artificial Sequence: Synthetic oligonucleotide
uuccucagucucucgccca

SEQ ID NO: 1727277 - RNA, 19 nt, Artificial Sequence
  Description of Artificial Sequence: Synthetic oligonucleotide
gaccgauucucggccagag

SEQ ID NO: 1727278 - RNA, 19 nt, Artificial Sequence
  Description of Artificial Sequence: Synthetic oligonucleotide
uugagcggacuccgugccc

SEQ ID NO: 1727279 - RNA, 19 nt, Artificial Sequence
  Description of Artificial Sequence: Synthetic oligonucleotide
gcuaccagacgaccgauuc

SEQ ID NO: 1727280 - RNA, 19 nt, Artificial Sequence
  Description of Artificial Sequence: Synthetic oligonucleotide
gacagagcuugucggggca

SEQ ID NO: 1727281 - RNA, 19 nt, Artificial Sequence
  Description of Artificial Sequence: Synthetic oligonucleotide
acgaccgauucucggccag

SEQ ID NO: 1727282 - RNA, 19 nt, Artificial Sequence
  Description of Artificial Sequence: Synthetic oligonucleotide
guuuggauggugacagauc

SEQ ID NO: 1727283 - RNA, 19 nt, Artificial Sequence
  Description of Artificial Sequence: Synthetic oligonucleotide
cgaacaaggaccucuugug

SEQ ID NO: 1727284 - RNA, 19 nt, Artificial Sequence
  Description of Artificial Sequence: Synthetic oligonucleotide
caugaggguuacaucaugu

SEQ ID NO: 1727285 - RNA, 19 nt, Artificial Sequence
  Description of Artificial Sequence: Synthetic oligonucleotide
ccaaguucuauuguucgug

SEQ ID NO: 1727286 - RNA, 19 nt, Artificial Sequence
  Description of Artificial Sequence: Synthetic oligonucleotide
cucgggguuccacuccacc

SEQ ID NO: 1727287 - RNA, 19 nt, Artificial Sequence
  Description of Artificial Sequence: Synthetic oligonucleotide
guaagcuaacgaggccagg

SEQ ID NO: 1727288 - RNA, 19 nt, Artificial Sequence
  Description of Artificial Sequence: Synthetic oligonucleotide
gaccucuuguggguugaag

SEQ ID NO: 1727289 - RNA, 19 nt, Artificial Sequence
  Description of Artificial Sequence: Synthetic oligonucleotide
gcuugagcggacuccgugc

SEQ ID NO: 1727290 - RNA, 19 nt, Artificial Sequence
  Description of Artificial Sequence: Synthetic oligonucleotide
cgugucgaaacacaacuug

SEQ ID NO: 1727291 - RNA, 19 nt, Artificial Sequence
  Description of Artificial Sequence: Synthetic oligonucleotide
ucucaggacccagcaguug

SEQ ID NO: 1727292 - RNA, 19 nt, Artificial Sequence
  Description of Artificial Sequence: Synthetic oligonucleotide
gugacgguguacucaaacu

SEQ ID NO: 1727293 - RNA, 19 nt, Artificial Sequence
  Description of Artificial Sequence: Synthetic oligonucleotide
agccacccgccgcuggugg

SEQ ID NO: 1727294 - RNA, 19 nt, Artificial Sequence
  Description of Artificial Sequence: Synthetic oligonucleotide
ugcuggcuaccagacgacc

SEQ ID NO: 1727295 - RNA, 19 nt, Artificial Sequence
  Description of Artificial Sequence: Synthetic oligonucleotide
cauuacugucgaugcccac

SEQ ID NO: 1727296 - RNA, 19 nt, Artificial Sequence
  Description of Artificial Sequence: Synthetic oligonucleotide
caaacauaccacccuucaa

SEQ ID NO: 1727297 - RNA, 19 nt, Artificial Sequence
  Description of Artificial Sequence: Synthetic oligonucleotide
cauguguugcauacaggua

SEQ ID NO: 1727298 - RNA, 19 nt, Artificial Sequence
  Description of Artificial Sequence: Synthetic oligonucleotide
cuaguggacagagcuuguc

SEQ ID NO: 1727299 - RNA, 19 nt, Artificial Sequence
  Description of Artificial Sequence: Synthetic oligonucleotide
acaucauguguugcauaca

SEQ ID NO: 1727300 - RNA, 19 nt, Artificial Sequence
  Description of Artificial Sequence: Synthetic oligonucleotide
cugcaaaauggccgucuuc

SEQ ID NO: 1727301 - RNA, 19 nt, Artificial Sequence
  Description of Artificial Sequence: Synthetic oligonucleotide
cuggcuaccagacgaccga

SEQ ID NO: 1727302 - RNA, 19 nt, Artificial Sequence
  Description of Artificial Sequence: Synthetic oligonucleotide
gcuggcuaccagacgaccg

SEQ ID NO: 1727303 - RNA, 19 nt, Artificial Sequence
  Description of Artificial Sequence: Synthetic oligonucleotide
cagagauugccucaucagu

SEQ ID NO: 1727304 - RNA, 19 nt, Artificial Sequence
  Description of Artificial Sequence: Synthetic oligonucleotide
acgagucacucuccaaguu

SEQ ID NO: 1727305 - RNA, 19 nt, Artificial Sequence
  Description of Artificial Sequence: Synthetic oligonucleotide
gaacgaagaaguccacuuu

SEQ ID NO: 1727306 - RNA, 19 nt, Artificial Sequence
  Description of Artificial Sequence: Synthetic oligonucleotide
uccuccccaugguaauaga

SEQ ID NO: 1727307 - RNA, 19 nt, Artificial Sequence
  Description of Artificial Sequence: Synthetic oligonucleotide
augcuggcuaccagacgac

SEQ ID NO: 1727308 - RNA, 19 nt, Artificial Sequence
  Description of Artificial Sequence: Synthetic oligonucleotide
agagccacccgccgcuggu

SEQ ID NO: 1727309 - RNA, 19 nt, Artificial Sequence
  Description of Artificial Sequence: Synthetic oligonucleotide
uugugguauucggagucau

SEQ ID NO: 1727310 - RNA, 19 nt, Artificial Sequence
  Description of Artificial Sequence: Synthetic oligonucleotide
acgaagaaguccacuuuau

SEQ ID NO: 1727311 - RNA, 19 nt, Artificial Sequence
  Description of Artificial Sequence: Synthetic oligonucleotide
uguucgugcuugggagcag

SEQ ID NO: 1727312 - RNA, 19 nt, Artificial Sequence
  Description of Artificial Sequence: Synthetic oligonucleotide
cucgcccagggcaaacauc

SEQ ID NO: 1727313 - RNA, 19 nt, Artificial Sequence
  Description of Artificial Sequence: Synthetic oligonucleotide
cuccccaugguaauagagu

SEQ ID NO: 1727314 - RNA, 19 nt, Artificial Sequence
  Description of Artificial Sequence: Synthetic oligonucleotide
ccaccagcuagauugguga

SEQ ID NO: 1727315 - RNA, 19 nt, Artificial Sequence
  Description of Artificial Sequence: Synthetic oligonucleotide
accagacgaccgauucucg

SEQ ID NO: 1727316 - RNA, 19 nt, Artificial Sequence
  Description of Artificial Sequence: Synthetic oligonucleotide
ggcuugagcggacuccgug

SEQ ID NO: 1727317 - RNA, 19 nt, Artificial Sequence
  Description of Artificial Sequence: Synthetic oligonucleotide
gguguucaagaacuugucu

SEQ ID NO: 1727318 - RNA, 19 nt, Artificial Sequence
  Description of Artificial Sequence: Synthetic oligonucleotide
gacgaccgauucucggcca

SEQ ID NO: 1727319 - RNA, 19 nt, Artificial Sequence
  Description of Artificial Sequence: Synthetic oligonucleotide
cucaggacccagcaguugu

SEQ ID NO: 1727320 - RNA, 19 nt, Artificial Sequence
  Description of Artificial Sequence: Synthetic oligonucleotide
gagcggacuccgugccccg

SEQ ID NO: 1727321 - RNA, 19 nt, Artificial Sequence
  Description of Artificial Sequence: Synthetic oligonucleotide
gaaugagguuucgggccac

SEQ ID NO: 1727322 - RNA, 19 nt, Artificial Sequence
  Description of Artificial Sequence: Synthetic oligonucleotide
uacugucgaugcccacacu

SEQ ID NO: 1727323 - RNA, 19 nt, Artificial Sequence
  Description of Artificial Sequence: Synthetic oligonucleotide
ccugaugcuggcuaccaga

SEQ ID NO: 1727324 - RNA, 19 nt, Artificial Sequence
  Description of Artificial Sequence: Synthetic oligonucleotide
gcccagccagcaaacaccg

SEQ ID NO: 1727325 - RNA, 19 nt, Artificial Sequence
  Description of Artificial Sequence: Synthetic oligonucleotide
cuuaggaggcugugcaccu

SEQ ID NO: 1727326 - RNA, 19 nt, Artificial Sequence
  Description of Artificial Sequence: Synthetic oligonucleotide
gcaucuuaggaggcugugc

SEQ ID NO: 1727327 - RNA, 19 nt, Artificial Sequence
  Description of Artificial Sequence: Synthetic oligonucleotide
cuagauuggugacggugua

SEQ ID NO: 1727328 - RNA, 19 nt, Artificial Sequence
  Description of Artificial Sequence: Synthetic oligonucleotide
caguaggcugcgguccacc

SEQ ID NO: 1727329 - RNA, 19 nt, Artificial Sequence
  Description of Artificial Sequence: Synthetic oligonucleotide
acagauccuuucugauguu

SEQ ID NO: 1727330 - RNA, 19 nt, Artificial Sequence
  Description of Artificial Sequence: Synthetic oligonucleotide
acuccgugccccgugucga

SEQ ID NO: 1727331 - RNA, 19 nt, Artificial Sequence
  Description of Artificial Sequence: Synthetic oligonucleotide
cacagcuuugagcagguuu

SEQ ID NO: 1727332 - RNA, 19 nt, Artificial Sequence
  Description of Artificial Sequence: Synthetic oligonucleotide
ggagcgaacaaggaccucu

SEQ ID NO: 1727333 - RNA, 19 nt, Artificial Sequence
  Description of Artificial Sequence: Synthetic oligonucleotide
gcggcuugagcggacuccg

SEQ ID NO: 1727334 - RNA, 19 nt, Artificial Sequence
  Description of Artificial Sequence: Synthetic oligonucleotide
gaacgggcccacugccauc

SEQ ID NO: 1727335 - RNA, 19 nt, Artificial Sequence
  Description of Artificial Sequence: Synthetic oligonucleotide
guacucaaacugaguuuga

SEQ ID NO: 1727336 - RNA, 19 nt, Artificial Sequence
  Description of Artificial Sequence: Synthetic oligonucleotide
caguugugauaguuggggu

SEQ ID NO: 1727337 - RNA, 19 nt, Artificial Sequence
  Description of Artificial Sequence: Synthetic oligonucleotide
ccccaugguaauagaguug

SEQ ID NO: 1727338 - RNA, 19 nt, Artificial Sequence
  Description of Artificial Sequence: Synthetic oligonucleotide
ggguuacaucauguguugc

SEQ ID NO: 1727339 - RNA, 19 nt, Artificial Sequence
  Description of Artificial Sequence: Synthetic oligonucleotide
gugaaaggaaggggauauc

SEQ ID NO: 1727340 - RNA, 19 nt, Artificial Sequence
  Description of Artificial Sequence: Synthetic oligonucleotide
cgaguagauuccagauucc

SEQ ID NO: 1727341 - RNA, 19 nt, Artificial Sequence
  Description of Artificial Sequence: Synthetic oligonucleotide
ucucucgcccagggcaaac

SEQ ID NO: 1727342 - RNA, 19 nt, Artificial Sequence
  Description of Artificial Sequence: Synthetic oligonucleotide
gcuagauuggugacggugu

SEQ ID NO: 1727343 - RNA, 19 nt, Artificial Sequence
  Description of Artificial Sequence: Synthetic oligonucleotide
agcaaacaccgaguagauu

SEQ ID NO: 1727344 - RNA, 19 nt, Artificial Sequence
  Description of Artificial Sequence: Synthetic oligonucleotide
ggagcagagugugugguua

SEQ ID NO: 1727345 - RNA, 19 nt, Artificial Sequence
  Description of Artificial Sequence: Synthetic oligonucleotide
ucggagucauaaggagaau

SEQ ID NO: 1727346 - RNA, 19 nt, Artificial Sequence
  Description of Artificial Sequence: Synthetic oligonucleotide
uggcuaccagacgaccgau

SEQ ID NO: 1727347 - RNA, 19 nt, Artificial Sequence
  Description of Artificial Sequence: Synthetic oligonucleotide
ggcaucuuaggaggcugug

SEQ ID NO: 1727348 - RNA, 19 nt, Artificial Sequence
  Description of Artificial Sequence: Synthetic oligonucleotide
gguuauuuucugggcucac

SEQ ID NO: 1727349 - RNA, 19 nt, Artificial Sequence
  Description of Artificial Sequence: Synthetic oligonucleotide
gagcggcuugagcggacuc

SEQ ID NO: 1727350 - RNA, 19 nt, Artificial Sequence
  Description of Artificial Sequence: Synthetic oligonucleotide
cccgugucgaaacacaacu

SEQ ID NO: 1727351 - RNA, 19 nt, Artificial Sequence
  Description of Artificial Sequence: Synthetic oligonucleotide
agucucucgcccagggcaa

SEQ ID NO: 1727352 - RNA, 19 nt, Artificial Sequence
  Description of Artificial Sequence: Synthetic oligonucleotide
cuaccagacgaccgauucu

SEQ ID NO: 1727353 - RNA, 19 nt, Artificial Sequence
  Description of Artificial Sequence: Synthetic oligonucleotide
ccacccuucaaagugaccu

SEQ ID NO: 1727354 - RNA, 19 nt, Artificial Sequence
  Description of Artificial Sequence: Synthetic oligonucleotide
ggauaggcaugaggguuac

SEQ ID NO: 1727355 - RNA, 19 nt, Artificial Sequence
  Description of Artificial Sequence: Synthetic oligonucleotide
gcaaaccucuucagugcug

SEQ ID NO: 1727356 - RNA, 19 nt, Artificial Sequence
  Description of Artificial Sequence: Synthetic oligonucleotide
gauaggcaugaggguuaca

SEQ ID NO: 1727357 - RNA, 19 nt, Artificial Sequence
  Description of Artificial Sequence: Synthetic oligonucleotide
gcugugcaccugcucagca

SEQ ID NO: 1727358 - RNA, 19 nt, Artificial Sequence
  Description of Artificial Sequence: Synthetic oligonucleotide
cagccagcaaacaccgagu

SEQ ID NO: 1727359 - RNA, 19 nt, Artificial Sequence
  Description of Artificial Sequence: Synthetic oligonucleotide
ggagaacgaagaaguccac

SEQ ID NO: 1727360 - RNA, 19 nt, Artificial Sequence
  Description of Artificial Sequence: Synthetic oligonucleotide
gagcagagugugugguuau

SEQ ID NO: 1727361 - RNA, 19 nt, Artificial Sequence
  Description of Artificial Sequence: Synthetic oligonucleotide
caguuuggauggugacaga

SEQ ID NO: 1727362 - RNA, 19 nt, Artificial Sequence
  Description of Artificial Sequence: Synthetic oligonucleotide
agcagagugugugguuauu

SEQ ID NO: 1727363 - RNA, 19 nt, Artificial Sequence
  Description of Artificial Sequence: Synthetic oligonucleotide
cuuccggccucuggucuuc

SEQ ID NO: 1727364 - RNA, 19 nt, Artificial Sequence
  Description of Artificial Sequence: Synthetic oligonucleotide
caccugaugcuggcuacca

SEQ ID NO: 1727365 - RNA, 19 nt, Artificial Sequence
  Description of Artificial Sequence: Synthetic oligonucleotide
gugccccgugucgaaacac

SEQ ID NO: 1727366 - RNA, 19 nt, Artificial Sequence
  Description of Artificial Sequence: Synthetic oligonucleotide
gagccacccgccgcuggug

SEQ ID NO: 1727367 - RNA, 19 nt, Artificial Sequence
  Description of Artificial Sequence: Synthetic oligonucleotide
uucgggccaccagcuagau

SEQ ID NO: 1727368 - RNA, 19 nt, Artificial Sequence
  Description of Artificial Sequence: Synthetic oligonucleotide
cagcaaacaccgaguagau

SEQ ID NO: 1727369 - RNA, 19 nt, Artificial Sequence
  Description of Artificial Sequence: Synthetic oligonucleotide
ccccgugucgaaacacaac

SEQ ID NO: 1727370 - RNA, 19 nt, Artificial Sequence
  Description of Artificial Sequence: Synthetic oligonucleotide
ggaacgggcccacugccau

SEQ ID NO: 1727371 - RNA, 19 nt, Artificial Sequence
  Description of Artificial Sequence: Synthetic oligonucleotide
gggauaucuuccauauaau

SEQ ID NO: 1727372 - RNA, 19 nt, Artificial Sequence
  Description of Artificial Sequence: Synthetic oligonucleotide
ccaccugaugcuggcuacc

SEQ ID NO: 1727373 - RNA, 19 nt, Artificial Sequence
  Description of Artificial Sequence: Synthetic oligonucleotide
ccgugccccgugucgaaac

SEQ ID NO: 1727374 - RNA, 19 nt, Artificial Sequence
  Description of Artificial Sequence: Synthetic oligonucleotide
gcggacuccgugccccgug

SEQ ID NO: 1727375 - RNA, 19 nt, Artificial Sequence
  Description of Artificial Sequence: Synthetic oligonucleotide
cacccgccgcugguggaag

SEQ ID NO: 1727376 - RNA, 19 nt, Artificial Sequence
  Description of Artificial Sequence: Synthetic oligonucleotide
gagcgaacaaggaccucuu

SEQ ID NO: 1727377 - RNA, 19 nt, Artificial Sequence
  Description of Artificial Sequence: Synthetic oligonucleotide
agcggacuccgugccccgu

SEQ ID NO: 1727378 - RNA, 19 nt, Artificial Sequence
  Description of Artificial Sequence: Synthetic oligonucleotide
cuccgugccccgugucgaa

SEQ ID NO: 1727379 - RNA, 19 nt, Artificial Sequence
  Description of Artificial Sequence: Synthetic oligonucleotide
caccggggagcggcuugag

SEQ ID NO: 1727380 - RNA, 19 nt, Artificial Sequence
  Description of Artificial Sequence: Synthetic oligonucleotide
caaggaccucuuguggguu

SEQ ID NO: 1727381 - RNA, 19 nt, Artificial Sequence
  Description of Artificial Sequence: Synthetic oligonucleotide
gccccgugucgaaacacaa

SEQ ID NO: 1727382 - RNA, 19 nt, Artificial Sequence
  Description of Artificial Sequence: Synthetic oligonucleotide
gucucucgcccagggcaaa

SEQ ID NO: 1727383 - RNA, 19 nt, Artificial Sequence
  Description of Artificial Sequence: Synthetic oligonucleotide
guacaggauuucagagauu

SEQ ID NO: 1727384 - RNA, 19 nt, Artificial Sequence
  Description of Artificial Sequence: Synthetic oligonucleotide
gggagcggcuugagcggac

SEQ ID NO: 1727385 - RNA, 19 nt, Artificial Sequence
  Description of Artificial Sequence: Synthetic oligonucleotide
cagcuagauuggugacggu

SEQ ID NO: 1727386 - RNA, 19 nt, Artificial Sequence
  Description of Artificial Sequence: Synthetic oligonucleotide
gggcaucuuaggaggcugu

SEQ ID NO: 1727387 - RNA, 19 nt, Artificial Sequence
  Description of Artificial Sequence: Synthetic oligonucleotide
ccgccgcugguggaagcag

SEQ ID NO: 1727388 - RNA, 19 nt, Artificial Sequence
  Description of Artificial Sequence: Synthetic oligonucleotide
cuugucggggcagccucuu

SEQ ID NO: 1727389 - RNA, 19 nt, Artificial Sequence
  Description of Artificial Sequence: Synthetic oligonucleotide
ccgugucgaaacacaacuu

SEQ ID NO: 1727390 - RNA, 19 nt, Artificial Sequence
  Description of Artificial Sequence: Synthetic oligonucleotide
cgugccccgugucgaaaca

SEQ ID NO: 1727391 - RNA, 19 nt, Artificial Sequence
  Description of Artificial Sequence: Synthetic oligonucleotide
ggaccucuuguggguugaa

SEQ ID NO: 1727392 - RNA, 19 nt, Artificial Sequence
  Description of Artificial Sequence: Synthetic oligonucleotide
gcuugucggggcagccucu

SEQ ID NO: 1727393 - RNA, 19 nt, Artificial Sequence
  Description of Artificial Sequence: Synthetic oligonucleotide
ggcuaccagacgaccgauu

SEQ ID NO: 1727394 - RNA, 19 nt, Artificial Sequence
  Description of Artificial Sequence: Synthetic oligonucleotide
ccgcugguggaagcaguaa

SEQ ID NO: 1727395 - RNA, 19 nt, Artificial Sequence
  Description of Artificial Sequence: Synthetic oligonucleotide
ccuccaccggggagcggcu

SEQ ID NO: 1727396 - RNA, 19 nt, Artificial Sequence
  Description of Artificial Sequence: Synthetic oligonucleotide
cuccaccggggagcggcuu

SEQ ID NO: 1727397 - RNA, 19 nt, Artificial Sequence
  Description of Artificial Sequence: Synthetic oligonucleotide
cggcuugagcggacuccgu

SEQ ID NO: 1727398 - RNA, 19 nt, Artificial Sequence
  Description of Artificial Sequence: Synthetic oligonucleotide
uuuucgaaaaucaaaaugc

SEQ ID NO: 1727399 - RNA, 19 nt, Artificial Sequence
  Description of Artificial Sequence: Synthetic oligonucleotide
auagacauaaaauugaaug

SEQ ID NO: 1727400 - RNA, 19 nt, Artificial Sequence
  Description of Artificial Sequence: Synthetic oligonucleotide
aaaagacacaauccaaucc

SEQ ID NO: 1727401 - RNA, 19 nt, Artificial Sequence
  Description of Artificial Sequence: Synthetic oligonucleotide
agauaaaucaaucaacuuc

SEQ ID NO: 1727402 - RNA, 19 nt, Artificial Sequence
  Description of Artificial Sequence: Synthetic oligonucleotide
uuugcuuucacauccaggg

SEQ ID NO: 1727403 - RNA, 19 nt, Artificial Sequence
  Description of Artificial Sequence: Synthetic oligonucleotide
agccauaucacccacuucc

SEQ ID NO: 1727404 - RNA, 19 nt, Artificial Sequence
  Description of Artificial Sequence: Synthetic oligonucleotide
uagacauaaaauugaaugg

SEQ ID NO: 1727405 - RNA, 19 nt, Artificial Sequence
  Description of Artificial Sequence: Synthetic oligonucleotide
uuuguguugaucuucaaug

SEQ ID NO: 1727406 - RNA, 19 nt, Artificial Sequence
  Description of Artificial Sequence: Synthetic oligonucleotide
ugauaguucauccucauca

SEQ ID NO: 1727407 - RNA, 19 nt, Artificial Sequence
  Description of Artificial Sequence: Synthetic oligonucleotide
ucuaaugagaaucacuucu

SEQ ID NO: 1727408 - RNA, 19 nt, Artificial Sequence
  Description of Artificial Sequence: Synthetic oligonucleotide
aaaucauugagacucagau

SEQ ID NO: 1727409 - RNA, 19 nt, Artificial Sequence
  Description of Artificial Sequence: Synthetic oligonucleotide
aaagacacaauccaauccu

SEQ ID NO: 1727410 - RNA, 19 nt, Artificial Sequence
  Description of Artificial Sequence: Synthetic oligonucleotide
uugacuaaaucauugagac

SEQ ID NO: 1727411 - RNA, 19 nt, Artificial Sequence
  Description of Artificial Sequence: Synthetic oligonucleotide
uauggcuuucuuaaaauag

SEQ ID NO: 1727412 - RNA, 19 nt, Artificial Sequence
  Description of Artificial Sequence: Synthetic oligonucleotide
gaugguucaaaauuucucc

SEQ ID NO: 1727413 - RNA, 19 nt, Artificial Sequence
  Description of Artificial Sequence: Synthetic oligonucleotide
aaugcaaaggagccugagc

SEQ ID NO: 1727414 - RNA, 19 nt, Artificial Sequence
  Description of Artificial Sequence: Synthetic oligonucleotide
uuugccucuuuuaaguugg

SEQ ID NO: 1727415 - RNA, 19 nt, Artificial Sequence
  Description of Artificial Sequence: Synthetic oligonucleotide
aucuuuugaagauaaauca

SEQ ID NO: 1727416 - RNA, 19 nt, Artificial Sequence
  Description of Artificial Sequence: Synthetic oligonucleotide
gacuaaaucauugagacuc

SEQ ID NO: 1727417 - RNA, 19 nt, Artificial Sequence
  Description of Artificial Sequence: Synthetic oligonucleotide
aaagacccagaucucuucc

SEQ ID NO: 1727418 - RNA, 19 nt, Artificial Sequence
  Description of Artificial Sequence: Synthetic oligonucleotide
uuugucuuaggguagauuc

SEQ ID NO: 1727419 - RNA, 19 nt, Artificial Sequence
  Description of Artificial Sequence: Synthetic oligonucleotide
acacucauaaaccauauga

SEQ ID NO: 1727420 - RNA, 19 nt, Artificial Sequence
  Description of Artificial Sequence: Synthetic oligonucleotide
uaucuuuugaagauaaauc

SEQ ID NO: 1727421 - RNA, 19 nt, Artificial Sequence
  Description of Artificial Sequence: Synthetic oligonucleotide
ugauaaugcuucuucaugc

SEQ ID NO: 1727422 - RNA, 19 nt, Artificial Sequence
  Description of Artificial Sequence: Synthetic oligonucleotide
aacgcuuucuuccuccugg

SEQ ID NO: 1727423 - RNA, 19 nt, Artificial Sequence
  Description of Artificial Sequence: Synthetic oligonucleotide
guuuucgaaaaucaaaaug

SEQ ID NO: 1727424 - RNA, 19 nt, Artificial Sequence
  Description of Artificial Sequence: Synthetic oligonucleotide
uauaauggucgccaucugg

SEQ ID NO: 1727425 - RNA, 19 nt, Artificial Sequence
  Description of Artificial Sequence: Synthetic oligonucleotide
ucuugcugugaaaugauag

SEQ ID NO: 1727426 - RNA, 19 nt, Artificial Sequence
  Description of Artificial Sequence: Synthetic oligonucleotide
acagcuuuuacuuuuggug

SEQ ID NO: 1727427 - RNA, 19 nt, Artificial Sequence
  Description of Artificial Sequence: Synthetic oligonucleotide
ucuuaaaauagaugggagc

SEQ ID NO: 1727428 - RNA, 19 nt, Artificial Sequence
  Description of Artificial Sequence: Synthetic oligonucleotide
gacaacuaaacguauaguc

SEQ ID NO: 1727429 - RNA, 19 nt, Artificial Sequence
  Description of Artificial Sequence: Synthetic oligonucleotide
uggacaacuaaacguauag

SEQ ID NO: 1727430 - RNA, 19 nt, Artificial Sequence
  Description of Artificial Sequence: Synthetic oligonucleotide
uucuuaaaauagaugggag

SEQ ID NO: 1727431 - RNA, 19 nt, Artificial Sequence
  Description of Artificial Sequence: Synthetic oligonucleotide
ucuacagcaaaguaaggca

SEQ ID NO: 1727432 - RNA, 19 nt, Artificial Sequence
  Description of Artificial Sequence: Synthetic oligonucleotide
cagucuaggcucuagaucc

SEQ ID NO: 1727433 - RNA, 19 nt, Artificial Sequence
  Description of Artificial Sequence: Synthetic oligonucleotide
gagggauacacucauaaac

SEQ ID NO: 1727434 - RNA, 19 nt, Artificial Sequence
  Description of Artificial Sequence: Synthetic oligonucleotide
ugcaggauacacuuaacag

SEQ ID NO: 1727435 - RNA, 19 nt, Artificial Sequence
  Description of Artificial Sequence: Synthetic oligonucleotide
ucuacauguuucuaaagac

SEQ ID NO: 1727436 - RNA, 19 nt, Artificial Sequence
  Description of Artificial Sequence: Synthetic oligonucleotide
gaaaugauaguucauccuc

SEQ ID NO: 1727437 - RNA, 19 nt, Artificial Sequence
  Description of Artificial Sequence: Synthetic oligonucleotide
uuuaaaucuauuugccucu

SEQ ID NO: 1727438 - RNA, 19 nt, Artificial Sequence
  Description of Artificial Sequence: Synthetic oligonucleotide
uaaacguauagucacugcu

SEQ ID NO: 1727439 - RNA, 19 nt, Artificial Sequence
  Description of Artificial Sequence: Synthetic oligonucleotide
aagauucuugcuuuugucu

SEQ ID NO: 1727440 - RNA, 19 nt, Artificial Sequence
  Description of Artificial Sequence: Synthetic oligonucleotide
auaaaauugaauggaaaug

SEQ ID NO: 1727441 - RNA, 19 nt, Artificial Sequence
  Description of Artificial Sequence: Synthetic oligonucleotide
ugaaucucuucccagauau

SEQ ID NO: 1727442 - RNA, 19 nt, Artificial Sequence
  Description of Artificial Sequence: Synthetic oligonucleotide
ucagauuccauuauggcuu

SEQ ID NO: 1727443 - RNA, 19 nt, Artificial Sequence
  Description of Artificial Sequence: Synthetic oligonucleotide
uccauuauggcuuucuuaa

SEQ ID NO: 1727444 - RNA, 19 nt, Artificial Sequence
  Description of Artificial Sequence: Synthetic oligonucleotide
augaacuuagaugccaucc

SEQ ID NO: 1727445 - RNA, 19 nt, Artificial Sequence
  Description of Artificial Sequence: Synthetic oligonucleotide
auaaaccauaugauaaugc

SEQ ID NO: 1727446 - RNA, 19 nt, Artificial Sequence
  Description of Artificial Sequence: Synthetic oligonucleotide
uggaaaugacacaugcagg

SEQ ID NO: 1727447 - RNA, 19 nt, Artificial Sequence
  Description of Artificial Sequence: Synthetic oligonucleotide
auaaugcuucuucaugccc

SEQ ID NO: 1727448 - RNA, 19 nt, Artificial Sequence
  Description of Artificial Sequence: Synthetic oligonucleotide
uuuuggacaacuaaacgua

SEQ ID NO: 1727449 - RNA, 19 nt, Artificial Sequence
  Description of Artificial Sequence: Synthetic oligonucleotide
aguaaggcaagccucuggg

SEQ ID NO: 1727450 - RNA, 19 nt, Artificial Sequence
  Description of Artificial Sequence: Synthetic oligonucleotide
uuaggucucaaauuuccag

SEQ ID NO: 1727451 - RNA, 19 nt, Artificial Sequence
  Description of Artificial Sequence: Synthetic oligonucleotide
uuucgaaaaucaaaaugca

SEQ ID NO: 1727452 - RNA, 19 nt, Artificial Sequence
  Description of Artificial Sequence: Synthetic oligonucleotide
ucuagauccagcauaccac

SEQ ID NO: 1727453 - RNA, 19 nt, Artificial Sequence
  Description of Artificial Sequence: Synthetic oligonucleotide
aaguggaugguucaaaauu

SEQ ID NO: 1727454 - RNA, 19 nt, Artificial Sequence
  Description of Artificial Sequence: Synthetic oligonucleotide
ucaucagagggucuuaaga

SEQ ID NO: 1727455 - RNA, 19 nt, Artificial Sequence
  Description of Artificial Sequence: Synthetic oligonucleotide
cuuguaaauauuauagaca

SEQ ID NO: 1727456 - RNA, 19 nt, Artificial Sequence
  Description of Artificial Sequence: Synthetic oligonucleotide
uuaggguagauucucuucu

SEQ ID NO: 1727457 - RNA, 19 nt, Artificial Sequence
  Description of Artificial Sequence: Synthetic oligonucleotide
cuuuuggugacaucaaaug

SEQ ID NO: 1727458 - RNA, 19 nt, Artificial Sequence
  Description of Artificial Sequence: Synthetic oligonucleotide
caacuaaacguauagucac

SEQ ID NO: 1727459 - RNA, 19 nt, Artificial Sequence
  Description of Artificial Sequence: Synthetic oligonucleotide
aagagggauacacucauaa

SEQ ID NO: 1727460 - RNA, 19 nt, Artificial Sequence
  Description of Artificial Sequence: Synthetic oligonucleotide
auaucugugucaugguuuc

SEQ ID NO: 1727461 - RNA, 19 nt, Artificial Sequence
  Description of Artificial Sequence: Synthetic oligonucleotide
aaaguaucggauccuuucu

SEQ ID NO: 1727462 - RNA, 19 nt, Artificial Sequence
  Description of Artificial Sequence: Synthetic oligonucleotide
ugaaaagucuguuuugauc

SEQ ID NO: 1727463 - RNA, 19 nt, Artificial Sequence
  Description of Artificial Sequence: Synthetic oligonucleotide
acacuuaacagcuuuuacu

SEQ ID NO: 1727464 - RNA, 19 nt, Artificial Sequence
  Description of Artificial Sequence: Synthetic oligonucleotide
gaaaguaucggauccuuuc

SEQ ID NO: 1727465 - RNA, 19 nt, Artificial Sequence
  Description of Artificial Sequence: Synthetic oligonucleotide
aauagaugggagccauauc

SEQ ID NO: 1727466 - RNA, 19 nt, Artificial Sequence
  Description of Artificial Sequence: Synthetic oligonucleotide
gauaaugcuucuucaugcc

SEQ ID NO: 1727467 - RNA, 19 nt, Artificial Sequence
  Description of Artificial Sequence: Synthetic oligonucleotide
ucaucaucaggaaaguauc

SEQ ID NO: 1727468 - RNA, 19 nt, Artificial Sequence
  Description of Artificial Sequence: Synthetic oligonucleotide
aacuucuuauucagggacc

SEQ ID NO: 1727469 - RNA, 19 nt, Artificial Sequence
  Description of Artificial Sequence: Synthetic oligonucleotide
gauaguucauccucaucag

SEQ ID NO: 1727470 - RNA, 19 nt, Artificial Sequence
  Description of Artificial Sequence: Synthetic oligonucleotide
uauucagggaccauucuuc

SEQ ID NO: 1727471 - RNA, 19 nt, Artificial Sequence
  Description of Artificial Sequence: Synthetic oligonucleotide
agaugggagccauaucacc

SEQ ID NO: 1727472 - RNA, 19 nt, Artificial Sequence
  Description of Artificial Sequence: Synthetic oligonucleotide
uuuugaucaauaccuguuc

SEQ ID NO: 1727473 - RNA, 19 nt, Artificial Sequence
  Description of Artificial Sequence: Synthetic oligonucleotide
aacugcuaacgcuuucuuc

SEQ ID NO: 1727474 - RNA, 19 nt, Artificial Sequence
  Description of Artificial Sequence: Synthetic oligonucleotide
aaguaaggcaagccucugg

SEQ ID NO: 1727475 - RNA, 19 nt, Artificial Sequence
  Description of Artificial Sequence: Synthetic oligonucleotide
aguauaauggucgccaucu

SEQ ID NO: 1727476 - RNA, 19 nt, Artificial Sequence
  Description of Artificial Sequence: Synthetic oligonucleotide
ugugaaaugauaguucauc

SEQ ID NO: 1727477 - RNA, 19 nt, Artificial Sequence
  Description of Artificial Sequence: Synthetic oligonucleotide
agucuguuuugaucaauac

SEQ ID NO: 1727478 - RNA, 19 nt, Artificial Sequence
  Description of Artificial Sequence: Synthetic oligonucleotide
uugaauggaaaugacacau

SEQ ID NO: 1727479 - RNA, 19 nt, Artificial Sequence
  Description of Artificial Sequence: Synthetic oligonucleotide
ugagcaaacugcuaacgcu

SEQ ID NO: 1727480 - RNA, 19 nt, Artificial Sequence
  Description of Artificial Sequence: Synthetic oligonucleotide
acagucuaggcucuagauc

SEQ ID NO: 1727481 - RNA, 19 nt, Artificial Sequence
  Description of Artificial Sequence: Synthetic oligonucleotide
cuucaugcccauauuagac

SEQ ID NO: 1727482 - RNA, 19 nt, Artificial Sequence
  Description of Artificial Sequence: Synthetic oligonucleotide
agcaaaguaaggcaagccu

SEQ ID NO: 1727483 - RNA, 19 nt, Artificial Sequence
  Description of Artificial Sequence: Synthetic oligonucleotide
gcuuguaaauauuauagac

SEQ ID NO: 1727484 - RNA, 19 nt, Artificial Sequence
  Description of Artificial Sequence: Synthetic oligonucleotide
gucuuaagaauuuaggucu

SEQ ID NO: 1727485 - RNA, 19 nt, Artificial Sequence
  Description of Artificial Sequence: Synthetic oligonucleotide
ugucauccagaguauaaug

SEQ ID NO: 1727486 - RNA, 19 nt, Artificial Sequence
  Description of Artificial Sequence: Synthetic oligonucleotide
ucuuauucagggaccauuc

SEQ ID NO: 1727487 - RNA, 19 nt, Artificial Sequence
  Description of Artificial Sequence: Synthetic oligonucleotide
ucaugaaaagucuguuuug

SEQ ID NO: 1727488 - RNA, 19 nt, Artificial Sequence
  Description of Artificial Sequence: Synthetic oligonucleotide
uucgaaaaucaaaaugcaa

SEQ ID NO: 1727489 - RNA, 19 nt, Artificial Sequence
  Description of Artificial Sequence: Synthetic oligonucleotide
ugagccacuaauguagaag

SEQ ID NO: 1727490 - RNA, 19 nt, Artificial Sequence
  Description of Artificial Sequence: Synthetic oligonucleotide
uguuuugaucaauaccugu

SEQ ID NO: 1727491 - RNA, 19 nt, Artificial Sequence
  Description of Artificial Sequence: Synthetic oligonucleotide
cuagauccagcauaccacc

SEQ ID NO: 1727492 - RNA, 19 nt, Artificial Sequence
  Description of Artificial Sequence: Synthetic oligonucleotide
uguuucuaaagacccagau

SEQ ID NO: 1727493 - RNA, 19 nt, Artificial Sequence
  Description of Artificial Sequence: Synthetic oligonucleotide
cauccaacaugguagcugc

SEQ ID NO: 1727494 - RNA, 19 nt, Artificial Sequence
  Description of Artificial Sequence: Synthetic oligonucleotide
uaaaucauugagacucaga

SEQ ID NO: 1727495 - RNA, 19 nt, Artificial Sequence
  Description of Artificial Sequence: Synthetic oligonucleotide
cuugacuaaaucauugaga

SEQ ID NO: 1727496 - RNA, 19 nt, Artificial Sequence
  Description of Artificial Sequence: Synthetic oligonucleotide
ugaacuuagaugccauccu

SEQ ID NO: 1727497 - RNA, 19 nt, Artificial Sequence
  Description of Artificial Sequence: Synthetic oligonucleotide
gucuguuuugaucaauacc

SEQ ID NO: 1727498 - RNA, 19 nt, Artificial Sequence
  Description of Artificial Sequence: Synthetic oligonucleotide
uccagcauaccaccaauga

SEQ ID NO: 1727499 - RNA, 19 nt, Artificial Sequence
  Description of Artificial Sequence: Synthetic oligonucleotide
gacucaucuguucuaauga

SEQ ID NO: 1727500 - RNA, 19 nt, Artificial Sequence
  Description of Artificial Sequence: Synthetic oligonucleotide
uaggucucaaauuuccaga

SEQ ID NO: 1727501 - RNA, 19 nt, Artificial Sequence
  Description of Artificial Sequence: Synthetic oligonucleotide
uugcuuuugucuuagggua

SEQ ID NO: 1727502 - RNA, 19 nt, Artificial Sequence
  Description of Artificial Sequence: Synthetic oligonucleotide
aaaguggaugguucaaaau

SEQ ID NO: 1727503 - RNA, 19 nt, Artificial Sequence
  Description of Artificial Sequence: Synthetic oligonucleotide
auuauggcuuucuuaaaau

SEQ ID NO: 1727504 - RNA, 19 nt, Artificial Sequence
  Description of Artificial Sequence: Synthetic oligonucleotide
ugcuuucacauccaggguc

SEQ ID NO: 1727505 - RNA, 19 nt, Artificial Sequence
  Description of Artificial Sequence: Synthetic oligonucleotide
aaguuggguuucuucacug

SEQ ID NO: 1727506 - RNA, 19 nt, Artificial Sequence
  Description of Artificial Sequence: Synthetic oligonucleotide
aaugauaguucauccucau

SEQ ID NO: 1727507 - RNA, 19 nt, Artificial Sequence
  Description of Artificial Sequence: Synthetic oligonucleotide
uuaaguuggguuucuucac

SEQ ID NO: 1727508 - RNA, 19 nt, Artificial Sequence
  Description of Artificial Sequence: Synthetic oligonucleotide
uuccuuuccaaaguaacga

SEQ ID NO: 1727509 - RNA, 19 nt, Artificial Sequence
  Description of Artificial Sequence: Synthetic oligonucleotide
ugugucaugguuucuuuaa

SEQ ID NO: 1727510 - RNA, 19 nt, Artificial Sequence
  Description of Artificial Sequence: Synthetic oligonucleotide
agacucaucuguucuaaug

SEQ ID NO: 1727511 - RNA, 19 nt, Artificial Sequence
  Description of Artificial Sequence: Synthetic oligonucleotide
caucaucaggaaaguaucg

SEQ ID NO: 1727512 - RNA, 19 nt, Artificial Sequence
  Description of Artificial Sequence: Synthetic oligonucleotide
caucaaaugguuuccacca

SEQ ID NO: 1727513 - RNA, 19 nt, Artificial Sequence
  Description of Artificial Sequence: Synthetic oligonucleotide
gaugggagccauaucaccc

SEQ ID NO: 1727514 - RNA, 19 nt, Artificial Sequence
  Description of Artificial Sequence: Synthetic oligonucleotide
uucuugacuaaaucauuga

SEQ ID NO: 1727515 - RNA, 19 nt, Artificial Sequence
  Description of Artificial Sequence: Synthetic oligonucleotide
ucucaaauuuccagaagau

SEQ ID NO: 1727516 - RNA, 19 nt, Artificial Sequence
  Description of Artificial Sequence: Synthetic oligonucleotide
acaacuaaacguauaguca

SEQ ID NO: 1727517 - RNA, 19 nt, Artificial Sequence
  Description of Artificial Sequence: Synthetic oligonucleotide
uccuuuccaaaguaacgag

SEQ ID NO: 1727518 - RNA, 19 nt, Artificial Sequence
  Description of Artificial Sequence: Synthetic oligonucleotide
gaaauuuguguugaucuuc

SEQ ID NO: 1727519 - RNA, 19 nt, Artificial Sequence
  Description of Artificial Sequence: Synthetic oligonucleotide
gagccacuaauguagaaga

SEQ ID NO: 1727520 - RNA, 19 nt, Artificial Sequence
  Description of Artificial Sequence: Synthetic oligonucleotide
cauguuucuaaagacccag

SEQ ID NO: 1727521 - RNA, 19 nt, Artificial Sequence
  Description of Artificial Sequence: Synthetic oligonucleotide
ucuuuauccucguggguug

SEQ ID NO: 1727522 - RNA, 19 nt, Artificial Sequence
  Description of Artificial Sequence: Synthetic oligonucleotide
ugaucaauaccuguuccca

SEQ ID NO: 1727523 - RNA, 19 nt, Artificial Sequence
  Description of Artificial Sequence: Synthetic oligonucleotide
acucaucuguucuaaugag

SEQ ID NO: 1727524 - RNA, 19 nt, Artificial Sequence
  Description of Artificial Sequence: Synthetic oligonucleotide
ggucuuaagaauuuagguc

SEQ ID NO: 1727525 - RNA, 19 nt, Artificial Sequence
  Description of Artificial Sequence: Synthetic oligonucleotide
uuaaaauagaugggagcca

SEQ ID NO: 1727526 - RNA, 19 nt, Artificial Sequence
  Description of Artificial Sequence: Synthetic oligonucleotide
acucauaaaccauaugaua

SEQ ID NO: 1727527 - RNA, 19 nt, Artificial Sequence
  Description of Artificial Sequence: Synthetic oligonucleotide
gucuacagcaaaguaaggc

SEQ ID NO: 1727528 - RNA, 19 nt, Artificial Sequence
  Description of Artificial Sequence: Synthetic oligonucleotide
auucuugacuaaaucauug

SEQ ID NO: 1727529 - RNA, 19 nt, Artificial Sequence
  Description of Artificial Sequence: Synthetic oligonucleotide
ucggauccuuucuuuaucc

SEQ ID NO: 1727530 - RNA, 19 nt, Artificial Sequence
  Description of Artificial Sequence: Synthetic oligonucleotide
aaucaacuucuuauucagg

SEQ ID NO: 1727531 - RNA, 19 nt, Artificial Sequence
  Description of Artificial Sequence: Synthetic oligonucleotide
ugagaaucacuucuucauc

SEQ ID NO: 1727532 - RNA, 19 nt, Artificial Sequence
  Description of Artificial Sequence: Synthetic oligonucleotide
aucaaaugguuuccaccac

SEQ ID NO: 1727533 - RNA, 19 nt, Artificial Sequence
  Description of Artificial Sequence: Synthetic oligonucleotide
uggguugcaacucuuuguc

SEQ ID NO: 1727534 - RNA, 19 nt, Artificial Sequence
  Description of Artificial Sequence: Synthetic oligonucleotide
uuauucagggaccauucuu

SEQ ID NO: 1727535 - RNA, 19 nt, Artificial Sequence
  Description of Artificial Sequence: Synthetic oligonucleotide
cuaaacguauagucacugc

SEQ ID NO: 1727536 - RNA, 19 nt, Artificial Sequence
  Description of Artificial Sequence: Synthetic oligonucleotide
uucaugcccauauuagacu

SEQ ID NO: 1727537 - RNA, 19 nt, Artificial Sequence
  Description of Artificial Sequence: Synthetic oligonucleotide
cauaaaccauaugauaaug

SEQ ID NO: 1727538 - RNA, 19 nt, Artificial Sequence
  Description of Artificial Sequence: Synthetic oligonucleotide
ugcuuuugucuuaggguag

SEQ ID NO: 1727539 - RNA, 19 nt, Artificial Sequence
  Description of Artificial Sequence: Synthetic oligonucleotide
auuuguguugaucuucaau

SEQ ID NO: 1727540 - RNA, 19 nt, Artificial Sequence
  Description of Artificial Sequence: Synthetic oligonucleotide
gacacaauccaauccuuuc

SEQ ID NO: 1727541 - RNA, 19 nt, Artificial Sequence
  Description of Artificial Sequence: Synthetic oligonucleotide
ugacaugggcaaauccucc

SEQ ID NO: 1727542 - RNA, 19 nt, Artificial Sequence
  Description of Artificial Sequence: Synthetic oligonucleotide
ucagagggucuuaagaauu

SEQ ID NO: 1727543 - RNA, 19 nt, Artificial Sequence
  Description of Artificial Sequence: Synthetic oligonucleotide
uuaccaaggauuuccuaaa

SEQ ID NO: 1727544 - RNA, 19 nt, Artificial Sequence
  Description of Artificial Sequence: Synthetic oligonucleotide
aucggauccuuucuuuauc

SEQ ID NO: 1727545 - RNA, 19 nt, Artificial Sequence
  Description of Artificial Sequence: Synthetic oligonucleotide
augguucaaaauuucuccu

SEQ ID NO: 1727546 - RNA, 19 nt, Artificial Sequence
  Description of Artificial Sequence: Synthetic oligonucleotide
acacaauccaauccuuucu

SEQ ID NO: 1727547 - RNA, 19 nt, Artificial Sequence
  Description of Artificial Sequence: Synthetic oligonucleotide
ucaugcccauauuagacuc

SEQ ID NO: 1727548 - RNA, 19 nt, Artificial Sequence
  Description of Artificial Sequence: Synthetic oligonucleotide
augcaggauacacuuaaca

SEQ ID NO: 1727549 - RNA, 19 nt, Artificial Sequence
  Description of Artificial Sequence: Synthetic oligonucleotide
uaaaauagaugggagccau

SEQ ID NO: 1727550 - RNA, 19 nt, Artificial Sequence
  Description of Artificial Sequence: Synthetic oligonucleotide
uuauggcuuucuuaaaaua

SEQ ID NO: 1727551 - RNA, 19 nt, Artificial Sequence
  Description of Artificial Sequence: Synthetic oligonucleotide
ucuuaagaauuuaggucuc

SEQ ID NO: 1727552 - RNA, 19 nt, Artificial Sequence
  Description of Artificial Sequence: Synthetic oligonucleotide
guagauucucuucuacaug

SEQ ID NO: 1727553 - RNA, 19 nt, Artificial Sequence
  Description of Artificial Sequence: Synthetic oligonucleotide
acugagcaaacugcuaacg

SEQ ID NO: 1727554 - RNA, 19 nt, Artificial Sequence
  Description of Artificial Sequence: Synthetic oligonucleotide
caaugacaugggcaaaucc

SEQ ID NO: 1727555 - RNA, 19 nt, Artificial Sequence
  Description of Artificial Sequence: Synthetic oligonucleotide
acacaugcaggauacacuu

SEQ ID NO: 1727556 - RNA, 19 nt, Artificial Sequence
  Description of Artificial Sequence: Synthetic oligonucleotide
ugucaugguuucuuuaaau

SEQ ID NO: 1727557 - RNA, 19 nt, Artificial Sequence
  Description of Artificial Sequence: Synthetic oligonucleotide
cauucuuccagacucaucu

SEQ ID NO: 1727558 - RNA, 19 nt, Artificial Sequence
  Description of Artificial Sequence: Synthetic oligonucleotide
uuuggacaacuaaacguau

SEQ ID NO: 1727559 - RNA, 19 nt, Artificial Sequence
  Description of Artificial Sequence: Synthetic oligonucleotide
acuaaacguauagucacug

SEQ ID NO: 1727560 - RNA, 19 nt, Artificial Sequence
  Description of Artificial Sequence: Synthetic oligonucleotide
aaaagucuguuuugaucaa

SEQ ID NO: 1727561 - RNA, 19 nt, Artificial Sequence
  Description of Artificial Sequence: Synthetic oligonucleotide
augauaguucauccucauc

SEQ ID NO: 1727562 - RNA, 19 nt, Artificial Sequence
  Description of Artificial Sequence: Synthetic oligonucleotide
gacaugggcaaauccuccc

SEQ ID NO: 1727563 - RNA, 19 nt, Artificial Sequence
  Description of Artificial Sequence: Synthetic oligonucleotide
agauucuugcuuuugucuu

SEQ ID NO: 1727564 - RNA, 19 nt, Artificial Sequence
  Description of Artificial Sequence: Synthetic oligonucleotide
guugcuuguaaauauuaua

SEQ ID NO: 1727565 - RNA, 19 nt, Artificial Sequence
  Description of Artificial Sequence: Synthetic oligonucleotide
uacacucauaaaccauaug

SEQ ID NO: 1727566 - RNA, 19 nt, Artificial Sequence
  Description of Artificial Sequence: Synthetic oligonucleotide
uguaaauauuauagacaua

SEQ ID NO: 1727567 - RNA, 19 nt, Artificial Sequence
  Description of Artificial Sequence: Synthetic oligonucleotide
aauggucgccaucugguuu

SEQ ID NO: 1727568 - RNA, 19 nt, Artificial Sequence
  Description of Artificial Sequence: Synthetic oligonucleotide
augacaugggcaaauccuc

SEQ ID NO: 1727569 - RNA, 19 nt, Artificial Sequence
  Description of Artificial Sequence: Synthetic oligonucleotide
uuggguuucuucacuguuc

SEQ ID NO: 1727570 - RNA, 19 nt, Artificial Sequence
  Description of Artificial Sequence: Synthetic oligonucleotide
uucuuuauccucguggguu

SEQ ID NO: 1727571 - RNA, 19 nt, Artificial Sequence
  Description of Artificial Sequence: Synthetic oligonucleotide
aaaccauaugauaaugcuu

SEQ ID NO: 1727572 - RNA, 19 nt, Artificial Sequence
  Description of Artificial Sequence: Synthetic oligonucleotide
cauccagaguauaaugguc

SEQ ID NO: 1727573 - RNA, 19 nt, Artificial Sequence
  Description of Artificial Sequence: Synthetic oligonucleotide
gagggucuuaagaauuuag

SEQ ID NO: 1727574 - RNA, 19 nt, Artificial Sequence
  Description of Artificial Sequence: Synthetic oligonucleotide
guuuccaccacugagcaaa

SEQ ID NO: 1727575 - RNA, 19 nt, Artificial Sequence
  Description of Artificial Sequence: Synthetic oligonucleotide
uucuaaugagaaucacuuc

SEQ ID NO: 1727576 - RNA, 19 nt, Artificial Sequence
  Description of Artificial Sequence: Synthetic oligonucleotide
cagcuuuuacuuuugguga

SEQ ID NO: 1727577 - RNA, 19 nt, Artificial Sequence
  Description of Artificial Sequence: Synthetic oligonucleotide
uaaagacccagaucucuuc

SEQ ID NO: 1727578 - RNA, 19 nt, Artificial Sequence
  Description of Artificial Sequence: Synthetic oligonucleotide
uuucccuccgggccaaggc

SEQ ID NO: 1727579 - RNA, 19 nt, Artificial Sequence
  Description of Artificial Sequence: Synthetic oligonucleotide
cucuagauccagcauacca

SEQ ID NO: 1727580 - RNA, 19 nt, Artificial Sequence
  Description of Artificial Sequence: Synthetic oligonucleotide
cuguuuugaucaauaccug

SEQ ID NO: 1727581 - RNA, 19 nt, Artificial Sequence
  Description of Artificial Sequence: Synthetic oligonucleotide
auaguucauccucaucaga

SEQ ID NO: 1727582 - RNA, 19 nt, Artificial Sequence
  Description of Artificial Sequence: Synthetic oligonucleotide
accaaugauuuccuuucca

SEQ ID NO: 1727583 - RNA, 19 nt, Artificial Sequence
  Description of Artificial Sequence: Synthetic oligonucleotide
aaguaucggauccuuucuu

SEQ ID NO: 1727584 - RNA, 19 nt, Artificial Sequence
  Description of Artificial Sequence: Synthetic oligonucleotide
uuccauuauggcuuucuua

SEQ ID NO: 1727585 - RNA, 19 nt, Artificial Sequence
  Description of Artificial Sequence: Synthetic oligonucleotide
ucuaggcucuagauccagc

SEQ ID NO: 1727586 - RNA, 19 nt, Artificial Sequence
  Description of Artificial Sequence: Synthetic oligonucleotide
cauuauggcuuucuuaaaa

SEQ ID NO: 1727587 - RNA, 19 nt, Artificial Sequence
  Description of Artificial Sequence: Synthetic oligonucleotide
ugagacucagaugaucauc

SEQ ID NO: 1727588 - RNA, 19 nt, Artificial Sequence
  Description of Artificial Sequence: Synthetic oligonucleotide
augguagcugcuugaaggu

SEQ ID NO: 1727589 - RNA, 19 nt, Artificial Sequence
  Description of Artificial Sequence: Synthetic oligonucleotide
aacuaaacguauagucacu

SEQ ID NO: 1727590 - RNA, 19 nt, Artificial Sequence
  Description of Artificial Sequence: Synthetic oligonucleotide
aaacguauagucacugcua

SEQ ID NO: 1727591 - RNA, 19 nt, Artificial Sequence
  Description of Artificial Sequence: Synthetic oligonucleotide
auucagggaccauucuuca

SEQ ID NO: 1727592 - RNA, 19 nt, Artificial Sequence
  Description of Artificial Sequence: Synthetic oligonucleotide
gugacaucaaaugguuucc

SEQ ID NO: 1727593 - RNA, 19 nt, Artificial Sequence
  Description of Artificial Sequence: Synthetic oligonucleotide
ccagauaucuucauccaac

SEQ ID NO: 1727594 - RNA, 19 nt, Artificial Sequence
  Description of Artificial Sequence: Synthetic oligonucleotide
cuugcuuuugucuuagggu

SEQ ID NO: 1727595 - RNA, 19 nt, Artificial Sequence
  Description of Artificial Sequence: Synthetic oligonucleotide
accaccaaugauuuccuuu

SEQ ID NO: 1727596 - RNA, 19 nt, Artificial Sequence
  Description of Artificial Sequence: Synthetic oligonucleotide
ugucuuaggguagauucuc

SEQ ID NO: 1727597 - RNA, 19 nt, Artificial Sequence
  Description of Artificial Sequence: Synthetic oligonucleotide
uuggacaacuaaacguaua

SEQ ID NO: 1727598 - RNA, 19 nt, Artificial Sequence
  Description of Artificial Sequence: Synthetic oligonucleotide
uaucggauccuuucuuuau

SEQ ID NO: 1727599 - RNA, 19 nt, Artificial Sequence
  Description of Artificial Sequence: Synthetic oligonucleotide
aauuuguguugaucuucaa

SEQ ID NO: 1727600 - RNA, 19 nt, Artificial Sequence
  Description of Artificial Sequence: Synthetic oligonucleotide
ccuuuccaaaguaacgagg

SEQ ID NO: 1727601 - RNA, 19 nt, Artificial Sequence
  Description of Artificial Sequence: Synthetic oligonucleotide
uaucacccacuucccuugg

SEQ ID NO: 1727602 - RNA, 19 nt, Artificial Sequence
  Description of Artificial Sequence: Synthetic oligonucleotide
aaacugcuaacgcuuucuu

SEQ ID NO: 1727603 - RNA, 19 nt, Artificial Sequence
  Description of Artificial Sequence: Synthetic oligonucleotide
auucuugcuuuugucuuag

SEQ ID NO: 1727604 - RNA, 19 nt, Artificial Sequence
  Description of Artificial Sequence: Synthetic oligonucleotide
aguaucggauccuuucuuu

SEQ ID NO: 1727605 - RNA, 19 nt, Artificial Sequence
  Description of Artificial Sequence: Synthetic oligonucleotide
acuuagaugccauccucau

SEQ ID NO: 1727606 - RNA, 19 nt, Artificial Sequence
  Description of Artificial Sequence: Synthetic oligonucleotide
aaguugcuuguaaauauua

SEQ ID NO: 1727607 - RNA, 19 nt, Artificial Sequence
  Description of Artificial Sequence: Synthetic oligonucleotide
uagauccagcauaccacca

SEQ ID NO: 1727608 - RNA, 19 nt, Artificial Sequence
  Description of Artificial Sequence: Synthetic oligonucleotide
uauuugccucuuuuaaguu

SEQ ID NO: 1727609 - RNA, 19 nt, Artificial Sequence
  Description of Artificial Sequence: Synthetic oligonucleotide
ugaucaucaucaggaaagu

SEQ ID NO: 1727610 - RNA, 19 nt, Artificial Sequence
  Description of Artificial Sequence: Synthetic oligonucleotide
gauuuccuaaacaucugaa

SEQ ID NO: 1727611 - RNA, 19 nt, Artificial Sequence
  Description of Artificial Sequence: Synthetic oligonucleotide
gucgccaucugguuuuccc

SEQ ID NO: 1727612 - RNA, 19 nt, Artificial Sequence
  Description of Artificial Sequence: Synthetic oligonucleotide
agauaucuucauccaacau

SEQ ID NO: 1727613 - RNA, 19 nt, Artificial Sequence
  Description of Artificial Sequence: Synthetic oligonucleotide
uucuuauucagggaccauu

SEQ ID NO: 1727614 - RNA, 19 nt, Artificial Sequence
  Description of Artificial Sequence: Synthetic oligonucleotide
guguugaucuucaaugaca

SEQ ID NO: 1727615 - RNA, 19 nt, Artificial Sequence
  Description of Artificial Sequence: Synthetic oligonucleotide
gguugcaacucuuugucuc

SEQ ID NO: 1727616 - RNA, 19 nt, Artificial Sequence
  Description of Artificial Sequence: Synthetic oligonucleotide
cuaaaucauugagacucag

SEQ ID NO: 1727617 - RNA, 19 nt, Artificial Sequence
  Description of Artificial Sequence: Synthetic oligonucleotide
cuuagaugccauccucaug

SEQ ID NO: 1727618 - RNA, 19 nt, Artificial Sequence
  Description of Artificial Sequence: Synthetic oligonucleotide
cagaguauaauggucgcca

SEQ ID NO: 1727619 - RNA, 19 nt, Artificial Sequence
  Description of Artificial Sequence: Synthetic oligonucleotide
gaguauaauggucgccauc

SEQ ID NO: 1727620 - RNA, 19 nt, Artificial Sequence
  Description of Artificial Sequence: Synthetic oligonucleotide
cucaucagagggucuuaag

SEQ ID NO: 1727621 - RNA, 19 nt, Artificial Sequence
  Description of Artificial Sequence: Synthetic oligonucleotide
cuacagcaaaguaaggcaa

SEQ ID NO: 1727622 - RNA, 19 nt, Artificial Sequence
  Description of Artificial Sequence: Synthetic oligonucleotide
cagauaucuucauccaaca

SEQ ID NO: 1727623 - RNA, 19 nt, Artificial Sequence
  Description of Artificial Sequence: Synthetic oligonucleotide
gccaaggcaaaguugcuug

SEQ ID NO: 1727624 - RNA, 19 nt, Artificial Sequence
  Description of Artificial Sequence: Synthetic oligonucleotide
ucuuuuaaguuggguuucu

SEQ ID NO: 1727625 - RNA, 19 nt, Artificial Sequence
  Description of Artificial Sequence: Synthetic oligonucleotide
acgaggaaauuuguguuga

SEQ ID NO: 1727626 - RNA, 19 nt, Artificial Sequence
  Description of Artificial Sequence: Synthetic oligonucleotide
auccucguggguugcaacu

SEQ ID NO: 1727627 - RNA, 19 nt, Artificial Sequence
  Description of Artificial Sequence: Synthetic oligonucleotide
uucccuccgggccaaggca

SEQ ID NO: 1727628 - RNA, 19 nt, Artificial Sequence
  Description of Artificial Sequence: Synthetic oligonucleotide
ucgccaucugguuuuccca

SEQ ID NO: 1727629 - RNA, 19 nt, Artificial Sequence
  Description of Artificial Sequence: Synthetic oligonucleotide
caugaacuuagaugccauc

SEQ ID NO: 1727630 - RNA, 19 nt, Artificial Sequence
  Description of Artificial Sequence: Synthetic oligonucleotide
agacuuucuaauaucuuuu

SEQ ID NO: 1727631 - RNA, 19 nt, Artificial Sequence
  Description of Artificial Sequence: Synthetic oligonucleotide
gcuaacgcuuucuuccucc

SEQ ID NO: 1727632 - RNA, 19 nt, Artificial Sequence
  Description of Artificial Sequence: Synthetic oligonucleotide
gccugagccacuaauguag

SEQ ID NO: 1727633 - RNA, 19 nt, Artificial Sequence
  Description of Artificial Sequence: Synthetic oligonucleotide
cacugagcaaacugcuaac

SEQ ID NO: 1727634 - RNA, 19 nt, Artificial Sequence
  Description of Artificial Sequence: Synthetic oligonucleotide
ucccuuggaagagggauac

SEQ ID NO: 1727635 - RNA, 19 nt, Artificial Sequence
  Description of Artificial Sequence: Synthetic oligonucleotide
uugccucuuuuaaguuggg

SEQ ID NO: 1727636 - RNA, 19 nt, Artificial Sequence
  Description of Artificial Sequence: Synthetic oligonucleotide
aaaaugcaaaggagccuga

SEQ ID NO: 1727637 - RNA, 19 nt, Artificial Sequence
  Description of Artificial Sequence: Synthetic oligonucleotide
agaguauaauggucgccau

SEQ ID NO: 1727638 - RNA, 19 nt, Artificial Sequence
  Description of Artificial Sequence: Synthetic oligonucleotide
agccucugggcacagacuu

SEQ ID NO: 1727639 - RNA, 19 nt, Artificial Sequence
  Description of Artificial Sequence: Synthetic oligonucleotide
acccagaucucuucccugu

SEQ ID NO: 1727640 - RNA, 19 nt, Artificial Sequence
  Description of Artificial Sequence: Synthetic oligonucleotide
ucugugucaugguuucuuu

SEQ ID NO: 1727641 - RNA, 19 nt, Artificial Sequence
  Description of Artificial Sequence: Synthetic oligonucleotide
cacagacuuucuaauaucu

SEQ ID NO: 1727642 - RNA, 19 nt, Artificial Sequence
  Description of Artificial Sequence: Synthetic oligonucleotide
aguugcuuguaaauauuau

SEQ ID NO: 1727643 - RNA, 19 nt, Artificial Sequence
  Description of Artificial Sequence: Synthetic oligonucleotide
guauaauggucgccaucug

SEQ ID NO: 1727644 - RNA, 19 nt, Artificial Sequence
  Description of Artificial Sequence: Synthetic oligonucleotide
ccaccaaugauuuccuuuc

SEQ ID NO: 1727645 - RNA, 19 nt, Artificial Sequence
  Description of Artificial Sequence: Synthetic oligonucleotide
cuugcugugaaaugauagu

SEQ ID NO: 1727646 - RNA, 19 nt, Artificial Sequence
  Description of Artificial Sequence: Synthetic oligonucleotide
uauccucguggguugcaac

SEQ ID NO: 1727647 - RNA, 19 nt, Artificial Sequence
  Description of Artificial Sequence: Synthetic oligonucleotide
ggguuuucgaaaaucaaaa

SEQ ID NO: 1727648 - RNA, 19 nt, Artificial Sequence
  Description of Artificial Sequence: Synthetic oligonucleotide
uggagacaaacaugucauc

SEQ ID NO: 1727649 - RNA, 19 nt, Artificial Sequence
  Description of Artificial Sequence: Synthetic oligonucleotide
augucauccagaguauaau

SEQ ID NO: 1727650 - RNA, 19 nt, Artificial Sequence
  Description of Artificial Sequence: Synthetic oligonucleotide
auggucgccaucugguuuu

SEQ ID NO: 1727651 - RNA, 19 nt, Artificial Sequence
  Description of Artificial Sequence: Synthetic oligonucleotide
gggucuuaagaauuuaggu

SEQ ID NO: 1727652 - RNA, 19 nt, Artificial Sequence
  Description of Artificial Sequence: Synthetic oligonucleotide
ggaugguucaaaauuucuc

SEQ ID NO: 1727653 - RNA, 19 nt, Artificial Sequence
  Description of Artificial Sequence: Synthetic oligonucleotide
uuuugucuuaggguagauu

SEQ ID NO: 1727654 - RNA, 19 nt, Artificial Sequence
  Description of Artificial Sequence: Synthetic oligonucleotide
cuaauaucuuuugaagaua

SEQ ID NO: 1727655 - RNA, 19 nt, Artificial Sequence
  Description of Artificial Sequence: Synthetic oligonucleotide
gguucaaaauuucuccucu

SEQ ID NO: 1727656 - RNA, 19 nt, Artificial Sequence
  Description of Artificial Sequence: Synthetic oligonucleotide
cagaagauucuugcuuuug

SEQ ID NO: 1727657 - RNA, 19 nt, Artificial Sequence
  Description of Artificial Sequence: Synthetic oligonucleotide
agcauaccaccaaugauuu

SEQ ID NO: 1727658 - RNA, 19 nt, Artificial Sequence
  Description of Artificial Sequence: Synthetic oligonucleotide
auacacucauaaaccauau

SEQ ID NO: 1727659 - RNA, 19 nt, Artificial Sequence
  Description of Artificial Sequence: Synthetic oligonucleotide
ugcucuacuccagaucuuu

SEQ ID NO: 1727660 - RNA, 19 nt, Artificial Sequence
  Description of Artificial Sequence: Synthetic oligonucleotide
gggauuuggagacaaacau

SEQ ID NO: 1727661 - RNA, 19 nt, Artificial Sequence
  Description of Artificial Sequence: Synthetic oligonucleotide
uaauggucgccaucugguu

SEQ ID NO: 1727662 - RNA, 19 nt, Artificial Sequence
  Description of Artificial Sequence: Synthetic oligonucleotide
cacucauaaaccauaugau

SEQ ID NO: 1727663 - RNA, 19 nt, Artificial Sequence
  Description of Artificial Sequence: Synthetic oligonucleotide
cucuguggguuuucgaaaa

SEQ ID NO: 1727664 - RNA, 19 nt, Artificial Sequence
  Description of Artificial Sequence: Synthetic oligonucleotide
aaaggagccugagccacua

SEQ ID NO: 1727665 - RNA, 19 nt, Artificial Sequence
  Description of Artificial Sequence: Synthetic oligonucleotide
ugcuaacgcuuucuuccuc

SEQ ID NO: 1727666 - RNA, 19 nt, Artificial Sequence
  Description of Artificial Sequence: Synthetic oligonucleotide
uucagggaccauucuucau

SEQ ID NO: 1727667 - RNA, 19 nt, Artificial Sequence
  Description of Artificial Sequence: Synthetic oligonucleotide
uuuauccucguggguugca

SEQ ID NO: 1727668 - RNA, 19 nt, Artificial Sequence
  Description of Artificial Sequence: Synthetic oligonucleotide
cuuuauccucguggguugc

SEQ ID NO: 1727669 - RNA, 19 nt, Artificial Sequence
  Description of Artificial Sequence: Synthetic oligonucleotide
guaucggauccuuucuuua

SEQ ID NO: 1727670 - RNA, 19 nt, Artificial Sequence
  Description of Artificial Sequence: Synthetic oligonucleotide
uuauccucguggguugcaa

SEQ ID NO: 1727671 - RNA, 19 nt, Artificial Sequence
  Description of Artificial Sequence: Synthetic oligonucleotide
guugcaacucuuugucucu

SEQ ID NO: 1727672 - RNA, 19 nt, Artificial Sequence
  Description of Artificial Sequence: Synthetic oligonucleotide
ugcugauaucugugucaug

SEQ ID NO: 1727673 - RNA, 19 nt, Artificial Sequence
  Description of Artificial Sequence: Synthetic oligonucleotide
guuuugaucaauaccuguu

SEQ ID NO: 1727674 - RNA, 19 nt, Artificial Sequence
  Description of Artificial Sequence: Synthetic oligonucleotide
auaccaccaaugauuuccu

SEQ ID NO: 1727675 - RNA, 19 nt, Artificial Sequence
  Description of Artificial Sequence: Synthetic oligonucleotide
agccugagccacuaaugua

SEQ ID NO: 1727676 - RNA, 19 nt, Artificial Sequence
  Description of Artificial Sequence: Synthetic oligonucleotide
ugccucuuuuaaguugggu

SEQ ID NO: 1727677 - RNA, 19 nt, Artificial Sequence
  Description of Artificial Sequence: Synthetic oligonucleotide
ucccuccgggccaaggcaa

SEQ ID NO: 1727678 - RNA, 19 nt, Artificial Sequence
  Description of Artificial Sequence: Synthetic oligonucleotide
ggagccugagccacuaaug

SEQ ID NO: 1727679 - RNA, 19 nt, Artificial Sequence
  Description of Artificial Sequence: Synthetic oligonucleotide
gugucaugguuucuuuaaa

SEQ ID NO: 1727680 - RNA, 19 nt, Artificial Sequence
  Description of Artificial Sequence: Synthetic oligonucleotide
agacucagaugaucaucau

SEQ ID NO: 1727681 - RNA, 19 nt, Artificial Sequence
  Description of Artificial Sequence: Synthetic oligonucleotide
gauccagcauaccaccaau

SEQ ID NO: 1727682 - RNA, 19 nt, Artificial Sequence
  Description of Artificial Sequence: Synthetic oligonucleotide
guggguugcaacucuuugu

SEQ ID NO: 1727683 - RNA, 19 nt, Artificial Sequence
  Description of Artificial Sequence: Synthetic oligonucleotide
aggaaaguaucggauccuu

SEQ ID NO: 1727684 - RNA, 19 nt, Artificial Sequence
  Description of Artificial Sequence: Synthetic oligonucleotide
gucuaggcucuagauccag

SEQ ID NO: 1727685 - RNA, 19 nt, Artificial Sequence
  Description of Artificial Sequence: Synthetic oligonucleotide
cuuuaccaaggauuuccua

SEQ ID NO: 1727686 - RNA, 19 nt, Artificial Sequence
  Description of Artificial Sequence: Synthetic oligonucleotide
gccauccucaugaaaaguc

SEQ ID NO: 1727687 - RNA, 19 nt, Artificial Sequence
  Description of Artificial Sequence: Synthetic oligonucleotide
cuuucccuccgggccaagg

SEQ ID NO: 1727688 - RNA, 19 nt, Artificial Sequence
  Description of Artificial Sequence: Synthetic oligonucleotide
ugcaacucuuugucucuuu

SEQ ID NO: 1727689 - RNA, 19 nt, Artificial Sequence
  Description of Artificial Sequence: Synthetic oligonucleotide
acagacuuucuaauaucuu

SEQ ID NO: 1727690 - RNA, 19 nt, Artificial Sequence
  Description of Artificial Sequence: Synthetic oligonucleotide
ugcccauauuagacucuaa

SEQ ID NO: 1727691 - RNA, 19 nt, Artificial Sequence
  Description of Artificial Sequence: Synthetic oligonucleotide
ucguggguugcaacucuuu

SEQ ID NO: 1727692 - RNA, 19 nt, Artificial Sequence
  Description of Artificial Sequence: Synthetic oligonucleotide
gaaucucuucccagauauc

SEQ ID NO: 1727693 - RNA, 19 nt, Artificial Sequence
  Description of Artificial Sequence: Synthetic oligonucleotide
uccucguggguugcaacuc

SEQ ID NO: 1727694 - RNA, 19 nt, Artificial Sequence
  Description of Artificial Sequence: Synthetic oligonucleotide
cauaucacccacuucccuu

SEQ ID NO: 1727695 - RNA, 19 nt, Artificial Sequence
  Description of Artificial Sequence: Synthetic oligonucleotide
ggcacagacuuucuaauau

SEQ ID NO: 1727696 - RNA, 19 nt, Artificial Sequence
  Description of Artificial Sequence: Synthetic oligonucleotide
gagccauaucacccacuuc

SEQ ID NO: 1727697 - RNA, 19 nt, Artificial Sequence
  Description of Artificial Sequence: Synthetic oligonucleotide
agacacaauccaauccuuu

SEQ ID NO: 1727698 - RNA, 19 nt, Artificial Sequence
  Description of Artificial Sequence: Synthetic oligonucleotide
ccaaggauuuccuaaacau

SEQ ID NO: 1727699 - RNA, 19 nt, Artificial Sequence
  Description of Artificial Sequence: Synthetic oligonucleotide
gguuuucgaaaaucaaaau

SEQ ID NO: 1727700 - RNA, 19 nt, Artificial Sequence
  Description of Artificial Sequence: Synthetic oligonucleotide
agagggucuuaagaauuua

SEQ ID NO: 1727701 - RNA, 19 nt, Artificial Sequence
  Description of Artificial Sequence: Synthetic oligonucleotide
agauuccauuauggcuuuc

SEQ ID NO: 1727702 - RNA, 19 nt, Artificial Sequence
  Description of Artificial Sequence: Synthetic oligonucleotide
cuuauucagggaccauucu

SEQ ID NO: 1727703 - RNA, 19 nt, Artificial Sequence
  Description of Artificial Sequence: Synthetic oligonucleotide
auccucaucagagggucuu

SEQ ID NO: 1727704 - RNA, 19 nt, Artificial Sequence
  Description of Artificial Sequence: Synthetic oligonucleotide
cuaaagacccagaucucuu

SEQ ID NO: 1727705 - RNA, 19 nt, Artificial Sequence
  Description of Artificial Sequence: Synthetic oligonucleotide
aggugcugcagagggauuu

SEQ ID NO: 1727706 - RNA, 19 nt, Artificial Sequence
  Description of Artificial Sequence: Synthetic oligonucleotide
augcccauauuagacucua

SEQ ID NO: 1727707 - RNA, 19 nt, Artificial Sequence
  Description of Artificial Sequence: Synthetic oligonucleotide
aaggagccugagccacuaa

SEQ ID NO: 1727708 - RNA, 19 nt, Artificial Sequence
  Description of Artificial Sequence: Synthetic oligonucleotide
guuggguuucuucacuguu

SEQ ID NO: 1727709 - RNA, 19 nt, Artificial Sequence
  Description of Artificial Sequence: Synthetic oligonucleotide
cucuugcugugaaaugaua

SEQ ID NO: 1727710 - RNA, 19 nt, Artificial Sequence
  Description of Artificial Sequence: Synthetic oligonucleotide
ccagaguauaauggucgcc

SEQ ID NO: 1727711 - RNA, 19 nt, Artificial Sequence
  Description of Artificial Sequence: Synthetic oligonucleotide
gccucuuuuaaguuggguu

SEQ ID NO: 1727712 - RNA, 19 nt, Artificial Sequence
  Description of Artificial Sequence: Synthetic oligonucleotide
cugugucaugguuucuuua

SEQ ID NO: 1727713 - RNA, 19 nt, Artificial Sequence
  Description of Artificial Sequence: Synthetic oligonucleotide
caccacugagcaaacugcu

SEQ ID NO: 1727714 - RNA, 19 nt, Artificial Sequence
  Description of Artificial Sequence: Synthetic oligonucleotide
agucuaggcucuagaucca

SEQ ID NO: 1727715 - RNA, 19 nt, Artificial Sequence
  Description of Artificial Sequence: Synthetic oligonucleotide
agcaaacugcuaacgcuuu

SEQ ID NO: 1727716 - RNA, 19 nt, Artificial Sequence
  Description of Artificial Sequence: Synthetic oligonucleotide
agccacuaauguagaagaa

SEQ ID NO: 1727717 - RNA, 19 nt, Artificial Sequence
  Description of Artificial Sequence: Synthetic oligonucleotide
ggaccauucuucaucagau

SEQ ID NO: 1727718 - RNA, 19 nt, Artificial Sequence
  Description of Artificial Sequence: Synthetic oligonucleotide
cugauaucugugucauggu

SEQ ID NO: 1727719 - RNA, 19 nt, Artificial Sequence
  Description of Artificial Sequence: Synthetic oligonucleotide
gcaaacugcuaacgcuuuc

SEQ ID NO: 1727720 - RNA, 19 nt, Artificial Sequence
  Description of Artificial Sequence: Synthetic oligonucleotide
cccacuucccuuggaagag

SEQ ID NO: 1727721 - RNA, 19 nt, Artificial Sequence
  Description of Artificial Sequence: Synthetic oligonucleotide
gaagagggauacacucaua

SEQ ID NO: 1727722 - RNA, 19 nt, Artificial Sequence
  Description of Artificial Sequence: Synthetic oligonucleotide
cugaugcccuuccuccaca

SEQ ID NO: 1727723 - RNA, 19 nt, Artificial Sequence
  Description of Artificial Sequence: Synthetic oligonucleotide
augacacaugcaggauaca

SEQ ID NO: 1727724 - RNA, 19 nt, Artificial Sequence
  Description of Artificial Sequence: Synthetic oligonucleotide
caugcccauauuagacucu

SEQ ID NO: 1727725 - RNA, 19 nt, Artificial Sequence
  Description of Artificial Sequence: Synthetic oligonucleotide
cguggguugcaacucuuug

SEQ ID NO: 1727726 - RNA, 19 nt, Artificial Sequence
  Description of Artificial Sequence: Synthetic oligonucleotide
cuaacgcuuucuuccuccu

SEQ ID NO: 1727727 - RNA, 19 nt, Artificial Sequence
  Description of Artificial Sequence: Synthetic oligonucleotide
ggagccauaucacccacuu

SEQ ID NO: 1727728 - RNA, 19 nt, Artificial Sequence
  Description of Artificial Sequence: Synthetic oligonucleotide
cacaugcaggauacacuua

SEQ ID NO: 1727729 - RNA, 19 nt, Artificial Sequence
  Description of Artificial Sequence: Synthetic oligonucleotide
cugcuaacgcuuucuuccu

SEQ ID NO: 1727730 - RNA, 19 nt, Artificial Sequence
  Description of Artificial Sequence: Synthetic oligonucleotide
caucugguuuucccaugaa

SEQ ID NO: 1727731 - RNA, 19 nt, Artificial Sequence
  Description of Artificial Sequence: Synthetic oligonucleotide
ugcuuucccuccgggccaa

SEQ ID NO: 1727732 - RNA, 19 nt, Artificial Sequence
  Description of Artificial Sequence: Synthetic oligonucleotide
ggacaacuaaacguauagu

SEQ ID NO: 1727733 - RNA, 19 nt, Artificial Sequence
  Description of Artificial Sequence: Synthetic oligonucleotide
agagggauuuggagacaaa

SEQ ID NO: 1727734 - RNA, 19 nt, Artificial Sequence
  Description of Artificial Sequence: Synthetic oligonucleotide
gucuuaggguagauucucu

SEQ ID NO: 1727735 - RNA, 19 nt, Artificial Sequence
  Description of Artificial Sequence: Synthetic oligonucleotide
aggauacacuuaacagcuu

SEQ ID NO: 1727736 - RNA, 19 nt, Artificial Sequence
  Description of Artificial Sequence: Synthetic oligonucleotide
gggguguucacaggccaca

SEQ ID NO: 1727737 - RNA, 19 nt, Artificial Sequence
  Description of Artificial Sequence: Synthetic oligonucleotide
caggaaaguaucggauccu

SEQ ID NO: 1727738 - RNA, 19 nt, Artificial Sequence
  Description of Artificial Sequence: Synthetic oligonucleotide
cccagauaucuucauccaa

SEQ ID NO: 1727739 - RNA, 19 nt, Artificial Sequence
  Description of Artificial Sequence: Synthetic oligonucleotide
ccauuauggcuuucuuaaa

SEQ ID NO: 1727740 - RNA, 19 nt, Artificial Sequence
  Description of Artificial Sequence: Synthetic oligonucleotide
gcucuagauccagcauacc

SEQ ID NO: 1727741 - RNA, 19 nt, Artificial Sequence
  Description of Artificial Sequence: Synthetic oligonucleotide
ggguugcaacucuuugucu

SEQ ID NO: 1727742 - RNA, 19 nt, Artificial Sequence
  Description of Artificial Sequence: Synthetic oligonucleotide
ccacagucuaggcucuaga

SEQ ID NO: 1727743 - RNA, 19 nt, Artificial Sequence
  Description of Artificial Sequence: Synthetic oligonucleotide
uggucgccaucugguuuuc

SEQ ID NO: 1727744 - RNA, 19 nt, Artificial Sequence
  Description of Artificial Sequence: Synthetic oligonucleotide
cacauucuuccagacucau

SEQ ID NO: 1727745 - RNA, 19 nt, Artificial Sequence
  Description of Artificial Sequence: Synthetic oligonucleotide
cagacucaucuguucuaau

SEQ ID NO: 1727746 - RNA, 19 nt, Artificial Sequence
  Description of Artificial Sequence: Synthetic oligonucleotide
caauaccuguucccauuuu

SEQ ID NO: 1727747 - RNA, 19 nt, Artificial Sequence
  Description of Artificial Sequence: Synthetic oligonucleotide
ccucaaagcuuucucugau

SEQ ID NO: 1727748 - RNA, 19 nt, Artificial Sequence
  Description of Artificial Sequence: Synthetic oligonucleotide
ggaaaguaucggauccuuu

SEQ ID NO: 1727749 - RNA, 19 nt, Artificial Sequence
  Description of Artificial Sequence: Synthetic oligonucleotide
cucguggguugcaacucuu

SEQ ID NO: 1727750 - RNA, 19 nt, Artificial Sequence
  Description of Artificial Sequence: Synthetic oligonucleotide
ggucgccaucugguuuucc

SEQ ID NO: 1727751 - RNA, 19 nt, Artificial Sequence
  Description of Artificial Sequence: Synthetic oligonucleotide
cuucuuauucagggaccau

SEQ ID NO: 1727752 - RNA, 19 nt, Artificial Sequence
  Description of Artificial Sequence: Synthetic oligonucleotide
cuccgggccaaggcaaagu

SEQ ID NO: 1727753 - RNA, 19 nt, Artificial Sequence
  Description of Artificial Sequence: Synthetic oligonucleotide
ccucaucagagggucuuaa

SEQ ID NO: 1727754 - RNA, 19 nt, Artificial Sequence
  Description of Artificial Sequence: Synthetic oligonucleotide
ccauaugauaaugcuucuu

SEQ ID NO: 1727755 - RNA, 19 nt, Artificial Sequence
  Description of Artificial Sequence: Synthetic oligonucleotide
ccucguggguugcaacucu

SEQ ID NO: 1727756 - RNA, 19 nt, Artificial Sequence
  Description of Artificial Sequence: Synthetic oligonucleotide
gggagccauaucacccacu

SEQ ID NO: 1727757 - RNA, 19 nt, Artificial Sequence
  Description of Artificial Sequence: Synthetic oligonucleotide
gcucuacuccagaucuuuu

SEQ ID NO: 1727758 - RNA, 19 nt, Artificial Sequence
  Description of Artificial Sequence: Synthetic oligonucleotide
cgaggaaauuuguguugau

SEQ ID NO: 1727759 - RNA, 19 nt, Artificial Sequence
  Description of Artificial Sequence: Synthetic oligonucleotide
cccuuggaagagggauaca

SEQ ID NO: 1727760 - RNA, 19 nt, Artificial Sequence
  Description of Artificial Sequence: Synthetic oligonucleotide
aaaucuucccgcuuuaggc

SEQ ID NO: 1727761 - RNA, 19 nt, Artificial Sequence
  Description of Artificial Sequence: Synthetic oligonucleotide
gaauaaacugacucuaugg

SEQ ID NO: 1727762 - RNA, 19 nt, Artificial Sequence
  Description of Artificial Sequence: Synthetic oligonucleotide
uuuauauccaaacucggug

SEQ ID NO: 1727763 - RNA, 19 nt, Artificial Sequence
  Description of Artificial Sequence: Synthetic oligonucleotide
aaucuucccgcuuuaggcc

SEQ ID NO: 1727764 - RNA, 19 nt, Artificial Sequence
  Description of Artificial Sequence: Synthetic oligonucleotide
uauucuuaacauaaucugc

SEQ ID NO: 1727765 - RNA, 19 nt, Artificial Sequence
  Description of Artificial Sequence: Synthetic oligonucleotide
auauucuuaacauaaucug

SEQ ID NO: 1727766 - RNA, 19 nt, Artificial Sequence
  Description of Artificial Sequence: Synthetic oligonucleotide
gaugcagccauccagcggg

SEQ ID NO: 1727767 - RNA, 19 nt, Artificial Sequence
  Description of Artificial Sequence: Synthetic oligonucleotide
aacauaaucugcaugacca

SEQ ID NO: 1727768 - RNA, 19 nt, Artificial Sequence
  Description of Artificial Sequence: Synthetic oligonucleotide
uaaacugacucuaugggga

SEQ ID NO: 1727769 - RNA, 19 nt, Artificial Sequence
  Description of Artificial Sequence: Synthetic oligonucleotide
gaggauguaaaccugggcc

SEQ ID NO: 1727770 - RNA, 19 nt, Artificial Sequence
  Description of Artificial Sequence: Synthetic oligonucleotide
aaucuguuuagccaguagu

SEQ ID NO: 1727771 - RNA, 19 nt, Artificial Sequence
  Description of Artificial Sequence: Synthetic oligonucleotide
ugagcuuuaaauccucucc

SEQ ID NO: 1727772 - RNA, 19 nt, Artificial Sequence
  Description of Artificial Sequence: Synthetic oligonucleotide
cuuuaaauccucuccaggc

SEQ ID NO: 1727773 - RNA, 19 nt, Artificial Sequence
  Description of Artificial Sequence: Synthetic oligonucleotide
uugaccaugaccaagccuc

SEQ ID NO: 1727774 - RNA, 19 nt, Artificial Sequence
  Description of Artificial Sequence: Synthetic oligonucleotide
auacaaaugguuuguggcg

SEQ ID NO: 1727775 - RNA, 19 nt, Artificial Sequence
  Description of Artificial Sequence: Synthetic oligonucleotide
ugaacuuagcuccaccucc

SEQ ID NO: 1727776 - RNA, 19 nt, Artificial Sequence
  Description of Artificial Sequence: Synthetic oligonucleotide
uuagccaguaguaagugcu

SEQ ID NO: 1727777 - RNA, 19 nt, Artificial Sequence
  Description of Artificial Sequence: Synthetic oligonucleotide
agaauuuucgugauggccg

SEQ ID NO: 1727778 - RNA, 19 nt, Artificial Sequence
  Description of Artificial Sequence: Synthetic oligonucleotide
ugcucaagggcgcagagag

SEQ ID NO: 1727779 - RNA, 19 nt, Artificial Sequence
  Description of Artificial Sequence: Synthetic oligonucleotide
aggaauagaauaaacugac

SEQ ID NO: 1727780 - RNA, 19 nt, Artificial Sequence
  Description of Artificial Sequence: Synthetic oligonucleotide
ugguaugucaaugacaaca

SEQ ID NO: 1727781 - RNA, 19 nt, Artificial Sequence
  Description of Artificial Sequence: Synthetic oligonucleotide
ucuuaacauaaucugcaug

SEQ ID NO: 1727782 - RNA, 19 nt, Artificial Sequence
  Description of Artificial Sequence: Synthetic oligonucleotide
uuuaaauccucuccaggca

SEQ ID NO: 1727783 - RNA, 19 nt, Artificial Sequence
  Description of Artificial Sequence: Synthetic oligonucleotide
uuauauccaaacucgguga

SEQ ID NO: 1727784 - RNA, 19 nt, Artificial Sequence
  Description of Artificial Sequence: Synthetic oligonucleotide
ucggcuagaauuuucguga

SEQ ID NO: 1727785 - RNA, 19 nt, Artificial Sequence
  Description of Artificial Sequence: Synthetic oligonucleotide
uaacauaaucugcaugacc

SEQ ID NO: 1727786 - RNA, 19 nt, Artificial Sequence
  Description of Artificial Sequence: Synthetic oligonucleotide
uucuguacugacuucacac

SEQ ID NO: 1727787 - RNA, 19 nt, Artificial Sequence
  Description of Artificial Sequence: Synthetic oligonucleotide
caggcauaaaaugagauac

SEQ ID NO: 1727788 - RNA, 19 nt, Artificial Sequence
  Description of Artificial Sequence: Synthetic oligonucleotide
uguuuagccaguaguaagu

SEQ ID NO: 1727789 - RNA, 19 nt, Artificial Sequence
  Description of Artificial Sequence: Synthetic oligonucleotide
gacacgacaggccaugucc

SEQ ID NO: 1727790 - RNA, 19 nt, Artificial Sequence
  Description of Artificial Sequence: Synthetic oligonucleotide
uuggugaggauguaaaccu

SEQ ID NO: 1727791 - RNA, 19 nt, Artificial Sequence
  Description of Artificial Sequence: Synthetic oligonucleotide
aaugguuuguggcggccac

SEQ ID NO: 1727792 - RNA, 19 nt, Artificial Sequence
  Description of Artificial Sequence: Synthetic oligonucleotide
ugcuauacuccacaugagc

SEQ ID NO: 1727793 - RNA, 19 nt, Artificial Sequence
  Description of Artificial Sequence: Synthetic oligonucleotide
ucaacaaccugagaagucc

SEQ ID NO: 1727794 - RNA, 19 nt, Artificial Sequence
  Description of Artificial Sequence: Synthetic oligonucleotide
agaauaaacugacucuaug

SEQ ID NO: 1727795 - RNA, 19 nt, Artificial Sequence
  Description of Artificial Sequence: Synthetic oligonucleotide
aaugccacgcucuagugua

SEQ ID NO: 1727796 - RNA, 19 nt, Artificial Sequence
  Description of Artificial Sequence: Synthetic oligonucleotide
uacaaaugguuuguggcgg

SEQ ID NO: 1727797 - RNA, 19 nt, Artificial Sequence
  Description of Artificial Sequence: Synthetic oligonucleotide
ucuaguguaccugucacca

SEQ ID NO: 1727798 - RNA, 19 nt, Artificial Sequence
  Description of Artificial Sequence: Synthetic oligonucleotide
ggaacgauggccaagguag

SEQ ID NO: 1727799 - RNA, 19 nt, Artificial Sequence
  Description of Artificial Sequence: Synthetic oligonucleotide
agcccuaagcucaacaacc

SEQ ID NO: 1727800 - RNA, 19 nt, Artificial Sequence
  Description of Artificial Sequence: Synthetic oligonucleotide
uagaauuuucgugauggcc

SEQ ID NO: 1727801 - RNA, 19 nt, Artificial Sequence
  Description of Artificial Sequence: Synthetic oligonucleotide
acaugacaggcauaaaaug

SEQ ID NO: 1727802 - RNA, 19 nt, Artificial Sequence
  Description of Artificial Sequence: Synthetic oligonucleotide
aacaugcucuaccccaauc

SEQ ID NO: 1727803 - RNA, 19 nt, Artificial Sequence
  Description of Artificial Sequence: Synthetic oligonucleotide
uucacguacaccacaacau

SEQ ID NO: 1727804 - RNA, 19 nt, Artificial Sequence
  Description of Artificial Sequence: Synthetic oligonucleotide
gagagcagagccuacgaug

SEQ ID NO: 1727805 - RNA, 19 nt, Artificial Sequence
  Description of Artificial Sequence: Synthetic oligonucleotide
auguccuagcaacucacac

SEQ ID NO: 1727806 - RNA, 19 nt, Artificial Sequence
  Description of Artificial Sequence: Synthetic oligonucleotide
ucguacuucuugaacuuag

SEQ ID NO: 1727807 - RNA, 19 nt, Artificial Sequence
  Description of Artificial Sequence: Synthetic oligonucleotide
uugucuaucuccucguacu

SEQ ID NO: 1727808 - RNA, 19 nt, Artificial Sequence
  Description of Artificial Sequence: Synthetic oligonucleotide
agagcacccagguuauccc

SEQ ID NO: 1727809 - RNA, 19 nt, Artificial Sequence
  Description of Artificial Sequence: Synthetic oligonucleotide
gaacaugacaggcauaaaa

SEQ ID NO: 1727810 - RNA, 19 nt, Artificial Sequence
  Description of Artificial Sequence: Synthetic oligonucleotide
caagaugacacgacaggcc

SEQ ID NO: 1727811 - RNA, 19 nt, Artificial Sequence
  Description of Artificial Sequence: Synthetic oligonucleotide
aucccucaaagugaaacgc

SEQ ID NO: 1727812 - RNA, 19 nt, Artificial Sequence
  Description of Artificial Sequence: Synthetic oligonucleotide
aauguucuuguuauguccu

SEQ ID NO: 1727813 - RNA, 19 nt, Artificial Sequence
  Description of Artificial Sequence: Synthetic oligonucleotide
auaaucugcaugaccaggg

SEQ ID NO: 1727814 - RNA, 19 nt, Artificial Sequence
  Description of Artificial Sequence: Synthetic oligonucleotide
accaugaccaagccucgcc

SEQ ID NO: 1727815 - RNA, 19 nt, Artificial Sequence
  Description of Artificial Sequence: Synthetic oligonucleotide
ucacguacaccacaacaug

SEQ ID NO: 1727816 - RNA, 19 nt, Artificial Sequence
  Description of Artificial Sequence: Synthetic oligonucleotide
gucacguugcucaagggcg

SEQ ID NO: 1727817 - RNA, 19 nt, Artificial Sequence
  Description of Artificial Sequence: Synthetic oligonucleotide
cuaagcucaacaaccugag

SEQ ID NO: 1727818 - RNA, 19 nt, Artificial Sequence
  Description of Artificial Sequence: Synthetic oligonucleotide
ucauuagcugccaccacca

SEQ ID NO: 1727819 - RNA, 19 nt, Artificial Sequence
  Description of Artificial Sequence: Synthetic oligonucleotide
cauugauggugauaccccg

SEQ ID NO: 1727820 - RNA, 19 nt, Artificial Sequence
  Description of Artificial Sequence: Synthetic oligonucleotide
aacgauggccaagguagcc

SEQ ID NO: 1727821 - RNA, 19 nt, Artificial Sequence
  Description of Artificial Sequence: Synthetic oligonucleotide
uuuugagugcagcuugugu

SEQ ID NO: 1727822 - RNA, 19 nt, Artificial Sequence
  Description of Artificial Sequence: Synthetic oligonucleotide
cuguuuagccaguaguaag

SEQ ID NO: 1727823 - RNA, 19 nt, Artificial Sequence
  Description of Artificial Sequence: Synthetic oligonucleotide
ugugugggcauagugucgg

SEQ ID NO: 1727824 - RNA, 19 nt, Artificial Sequence
  Description of Artificial Sequence: Synthetic oligonucleotide
ccaggaauagaauaaacug

SEQ ID NO: 1727825 - RNA, 19 nt, Artificial Sequence
  Description of Artificial Sequence: Synthetic oligonucleotide
uuauguccuagcaacucac

SEQ ID NO: 1727826 - RNA, 19 nt, Artificial Sequence
  Description of Artificial Sequence: Synthetic oligonucleotide
uuuagccaguaguaagugc

SEQ ID NO: 1727827 - RNA, 19 nt, Artificial Sequence
  Description of Artificial Sequence: Synthetic oligonucleotide
ugugcgaauguucuuguua

SEQ ID NO: 1727828 - RNA, 19 nt, Artificial Sequence
  Description of Artificial Sequence: Synthetic oligonucleotide
gaauuuucgugauggccgc

SEQ ID NO: 1727829 - RNA, 19 nt, Artificial Sequence
  Description of Artificial Sequence: Synthetic oligonucleotide
caugucccaagucagggag

SEQ ID NO: 1727830 - RNA, 19 nt, Artificial Sequence
  Description of Artificial Sequence: Synthetic oligonucleotide
ugaggauguaaaccugggc

SEQ ID NO: 1727831 - RNA, 19 nt, Artificial Sequence
  Description of Artificial Sequence: Synthetic oligonucleotide
uggugauaccccgagcucg

SEQ ID NO: 1727832 - RNA, 19 nt, Artificial Sequence
  Description of Artificial Sequence: Synthetic oligonucleotide
cucgccucaaaucuucccg

SEQ ID NO: 1727833 - RNA, 19 nt, Artificial Sequence
  Description of Artificial Sequence: Synthetic oligonucleotide
uguccuagcaacucacacu

SEQ ID NO: 1727834 - RNA, 19 nt, Artificial Sequence
  Description of Artificial Sequence: Synthetic oligonucleotide
gucauuagcugccaccacc

SEQ ID NO: 1727835 - RNA, 19 nt, Artificial Sequence
  Description of Artificial Sequence: Synthetic oligonucleotide
cauaaucugcaugaccagg

SEQ ID NO: 1727836 - RNA, 19 nt, Artificial Sequence
  Description of Artificial Sequence: Synthetic oligonucleotide
agcuuuaaauccucuccag

SEQ ID NO: 1727837 - RNA, 19 nt, Artificial Sequence
  Description of Artificial Sequence: Synthetic oligonucleotide
acaugcucuaccccaaucu

SEQ ID NO: 1727838 - RNA, 19 nt, Artificial Sequence
  Description of Artificial Sequence: Synthetic oligonucleotide
cacguacaccacaacaugc

SEQ ID NO: 1727839 - RNA, 19 nt, Artificial Sequence
  Description of Artificial Sequence: Synthetic oligonucleotide
agggucacguugcucaagg

SEQ ID NO: 1727840 - RNA, 19 nt, Artificial Sequence
  Description of Artificial Sequence: Synthetic oligonucleotide
ugacaggcauaaaaugaga

SEQ ID NO: 1727841 - RNA, 19 nt, Artificial Sequence
  Description of Artificial Sequence: Synthetic oligonucleotide
agagccuacgaugacuggg

SEQ ID NO: 1727842 - RNA, 19 nt, Artificial Sequence
  Description of Artificial Sequence: Synthetic oligonucleotide
uguucuuguuauguccuag

SEQ ID NO: 1727843 - RNA, 19 nt, Artificial Sequence
  Description of Artificial Sequence: Synthetic oligonucleotide
aguaagugcucucgggucu

SEQ ID NO: 1727844 - RNA, 19 nt, Artificial Sequence
  Description of Artificial Sequence: Synthetic oligonucleotide
gauggugauaccccgagcu

SEQ ID NO: 1727845 - RNA, 19 nt, Artificial Sequence
  Description of Artificial Sequence: Synthetic oligonucleotide
guccuagcaacucacacuc

SEQ ID NO: 1727846 - RNA, 19 nt, Artificial Sequence
  Description of Artificial Sequence: Synthetic oligonucleotide
cucggcuagaauuuucgug

SEQ ID NO: 1727847 - RNA, 19 nt, Artificial Sequence
  Description of Artificial Sequence: Synthetic oligonucleotide
gagcuuuaaauccucucca

SEQ ID NO: 1727848 - RNA, 19 nt, Artificial Sequence
  Description of Artificial Sequence: Synthetic oligonucleotide
uaccccaaucuguuuagcc

SEQ ID NO: 1727849 - RNA, 19 nt, Artificial Sequence
  Description of Artificial Sequence: Synthetic oligonucleotide
aacugacucuauggggagc

SEQ ID NO: 1727850 - RNA, 19 nt, Artificial Sequence
  Description of Artificial Sequence: Synthetic oligonucleotide
guucacguacaccacaaca

SEQ ID NO: 1727851 - RNA, 19 nt, Artificial Sequence
  Description of Artificial Sequence: Synthetic oligonucleotide
ugccgcaaaacuaggcuga

SEQ ID NO: 1727852 - RNA, 19 nt, Artificial Sequence
  Description of Artificial Sequence: Synthetic oligonucleotide
auauccaaacucggugagc

SEQ ID NO: 1727853 - RNA, 19 nt, Artificial Sequence
  Description of Artificial Sequence: Synthetic oligonucleotide
uuaacauaaucugcaugac

SEQ ID NO: 1727854 - RNA, 19 nt, Artificial Sequence
  Description of Artificial Sequence: Synthetic oligonucleotide
ugaccaugaccaagccucg

SEQ ID NO: 1727855 - RNA, 19 nt, Artificial Sequence
  Description of Artificial Sequence: Synthetic oligonucleotide
agcagugcuauacuccaca

SEQ ID NO: 1727856 - RNA, 19 nt, Artificial Sequence
  Description of Artificial Sequence: Synthetic oligonucleotide
cacuauugugcgaauguuc

SEQ ID NO: 1727857 - RNA, 19 nt, Artificial Sequence
  Description of Artificial Sequence: Synthetic oligonucleotide
uuguucacguacaccacaa

SEQ ID NO: 1727858 - RNA, 19 nt, Artificial Sequence
  Description of Artificial Sequence: Synthetic oligonucleotide
ucuguuuagccaguaguaa

SEQ ID NO: 1727859 - RNA, 19 nt, Artificial Sequence
  Description of Artificial Sequence: Synthetic oligonucleotide
aacucggugagcagcucac

SEQ ID NO: 1727860 - RNA, 19 nt, Artificial Sequence
  Description of Artificial Sequence: Synthetic oligonucleotide
uucgugauggccgcgguca

SEQ ID NO: 1727861 - RNA, 19 nt, Artificial Sequence
  Description of Artificial Sequence: Synthetic oligonucleotide
uagcccuaagcucaacaac

SEQ ID NO: 1727862 - RNA, 19 nt, Artificial Sequence
  Description of Artificial Sequence: Synthetic oligonucleotide
acgauggccaagguagccc

SEQ ID NO: 1727863 - RNA, 19 nt, Artificial Sequence
  Description of Artificial Sequence: Synthetic oligonucleotide
augagcugcauugauggug

SEQ ID NO: 1727864 - RNA, 19 nt, Artificial Sequence
  Description of Artificial Sequence: Synthetic oligonucleotide
guuauguccuagcaacuca

SEQ ID NO: 1727865 - RNA, 19 nt, Artificial Sequence
  Description of Artificial Sequence: Synthetic oligonucleotide
cacaacaugcucuacccca

SEQ ID NO: 1727866 - RNA, 19 nt, Artificial Sequence
  Description of Artificial Sequence: Synthetic oligonucleotide
uauguccuagcaacucaca

SEQ ID NO: 1727867 - RNA, 19 nt, Artificial Sequence
  Description of Artificial Sequence: Synthetic oligonucleotide
gauggagccuggcuugacc

SEQ ID NO: 1727868 - RNA, 19 nt, Artificial Sequence
  Description of Artificial Sequence: Synthetic oligonucleotide
auggcugguaugucaauga

SEQ ID NO: 1727869 - RNA, 19 nt, Artificial Sequence
  Description of Artificial Sequence: Synthetic oligonucleotide
auuuucgugauggccgcgg

SEQ ID NO: 1727870 - RNA, 19 nt, Artificial Sequence
  Description of Artificial Sequence: Synthetic oligonucleotide
caccacaacaugcucuacc

SEQ ID NO: 1727871 - RNA, 19 nt, Artificial Sequence
  Description of Artificial Sequence: Synthetic oligonucleotide
acaggcauaaaaugagaua

SEQ ID NO: 1727872 - RNA, 19 nt, Artificial Sequence
  Description of Artificial Sequence: Synthetic oligonucleotide
gagccuacgaugacugggg

SEQ ID NO: 1727873 - RNA, 19 nt, Artificial Sequence
  Description of Artificial Sequence: Synthetic oligonucleotide
cuucuucaaaaugccacgc

SEQ ID NO: 1727874 - RNA, 19 nt, Artificial Sequence
  Description of Artificial Sequence: Synthetic oligonucleotide
auggugauaccccgagcuc

SEQ ID NO: 1727875 - RNA, 19 nt, Artificial Sequence
  Description of Artificial Sequence: Synthetic oligonucleotide
ucccucaaagugaaacgcu

SEQ ID NO: 1727876 - RNA, 19 nt, Artificial Sequence
  Description of Artificial Sequence: Synthetic oligonucleotide
gaugacacgacaggccaug

SEQ ID NO: 1727877 - RNA, 19 nt, Artificial Sequence
  Description of Artificial Sequence: Synthetic oligonucleotide
aauuuucgugauggccgcg

SEQ ID NO: 1727878 - RNA, 19 nt, Artificial Sequence
  Description of Artificial Sequence: Synthetic oligonucleotide
gaggcaagaugacacgaca

SEQ ID NO: 1727879 - RNA, 19 nt, Artificial Sequence
  Description of Artificial Sequence: Synthetic oligonucleotide
uguacugacuucacaccua

SEQ ID NO: 1727880 - RNA, 19 nt, Artificial Sequence
  Description of Artificial Sequence: Synthetic oligonucleotide
ucacguugcucaagggcgc

SEQ ID NO: 1727881 - RNA, 19 nt, Artificial Sequence
  Description of Artificial Sequence: Synthetic oligonucleotide
cucuaguguaccugucacc

SEQ ID NO: 1727882 - RNA, 19 nt, Artificial Sequence
  Description of Artificial Sequence: Synthetic oligonucleotide
ccuuuauauccaaacucgg

SEQ ID NO: 1727883 - RNA, 19 nt, Artificial Sequence
  Description of Artificial Sequence: Synthetic oligonucleotide
caugcucuaccccaaucug

SEQ ID NO: 1727884 - RNA, 19 nt, Artificial Sequence
  Description of Artificial Sequence: Synthetic oligonucleotide
ugucacuauugugcgaaug

SEQ ID NO: 1727885 - RNA, 19 nt, Artificial Sequence
  Description of Artificial Sequence: Synthetic oligonucleotide
cucaacaaccugagaaguc

SEQ ID NO: 1727886 - RNA, 19 nt, Artificial Sequence
  Description of Artificial Sequence: Synthetic oligonucleotide
aacaaccugagaaguccag

SEQ ID NO: 1727887 - RNA, 19 nt, Artificial Sequence
  Description of Artificial Sequence: Synthetic oligonucleotide
cugacuucacaccuagcuc

SEQ ID NO: 1727888 - RNA, 19 nt, Artificial Sequence
  Description of Artificial Sequence: Synthetic oligonucleotide
ugcucuaccccaaucuguu

SEQ ID NO: 1727889 - RNA, 19 nt, Artificial Sequence
  Description of Artificial Sequence: Synthetic oligonucleotide
ucgccucaaaucuucccgc

SEQ ID NO: 1727890 - RNA, 19 nt, Artificial Sequence
  Description of Artificial Sequence: Synthetic oligonucleotide
aaaugguuuguggcggcca

SEQ ID NO: 1727891 - RNA, 19 nt, Artificial Sequence
  Description of Artificial Sequence: Synthetic oligonucleotide
ggugaggauguaaaccugg

SEQ ID NO: 1727892 - RNA, 19 nt, Artificial Sequence
  Description of Artificial Sequence: Synthetic oligonucleotide
cugccgcaaaacuaggcug

SEQ ID NO: 1727893 - RNA, 19 nt, Artificial Sequence
  Description of Artificial Sequence: Synthetic oligonucleotide
acacgacaggccauguccc

SEQ ID NO: 1727894 - RNA, 19 nt, Artificial Sequence
  Description of Artificial Sequence: Synthetic oligonucleotide
cagggagaacaugacaggc

SEQ ID NO: 1727895 - RNA, 19 nt, Artificial Sequence
  Description of Artificial Sequence: Synthetic oligonucleotide
gaacuuagcuccaccuccc

SEQ ID NO: 1727896 - RNA, 19 nt, Artificial Sequence
  Description of Artificial Sequence: Synthetic oligonucleotide
aaccugagaaguccagauu

SEQ ID NO: 1727897 - RNA, 19 nt, Artificial Sequence
  Description of Artificial Sequence: Synthetic oligonucleotide
cagagcacccagguuaucc

SEQ ID NO: 1727898 - RNA, 19 nt, Artificial Sequence
  Description of Artificial Sequence: Synthetic oligonucleotide
ggucacguugcucaagggc

SEQ ID NO: 1727899 - RNA, 19 nt, Artificial Sequence
  Description of Artificial Sequence: Synthetic oligonucleotide
uuuaggccucggaccagag

SEQ ID NO: 1727900 - RNA, 19 nt, Artificial Sequence
  Description of Artificial Sequence: Synthetic oligonucleotide
uucacaccuagcucagggu

SEQ ID NO: 1727901 - RNA, 19 nt, Artificial Sequence
  Description of Artificial Sequence: Synthetic oligonucleotide
aucuucccgcuuuaggccu

SEQ ID NO: 1727902 - RNA, 19 nt, Artificial Sequence
  Description of Artificial Sequence: Synthetic oligonucleotide
aacgcuggccuuucucuaa

SEQ ID NO: 1727903 - RNA, 19 nt, Artificial Sequence
  Description of Artificial Sequence: Synthetic oligonucleotide
ccucucaaggcucuugugg

SEQ ID NO: 1727904 - RNA, 19 nt, Artificial Sequence
  Description of Artificial Sequence: Synthetic oligonucleotide
uggcugguaugucaaugac

SEQ ID NO: 1727905 - RNA, 19 nt, Artificial Sequence
  Description of Artificial Sequence: Synthetic oligonucleotide
gugaggauguaaaccuggg

SEQ ID NO: 1727906 - RNA, 19 nt, Artificial Sequence
  Description of Artificial Sequence: Synthetic oligonucleotide
ucggaccagagcacccagg

SEQ ID NO: 1727907 - RNA, 19 nt, Artificial Sequence
  Description of Artificial Sequence: Synthetic oligonucleotide
aacuuagcuccaccucccu

SEQ ID NO: 1727908 - RNA, 19 nt, Artificial Sequence
  Description of Artificial Sequence: Synthetic oligonucleotide
uuauccccugccucagccc

SEQ ID NO: 1727909 - RNA, 19 nt, Artificial Sequence
  Description of Artificial Sequence: Synthetic oligonucleotide
acugacucuauggggagca

SEQ ID NO: 1727910 - RNA, 19 nt, Artificial Sequence
  Description of Artificial Sequence: Synthetic oligonucleotide
cuagcaacucacacucauc

SEQ ID NO: 1727911 - RNA, 19 nt, Artificial Sequence
  Description of Artificial Sequence: Synthetic oligonucleotide
cuuuauauccaaacucggu

SEQ ID NO: 1727912 - RNA, 19 nt, Artificial Sequence
  Description of Artificial Sequence: Synthetic oligonucleotide
ugcgaauguucuuguuaug

SEQ ID NO: 1727913 - RNA, 19 nt, Artificial Sequence
  Description of Artificial Sequence: Synthetic oligonucleotide
cuuguucacguacaccaca

SEQ ID NO: 1727914 - RNA, 19 nt, Artificial Sequence
  Description of Artificial Sequence: Synthetic oligonucleotide
gguaugucaaugacaacac

SEQ ID NO: 1727915 - RNA, 19 nt, Artificial Sequence
  Description of Artificial Sequence: Synthetic oligonucleotide
agugaaacgcuggccuuuc

SEQ ID NO: 1727916 - RNA, 19 nt, Artificial Sequence
  Description of Artificial Sequence: Synthetic oligonucleotide
uuuucgugauggccgcggu

SEQ ID NO: 1727917 - RNA, 19 nt, Artificial Sequence
  Description of Artificial Sequence: Synthetic oligonucleotide
auagugucgggcagcagug

SEQ ID NO: 1727918 - RNA, 19 nt, Artificial Sequence
  Description of Artificial Sequence: Synthetic oligonucleotide
guuuguggcggccacccuc

SEQ ID NO: 1727919 - RNA, 19 nt, Artificial Sequence
  Description of Artificial Sequence: Synthetic oligonucleotide
cuaagaucaugggcugccg

SEQ ID NO: 1727920 - RNA, 19 nt, Artificial Sequence
  Description of Artificial Sequence: Synthetic oligonucleotide
ugucuaucuccucguacuu

SEQ ID NO: 1727921 - RNA, 19 nt, Artificial Sequence
  Description of Artificial Sequence: Synthetic oligonucleotide
gucacuauugugcgaaugu

SEQ ID NO: 1727922 - RNA, 19 nt, Artificial Sequence
  Description of Artificial Sequence: Synthetic oligonucleotide
guagcccuaagcucaacaa

SEQ ID NO: 1727923 - RNA, 19 nt, Artificial Sequence
  Description of Artificial Sequence: Synthetic oligonucleotide
cuucaaaaugccacgcucu

SEQ ID NO: 1727924 - RNA, 19 nt, Artificial Sequence
  Description of Artificial Sequence: Synthetic oligonucleotide
cuugaacuuagcuccaccu

SEQ ID NO: 1727925 - RNA, 19 nt, Artificial Sequence
  Description of Artificial Sequence: Synthetic oligonucleotide
ugugggcauagugucgggc

SEQ ID NO: 1727926 - RNA, 19 nt, Artificial Sequence
  Description of Artificial Sequence: Synthetic oligonucleotide
ccugugaucauauucuuaa

SEQ ID NO: 1727927 - RNA, 19 nt, Artificial Sequence
  Description of Artificial Sequence: Synthetic oligonucleotide
ucucaaggcucuuguggaa

SEQ ID NO: 1727928 - RNA, 19 nt, Artificial Sequence
  Description of Artificial Sequence: Synthetic oligonucleotide
aaaacuaggcugagcuuua

SEQ ID NO: 1727929 - RNA, 19 nt, Artificial Sequence
  Description of Artificial Sequence: Synthetic oligonucleotide
gacucuauggggagcagaa

SEQ ID NO: 1727930 - RNA, 19 nt, Artificial Sequence
  Description of Artificial Sequence: Synthetic oligonucleotide
cauagugucgggcagcagu

SEQ ID NO: 1727931 - RNA, 19 nt, Artificial Sequence
  Description of Artificial Sequence: Synthetic oligonucleotide
guacuucuugaacuuagcu

SEQ ID NO: 1727932 - RNA, 19 nt, Artificial Sequence
  Description of Artificial Sequence: Synthetic oligonucleotide
cuccucguacuucuugaac

SEQ ID NO: 1727933 - RNA, 19 nt, Artificial Sequence
  Description of Artificial Sequence: Synthetic oligonucleotide
ugacucuauggggagcaga

SEQ ID NO: 1727934 - RNA, 19 nt, Artificial Sequence
  Description of Artificial Sequence: Synthetic oligonucleotide
aucuguuuagccaguagua

SEQ ID NO: 1727935 - RNA, 19 nt, Artificial Sequence
  Description of Artificial Sequence: Synthetic oligonucleotide
gugggcauagugucgggca

SEQ ID NO: 1727936 - RNA, 19 nt, Artificial Sequence
  Description of Artificial Sequence: Synthetic oligonucleotide
ccuaagcucaacaaccuga

SEQ ID NO: 1727937 - RNA, 19 nt, Artificial Sequence
  Description of Artificial Sequence: Synthetic oligonucleotide
ucacuauugugcgaauguu

SEQ ID NO: 1727938 - RNA, 19 nt, Artificial Sequence
  Description of Artificial Sequence: Synthetic oligonucleotide
uuucgugauggccgcgguc

SEQ ID NO: 1727939 - RNA, 19 nt, Artificial Sequence
  Description of Artificial Sequence: Synthetic oligonucleotide
caugaccaagccucgccuc

SEQ ID NO: 1727940 - RNA, 19 nt, Artificial Sequence
  Description of Artificial Sequence: Synthetic oligonucleotide
ugauaccccgagcucgcuc

SEQ ID NO: 1727941 - RNA, 19 nt, Artificial Sequence
  Description of Artificial Sequence: Synthetic oligonucleotide
cuaguguaccugucaccac

SEQ ID NO: 1727942 - RNA, 19 nt, Artificial Sequence
  Description of Artificial Sequence: Synthetic oligonucleotide
aagugaaacgcuggccuuu

SEQ ID NO: 1727943 - RNA, 19 nt, Artificial Sequence
  Description of Artificial Sequence: Synthetic oligonucleotide
ggcauaaaaugagauacaa

SEQ ID NO: 1727944 - RNA, 19 nt, Artificial Sequence
  Description of Artificial Sequence: Synthetic oligonucleotide
caaaugguuuguggcggcc

SEQ ID NO: 1727945 - RNA, 19 nt, Artificial Sequence
  Description of Artificial Sequence: Synthetic oligonucleotide
aagugcucucgggucuggg

SEQ ID NO: 1727946 - RNA, 19 nt, Artificial Sequence
  Description of Artificial Sequence: Synthetic oligonucleotide
gcauugauggugauacccc

SEQ ID NO: 1727947 - RNA, 19 nt, Artificial Sequence
  Description of Artificial Sequence: Synthetic oligonucleotide
cauggggccgucauuagcu

SEQ ID NO: 1727948 - RNA, 19 nt, Artificial Sequence
  Description of Artificial Sequence: Synthetic oligonucleotide
gaacgauggccaagguagc

SEQ ID NO: 1727949 - RNA, 19 nt, Artificial Sequence
  Description of Artificial Sequence: Synthetic oligonucleotide
ggcuugaccaugaccaagc

SEQ ID NO: 1727950 - RNA, 19 nt, Artificial Sequence
  Description of Artificial Sequence: Synthetic oligonucleotide
cucuaagaucaugggcugc

SEQ ID NO: 1727951 - RNA, 19 nt, Artificial Sequence
  Description of Artificial Sequence: Synthetic oligonucleotide
ggaugcagccauccagcgg

SEQ ID NO: 1727952 - RNA, 19 nt, Artificial Sequence
  Description of Artificial Sequence: Synthetic oligonucleotide
agggagaacaugacaggca

SEQ ID NO: 1727953 - RNA, 19 nt, Artificial Sequence
  Description of Artificial Sequence: Synthetic oligonucleotide
gccaugucccaagucaggg

SEQ ID NO: 1727954 - RNA, 19 nt, Artificial Sequence
  Description of Artificial Sequence: Synthetic oligonucleotide
cccucggcuagaauuuucg

SEQ ID NO: 1727955 - RNA, 19 nt, Artificial Sequence
  Description of Artificial Sequence: Synthetic oligonucleotide
gacaggcauaaaaugagau

SEQ ID NO: 1727956 - RNA, 19 nt, Artificial Sequence
  Description of Artificial Sequence: Synthetic oligonucleotide
uccuagcaacucacacuca

SEQ ID NO: 1727957 - RNA, 19 nt, Artificial Sequence
  Description of Artificial Sequence: Synthetic oligonucleotide
gcucuaguguaccugucac

SEQ ID NO: 1727958 - RNA, 19 nt, Artificial Sequence
  Description of Artificial Sequence: Synthetic oligonucleotide
aggcauaaaaugagauaca

SEQ ID NO: 1727959 - RNA, 19 nt, Artificial Sequence
  Description of Artificial Sequence: Synthetic oligonucleotide
uaagugcucucgggucugg

SEQ ID NO: 1727960 - RNA, 19 nt, Artificial Sequence
  Description of Artificial Sequence: Synthetic oligonucleotide
ucgugauggccgcggucag

SEQ ID NO: 1727961 - RNA, 19 nt, Artificial Sequence
  Description of Artificial Sequence: Synthetic oligonucleotide
cauuagcugccaccaccag

SEQ ID NO: 1727962 - RNA, 19 nt, Artificial Sequence
  Description of Artificial Sequence: Synthetic oligonucleotide
gguagcccuaagcucaaca

SEQ ID NO: 1727963 - RNA, 19 nt, Artificial Sequence
  Description of Artificial Sequence: Synthetic oligonucleotide
cugcauugauggugauacc

SEQ ID NO: 1727964 - RNA, 19 nt, Artificial Sequence
  Description of Artificial Sequence: Synthetic oligonucleotide
cagagccuacgaugacugg

SEQ ID NO: 1727965 - RNA, 19 nt, Artificial Sequence
  Description of Artificial Sequence: Synthetic oligonucleotide
auggggccgucauuagcug

SEQ ID NO: 1727966 - RNA, 19 nt, Artificial Sequence
  Description of Artificial Sequence: Synthetic oligonucleotide
accuagcucagggucacgu

SEQ ID NO: 1727967 - RNA, 19 nt, Artificial Sequence
  Description of Artificial Sequence: Synthetic oligonucleotide
aucaugggcugccgcaaaa

SEQ ID NO: 1727968 - RNA, 19 nt, Artificial Sequence
  Description of Artificial Sequence: Synthetic oligonucleotide
augcucuaccccaaucugu

SEQ ID NO: 1727969 - RNA, 19 nt, Artificial Sequence
  Description of Artificial Sequence: Synthetic oligonucleotide
gccgucauuagcugccacc

SEQ ID NO: 1727970 - RNA, 19 nt, Artificial Sequence
  Description of Artificial Sequence: Synthetic oligonucleotide
gugcuauacuccacaugag

SEQ ID NO: 1727971 - RNA, 19 nt, Artificial Sequence
  Description of Artificial Sequence: Synthetic oligonucleotide
ucccucggcuagaauuuuc

SEQ ID NO: 1727972 - RNA, 19 nt, Artificial Sequence
  Description of Artificial Sequence: Synthetic oligonucleotide
gcagagagcagagccuacg

SEQ ID NO: 1727973 - RNA, 19 nt, Artificial Sequence
  Description of Artificial Sequence: Synthetic oligonucleotide
gcagagccuacgaugacug

SEQ ID NO: 1727974 - RNA, 19 nt, Artificial Sequence
  Description of Artificial Sequence: Synthetic oligonucleotide
uggggcauggggccgucau

SEQ ID NO: 1727975 - RNA, 19 nt, Artificial Sequence
  Description of Artificial Sequence: Synthetic oligonucleotide
gugccugugaucauauucu

SEQ ID NO: 1727976 - RNA, 19 nt, Artificial Sequence
  Description of Artificial Sequence: Synthetic oligonucleotide
guaagugcucucgggucug

SEQ ID NO: 1727977 - RNA, 19 nt, Artificial Sequence
  Description of Artificial Sequence: Synthetic oligonucleotide
auguucuuguuauguccua

SEQ ID NO: 1727978 - RNA, 19 nt, Artificial Sequence
  Description of Artificial Sequence: Synthetic oligonucleotide
accaagccucgccucaaau

SEQ ID NO: 1727979 - RNA, 19 nt, Artificial Sequence
  Description of Artificial Sequence: Synthetic oligonucleotide
cucggaccagagcacccag

SEQ ID NO: 1727980 - RNA, 19 nt, Artificial Sequence
  Description of Artificial Sequence: Synthetic oligonucleotide
ccgcuuuaggccucggacc

SEQ ID NO: 1727981 - RNA, 19 nt, Artificial Sequence
  Description of Artificial Sequence: Synthetic oligonucleotide
auguaaguguccacugcau

SEQ ID NO: 1727982 - RNA, 19 nt, Artificial Sequence
  Description of Artificial Sequence: Synthetic oligonucleotide
ucauggcugguaugucaau

SEQ ID NO: 1727983 - RNA, 19 nt, Artificial Sequence
  Description of Artificial Sequence: Synthetic oligonucleotide
cagagagcagagccuacga

SEQ ID NO: 1727984 - RNA, 19 nt, Artificial Sequence
  Description of Artificial Sequence: Synthetic oligonucleotide
ggcuagaauuuucgugaug

SEQ ID NO: 1727985 - RNA, 19 nt, Artificial Sequence
  Description of Artificial Sequence: Synthetic oligonucleotide
cuaccccaaucuguuuagc

SEQ ID NO: 1727986 - RNA, 19 nt, Artificial Sequence
  Description of Artificial Sequence: Synthetic oligonucleotide
caaccugagaaguccagau

SEQ ID NO: 1727987 - RNA, 19 nt, Artificial Sequence
  Description of Artificial Sequence: Synthetic oligonucleotide
ccuuggugaggauguaaac

SEQ ID NO: 1727988 - RNA, 19 nt, Artificial Sequence
  Description of Artificial Sequence: Synthetic oligonucleotide
gaccaugaccaagccucgc

SEQ ID NO: 1727989 - RNA, 19 nt, Artificial Sequence
  Description of Artificial Sequence: Synthetic oligonucleotide
gccuacgaugacuggggcc

SEQ ID NO: 1727990 - RNA, 19 nt, Artificial Sequence
  Description of Artificial Sequence: Synthetic oligonucleotide
ccaagccucgccucaaauc

SEQ ID NO: 1727991 - RNA, 19 nt, Artificial Sequence
  Description of Artificial Sequence: Synthetic oligonucleotide
gccaggaauagaauaaacu

SEQ ID NO: 1727992 - RNA, 19 nt, Artificial Sequence
  Description of Artificial Sequence: Synthetic oligonucleotide
ggugauaccccgagcucgc

SEQ ID NO: 1727993 - RNA, 19 nt, Artificial Sequence
  Description of Artificial Sequence: Synthetic oligonucleotide
cagcagugcuauacuccac

SEQ ID NO: 1727994 - RNA, 19 nt, Artificial Sequence
  Description of Artificial Sequence: Synthetic oligonucleotide
auguaaaccugggccucca

SEQ ID NO: 1727995 - RNA, 19 nt, Artificial Sequence
  Description of Artificial Sequence: Synthetic oligonucleotide
gcauggggccgucauuagc

SEQ ID NO: 1727996 - RNA, 19 nt, Artificial Sequence
  Description of Artificial Sequence: Synthetic oligonucleotide
cugucaccaccgugccccg

SEQ ID NO: 1727997 - RNA, 19 nt, Artificial Sequence
  Description of Artificial Sequence: Synthetic oligonucleotide
cacgcucuaguguaccugu

SEQ ID NO: 1727998 - RNA, 19 nt, Artificial Sequence
  Description of Artificial Sequence: Synthetic oligonucleotide
agcggggcagugccuguga

SEQ ID NO: 1727999 - RNA, 19 nt, Artificial Sequence
  Description of Artificial Sequence: Synthetic oligonucleotide
ugucaccaccgugccccgg

SEQ ID NO: 1728000 - RNA, 19 nt, Artificial Sequence
  Description of Artificial Sequence: Synthetic oligonucleotide
ugaccaagccucgccucaa

SEQ ID NO: 1728001 - RNA, 19 nt, Artificial Sequence
  Description of Artificial Sequence: Synthetic oligonucleotide
cucaaugccugucacuauu

SEQ ID NO: 1728002 - RNA, 19 nt, Artificial Sequence
  Description of Artificial Sequence: Synthetic oligonucleotide
cuucccgcuuuaggccucg

SEQ ID NO: 1728003 - RNA, 19 nt, Artificial Sequence
  Description of Artificial Sequence: Synthetic oligonucleotide
gcugccgcaaaacuaggcu

SEQ ID NO: 1728004 - RNA, 19 nt, Artificial Sequence
  Description of Artificial Sequence: Synthetic oligonucleotide
augccacgcucuaguguac

SEQ ID NO: 1728005 - RNA, 19 nt, Artificial Sequence
  Description of Artificial Sequence: Synthetic oligonucleotide
ggggccgucauuagcugcc

SEQ ID NO: 1728006 - RNA, 19 nt, Artificial Sequence
  Description of Artificial Sequence: Synthetic oligonucleotide
gcgaauguucuuguuaugu

SEQ ID NO: 1728007 - RNA, 19 nt, Artificial Sequence
  Description of Artificial Sequence: Synthetic oligonucleotide
ggccaugucccaagucagg

SEQ ID NO: 1728008 - RNA, 19 nt, Artificial Sequence
  Description of Artificial Sequence: Synthetic oligonucleotide
accagagcacccagguuau

SEQ ID NO: 1728009 - RNA, 19 nt, Artificial Sequence
  Description of Artificial Sequence: Synthetic oligonucleotide
gggaacgauggccaaggua

SEQ ID NO: 1728010 - RNA, 19 nt, Artificial Sequence
  Description of Artificial Sequence: Synthetic oligonucleotide
cacgacaggccauguccca

SEQ ID NO: 1728011 - RNA, 19 nt, Artificial Sequence
  Description of Artificial Sequence: Synthetic oligonucleotide
cuucagucauggcugguau

SEQ ID NO: 1728012 - RNA, 19 nt, Artificial Sequence
  Description of Artificial Sequence: Synthetic oligonucleotide
caugggcugccgcaaaacu

SEQ ID NO: 1728013 - RNA, 19 nt, Artificial Sequence
  Description of Artificial Sequence: Synthetic oligonucleotide
cauugucuaucuccucgua

SEQ ID NO: 1728014 - RNA, 19 nt, Artificial Sequence
  Description of Artificial Sequence: Synthetic oligonucleotide
acgcucuaguguaccuguc

SEQ ID NO: 1728015 - RNA, 19 nt, Artificial Sequence
  Description of Artificial Sequence: Synthetic oligonucleotide
ggcauggggccgucauuag

SEQ ID NO: 1728016 - RNA, 19 nt, Artificial Sequence
  Description of Artificial Sequence: Synthetic oligonucleotide
agguagcccuaagcucaac

SEQ ID NO: 1728017 - RNA, 19 nt, Artificial Sequence
  Description of Artificial Sequence: Synthetic oligonucleotide
agaugacacgacaggccau

SEQ ID NO: 1728018 - RNA, 19 nt, Artificial Sequence
  Description of Artificial Sequence: Synthetic oligonucleotide
ggaauagaauaaacugacu

SEQ ID NO: 1728019 - RNA, 19 nt, Artificial Sequence
  Description of Artificial Sequence: Synthetic oligonucleotide
acguugcucaagggcgcag

SEQ ID NO: 1728020 - RNA, 19 nt, Artificial Sequence
  Description of Artificial Sequence: Synthetic oligonucleotide
acgacaggccaugucccaa

SEQ ID NO: 1728021 - RNA, 19 nt, Artificial Sequence
  Description of Artificial Sequence: Synthetic oligonucleotide
aagccucgccucaaaucuu

SEQ ID NO: 1728022 - RNA, 19 nt, Artificial Sequence
  Description of Artificial Sequence: Synthetic oligonucleotide
cccuaagcucaacaaccug

SEQ ID NO: 1728023 - RNA, 19 nt, Artificial Sequence
  Description of Artificial Sequence: Synthetic oligonucleotide
ggcugccgcaaaacuaggc

SEQ ID NO: 1728024 - RNA, 19 nt, Artificial Sequence
  Description of Artificial Sequence: Synthetic oligonucleotide
guccagauucagcuccacu

SEQ ID NO: 1728025 - RNA, 19 nt, Artificial Sequence
  Description of Artificial Sequence: Synthetic oligonucleotide
gcucaacaaccugagaagu

SEQ ID NO: 1728026 - RNA, 19 nt, Artificial Sequence
  Description of Artificial Sequence: Synthetic oligonucleotide
ggcauagugucgggcagca

SEQ ID NO: 1728027 - RNA, 19 nt, Artificial Sequence
  Description of Artificial Sequence: Synthetic oligonucleotide
gccgugguccacauggcca

SEQ ID NO: 1728028 - RNA, 19 nt, Artificial Sequence
  Description of Artificial Sequence: Synthetic oligonucleotide
caugagcugcauugauggu

SEQ ID NO: 1728029 - RNA, 19 nt, Artificial Sequence
  Description of Artificial Sequence: Synthetic oligonucleotide
ugccccggccaggaauaga

SEQ ID NO: 1728030 - RNA, 19 nt, Artificial Sequence
  Description of Artificial Sequence: Synthetic oligonucleotide
uucccgcuuuaggccucgg

SEQ ID NO: 1728031 - RNA, 19 nt, Artificial Sequence
  Description of Artificial Sequence: Synthetic oligonucleotide
ccgucauuagcugccacca

SEQ ID NO: 1728032 - RNA, 19 nt, Artificial Sequence
  Description of Artificial Sequence: Synthetic oligonucleotide
caggggcauugucuaucuc

SEQ ID NO: 1728033 - RNA, 19 nt, Artificial Sequence
  Description of Artificial Sequence: Synthetic oligonucleotide
gccgcaaaacuaggcugag

SEQ ID NO: 1728034 - RNA, 19 nt, Artificial Sequence
  Description of Artificial Sequence: Synthetic oligonucleotide
gcggucaggguggucuugc

SEQ ID NO: 1728035 - RNA, 19 nt, Artificial Sequence
  Description of Artificial Sequence: Synthetic oligonucleotide
cuacgaugacuggggccuc

SEQ ID NO: 1728036 - RNA, 19 nt, Artificial Sequence
  Description of Artificial Sequence: Synthetic oligonucleotide
gggcugccgcaaaacuagg

SEQ ID NO: 1728037 - RNA, 19 nt, Artificial Sequence
  Description of Artificial Sequence: Synthetic oligonucleotide
gggcauggggccgucauua

SEQ ID NO: 1728038 - RNA, 19 nt, Artificial Sequence
  Description of Artificial Sequence: Synthetic oligonucleotide
gcuuuaggccucggaccag

SEQ ID NO: 1728039 - RNA, 19 nt, Artificial Sequence
  Description of Artificial Sequence: Synthetic oligonucleotide
ggccuccucuccuuuauau

SEQ ID NO: 1728040 - RNA, 19 nt, Artificial Sequence
  Description of Artificial Sequence: Synthetic oligonucleotide
ccacgcucuaguguaccug

SEQ ID NO: 1728041 - RNA, 19 nt, Artificial Sequence
  Description of Artificial Sequence: Synthetic oligonucleotide
ccuagcaacucacacucau

SEQ ID NO: 1728042 - RNA, 19 nt, Artificial Sequence
  Description of Artificial Sequence: Synthetic oligonucleotide
cccggccaggaauagaaua

SEQ ID NO: 1728043 - RNA, 19 nt, Artificial Sequence
  Description of Artificial Sequence: Synthetic oligonucleotide
cacguugcucaagggcgca

SEQ ID NO: 1728044 - RNA, 19 nt, Artificial Sequence
  Description of Artificial Sequence: Synthetic oligonucleotide
gccccggccaggaauagaa

SEQ ID NO: 1728045 - RNA, 19 nt, Artificial Sequence
  Description of Artificial Sequence: Synthetic oligonucleotide
gcucaagggcgcagagagc

SEQ ID NO: 1728046 - RNA, 19 nt, Artificial Sequence
  Description of Artificial Sequence: Synthetic oligonucleotide
gccugucacuauugugcga

SEQ ID NO: 1728047 - RNA, 19 nt, Artificial Sequence
  Description of Artificial Sequence: Synthetic oligonucleotide
gugccccggccaggaauag

SEQ ID NO: 1728048 - RNA, 19 nt, Artificial Sequence
  Description of Artificial Sequence: Synthetic oligonucleotide
gccucggaccagagcaccc

SEQ ID NO: 1728049 - RNA, 19 nt, Artificial Sequence
  Description of Artificial Sequence: Synthetic oligonucleotide
gccugugaucauauucuua

SEQ ID NO: 1728050 - RNA, 19 nt, Artificial Sequence
  Description of Artificial Sequence: Synthetic oligonucleotide
gccgcggucaggguggucu

SEQ ID NO: 1728051 - RNA, 19 nt, Artificial Sequence
  Description of Artificial Sequence: Synthetic oligonucleotide
caacaugcucuaccccaau

SEQ ID NO: 1728052 - RNA, 19 nt, Artificial Sequence
  Description of Artificial Sequence: Synthetic oligonucleotide
caccaccgugccccggcca

SEQ ID NO: 1728053 - RNA, 19 nt, Artificial Sequence
  Description of Artificial Sequence: Synthetic oligonucleotide
ccaugaccaagccucgccu

SEQ ID NO: 1728054 - RNA, 19 nt, Artificial Sequence
  Description of Artificial Sequence: Synthetic oligonucleotide
gcccuaagcucaacaaccu

SEQ ID NO: 1728055 - RNA, 19 nt, Artificial Sequence
  Description of Artificial Sequence: Synthetic oligonucleotide
cucucgggucuggggcaug

SEQ ID NO: 1728056 - RNA, 19 nt, Artificial Sequence
  Description of Artificial Sequence: Synthetic oligonucleotide
ggguggucuugccgugguc

SEQ ID NO: 1728057 - RNA, 19 nt, Artificial Sequence
  Description of Artificial Sequence: Synthetic oligonucleotide
cugucacuauugugcgaau

SEQ ID NO: 1728058 - RNA, 19 nt, Artificial Sequence
  Description of Artificial Sequence: Synthetic oligonucleotide
caccgugccccggccagga

SEQ ID NO: 1728059 - RNA, 19 nt, Artificial Sequence
  Description of Artificial Sequence: Synthetic oligonucleotide
caccaccaggaugcagcca

SEQ ID NO: 1728060 - RNA, 19 nt, Artificial Sequence
  Description of Artificial Sequence: Synthetic oligonucleotide
accgugccccggccaggaa

SEQ ID NO: 1728061 - RNA, 19 nt, Artificial Sequence
  Description of Artificial Sequence: Synthetic oligonucleotide
gccacgcucuaguguaccu

SEQ ID NO: 1728062 - RNA, 19 nt, Artificial Sequence
  Description of Artificial Sequence: Synthetic oligonucleotide
ccucccucggcuagaauuu

SEQ ID NO: 1728063 - RNA, 19 nt, Artificial Sequence
  Description of Artificial Sequence: Synthetic oligonucleotide
ccaaucuguuuagccagua

SEQ ID NO: 1728064 - RNA, 19 nt, Artificial Sequence
  Description of Artificial Sequence: Synthetic oligonucleotide
gcagugccugugaucauau

SEQ ID NO: 1728065 - RNA, 19 nt, Artificial Sequence
  Description of Artificial Sequence: Synthetic oligonucleotide
ccucggaccagagcaccca

SEQ ID NO: 1728066 - RNA, 19 nt, Artificial Sequence
  Description of Artificial Sequence: Synthetic oligonucleotide
ccucggcuagaauuuucgu

SEQ ID NO: 1728067 - RNA, 19 nt, Artificial Sequence
  Description of Artificial Sequence: Synthetic oligonucleotide
gugauaccccgagcucgcu

SEQ ID NO: 1728068 - RNA, 19 nt, Artificial Sequence
  Description of Artificial Sequence: Synthetic oligonucleotide
caccagugccaauggucuu

SEQ ID NO: 1728069 - RNA, 19 nt, Artificial Sequence
  Description of Artificial Sequence: Synthetic oligonucleotide
gggccgucauuagcugcca

SEQ ID NO: 1728070 - RNA, 19 nt, Artificial Sequence
  Description of Artificial Sequence: Synthetic oligonucleotide
ggggaacgauggccaaggu

SEQ ID NO: 1728071 - RNA, 19 nt, Artificial Sequence
  Description of Artificial Sequence: Synthetic oligonucleotide
ccaccgugccccggccagg

SEQ ID NO: 1728072 - RNA, 19 nt, Artificial Sequence
  Description of Artificial Sequence: Synthetic oligonucleotide
cuggggcauggggccguca

SEQ ID NO: 1728073 - RNA, 19 nt, Artificial Sequence
  Description of Artificial Sequence: Synthetic oligonucleotide
ccagagcacccagguuauc

SEQ ID NO: 1728074 - RNA, 19 nt, Artificial Sequence
  Description of Artificial Sequence: Synthetic oligonucleotide
cucccucggcuagaauuuu

SEQ ID NO: 1728075 - RNA, 19 nt, Artificial Sequence
  Description of Artificial Sequence: Synthetic oligonucleotide
ggggcauggggccgucauu

SEQ ID NO: 1728076 - RNA, 19 nt, Artificial Sequence
  Description of Artificial Sequence: Synthetic oligonucleotide
cgccucaaaucuucccgcu

SEQ ID NO: 1728077 - RNA, 19 nt, Artificial Sequence
  Description of Artificial Sequence: Synthetic oligonucleotide
gccaucccucaaagugaaa

SEQ ID NO: 1728078 - RNA, 19 nt, Artificial Sequence
  Description of Artificial Sequence: Synthetic oligonucleotide
cggcuagaauuuucgugau

SEQ ID NO: 1728079 - RNA, 19 nt, Artificial Sequence
  Description of Artificial Sequence: Synthetic oligonucleotide
gcggggcagugccugugau

SEQ ID NO: 1728080 - RNA, 19 nt, Artificial Sequence
  Description of Artificial Sequence: Synthetic oligonucleotide
cgcggucaggguggucuug

SEQ ID NO: 1728081 - RNA, 19 nt, Artificial Sequence
  Description of Artificial Sequence: Synthetic oligonucleotide
cagugccaauggucuuguu

SEQ ID NO: 1728082 - RNA, 19 nt, Artificial Sequence
  Description of Artificial Sequence: Synthetic oligonucleotide
ccaccucccucggcuagaa

SEQ ID NO: 1728083 - RNA, 19 nt, Artificial Sequence
  Description of Artificial Sequence: Synthetic oligonucleotide
caccucccucggcuagaau

SEQ ID NO: 1728084 - RNA, 19 nt, Artificial Sequence
  Description of Artificial Sequence: Synthetic oligonucleotide
cucgcuccucaggggcauu

SEQ ID NO: 1728085 - RNA, 19 nt, Artificial Sequence
  Description of Artificial Sequence: Synthetic oligonucleotide
cgugguccacauggccaau

SEQ ID NO: 1728086 - RNA, 19 nt, Artificial Sequence
  Description of Artificial Sequence: Synthetic oligonucleotide
aauaguuacaccuaccacu

SEQ ID NO: 1728087 - RNA, 19 nt, Artificial Sequence
  Description of Artificial Sequence: Synthetic oligonucleotide
ucaauuuacagagaggaag

SEQ ID NO: 1728088 - RNA, 19 nt, Artificial Sequence
  Description of Artificial Sequence: Synthetic oligonucleotide
agauucaauuuacagagag

SEQ ID NO: 1728089 - RNA, 19 nt, Artificial Sequence
  Description of Artificial Sequence: Synthetic oligonucleotide
uagacuggaauccuagacg

SEQ ID NO: 1728090 - RNA, 19 nt, Artificial Sequence
  Description of Artificial Sequence: Synthetic oligonucleotide
acacccauuacaaagaagg

SEQ ID NO: 1728091 - RNA, 19 nt, Artificial Sequence
  Description of Artificial Sequence: Synthetic oligonucleotide
aauccuagacggcugcggc

SEQ ID NO: 1728092 - RNA, 19 nt, Artificial Sequence
  Description of Artificial Sequence: Synthetic oligonucleotide
ugugugagcuacaugauac

SEQ ID NO: 1728093 - RNA, 19 nt, Artificial Sequence
  Description of Artificial Sequence: Synthetic oligonucleotide
uugagagagagagagagag

SEQ ID NO: 1728094 - RNA, 19 nt, Artificial Sequence
  Description of Artificial Sequence: Synthetic oligonucleotide
auucaauuuacagagagga

SEQ ID NO: 1728095 - RNA, 19 nt, Artificial Sequence
  Description of Artificial Sequence: Synthetic oligonucleotide
agagaguucccaaacaagc

SEQ ID NO: 1728096 - RNA, 19 nt, Artificial Sequence
  Description of Artificial Sequence: Synthetic oligonucleotide
ucaaagaaggccacucggg

SEQ ID NO: 1728097 - RNA, 19 nt, Artificial Sequence
  Description of Artificial Sequence: Synthetic oligonucleotide
agacuggaauccuagacgg

SEQ ID NO: 1728098 - RNA, 19 nt, Artificial Sequence
  Description of Artificial Sequence: Synthetic oligonucleotide
auaggguugagagagagag

SEQ ID NO: 1728099 - RNA, 19 nt, Artificial Sequence
  Description of Artificial Sequence: Synthetic oligonucleotide
auugauggcucccaagggg

SEQ ID NO: 1728100 - RNA, 19 nt, Artificial Sequence
  Description of Artificial Sequence: Synthetic oligonucleotide
uauacaucucuucauggac

SEQ ID NO: 1728101 - RNA, 19 nt, Artificial Sequence
  Description of Artificial Sequence: Synthetic oligonucleotide
gagagagagagagagagag

SEQ ID NO: 1728102 - RNA, 19 nt, Artificial Sequence
  Description of Artificial Sequence: Synthetic oligonucleotide
caugauacgcaucugcugc

SEQ ID NO: 1728103 - RNA, 19 nt, Artificial Sequence
  Description of Artificial Sequence: Synthetic oligonucleotide
aaaauuugagacacaaaca

SEQ ID NO: 1728104 - RNA, 19 nt, Artificial Sequence
  Description of Artificial Sequence: Synthetic oligonucleotide
uuugagacacaaacaguag

SEQ ID NO: 1728105 - RNA, 19 nt, Artificial Sequence
  Description of Artificial Sequence: Synthetic oligonucleotide
aagaaagucagggaacaag

SEQ ID NO: 1728106 - RNA, 19 nt, Artificial Sequence
  Description of Artificial Sequence: Synthetic oligonucleotide
ucuucaguuaauauacauc

SEQ ID NO: 1728107 - RNA, 19 nt, Artificial Sequence
  Description of Artificial Sequence: Synthetic oligonucleotide
gacccucucacccuuaggg

SEQ ID NO: 1728108 - RNA, 19 nt, Artificial Sequence
  Description of Artificial Sequence: Synthetic oligonucleotide
gagaggaggagagagagag

SEQ ID NO: 1728109 - RNA, 19 nt, Artificial Sequence
  Description of Artificial Sequence: Synthetic oligonucleotide
cuuaucuggccacaggagg

SEQ ID NO: 1728110 - RNA, 19 nt, Artificial Sequence
  Description of Artificial Sequence: Synthetic oligonucleotide
caacccauaggguugagag

SEQ ID NO: 1728111 - RNA, 19 nt, Artificial Sequence
  Description of Artificial Sequence: Synthetic oligonucleotide
gagagagagagagaggagg

SEQ ID NO: 1728112 - RNA, 19 nt, Artificial Sequence
  Description of Artificial Sequence: Synthetic oligonucleotide
aagaagguagagccaauca

SEQ ID NO: 1728113 - RNA, 19 nt, Artificial Sequence
  Description of Artificial Sequence: Synthetic oligonucleotide
uggagcauuccuuugcucc

SEQ ID NO: 1728114 - RNA, 19 nt, Artificial Sequence
  Description of Artificial Sequence: Synthetic oligonucleotide
ucuuaagcgagcugaagcu

SEQ ID NO: 1728115 - RNA, 19 nt, Artificial Sequence
  Description of Artificial Sequence: Synthetic oligonucleotide
aaagaagguagagccaauc

SEQ ID NO: 1728116 - RNA, 19 nt, Artificial Sequence
  Description of Artificial Sequence: Synthetic oligonucleotide
cucuuaagcgagcugaagc

SEQ ID NO: 1728117 - RNA, 19 nt, Artificial Sequence
  Description of Artificial Sequence: Synthetic oligonucleotide
uuaagggacagucuccgac

SEQ ID NO: 1728118 - RNA, 19 nt, Artificial Sequence
  Description of Artificial Sequence: Synthetic oligonucleotide
gaggaggagagagagagag

SEQ ID NO: 1728119 - RNA, 19 nt, Artificial Sequence
  Description of Artificial Sequence: Synthetic oligonucleotide
uugagacacaaacaguagu

SEQ ID NO: 1728120 - RNA, 19 nt, Artificial Sequence
  Description of Artificial Sequence: Synthetic oligonucleotide
aggguugagagagagagag

SEQ ID NO: 1728121 - RNA, 19 nt, Artificial Sequence
  Description of Artificial Sequence: Synthetic oligonucleotide
aguugaacuccaucucggc

SEQ ID NO: 1728122 - RNA, 19 nt, Artificial Sequence
  Description of Artificial Sequence: Synthetic oligonucleotide
agcuacaugauacgcaucu

SEQ ID NO: 1728123 - RNA, 19 nt, Artificial Sequence
  Description of Artificial Sequence: Synthetic oligonucleotide
uuaagcgagcugaagcuca

SEQ ID NO: 1728124 - RNA, 19 nt, Artificial Sequence
  Description of Artificial Sequence: Synthetic oligonucleotide
gagagagagagagaguucc

SEQ ID NO: 1728125 - RNA, 19 nt, Artificial Sequence
  Description of Artificial Sequence: Synthetic oligonucleotide
aagcguccuccacuaaccc

SEQ ID NO: 1728126 - RNA, 19 nt, Artificial Sequence
  Description of Artificial Sequence: Synthetic oligonucleotide
uugauggcucccaaggggc

SEQ ID NO: 1728127 - RNA, 19 nt, Artificial Sequence
  Description of Artificial Sequence: Synthetic oligonucleotide
accguaaaugucuugggcu

SEQ ID NO: 1728128 - RNA, 19 nt, Artificial Sequence
  Description of Artificial Sequence: Synthetic oligonucleotide
auauacaucucuucaugga

SEQ ID NO: 1728129 - RNA, 19 nt, Artificial Sequence
  Description of Artificial Sequence: Synthetic oligonucleotide
ugcucaaauaccaggguuc

SEQ ID NO: 1728130 - RNA, 19 nt, Artificial Sequence
  Description of Artificial Sequence: Synthetic oligonucleotide
guugaacuccaucucggcg

SEQ ID NO: 1728131 - RNA, 19 nt, Artificial Sequence
  Description of Artificial Sequence: Synthetic oligonucleotide
gagagagaggaggagagag

SEQ ID NO: 1728132 - RNA, 19 nt, Artificial Sequence
  Description of Artificial Sequence: Synthetic oligonucleotide
aguuacaccuaccacugcu

SEQ ID NO: 1728133 - RNA, 19 nt, Artificial Sequence
  Description of Artificial Sequence: Synthetic oligonucleotide
ugagcuacaugauacgcau

SEQ ID NO: 1728134 - RNA, 19 nt, Artificial Sequence
  Description of Artificial Sequence: Synthetic oligonucleotide
gagagaggaggagagagag

SEQ ID NO: 1728135 - RNA, 19 nt, Artificial Sequence
  Description of Artificial Sequence: Synthetic oligonucleotide
acccauaggguugagagag

SEQ ID NO: 1728136 - RNA, 19 nt, Artificial Sequence
  Description of Artificial Sequence: Synthetic oligonucleotide
gagagagagagagagagga

SEQ ID NO: 1728137 - RNA, 19 nt, Artificial Sequence
  Description of Artificial Sequence: Synthetic oligonucleotide
cuagacuggaauccuagac

SEQ ID NO: 1728138 - RNA, 19 nt, Artificial Sequence
  Description of Artificial Sequence: Synthetic oligonucleotide
ucucaaaaccaaacuguac

SEQ ID NO: 1728139 - RNA, 19 nt, Artificial Sequence
  Description of Artificial Sequence: Synthetic oligonucleotide
uguagcuuggcauucccaa

SEQ ID NO: 1728140 - RNA, 19 nt, Artificial Sequence
  Description of Artificial Sequence: Synthetic oligonucleotide
agaguucccaaacaagcca

SEQ ID NO: 1728141 - RNA, 19 nt, Artificial Sequence
  Description of Artificial Sequence: Synthetic oligonucleotide
augauacgcaucugcugcc

SEQ ID NO: 1728142 - RNA, 19 nt, Artificial Sequence
  Description of Artificial Sequence: Synthetic oligonucleotide
uaccacugcucaaauacca

SEQ ID NO: 1728143 - RNA, 19 nt, Artificial Sequence
  Description of Artificial Sequence: Synthetic oligonucleotide
ucgcaguugaacuccaucu

SEQ ID NO: 1728144 - RNA, 19 nt, Artificial Sequence
  Description of Artificial Sequence: Synthetic oligonucleotide
ugagacagaccuaggcugc

SEQ ID NO: 1728145 - RNA, 19 nt, Artificial Sequence
  Description of Artificial Sequence: Synthetic oligonucleotide
aaacaagccagcucccuau

SEQ ID NO: 1728146 - RNA, 19 nt, Artificial Sequence
  Description of Artificial Sequence: Synthetic oligonucleotide
gguugagagagagagagag

SEQ ID NO: 1728147 - RNA, 19 nt, Artificial Sequence
  Description of Artificial Sequence: Synthetic oligonucleotide
uauguagcuuggcauuccc

SEQ ID NO: 1728148 - RNA, 19 nt, Artificial Sequence
  Description of Artificial Sequence: Synthetic oligonucleotide
uuccucuuaagcgagcuga

SEQ ID NO: 1728149 - RNA, 19 nt, Artificial Sequence
  Description of Artificial Sequence: Synthetic oligonucleotide
aacaagguagagugccuca

SEQ ID NO: 1728150 - RNA, 19 nt, Artificial Sequence
  Description of Artificial Sequence: Synthetic oligonucleotide
caauuuacagagaggaaga

SEQ ID NO: 1728151 - RNA, 19 nt, Artificial Sequence
  Description of Artificial Sequence: Synthetic oligonucleotide
auaguuacaccuaccacug

SEQ ID NO: 1728152 - RNA, 19 nt, Artificial Sequence
  Description of Artificial Sequence: Synthetic oligonucleotide
ugugagcuacaugauacgc

SEQ ID NO: 1728153 - RNA, 19 nt, Artificial Sequence
  Description of Artificial Sequence: Synthetic oligonucleotide
uggcauucccaaaauuuga

SEQ ID NO: 1728154 - RNA, 19 nt, Artificial Sequence
  Description of Artificial Sequence: Synthetic oligonucleotide
ugguuauguagcuuggcau

SEQ ID NO: 1728155 - RNA, 19 nt, Artificial Sequence
  Description of Artificial Sequence: Synthetic oligonucleotide
gagagagagaggaggagag

SEQ ID NO: 1728156 - RNA, 19 nt, Artificial Sequence
  Description of Artificial Sequence: Synthetic oligonucleotide
ggaggagagagagagagag

SEQ ID NO: 1728157 - RNA, 19 nt, Artificial Sequence
  Description of Artificial Sequence: Synthetic oligonucleotide
uaccaggguucccaugugg

SEQ ID NO: 1728158 - RNA, 19 nt, Artificial Sequence
  Description of Artificial Sequence: Synthetic oligonucleotide
agcguccuccacuaacccc

SEQ ID NO: 1728159 - RNA, 19 nt, Artificial Sequence
  Description of Artificial Sequence: Synthetic oligonucleotide
gacgaguuaagggacaguc

SEQ ID NO: 1728160 - RNA, 19 nt, Artificial Sequence
  Description of Artificial Sequence: Synthetic oligonucleotide
uggcgcaggauucuggcca

SEQ ID NO: 1728161 - RNA, 19 nt, Artificial Sequence
  Description of Artificial Sequence: Synthetic oligonucleotide
guauugugcuugcuacugg

SEQ ID NO: 1728162 - RNA, 19 nt, Artificial Sequence
  Description of Artificial Sequence: Synthetic oligonucleotide
uguguccacagccauuguc

SEQ ID NO: 1728163 - RNA, 19 nt, Artificial Sequence
  Description of Artificial Sequence: Synthetic oligonucleotide
gaagcguccuccacuaacc

SEQ ID NO: 1728164 - RNA, 19 nt, Artificial Sequence
  Description of Artificial Sequence: Synthetic oligonucleotide
uggaauccuagacggcugc

SEQ ID NO: 1728165 - RNA, 19 nt, Artificial Sequence
  Description of Artificial Sequence: Synthetic oligonucleotide
accuaggcugcgugggucc

SEQ ID NO: 1728166 - RNA, 19 nt, Artificial Sequence
  Description of Artificial Sequence: Synthetic oligonucleotide
gaauccuagacggcugcgg

SEQ ID NO: 1728167 - RNA, 19 nt, Artificial Sequence
  Description of Artificial Sequence: Synthetic oligonucleotide
gguagagugccucaguuuc

SEQ ID NO: 1728168 - RNA, 19 nt, Artificial Sequence
  Description of Artificial Sequence: Synthetic oligonucleotide
gaccugaagggcuuaucug

SEQ ID NO: 1728169 - RNA, 19 nt, Artificial Sequence
  Description of Artificial Sequence: Synthetic oligonucleotide
cuaccacugcucaaauacc

SEQ ID NO: 1728170 - RNA, 19 nt, Artificial Sequence
  Description of Artificial Sequence: Synthetic oligonucleotide
aacccauaggguugagaga

SEQ ID NO: 1728171 - RNA, 19 nt, Artificial Sequence
  Description of Artificial Sequence: Synthetic oligonucleotide
ugucuucaguuaauauaca

SEQ ID NO: 1728172 - RNA, 19 nt, Artificial Sequence
  Description of Artificial Sequence: Synthetic oligonucleotide
gaaacucgggcuggggacg

SEQ ID NO: 1728173 - RNA, 19 nt, Artificial Sequence
  Description of Artificial Sequence: Synthetic oligonucleotide
ugagagagagagagagaga

SEQ ID NO: 1728174 - RNA, 19 nt, Artificial Sequence
  Description of Artificial Sequence: Synthetic oligonucleotide
cauggagugugugagcuac

SEQ ID NO: 1728175 - RNA, 19 nt, Artificial Sequence
  Description of Artificial Sequence: Synthetic oligonucleotide
gugugagcuacaugauacg

SEQ ID NO: 1728176 - RNA, 19 nt, Artificial Sequence
  Description of Artificial Sequence: Synthetic oligonucleotide
cacgacgcgggcaggagcg

SEQ ID NO: 1728177 - RNA, 19 nt, Artificial Sequence
  Description of Artificial Sequence: Synthetic oligonucleotide
ugaagcucaugcgggaagc

SEQ ID NO: 1728178 - RNA, 19 nt, Artificial Sequence
  Description of Artificial Sequence: Synthetic oligonucleotide
cauggcgcaggauucuggc

SEQ ID NO: 1728179 - RNA, 19 nt, Artificial Sequence
  Description of Artificial Sequence: Synthetic oligonucleotide
caccguaaaugucuugggc

SEQ ID NO: 1728180 - RNA, 19 nt, Artificial Sequence
  Description of Artificial Sequence: Synthetic oligonucleotide
aggagagagagagagaguu

SEQ ID NO: 1728181 - RNA, 19 nt, Artificial Sequence
  Description of Artificial Sequence: Synthetic oligonucleotide
acacaugaccugcucuauc

SEQ ID NO: 1728182 - RNA, 19 nt, Artificial Sequence
  Description of Artificial Sequence: Synthetic oligonucleotide
acccucucacccuuagggg

SEQ ID NO: 1728183 - RNA, 19 nt, Artificial Sequence
  Description of Artificial Sequence: Synthetic oligonucleotide
uccugucgcugucaggagc

SEQ ID NO: 1728184 - RNA, 19 nt, Artificial Sequence
  Description of Artificial Sequence: Synthetic oligonucleotide
agagagagagaggaggaga

SEQ ID NO: 1728185 - RNA, 19 nt, Artificial Sequence
  Description of Artificial Sequence: Synthetic oligonucleotide
gacggcugcggcgaggacg

SEQ ID NO: 1728186 - RNA, 19 nt, Artificial Sequence
  Description of Artificial Sequence: Synthetic oligonucleotide
acacgacgcgggcaggagc

SEQ ID NO: 1728187 - RNA, 19 nt, Artificial Sequence
  Description of Artificial Sequence: Synthetic oligonucleotide
cuuggcgcucugcagagug

SEQ ID NO: 1728188 - RNA, 19 nt, Artificial Sequence
  Description of Artificial Sequence: Synthetic oligonucleotide
accaugggccgcgaggacc

SEQ ID NO: 1728189 - RNA, 19 nt, Artificial Sequence
  Description of Artificial Sequence: Synthetic oligonucleotide
gagagacgaguuaagggac

SEQ ID NO: 1728190 - RNA, 19 nt, Artificial Sequence
  Description of Artificial Sequence: Synthetic oligonucleotide
ucgggaagcguccuccacu

SEQ ID NO: 1728191 - RNA, 19 nt, Artificial Sequence
  Description of Artificial Sequence: Synthetic oligonucleotide
uuauguagcuuggcauucc

SEQ ID NO: 1728192 - RNA, 19 nt, Artificial Sequence
  Description of Artificial Sequence: Synthetic oligonucleotide
gacuuggcgcucugcagag

SEQ ID NO: 1728193 - RNA, 19 nt, Artificial Sequence
  Description of Artificial Sequence: Synthetic oligonucleotide
auccuagacggcugcggcg

SEQ ID NO: 1728194 - RNA, 19 nt, Artificial Sequence
  Description of Artificial Sequence: Synthetic oligonucleotide
aucaugguccuguguccac

SEQ ID NO: 1728195 - RNA, 19 nt, Artificial Sequence
  Description of Artificial Sequence: Synthetic oligonucleotide
gaggcaacccauaggguug

SEQ ID NO: 1728196 - RNA, 19 nt, Artificial Sequence
  Description of Artificial Sequence: Synthetic oligonucleotide
accaaacuguacuguggag

SEQ ID NO: 1728197 - RNA, 19 nt, Artificial Sequence
  Description of Artificial Sequence: Synthetic oligonucleotide
agagagagagagaguuccc

SEQ ID NO: 1728198 - RNA, 19 nt, Artificial Sequence
  Description of Artificial Sequence: Synthetic oligonucleotide
acgcgcgccucucagcggc

SEQ ID NO: 1728199 - RNA, 19 nt, Artificial Sequence
  Description of Artificial Sequence: Synthetic oligonucleotide
agagagagagaguucccaa

SEQ ID NO: 1728200 - RNA, 19 nt, Artificial Sequence
  Description of Artificial Sequence: Synthetic oligonucleotide
gacagaccuaggcugcgug

SEQ ID NO: 1728201 - RNA, 19 nt, Artificial Sequence
  Description of Artificial Sequence: Synthetic oligonucleotide
agacacaugaccugcucua

SEQ ID NO: 1728202 - RNA, 19 nt, Artificial Sequence
  Description of Artificial Sequence: Synthetic oligonucleotide
uucauggacugagacacau

SEQ ID NO: 1728203 - RNA, 19 nt, Artificial Sequence
  Description of Artificial Sequence: Synthetic oligonucleotide
gagacgaguuaagggacag

SEQ ID NO: 1728204 - RNA, 19 nt, Artificial Sequence
  Description of Artificial Sequence: Synthetic oligonucleotide
auacgcaucugcugcccag

SEQ ID NO: 1728205 - RNA, 19 nt, Artificial Sequence
  Description of Artificial Sequence: Synthetic oligonucleotide
uagucgggagcgcacgcgc

SEQ ID NO: 1728206 - RNA, 19 nt, Artificial Sequence
  Description of Artificial Sequence: Synthetic oligonucleotide
ugguauugugcuugcuacu

SEQ ID NO: 1728207 - RNA, 19 nt, Artificial Sequence
  Description of Artificial Sequence: Synthetic oligonucleotide
gacacccauuacaaagaag

SEQ ID NO: 1728208 - RNA, 19 nt, Artificial Sequence
  Description of Artificial Sequence: Synthetic oligonucleotide
gagagagagagaggaggag

SEQ ID NO: 1728209 - RNA, 19 nt, Artificial Sequence
  Description of Artificial Sequence: Synthetic oligonucleotide
cauccugucgcugucagga

SEQ ID NO: 1728210 - RNA, 19 nt, Artificial Sequence
  Description of Artificial Sequence: Synthetic oligonucleotide
ccaaacuguacuguggagc

SEQ ID NO: 1728211 - RNA, 19 nt, Artificial Sequence
  Description of Artificial Sequence: Synthetic oligonucleotide
agagagagagagaggagga

SEQ ID NO: 1728212 - RNA, 19 nt, Artificial Sequence
  Description of Artificial Sequence: Synthetic oligonucleotide
agagagagagagagagagg

SEQ ID NO: 1728213 - RNA, 19 nt, Artificial Sequence
  Description of Artificial Sequence: Synthetic oligonucleotide
acgccccuagacuggaauc

SEQ ID NO: 1728214 - RNA, 19 nt, Artificial Sequence
  Description of Artificial Sequence: Synthetic oligonucleotide
caggaggacacccauuaca

SEQ ID NO: 1728215 - RNA, 19 nt, Artificial Sequence
  Description of Artificial Sequence: Synthetic oligonucleotide
guuauguagcuuggcauuc

SEQ ID NO: 1728216 - RNA, 19 nt, Artificial Sequence
  Description of Artificial Sequence: Synthetic oligonucleotide
cuggaauccuagacggcug

SEQ ID NO: 1728217 - RNA, 19 nt, Artificial Sequence
  Description of Artificial Sequence: Synthetic oligonucleotide
gagagagagagaguuccca

SEQ ID NO: 1728218 - RNA, 19 nt, Artificial Sequence
  Description of Artificial Sequence: Synthetic oligonucleotide
ugauacgcaucugcugccc

SEQ ID NO: 1728219 - RNA, 19 nt, Artificial Sequence
  Description of Artificial Sequence: Synthetic oligonucleotide
ucuuagccucccuggagaa

SEQ ID NO: 1728220 - RNA, 19 nt, Artificial Sequence
  Description of Artificial Sequence: Synthetic oligonucleotide
uaggguugagagagagaga

SEQ ID NO: 1728221 - RNA, 19 nt, Artificial Sequence
  Description of Artificial Sequence: Synthetic oligonucleotide
uccuagacggcugcggcga

SEQ ID NO: 1728222 - RNA, 19 nt, Artificial Sequence
  Description of Artificial Sequence: Synthetic oligonucleotide
agggaacaagguagagugc

SEQ ID NO: 1728223 - RNA, 19 nt, Artificial Sequence
  Description of Artificial Sequence: Synthetic oligonucleotide
ucaugcgggaagcgauggc

SEQ ID NO: 1728224 - RNA, 19 nt, Artificial Sequence
  Description of Artificial Sequence: Synthetic oligonucleotide
cuuaagcgagcugaagcuc

SEQ ID NO: 1728225 - RNA, 19 nt, Artificial Sequence
  Description of Artificial Sequence: Synthetic oligonucleotide
auccgcaccguaaaugucu

SEQ ID NO: 1728226 - RNA, 19 nt, Artificial Sequence
  Description of Artificial Sequence: Synthetic oligonucleotide
acgauccgcaccguaaaug

SEQ ID NO: 1728227 - RNA, 19 nt, Artificial Sequence
  Description of Artificial Sequence: Synthetic oligonucleotide
cucaugcgggaagcgaugg

SEQ ID NO: 1728228 - RNA, 19 nt, Artificial Sequence
  Description of Artificial Sequence: Synthetic oligonucleotide
gugcgugucugucaccggc

SEQ ID NO: 1728229 - RNA, 19 nt, Artificial Sequence
  Description of Artificial Sequence: Synthetic oligonucleotide
ccuuaggggucucuuagcc

SEQ ID NO: 1728230 - RNA, 19 nt, Artificial Sequence
  Description of Artificial Sequence: Synthetic oligonucleotide
uccucuuaagcgagcugaa

SEQ ID NO: 1728231 - RNA, 19 nt, Artificial Sequence
  Description of Artificial Sequence: Synthetic oligonucleotide
gacgacgcgcgccucucag

SEQ ID NO: 1728232 - RNA, 19 nt, Artificial Sequence
  Description of Artificial Sequence: Synthetic oligonucleotide
cucuuagccucccuggaga

SEQ ID NO: 1728233 - RNA, 19 nt, Artificial Sequence
  Description of Artificial Sequence: Synthetic oligonucleotide
ugcgugucugucaccggcu

SEQ ID NO: 1728234 - RNA, 19 nt, Artificial Sequence
  Description of Artificial Sequence: Synthetic oligonucleotide
gagacagaccuaggcugcg

SEQ ID NO: 1728235 - RNA, 19 nt, Artificial Sequence
  Description of Artificial Sequence: Synthetic oligonucleotide
ugaccugcucuaucaggac

SEQ ID NO: 1728236 - RNA, 19 nt, Artificial Sequence
  Description of Artificial Sequence: Synthetic oligonucleotide
acgacgcgcgccucucagc

SEQ ID NO: 1728237 - RNA, 19 nt, Artificial Sequence
  Description of Artificial Sequence: Synthetic oligonucleotide
uggaggcaacccauagggu

SEQ ID NO: 1728238 - RNA, 19 nt, Artificial Sequence
  Description of Artificial Sequence: Synthetic oligonucleotide
ggaagcguccuccacuaac

SEQ ID NO: 1728239 - RNA, 19 nt, Artificial Sequence
  Description of Artificial Sequence: Synthetic oligonucleotide
caagccagcucccuauuga

SEQ ID NO: 1728240 - RNA, 19 nt, Artificial Sequence
  Description of Artificial Sequence: Synthetic oligonucleotide
agagagagagagagaggag

SEQ ID NO: 1728241 - RNA, 19 nt, Artificial Sequence
  Description of Artificial Sequence: Synthetic oligonucleotide
uacaccuaccacugcucaa

SEQ ID NO: 1728242 - RNA, 19 nt, Artificial Sequence
  Description of Artificial Sequence: Synthetic oligonucleotide
gauacgcaucugcugccca

SEQ ID NO: 1728243 - RNA, 19 nt, Artificial Sequence
  Description of Artificial Sequence: Synthetic oligonucleotide
cggagagacgaguuaaggg

SEQ ID NO: 1728244 - RNA, 19 nt, Artificial Sequence
  Description of Artificial Sequence: Synthetic oligonucleotide
uaagcgagcugaagcucau

SEQ ID NO: 1728245 - RNA, 19 nt, Artificial Sequence
  Description of Artificial Sequence: Synthetic oligonucleotide
uagagugccucaguuucuc

SEQ ID NO: 1728246 - RNA, 19 nt, Artificial Sequence
  Description of Artificial Sequence: Synthetic oligonucleotide
guagucgggagcgcacgcg

SEQ ID NO: 1728247 - RNA, 19 nt, Artificial Sequence
  Description of Artificial Sequence: Synthetic oligonucleotide
acaccuaccacugcucaaa

SEQ ID NO: 1728248 - RNA, 19 nt, Artificial Sequence
  Description of Artificial Sequence: Synthetic oligonucleotide
agucuccgacggcagcggg

SEQ ID NO: 1728249 - RNA, 19 nt, Artificial Sequence
  Description of Artificial Sequence: Synthetic oligonucleotide
gcaccguaaaugucuuggg

SEQ ID NO: 1728250 - RNA, 19 nt, Artificial Sequence
  Description of Artificial Sequence: Synthetic oligonucleotide
aucucggcguccaugguga

SEQ ID NO: 1728251 - RNA, 19 nt, Artificial Sequence
  Description of Artificial Sequence: Synthetic oligonucleotide
guuacaccuaccacugcuc

SEQ ID NO: 1728252 - RNA, 19 nt, Artificial Sequence
  Description of Artificial Sequence: Synthetic oligonucleotide
auaccaggguucccaugug

SEQ ID NO: 1728253 - RNA, 19 nt, Artificial Sequence
  Description of Artificial Sequence: Synthetic oligonucleotide
agguagagugccucaguuu

SEQ ID NO: 1728254 - RNA, 19 nt, Artificial Sequence
  Description of Artificial Sequence: Synthetic oligonucleotide
uacgcaucugcugcccagc

SEQ ID NO: 1728255 - RNA, 19 nt, Artificial Sequence
  Description of Artificial Sequence: Synthetic oligonucleotide
cacaggaggacacccauua

SEQ ID NO: 1728256 - RNA, 19 nt, Artificial Sequence
  Description of Artificial Sequence: Synthetic oligonucleotide
gccugagacagaccuaggc

SEQ ID NO: 1728257 - RNA, 19 nt, Artificial Sequence
  Description of Artificial Sequence: Synthetic oligonucleotide
cgaguuaagggacagucuc

SEQ ID NO: 1728258 - RNA, 19 nt, Artificial Sequence
  Description of Artificial Sequence: Synthetic oligonucleotide
gucgcugucaggagcagca

SEQ ID NO: 1728259 - RNA, 19 nt, Artificial Sequence
  Description of Artificial Sequence: Synthetic oligonucleotide
ugcggcgaggacgacgcgc

SEQ ID NO: 1728260 - RNA, 19 nt, Artificial Sequence
  Description of Artificial Sequence: Synthetic oligonucleotide
gacuggaauccuagacggc

SEQ ID NO: 1728261 - RNA, 19 nt, Artificial Sequence
  Description of Artificial Sequence: Synthetic oligonucleotide
aggguucccaugugguuau

SEQ ID NO: 1728262 - RNA, 19 nt, Artificial Sequence
  Description of Artificial Sequence: Synthetic oligonucleotide
uaaugguauugugcuugcu

SEQ ID NO: 1728263 - RNA, 19 nt, Artificial Sequence
  Description of Artificial Sequence: Synthetic oligonucleotide
agagagaggaggagagaga

SEQ ID NO: 1728264 - RNA, 19 nt, Artificial Sequence
  Description of Artificial Sequence: Synthetic oligonucleotide
gcauucccaaaauuugaga

SEQ ID NO: 1728265 - RNA, 19 nt, Artificial Sequence
  Description of Artificial Sequence: Synthetic oligonucleotide
aggcccauccugucgcugu

SEQ ID NO: 1728266 - RNA, 19 nt, Artificial Sequence
  Description of Artificial Sequence: Synthetic oligonucleotide
cagccauggcgcaggauuc

SEQ ID NO: 1728267 - RNA, 19 nt, Artificial Sequence
  Description of Artificial Sequence: Synthetic oligonucleotide
augcgggaagcgauggcuc

SEQ ID NO: 1728268 - RNA, 19 nt, Artificial Sequence
  Description of Artificial Sequence: Synthetic oligonucleotide
cauaggguugagagagaga

SEQ ID NO: 1728269 - RNA, 19 nt, Artificial Sequence
  Description of Artificial Sequence: Synthetic oligonucleotide
acgaguuaagggacagucu

SEQ ID NO: 1728270 - RNA, 19 nt, Artificial Sequence
  Description of Artificial Sequence: Synthetic oligonucleotide
cccuagacuggaauccuag

SEQ ID NO: 1728271 - RNA, 19 nt, Artificial Sequence
  Description of Artificial Sequence: Synthetic oligonucleotide
cucccagacccucaacuca

SEQ ID NO: 1728272 - RNA, 19 nt, Artificial Sequence
  Description of Artificial Sequence: Synthetic oligonucleotide
agcucccuauugauggcuc

SEQ ID NO: 1728273 - RNA, 19 nt, Artificial Sequence
  Description of Artificial Sequence: Synthetic oligonucleotide
guucccaugugguuaugua

SEQ ID NO: 1728274 - RNA, 19 nt, Artificial Sequence
  Description of Artificial Sequence: Synthetic oligonucleotide
aaacuguacuguggagcau

SEQ ID NO: 1728275 - RNA, 19 nt, Artificial Sequence
  Description of Artificial Sequence: Synthetic oligonucleotide
aggaccugaagggcuuauc

SEQ ID NO: 1728276 - RNA, 19 nt, Artificial Sequence
  Description of Artificial Sequence: Synthetic oligonucleotide
uccgcaccguaaaugucuu

SEQ ID NO: 1728277 - RNA, 19 nt, Artificial Sequence
  Description of Artificial Sequence: Synthetic oligonucleotide
ugucgcugucaggagcagc

SEQ ID NO: 1728278 - RNA, 19 nt, Artificial Sequence
  Description of Artificial Sequence: Synthetic oligonucleotide
agcggggacacgacgcggg

SEQ ID NO: 1728279 - RNA, 19 nt, Artificial Sequence
  Description of Artificial Sequence: Synthetic oligonucleotide
agagagagaggaggagaga

SEQ ID NO: 1728280 - RNA, 19 nt, Artificial Sequence
  Description of Artificial Sequence: Synthetic oligonucleotide
guuaagggacagucuccga

SEQ ID NO: 1728281 - RNA, 19 nt, Artificial Sequence
  Description of Artificial Sequence: Synthetic oligonucleotide
gccauugucaaagauucaa

SEQ ID NO: 1728282 - RNA, 19 nt, Artificial Sequence
  Description of Artificial Sequence: Synthetic oligonucleotide
accaggguucccauguggu

SEQ ID NO: 1728283 - RNA, 19 nt, Artificial Sequence
  Description of Artificial Sequence: Synthetic oligonucleotide
agagagagagagagagaga

SEQ ID NO: 1728284 - RNA, 19 nt, Artificial Sequence
  Description of Artificial Sequence: Synthetic oligonucleotide
guugagagagagagagaga

SEQ ID NO: 1728285 - RNA, 19 nt, Artificial Sequence
  Description of Artificial Sequence: Synthetic oligonucleotide
ucauggagugugugagcua

SEQ ID NO: 1728286 - RNA, 19 nt, Artificial Sequence
  Description of Artificial Sequence: Synthetic oligonucleotide
agaccuaggcugcgugggu

SEQ ID NO: 1728287 - RNA, 19 nt, Artificial Sequence
  Description of Artificial Sequence: Synthetic oligonucleotide
agggcuuaucuggccacag

SEQ ID NO: 1728288 - RNA, 19 nt, Artificial Sequence
  Description of Artificial Sequence: Synthetic oligonucleotide
cgcaccguaaaugucuugg

SEQ ID NO: 1728289 - RNA, 19 nt, Artificial Sequence
  Description of Artificial Sequence: Synthetic oligonucleotide
caaaaccaaacuguacugu

SEQ ID NO: 1728290 - RNA, 19 nt, Artificial Sequence
  Description of Artificial Sequence: Synthetic oligonucleotide
gacacgacgcgggcaggag

SEQ ID NO: 1728291 - RNA, 19 nt, Artificial Sequence
  Description of Artificial Sequence: Synthetic oligonucleotide
gacgcgcgccucucagcgg

SEQ ID NO: 1728292 - RNA, 19 nt, Artificial Sequence
  Description of Artificial Sequence: Synthetic oligonucleotide
ccauaggguugagagagag

SEQ ID NO: 1728293 - RNA, 19 nt, Artificial Sequence
  Description of Artificial Sequence: Synthetic oligonucleotide
ggcgcucggaaacucgggc

SEQ ID NO: 1728294 - RNA, 19 nt, Artificial Sequence
  Description of Artificial Sequence: Synthetic oligonucleotide
gcgugcgugucugucaccg

SEQ ID NO: 1728295 - RNA, 19 nt, Artificial Sequence
  Description of Artificial Sequence: Synthetic oligonucleotide
cuguacuguggagcauucc

SEQ ID NO: 1728296 - RNA, 19 nt, Artificial Sequence
  Description of Artificial Sequence: Synthetic oligonucleotide
cacugcuagaguucuucaa

SEQ ID NO: 1728297 - RNA, 19 nt, Artificial Sequence
  Description of Artificial Sequence: Synthetic oligonucleotide
gauccgcaccguaaauguc

SEQ ID NO: 1728298 - RNA, 19 nt, Artificial Sequence
  Description of Artificial Sequence: Synthetic oligonucleotide
cucggaaacucgggcuggg

SEQ ID NO: 1728299 - RNA, 19 nt, Artificial Sequence
  Description of Artificial Sequence: Synthetic oligonucleotide
gguuauguagcuuggcauu

SEQ ID NO: 1728300 - RNA, 19 nt, Artificial Sequence
  Description of Artificial Sequence: Synthetic oligonucleotide
ggaauccuagacggcugcg

SEQ ID NO: 1728301 - RNA, 19 nt, Artificial Sequence
  Description of Artificial Sequence: Synthetic oligonucleotide
gucgggagcgcacgcgcgc

SEQ ID NO: 1728302 - RNA, 19 nt, Artificial Sequence
  Description of Artificial Sequence: Synthetic oligonucleotide
ugcuacuggugccgccuuc

SEQ ID NO: 1728303 - RNA, 19 nt, Artificial Sequence
  Description of Artificial Sequence: Synthetic oligonucleotide
guggagcauuccuuugcuc

SEQ ID NO: 1728304 - RNA, 19 nt, Artificial Sequence
  Description of Artificial Sequence: Synthetic oligonucleotide
ggaccugaagggcuuaucu

SEQ ID NO: 1728305 - RNA, 19 nt, Artificial Sequence
  Description of Artificial Sequence: Synthetic oligonucleotide
cucggcguccauggugacg

SEQ ID NO: 1728306 - RNA, 19 nt, Artificial Sequence
  Description of Artificial Sequence: Synthetic oligonucleotide
cuagacggcugcggcgagg

SEQ ID NO: 1728307 - RNA, 19 nt, Artificial Sequence
  Description of Artificial Sequence: Synthetic oligonucleotide
ucucgcaguugaacuccau

SEQ ID NO: 1728308 - RNA, 19 nt, Artificial Sequence
  Description of Artificial Sequence: Synthetic oligonucleotide
gcagcggggacacgacgcg

SEQ ID NO: 1728309 - RNA, 19 nt, Artificial Sequence
  Description of Artificial Sequence: Synthetic oligonucleotide
gagcgcacgcgcgcgugcg

SEQ ID NO: 1728310 - RNA, 19 nt, Artificial Sequence
  Description of Artificial Sequence: Synthetic oligonucleotide
cuuaggggucucuuagccu

SEQ ID NO: 1728311 - RNA, 19 nt, Artificial Sequence
  Description of Artificial Sequence: Synthetic oligonucleotide
uccgcgcgcccucgggaag

SEQ ID NO: 1728312 - RNA, 19 nt, Artificial Sequence
  Description of Artificial Sequence: Synthetic oligonucleotide
gguagucgggagcgcacgc

SEQ ID NO: 1728313 - RNA, 19 nt, Artificial Sequence
  Description of Artificial Sequence: Synthetic oligonucleotide
cucgggaagcguccuccac

SEQ ID NO: 1728314 - RNA, 19 nt, Artificial Sequence
  Description of Artificial Sequence: Synthetic oligonucleotide
auguagcuuggcauuccca

SEQ ID NO: 1728315 - RNA, 19 nt, Artificial Sequence
  Description of Artificial Sequence: Synthetic oligonucleotide
agucgggagcgcacgcgcg

SEQ ID NO: 1728316 - RNA, 19 nt, Artificial Sequence
  Description of Artificial Sequence: Synthetic oligonucleotide
gcugcggcgaggacgacgc

SEQ ID NO: 1728317 - RNA, 19 nt, Artificial Sequence
  Description of Artificial Sequence: Synthetic oligonucleotide
cugcguggguccccagcgg

SEQ ID NO: 1728318 - RNA, 19 nt, Artificial Sequence
  Description of Artificial Sequence: Synthetic oligonucleotide
accuaccacugcucaaaua

SEQ ID NO: 1728319 - RNA, 19 nt, Artificial Sequence
  Description of Artificial Sequence: Synthetic oligonucleotide
aggacgacgcgcgccucuc

SEQ ID NO: 1728320 - RNA, 19 nt, Artificial Sequence
  Description of Artificial Sequence: Synthetic oligonucleotide
ggaggcaacccauaggguu

SEQ ID NO: 1728321 - RNA, 19 nt, Artificial Sequence
  Description of Artificial Sequence: Synthetic oligonucleotide
agagaggaggagagagaga

SEQ ID NO: 1728322 - RNA, 19 nt, Artificial Sequence
  Description of Artificial Sequence: Synthetic oligonucleotide
cagucuccgacggcagcgg

SEQ ID NO: 1728323 - RNA, 19 nt, Artificial Sequence
  Description of Artificial Sequence: Synthetic oligonucleotide
ccggagagacgaguuaagg

SEQ ID NO: 1728324 - RNA, 19 nt, Artificial Sequence
  Description of Artificial Sequence: Synthetic oligonucleotide
cccaaaauuugagacacaa

SEQ ID NO: 1728325 - RNA, 19 nt, Artificial Sequence
  Description of Artificial Sequence: Synthetic oligonucleotide
gcucccuauugauggcucc

SEQ ID NO: 1728326 - RNA, 19 nt, Artificial Sequence
  Description of Artificial Sequence: Synthetic oligonucleotide
ggcagcggggacacgacgc

SEQ ID NO: 1728327 - RNA, 19 nt, Artificial Sequence
  Description of Artificial Sequence: Synthetic oligonucleotide
cuggggacgccggggacgc

SEQ ID NO: 1728328 - RNA, 19 nt, Artificial Sequence
  Description of Artificial Sequence: Synthetic oligonucleotide
cuucauggacugagacaca

SEQ ID NO: 1728329 - RNA, 19 nt, Artificial Sequence
  Description of Artificial Sequence: Synthetic oligonucleotide
acccucaacucagcugucu

SEQ ID NO: 1728330 - RNA, 19 nt, Artificial Sequence
  Description of Artificial Sequence: Synthetic oligonucleotide
agacgaguuaagggacagu

SEQ ID NO: 1728331 - RNA, 19 nt, Artificial Sequence
  Description of Artificial Sequence: Synthetic oligonucleotide
ggacccucucacccuuagg

SEQ ID NO: 1728332 - RNA, 19 nt, Artificial Sequence
  Description of Artificial Sequence: Synthetic oligonucleotide
cacccauuacaaagaaggu

SEQ ID NO: 1728333 - RNA, 19 nt, Artificial Sequence
  Description of Artificial Sequence: Synthetic oligonucleotide
ggcgcaggauucuggccag

SEQ ID NO: 1728334 - RNA, 19 nt, Artificial Sequence
  Description of Artificial Sequence: Synthetic oligonucleotide
ucacccuuaggggucucuu

SEQ ID NO: 1728335 - RNA, 19 nt, Artificial Sequence
  Description of Artificial Sequence: Synthetic oligonucleotide
gcucccagacccucaacuc

SEQ ID NO: 1728336 - RNA, 19 nt, Artificial Sequence
  Description of Artificial Sequence: Synthetic oligonucleotide
agacagaccuaggcugcgu

SEQ ID NO: 1728337 - RNA, 19 nt, Artificial Sequence
  Description of Artificial Sequence: Synthetic oligonucleotide
uugcuacuggugccgccuu

SEQ ID NO: 1728338 - RNA, 19 nt, Artificial Sequence
  Description of Artificial Sequence: Synthetic oligonucleotide
acgccggggacgccccuag

SEQ ID NO: 1728339 - RNA, 19 nt, Artificial Sequence
  Description of Artificial Sequence: Synthetic oligonucleotide
agaggaggagagagagaga

SEQ ID NO: 1728340 - RNA, 19 nt, Artificial Sequence
  Description of Artificial Sequence: Synthetic oligonucleotide
gccaaucauggagugugug

SEQ ID NO: 1728341 - RNA, 19 nt, Artificial Sequence
  Description of Artificial Sequence: Synthetic oligonucleotide
aggcaacccauaggguuga

SEQ ID NO: 1728342 - RNA, 19 nt, Artificial Sequence
  Description of Artificial Sequence: Synthetic oligonucleotide
cccaaacaagccagcuccc

SEQ ID NO: 1728343 - RNA, 19 nt, Artificial Sequence
  Description of Artificial Sequence: Synthetic oligonucleotide
gacgccccuagacuggaau

SEQ ID NO: 1728344 - RNA, 19 nt, Artificial Sequence
  Description of Artificial Sequence: Synthetic oligonucleotide
aggaggagagagagagaga

SEQ ID NO: 1728345 - RNA, 19 nt, Artificial Sequence
  Description of Artificial Sequence: Synthetic oligonucleotide
acggcagcggggacacgac

SEQ ID NO: 1728346 - RNA, 19 nt, Artificial Sequence
  Description of Artificial Sequence: Synthetic oligonucleotide
gcuggggacgccggggacg

SEQ ID NO: 1728347 - RNA, 19 nt, Artificial Sequence
  Description of Artificial Sequence: Synthetic oligonucleotide
ggagagagagagagaguuc

SEQ ID NO: 1728348 - RNA, 19 nt, Artificial Sequence
  Description of Artificial Sequence: Synthetic oligonucleotide
gcggcgaggacgacgcgcg

SEQ ID NO: 1728349 - RNA, 19 nt, Artificial Sequence
  Description of Artificial Sequence: Synthetic oligonucleotide
agcggcccgacggggucgc

SEQ ID NO: 1728350 - RNA, 19 nt, Artificial Sequence
  Description of Artificial Sequence: Synthetic oligonucleotide
gcucggaaacucgggcugg

SEQ ID NO: 1728351 - RNA, 19 nt, Artificial Sequence
  Description of Artificial Sequence: Synthetic oligonucleotide
gacggggucgcggggccgc

SEQ ID NO: 1728352 - RNA, 19 nt, Artificial Sequence
  Description of Artificial Sequence: Synthetic oligonucleotide
cuaggcugcgugggucccc

SEQ ID NO: 1728353 - RNA, 19 nt, Artificial Sequence
  Description of Artificial Sequence: Synthetic oligonucleotide
ccggcgcucggaaacucgg

SEQ ID NO: 1728354 - RNA, 19 nt, Artificial Sequence
  Description of Artificial Sequence: Synthetic oligonucleotide
gcucccaaggggccaggcc

SEQ ID NO: 1728355 - RNA, 19 nt, Artificial Sequence
  Description of Artificial Sequence: Synthetic oligonucleotide
cagcggggacacgacgcgg

SEQ ID NO: 1728356 - RNA, 19 nt, Artificial Sequence
  Description of Artificial Sequence: Synthetic oligonucleotide
cgacgcgcgccucucagcg

SEQ ID NO: 1728357 - RNA, 19 nt, Artificial Sequence
  Description of Artificial Sequence: Synthetic oligonucleotide
caagguagagugccucagu

SEQ ID NO: 1728358 - RNA, 19 nt, Artificial Sequence
  Description of Artificial Sequence: Synthetic oligonucleotide
ucucggcguccauggugac

SEQ ID NO: 1728359 - RNA, 19 nt, Artificial Sequence
  Description of Artificial Sequence: Synthetic oligonucleotide
agccaaucauggagugugu

SEQ ID NO: 1728360 - RNA, 19 nt, Artificial Sequence
  Description of Artificial Sequence: Synthetic oligonucleotide
ccucuuaagcgagcugaag

SEQ ID NO: 1728361 - RNA, 19 nt, Artificial Sequence
  Description of Artificial Sequence: Synthetic oligonucleotide
ggcugcguggguccccagc

SEQ ID NO: 1728362 - RNA, 19 nt, Artificial Sequence
  Description of Artificial Sequence: Synthetic oligonucleotide
gacacaugaccugcucuau

SEQ ID NO: 1728363 - RNA, 19 nt, Artificial Sequence
  Description of Artificial Sequence: Synthetic oligonucleotide
gaggagagagagagagagu

SEQ ID NO: 1728364 - RNA, 19 nt, Artificial Sequence
  Description of Artificial Sequence: Synthetic oligonucleotide
gcucaugcgggaagcgaug

SEQ ID NO: 1728365 - RNA, 19 nt, Artificial Sequence
  Description of Artificial Sequence: Synthetic oligonucleotide
gccggggacgccccuagac

SEQ ID NO: 1728366 - RNA, 19 nt, Artificial Sequence
  Description of Artificial Sequence: Synthetic oligonucleotide
caaagaagguagagccaau

SEQ ID NO: 1728367 - RNA, 19 nt, Artificial Sequence
  Description of Artificial Sequence: Synthetic oligonucleotide
acucgggacuuggcgcucu

SEQ ID NO: 1728368 - RNA, 19 nt, Artificial Sequence
  Description of Artificial Sequence: Synthetic oligonucleotide
ggcgaggacgacgcgcgcc

SEQ ID NO: 1728369 - RNA, 19 nt, Artificial Sequence
  Description of Artificial Sequence: Synthetic oligonucleotide
auggagugugugagcuaca

SEQ ID NO: 1728370 - RNA, 19 nt, Artificial Sequence
  Description of Artificial Sequence: Synthetic oligonucleotide
gaggacgacgcgcgccucu

SEQ ID NO: 1728371 - RNA, 19 nt, Artificial Sequence
  Description of Artificial Sequence: Synthetic oligonucleotide
acgacgcgggcaggagcgg

SEQ ID NO: 1728372 - RNA, 19 nt, Artificial Sequence
  Description of Artificial Sequence: Synthetic oligonucleotide
gccggagagacgaguuaag

SEQ ID NO: 1728373 - RNA, 19 nt, Artificial Sequence
  Description of Artificial Sequence: Synthetic oligonucleotide
cagcauggaggcaacccau

SEQ ID NO: 1728374 - RNA, 19 nt, Artificial Sequence
  Description of Artificial Sequence: Synthetic oligonucleotide
cccggcgcucggaaacucg

SEQ ID NO: 1728375 - RNA, 19 nt, Artificial Sequence
  Description of Artificial Sequence: Synthetic oligonucleotide
cucgggacuuggcgcucug

SEQ ID NO: 1728376 - RNA, 19 nt, Artificial Sequence
  Description of Artificial Sequence: Synthetic oligonucleotide
gcgcgugcgugucugucac

SEQ ID NO: 1728377 - RNA, 19 nt, Artificial Sequence
  Description of Artificial Sequence: Synthetic oligonucleotide
cggggacgccccuagacug

SEQ ID NO: 1728378 - RNA, 19 nt, Artificial Sequence
  Description of Artificial Sequence: Synthetic oligonucleotide
cgccccuagacuggaaucc

SEQ ID NO: 1728379 - RNA, 19 nt, Artificial Sequence
  Description of Artificial Sequence: Synthetic oligonucleotide
cgcucggaaacucgggcug

SEQ ID NO: 1728380 - RNA, 19 nt, Artificial Sequence
  Description of Artificial Sequence: Synthetic oligonucleotide
ggagcgcacgcgcgcgugc

SEQ ID NO: 1728381 - RNA, 19 nt, Artificial Sequence
  Description of Artificial Sequence: Synthetic oligonucleotide
acuuggcgcucugcagagu

SEQ ID NO: 1728382 - RNA, 19 nt, Artificial Sequence
  Description of Artificial Sequence: Synthetic oligonucleotide
ggcuccgcgcgcccucggg

SEQ ID NO: 1728383 - RNA, 19 nt, Artificial Sequence
  Description of Artificial Sequence: Synthetic oligonucleotide
cagcggcccgacggggucg

SEQ ID NO: 1728384 - RNA, 19 nt, Artificial Sequence
  Description of Artificial Sequence: Synthetic oligonucleotide
agcgcacgcgcgcgugcgu

SEQ ID NO: 1728385 - RNA, 19 nt, Artificial Sequence
  Description of Artificial Sequence: Synthetic oligonucleotide
gacccucaacucagcuguc

SEQ ID NO: 1728386 - RNA, 19 nt, Artificial Sequence
  Description of Artificial Sequence: Synthetic oligonucleotide
ggaacaagguagagugccu

SEQ ID NO: 1728387 - RNA, 19 nt, Artificial Sequence
  Description of Artificial Sequence: Synthetic oligonucleotide
gucaccggcucggcuccgc

SEQ ID NO: 1728388 - RNA, 19 nt, Artificial Sequence
  Description of Artificial Sequence: Synthetic oligonucleotide
gccauggcgcaggauucug

SEQ ID NO: 1728389 - RNA, 19 nt, Artificial Sequence
  Description of Artificial Sequence: Synthetic oligonucleotide
cugcggcgaggacgacgcg

SEQ ID NO: 1728390 - RNA, 19 nt, Artificial Sequence
  Description of Artificial Sequence: Synthetic oligonucleotide
gccucucagcggcccgacg

SEQ ID NO: 1728391 - RNA, 19 nt, Artificial Sequence
  Description of Artificial Sequence: Synthetic oligonucleotide
cuccgcgcgcccucgggaa

SEQ ID NO: 1728392 - RNA, 19 nt, Artificial Sequence
  Description of Artificial Sequence: Synthetic oligonucleotide
ggguugagagagagagaga

SEQ ID NO: 1728393 - RNA, 19 nt, Artificial Sequence
  Description of Artificial Sequence: Synthetic oligonucleotide
cgauccgcaccguaaaugu

SEQ ID NO: 1728394 - RNA, 19 nt, Artificial Sequence
  Description of Artificial Sequence: Synthetic oligonucleotide
ggacacgacgcgggcagga

SEQ ID NO: 1728395 - RNA, 19 nt, Artificial Sequence
  Description of Artificial Sequence: Synthetic oligonucleotide
gcggggacacgacgcgggc

SEQ ID NO: 1728396 - RNA, 19 nt, Artificial Sequence
  Description of Artificial Sequence: Synthetic oligonucleotide
gggacacgacgcgggcagg

SEQ ID NO: 1728397 - RNA, 19 nt, Artificial Sequence
  Description of Artificial Sequence: Synthetic oligonucleotide
cgugcgugucugucaccgg

SEQ ID NO: 1728398 - RNA, 19 nt, Artificial Sequence
  Description of Artificial Sequence: Synthetic oligonucleotide
ggcguccauggugacgauc

SEQ ID NO: 1728399 - RNA, 19 nt, Artificial Sequence
  Description of Artificial Sequence: Synthetic oligonucleotide
cucagcggcccgacggggu

SEQ ID NO: 1728400 - RNA, 19 nt, Artificial Sequence
  Description of Artificial Sequence: Synthetic oligonucleotide
cacucgggacuuggcgcuc

SEQ ID NO: 1728401 - RNA, 19 nt, Artificial Sequence
  Description of Artificial Sequence: Synthetic oligonucleotide
ccuaggcugcguggguccc

SEQ ID NO: 1728402 - RNA, 19 nt, Artificial Sequence
  Description of Artificial Sequence: Synthetic oligonucleotide
gcgcucggaaacucgggcu

SEQ ID NO: 1728403 - RNA, 19 nt, Artificial Sequence
  Description of Artificial Sequence: Synthetic oligonucleotide
cgguagucgggagcgcacg

SEQ ID NO: 1728404 - RNA, 19 nt, Artificial Sequence
  Description of Artificial Sequence: Synthetic oligonucleotide
ccgacggcagcggggacac

SEQ ID NO: 1728405 - RNA, 19 nt, Artificial Sequence
  Description of Artificial Sequence: Synthetic oligonucleotide
cuccgacggcagcggggac

SEQ ID NO: 1728406 - RNA, 19 nt, Artificial Sequence
  Description of Artificial Sequence: Synthetic oligonucleotide
ccuagacggcugcggcgag

SEQ ID NO: 1728407 - RNA, 19 nt, Artificial Sequence
  Description of Artificial Sequence: Synthetic oligonucleotide
gcgguagucgggagcgcac

SEQ ID NO: 1728408 - RNA, 19 nt, Artificial Sequence
  Description of Artificial Sequence: Synthetic oligonucleotide
ccgcgcgguagucgggagc

SEQ ID NO: 1728409 - RNA, 19 nt, Artificial Sequence
  Description of Artificial Sequence: Synthetic oligonucleotide
gcuccgcgcgcccucggga

SEQ ID NO: 1728410 - RNA, 19 nt, Artificial Sequence
  Description of Artificial Sequence: Synthetic oligonucleotide
cggcgcucggaaacucggg

SEQ ID NO: 1728411 - RNA, 19 nt, Artificial Sequence
  Description of Artificial Sequence: Synthetic oligonucleotide
ccgacggggucgcggggcc

SEQ ID NO: 1728412 - RNA, 19 nt, Artificial Sequence
  Description of Artificial Sequence: Synthetic oligonucleotide
caccuaccacugcucaaau

SEQ ID NO: 1728413 - RNA, 19 nt, Artificial Sequence
  Description of Artificial Sequence: Synthetic oligonucleotide
gcgaggacgacgcgcgccu

SEQ ID NO: 1728414 - RNA, 19 nt, Artificial Sequence
  Description of Artificial Sequence: Synthetic oligonucleotide
cccgacggggucgcggggc

SEQ ID NO: 1728415 - RNA, 19 nt, Artificial Sequence
  Description of Artificial Sequence: Synthetic oligonucleotide
gcgcccucgggaagcgucc

SEQ ID NO: 1728416 - RNA, 19 nt, Artificial Sequence
  Description of Artificial Sequence: Synthetic oligonucleotide
gaucacugcuagaguucuu

SEQ ID NO: 1728417 - RNA, 19 nt, Artificial Sequence
  Description of Artificial Sequence: Synthetic oligonucleotide
ccgcaccguaaaugucuug

SEQ ID NO: 1728418 - RNA, 19 nt, Artificial Sequence
  Description of Artificial Sequence: Synthetic oligonucleotide
cccuauugauggcucccaa

SEQ ID NO: 1728419 - RNA, 19 nt, Artificial Sequence
  Description of Artificial Sequence: Synthetic oligonucleotide
cggcagcggggacacgacg

SEQ ID NO: 1728420 - RNA, 19 nt, Artificial Sequence
  Description of Artificial Sequence: Synthetic oligonucleotide
ggacgacgcgcgccucuca

SEQ ID NO: 1728421 - RNA, 19 nt, Artificial Sequence
  Description of Artificial Sequence: Synthetic oligonucleotide
gcgcaggauucuggccagg

SEQ ID NO: 1728422 - RNA, 19 nt, Artificial Sequence
  Description of Artificial Sequence: Synthetic oligonucleotide
gggacgccggggacgcccc

SEQ ID NO: 1728423 - RNA, 19 nt, Artificial Sequence
  Description of Artificial Sequence: Synthetic oligonucleotide
cuacuggugccgccuucau

SEQ ID NO: 1728424 - RNA, 19 nt, Artificial Sequence
  Description of Artificial Sequence: Synthetic oligonucleotide
gcccgacggggucgcgggg

SEQ ID NO: 1728425 - RNA, 19 nt, Artificial Sequence
  Description of Artificial Sequence: Synthetic oligonucleotide
cggcccggcgcucggaaac

SEQ ID NO: 1728426 - RNA, 19 nt, Artificial Sequence
  Description of Artificial Sequence: Synthetic oligonucleotide
ccagacccucaacucagcu

SEQ ID NO: 1728427 - RNA, 19 nt, Artificial Sequence
  Description of Artificial Sequence: Synthetic oligonucleotide
ccucgggaagcguccucca

SEQ ID NO: 1728428 - RNA, 19 nt, Artificial Sequence
  Description of Artificial Sequence: Synthetic oligonucleotide
cuguguccacagccauugu

SEQ ID NO: 1728429 - RNA, 19 nt, Artificial Sequence
  Description of Artificial Sequence: Synthetic oligonucleotide
ccccggugccggagagacg

SEQ ID NO: 1728430 - RNA, 19 nt, Artificial Sequence
  Description of Artificial Sequence: Synthetic oligonucleotide
cgacgcgggcaggagcggg

SEQ ID NO: 1728431 - RNA, 19 nt, Artificial Sequence
  Description of Artificial Sequence: Synthetic oligonucleotide
ccccuagacuggaauccua

SEQ ID NO: 1728432 - RNA, 19 nt, Artificial Sequence
  Description of Artificial Sequence: Synthetic oligonucleotide
ccggugccggagagacgag

SEQ ID NO: 1728433 - RNA, 19 nt, Artificial Sequence
  Description of Artificial Sequence: Synthetic oligonucleotide
ccgcgcgcccucgggaagc

SEQ ID NO: 1728434 - RNA, 19 nt, Artificial Sequence
  Description of Artificial Sequence: Synthetic oligonucleotide
gccccuagacuggaauccu

SEQ ID NO: 1728435 - RNA, 19 nt, Artificial Sequence
  Description of Artificial Sequence: Synthetic oligonucleotide
gcccucgggaagcguccuc

SEQ ID NO: 1728436 - RNA, 19 nt, Artificial Sequence
  Description of Artificial Sequence: Synthetic oligonucleotide
cgcgugcgugucugucacc

SEQ ID NO: 1728437 - RNA, 19 nt, Artificial Sequence
  Description of Artificial Sequence: Synthetic oligonucleotide
ccggggacgccccuagacu

SEQ ID NO: 1728438 - RNA, 19 nt, Artificial Sequence
  Description of Artificial Sequence: Synthetic oligonucleotide
gucgcggggccgcgcggua

SEQ ID NO: 1728439 - RNA, 19 nt, Artificial Sequence
  Description of Artificial Sequence: Synthetic oligonucleotide
gcgcgccucucagcggccc

SEQ ID NO: 1728440 - RNA, 19 nt, Artificial Sequence
  Description of Artificial Sequence: Synthetic oligonucleotide
ccaggguucccaugugguu

SEQ ID NO: 1728441 - RNA, 19 nt, Artificial Sequence
  Description of Artificial Sequence: Synthetic oligonucleotide
cccucaacucagcugucuu

SEQ ID NO: 1728442 - RNA, 19 nt, Artificial Sequence
  Description of Artificial Sequence: Synthetic oligonucleotide
cgcgguagucgggagcgca

SEQ ID NO: 1728443 - RNA, 19 nt, Artificial Sequence
  Description of Artificial Sequence: Synthetic oligonucleotide
cguggguccccagcggcca

SEQ ID NO: 1728444 - RNA, 19 nt, Artificial Sequence
  Description of Artificial Sequence: Synthetic oligonucleotide
cggcccgacggggucgcgg

SEQ ID NO: 1728445 - RNA, 19 nt, Artificial Sequence
  Description of Artificial Sequence: Synthetic oligonucleotide
gcccggcgcucggaaacuc

SEQ ID NO: 1728446 - RNA, 19 nt, Artificial Sequence
  Description of Artificial Sequence: Synthetic oligonucleotide
cgcgcgccucucagcggcc

SEQ ID NO: 1728447 - RNA, 19 nt, Artificial Sequence
  Description of Artificial Sequence: Synthetic oligonucleotide
gcggcccggcgcucggaaa

SEQ ID NO: 1728448 - RNA, 19 nt, Artificial Sequence
  Description of Artificial Sequence: Synthetic oligonucleotide
ccgccuucaucucgcaguu

SEQ ID NO: 1728449 - RNA, 19 nt, Artificial Sequence
  Description of Artificial Sequence: Synthetic oligonucleotide
ggucgcggggccgcgcggu

SEQ ID NO: 1728450 - RNA, 19 nt, Artificial Sequence
  Description of Artificial Sequence: Synthetic oligonucleotide
cgcgcgcccucgggaagcg

SEQ ID NO: 1728451 - RNA, 19 nt, Artificial Sequence
  Description of Artificial Sequence: Synthetic oligonucleotide
ggacgccccuagacuggaa

SEQ ID NO: 1728452 - RNA, 19 nt, Artificial Sequence
  Description of Artificial Sequence: Synthetic oligonucleotide
ccggcuggccggccugaga

SEQ ID NO: 1728453 - RNA, 19 nt, Artificial Sequence
  Description of Artificial Sequence: Synthetic oligonucleotide
cggcgaggacgacgcgcgc

SEQ ID NO: 1728454 - RNA, 19 nt, Artificial Sequence
  Description of Artificial Sequence: Synthetic oligonucleotide
ggcccggcgcucggaaacu

SEQ ID NO: 1728455 - RNA, 19 nt, Artificial Sequence
  Description of Artificial Sequence: Synthetic oligonucleotide
ccaucucggcguccauggu

SEQ ID NO: 1728456 - RNA, 19 nt, Artificial Sequence
  Description of Artificial Sequence: Synthetic oligonucleotide
cgccucucagcggcccgac

SEQ ID NO: 1728457 - RNA, 19 nt, Artificial Sequence
  Description of Artificial Sequence: Synthetic oligonucleotide
cgaggacgacgcgcgccuc

SEQ ID NO: 1728458 - RNA, 19 nt, Artificial Sequence
  Description of Artificial Sequence: Synthetic oligonucleotide
gcggcccgacggggucgcg

SEQ ID NO: 1728459 - RNA, 19 nt, Artificial Sequence
  Description of Artificial Sequence: Synthetic oligonucleotide
cggugccggagagacgagu

SEQ ID NO: 1728460 - RNA, 19 nt, Artificial Sequence
  Description of Artificial Sequence: Synthetic oligonucleotide
cgccggggacgccccuaga

SEQ ID NO: 1728461 - RNA, 19 nt, Artificial Sequence
  Description of Artificial Sequence: Synthetic oligonucleotide
cccaaggggccaggcccau

SEQ ID NO: 1728462 - RNA, 19 nt, Artificial Sequence
  Description of Artificial Sequence: Synthetic oligonucleotide
cgggagcgcacgcgcgcgu

SEQ ID NO: 1728463 - RNA, 19 nt, Artificial Sequence
  Description of Artificial Sequence: Synthetic oligonucleotide
augguaacaacucuaaugg

SEQ ID NO: 1728464 - RNA, 19 nt, Artificial Sequence
  Description of Artificial Sequence: Synthetic oligonucleotide
ugagauguugcccugaaug

SEQ ID NO: 1728465 - RNA, 19 nt, Artificial Sequence
  Description of Artificial Sequence: Synthetic oligonucleotide
acauguuggaaucaacacc

SEQ ID NO: 1728466 - RNA, 19 nt, Artificial Sequence
  Description of Artificial Sequence: Synthetic oligonucleotide
gaaucaacacccucaaugg

SEQ ID NO: 1728467 - RNA, 19 nt, Artificial Sequence
  Description of Artificial Sequence: Synthetic oligonucleotide
ucugaggagauucagguug

SEQ ID NO: 1728468 - RNA, 19 nt, Artificial Sequence
  Description of Artificial Sequence: Synthetic oligonucleotide
acugagauugcucacgugg

SEQ ID NO: 1728469 - RNA, 19 nt, Artificial Sequence
  Description of Artificial Sequence: Synthetic oligonucleotide
aacucaaucacacuccgga

SEQ ID NO: 1728470 - RNA, 19 nt, Artificial Sequence
  Description of Artificial Sequence: Synthetic oligonucleotide
acucccaugacuucuuucc

SEQ ID NO: 1728471 - RNA, 19 nt, Artificial Sequence
  Description of Artificial Sequence: Synthetic oligonucleotide
uaagacuucagccacccug

SEQ ID NO: 1728472 - RNA, 19 nt, Artificial Sequence
  Description of Artificial Sequence: Synthetic oligonucleotide
aguaagaagagcccagcac

SEQ ID NO: 1728473 - RNA, 19 nt, Artificial Sequence
  Description of Artificial Sequence: Synthetic oligonucleotide
cacaguuaagaacaggagg

SEQ ID NO: 1728474 - RNA, 19 nt, Artificial Sequence
  Description of Artificial Sequence: Synthetic oligonucleotide
guaagaagagcccagcacc

SEQ ID NO: 1728475 - RNA, 19 nt, Artificial Sequence
  Description of Artificial Sequence: Synthetic oligonucleotide
guagcuaucgcgcugacac

SEQ ID NO: 1728476 - RNA, 19 nt, Artificial Sequence
  Description of Artificial Sequence: Synthetic oligonucleotide
aaguggucagccugggccc

SEQ ID NO: 1728477 - RNA, 19 nt, Artificial Sequence
  Description of Artificial Sequence: Synthetic oligonucleotide
uuucucagugcccagaauc

SEQ ID NO: 1728478 - RNA, 19 nt, Artificial Sequence
  Description of Artificial Sequence: Synthetic oligonucleotide
agauugcucacgugggucc

SEQ ID NO: 1728479 - RNA, 19 nt, Artificial Sequence
  Description of Artificial Sequence: Synthetic oligonucleotide
agcguaaccacaccucccc

SEQ ID NO: 1728480 - RNA, 19 nt, Artificial Sequence
  Description of Artificial Sequence: Synthetic oligonucleotide
aggagauucagguuguucu

SEQ ID NO: 1728481 - RNA, 19 nt, Artificial Sequence
  Description of Artificial Sequence: Synthetic oligonucleotide
ugacacuuuguucaauggc

SEQ ID NO: 1728482 - RNA, 19 nt, Artificial Sequence
  Description of Artificial Sequence: Synthetic oligonucleotide
aucgcgcugacacaggaac

SEQ ID NO: 1728483 - RNA, 19 nt, Artificial Sequence
  Description of Artificial Sequence: Synthetic oligonucleotide
acuugaguagugcagucag

SEQ ID NO: 1728484 - RNA, 19 nt, Artificial Sequence
  Description of Artificial Sequence: Synthetic oligonucleotide
uugacacuuuguucaaugg

SEQ ID NO: 1728485 - RNA, 19 nt, Artificial Sequence
  Description of Artificial Sequence: Synthetic oligonucleotide
uucucgcacagucacaggc

SEQ ID NO: 1728486 - RNA, 19 nt, Artificial Sequence
  Description of Artificial Sequence: Synthetic oligonucleotide
ucacucucagcacagaaau

SEQ ID NO: 1728487 - RNA, 19 nt, Artificial Sequence
  Description of Artificial Sequence: Synthetic oligonucleotide
ucuaaugggcccagcauga

SEQ ID NO: 1728488 - RNA, 19 nt, Artificial Sequence
  Description of Artificial Sequence: Synthetic oligonucleotide
gagauguugcccugaaugc

SEQ ID NO: 1728489 - RNA, 19 nt, Artificial Sequence
  Description of Artificial Sequence: Synthetic oligonucleotide
cuucagcccaaagagaugg

SEQ ID NO: 1728490 - RNA, 19 nt, Artificial Sequence
  Description of Artificial Sequence: Synthetic oligonucleotide
acacaggaacgccauagcg

SEQ ID NO: 1728491 - RNA, 19 nt, Artificial Sequence
  Description of Artificial Sequence: Synthetic oligonucleotide
guaacaacucuaaugggcc

SEQ ID NO: 1728492 - RNA, 19 nt, Artificial Sequence
  Description of Artificial Sequence: Synthetic oligonucleotide
ucugauugacacuuuguuc

SEQ ID NO: 1728493 - RNA, 19 nt, Artificial Sequence
  Description of Artificial Sequence: Synthetic oligonucleotide
ugcagugaugagauguugc

SEQ ID NO: 1728494 - RNA, 19 nt, Artificial Sequence
  Description of Artificial Sequence: Synthetic oligonucleotide
gagauggucagcuacugca

SEQ ID NO: 1728495 - RNA, 19 nt, Artificial Sequence
  Description of Artificial Sequence: Synthetic oligonucleotide
acggucgucaggcuggccc

SEQ ID NO: 1728496 - RNA, 19 nt, Artificial Sequence
  Description of Artificial Sequence: Synthetic oligonucleotide
aagacuucagccacccugg

SEQ ID NO: 1728497 - RNA, 19 nt, Artificial Sequence
  Description of Artificial Sequence: Synthetic oligonucleotide
ugugccaacauaguccugc

SEQ ID NO: 1728498 - RNA, 19 nt, Artificial Sequence
  Description of Artificial Sequence: Synthetic oligonucleotide
ucaugaacucagaaucgcc

SEQ ID NO: 1728499 - RNA, 19 nt, Artificial Sequence
  Description of Artificial Sequence: Synthetic oligonucleotide
agugcccagaaucuuaaug

SEQ ID NO: 1728500 - RNA, 19 nt, Artificial Sequence
  Description of Artificial Sequence: Synthetic oligonucleotide
ugugugccaacauaguccu

SEQ ID NO: 1728501 - RNA, 19 nt, Artificial Sequence
  Description of Artificial Sequence: Synthetic oligonucleotide
agccagaaauaucagguug

SEQ ID NO: 1728502 - RNA, 19 nt, Artificial Sequence
  Description of Artificial Sequence: Synthetic oligonucleotide
gaaucuuaaugaccugaag

SEQ ID NO: 1728503 - RNA, 19 nt, Artificial Sequence
  Description of Artificial Sequence: Synthetic oligonucleotide
gcugcauguggucaaaucg

SEQ ID NO: 1728504 - RNA, 19 nt, Artificial Sequence
  Description of Artificial Sequence: Synthetic oligonucleotide
ucugugugccaacauaguc

SEQ ID NO: 1728505 - RNA, 19 nt, Artificial Sequence
  Description of Artificial Sequence: Synthetic oligonucleotide
ugagguugucuucagccca

SEQ ID NO: 1728506 - RNA, 19 nt, Artificial Sequence
  Description of Artificial Sequence: Synthetic oligonucleotide
aaucaacacccucaauggu

SEQ ID NO: 1728507 - RNA, 19 nt, Artificial Sequence
  Description of Artificial Sequence: Synthetic oligonucleotide
acaggaacgccauagcggu

SEQ ID NO: 1728508 - RNA, 19 nt, Artificial Sequence
  Description of Artificial Sequence: Synthetic oligonucleotide
uuuguucaauggcagcuac

SEQ ID NO: 1728509 - RNA, 19 nt, Artificial Sequence
  Description of Artificial Sequence: Synthetic oligonucleotide
aacaggagggucuccucag

SEQ ID NO: 1728510 - RNA, 19 nt, Artificial Sequence
  Description of Artificial Sequence: Synthetic oligonucleotide
uuucugauugacacuuugu

SEQ ID NO: 1728511 - RNA, 19 nt, Artificial Sequence
  Description of Artificial Sequence: Synthetic oligonucleotide
aaaucgccucucccagucc

SEQ ID NO: 1728512 - RNA, 19 nt, Artificial Sequence
  Description of Artificial Sequence: Synthetic oligonucleotide
uucugauugacacuuuguu

SEQ ID NO: 1728513 - RNA, 19 nt, Artificial Sequence
  Description of Artificial Sequence: Synthetic oligonucleotide
gauauucaugaacucagaa

SEQ ID NO: 1728514 - RNA, 19 nt, Artificial Sequence
  Description of Artificial Sequence: Synthetic oligonucleotide
ugguaacaacucuaauggg

SEQ ID NO: 1728515 - RNA, 19 nt, Artificial Sequence
  Description of Artificial Sequence: Synthetic oligonucleotide
uuuccuguguagcguaacc

SEQ ID NO: 1728516 - RNA, 19 nt, Artificial Sequence
  Description of Artificial Sequence: Synthetic oligonucleotide
cucagaaucgcccucuuuc

SEQ ID NO: 1728517 - RNA, 19 nt, Artificial Sequence
  Description of Artificial Sequence: Synthetic oligonucleotide
ucagaaucgcccucuuucc

SEQ ID NO: 1728518 - RNA, 19 nt, Artificial Sequence
  Description of Artificial Sequence: Synthetic oligonucleotide
ugcauguggucaaaucgcc

SEQ ID NO: 1728519 - RNA, 19 nt, Artificial Sequence
  Description of Artificial Sequence: Synthetic oligonucleotide
ucaacacccucaaugguaa

SEQ ID NO: 1728520 - RNA, 19 nt, Artificial Sequence
  Description of Artificial Sequence: Synthetic oligonucleotide
ugacacaggaacgccauag

SEQ ID NO: 1728521 - RNA, 19 nt, Artificial Sequence
  Description of Artificial Sequence: Synthetic oligonucleotide
cugcauguggucaaaucgc

SEQ ID NO: 1728522 - RNA, 19 nt, Artificial Sequence
  Description of Artificial Sequence: Synthetic oligonucleotide
auucaugaacucagaaucg

SEQ ID NO: 1728523 - RNA, 19 nt, Artificial Sequence
  Description of Artificial Sequence: Synthetic oligonucleotide
agaaccacauggaaaccgc

SEQ ID NO: 1728524 - RNA, 19 nt, Artificial Sequence
  Description of Artificial Sequence: Synthetic oligonucleotide
uucaugaacucagaaucgc

SEQ ID NO: 1728525 - RNA, 19 nt, Artificial Sequence
  Description of Artificial Sequence: Synthetic oligonucleotide
gguaacaacucuaaugggc

SEQ ID NO: 1728526 - RNA, 19 nt, Artificial Sequence
  Description of Artificial Sequence: Synthetic oligonucleotide
ugcucgucggcucaucuug

SEQ ID NO: 1728527 - RNA, 19 nt, Artificial Sequence
  Description of Artificial Sequence: Synthetic oligonucleotide
uguagcguaaccacaccuc

SEQ ID NO: 1728528 - RNA, 19 nt, Artificial Sequence
  Description of Artificial Sequence: Synthetic oligonucleotide
ucgaucucugauuuucuga

SEQ ID NO: 1728529 - RNA, 19 nt, Artificial Sequence
  Description of Artificial Sequence: Synthetic oligonucleotide
aggagggucuccucagacc

SEQ ID NO: 1728530 - RNA, 19 nt, Artificial Sequence
  Description of Artificial Sequence: Synthetic oligonucleotide
ucuaagacuucagccaccc

SEQ ID NO: 1728531 - RNA, 19 nt, Artificial Sequence
  Description of Artificial Sequence: Synthetic oligonucleotide
ucacgugggucccacagca

SEQ ID NO: 1728532 - RNA, 19 nt, Artificial Sequence
  Description of Artificial Sequence: Synthetic oligonucleotide
gaugguaccacggucguca

SEQ ID NO: 1728533 - RNA, 19 nt, Artificial Sequence
  Description of Artificial Sequence: Synthetic oligonucleotide
aucgaugguaccacggucg

SEQ ID NO: 1728534 - RNA, 19 nt, Artificial Sequence
  Description of Artificial Sequence: Synthetic oligonucleotide
cucauuggcgaugauauuc

SEQ ID NO: 1728535 - RNA, 19 nt, Artificial Sequence
  Description of Artificial Sequence: Synthetic oligonucleotide
gaucaucuggcagaccccg

SEQ ID NO: 1728536 - RNA, 19 nt, Artificial Sequence
  Description of Artificial Sequence: Synthetic oligonucleotide
aaaagcggcguaucuucca

SEQ ID NO: 1728537 - RNA, 19 nt, Artificial Sequence
  Description of Artificial Sequence: Synthetic oligonucleotide
cucuaaugggcccagcaug

SEQ ID NO: 1728538 - RNA, 19 nt, Artificial Sequence
  Description of Artificial Sequence: Synthetic oligonucleotide
guagcguaaccacaccucc

SEQ ID NO: 1728539 - RNA, 19 nt, Artificial Sequence
  Description of Artificial Sequence: Synthetic oligonucleotide
aaucgccucucccagucca

SEQ ID NO: 1728540 - RNA, 19 nt, Artificial Sequence
  Description of Artificial Sequence: Synthetic oligonucleotide
cacuucagcacucgguucc

SEQ ID NO: 1728541 - RNA, 19 nt, Artificial Sequence
  Description of Artificial Sequence: Synthetic oligonucleotide
aguucucgcacagucacag

SEQ ID NO: 1728542 - RNA, 19 nt, Artificial Sequence
  Description of Artificial Sequence: Synthetic oligonucleotide
cauguggucaaaucgccuc

SEQ ID NO: 1728543 - RNA, 19 nt, Artificial Sequence
  Description of Artificial Sequence: Synthetic oligonucleotide
acauggaaaccgcucagca

SEQ ID NO: 1728544 - RNA, 19 nt, Artificial Sequence
  Description of Artificial Sequence: Synthetic oligonucleotide
ucaucgaugguaccacggu

SEQ ID NO: 1728545 - RNA, 19 nt, Artificial Sequence
  Description of Artificial Sequence: Synthetic oligonucleotide
uuugccgccgcucgcgucc

SEQ ID NO: 1728546 - RNA, 19 nt, Artificial Sequence
  Description of Artificial Sequence: Synthetic oligonucleotide
uuggaaucaacacccucaa

SEQ ID NO: 1728547 - RNA, 19 nt, Artificial Sequence
  Description of Artificial Sequence: Synthetic oligonucleotide
ugccuucuaagacuucagc

SEQ ID NO: 1728548 - RNA, 19 nt, Artificial Sequence
  Description of Artificial Sequence: Synthetic oligonucleotide
aucuggcagaccccggccc

SEQ ID NO: 1728549 - RNA, 19 nt, Artificial Sequence
  Description of Artificial Sequence: Synthetic oligonucleotide
accacauggaaaccgcuca

SEQ ID NO: 1728550 - RNA, 19 nt, Artificial Sequence
  Description of Artificial Sequence: Synthetic oligonucleotide
uccuguguagcguaaccac

SEQ ID NO: 1728551 - RNA, 19 nt, Artificial Sequence
  Description of Artificial Sequence: Synthetic oligonucleotide
guuggaaucaacacccuca

SEQ ID NO: 1728552 - RNA, 19 nt, Artificial Sequence
  Description of Artificial Sequence: Synthetic oligonucleotide
cagaaccacauggaaaccg

SEQ ID NO: 1728553 - RNA, 19 nt, Artificial Sequence
  Description of Artificial Sequence: Synthetic oligonucleotide
cuguguagcguaaccacac

SEQ ID NO: 1728554 - RNA, 19 nt, Artificial Sequence
  Description of Artificial Sequence: Synthetic oligonucleotide
aacacccucaaugguaaca

SEQ ID NO: 1728555 - RNA, 19 nt, Artificial Sequence
  Description of Artificial Sequence: Synthetic oligonucleotide
ugucaucgaugguaccacg

SEQ ID NO: 1728556 - RNA, 19 nt, Artificial Sequence
  Description of Artificial Sequence: Synthetic oligonucleotide
uguguagcguaaccacacc

SEQ ID NO: 1728557 - RNA, 19 nt, Artificial Sequence
  Description of Artificial Sequence: Synthetic oligonucleotide
ugaucaucuggcagacccc

SEQ ID NO: 1728558 - RNA, 19 nt, Artificial Sequence
  Description of Artificial Sequence: Synthetic oligonucleotide
gucacugagauugcucacg

SEQ ID NO: 1728559 - RNA, 19 nt, Artificial Sequence
  Description of Artificial Sequence: Synthetic oligonucleotide
ucacugagauugcucacgu

SEQ ID NO: 1728560 - RNA, 19 nt, Artificial Sequence
  Description of Artificial Sequence: Synthetic oligonucleotide
ugguggugaacucccgugc

SEQ ID NO: 1728561 - RNA, 19 nt, Artificial Sequence
  Description of Artificial Sequence: Synthetic oligonucleotide
acacuugaguagugcaguc

SEQ ID NO: 1728562 - RNA, 19 nt, Artificial Sequence
  Description of Artificial Sequence: Synthetic oligonucleotide
uuguucaauggcagcuacc

SEQ ID NO: 1728563 - RNA, 19 nt, Artificial Sequence
  Description of Artificial Sequence: Synthetic oligonucleotide
cuugaguagugcagucagg

SEQ ID NO: 1728564 - RNA, 19 nt, Artificial Sequence
  Description of Artificial Sequence: Synthetic oligonucleotide
augucaucgaugguaccac

SEQ ID NO: 1728565 - RNA, 19 nt, Artificial Sequence
  Description of Artificial Sequence: Synthetic oligonucleotide
ugagauugcucacgugggu

SEQ ID NO: 1728566 - RNA, 19 nt, Artificial Sequence
  Description of Artificial Sequence: Synthetic oligonucleotide
gaguagugcagucagggcu

SEQ ID NO: 1728567 - RNA, 19 nt, Artificial Sequence
  Description of Artificial Sequence: Synthetic oligonucleotide
ucucgcacagucacaggca

SEQ ID NO: 1728568 - RNA, 19 nt, Artificial Sequence
  Description of Artificial Sequence: Synthetic oligonucleotide
cacagcacauguuggaauc

SEQ ID NO: 1728569 - RNA, 19 nt, Artificial Sequence
  Description of Artificial Sequence: Synthetic oligonucleotide
ggcgaugauauucaugaac

SEQ ID NO: 1728570 - RNA, 19 nt, Artificial Sequence
  Description of Artificial Sequence: Synthetic oligonucleotide
uucacugccuccacgugau

SEQ ID NO: 1728571 - RNA, 19 nt, Artificial Sequence
  Description of Artificial Sequence: Synthetic oligonucleotide
gccuucuaagacuucagcc

SEQ ID NO: 1728572 - RNA, 19 nt, Artificial Sequence
  Description of Artificial Sequence: Synthetic oligonucleotide
cauggaaaccgcucagcac

SEQ ID NO: 1728573 - RNA, 19 nt, Artificial Sequence
  Description of Artificial Sequence: Synthetic oligonucleotide
uucagcacucgguucccag

SEQ ID NO: 1728574 - RNA, 19 nt, Artificial Sequence
  Description of Artificial Sequence: Synthetic oligonucleotide
cuggaagcggccuuucuuc

SEQ ID NO: 1728575 - RNA, 19 nt, Artificial Sequence
  Description of Artificial Sequence: Synthetic oligonucleotide
ucucccuaauucccaugag

SEQ ID NO: 1728576 - RNA, 19 nt, Artificial Sequence
  Description of Artificial Sequence: Synthetic oligonucleotide
gguaccacggucgucaggc

SEQ ID NO: 1728577 - RNA, 19 nt, Artificial Sequence
  Description of Artificial Sequence: Synthetic oligonucleotide
ucgcgcugacacaggaacg

SEQ ID NO: 1728578 - RNA, 19 nt, Artificial Sequence
  Description of Artificial Sequence: Synthetic oligonucleotide
aacgccauagcggucuccu

SEQ ID NO: 1728579 - RNA, 19 nt, Artificial Sequence
  Description of Artificial Sequence: Synthetic oligonucleotide
agcuaucgcgcugacacag

SEQ ID NO: 1728580 - RNA, 19 nt, Artificial Sequence
  Description of Artificial Sequence: Synthetic oligonucleotide
guccacucggaccuggacc

SEQ ID NO: 1728581 - RNA, 19 nt, Artificial Sequence
  Description of Artificial Sequence: Synthetic oligonucleotide
ggaaaagcggcguaucuuc

SEQ ID NO: 1728582 - RNA, 19 nt, Artificial Sequence
  Description of Artificial Sequence: Synthetic oligonucleotide
agacccaaucucauuggcg

SEQ ID NO: 1728583 - RNA, 19 nt, Artificial Sequence
  Description of Artificial Sequence: Synthetic oligonucleotide
uagcguaaccacaccuccc

SEQ ID NO: 1728584 - RNA, 19 nt, Artificial Sequence
  Description of Artificial Sequence: Synthetic oligonucleotide
ccuaauucccaugagguug

SEQ ID NO: 1728585 - RNA, 19 nt, Artificial Sequence
  Description of Artificial Sequence: Synthetic oligonucleotide
aguccacucggaccuggac

SEQ ID NO: 1728586 - RNA, 19 nt, Artificial Sequence
  Description of Artificial Sequence: Synthetic oligonucleotide
gaacaggagggucuccuca

SEQ ID NO: 1728587 - RNA, 19 nt, Artificial Sequence
  Description of Artificial Sequence: Synthetic oligonucleotide
caaaucgccucucccaguc

SEQ ID NO: 1728588 - RNA, 19 nt, Artificial Sequence
  Description of Artificial Sequence: Synthetic oligonucleotide
ugauugacacuuuguucaa

SEQ ID NO: 1728589 - RNA, 19 nt, Artificial Sequence
  Description of Artificial Sequence: Synthetic oligonucleotide
cauaguccugcagaagcgc

SEQ ID NO: 1728590 - RNA, 19 nt, Artificial Sequence
  Description of Artificial Sequence: Synthetic oligonucleotide
uuccuguguagcguaacca

SEQ ID NO: 1728591 - RNA, 19 nt, Artificial Sequence
  Description of Artificial Sequence: Synthetic oligonucleotide
caacucaaucacacuccgg

SEQ ID NO: 1728592 - RNA, 19 nt, Artificial Sequence
  Description of Artificial Sequence: Synthetic oligonucleotide
cucaaugguaacaacucua

SEQ ID NO: 1728593 - RNA, 19 nt, Artificial Sequence
  Description of Artificial Sequence: Synthetic oligonucleotide
cauagcggucuccuaggcc

SEQ ID NO: 1728594 - RNA, 19 nt, Artificial Sequence
  Description of Artificial Sequence: Synthetic oligonucleotide
gaaaagcggcguaucuucc

SEQ ID NO: 1728595 - RNA, 19 nt, Artificial Sequence
  Description of Artificial Sequence: Synthetic oligonucleotide
gcagugaugagauguugcc

SEQ ID NO: 1728596 - RNA, 19 nt, Artificial Sequence
  Description of Artificial Sequence: Synthetic oligonucleotide
ucuggcagaccccggcccc

SEQ ID NO: 1728597 - RNA, 19 nt, Artificial Sequence
  Description of Artificial Sequence: Synthetic oligonucleotide
uggaagcggccuuucuucc

SEQ ID NO: 1728598 - RNA, 19 nt, Artificial Sequence
  Description of Artificial Sequence: Synthetic oligonucleotide
acucuaaugggcccagcau

SEQ ID NO: 1728599 - RNA, 19 nt, Artificial Sequence
  Description of Artificial Sequence: Synthetic oligonucleotide
uuuucacucccaugacuuc

SEQ ID NO: 1728600 - RNA, 19 nt, Artificial Sequence
  Description of Artificial Sequence: Synthetic oligonucleotide
cucgcacagucacaggcag

SEQ ID NO: 1728601 - RNA, 19 nt, Artificial Sequence
  Description of Artificial Sequence: Synthetic oligonucleotide
uaccacggucgucaggcug

SEQ ID NO: 1728602 - RNA, 19 nt, Artificial Sequence
  Description of Artificial Sequence: Synthetic oligonucleotide
ucugcucgucggcucaucu

SEQ ID NO: 1728603 - RNA, 19 nt, Artificial Sequence
  Description of Artificial Sequence: Synthetic oligonucleotide
agauguugcccugaaugcu

SEQ ID NO: 1728604 - RNA, 19 nt, Artificial Sequence
  Description of Artificial Sequence: Synthetic oligonucleotide
uccaccccacacuugagua

SEQ ID NO: 1728605 - RNA, 19 nt, Artificial Sequence
  Description of Artificial Sequence: Synthetic oligonucleotide
aauucccaugagguugucu

SEQ ID NO: 1728606 - RNA, 19 nt, Artificial Sequence
  Description of Artificial Sequence: Synthetic oligonucleotide
ugcaccucugcucgucggc

SEQ ID NO: 1728607 - RNA, 19 nt, Artificial Sequence
  Description of Artificial Sequence: Synthetic oligonucleotide
acccucaaugguaacaacu

SEQ ID NO: 1728608 - RNA, 19 nt, Artificial Sequence
  Description of Artificial Sequence: Synthetic oligonucleotide
aacucccgugcguagcuau

SEQ ID NO: 1728609 - RNA, 19 nt, Artificial Sequence
  Description of Artificial Sequence: Synthetic oligonucleotide
gacuucagccacccugggc

SEQ ID NO: 1728610 - RNA, 19 nt, Artificial Sequence
  Description of Artificial Sequence: Synthetic oligonucleotide
aaccgcucagcacuucuuu

SEQ ID NO: 1728611 - RNA, 19 nt, Artificial Sequence
  Description of Artificial Sequence: Synthetic oligonucleotide
cagucgaucucugauuuuc

SEQ ID NO: 1728612 - RNA, 19 nt, Artificial Sequence
  Description of Artificial Sequence: Synthetic oligonucleotide
gguggugaacucccgugcg

SEQ ID NO: 1728613 - RNA, 19 nt, Artificial Sequence
  Description of Artificial Sequence: Synthetic oligonucleotide
agcacauguuggaaucaac

SEQ ID NO: 1728614 - RNA, 19 nt, Artificial Sequence
  Description of Artificial Sequence: Synthetic oligonucleotide
auuggcgaugauauucaug

SEQ ID NO: 1728615 - RNA, 19 nt, Artificial Sequence
  Description of Artificial Sequence: Synthetic oligonucleotide
gucucccuaauucccauga

SEQ ID NO: 1728616 - RNA, 19 nt, Artificial Sequence
  Description of Artificial Sequence: Synthetic oligonucleotide
cagacccaaucucauuggc

SEQ ID NO: 1728617 - RNA, 19 nt, Artificial Sequence
  Description of Artificial Sequence: Synthetic oligonucleotide
ucgucggcucaucuuggug

SEQ ID NO: 1728618 - RNA, 19 nt, Artificial Sequence
  Description of Artificial Sequence: Synthetic oligonucleotide
ucgaugguaccacggucgu

SEQ ID NO: 1728619 - RNA, 19 nt, Artificial Sequence
  Description of Artificial Sequence: Synthetic oligonucleotide
cagcacucgguucccagcc

SEQ ID NO: 1728620 - RNA, 19 nt, Artificial Sequence
  Description of Artificial Sequence: Synthetic oligonucleotide
aggaacgccauagcggucu

SEQ ID NO: 1728621 - RNA, 19 nt, Artificial Sequence
  Description of Artificial Sequence: Synthetic oligonucleotide
accacggucgucaggcugg

SEQ ID NO: 1728622 - RNA, 19 nt, Artificial Sequence
  Description of Artificial Sequence: Synthetic oligonucleotide
gagauugcucacguggguc

SEQ ID NO: 1728623 - RNA, 19 nt, Artificial Sequence
  Description of Artificial Sequence: Synthetic oligonucleotide
agaaucuuaaugaccugaa

SEQ ID NO: 1728624 - RNA, 19 nt, Artificial Sequence
  Description of Artificial Sequence: Synthetic oligonucleotide
aucaacacccucaauggua

SEQ ID NO: 1728625 - RNA, 19 nt, Artificial Sequence
  Description of Artificial Sequence: Synthetic oligonucleotide
ucaaaucgccucucccagu

SEQ ID NO: 1728626 - RNA, 19 nt, Artificial Sequence
  Description of Artificial Sequence: Synthetic oligonucleotide
cacagaagggcuguccaac

SEQ ID NO: 1728627 - RNA, 19 nt, Artificial Sequence
  Description of Artificial Sequence: Synthetic oligonucleotide
acgacgggucacucucagc

SEQ ID NO: 1728628 - RNA, 19 nt, Artificial Sequence
  Description of Artificial Sequence: Synthetic oligonucleotide
ggucaaaucgccucuccca

SEQ ID NO: 1728629 - RNA, 19 nt, Artificial Sequence
  Description of Artificial Sequence: Synthetic oligonucleotide
cauccaggcucaguucucg

SEQ ID NO: 1728630 - RNA, 19 nt, Artificial Sequence
  Description of Artificial Sequence: Synthetic oligonucleotide
auaucagguugcuuuuguu

SEQ ID NO: 1728631 - RNA, 19 nt, Artificial Sequence
  Description of Artificial Sequence: Synthetic oligonucleotide
ugcuggccccgccaguaag

SEQ ID NO: 1728632 - RNA, 19 nt, Artificial Sequence
  Description of Artificial Sequence: Synthetic oligonucleotide
ucuuuccuguguagcguaa

SEQ ID NO: 1728633 - RNA, 19 nt, Artificial Sequence
  Description of Artificial Sequence: Synthetic oligonucleotide
ccaacucaaucacacuccg

SEQ ID NO: 1728634 - RNA, 19 nt, Artificial Sequence
  Description of Artificial Sequence: Synthetic oligonucleotide
cccacaguuaagaacagga

SEQ ID NO: 1728635 - RNA, 19 nt, Artificial Sequence
  Description of Artificial Sequence: Synthetic oligonucleotide
gccagaaauaucagguugc

SEQ ID NO: 1728636 - RNA, 19 nt, Artificial Sequence
  Description of Artificial Sequence: Synthetic oligonucleotide
ugaugagauguugcccuga

SEQ ID NO: 1728637 - RNA, 19 nt, Artificial Sequence
  Description of Artificial Sequence: Synthetic oligonucleotide
ccacaguuaagaacaggag

SEQ ID NO: 1728638 - RNA, 19 nt, Artificial Sequence
  Description of Artificial Sequence: Synthetic oligonucleotide
gucggcucaucuugguggc

SEQ ID NO: 1728639 - RNA, 19 nt, Artificial Sequence
  Description of Artificial Sequence: Synthetic oligonucleotide
agucucccuaauucccaug

SEQ ID NO: 1728640 - RNA, 19 nt, Artificial Sequence
  Description of Artificial Sequence: Synthetic oligonucleotide
gauugcucacguggguccc

SEQ ID NO: 1728641 - RNA, 19 nt, Artificial Sequence
  Description of Artificial Sequence: Synthetic oligonucleotide
gugaugagauguugcccug

SEQ ID NO: 1728642 - RNA, 19 nt, Artificial Sequence
  Description of Artificial Sequence: Synthetic oligonucleotide
cucaucuugguggccuugc

SEQ ID NO: 1728643 - RNA, 19 nt, Artificial Sequence
  Description of Artificial Sequence: Synthetic oligonucleotide
guucucgcacagucacagg

SEQ ID NO: 1728644 - RNA, 19 nt, Artificial Sequence
  Description of Artificial Sequence: Synthetic oligonucleotide
cacgugauccuccacccca

SEQ ID NO: 1728645 - RNA, 19 nt, Artificial Sequence
  Description of Artificial Sequence: Synthetic oligonucleotide
uaucgcgcugacacaggaa

SEQ ID NO: 1728646 - RNA, 19 nt, Artificial Sequence
  Description of Artificial Sequence: Synthetic oligonucleotide
cacagucacaggcagucga

SEQ ID NO: 1728647 - RNA, 19 nt, Artificial Sequence
  Description of Artificial Sequence: Synthetic oligonucleotide
aaucgcccucuuuccugug

SEQ ID NO: 1728648 - RNA, 19 nt, Artificial Sequence
  Description of Artificial Sequence: Synthetic oligonucleotide
cacucucagcacagaaaug

SEQ ID NO: 1728649 - RNA, 19 nt, Artificial Sequence
  Description of Artificial Sequence: Synthetic oligonucleotide
cccucuuuccuguguagcg

SEQ ID NO: 1728650 - RNA, 19 nt, Artificial Sequence
  Description of Artificial Sequence: Synthetic oligonucleotide
cacggugguggugaacucc

SEQ ID NO: 1728651 - RNA, 19 nt, Artificial Sequence
  Description of Artificial Sequence: Synthetic oligonucleotide
cuucagccacccugggccc

SEQ ID NO: 1728652 - RNA, 19 nt, Artificial Sequence
  Description of Artificial Sequence: Synthetic oligonucleotide
cucccgugcguagcuaucg

SEQ ID NO: 1728653 - RNA, 19 nt, Artificial Sequence
  Description of Artificial Sequence: Synthetic oligonucleotide
guaucuuccagaaccacau

SEQ ID NO: 1728654 - RNA, 19 nt, Artificial Sequence
  Description of Artificial Sequence: Synthetic oligonucleotide
ggcaguaugcacagccagg

SEQ ID NO: 1728655 - RNA, 19 nt, Artificial Sequence
  Description of Artificial Sequence: Synthetic oligonucleotide
ucccgugcguagcuaucgc

SEQ ID NO: 1728656 - RNA, 19 nt, Artificial Sequence
  Description of Artificial Sequence: Synthetic oligonucleotide
gaaaccgcucagcacuucu

SEQ ID NO: 1728657 - RNA, 19 nt, Artificial Sequence
  Description of Artificial Sequence: Synthetic oligonucleotide
caguaagaagagcccagca

SEQ ID NO: 1728658 - RNA, 19 nt, Artificial Sequence
  Description of Artificial Sequence: Synthetic oligonucleotide
ccacacuugaguagugcag

SEQ ID NO: 1728659 - RNA, 19 nt, Artificial Sequence
  Description of Artificial Sequence: Synthetic oligonucleotide
ccaugacuucuuuccaucc

SEQ ID NO: 1728660 - RNA, 19 nt, Artificial Sequence
  Description of Artificial Sequence: Synthetic oligonucleotide
cuaauucccaugagguugu

SEQ ID NO: 1728661 - RNA, 19 nt, Artificial Sequence
  Description of Artificial Sequence: Synthetic oligonucleotide
gucacaggcagucgaucuc

SEQ ID NO: 1728662 - RNA, 19 nt, Artificial Sequence
  Description of Artificial Sequence: Synthetic oligonucleotide
aguagugcagucagggcuu

SEQ ID NO: 1728663 - RNA, 19 nt, Artificial Sequence
  Description of Artificial Sequence: Synthetic oligonucleotide
ggaccuggcucccagguga

SEQ ID NO: 1728664 - RNA, 19 nt, Artificial Sequence
  Description of Artificial Sequence: Synthetic oligonucleotide
gcacauguuggaaucaaca

SEQ ID NO: 1728665 - RNA, 19 nt, Artificial Sequence
  Description of Artificial Sequence: Synthetic oligonucleotide
cuuuccuguguagcguaac

SEQ ID NO: 1728666 - RNA, 19 nt, Artificial Sequence
  Description of Artificial Sequence: Synthetic oligonucleotide
acaggcagucgaucucuga

SEQ ID NO: 1728667 - RNA, 19 nt, Artificial Sequence
  Description of Artificial Sequence: Synthetic oligonucleotide
uagcuaucgcgcugacaca

SEQ ID NO: 1728668 - RNA, 19 nt, Artificial Sequence
  Description of Artificial Sequence: Synthetic oligonucleotide
acagcacauguuggaauca

SEQ ID NO: 1728669 - RNA, 19 nt, Artificial Sequence
  Description of Artificial Sequence: Synthetic oligonucleotide
gcgccugcaccucugcucg

SEQ ID NO: 1728670 - RNA, 19 nt, Artificial Sequence
  Description of Artificial Sequence: Synthetic oligonucleotide
cagaagggcuguccaacuc

SEQ ID NO: 1728671 - RNA, 19 nt, Artificial Sequence
  Description of Artificial Sequence: Synthetic oligonucleotide
gcgaugauauucaugaacu

SEQ ID NO: 1728672 - RNA, 19 nt, Artificial Sequence
  Description of Artificial Sequence: Synthetic oligonucleotide
gucuucagcccaaagagau

SEQ ID NO: 1728673 - RNA, 19 nt, Artificial Sequence
  Description of Artificial Sequence: Synthetic oligonucleotide
cacgacgggucacucucag

SEQ ID NO: 1728674 - RNA, 19 nt, Artificial Sequence
  Description of Artificial Sequence: Synthetic oligonucleotide
cugcaccucugcucgucgg

SEQ ID NO: 1728675 - RNA, 19 nt, Artificial Sequence
  Description of Artificial Sequence: Synthetic oligonucleotide
aggcagucgaucucugauu

SEQ ID NO: 1728676 - RNA, 19 nt, Artificial Sequence
  Description of Artificial Sequence: Synthetic oligonucleotide
aagcggccuuucuucccug

SEQ ID NO: 1728677 - RNA, 19 nt, Artificial Sequence
  Description of Artificial Sequence: Synthetic oligonucleotide
cuaucgcgcugacacagga

SEQ ID NO: 1728678 - RNA, 19 nt, Artificial Sequence
  Description of Artificial Sequence: Synthetic oligonucleotide
gaagcggccuuucuucccu

SEQ ID NO: 1728679 - RNA, 19 nt, Artificial Sequence
  Description of Artificial Sequence: Synthetic oligonucleotide
ggugaacucccgugcguag

SEQ ID NO: 1728680 - RNA, 19 nt, Artificial Sequence
  Description of Artificial Sequence: Synthetic oligonucleotide
ugcccugaaugcugcugca

SEQ ID NO: 1728681 - RNA, 19 nt, Artificial Sequence
  Description of Artificial Sequence: Synthetic oligonucleotide
ccggagucucccuaauucc

SEQ ID NO: 1728682 - RNA, 19 nt, Artificial Sequence
  Description of Artificial Sequence: Synthetic oligonucleotide
agcccagcaccuuucucau

SEQ ID NO: 1728683 - RNA, 19 nt, Artificial Sequence
  Description of Artificial Sequence: Synthetic oligonucleotide
uggugaacucccgugcgua

SEQ ID NO: 1728684 - RNA, 19 nt, Artificial Sequence
  Description of Artificial Sequence: Synthetic oligonucleotide
guguagcguaaccacaccu

SEQ ID NO: 1728685 - RNA, 19 nt, Artificial Sequence
  Description of Artificial Sequence: Synthetic oligonucleotide
ucucauuggcgaugauauu

SEQ ID NO: 1728686 - RNA, 19 nt, Artificial Sequence
  Description of Artificial Sequence: Synthetic oligonucleotide
ggccccgccaguaagaaga

SEQ ID NO: 1728687 - RNA, 19 nt, Artificial Sequence
  Description of Artificial Sequence: Synthetic oligonucleotide
acgugauccuccaccccac

SEQ ID NO: 1728688 - RNA, 19 nt, Artificial Sequence
  Description of Artificial Sequence: Synthetic oligonucleotide
ucgcacagucacaggcagu

SEQ ID NO: 1728689 - RNA, 19 nt, Artificial Sequence
  Description of Artificial Sequence: Synthetic oligonucleotide
cacugagauugcucacgug

SEQ ID NO: 1728690 - RNA, 19 nt, Artificial Sequence
  Description of Artificial Sequence: Synthetic oligonucleotide
ucgcccucuuuccugugua

SEQ ID NO: 1728691 - RNA, 19 nt, Artificial Sequence
  Description of Artificial Sequence: Synthetic oligonucleotide
agcuaccugcucagcaguc

SEQ ID NO: 1728692 - RNA, 19 nt, Artificial Sequence
  Description of Artificial Sequence: Synthetic oligonucleotide
ccgugcguagcuaucgcgc

SEQ ID NO: 1728693 - RNA, 19 nt, Artificial Sequence
  Description of Artificial Sequence: Synthetic oligonucleotide
uggcgaugauauucaugaa

SEQ ID NO: 1728694 - RNA, 19 nt, Artificial Sequence
  Description of Artificial Sequence: Synthetic oligonucleotide
gucacucucagcacagaaa

SEQ ID NO: 1728695 - RNA, 19 nt, Artificial Sequence
  Description of Artificial Sequence: Synthetic oligonucleotide
agucgaucucugauuuucu

SEQ ID NO: 1728696 - RNA, 19 nt, Artificial Sequence
  Description of Artificial Sequence: Synthetic oligonucleotide
cacccucaaugguaacaac

SEQ ID NO: 1728697 - RNA, 19 nt, Artificial Sequence
  Description of Artificial Sequence: Synthetic oligonucleotide
ucggggaaaagcggcguau

SEQ ID NO: 1728698 - RNA, 19 nt, Artificial Sequence
  Description of Artificial Sequence: Synthetic oligonucleotide
acccaaucucauuggcgau

SEQ ID NO: 1728699 - RNA, 19 nt, Artificial Sequence
  Description of Artificial Sequence: Synthetic oligonucleotide
ggaagcggccuuucuuccc

SEQ ID NO: 1728700 - RNA, 19 nt, Artificial Sequence
  Description of Artificial Sequence: Synthetic oligonucleotide
agaccccggccccucaccu

SEQ ID NO: 1728701 - RNA, 19 nt, Artificial Sequence
  Description of Artificial Sequence: Synthetic oligonucleotide
gccaguaagaagagcccag

SEQ ID NO: 1728702 - RNA, 19 nt, Artificial Sequence
  Description of Artificial Sequence: Synthetic oligonucleotide
ccgcccucggggaaaagcg

SEQ ID NO: 1728703 - RNA, 19 nt, Artificial Sequence
  Description of Artificial Sequence: Synthetic oligonucleotide
ucucagugcccagaaucuu

SEQ ID NO: 1728704 - RNA, 19 nt, Artificial Sequence
  Description of Artificial Sequence: Synthetic oligonucleotide
aaaccgcucagcacuucuu

SEQ ID NO: 1728705 - RNA, 19 nt, Artificial Sequence
  Description of Artificial Sequence: Synthetic oligonucleotide
uuuugccgccgcucgcguc

SEQ ID NO: 1728706 - RNA, 19 nt, Artificial Sequence
  Description of Artificial Sequence: Synthetic oligonucleotide
caugaucaucuggcagacc

SEQ ID NO: 1728707 - RNA, 19 nt, Artificial Sequence
  Description of Artificial Sequence: Synthetic oligonucleotide
caguaugcacagccagguc

SEQ ID NO: 1728708 - RNA, 19 nt, Artificial Sequence
  Description of Artificial Sequence: Synthetic oligonucleotide
cagccccuuacuccucagc

SEQ ID NO: 1728709 - RNA, 19 nt, Artificial Sequence
  Description of Artificial Sequence: Synthetic oligonucleotide
ggucacucucagcacagaa

SEQ ID NO: 1728710 - RNA, 19 nt, Artificial Sequence
  Description of Artificial Sequence: Synthetic oligonucleotide
gcucgcguccgucugcagc

SEQ ID NO: 1728711 - RNA, 19 nt, Artificial Sequence
  Description of Artificial Sequence: Synthetic oligonucleotide
gugccaacauaguccugca

SEQ ID NO: 1728712 - RNA, 19 nt, Artificial Sequence
  Description of Artificial Sequence: Synthetic oligonucleotide
cggagucucccuaauuccc

SEQ ID NO: 1728713 - RNA, 19 nt, Artificial Sequence
  Description of Artificial Sequence: Synthetic oligonucleotide
caacacccucaaugguaac

SEQ ID NO: 1728714 - RNA, 19 nt, Artificial Sequence
  Description of Artificial Sequence: Synthetic oligonucleotide
cccugaaugcugcugcaug

SEQ ID NO: 1728715 - RNA, 19 nt, Artificial Sequence
  Description of Artificial Sequence: Synthetic oligonucleotide
acagucacaggcagucgau

SEQ ID NO: 1728716 - RNA, 19 nt, Artificial Sequence
  Description of Artificial Sequence: Synthetic oligonucleotide
cguaaccacaccuccccag

SEQ ID NO: 1728717 - RNA, 19 nt, Artificial Sequence
  Description of Artificial Sequence: Synthetic oligonucleotide
agaagcgccugcaccucug

SEQ ID NO: 1728718 - RNA, 19 nt, Artificial Sequence
  Description of Artificial Sequence: Synthetic oligonucleotide
cacacuugaguagugcagu

SEQ ID NO: 1728719 - RNA, 19 nt, Artificial Sequence
  Description of Artificial Sequence: Synthetic oligonucleotide
acucccgugcguagcuauc

SEQ ID NO: 1728720 - RNA, 19 nt, Artificial Sequence
  Description of Artificial Sequence: Synthetic oligonucleotide
gaacgccauagcggucucc

SEQ ID NO: 1728721 - RNA, 19 nt, Artificial Sequence
  Description of Artificial Sequence: Synthetic oligonucleotide
ccgccaguaagaagagccc

SEQ ID NO: 1728722 - RNA, 19 nt, Artificial Sequence
  Description of Artificial Sequence: Synthetic oligonucleotide
cagaccccggccccucacc

SEQ ID NO: 1728723 - RNA, 19 nt, Artificial Sequence
  Description of Artificial Sequence: Synthetic oligonucleotide
cacggccucugcuggcccc

SEQ ID NO: 1728724 - RNA, 19 nt, Artificial Sequence
  Description of Artificial Sequence: Synthetic oligonucleotide
cccgugcguagcuaucgcg

SEQ ID NO: 1728725 - RNA, 19 nt, Artificial Sequence
  Description of Artificial Sequence: Synthetic oligonucleotide
gcaugaucaucuggcagac

SEQ ID NO: 1728726 - RNA, 19 nt, Artificial Sequence
  Description of Artificial Sequence: Synthetic oligonucleotide
ccuguguagcguaaccaca

SEQ ID NO: 1728727 - RNA, 19 nt, Artificial Sequence
  Description of Artificial Sequence: Synthetic oligonucleotide
cccacgacgggucacucuc

SEQ ID NO: 1728728 - RNA, 19 nt, Artificial Sequence
  Description of Artificial Sequence: Synthetic oligonucleotide
uugcccuggaagcggccuu

SEQ ID NO: 1728729 - RNA, 19 nt, Artificial Sequence
  Description of Artificial Sequence: Synthetic oligonucleotide
cguaucuuccagaaccaca

SEQ ID NO: 1728730 - RNA, 19 nt, Artificial Sequence
  Description of Artificial Sequence: Synthetic oligonucleotide
cagucacaggcagucgauc

SEQ ID NO: 1728731 - RNA, 19 nt, Artificial Sequence
  Description of Artificial Sequence: Synthetic oligonucleotide
cugggccccacgacggguc

SEQ ID NO: 1728732 - RNA, 19 nt, Artificial Sequence
  Description of Artificial Sequence: Synthetic oligonucleotide
ccaccccacacuugaguag

SEQ ID NO: 1728733 - RNA, 19 nt, Artificial Sequence
  Description of Artificial Sequence: Synthetic oligonucleotide
uugcucacgugggucccac

SEQ ID NO: 1728734 - RNA, 19 nt, Artificial Sequence
  Description of Artificial Sequence: Synthetic oligonucleotide
caggcucaguucucgcaca

SEQ ID NO: 1728735 - RNA, 19 nt, Artificial Sequence
  Description of Artificial Sequence: Synthetic oligonucleotide
cucgcguccgucugcagcu

SEQ ID NO: 1728736 - RNA, 19 nt, Artificial Sequence
  Description of Artificial Sequence: Synthetic oligonucleotide
cgaugauauucaugaacuc

SEQ ID NO: 1728737 - RNA, 19 nt, Artificial Sequence
  Description of Artificial Sequence: Synthetic oligonucleotide
ggagucucccuaauuccca

SEQ ID NO: 1728738 - RNA, 19 nt, Artificial Sequence
  Description of Artificial Sequence: Synthetic oligonucleotide
gaaccacauggaaaccgcu

SEQ ID NO: 1728739 - RNA, 19 nt, Artificial Sequence
  Description of Artificial Sequence: Synthetic oligonucleotide
gaccccggccccucaccug

SEQ ID NO: 1728740 - RNA, 19 nt, Artificial Sequence
  Description of Artificial Sequence: Synthetic oligonucleotide
auugcucacguggguccca

SEQ ID NO: 1728741 - RNA, 19 nt, Artificial Sequence
  Description of Artificial Sequence: Synthetic oligonucleotide
gagucucccuaauucccau

SEQ ID NO: 1728742 - RNA, 19 nt, Artificial Sequence
  Description of Artificial Sequence: Synthetic oligonucleotide
caacucuaaugggcccagc

SEQ ID NO: 1728743 - RNA, 19 nt, Artificial Sequence
  Description of Artificial Sequence: Synthetic oligonucleotide
caguucucgcacagucaca

SEQ ID NO: 1728744 - RNA, 19 nt, Artificial Sequence
  Description of Artificial Sequence: Synthetic oligonucleotide
caggcagucgaucucugau

SEQ ID NO: 1728745 - RNA, 19 nt, Artificial Sequence
  Description of Artificial Sequence: Synthetic oligonucleotide
ccauccacuucagcacucg

SEQ ID NO: 1728746 - RNA, 19 nt, Artificial Sequence
  Description of Artificial Sequence: Synthetic oligonucleotide
gcuaucgcgcugacacagg

SEQ ID NO: 1728747 - RNA, 19 nt, Artificial Sequence
  Description of Artificial Sequence: Synthetic oligonucleotide
ugcucacgugggucccaca

SEQ ID NO: 1728748 - RNA, 19 nt, Artificial Sequence
  Description of Artificial Sequence: Synthetic oligonucleotide
caggaacgccauagcgguc

SEQ ID NO: 1728749 - RNA, 19 nt, Artificial Sequence
  Description of Artificial Sequence: Synthetic oligonucleotide
ccugcaccucugcucgucg

SEQ ID NO: 1728750 - RNA, 19 nt, Artificial Sequence
  Description of Artificial Sequence: Synthetic oligonucleotide
cucugugugccaacauagu

SEQ ID NO: 1728751 - RNA, 19 nt, Artificial Sequence
  Description of Artificial Sequence: Synthetic oligonucleotide
caguuaagaacaggagggu

SEQ ID NO: 1728752 - RNA, 19 nt, Artificial Sequence
  Description of Artificial Sequence: Synthetic oligonucleotide
aagggcuguccaacucaau

SEQ ID NO: 1728753 - RNA, 19 nt, Artificial Sequence
  Description of Artificial Sequence: Synthetic oligonucleotide
ugggcccagcaugaucauc

SEQ ID NO: 1728754 - RNA, 19 nt, Artificial Sequence
  Description of Artificial Sequence: Synthetic oligonucleotide
ggcagucgaucucugauuu

SEQ ID NO: 1728755 - RNA, 19 nt, Artificial Sequence
  Description of Artificial Sequence: Synthetic oligonucleotide
gcccucuuuccuguguagc

SEQ ID NO: 1728756 - RNA, 19 nt, Artificial Sequence
  Description of Artificial Sequence: Synthetic oligonucleotide
gcucgucggcucaucuugg

SEQ ID NO: 1728757 - RNA, 19 nt, Artificial Sequence
  Description of Artificial Sequence: Synthetic oligonucleotide
cacuccggagucucccuaa

SEQ ID NO: 1728758 - RNA, 19 nt, Artificial Sequence
  Description of Artificial Sequence: Synthetic oligonucleotide
guggugaacucccgugcgu

SEQ ID NO: 1728759 - RNA, 19 nt, Artificial Sequence
  Description of Artificial Sequence: Synthetic oligonucleotide
gcacagucacaggcagucg

SEQ ID NO: 1728760 - RNA, 19 nt, Artificial Sequence
  Description of Artificial Sequence: Synthetic oligonucleotide
cagaaucgcccucuuuccu

SEQ ID NO: 1728761 - RNA, 19 nt, Artificial Sequence
  Description of Artificial Sequence: Synthetic oligonucleotide
uccggaggcugugggcagu

SEQ ID NO: 1728762 - RNA, 19 nt, Artificial Sequence
  Description of Artificial Sequence: Synthetic oligonucleotide
cagcacauguuggaaucaa

SEQ ID NO: 1728763 - RNA, 19 nt, Artificial Sequence
  Description of Artificial Sequence: Synthetic oligonucleotide
ggggaaaagcggcguaucu

SEQ ID NO: 1728764 - RNA, 19 nt, Artificial Sequence
  Description of Artificial Sequence: Synthetic oligonucleotide
gcuccggaggcugugggca

SEQ ID NO: 1728765 - RNA, 19 nt, Artificial Sequence
  Description of Artificial Sequence: Synthetic oligonucleotide
gcccucggggaaaagcggc

SEQ ID NO: 1728766 - RNA, 19 nt, Artificial Sequence
  Description of Artificial Sequence: Synthetic oligonucleotide
ggcccagcaugaucaucug

SEQ ID NO: 1728767 - RNA, 19 nt, Artificial Sequence
  Description of Artificial Sequence: Synthetic oligonucleotide
cuccaccccacacuugagu

SEQ ID NO: 1728768 - RNA, 19 nt, Artificial Sequence
  Description of Artificial Sequence: Synthetic oligonucleotide
ugcccuggaagcggccuuu

SEQ ID NO: 1728769 - RNA, 19 nt, Artificial Sequence
  Description of Artificial Sequence: Synthetic oligonucleotide
cccuuacuccucagcacuc

SEQ ID NO: 1728770 - RNA, 19 nt, Artificial Sequence
  Description of Artificial Sequence: Synthetic oligonucleotide
caccccacacuugaguagu

SEQ ID NO: 1728771 - RNA, 19 nt, Artificial Sequence
  Description of Artificial Sequence: Synthetic oligonucleotide
cgggucacucucagcacag

SEQ ID NO: 1728772 - RNA, 19 nt, Artificial Sequence
  Description of Artificial Sequence: Synthetic oligonucleotide
cagcuaccugcucagcagu

SEQ ID NO: 1728773 - RNA, 19 nt, Artificial Sequence
  Description of Artificial Sequence: Synthetic oligonucleotide
ccacgugauccuccacccc

SEQ ID NO: 1728774 - RNA, 19 nt, Artificial Sequence
  Description of Artificial Sequence: Synthetic oligonucleotide
cucggggaaaagcggcgua

SEQ ID NO: 1728775 - RNA, 19 nt, Artificial Sequence
  Description of Artificial Sequence: Synthetic oligonucleotide
accccacacuugaguagug

SEQ ID NO: 1728776 - RNA, 19 nt, Artificial Sequence
  Description of Artificial Sequence: Synthetic oligonucleotide
cucugaggagauucagguu

SEQ ID NO: 1728777 - RNA, 19 nt, Artificial Sequence
  Description of Artificial Sequence: Synthetic oligonucleotide
cauuggcgaugauauucau

SEQ ID NO: 1728778 - RNA, 19 nt, Artificial Sequence
  Description of Artificial Sequence: Synthetic oligonucleotide
ccucaaugguaacaacucu

SEQ ID NO: 1728779 - RNA, 19 nt, Artificial Sequence
  Description of Artificial Sequence: Synthetic oligonucleotide
cccgcccucggggaaaagc

SEQ ID NO: 1728780 - RNA, 19 nt, Artificial Sequence
  Description of Artificial Sequence: Synthetic oligonucleotide
acgccauagcggucuccua

SEQ ID NO: 1728781 - RNA, 19 nt, Artificial Sequence
  Description of Artificial Sequence: Synthetic oligonucleotide
cuuucucagugcccagaau

SEQ ID NO: 1728782 - RNA, 19 nt, Artificial Sequence
  Description of Artificial Sequence: Synthetic oligonucleotide
gcggcguaucuuccagaac

SEQ ID NO: 1728783 - RNA, 19 nt, Artificial Sequence
  Description of Artificial Sequence: Synthetic oligonucleotide
gugugccaacauaguccug

SEQ ID NO: 1728784 - RNA, 19 nt, Artificial Sequence
  Description of Artificial Sequence: Synthetic oligonucleotide
gcucaucuugguggccuug

SEQ ID NO: 1728785 - RNA, 19 nt, Artificial Sequence
  Description of Artificial Sequence: Synthetic oligonucleotide
gcgcugacacaggaacgcc

SEQ ID NO: 1728786 - RNA, 19 nt, Artificial Sequence
  Description of Artificial Sequence: Synthetic oligonucleotide
cugacacaggaacgccaua

SEQ ID NO: 1728787 - RNA, 19 nt, Artificial Sequence
  Description of Artificial Sequence: Synthetic oligonucleotide
gcguaaccacaccucccca

SEQ ID NO: 1728788 - RNA, 19 nt, Artificial Sequence
  Description of Artificial Sequence: Synthetic oligonucleotide
gaacucccgugcguagcua

SEQ ID NO: 1728789 - RNA, 19 nt, Artificial Sequence
  Description of Artificial Sequence: Synthetic oligonucleotide
ggaacgccauagcggucuc

SEQ ID NO: 1728790 - RNA, 19 nt, Artificial Sequence
  Description of Artificial Sequence: Synthetic oligonucleotide
cuaagacuucagccacccu

SEQ ID NO: 1728791 - RNA, 19 nt, Artificial Sequence
  Description of Artificial Sequence: Synthetic oligonucleotide
cacacuccggagucucccu

SEQ ID NO: 1728792 - RNA, 19 nt, Artificial Sequence
  Description of Artificial Sequence: Synthetic oligonucleotide
cucgucggcucaucuuggu

SEQ ID NO: 1728793 - RNA, 19 nt, Artificial Sequence
  Description of Artificial Sequence: Synthetic oligonucleotide
ccccuuacuccucagcacu

SEQ ID NO: 1728794 - RNA, 19 nt, Artificial Sequence
  Description of Artificial Sequence: Synthetic oligonucleotide
gccuugcccuggaagcggc

SEQ ID NO: 1728795 - RNA, 19 nt, Artificial Sequence
  Description of Artificial Sequence: Synthetic oligonucleotide
ggaaaccgcucagcacuuc

SEQ ID NO: 1728796 - RNA, 19 nt, Artificial Sequence
  Description of Artificial Sequence: Synthetic oligonucleotide
gcagaagcgccugcaccuc

SEQ ID NO: 1728797 - RNA, 19 nt, Artificial Sequence
  Description of Artificial Sequence: Synthetic oligonucleotide
cagaagcgccugcaccucu

SEQ ID NO: 1728798 - RNA, 19 nt, Artificial Sequence
  Description of Artificial Sequence: Synthetic oligonucleotide
ucgcguccgucugcagcuc

SEQ ID NO: 1728799 - RNA, 19 nt, Artificial Sequence
  Description of Artificial Sequence: Synthetic oligonucleotide
cacggucgucaggcuggcc

SEQ ID NO: 1728800 - RNA, 19 nt, Artificial Sequence
  Description of Artificial Sequence: Synthetic oligonucleotide
gcauguggucaaaucgccu

SEQ ID NO: 1728801 - RNA, 19 nt, Artificial Sequence
  Description of Artificial Sequence: Synthetic oligonucleotide
gccccgccaguaagaagag

SEQ ID NO: 1728802 - RNA, 19 nt, Artificial Sequence
  Description of Artificial Sequence: Synthetic oligonucleotide
cgcccucuuuccuguguag

SEQ ID NO: 1728803 - RNA, 19 nt, Artificial Sequence
  Description of Artificial Sequence: Synthetic oligonucleotide
ccacggugguggugaacuc

SEQ ID NO: 1728804 - RNA, 19 nt, Artificial Sequence
  Description of Artificial Sequence: Synthetic oligonucleotide
cggugguggugaacucccg

SEQ ID NO: 1728805 - RNA, 19 nt, Artificial Sequence
  Description of Artificial Sequence: Synthetic oligonucleotide
gcucggccgggcugcagga

SEQ ID NO: 1728806 - RNA, 19 nt, Artificial Sequence
  Description of Artificial Sequence: Synthetic oligonucleotide
cuaaugggcccagcaugau

SEQ ID NO: 1728807 - RNA, 19 nt, Artificial Sequence
  Description of Artificial Sequence: Synthetic oligonucleotide
cgcguccgucugcagcucg

SEQ ID NO: 1728808 - RNA, 19 nt, Artificial Sequence
  Description of Artificial Sequence: Synthetic oligonucleotide
cggccuuucuucccugcuc

SEQ ID NO: 1728809 - RNA, 19 nt, Artificial Sequence
  Description of Artificial Sequence: Synthetic oligonucleotide
ccgggcugcaggagaccac

SEQ ID NO: 1728810 - RNA, 19 nt, Artificial Sequence
  Description of Artificial Sequence: Synthetic oligonucleotide
cgccaguaagaagagccca

SEQ ID NO: 1728811 - RNA, 19 nt, Artificial Sequence
  Description of Artificial Sequence: Synthetic oligonucleotide
cugcucgucggcucaucuu

SEQ ID NO: 1728812 - RNA, 19 nt, Artificial Sequence
  Description of Artificial Sequence: Synthetic oligonucleotide
gccugcaccucugcucguc

SEQ ID NO: 1728813 - RNA, 19 nt, Artificial Sequence
  Description of Artificial Sequence: Synthetic oligonucleotide
gcguagcuaucgcgcugac

SEQ ID NO: 1728814 - RNA, 19 nt, Artificial Sequence
  Description of Artificial Sequence: Synthetic oligonucleotide
gggucacucucagcacaga

SEQ ID NO: 1728815 - RNA, 19 nt, Artificial Sequence
  Description of Artificial Sequence: Synthetic oligonucleotide
cucggaccuggaccuggcu

SEQ ID NO: 1728816 - RNA, 19 nt, Artificial Sequence
  Description of Artificial Sequence: Synthetic oligonucleotide
ccucuuuccuguguagcgu

SEQ ID NO: 1728817 - RNA, 19 nt, Artificial Sequence
  Description of Artificial Sequence: Synthetic oligonucleotide
cggggaaaagcggcguauc

SEQ ID NO: 1728818 - RNA, 19 nt, Artificial Sequence
  Description of Artificial Sequence: Synthetic oligonucleotide
cccuaauucccaugagguu

SEQ ID NO: 1728819 - RNA, 19 nt, Artificial Sequence
  Description of Artificial Sequence: Synthetic oligonucleotide
ccccgccaguaagaagagc

SEQ ID NO: 1728820 - RNA, 19 nt, Artificial Sequence
  Description of Artificial Sequence: Synthetic oligonucleotide
ggcagaccccggccccuca

SEQ ID NO: 1728821 - RNA, 19 nt, Artificial Sequence
  Description of Artificial Sequence: Synthetic oligonucleotide
guagugcagucagggcuuu

SEQ ID NO: 1728822 - RNA, 19 nt, Artificial Sequence
  Description of Artificial Sequence: Synthetic oligonucleotide
gcggccuuucuucccugcu

SEQ ID NO: 1728823 - RNA, 19 nt, Artificial Sequence
  Description of Artificial Sequence: Synthetic oligonucleotide
ccacggucgucaggcuggc

SEQ ID NO: 1728824 - RNA, 19 nt, Artificial Sequence
  Description of Artificial Sequence: Synthetic oligonucleotide
caaucucauuggcgaugau

SEQ ID NO: 1728825 - RNA, 19 nt, Artificial Sequence
  Description of Artificial Sequence: Synthetic oligonucleotide
gcagucgaucucugauuuu

SEQ ID NO: 1728826 - RNA, 19 nt, Artificial Sequence
  Description of Artificial Sequence: Synthetic oligonucleotide
gcaccucugcucgucggcu

SEQ ID NO: 1728827 - RNA, 19 nt, Artificial Sequence
  Description of Artificial Sequence: Synthetic oligonucleotide
cguagcuaucgcgcugaca

SEQ ID NO: 1728828 - RNA, 19 nt, Artificial Sequence
  Description of Artificial Sequence: Synthetic oligonucleotide
cgugauccuccaccccaca

SEQ ID NO: 1728829 - RNA, 19 nt, Artificial Sequence
  Description of Artificial Sequence: Synthetic oligonucleotide
cgaugguaccacggucguc

SEQ ID NO: 1728830 - RNA, 19 nt, Artificial Sequence
  Description of Artificial Sequence: Synthetic oligonucleotide
gggccccacgacgggucac

SEQ ID NO: 1728831 - RNA, 19 nt, Artificial Sequence
  Description of Artificial Sequence: Synthetic oligonucleotide
ccgcucgcguccgucugca

SEQ ID NO: 1728832 - RNA, 19 nt, Artificial Sequence
  Description of Artificial Sequence: Synthetic oligonucleotide
ccccacgacgggucacucu

SEQ ID NO: 1728833 - RNA, 19 nt, Artificial Sequence
  Description of Artificial Sequence: Synthetic oligonucleotide
cuccccagucugggcugcu

SEQ ID NO: 1728834 - RNA, 19 nt, Artificial Sequence
  Description of Artificial Sequence: Synthetic oligonucleotide
gggucuccucagacccaau

SEQ ID NO: 1728835 - RNA, 19 nt, Artificial Sequence
  Description of Artificial Sequence: Synthetic oligonucleotide
ccccgcccucggggaaaag

SEQ ID NO: 1728836 - RNA, 19 nt, Artificial Sequence
  Description of Artificial Sequence: Synthetic oligonucleotide
cgccugcaccucugcucgu

SEQ ID NO: 1728837 - RNA, 19 nt, Artificial Sequence
  Description of Artificial Sequence: Synthetic oligonucleotide
aaagaagaggccuuggcgc

SEQ ID NO: 1728838 - RNA, 19 nt, Artificial Sequence
  Description of Artificial Sequence: Synthetic oligonucleotide
aucacaucuagcuuaaucc

SEQ ID NO: 1728839 - RNA, 19 nt, Artificial Sequence
  Description of Artificial Sequence: Synthetic oligonucleotide
auaguaauacugcagaaac

SEQ ID NO: 1728840 - RNA, 19 nt, Artificial Sequence
  Description of Artificial Sequence: Synthetic oligonucleotide
aguugaacaaugucaaugc

SEQ ID NO: 1728841 - RNA, 19 nt, Artificial Sequence
  Description of Artificial Sequence: Synthetic oligonucleotide
uuauugaugagaaugcucu

SEQ ID NO: 1728842 - RNA, 19 nt, Artificial Sequence
  Description of Artificial Sequence: Synthetic oligonucleotide
aaugucaaugcauuaaaga

SEQ ID NO: 1728843 - RNA, 19 nt, Artificial Sequence
  Description of Artificial Sequence: Synthetic oligonucleotide
uuuguaagcaaacuuggcc

SEQ ID NO: 1728844 - RNA, 19 nt, Artificial Sequence
  Description of Artificial Sequence: Synthetic oligonucleotide
uuaaagagcugccagaagu

SEQ ID NO: 1728845 - RNA, 19 nt, Artificial Sequence
  Description of Artificial Sequence: Synthetic oligonucleotide
ucagcguacaguaauacca

SEQ ID NO: 1728846 - RNA, 19 nt, Artificial Sequence
  Description of Artificial Sequence: Synthetic oligonucleotide
ugucaaugcauuaaagagc

SEQ ID NO: 1728847 - RNA, 19 nt, Artificial Sequence
  Description of Artificial Sequence: Synthetic oligonucleotide
ucuagcuuaauccuucuug

SEQ ID NO: 1728848 - RNA, 19 nt, Artificial Sequence
  Description of Artificial Sequence: Synthetic oligonucleotide
uuuuccaggguccugugcg

SEQ ID NO: 1728849 - RNA, 19 nt, Artificial Sequence
  Description of Artificial Sequence: Synthetic oligonucleotide
guugacauuccccagaacc

SEQ ID NO: 1728850 - RNA, 19 nt, Artificial Sequence
  Description of Artificial Sequence: Synthetic oligonucleotide
ucuacggugagauccauag

SEQ ID NO: 1728851 - RNA, 19 nt, Artificial Sequence
  Description of Artificial Sequence: Synthetic oligonucleotide
accagacucagguacaacc

SEQ ID NO: 1728852 - RNA, 19 nt, Artificial Sequence
  Description of Artificial Sequence: Synthetic oligonucleotide
aaugcauuaaagagcugcc

SEQ ID NO: 1728853 - RNA, 19 nt, Artificial Sequence
  Description of Artificial Sequence: Synthetic oligonucleotide
aauccugcaagcugggcuc

SEQ ID NO: 1728854 - RNA, 19 nt, Artificial Sequence
  Description of Artificial Sequence: Synthetic oligonucleotide
uggagaaagacagaaacug

SEQ ID NO: 1728855 - RNA, 19 nt, Artificial Sequence
  Description of Artificial Sequence: Synthetic oligonucleotide
cauaguaugucguucgccc

SEQ ID NO: 1728856 - RNA, 19 nt, Artificial Sequence
  Description of Artificial Sequence: Synthetic oligonucleotide
acucgcaugagagagaggg

SEQ ID NO: 1728857 - RNA, 19 nt, Artificial Sequence
  Description of Artificial Sequence: Synthetic oligonucleotide
augucguucgcccagggcg

SEQ ID NO: 1728858 - RNA, 19 nt, Artificial Sequence
  Description of Artificial Sequence: Synthetic oligonucleotide
aauacugcagaaacugcac

SEQ ID NO: 1728859 - RNA, 19 nt, Artificial Sequence
  Description of Artificial Sequence: Synthetic oligonucleotide
aggcccagagcccaaaucc

SEQ ID NO: 1728860 - RNA, 19 nt, Artificial Sequence
  Description of Artificial Sequence: Synthetic oligonucleotide
ucauacucgucuuuguaag

SEQ ID NO: 1728861 - RNA, 19 nt, Artificial Sequence
  Description of Artificial Sequence: Synthetic oligonucleotide
cuagcuuaauccuucuugc

SEQ ID NO: 1728862 - RNA, 19 nt, Artificial Sequence
  Description of Artificial Sequence: Synthetic oligonucleotide
acaguaauaccagaccagc

SEQ ID NO: 1728863 - RNA, 19 nt, Artificial Sequence
  Description of Artificial Sequence: Synthetic oligonucleotide
ugagauccauaguaugucg

SEQ ID NO: 1728864 - RNA, 19 nt, Artificial Sequence
  Description of Artificial Sequence: Synthetic oligonucleotide
gguacauggagaaagacag

SEQ ID NO: 1728865 - RNA, 19 nt, Artificial Sequence
  Description of Artificial Sequence: Synthetic oligonucleotide
caaugcauuaaagagcugc

SEQ ID NO: 1728866 - RNA, 19 nt, Artificial Sequence
  Description of Artificial Sequence: Synthetic oligonucleotide
auccauaguaugucguucg

SEQ ID NO: 1728867 - RNA, 19 nt, Artificial Sequence
  Description of Artificial Sequence: Synthetic oligonucleotide
uacggugagauccauagua

SEQ ID NO: 1728868 - RNA, 19 nt, Artificial Sequence
  Description of Artificial Sequence: Synthetic oligonucleotide
guaaugauggaacacccac

SEQ ID NO: 1728869 - RNA, 19 nt, Artificial Sequence
  Description of Artificial Sequence: Synthetic oligonucleotide
augaggaugaucgugaggu

SEQ ID NO: 1728870 - RNA, 19 nt, Artificial Sequence
  Description of Artificial Sequence: Synthetic oligonucleotide
ugguacauggagaaagaca

SEQ ID NO: 1728871 - RNA, 19 nt, Artificial Sequence
  Description of Artificial Sequence: Synthetic oligonucleotide
gauccucccaguuacgcag

SEQ ID NO: 1728872 - RNA, 19 nt, Artificial Sequence
  Description of Artificial Sequence: Synthetic oligonucleotide
aacccauucuucuuaggca

SEQ ID NO: 1728873 - RNA, 19 nt, Artificial Sequence
  Description of Artificial Sequence: Synthetic oligonucleotide
ugcagauccucccaguuac

SEQ ID NO: 1728874 - RNA, 19 nt, Artificial Sequence
  Description of Artificial Sequence: Synthetic oligonucleotide
gguacaugagaccaucugg

SEQ ID NO: 1728875 - RNA, 19 nt, Artificial Sequence
  Description of Artificial Sequence: Synthetic oligonucleotide
caugagaccaucuggccag

SEQ ID NO: 1728876 - RNA, 19 nt, Artificial Sequence
  Description of Artificial Sequence: Synthetic oligonucleotide
guugguacaguuguccugg

SEQ ID NO: 1728877 - RNA, 19 nt, Artificial Sequence
  Description of Artificial Sequence: Synthetic oligonucleotide
aaaccuucuacggugagau

SEQ ID NO: 1728878 - RNA, 19 nt, Artificial Sequence
  Description of Artificial Sequence: Synthetic oligonucleotide
uguaccacucggagggucg

SEQ ID NO: 1728879 - RNA, 19 nt, Artificial Sequence
  Description of Artificial Sequence: Synthetic oligonucleotide
uucuuaggcaaauaggcuu

SEQ ID NO: 1728880 - RNA, 19 nt, Artificial Sequence
  Description of Artificial Sequence: Synthetic oligonucleotide
uguaagcaaacuuggccug

SEQ ID NO: 1728881 - RNA, 19 nt, Artificial Sequence
  Description of Artificial Sequence: Synthetic oligonucleotide
aacaaugucaaugcauuaa

SEQ ID NO: 1728882 - RNA, 19 nt, Artificial Sequence
  Description of Artificial Sequence: Synthetic oligonucleotide
gucuuuguaagcaaacuug

SEQ ID NO: 1728883 - RNA, 19 nt, Artificial Sequence
  Description of Artificial Sequence: Synthetic oligonucleotide
ucacaucuagcuuaauccu

SEQ ID NO: 1728884 - RNA, 19 nt, Artificial Sequence
  Description of Artificial Sequence: Synthetic oligonucleotide
ucuuaggcaaauaggcuuc

SEQ ID NO: 1728885 - RNA, 19 nt, Artificial Sequence
  Description of Artificial Sequence: Synthetic oligonucleotide
uagagcuugaauuucucau

SEQ ID NO: 1728886 - RNA, 19 nt, Artificial Sequence
  Description of Artificial Sequence: Synthetic oligonucleotide
uaccagaccagcaggaagu

SEQ ID NO: 1728887 - RNA, 19 nt, Artificial Sequence
  Description of Artificial Sequence: Synthetic oligonucleotide
ugagcaggaagcgacaaga

SEQ ID NO: 1728888 - RNA, 19 nt, Artificial Sequence
  Description of Artificial Sequence: Synthetic oligonucleotide
aaacuuggccugcuugcuc

SEQ ID NO: 1728889 - RNA, 19 nt, Artificial Sequence
  Description of Artificial Sequence: Synthetic oligonucleotide
aacguggacacguaaugau

SEQ ID NO: 1728890 - RNA, 19 nt, Artificial Sequence
  Description of Artificial Sequence: Synthetic oligonucleotide
ucuagcuucaggcgguaca

SEQ ID NO: 1728891 - RNA, 19 nt, Artificial Sequence
  Description of Artificial Sequence: Synthetic oligonucleotide
ugucacguugacauucccc

SEQ ID NO: 1728892 - RNA, 19 nt, Artificial Sequence
  Description of Artificial Sequence: Synthetic oligonucleotide
gauggaacacccaccagcc

SEQ ID NO: 1728893 - RNA, 19 nt, Artificial Sequence
  Description of Artificial Sequence: Synthetic oligonucleotide
caaugucaaugcauuaaag

SEQ ID NO: 1728894 - RNA, 19 nt, Artificial Sequence
  Description of Artificial Sequence: Synthetic oligonucleotide
gacaaugaggaugaucgug

SEQ ID NO: 1728895 - RNA, 19 nt, Artificial Sequence
  Description of Artificial Sequence: Synthetic oligonucleotide
agagagagggccugcaucu

SEQ ID NO: 1728896 - RNA, 19 nt, Artificial Sequence
  Description of Artificial Sequence: Synthetic oligonucleotide
uaguaauacugcagaaacu

SEQ ID NO: 1728897 - RNA, 19 nt, Artificial Sequence
  Description of Artificial Sequence: Synthetic oligonucleotide
uaguaugucguucgcccag

SEQ ID NO: 1728898 - RNA, 19 nt, Artificial Sequence
  Description of Artificial Sequence: Synthetic oligonucleotide
cugauaguaauacugcaga

SEQ ID NO: 1728899 - RNA, 19 nt, Artificial Sequence
  Description of Artificial Sequence: Synthetic oligonucleotide
aggcaaauaggcuuccaug

SEQ ID NO: 1728900 - RNA, 19 nt, Artificial Sequence
  Description of Artificial Sequence: Synthetic oligonucleotide
auaccagaccagcaggaag

SEQ ID NO: 1728901 - RNA, 19 nt, Artificial Sequence
  Description of Artificial Sequence: Synthetic oligonucleotide
uggcgugugauggaguugg

SEQ ID NO: 1728902 - RNA, 19 nt, Artificial Sequence
  Description of Artificial Sequence: Synthetic oligonucleotide
acguaaugauggaacaccc

SEQ ID NO: 1728903 - RNA, 19 nt, Artificial Sequence
  Description of Artificial Sequence: Synthetic oligonucleotide
auuaaagagcugccagaag

SEQ ID NO: 1728904 - RNA, 19 nt, Artificial Sequence
  Description of Artificial Sequence: Synthetic oligonucleotide
agagcccaaauccugcaag

SEQ ID NO: 1728905 - RNA, 19 nt, Artificial Sequence
  Description of Artificial Sequence: Synthetic oligonucleotide
gaauuucucauacucgucu

SEQ ID NO: 1728906 - RNA, 19 nt, Artificial Sequence
  Description of Artificial Sequence: Synthetic oligonucleotide
agaaacugguuccggaacu

SEQ ID NO: 1728907 - RNA, 19 nt, Artificial Sequence
  Description of Artificial Sequence: Synthetic oligonucleotide
gcuuaauccuucuugcucc

SEQ ID NO: 1728908 - RNA, 19 nt, Artificial Sequence
  Description of Artificial Sequence: Synthetic oligonucleotide
ugauaguaauacugcagaa

SEQ ID NO: 1728909 - RNA, 19 nt, Artificial Sequence
  Description of Artificial Sequence: Synthetic oligonucleotide
guacaugagaccaucuggc

SEQ ID NO: 1728910 - RNA, 19 nt, Artificial Sequence
  Description of Artificial Sequence: Synthetic oligonucleotide
gaggaugaucgugagguag

SEQ ID NO: 1728911 - RNA, 19 nt, Artificial Sequence
  Description of Artificial Sequence: Synthetic oligonucleotide
ucgcaugagagagagggcc

SEQ ID NO: 1728912 - RNA, 19 nt, Artificial Sequence
  Description of Artificial Sequence: Synthetic oligonucleotide
uacaugagaccaucuggcc

SEQ ID NO: 1728913 - RNA, 19 nt, Artificial Sequence
  Description of Artificial Sequence: Synthetic oligonucleotide
uacaacccauucuucuuag

SEQ ID NO: 1728914 - RNA, 19 nt, Artificial Sequence
  Description of Artificial Sequence: Synthetic oligonucleotide
acaucuagcuuaauccuuc

SEQ ID NO: 1728915 - RNA, 19 nt, Artificial Sequence
  Description of Artificial Sequence: Synthetic oligonucleotide
gucacguugacauucccca

SEQ ID NO: 1728916 - RNA, 19 nt, Artificial Sequence
  Description of Artificial Sequence: Synthetic oligonucleotide
gucgaagccccuuuggggc

SEQ ID NO: 1728917 - RNA, 19 nt, Artificial Sequence
  Description of Artificial Sequence: Synthetic oligonucleotide
gaucgugagguagagcuug

SEQ ID NO: 1728918 - RNA, 19 nt, Artificial Sequence
  Description of Artificial Sequence: Synthetic oligonucleotide
caucacaucuagcuuaauc

SEQ ID NO: 1728919 - RNA, 19 nt, Artificial Sequence
  Description of Artificial Sequence: Synthetic oligonucleotide
caugacucccgacaggaac

SEQ ID NO: 1728920 - RNA, 19 nt, Artificial Sequence
  Description of Artificial Sequence: Synthetic oligonucleotide
acaugagaccaucuggcca

SEQ ID NO: 1728921 - RNA, 19 nt, Artificial Sequence
  Description of Artificial Sequence: Synthetic oligonucleotide
ugaauuucucauacucguc

SEQ ID NO: 1728922 - RNA, 19 nt, Artificial Sequence
  Description of Artificial Sequence: Synthetic oligonucleotide
gacacguaaugauggaaca

SEQ ID NO: 1728923 - RNA, 19 nt, Artificial Sequence
  Description of Artificial Sequence: Synthetic oligonucleotide
cuuccauguccaaagaaga

SEQ ID NO: 1728924 - RNA, 19 nt, Artificial Sequence
  Description of Artificial Sequence: Synthetic oligonucleotide
cucccaguuacgcaggcag

SEQ ID NO: 1728925 - RNA, 19 nt, Artificial Sequence
  Description of Artificial Sequence: Synthetic oligonucleotide
caggcacccgcucugauag

SEQ ID NO: 1728926 - RNA, 19 nt, Artificial Sequence
  Description of Artificial Sequence: Synthetic oligonucleotide
acacguaaugauggaacac

SEQ ID NO: 1728927 - RNA, 19 nt, Artificial Sequence
  Description of Artificial Sequence: Synthetic oligonucleotide
cagaaguguccaaagaaga

SEQ ID NO: 1728928 - RNA, 19 nt, Artificial Sequence
  Description of Artificial Sequence: Synthetic oligonucleotide
uccauaguaugucguucgc

SEQ ID NO: 1728929 - RNA, 19 nt, Artificial Sequence
  Description of Artificial Sequence: Synthetic oligonucleotide
gauggaguugguacaguug

SEQ ID NO: 1728930 - RNA, 19 nt, Artificial Sequence
  Description of Artificial Sequence: Synthetic oligonucleotide
uggaacuucugguguacca

SEQ ID NO: 1728931 - RNA, 19 nt, Artificial Sequence
  Description of Artificial Sequence: Synthetic oligonucleotide
cauacucgucuuuguaagc

SEQ ID NO: 1728932 - RNA, 19 nt, Artificial Sequence
  Description of Artificial Sequence: Synthetic oligonucleotide
uggaacacccaccagccuu

SEQ ID NO: 1728933 - RNA, 19 nt, Artificial Sequence
  Description of Artificial Sequence: Synthetic oligonucleotide
uuuguccacgccacgggac

SEQ ID NO: 1728934 - RNA, 19 nt, Artificial Sequence
  Description of Artificial Sequence: Synthetic oligonucleotide
auguccaaagaagaggccu

SEQ ID NO: 1728935 - RNA, 19 nt, Artificial Sequence
  Description of Artificial Sequence: Synthetic oligonucleotide
ucucggauggucagcguac

SEQ ID NO: 1728936 - RNA, 19 nt, Artificial Sequence
  Description of Artificial Sequence: Synthetic oligonucleotide
cuuaauccuucuugcuccc

SEQ ID NO: 1728937 - RNA, 19 nt, Artificial Sequence
  Description of Artificial Sequence: Synthetic oligonucleotide
gaguugagcaggaagcgac

SEQ ID NO: 1728938 - RNA, 19 nt, Artificial Sequence
  Description of Artificial Sequence: Synthetic oligonucleotide
ucucauacucgucuuugua

SEQ ID NO: 1728939 - RNA, 19 nt, Artificial Sequence
  Description of Artificial Sequence: Synthetic oligonucleotide
augacucccgacaggaacg

SEQ ID NO: 1728940 - RNA, 19 nt, Artificial Sequence
  Description of Artificial Sequence: Synthetic oligonucleotide
uugcucagaagugucacgu

SEQ ID NO: 1728941 - RNA, 19 nt, Artificial Sequence
  Description of Artificial Sequence: Synthetic oligonucleotide
auggucagcguacaguaau

SEQ ID NO: 1728942 - RNA, 19 nt, Artificial Sequence
  Description of Artificial Sequence: Synthetic oligonucleotide
agugucacguugacauucc

SEQ ID NO: 1728943 - RNA, 19 nt, Artificial Sequence
  Description of Artificial Sequence: Synthetic oligonucleotide
agacucgcaugagagagag

SEQ ID NO: 1728944 - RNA, 19 nt, Artificial Sequence
  Description of Artificial Sequence: Synthetic oligonucleotide
gucagcguacaguaauacc

SEQ ID NO: 1728945 - RNA, 19 nt, Artificial Sequence
  Description of Artificial Sequence: Synthetic oligonucleotide
gucaaugcauuaaagagcu

SEQ ID NO: 1728946 - RNA, 19 nt, Artificial Sequence
  Description of Artificial Sequence: Synthetic oligonucleotide
uaugucguucgcccagggc

SEQ ID NO: 1728947 - RNA, 19 nt, Artificial Sequence
  Description of Artificial Sequence: Synthetic oligonucleotide
agagcuugaauuucucaua

SEQ ID NO: 1728948 - RNA, 19 nt, Artificial Sequence
  Description of Artificial Sequence: Synthetic oligonucleotide
acacaggggugccccaacc

SEQ ID NO: 1728949 - RNA, 19 nt, Artificial Sequence
  Description of Artificial Sequence: Synthetic oligonucleotide
aggcgguacaggcacccgc

SEQ ID NO: 1728950 - RNA, 19 nt, Artificial Sequence
  Description of Artificial Sequence: Synthetic oligonucleotide
ggagaaagacagaaacugg

SEQ ID NO: 1728951 - RNA, 19 nt, Artificial Sequence
  Description of Artificial Sequence: Synthetic oligonucleotide
uugaaggcagcguccguca

SEQ ID NO: 1728952 - RNA, 19 nt, Artificial Sequence
  Description of Artificial Sequence: Synthetic oligonucleotide
ucacccuggaguugagcag

SEQ ID NO: 1728953 - RNA, 19 nt, Artificial Sequence
  Description of Artificial Sequence: Synthetic oligonucleotide
uccuggaaccauuauugau

SEQ ID NO: 1728954 - RNA, 19 nt, Artificial Sequence
  Description of Artificial Sequence: Synthetic oligonucleotide
ugucguucgcccagggcgc

SEQ ID NO: 1728955 - RNA, 19 nt, Artificial Sequence
  Description of Artificial Sequence: Synthetic oligonucleotide
auacucgucuuuguaagca

SEQ ID NO: 1728956 - RNA, 19 nt, Artificial Sequence
  Description of Artificial Sequence: Synthetic oligonucleotide
uccaaagaagaggccuugg

SEQ ID NO: 1728957 - RNA, 19 nt, Artificial Sequence
  Description of Artificial Sequence: Synthetic oligonucleotide
gagagagagggccugcauc

SEQ ID NO: 1728958 - RNA, 19 nt, Artificial Sequence
  Description of Artificial Sequence: Synthetic oligonucleotide
caggcgguguguuuccugg

SEQ ID NO: 1728959 - RNA, 19 nt, Artificial Sequence
  Description of Artificial Sequence: Synthetic oligonucleotide
auaguaugucguucgccca

SEQ ID NO: 1728960 - RNA, 19 nt, Artificial Sequence
  Description of Artificial Sequence: Synthetic oligonucleotide
ugcaugucuuuguccacgc

SEQ ID NO: 1728961 - RNA, 19 nt, Artificial Sequence
  Description of Artificial Sequence: Synthetic oligonucleotide
cagaaacugcacaaagcuc

SEQ ID NO: 1728962 - RNA, 19 nt, Artificial Sequence
  Description of Artificial Sequence: Synthetic oligonucleotide
aaguugccgaggaaaagga

SEQ ID NO: 1728963 - RNA, 19 nt, Artificial Sequence
  Description of Artificial Sequence: Synthetic oligonucleotide
auaccuuggaaguccugcu

SEQ ID NO: 1728964 - RNA, 19 nt, Artificial Sequence
  Description of Artificial Sequence: Synthetic oligonucleotide
uauugaugagaaugcucuc

SEQ ID NO: 1728965 - RNA, 19 nt, Artificial Sequence
  Description of Artificial Sequence: Synthetic oligonucleotide
ggucgaagccccuuugggg

SEQ ID NO: 1728966 - RNA, 19 nt, Artificial Sequence
  Description of Artificial Sequence: Synthetic oligonucleotide
uguccaaagaagaggccuu

SEQ ID NO: 1728967 - RNA, 19 nt, Artificial Sequence
  Description of Artificial Sequence: Synthetic oligonucleotide
acaacccauucuucuuagg

SEQ ID NO: 1728968 - RNA, 19 nt, Artificial Sequence
  Description of Artificial Sequence: Synthetic oligonucleotide
cuagcuucaggcgguacag

SEQ ID NO: 1728969 - RNA, 19 nt, Artificial Sequence
  Description of Artificial Sequence: Synthetic oligonucleotide
ggagccuuuucuucuggcg

SEQ ID NO: 1728970 - RNA, 19 nt, Artificial Sequence
  Description of Artificial Sequence: Synthetic oligonucleotide
ugguacaguuguccuggag

SEQ ID NO: 1728971 - RNA, 19 nt, Artificial Sequence
  Description of Artificial Sequence: Synthetic oligonucleotide
uagcuuaauccuucuugcu

SEQ ID NO: 1728972 - RNA, 19 nt, Artificial Sequence
  Description of Artificial Sequence: Synthetic oligonucleotide
cugguuccggaacuucugg

SEQ ID NO: 1728973 - RNA, 19 nt, Artificial Sequence
  Description of Artificial Sequence: Synthetic oligonucleotide
guugccgaggaaaaggaga

SEQ ID NO: 1728974 - RNA, 19 nt, Artificial Sequence
  Description of Artificial Sequence: Synthetic oligonucleotide
uccucuagcuucaggcggu

SEQ ID NO: 1728975 - RNA, 19 nt, Artificial Sequence
  Description of Artificial Sequence: Synthetic oligonucleotide
aguuacgcaggcagucgcc

SEQ ID NO: 1728976 - RNA, 19 nt, Artificial Sequence
  Description of Artificial Sequence: Synthetic oligonucleotide
cagaaacugguuccggaac

SEQ ID NO: 1728977 - RNA, 19 nt, Artificial Sequence
  Description of Artificial Sequence: Synthetic oligonucleotide
caggucagcaugacucccg

SEQ ID NO: 1728978 - RNA, 19 nt, Artificial Sequence
  Description of Artificial Sequence: Synthetic oligonucleotide
aaccagacucagguacaac

SEQ ID NO: 1728979 - RNA, 19 nt, Artificial Sequence
  Description of Artificial Sequence: Synthetic oligonucleotide
aauaccagaccagcaggaa

SEQ ID NO: 1728980 - RNA, 19 nt, Artificial Sequence
  Description of Artificial Sequence: Synthetic oligonucleotide
aaccuucuacggugagauc

SEQ ID NO: 1728981 - RNA, 19 nt, Artificial Sequence
  Description of Artificial Sequence: Synthetic oligonucleotide
acaggggugccccaaccug

SEQ ID NO: 1728982 - RNA, 19 nt, Artificial Sequence
  Description of Artificial Sequence: Synthetic oligonucleotide
cguggacacguaaugaugg

SEQ ID NO: 1728983 - RNA, 19 nt, Artificial Sequence
  Description of Artificial Sequence: Synthetic oligonucleotide
agauccucccaguuacgca

SEQ ID NO: 1728984 - RNA, 19 nt, Artificial Sequence
  Description of Artificial Sequence: Synthetic oligonucleotide
gugagguagagcuugaauu

SEQ ID NO: 1728985 - RNA, 19 nt, Artificial Sequence
  Description of Artificial Sequence: Synthetic oligonucleotide
uggauaccuuggaaguccu

SEQ ID NO: 1728986 - RNA, 19 nt, Artificial Sequence
  Description of Artificial Sequence: Synthetic oligonucleotide
aguaugucguucgcccagg

SEQ ID NO: 1728987 - RNA, 19 nt, Artificial Sequence
  Description of Artificial Sequence: Synthetic oligonucleotide
ucaaugcauuaaagagcug

SEQ ID NO: 1728988 - RNA, 19 nt, Artificial Sequence
  Description of Artificial Sequence: Synthetic oligonucleotide
ugacaaugaggaugaucgu

SEQ ID NO: 1728989 - RNA, 19 nt, Artificial Sequence
  Description of Artificial Sequence: Synthetic oligonucleotide
caguuacgcaggcagucgc

SEQ ID NO: 1728990 - RNA, 19 nt, Artificial Sequence
  Description of Artificial Sequence: Synthetic oligonucleotide
cguacaguaauaccagacc

SEQ ID NO: 1728991 - RNA, 19 nt, Artificial Sequence
  Description of Artificial Sequence: Synthetic oligonucleotide
aauaggcuuccauguccaa

SEQ ID NO: 1728992 - RNA, 19 nt, Artificial Sequence
  Description of Artificial Sequence: Synthetic oligonucleotide
ccagacucagguacaaccc

SEQ ID NO: 1728993 - RNA, 19 nt, Artificial Sequence
  Description of Artificial Sequence: Synthetic oligonucleotide
gaugaucgugagguagagc

SEQ ID NO: 1728994 - RNA, 19 nt, Artificial Sequence
  Description of Artificial Sequence: Synthetic oligonucleotide
uccgucacccuggaguuga

SEQ ID NO: 1728995 - RNA, 19 nt, Artificial Sequence
  Description of Artificial Sequence: Synthetic oligonucleotide
ggggaagccgcacaugagc

SEQ ID NO: 1728996 - RNA, 19 nt, Artificial Sequence
  Description of Artificial Sequence: Synthetic oligonucleotide
gaacaaugucaaugcauua

SEQ ID NO: 1728997 - RNA, 19 nt, Artificial Sequence
  Description of Artificial Sequence: Synthetic oligonucleotide
caggucgaagccccuuugg

SEQ ID NO: 1728998 - RNA, 19 nt, Artificial Sequence
  Description of Artificial Sequence: Synthetic oligonucleotide
agcguacaguaauaccaga

SEQ ID NO: 1728999 - RNA, 19 nt, Artificial Sequence
  Description of Artificial Sequence: Synthetic oligonucleotide
caggggugccccaaccugc

SEQ ID NO: 1729000 - RNA, 19 nt, Artificial Sequence
  Description of Artificial Sequence: Synthetic oligonucleotide
guaagcaaacuuggccugc

SEQ ID NO: 1729001 - RNA, 19 nt, Artificial Sequence
  Description of Artificial Sequence: Synthetic oligonucleotide
caccccaccuggcacacag

SEQ ID NO: 1729002 - RNA, 19 nt, Artificial Sequence
  Description of Artificial Sequence: Synthetic oligonucleotide
gaaaccuucuacggugaga

SEQ ID NO: 1729003 - RNA, 19 nt, Artificial Sequence
  Description of Artificial Sequence: Synthetic oligonucleotide
uggacacguaaugauggaa

SEQ ID NO: 1729004 - RNA, 19 nt, Artificial Sequence
  Description of Artificial Sequence: Synthetic oligonucleotide
agaaagacagaaacugguu

SEQ ID NO: 1729005 - RNA, 19 nt, Artificial Sequence
  Description of Artificial Sequence: Synthetic oligonucleotide
ugguuccggaacuucuggu

SEQ ID NO: 1729006 - RNA, 19 nt, Artificial Sequence
  Description of Artificial Sequence: Synthetic oligonucleotide
  modified_base (18)..(18): a, c, u, g, unknown or other
cuuggcgcuccuucaucng

SEQ ID NO: 1729007 - RNA, 19 nt, Artificial Sequence
  Description of Artificial Sequence: Synthetic oligonucleotide
caaccugccaccccaccug

SEQ ID NO: 1729008 - RNA, 19 nt, Artificial Sequence
  Description of Artificial Sequence: Synthetic oligonucleotide
cagauccucccaguuacgc

SEQ ID NO: 1729009 - RNA, 19 nt, Artificial Sequence
  Description of Artificial Sequence: Synthetic oligonucleotide
ggacacguaaugauggaac

SEQ ID NO: 1729010 - RNA, 19 nt, Artificial Sequence
  Description of Artificial Sequence: Synthetic oligonucleotide
acaggucgaagccccuuug

SEQ ID NO: 1729011 - RNA, 19 nt, Artificial Sequence
  Description of Artificial Sequence: Synthetic oligonucleotide
ggcaaauaggcuuccaugu

SEQ ID NO: 1729012 - RNA, 19 nt, Artificial Sequence
  Description of Artificial Sequence: Synthetic oligonucleotide
ugagagagagggccugcau

SEQ ID NO: 1729013 - RNA, 19 nt, Artificial Sequence
  Description of Artificial Sequence: Synthetic oligonucleotide
acucggagggucgugaaaa

SEQ ID NO: 1729014 - RNA, 19 nt, Artificial Sequence
  Description of Artificial Sequence: Synthetic oligonucleotide
guaugucguucgcccaggg

SEQ ID NO: 1729015 - RNA, 19 nt, Artificial Sequence
  Description of Artificial Sequence: Synthetic oligonucleotide
augcauuaaagagcugcca

SEQ ID NO: 1729016 - RNA, 19 nt, Artificial Sequence
  Description of Artificial Sequence: Synthetic oligonucleotide
uggucagcguacaguaaua

SEQ ID NO: 1729017 - RNA, 19 nt, Artificial Sequence
  Description of Artificial Sequence: Synthetic oligonucleotide
gagaccaucuggccagguc

SEQ ID NO: 1729018 - RNA, 19 nt, Artificial Sequence
  Description of Artificial Sequence: Synthetic oligonucleotide
uccuggaguuuggugagcu

SEQ ID NO: 1729019 - RNA, 19 nt, Artificial Sequence
  Description of Artificial Sequence: Synthetic oligonucleotide
guuacgcaggcagucgccc

SEQ ID NO: 1729020 - RNA, 19 nt, Artificial Sequence
  Description of Artificial Sequence: Synthetic oligonucleotide
cugguacauggagaaagac

SEQ ID NO: 1729021 - RNA, 19 nt, Artificial Sequence
  Description of Artificial Sequence: Synthetic oligonucleotide
cuucuggcgugugauggag

SEQ ID NO: 1729022 - RNA, 19 nt, Artificial Sequence
  Description of Artificial Sequence: Synthetic oligonucleotide
ggcuguggaacuucuggug

SEQ ID NO: 1729023 - RNA, 19 nt, Artificial Sequence
  Description of Artificial Sequence: Synthetic oligonucleotide
guacaacccauucuucuua

SEQ ID NO: 1729024 - RNA, 19 nt, Artificial Sequence
  Description of Artificial Sequence: Synthetic oligonucleotide
gguacaggcacccgcucug

SEQ ID NO: 1729025 - RNA, 19 nt, Artificial Sequence
  Description of Artificial Sequence: Synthetic oligonucleotide
agaaccagacucagguaca

SEQ ID NO: 1729026 - RNA, 19 nt, Artificial Sequence
  Description of Artificial Sequence: Synthetic oligonucleotide
ugaucgugagguagagcuu

SEQ ID NO: 1729027 - RNA, 19 nt, Artificial Sequence
  Description of Artificial Sequence: Synthetic oligonucleotide
agggucccgggccaaguug

SEQ ID NO: 1729028 - RNA, 19 nt, Artificial Sequence
  Description of Artificial Sequence: Synthetic oligonucleotide
aguugccgaggaaaaggag

SEQ ID NO: 1729029 - RNA, 19 nt, Artificial Sequence
  Description of Artificial Sequence: Synthetic oligonucleotide
guacaggcgguguguuucc

SEQ ID NO: 1729030 - RNA, 19 nt, Artificial Sequence
  Description of Artificial Sequence: Synthetic oligonucleotide
uggccaucacaucuagcuu

SEQ ID NO: 1729031 - RNA, 19 nt, Artificial Sequence
  Description of Artificial Sequence: Synthetic oligonucleotide
acaggcgguguguuuccug

SEQ ID NO: 1729032 - RNA, 19 nt, Artificial Sequence
  Description of Artificial Sequence: Synthetic oligonucleotide
uucuacggugagauccaua

SEQ ID NO: 1729033 - RNA, 19 nt, Artificial Sequence
  Description of Artificial Sequence: Synthetic oligonucleotide
ggauggucagcguacagua

SEQ ID NO: 1729034 - RNA, 19 nt, Artificial Sequence
  Description of Artificial Sequence: Synthetic oligonucleotide
uucuggcgugugauggagu

SEQ ID NO: 1729035 - RNA, 19 nt, Artificial Sequence
  Description of Artificial Sequence: Synthetic oligonucleotide
ucgaagccccuuuggggcu

SEQ ID NO: 1729036 - RNA, 19 nt, Artificial Sequence
  Description of Artificial Sequence: Synthetic oligonucleotide
caugagagagagggccugc

SEQ ID NO: 1729037 - RNA, 19 nt, Artificial Sequence
  Description of Artificial Sequence: Synthetic oligonucleotide
gguacaggcgguguguuuc

SEQ ID NO: 1729038 - RNA, 19 nt, Artificial Sequence
  Description of Artificial Sequence: Synthetic oligonucleotide
cacgccacgggacgcgggg

SEQ ID NO: 1729039 - RNA, 19 nt, Artificial Sequence
  Description of Artificial Sequence: Synthetic oligonucleotide
gcaaauaggcuuccauguc

SEQ ID NO: 1729040 - RNA, 19 nt, Artificial Sequence
  Description of Artificial Sequence: Synthetic oligonucleotide
aggggugccccaaccugcc

SEQ ID NO: 1729041 - RNA, 19 nt, Artificial Sequence
  Description of Artificial Sequence: Synthetic oligonucleotide
ugaggaugaucgugaggua

SEQ ID NO: 1729042 - RNA, 19 nt, Artificial Sequence
  Description of Artificial Sequence: Synthetic oligonucleotide
cuuuguccacgccacggga

SEQ ID NO: 1729043 - RNA, 19 nt, Artificial Sequence
  Description of Artificial Sequence: Synthetic oligonucleotide
caaauccugcaagcugggc

SEQ ID NO: 1729044 - RNA, 19 nt, Artificial Sequence
  Description of Artificial Sequence: Synthetic oligonucleotide
ggaaaccuucuacggugag

SEQ ID NO: 1729045 - RNA, 19 nt, Artificial Sequence
  Description of Artificial Sequence: Synthetic oligonucleotide
guacaguuguccuggaguu

SEQ ID NO: 1729046 - RNA, 19 nt, Artificial Sequence
  Description of Artificial Sequence: Synthetic oligonucleotide
guggacacguaaugaugga

SEQ ID NO: 1729047 - RNA, 19 nt, Artificial Sequence
  Description of Artificial Sequence: Synthetic oligonucleotide
gagauccauaguaugucgu

SEQ ID NO: 1729048 - RNA, 19 nt, Artificial Sequence
  Description of Artificial Sequence: Synthetic oligonucleotide
gugucacguugacauuccc

SEQ ID NO: 1729049 - RNA, 19 nt, Artificial Sequence
  Description of Artificial Sequence: Synthetic oligonucleotide
gcuucaggcgguacaggcg

SEQ ID NO: 1729050 - RNA, 19 nt, Artificial Sequence
  Description of Artificial Sequence: Synthetic oligonucleotide
gcguacaguaauaccagac

SEQ ID NO: 1729051 - RNA, 19 nt, Artificial Sequence
  Description of Artificial Sequence: Synthetic oligonucleotide
uugguacaguuguccugga

SEQ ID NO: 1729052 - RNA, 19 nt, Artificial Sequence
  Description of Artificial Sequence: Synthetic oligonucleotide
ggaugaucgugagguagag

SEQ ID NO: 1729053 - RNA, 19 nt, Artificial Sequence
  Description of Artificial Sequence: Synthetic oligonucleotide
gacgcggggagccacgagu

SEQ ID NO: 1729054 - RNA, 19 nt, Artificial Sequence
  Description of Artificial Sequence: Synthetic oligonucleotide
acggugagauccauaguau

SEQ ID NO: 1729055 - RNA, 19 nt, Artificial Sequence
  Description of Artificial Sequence: Synthetic oligonucleotide
aggcuuccauguccaaaga

SEQ ID NO: 1729056 - RNA, 19 nt, Artificial Sequence
  Description of Artificial Sequence: Synthetic oligonucleotide
ugacucccgacaggaacgu

SEQ ID NO: 1729057 - RNA, 19 nt, Artificial Sequence
  Description of Artificial Sequence: Synthetic oligonucleotide
cccgcucugauaguaauac

SEQ ID NO: 1729058 - RNA, 19 nt, Artificial Sequence
  Description of Artificial Sequence: Synthetic oligonucleotide
cugugcggccucugcagac

SEQ ID NO: 1729059 - RNA, 19 nt, Artificial Sequence
  Description of Artificial Sequence: Synthetic oligonucleotide
guguguuuccuggauaccu

SEQ ID NO: 1729060 - RNA, 19 nt, Artificial Sequence
  Description of Artificial Sequence: Synthetic oligonucleotide
ugcucagaagugucacguu

SEQ ID NO: 1729061 - RNA, 19 nt, Artificial Sequence
  Description of Artificial Sequence: Synthetic oligonucleotide
ggugagauccauaguaugu

SEQ ID NO: 1729062 - RNA, 19 nt, Artificial Sequence
  Description of Artificial Sequence: Synthetic oligonucleotide
gccucugcagacucgcaug

SEQ ID NO: 1729063 - RNA, 19 nt, Artificial Sequence
  Description of Artificial Sequence: Synthetic oligonucleotide
cucagguacaacccauucu

SEQ ID NO: 1729064 - RNA, 19 nt, Artificial Sequence
  Description of Artificial Sequence: Synthetic oligonucleotide
ggaagcgacaagagaagga

SEQ ID NO: 1729065 - RNA, 19 nt, Artificial Sequence
  Description of Artificial Sequence: Synthetic oligonucleotide
aggcgguacaggcggugug

SEQ ID NO: 1729066 - RNA, 19 nt, Artificial Sequence
  Description of Artificial Sequence: Synthetic oligonucleotide
uucaggcgguacaggcggu

SEQ ID NO: 1729067 - RNA, 19 nt, Artificial Sequence
  Description of Artificial Sequence: Synthetic oligonucleotide
agccccuuuggggcuggcc

SEQ ID NO: 1729068 - RNA, 19 nt, Artificial Sequence
  Description of Artificial Sequence: Synthetic oligonucleotide
uucgcccagggcgcgcagg

SEQ ID NO: 1729069 - RNA, 19 nt, Artificial Sequence
  Description of Artificial Sequence: Synthetic oligonucleotide
ccauaguaugucguucgcc

SEQ ID NO: 1729070 - RNA, 19 nt, Artificial Sequence
  Description of Artificial Sequence: Synthetic oligonucleotide
guggaacuucugguguacc

SEQ ID NO: 1729071 - RNA, 19 nt, Artificial Sequence
  Description of Artificial Sequence: Synthetic oligonucleotide
uccacgccacgggacgcgg

SEQ ID NO: 1729072 - RNA, 19 nt, Artificial Sequence
  Description of Artificial Sequence: Synthetic oligonucleotide
ggucagcguacaguaauac

SEQ ID NO: 1729073 - RNA, 19 nt, Artificial Sequence
  Description of Artificial Sequence: Synthetic oligonucleotide
gcacucagggucccgggcc

SEQ ID NO: 1729074 - RNA, 19 nt, Artificial Sequence
  Description of Artificial Sequence: Synthetic oligonucleotide
ggugccccaaccugccacc

SEQ ID NO: 1729075 - RNA, 19 nt, Artificial Sequence
  Description of Artificial Sequence: Synthetic oligonucleotide
aagccgcacaugagcaccu

SEQ ID NO: 1729076 - RNA, 19 nt, Artificial Sequence
  Description of Artificial Sequence: Synthetic oligonucleotide
accacucggagggucguga

SEQ ID NO: 1729077 - RNA, 19 nt, Artificial Sequence
  Description of Artificial Sequence: Synthetic oligonucleotide
agagcccacgaagcccagg

SEQ ID NO: 1729078 - RNA, 19 nt, Artificial Sequence
  Description of Artificial Sequence: Synthetic oligonucleotide
gauggucagcguacaguaa

SEQ ID NO: 1729079 - RNA, 19 nt, Artificial Sequence
  Description of Artificial Sequence: Synthetic oligonucleotide
uacaggcacccgcucugau

SEQ ID NO: 1729080 - RNA, 19 nt, Artificial Sequence
  Description of Artificial Sequence: Synthetic oligonucleotide
gacucgcaugagagagagg

SEQ ID NO: 1729081 - RNA, 19 nt, Artificial Sequence
  Description of Artificial Sequence: Synthetic oligonucleotide
guacauggagaaagacaga

SEQ ID NO: 1729082 - RNA, 19 nt, Artificial Sequence
  Description of Artificial Sequence: Synthetic oligonucleotide
cucucggauggucagcgua

SEQ ID NO: 1729083 - RNA, 19 nt, Artificial Sequence
  Description of Artificial Sequence: Synthetic oligonucleotide
cacacaggggugccccaac

SEQ ID NO: 1729084 - RNA, 19 nt, Artificial Sequence
  Description of Artificial Sequence: Synthetic oligonucleotide
ggaagccgcacaugagcac

SEQ ID NO: 1729085 - RNA, 19 nt, Artificial Sequence
  Description of Artificial Sequence: Synthetic oligonucleotide
ccaguuacgcaggcagucg

SEQ ID NO: 1729086 - RNA, 19 nt, Artificial Sequence
  Description of Artificial Sequence: Synthetic oligonucleotide
cgguguguuuccuggauac

SEQ ID NO: 1729087 - RNA, 19 nt, Artificial Sequence
  Description of Artificial Sequence: Synthetic oligonucleotide
gaagccccuuuggggcugg

SEQ ID NO: 1729088 - RNA, 19 nt, Artificial Sequence
  Description of Artificial Sequence: Synthetic oligonucleotide
aggggaagccgcacaugag

SEQ ID NO: 1729089 - RNA, 19 nt, Artificial Sequence
  Description of Artificial Sequence: Synthetic oligonucleotide
ggggcuggccaucacaucu

SEQ ID NO: 1729090 - RNA, 19 nt, Artificial Sequence
  Description of Artificial Sequence: Synthetic oligonucleotide
ggcuggccaucacaucuag

SEQ ID NO: 1729091 - RNA, 19 nt, Artificial Sequence
  Description of Artificial Sequence: Synthetic oligonucleotide
cagacucgcaugagagaga

SEQ ID NO: 1729092 - RNA, 19 nt, Artificial Sequence
  Description of Artificial Sequence: Synthetic oligonucleotide
cgggccaaguugaacaaug

SEQ ID NO: 1729093 - RNA, 19 nt, Artificial Sequence
  Description of Artificial Sequence: Synthetic oligonucleotide
gcuguggaacuucuggugu

SEQ ID NO: 1729094 - RNA, 19 nt, Artificial Sequence
  Description of Artificial Sequence: Synthetic oligonucleotide
gguguguuuccuggauacc

SEQ ID NO: 1729095 - RNA, 19 nt, Artificial Sequence
  Description of Artificial Sequence: Synthetic oligonucleotide
guccacgccacgggacgcg

SEQ ID NO: 1729096 - RNA, 19 nt, Artificial Sequence
  Description of Artificial Sequence: Synthetic oligonucleotide
gggcacacgaagggaaccc

SEQ ID NO: 1729097 - RNA, 19 nt, Artificial Sequence
  Description of Artificial Sequence: Synthetic oligonucleotide
uacaggcgguguguuuccu

SEQ ID NO: 1729098 - RNA, 19 nt, Artificial Sequence
  Description of Artificial Sequence: Synthetic oligonucleotide
acgcggggagccacgagug

SEQ ID NO: 1729099 - RNA, 19 nt, Artificial Sequence
  Description of Artificial Sequence: Synthetic oligonucleotide
gcaugucuuuguccacgcc

SEQ ID NO: 1729100 - RNA, 19 nt, Artificial Sequence
  Description of Artificial Sequence: Synthetic oligonucleotide
cuggcgugugauggaguug

SEQ ID NO: 1729101 - RNA, 19 nt, Artificial Sequence
  Description of Artificial Sequence: Synthetic oligonucleotide
cggugagauccauaguaug

SEQ ID NO: 1729102 - RNA, 19 nt, Artificial Sequence
  Description of Artificial Sequence: Synthetic oligonucleotide
ggcacacgaagggaacccc

SEQ ID NO: 1729103 - RNA, 19 nt, Artificial Sequence
  Description of Artificial Sequence: Synthetic oligonucleotide
cugcagauccucccaguua

SEQ ID NO: 1729104 - RNA, 19 nt, Artificial Sequence
  Description of Artificial Sequence: Synthetic oligonucleotide
caucuagcuuaauccuucu

SEQ ID NO: 1729105 - RNA, 19 nt, Artificial Sequence
  Description of Artificial Sequence: Synthetic oligonucleotide
aagccccuuuggggcuggc

SEQ ID NO: 1729106 - RNA, 19 nt, Artificial Sequence
  Description of Artificial Sequence: Synthetic oligonucleotide
uaccacucggagggucgug

SEQ ID NO: 1729107 - RNA, 19 nt, Artificial Sequence
  Description of Artificial Sequence: Synthetic oligonucleotide
gucguucgcccagggcgcg

SEQ ID NO: 1729108 - RNA, 19 nt, Artificial Sequence
  Description of Artificial Sequence: Synthetic oligonucleotide
gcgcgcaggcgguacaggc

SEQ ID NO: 1729109 - RNA, 19 nt, Artificial Sequence
  Description of Artificial Sequence: Synthetic oligonucleotide
agcguccgucacccuggag

SEQ ID NO: 1729110 - RNA, 19 nt, Artificial Sequence
  Description of Artificial Sequence: Synthetic oligonucleotide
cucuagcuucaggcgguac

SEQ ID NO: 1729111 - RNA, 19 nt, Artificial Sequence
  Description of Artificial Sequence: Synthetic oligonucleotide
gcagauccucccaguuacg

SEQ ID NO: 1729112 - RNA, 19 nt, Artificial Sequence
  Description of Artificial Sequence: Synthetic oligonucleotide
gccugcuugcucagaagug

SEQ ID NO: 1729113 - RNA, 19 nt, Artificial Sequence
  Description of Artificial Sequence: Synthetic oligonucleotide
caggcgguacaggcacccg

SEQ ID NO: 1729114 - RNA, 19 nt, Artificial Sequence
  Description of Artificial Sequence: Synthetic oligonucleotide
cguaaugauggaacaccca

SEQ ID NO: 1729115 - RNA, 19 nt, Artificial Sequence
  Description of Artificial Sequence: Synthetic oligonucleotide
gugcggccucugcagacuc

SEQ ID NO: 1729116 - RNA, 19 nt, Artificial Sequence
  Description of Artificial Sequence: Synthetic oligonucleotide
cucggauggucagcguaca

SEQ ID NO: 1729117 - RNA, 19 nt, Artificial Sequence
  Description of Artificial Sequence: Synthetic oligonucleotide
agggcgcgcaggcgguaca

SEQ ID NO: 1729118 - RNA, 19 nt, Artificial Sequence
  Description of Artificial Sequence: Synthetic oligonucleotide
guacaggcacccgcucuga

SEQ ID NO: 1729119 - RNA, 19 nt, Artificial Sequence
  Description of Artificial Sequence: Synthetic oligonucleotide
ggaaggggaagccgcacau

SEQ ID NO: 1729120 - RNA, 19 nt, Artificial Sequence
  Description of Artificial Sequence: Synthetic oligonucleotide
acacaggucgaagccccuu

SEQ ID NO: 1729121 - RNA, 19 nt, Artificial Sequence
  Description of Artificial Sequence: Synthetic oligonucleotide
ccuacacacaggggugccc

SEQ ID NO: 1729122 - RNA, 19 nt, Artificial Sequence
  Description of Artificial Sequence: Synthetic oligonucleotide
ggauaccuuggaaguccug

SEQ ID NO: 1729123 - RNA, 19 nt, Artificial Sequence
  Description of Artificial Sequence: Synthetic oligonucleotide
caccuggcacacaggucga

SEQ ID NO: 1729124 - RNA, 19 nt, Artificial Sequence
  Description of Artificial Sequence: Synthetic oligonucleotide
cacucggagggucgugaaa

SEQ ID NO: 1729125 - RNA, 19 nt, Artificial Sequence
  Description of Artificial Sequence: Synthetic oligonucleotide
gcggccucugcagacucgc

SEQ ID NO: 1729126 - RNA, 19 nt, Artificial Sequence
  Description of Artificial Sequence: Synthetic oligonucleotide
gggcccacagagcccacga

SEQ ID NO: 1729127 - RNA, 19 nt, Artificial Sequence
  Description of Artificial Sequence: Synthetic oligonucleotide
ucguucgcccagggcgcgc

SEQ ID NO: 1729128 - RNA, 19 nt, Artificial Sequence
  Description of Artificial Sequence: Synthetic oligonucleotide
gucccgggccaaguugaac

SEQ ID NO: 1729129 - RNA, 19 nt, Artificial Sequence
  Description of Artificial Sequence: Synthetic oligonucleotide
cacaggggugccccaaccu

SEQ ID NO: 1729130 - RNA, 19 nt, Artificial Sequence
  Description of Artificial Sequence: Synthetic oligonucleotide
cagucgcccagcgggucug

SEQ ID NO: 1729131 - RNA, 19 nt, Artificial Sequence
  Description of Artificial Sequence: Synthetic oligonucleotide
accccaccuggcacacagg

SEQ ID NO: 1729132 - RNA, 19 nt, Artificial Sequence
  Description of Artificial Sequence: Synthetic oligonucleotide
cuacggugagauccauagu

SEQ ID NO: 1729133 - RNA, 19 nt, Artificial Sequence
  Description of Artificial Sequence: Synthetic oligonucleotide
acccgcucugauaguaaua

SEQ ID NO: 1729134 - RNA, 19 nt, Artificial Sequence
  Description of Artificial Sequence: Synthetic oligonucleotide
aggcacccgcucugauagu

SEQ ID NO: 1729135 - RNA, 19 nt, Artificial Sequence
  Description of Artificial Sequence: Synthetic oligonucleotide
gccaucacaucuagcuuaa

SEQ ID NO: 1729136 - RNA, 19 nt, Artificial Sequence
  Description of Artificial Sequence: Synthetic oligonucleotide
gcucucucggauggucagc

SEQ ID NO: 1729137 - RNA, 19 nt, Artificial Sequence
  Description of Artificial Sequence: Synthetic oligonucleotide
guccgucacccuggaguug

SEQ ID NO: 1729138 - RNA, 19 nt, Artificial Sequence
  Description of Artificial Sequence: Synthetic oligonucleotide
caugccucucuuccuuuau

SEQ ID NO: 1729139 - RNA, 19 nt, Artificial Sequence
  Description of Artificial Sequence: Synthetic oligonucleotide
gccuuggcgcuccuucauc

SEQ ID NO: 1729140 - RNA, 19 nt, Artificial Sequence
  Description of Artificial Sequence: Synthetic oligonucleotide
ccccuacacacaggggugc

SEQ ID NO: 1729141 - RNA, 19 nt, Artificial Sequence
  Description of Artificial Sequence: Synthetic oligonucleotide
aggcagucgcccagcgggu

SEQ ID NO: 1729142 - RNA, 19 nt, Artificial Sequence
  Description of Artificial Sequence: Synthetic oligonucleotide
cccaaccugccaccccacc

SEQ ID NO: 1729143 - RNA, 19 nt, Artificial Sequence
  Description of Artificial Sequence: Synthetic oligonucleotide
cccaccuggcacacagguc

SEQ ID NO: 1729144 - RNA, 19 nt, Artificial Sequence
  Description of Artificial Sequence: Synthetic oligonucleotide
cacccgcucugauaguaau

SEQ ID NO: 1729145 - RNA, 19 nt, Artificial Sequence
  Description of Artificial Sequence: Synthetic oligonucleotide
caggaaggugaggccucuc

SEQ ID NO: 1729146 - RNA, 19 nt, Artificial Sequence
  Description of Artificial Sequence: Synthetic oligonucleotide
caggguccugugcggccuc

SEQ ID NO: 1729147 - RNA, 19 nt, Artificial Sequence
  Description of Artificial Sequence: Synthetic oligonucleotide
gcgguguguuuccuggaua

SEQ ID NO: 1729148 - RNA, 19 nt, Artificial Sequence
  Description of Artificial Sequence: Synthetic oligonucleotide
cccuacacacaggggugcc

SEQ ID NO: 1729149 - RNA, 19 nt, Artificial Sequence
  Description of Artificial Sequence: Synthetic oligonucleotide
ggcacccgcucugauagua

SEQ ID NO: 1729150 - RNA, 19 nt, Artificial Sequence
  Description of Artificial Sequence: Synthetic oligonucleotide
accuggcacacaggucgaa

SEQ ID NO: 1729151 - RNA, 19 nt, Artificial Sequence
  Description of Artificial Sequence: Synthetic oligonucleotide
ggccucugcagacucgcau

SEQ ID NO: 1729152 - RNA, 19 nt, Artificial Sequence
  Description of Artificial Sequence: Synthetic oligonucleotide
acgccacgggacgcgggga

SEQ ID NO: 1729153 - RNA, 19 nt, Artificial Sequence
  Description of Artificial Sequence: Synthetic oligonucleotide
ccacgccacgggacgcggg

SEQ ID NO: 1729154 - RNA, 19 nt, Artificial Sequence
  Description of Artificial Sequence: Synthetic oligonucleotide
cacacaggucgaagccccu

SEQ ID NO: 1729155 - RNA, 19 nt, Artificial Sequence
  Description of Artificial Sequence: Synthetic oligonucleotide
gcgguacaggcacccgcuc

SEQ ID NO: 1729156 - RNA, 19 nt, Artificial Sequence
  Description of Artificial Sequence: Synthetic oligonucleotide
ggaacacccaccagccuuu

SEQ ID NO: 1729157 - RNA, 19 nt, Artificial Sequence
  Description of Artificial Sequence: Synthetic oligonucleotide
ccaaccugccaccccaccu

SEQ ID NO: 1729158 - RNA, 19 nt, Artificial Sequence
  Description of Artificial Sequence: Synthetic oligonucleotide
ggcgguacaggcggugugu

SEQ ID NO: 1729159 - RNA, 19 nt, Artificial Sequence
  Description of Artificial Sequence: Synthetic oligonucleotide
aggcagcguccgucacccu

SEQ ID NO: 1729160 - RNA, 19 nt, Artificial Sequence
  Description of Artificial Sequence: Synthetic oligonucleotide
ggggcggggacugcauguc

SEQ ID NO: 1729161 - RNA, 19 nt, Artificial Sequence
  Description of Artificial Sequence: Synthetic oligonucleotide
gcgugugauggaguuggua

SEQ ID NO: 1729162 - RNA, 19 nt, Artificial Sequence
  Description of Artificial Sequence: Synthetic oligonucleotide
cagcguccgucacccugga

SEQ ID NO: 1729163 - RNA, 19 nt, Artificial Sequence
  Description of Artificial Sequence: Synthetic oligonucleotide
gcagucgcccagcgggucu

SEQ ID NO: 1729164 - RNA, 19 nt, Artificial Sequence
  Description of Artificial Sequence: Synthetic oligonucleotide
ggcagucgcccagcggguc

SEQ ID NO: 1729165 - RNA, 19 nt, Artificial Sequence
  Description of Artificial Sequence: Synthetic oligonucleotide
ccaugccucucuuccuuua

SEQ ID NO: 1729166 - RNA, 19 nt, Artificial Sequence
  Description of Artificial Sequence: Synthetic oligonucleotide
cuucuacggugagauccau

SEQ ID NO: 1729167 - RNA, 19 nt, Artificial Sequence
  Description of Artificial Sequence: Synthetic oligonucleotide
gcacccgcucugauaguaa

SEQ ID NO: 1729168 - RNA, 19 nt, Artificial Sequence
  Description of Artificial Sequence: Synthetic oligonucleotide
ggggugccccaaccugcca

SEQ ID NO: 1729169 - RNA, 19 nt, Artificial Sequence
  Description of Artificial Sequence: Synthetic oligonucleotide
gcaugacucccgacaggaa

SEQ ID NO: 1729170 - RNA, 19 nt, Artificial Sequence
  Description of Artificial Sequence: Synthetic oligonucleotide
cacgggacgcggggagcca

SEQ ID NO: 1729171 - RNA, 19 nt, Artificial Sequence
  Description of Artificial Sequence: Synthetic oligonucleotide
cggggacugcaugucuuug

SEQ ID NO: 1729172 - RNA, 19 nt, Artificial Sequence
  Description of Artificial Sequence: Synthetic oligonucleotide
gggcggggacugcaugucu

SEQ ID NO: 1729173 - RNA, 19 nt, Artificial Sequence
  Description of Artificial Sequence: Synthetic oligonucleotide
ccacucggagggucgugaa

SEQ ID NO: 1729174 - RNA, 19 nt, Artificial Sequence
  Description of Artificial Sequence: Synthetic oligonucleotide
cgcaugagagagagggccu

SEQ ID NO: 1729175 - RNA, 19 nt, Artificial Sequence
  Description of Artificial Sequence: Synthetic oligonucleotide
ccgcucugauaguaauacu

SEQ ID NO: 1729176 - RNA, 19 nt, Artificial Sequence
  Description of Artificial Sequence: Synthetic oligonucleotide
cggauggucagcguacagu

SEQ ID NO: 1729177 - RNA, 19 nt, Artificial Sequence
  Description of Artificial Sequence: Synthetic oligonucleotide
gguguaccacucggagggu

SEQ ID NO: 1729178 - RNA, 19 nt, Artificial Sequence
  Description of Artificial Sequence: Synthetic oligonucleotide
  modified_base (15)..(15): a, c, u, g, unknown or other
ggcgcuccuucaucngguu

SEQ ID NO: 1729179 - RNA, 19 nt, Artificial Sequence
  Description of Artificial Sequence: Synthetic oligonucleotide
ggucccgggccaaguugaa

SEQ ID NO: 1729180 - RNA, 19 nt, Artificial Sequence
  Description of Artificial Sequence: Synthetic oligonucleotide
ggcggggacugcaugucuu

SEQ ID NO: 1729181 - RNA, 19 nt, Artificial Sequence
  Description of Artificial Sequence: Synthetic oligonucleotide
cguccgucacccuggaguu

SEQ ID NO: 1729182 - RNA, 19 nt, Artificial Sequence
  Description of Artificial Sequence: Synthetic oligonucleotide
cgguacaggcacccgcucu

SEQ ID NO: 1729183 - RNA, 19 nt, Artificial Sequence
  Description of Artificial Sequence: Synthetic oligonucleotide
ggcgugugauggaguuggu

SEQ ID NO: 1729184 - RNA, 19 nt, Artificial Sequence
  Description of Artificial Sequence: Synthetic oligonucleotide
gcgguacaggcgguguguu

SEQ ID NO: 1729185 - RNA, 19 nt, Artificial Sequence
  Description of Artificial Sequence: Synthetic oligonucleotide
ccucuagcuucaggcggua

SEQ ID NO: 1729186 - RNA, 19 nt, Artificial Sequence
  Description of Artificial Sequence: Synthetic oligonucleotide
cccagggcgcgcaggcggu

SEQ ID NO: 1729187 - RNA, 19 nt, Artificial Sequence
  Description of Artificial Sequence: Synthetic oligonucleotide
cggccucugcagacucgca

SEQ ID NO: 1729188 - RNA, 19 nt, Artificial Sequence
  Description of Artificial Sequence: Synthetic oligonucleotide
ccgggccaaguugaacaau

SEQ ID NO: 1729189 - RNA, 19 nt, Artificial Sequence
  Description of Artificial Sequence: Synthetic oligonucleotide
cgguacaggcgguguguuu

SEQ ID NO: 1729190 - RNA, 19 nt, Artificial Sequence
  Description of Artificial Sequence: Synthetic oligonucleotide
aauaugaccauuuacaacc

SEQ ID NO: 1729191 - RNA, 19 nt, Artificial Sequence
  Description of Artificial Sequence: Synthetic oligonucleotide
ugaaauaugaccauuuaca

SEQ ID NO: 1729192 - RNA, 19 nt, Artificial Sequence
  Description of Artificial Sequence: Synthetic oligonucleotide
aauucgguccugcugagcc

SEQ ID NO: 1729193 - RNA, 19 nt, Artificial Sequence
  Description of Artificial Sequence: Synthetic oligonucleotide
aaauaugaccauuuacaac

SEQ ID NO: 1729194 - RNA, 19 nt, Artificial Sequence
  Description of Artificial Sequence: Synthetic oligonucleotide
auaggaagaaagcugaggg

SEQ ID NO: 1729195 - RNA, 19 nt, Artificial Sequence
  Description of Artificial Sequence: Synthetic oligonucleotide
aauuucucuuggcagagac

SEQ ID NO: 1729196 - RNA, 19 nt, Artificial Sequence
  Description of Artificial Sequence: Synthetic oligonucleotide
ucgauaagguccaugaacg

SEQ ID NO: 1729197 - RNA, 19 nt, Artificial Sequence
  Description of Artificial Sequence: Synthetic oligonucleotide
acaguuaacaccuucggag

SEQ ID NO: 1729198 - RNA, 19 nt, Artificial Sequence
  Description of Artificial Sequence: Synthetic oligonucleotide
aaagcugagggacccaccc

SEQ ID NO: 1729199 - RNA, 19 nt, Artificial Sequence
  Description of Artificial Sequence: Synthetic oligonucleotide
ugugugacagggaaaaggg

SEQ ID NO: 1729200 - RNA, 19 nt, Artificial Sequence
  Description of Artificial Sequence: Synthetic oligonucleotide
aauaaaacauggaagguug

SEQ ID NO: 1729201 - RNA, 19 nt, Artificial Sequence
  Description of Artificial Sequence: Synthetic oligonucleotide
uuuguagaggauaucguag

SEQ ID NO: 1729202 - RNA, 19 nt, Artificial Sequence
  Description of Artificial Sequence: Synthetic oligonucleotide
auugugaacucagugaagc

SEQ ID NO: 1729203 - RNA, 19 nt, Artificial Sequence
  Description of Artificial Sequence: Synthetic oligonucleotide
uaucguaguguccaggccg

SEQ ID NO: 1729204 - RNA, 19 nt, Artificial Sequence
  Description of Artificial Sequence: Synthetic oligonucleotide
uucacauuuauugagggcc

SEQ ID NO: 1729205 - RNA, 19 nt, Artificial Sequence
  Description of Artificial Sequence: Synthetic oligonucleotide
uucaaauuucucuuggcag

SEQ ID NO: 1729206 - RNA, 19 nt, Artificial Sequence
  Description of Artificial Sequence: Synthetic oligonucleotide
aagacauguggguuggugg

SEQ ID NO: 1729207 - RNA, 19 nt, Artificial Sequence
  Description of Artificial Sequence: Synthetic oligonucleotide
cauaauggcuucaucauag

SEQ ID NO: 1729208 - RNA, 19 nt, Artificial Sequence
  Description of Artificial Sequence: Synthetic oligonucleotide
acuguacaugucuagugcc

SEQ ID NO: 1729209 - RNA, 19 nt, Artificial Sequence
  Description of Artificial Sequence: Synthetic oligonucleotide
agugggagaagccgaaugc

SEQ ID NO: 1729210 - RNA, 19 nt, Artificial Sequence
  Description of Artificial Sequence: Synthetic oligonucleotide
agaagguagaccuugggcu

SEQ ID NO: 1729211 - RNA, 19 nt, Artificial Sequence
  Description of Artificial Sequence: Synthetic oligonucleotide
uccugcugagccauaaugg

SEQ ID NO: 1729212 - RNA, 19 nt, Artificial Sequence
  Description of Artificial Sequence: Synthetic oligonucleotide
acaagguagucugaggugc

SEQ ID NO: 1729213 - RNA, 19 nt, Artificial Sequence
  Description of Artificial Sequence: Synthetic oligonucleotide
gauaucguaguguccaggc

SEQ ID NO: 1729214 - RNA, 19 nt, Artificial Sequence
  Description of Artificial Sequence: Synthetic oligonucleotide
aggccagacaguuaacacc

SEQ ID NO: 1729215 - RNA, 19 nt, Artificial Sequence
  Description of Artificial Sequence: Synthetic oligonucleotide
uacuguacaugucuagugc

SEQ ID NO: 1729216 - RNA, 19 nt, Artificial Sequence
  Description of Artificial Sequence: Synthetic oligonucleotide
aaguccucgauugugaacu

SEQ ID NO: 1729217 - RNA, 19 nt, Artificial Sequence
  Description of Artificial Sequence: Synthetic oligonucleotide
ucauaggccagacaguuaa

SEQ ID NO: 1729218 - RNA, 19 nt, Artificial Sequence
  Description of Artificial Sequence: Synthetic oligonucleotide
ucgauugugaacucaguga

SEQ ID NO: 1729219 - RNA, 19 nt, Artificial Sequence
  Description of Artificial Sequence: Synthetic oligonucleotide
acauacagcagccaguaga

SEQ ID NO: 1729220 - RNA, 19 nt, Artificial Sequence
  Description of Artificial Sequence: Synthetic oligonucleotide
gaaauaugaccauuuacaa

SEQ ID NO: 1729221 - RNA, 19 nt, Artificial Sequence
  Description of Artificial Sequence: Synthetic oligonucleotide
auuuauugagggccucgcc

SEQ ID NO: 1729222 - RNA, 19 nt, Artificial Sequence
  Description of Artificial Sequence: Synthetic oligonucleotide
gaagccgaaugcucgauag

SEQ ID NO: 1729223 - RNA, 19 nt, Artificial Sequence
  Description of Artificial Sequence: Synthetic oligonucleotide
ucuuggcagagacacuugg

SEQ ID NO: 1729224 - RNA, 19 nt, Artificial Sequence
  Description of Artificial Sequence: Synthetic oligonucleotide
agccauaauggcuucauca

SEQ ID NO: 1729225 - RNA, 19 nt, Artificial Sequence
  Description of Artificial Sequence: Synthetic oligonucleotide
aagguugugugacagggaa

SEQ ID NO: 1729226 - RNA, 19 nt, Artificial Sequence
  Description of Artificial Sequence: Synthetic oligonucleotide
uuguggaaguccucgauug

SEQ ID NO: 1729227 - RNA, 19 nt, Artificial Sequence
  Description of Artificial Sequence: Synthetic oligonucleotide
gagaagguagaccuugggc

SEQ ID NO: 1729228 - RNA, 19 nt, Artificial Sequence
  Description of Artificial Sequence: Synthetic oligonucleotide
auaucguaguguccaggcc

SEQ ID NO: 1729229 - RNA, 19 nt, Artificial Sequence
  Description of Artificial Sequence: Synthetic oligonucleotide
agacaguuaacaccuucgg

SEQ ID NO: 1729230 - RNA, 19 nt, Artificial Sequence
  Description of Artificial Sequence: Synthetic oligonucleotide
uguugauagauguugucau

SEQ ID NO: 1729231 - RNA, 19 nt, Artificial Sequence
  Description of Artificial Sequence: Synthetic oligonucleotide
ggaggagugaaauaugacc

SEQ ID NO: 1729232 - RNA, 19 nt, Artificial Sequence
  Description of Artificial Sequence: Synthetic oligonucleotide
uuauugagggccucgcccc

SEQ ID NO: 1729233 - RNA, 19 nt, Artificial Sequence
  Description of Artificial Sequence: Synthetic oligonucleotide
ucuuguugaauucgguccu

SEQ ID NO: 1729234 - RNA, 19 nt, Artificial Sequence
  Description of Artificial Sequence: Synthetic oligonucleotide
aaucucuuguugaauucgg

SEQ ID NO: 1729235 - RNA, 19 nt, Artificial Sequence
  Description of Artificial Sequence: Synthetic oligonucleotide
agaacuugcucucucgcug

SEQ ID NO: 1729236 - RNA, 19 nt, Artificial Sequence
  Description of Artificial Sequence: Synthetic oligonucleotide
agccaguagacauguaggg

SEQ ID NO: 1729237 - RNA, 19 nt, Artificial Sequence
  Description of Artificial Sequence: Synthetic oligonucleotide
uuguacaggacugagaguu

SEQ ID NO: 1729238 - RNA, 19 nt, Artificial Sequence
  Description of Artificial Sequence: Synthetic oligonucleotide
uccaugaacguguugugga

SEQ ID NO: 1729239 - RNA, 19 nt, Artificial Sequence
  Description of Artificial Sequence: Synthetic oligonucleotide
uguagaggauaucguagug

SEQ ID NO: 1729240 - RNA, 19 nt, Artificial Sequence
  Description of Artificial Sequence: Synthetic oligonucleotide
agaagcaguugccaucagg

SEQ ID NO: 1729241 - RNA, 19 nt, Artificial Sequence
  Description of Artificial Sequence: Synthetic oligonucleotide
gugaaauaugaccauuuac

SEQ ID NO: 1729242 - RNA, 19 nt, Artificial Sequence
  Description of Artificial Sequence: Synthetic oligonucleotide
agacacuugggguggauag

SEQ ID NO: 1729243 - RNA, 19 nt, Artificial Sequence
  Description of Artificial Sequence: Synthetic oligonucleotide
aguuaacaccuucggaguc

SEQ ID NO: 1729244 - RNA, 19 nt, Artificial Sequence
  Description of Artificial Sequence: Synthetic oligonucleotide
uacucuacuuggauggaca

SEQ ID NO: 1729245 - RNA, 19 nt, Artificial Sequence
  Description of Artificial Sequence: Synthetic oligonucleotide
uccucgauugugaacucag

SEQ ID NO: 1729246 - RNA, 19 nt, Artificial Sequence
  Description of Artificial Sequence: Synthetic oligonucleotide
auauggucgcucuccuugc

SEQ ID NO: 1729247 - RNA, 19 nt, Artificial Sequence
  Description of Artificial Sequence: Synthetic oligonucleotide
cagguagaccacaagguag

SEQ ID NO: 1729248 - RNA, 19 nt, Artificial Sequence
  Description of Artificial Sequence: Synthetic oligonucleotide
gauaagguccaugaacgug

SEQ ID NO: 1729249 - RNA, 19 nt, Artificial Sequence
  Description of Artificial Sequence: Synthetic oligonucleotide
aacauggaagguuguguga

SEQ ID NO: 1729250 - RNA, 19 nt, Artificial Sequence
  Description of Artificial Sequence: Synthetic oligonucleotide
aagaacuugcucucucgcu

SEQ ID NO: 1729251 - RNA, 19 nt, Artificial Sequence
  Description of Artificial Sequence: Synthetic oligonucleotide
auuuguagaggauaucgua

SEQ ID NO: 1729252 - RNA, 19 nt, Artificial Sequence
  Description of Artificial Sequence: Synthetic oligonucleotide
uccgccgccaucuuuaaac

SEQ ID NO: 1729253 - RNA, 19 nt, Artificial Sequence
  Description of Artificial Sequence: Synthetic oligonucleotide
cucgauagaagcaguugcc

SEQ ID NO: 1729254 - RNA, 19 nt, Artificial Sequence
  Description of Artificial Sequence: Synthetic oligonucleotide
uuguagaggauaucguagu

SEQ ID NO: 1729255 - RNA, 19 nt, Artificial Sequence
  Description of Artificial Sequence: Synthetic oligonucleotide
acucuacuuggauggacac

SEQ ID NO: 1729256 - RNA, 19 nt, Artificial Sequence
  Description of Artificial Sequence: Synthetic oligonucleotide
guugaauucgguccugcug

SEQ ID NO: 1729257 - RNA, 19 nt, Artificial Sequence
  Description of Artificial Sequence: Synthetic oligonucleotide
ucucuuguugaauucgguc

SEQ ID NO: 1729258 - RNA, 19 nt, Artificial Sequence
  Description of Artificial Sequence: Synthetic oligonucleotide
uugccaucaggccuggucu

SEQ ID NO: 1729259 - RNA, 19 nt, Artificial Sequence
  Description of Artificial Sequence: Synthetic oligonucleotide
caaucucuuguugaauucg

SEQ ID NO: 1729260 - RNA, 19 nt, Artificial Sequence
  Description of Artificial Sequence: Synthetic oligonucleotide
uucuguugauagauguugu

SEQ ID NO: 1729261 - RNA, 19 nt, Artificial Sequence
  Description of Artificial Sequence: Synthetic oligonucleotide
cuacuguacaugucuagug

SEQ ID NO: 1729262 - RNA, 19 nt, Artificial Sequence
  Description of Artificial Sequence: Synthetic oligonucleotide
gaggauaucguagugucca

SEQ ID NO: 1729263 - RNA, 19 nt, Artificial Sequence
  Description of Artificial Sequence: Synthetic oligonucleotide
cucgauugugaacucagug

SEQ ID NO: 1729264 - RNA, 19 nt, Artificial Sequence
  Description of Artificial Sequence: Synthetic oligonucleotide
uucuccaccugcucgauaa

SEQ ID NO: 1729265 - RNA, 19 nt, Artificial Sequence
  Description of Artificial Sequence: Synthetic oligonucleotide
ugagaguuccagccgcucc

SEQ ID NO: 1729266 - RNA, 19 nt, Artificial Sequence
  Description of Artificial Sequence: Synthetic oligonucleotide
cucagcauacuccuuguac

SEQ ID NO: 1729267 - RNA, 19 nt, Artificial Sequence
  Description of Artificial Sequence: Synthetic oligonucleotide
uccaagugggagaagccga

SEQ ID NO: 1729268 - RNA, 19 nt, Artificial Sequence
  Description of Artificial Sequence: Synthetic oligonucleotide
auaagguccaugaacgugu

SEQ ID NO: 1729269 - RNA, 19 nt, Artificial Sequence
  Description of Artificial Sequence: Synthetic oligonucleotide
gacugagaguuccagccgc

SEQ ID NO: 1729270 - RNA, 19 nt, Artificial Sequence
  Description of Artificial Sequence: Synthetic oligonucleotide
agcuacggaggucugcuuc

SEQ ID NO: 1729271 - RNA, 19 nt, Artificial Sequence
  Description of Artificial Sequence: Synthetic oligonucleotide
caugucuagugccuggcag

SEQ ID NO: 1729272 - RNA, 19 nt, Artificial Sequence
  Description of Artificial Sequence: Synthetic oligonucleotide
ugagggacccacccugggg

SEQ ID NO: 1729273 - RNA, 19 nt, Artificial Sequence
  Description of Artificial Sequence: Synthetic oligonucleotide
cagccagacauacagcagc

SEQ ID NO: 1729274 - RNA, 19 nt, Artificial Sequence
  Description of Artificial Sequence: Synthetic oligonucleotide
gccaucuuuaaacagcgcc

SEQ ID NO: 1729275 - RNA, 19 nt, Artificial Sequence
  Description of Artificial Sequence: Synthetic oligonucleotide
guagagaagguagaccuug

SEQ ID NO: 1729276 - RNA, 19 nt, Artificial Sequence
  Description of Artificial Sequence: Synthetic oligonucleotide
cacgcugagggcuugcgcc

SEQ ID NO: 1729277 - RNA, 19 nt, Artificial Sequence
  Description of Artificial Sequence: Synthetic oligonucleotide
gaagguagaccuugggcuc

SEQ ID NO: 1729278 - RNA, 19 nt, Artificial Sequence
  Description of Artificial Sequence: Synthetic oligonucleotide
uacuuggauggacacgcug

SEQ ID NO: 1729279 - RNA, 19 nt, Artificial Sequence
  Description of Artificial Sequence: Synthetic oligonucleotide
uagacauguagggaagagc

SEQ ID NO: 1729280 - RNA, 19 nt, Artificial Sequence
  Description of Artificial Sequence: Synthetic oligonucleotide
ugcugagccauaauggcuu

SEQ ID NO: 1729281 - RNA, 19 nt, Artificial Sequence
  Description of Artificial Sequence: Synthetic oligonucleotide
ccaucuuuaaacagcgccg

SEQ ID NO: 1729282 - RNA, 19 nt, Artificial Sequence
  Description of Artificial Sequence: Synthetic oligonucleotide
agguccaugaacguguugu

SEQ ID NO: 1729283 - RNA, 19 nt, Artificial Sequence
  Description of Artificial Sequence: Synthetic oligonucleotide
agcaaucucuuguugaauu

SEQ ID NO: 1729284 - RNA, 19 nt, Artificial Sequence
  Description of Artificial Sequence: Synthetic oligonucleotide
aagguagaccuugggcucg

SEQ ID NO: 1729285 - RNA, 19 nt, Artificial Sequence
  Description of Artificial Sequence: Synthetic oligonucleotide
caucuuuaaacagcgccgc

SEQ ID NO: 1729286 - RNA, 19 nt, Artificial Sequence
  Description of Artificial Sequence: Synthetic oligonucleotide
uugugaacucagugaagcc

SEQ ID NO: 1729287 - RNA, 19 nt, Artificial Sequence
  Description of Artificial Sequence: Synthetic oligonucleotide
ugucuagugccuggcaggg

SEQ ID NO: 1729288 - RNA, 19 nt, Artificial Sequence
  Description of Artificial Sequence: Synthetic oligonucleotide
accacaagguagucugagg

SEQ ID NO: 1729289 - RNA, 19 nt, Artificial Sequence
  Description of Artificial Sequence: Synthetic oligonucleotide
gaacuugcucucucgcugc

SEQ ID NO: 1729290 - RNA, 19 nt, Artificial Sequence
  Description of Artificial Sequence: Synthetic oligonucleotide
gaacguguuguggaagucc

SEQ ID NO: 1729291 - RNA, 19 nt, Artificial Sequence
  Description of Artificial Sequence: Synthetic oligonucleotide
ucuguugauagauguuguc

SEQ ID NO: 1729292 - RNA, 19 nt, Artificial Sequence
  Description of Artificial Sequence: Synthetic oligonucleotide
uccuuaacaguccggccac

SEQ ID NO: 1729293 - RNA, 19 nt, Artificial Sequence
  Description of Artificial Sequence: Synthetic oligonucleotide
uguacaugucuagugccug

SEQ ID NO: 1729294 - RNA, 19 nt, Artificial Sequence
  Description of Artificial Sequence: Synthetic oligonucleotide
agacauguggguugguggu

SEQ ID NO: 1729295 - RNA, 19 nt, Artificial Sequence
  Description of Artificial Sequence: Synthetic oligonucleotide
gacaguuaacaccuucgga

SEQ ID NO: 1729296 - RNA, 19 nt, Artificial Sequence
  Description of Artificial Sequence: Synthetic oligonucleotide
guacaugucuagugccugg

SEQ ID NO: 1729297 - RNA, 19 nt, Artificial Sequence
  Description of Artificial Sequence: Synthetic oligonucleotide
gaagacauguggguuggug

SEQ ID NO: 1729298 - RNA, 19 nt, Artificial Sequence
  Description of Artificial Sequence: Synthetic oligonucleotide
ugcagguagccugagguga

SEQ ID NO: 1729299 - RNA, 19 nt, Artificial Sequence
  Description of Artificial Sequence: Synthetic oligonucleotide
gauucugcacagcaaucuc

SEQ ID NO: 1729300 - RNA, 19 nt, Artificial Sequence
  Description of Artificial Sequence: Synthetic oligonucleotide
ucgauagaagcaguugcca

SEQ ID NO: 1729301 - RNA, 19 nt, Artificial Sequence
  Description of Artificial Sequence: Synthetic oligonucleotide
gauugugaacucagugaag

SEQ ID NO: 1729302 - RNA, 19 nt, Artificial Sequence
  Description of Artificial Sequence: Synthetic oligonucleotide
uggaagguugugugacagg

SEQ ID NO: 1729303 - RNA, 19 nt, Artificial Sequence
  Description of Artificial Sequence: Synthetic oligonucleotide
uaugaccauuuacaaccac

SEQ ID NO: 1729304 - RNA, 19 nt, Artificial Sequence
  Description of Artificial Sequence: Synthetic oligonucleotide
ccgaaugcucgauagaagc

SEQ ID NO: 1729305 - RNA, 19 nt, Artificial Sequence
  Description of Artificial Sequence: Synthetic oligonucleotide
uaacaguccggccacccuc

SEQ ID NO: 1729306 - RNA, 19 nt, Artificial Sequence
  Description of Artificial Sequence: Synthetic oligonucleotide
gcagccaguagacauguag

SEQ ID NO: 1729307 - RNA, 19 nt, Artificial Sequence
  Description of Artificial Sequence: Synthetic oligonucleotide
auccccuuuaauaaaacau

SEQ ID NO: 1729308 - RNA, 19 nt, Artificial Sequence
  Description of Artificial Sequence: Synthetic oligonucleotide
caguagacauguagggaag

SEQ ID NO: 1729309 - RNA, 19 nt, Artificial Sequence
  Description of Artificial Sequence: Synthetic oligonucleotide
ucaggccuggucuugcgga

SEQ ID NO: 1729310 - RNA, 19 nt, Artificial Sequence
  Description of Artificial Sequence: Synthetic oligonucleotide
gcucgauagaagcaguugc

SEQ ID NO: 1729311 - RNA, 19 nt, Artificial Sequence
  Description of Artificial Sequence: Synthetic oligonucleotide
aguccggccacccucuaug

SEQ ID NO: 1729312 - RNA, 19 nt, Artificial Sequence
  Description of Artificial Sequence: Synthetic oligonucleotide
cagacacagccuugaaccg

SEQ ID NO: 1729313 - RNA, 19 nt, Artificial Sequence
  Description of Artificial Sequence: Synthetic oligonucleotide
gcacuucacauuuauugag

SEQ ID NO: 1729314 - RNA, 19 nt, Artificial Sequence
  Description of Artificial Sequence: Synthetic oligonucleotide
cacaagguagucugaggug

SEQ ID NO: 1729315 - RNA, 19 nt, Artificial Sequence
  Description of Artificial Sequence: Synthetic oligonucleotide
cuccaagugggagaagccg

SEQ ID NO: 1729316 - RNA, 19 nt, Artificial Sequence
  Description of Artificial Sequence: Synthetic oligonucleotide
uguugaauucgguccugcu

SEQ ID NO: 1729317 - RNA, 19 nt, Artificial Sequence
  Description of Artificial Sequence: Synthetic oligonucleotide
acacgcugagggcuugcgc

SEQ ID NO: 1729318 - RNA, 19 nt, Artificial Sequence
  Description of Artificial Sequence: Synthetic oligonucleotide
ugaauucgguccugcugag

SEQ ID NO: 1729319 - RNA, 19 nt, Artificial Sequence
  Description of Artificial Sequence: Synthetic oligonucleotide
guagacauguagggaagag

SEQ ID NO: 1729320 - RNA, 19 nt, Artificial Sequence
  Description of Artificial Sequence: Synthetic oligonucleotide
gggaaacgcacacucaggc

SEQ ID NO: 1729321 - RNA, 19 nt, Artificial Sequence
  Description of Artificial Sequence: Synthetic oligonucleotide
agucugaggugcucugguc

SEQ ID NO: 1729322 - RNA, 19 nt, Artificial Sequence
  Description of Artificial Sequence: Synthetic oligonucleotide
ucgaagaacuugcucucuc

SEQ ID NO: 1729323 - RNA, 19 nt, Artificial Sequence
  Description of Artificial Sequence: Synthetic oligonucleotide
aaacccuacuguacauguc

SEQ ID NO: 1729324 - RNA, 19 nt, Artificial Sequence
  Description of Artificial Sequence: Synthetic oligonucleotide
agccagacauacagcagcc

SEQ ID NO: 1729325 - RNA, 19 nt, Artificial Sequence
  Description of Artificial Sequence: Synthetic oligonucleotide
uuaacaccuucggagucgc

SEQ ID NO: 1729326 - RNA, 19 nt, Artificial Sequence
  Description of Artificial Sequence: Synthetic oligonucleotide
aaugcucgauagaagcagu

SEQ ID NO: 1729327 - RNA, 19 nt, Artificial Sequence
  Description of Artificial Sequence: Synthetic oligonucleotide
ugcucgauagaagcaguug

SEQ ID NO: 1729328 - RNA, 19 nt, Artificial Sequence
  Description of Artificial Sequence: Synthetic oligonucleotide
auaggccagacaguuaaca

SEQ ID NO: 1729329 - RNA, 19 nt, Artificial Sequence
  Description of Artificial Sequence: Synthetic oligonucleotide
ucagcuacggaggucugcu

SEQ ID NO: 1729330 - RNA, 19 nt, Artificial Sequence
  Description of Artificial Sequence: Synthetic oligonucleotide
gagaucccacaugugcugg

SEQ ID NO: 1729331 - RNA, 19 nt, Artificial Sequence
  Description of Artificial Sequence: Synthetic oligonucleotide
aggccuagccccuucaaau

SEQ ID NO: 1729332 - RNA, 19 nt, Artificial Sequence
  Description of Artificial Sequence: Synthetic oligonucleotide
ggcagagacacuuggggug

SEQ ID NO: 1729333 - RNA, 19 nt, Artificial Sequence
  Description of Artificial Sequence: Synthetic oligonucleotide
cuugcggauguaugaguac

SEQ ID NO: 1729334 - RNA, 19 nt, Artificial Sequence
  Description of Artificial Sequence: Synthetic oligonucleotide
cuccuuaacaguccggcca

SEQ ID NO: 1729335 - RNA, 19 nt, Artificial Sequence
  Description of Artificial Sequence: Synthetic oligonucleotide
ugcacagcaaucucuuguu

SEQ ID NO: 1729336 - RNA, 19 nt, Artificial Sequence
  Description of Artificial Sequence: Synthetic oligonucleotide
agaucccacaugugcuggg

SEQ ID NO: 1729337 - RNA, 19 nt, Artificial Sequence
  Description of Artificial Sequence: Synthetic oligonucleotide
cuugcacauggguuccacc

SEQ ID NO: 1729338 - RNA, 19 nt, Artificial Sequence
  Description of Artificial Sequence: Synthetic oligonucleotide
auguggauauggucgcucu

SEQ ID NO: 1729339 - RNA, 19 nt, Artificial Sequence
  Description of Artificial Sequence: Synthetic oligonucleotide
agcucagcuacggaggucu

SEQ ID NO: 1729340 - RNA, 19 nt, Artificial Sequence
  Description of Artificial Sequence: Synthetic oligonucleotide
uacaugucuagugccuggc

SEQ ID NO: 1729341 - RNA, 19 nt, Artificial Sequence
  Description of Artificial Sequence: Synthetic oligonucleotide
cuuaacaguccggccaccc

SEQ ID NO: 1729342 - RNA, 19 nt, Artificial Sequence
  Description of Artificial Sequence: Synthetic oligonucleotide
caccagguccucuuuacuc

SEQ ID NO: 1729343 - RNA, 19 nt, Artificial Sequence
  Description of Artificial Sequence: Synthetic oligonucleotide
aagggaggagugaaauaug

SEQ ID NO: 1729344 - RNA, 19 nt, Artificial Sequence
  Description of Artificial Sequence: Synthetic oligonucleotide
guacaggacugagaguucc

SEQ ID NO: 1729345 - RNA, 19 nt, Artificial Sequence
  Description of Artificial Sequence: Synthetic oligonucleotide
aagccgaaugcucgauaga

SEQ ID NO: 1729346 - RNA, 19 nt, Artificial Sequence
  Description of Artificial Sequence: Synthetic oligonucleotide
uguacaggacugagaguuc

SEQ ID NO: 1729347 - RNA, 19 nt, Artificial Sequence
  Description of Artificial Sequence: Synthetic oligonucleotide
acccucuaugaagugcucg

SEQ ID NO: 1729348 - RNA, 19 nt, Artificial Sequence
  Description of Artificial Sequence: Synthetic oligonucleotide
cuggucuugcggauguaug

SEQ ID NO: 1729349 - RNA, 19 nt, Artificial Sequence
  Description of Artificial Sequence: Synthetic oligonucleotide
cagaggauucugcacagca

SEQ ID NO: 1729350 - RNA, 19 nt, Artificial Sequence
  Description of Artificial Sequence: Synthetic oligonucleotide
aggauaucguaguguccag

SEQ ID NO: 1729351 - RNA, 19 nt, Artificial Sequence
  Description of Artificial Sequence: Synthetic oligonucleotide
gggagaagccgaaugcucg

SEQ ID NO: 1729352 - RNA, 19 nt, Artificial Sequence
  Description of Artificial Sequence: Synthetic oligonucleotide
uacaggacugagaguucca

SEQ ID NO: 1729353 - RNA, 19 nt, Artificial Sequence
  Description of Artificial Sequence: Synthetic oligonucleotide
uuguugaauucgguccugc

SEQ ID NO: 1729354 - RNA, 19 nt, Artificial Sequence
  Description of Artificial Sequence: Synthetic oligonucleotide
gggguggauaggaagaaag

SEQ ID NO: 1729355 - RNA, 19 nt, Artificial Sequence
  Description of Artificial Sequence: Synthetic oligonucleotide
cucuacuuggauggacacg

SEQ ID NO: 1729356 - RNA, 19 nt, Artificial Sequence
  Description of Artificial Sequence: Synthetic oligonucleotide
aaacgcacacucaggcuca

SEQ ID NO: 1729357 - RNA, 19 nt, Artificial Sequence
  Description of Artificial Sequence: Synthetic oligonucleotide
ucaccacgguccauguacu

SEQ ID NO: 1729358 - RNA, 19 nt, Artificial Sequence
  Description of Artificial Sequence: Synthetic oligonucleotide
uauggucgcucuccuugca

SEQ ID NO: 1729359 - RNA, 19 nt, Artificial Sequence
  Description of Artificial Sequence: Synthetic oligonucleotide
uguggauauggucgcucuc

SEQ ID NO: 1729360 - RNA, 19 nt, Artificial Sequence
  Description of Artificial Sequence: Synthetic oligonucleotide
gacauacagcagccaguag

SEQ ID NO: 1729361 - RNA, 19 nt, Artificial Sequence
  Description of Artificial Sequence: Synthetic oligonucleotide
aguuccagccgcuccgaca

SEQ ID NO: 1729362 - RNA, 19 nt, Artificial Sequence
  Description of Artificial Sequence: Synthetic oligonucleotide
agggaggagugaaauauga

SEQ ID NO: 1729363 - RNA, 19 nt, Artificial Sequence
  Description of Artificial Sequence: Synthetic oligonucleotide
ugcacauggguuccaccuc

SEQ ID NO: 1729364 - RNA, 19 nt, Artificial Sequence
  Description of Artificial Sequence: Synthetic oligonucleotide
aucguaguguccaggccgg

SEQ ID NO: 1729365 - RNA, 19 nt, Artificial Sequence
  Description of Artificial Sequence: Synthetic oligonucleotide
guagaccuugggcucggag

SEQ ID NO: 1729366 - RNA, 19 nt, Artificial Sequence
  Description of Artificial Sequence: Synthetic oligonucleotide
uacggaggucugcuucucc

SEQ ID NO: 1729367 - RNA, 19 nt, Artificial Sequence
  Description of Artificial Sequence: Synthetic oligonucleotide
gguggugccgcccucacca

SEQ ID NO: 1729368 - RNA, 19 nt, Artificial Sequence
  Description of Artificial Sequence: Synthetic oligonucleotide
ccagacauacagcagccag

SEQ ID NO: 1729369 - RNA, 19 nt, Artificial Sequence
  Description of Artificial Sequence: Synthetic oligonucleotide
agcgccuccaagugggaga

SEQ ID NO: 1729370 - RNA, 19 nt, Artificial Sequence
  Description of Artificial Sequence: Synthetic oligonucleotide
ugagccauaauggcuucau

SEQ ID NO: 1729371 - RNA, 19 nt, Artificial Sequence
  Description of Artificial Sequence: Synthetic oligonucleotide
agguagaccacaagguagu

SEQ ID NO: 1729372 - RNA, 19 nt, Artificial Sequence
  Description of Artificial Sequence: Synthetic oligonucleotide
aguagacauguagggaaga

SEQ ID NO: 1729373 - RNA, 19 nt, Artificial Sequence
  Description of Artificial Sequence: Synthetic oligonucleotide
uguacucuacuuggaugga

SEQ ID NO: 1729374 - RNA, 19 nt, Artificial Sequence
  Description of Artificial Sequence: Synthetic oligonucleotide
ccgccaucuuuaaacagcg

SEQ ID NO: 1729375 - RNA, 19 nt, Artificial Sequence
  Description of Artificial Sequence: Synthetic oligonucleotide
gugaagguccuugaucuuc

SEQ ID NO: 1729376 - RNA, 19 nt, Artificial Sequence
  Description of Artificial Sequence: Synthetic oligonucleotide
ccgcagguagaccacaagg

SEQ ID NO: 1729377 - RNA, 19 nt, Artificial Sequence
  Description of Artificial Sequence: Synthetic oligonucleotide
acaugucuagugccuggca

SEQ ID NO: 1729378 - RNA, 19 nt, Artificial Sequence
  Description of Artificial Sequence: Synthetic oligonucleotide
ugcggauguaugaguacuu

SEQ ID NO: 1729379 - RNA, 19 nt, Artificial Sequence
  Description of Artificial Sequence: Synthetic oligonucleotide
ucucucgcugcagguagcc

SEQ ID NO: 1729380 - RNA, 19 nt, Artificial Sequence
  Description of Artificial Sequence: Synthetic oligonucleotide
ggauaucguaguguccagg

SEQ ID NO: 1729381 - RNA, 19 nt, Artificial Sequence
  Description of Artificial Sequence: Synthetic oligonucleotide
auaugaccauuuacaacca

SEQ ID NO: 1729382 - RNA, 19 nt, Artificial Sequence
  Description of Artificial Sequence: Synthetic oligonucleotide
caucaggccuggucuugcg

SEQ ID NO: 1729383 - RNA, 19 nt, Artificial Sequence
  Description of Artificial Sequence: Synthetic oligonucleotide
cagccggcccuauuuguag

SEQ ID NO: 1729384 - RNA, 19 nt, Artificial Sequence
  Description of Artificial Sequence: Synthetic oligonucleotide
gacacgcugagggcuugcg

SEQ ID NO: 1729385 - RNA, 19 nt, Artificial Sequence
  Description of Artificial Sequence: Synthetic oligonucleotide
uaguguccaggccgguaga

SEQ ID NO: 1729386 - RNA, 19 nt, Artificial Sequence
  Description of Artificial Sequence: Synthetic oligonucleotide
cauaggccagacaguuaac

SEQ ID NO: 1729387 - RNA, 19 nt, Artificial Sequence
  Description of Artificial Sequence: Synthetic oligonucleotide
ccaguagacauguagggaa

SEQ ID NO: 1729388 - RNA, 19 nt, Artificial Sequence
  Description of Artificial Sequence: Synthetic oligonucleotide
gcucucucgcugcagguag

SEQ ID NO: 1729389 - RNA, 19 nt, Artificial Sequence
  Description of Artificial Sequence: Synthetic oligonucleotide
uggguuccaccuccugcug

SEQ ID NO: 1729390 - RNA, 19 nt, Artificial Sequence
  Description of Artificial Sequence: Synthetic oligonucleotide
auguagggaagagcagcag

SEQ ID NO: 1729391 - RNA, 19 nt, Artificial Sequence
  Description of Artificial Sequence: Synthetic oligonucleotide
ugaacguguuguggaaguc

SEQ ID NO: 1729392 - RNA, 19 nt, Artificial Sequence
  Description of Artificial Sequence: Synthetic oligonucleotide
aguguccaggccgguagag

SEQ ID NO: 1729393 - RNA, 19 nt, Artificial Sequence
  Description of Artificial Sequence: Synthetic oligonucleotide
accuucggagucgcugccc

SEQ ID NO: 1729394 - RNA, 19 nt, Artificial Sequence
  Description of Artificial Sequence: Synthetic oligonucleotide
agcauccccuuuaauaaaa

SEQ ID NO: 1729395 - RNA, 19 nt, Artificial Sequence
  Description of Artificial Sequence: Synthetic oligonucleotide
aagaaagcugagggaccca

SEQ ID NO: 1729396 - RNA, 19 nt, Artificial Sequence
  Description of Artificial Sequence: Synthetic oligonucleotide
ggucuugcggauguaugag

SEQ ID NO: 1729397 - RNA, 19 nt, Artificial Sequence
  Description of Artificial Sequence: Synthetic oligonucleotide
gcagagacacuuggggugg

SEQ ID NO: 1729398 - RNA, 19 nt, Artificial Sequence
  Description of Artificial Sequence: Synthetic oligonucleotide
cagugaagcccugggacac

SEQ ID NO: 1729399 - RNA, 19 nt, Artificial Sequence
  Description of Artificial Sequence: Synthetic oligonucleotide
gggaagacauguggguugg

SEQ ID NO: 1729400 - RNA, 19 nt, Artificial Sequence
  Description of Artificial Sequence: Synthetic oligonucleotide
gggcucggagcccucaggg

SEQ ID NO: 1729401 - RNA, 19 nt, Artificial Sequence
  Description of Artificial Sequence: Synthetic oligonucleotide
ccagcauccccuuuaauaa

SEQ ID NO: 1729402 - RNA, 19 nt, Artificial Sequence
  Description of Artificial Sequence: Synthetic oligonucleotide
guagaggauaucguagugu

SEQ ID NO: 1729403 - RNA, 19 nt, Artificial Sequence
  Description of Artificial Sequence: Synthetic oligonucleotide
cgaagaacuugcucucucg

SEQ ID NO: 1729404 - RNA, 19 nt, Artificial Sequence
  Description of Artificial Sequence: Synthetic oligonucleotide
cauguggguugguggugcc

SEQ ID NO: 1729405 - RNA, 19 nt, Artificial Sequence
  Description of Artificial Sequence: Synthetic oligonucleotide
ucuuuacucuuggcagaca

SEQ ID NO: 1729406 - RNA, 19 nt, Artificial Sequence
  Description of Artificial Sequence: Synthetic oligonucleotide
acauggguuccaccuccug

SEQ ID NO: 1729407 - RNA, 19 nt, Artificial Sequence
  Description of Artificial Sequence: Synthetic oligonucleotide
auuucucuuggcagagaca

SEQ ID NO: 1729408 - RNA, 19 nt, Artificial Sequence
  Description of Artificial Sequence: Synthetic oligonucleotide
agaagccgaaugcucgaua

SEQ ID NO: 1729409 - RNA, 19 nt, Artificial Sequence
  Description of Artificial Sequence: Synthetic oligonucleotide
gaauucgguccugcugagc

SEQ ID NO: 1729410 - RNA, 19 nt, Artificial Sequence
  Description of Artificial Sequence: Synthetic oligonucleotide
guacucuacuuggauggac

SEQ ID NO: 1729411 - RNA, 19 nt, Artificial Sequence
  Description of Artificial Sequence: Synthetic oligonucleotide
caggcucaccaccagcauc

SEQ ID NO: 1729412 - RNA, 19 nt, Artificial Sequence
  Description of Artificial Sequence: Synthetic oligonucleotide
ugggacaccagguccucuu

SEQ ID NO: 1729413 - RNA, 19 nt, Artificial Sequence
  Description of Artificial Sequence: Synthetic oligonucleotide
gaagguugugugacaggga

SEQ ID NO: 1729414 - RNA, 19 nt, Artificial Sequence
  Description of Artificial Sequence: Synthetic oligonucleotide
cauggaagguugugugaca

SEQ ID NO: 1729415 - RNA, 19 nt, Artificial Sequence
  Description of Artificial Sequence: Synthetic oligonucleotide
caguuaacaccuucggagu

SEQ ID NO: 1729416 - RNA, 19 nt, Artificial Sequence
  Description of Artificial Sequence: Synthetic oligonucleotide
cguguuguggaaguccucg

SEQ ID NO: 1729417 - RNA, 19 nt, Artificial Sequence
  Description of Artificial Sequence: Synthetic oligonucleotide
acuccuuguacaggacuga

SEQ ID NO: 1729418 - RNA, 19 nt, Artificial Sequence
  Description of Artificial Sequence: Synthetic oligonucleotide
cucucucgcugcagguagc

SEQ ID NO: 1729419 - RNA, 19 nt, Artificial Sequence
  Description of Artificial Sequence: Synthetic oligonucleotide
gagugaaauaugaccauuu

SEQ ID NO: 1729420 - RNA, 19 nt, Artificial Sequence
  Description of Artificial Sequence: Synthetic oligonucleotide
ggguuccaccuccugcugg

SEQ ID NO: 1729421 - RNA, 19 nt, Artificial Sequence
  Description of Artificial Sequence: Synthetic oligonucleotide
cucagcuacggaggucugc

SEQ ID NO: 1729422 - RNA, 19 nt, Artificial Sequence
  Description of Artificial Sequence: Synthetic oligonucleotide
gcugcugagguuccuccgc

SEQ ID NO: 1729423 - RNA, 19 nt, Artificial Sequence
  Description of Artificial Sequence: Synthetic oligonucleotide
ggacgcagcaggccagccg

SEQ ID NO: 1729424 - RNA, 19 nt, Artificial Sequence
  Description of Artificial Sequence: Synthetic oligonucleotide
ggauaggaagaaagcugag

SEQ ID NO: 1729425 - RNA, 19 nt, Artificial Sequence
  Description of Artificial Sequence: Synthetic oligonucleotide
gucgcugcccagcggcucc

SEQ ID NO: 1729426 - RNA, 19 nt, Artificial Sequence
  Description of Artificial Sequence: Synthetic oligonucleotide
guguuguggaaguccucga

SEQ ID NO: 1729427 - RNA, 19 nt, Artificial Sequence
  Description of Artificial Sequence: Synthetic oligonucleotide
ugguggugccgcccucacc

SEQ ID NO: 1729428 - RNA, 19 nt, Artificial Sequence
  Description of Artificial Sequence: Synthetic oligonucleotide
ggcagaacuccuuaacagu

SEQ ID NO: 1729429 - RNA, 19 nt, Artificial Sequence
  Description of Artificial Sequence: Synthetic oligonucleotide
agguagccugaggugagca

SEQ ID NO: 1729430 - RNA, 19 nt, Artificial Sequence
  Description of Artificial Sequence: Synthetic oligonucleotide
cucgcugcagguagccuga

SEQ ID NO: 1729431 - RNA, 19 nt, Artificial Sequence
  Description of Artificial Sequence: Synthetic oligonucleotide
uugaaccgcugcagcuccu

SEQ ID NO: 1729432 - RNA, 19 nt, Artificial Sequence
  Description of Artificial Sequence: Synthetic oligonucleotide
ccuccaagugggagaagcc

SEQ ID NO: 1729433 - RNA, 19 nt, Artificial Sequence
  Description of Artificial Sequence: Synthetic oligonucleotide
agccggcccuauuuguaga

SEQ ID NO: 1729434 - RNA, 19 nt, Artificial Sequence
  Description of Artificial Sequence: Synthetic oligonucleotide
ggagaagccgaaugcucga

SEQ ID NO: 1729435 - RNA, 19 nt, Artificial Sequence
  Description of Artificial Sequence: Synthetic oligonucleotide
uccggccacccucuaugaa

SEQ ID NO: 1729436 - RNA, 19 nt, Artificial Sequence
  Description of Artificial Sequence: Synthetic oligonucleotide
cccuacuguacaugucuag

SEQ ID NO: 1729437 - RNA, 19 nt, Artificial Sequence
  Description of Artificial Sequence: Synthetic oligonucleotide
gcagguagaccacaaggua

SEQ ID NO: 1729438 - RNA, 19 nt, Artificial Sequence
  Description of Artificial Sequence: Synthetic oligonucleotide
gccgcuccgacaccagagg

SEQ ID NO: 1729439 - RNA, 19 nt, Artificial Sequence
  Description of Artificial Sequence: Synthetic oligonucleotide
cgaugauguggauaugguc

SEQ ID NO: 1729440 - RNA, 19 nt, Artificial Sequence
  Description of Artificial Sequence: Synthetic oligonucleotide
cuccgacaccagaggauuc

SEQ ID NO: 1729441 - RNA, 19 nt, Artificial Sequence
  Description of Artificial Sequence: Synthetic oligonucleotide
gggaggagugaaauaugac

SEQ ID NO: 1729442 - RNA, 19 nt, Artificial Sequence
  Description of Artificial Sequence: Synthetic oligonucleotide
cgauugugaacucagugaa

SEQ ID NO: 1729443 - RNA, 19 nt, Artificial Sequence
  Description of Artificial Sequence: Synthetic oligonucleotide
uugcgccagggcgaugaug

SEQ ID NO: 1729444 - RNA, 19 nt, Artificial Sequence
  Description of Artificial Sequence: Synthetic oligonucleotide
ugcccagcggcuccugcuu

SEQ ID NO: 1729445 - RNA, 19 nt, Artificial Sequence
  Description of Artificial Sequence: Synthetic oligonucleotide
ugccaucaggccuggucuu

SEQ ID NO: 1729446 - RNA, 19 nt, Artificial Sequence
  Description of Artificial Sequence: Synthetic oligonucleotide
ucggagcccucagggaaga

SEQ ID NO: 1729447 - RNA, 19 nt, Artificial Sequence
  Description of Artificial Sequence: Synthetic oligonucleotide
caucauaggccagacaguu

SEQ ID NO: 1729448 - RNA, 19 nt, Artificial Sequence
  Description of Artificial Sequence: Synthetic oligonucleotide
ugcucucucgcugcaggua

SEQ ID NO: 1729449 - RNA, 19 nt, Artificial Sequence
  Description of Artificial Sequence: Synthetic oligonucleotide
acgcacacucaggcucacc

SEQ ID NO: 1729450 - RNA, 19 nt, Artificial Sequence
  Description of Artificial Sequence: Synthetic oligonucleotide
gccgaaugcucgauagaag

SEQ ID NO: 1729451 - RNA, 19 nt, Artificial Sequence
  Description of Artificial Sequence: Synthetic oligonucleotide
guagaccacaagguagucu

SEQ ID NO: 1729452 - RNA, 19 nt, Artificial Sequence
  Description of Artificial Sequence: Synthetic oligonucleotide
ccuagccccuucaaauuuc

SEQ ID NO: 1729453 - RNA, 19 nt, Artificial Sequence
  Description of Artificial Sequence: Synthetic oligonucleotide
gucuagugccuggcagggg

SEQ ID NO: 1729454 - RNA, 19 nt, Artificial Sequence
  Description of Artificial Sequence: Synthetic oligonucleotide
acguguuguggaaguccuc

SEQ ID NO: 1729455 - RNA, 19 nt, Artificial Sequence
  Description of Artificial Sequence: Synthetic oligonucleotide
agguuccuccgccgccauc

SEQ ID NO: 1729456 - RNA, 19 nt, Artificial Sequence
  Description of Artificial Sequence: Synthetic oligonucleotide
cagcauccccuuuaauaaa

SEQ ID NO: 1729457 - RNA, 19 nt, Artificial Sequence
  Description of Artificial Sequence: Synthetic oligonucleotide
agaguuccagccgcuccga

SEQ ID NO: 1729458 - RNA, 19 nt, Artificial Sequence
  Description of Artificial Sequence: Synthetic oligonucleotide
guccaggccgguagagaag

SEQ ID NO: 1729459 - RNA, 19 nt, Artificial Sequence
  Description of Artificial Sequence: Synthetic oligonucleotide
gccggcccuauuuguagag

SEQ ID NO: 1729460 - RNA, 19 nt, Artificial Sequence
  Description of Artificial Sequence: Synthetic oligonucleotide
guggguugguggugccgcc

SEQ ID NO: 1729461 - RNA, 19 nt, Artificial Sequence
  Description of Artificial Sequence: Synthetic oligonucleotide
gagacacuugggguggaua

SEQ ID NO: 1729462 - RNA, 19 nt, Artificial Sequence
  Description of Artificial Sequence: Synthetic oligonucleotide
gccauaauggcuucaucau

SEQ ID NO: 1729463 - RNA, 19 nt, Artificial Sequence
  Description of Artificial Sequence: Synthetic oligonucleotide
gaggugcucuggucauuga

SEQ ID NO: 1729464 - RNA, 19 nt, Artificial Sequence
  Description of Artificial Sequence: Synthetic oligonucleotide
guugguggugccgcccuca

SEQ ID NO: 1729465 - RNA, 19 nt, Artificial Sequence
  Description of Artificial Sequence: Synthetic oligonucleotide
gccaguagacauguaggga

SEQ ID NO: 1729466 - RNA, 19 nt, Artificial Sequence
  Description of Artificial Sequence: Synthetic oligonucleotide
cccucuaugaagugcucga

SEQ ID NO: 1729467 - RNA, 19 nt, Artificial Sequence
  Description of Artificial Sequence: Synthetic oligonucleotide
ccacaagguagucugaggu

SEQ ID NO: 1729468 - RNA, 19 nt, Artificial Sequence
  Description of Artificial Sequence: Synthetic oligonucleotide
gcagguagccugaggugag

SEQ ID NO: 1729469 - RNA, 19 nt, Artificial Sequence
  Description of Artificial Sequence: Synthetic oligonucleotide
gcugagggacccacccugg

SEQ ID NO: 1729470 - RNA, 19 nt, Artificial Sequence
  Description of Artificial Sequence: Synthetic oligonucleotide
cacccucuaugaagugcuc

SEQ ID NO: 1729471 - RNA, 19 nt, Artificial Sequence
  Description of Artificial Sequence: Synthetic oligonucleotide
gugggagaagccgaaugcu

SEQ ID NO: 1729472 - RNA, 19 nt, Artificial Sequence
  Description of Artificial Sequence: Synthetic oligonucleotide
guccucgauugugaacuca

SEQ ID NO: 1729473 - RNA, 19 nt, Artificial Sequence
  Description of Artificial Sequence: Synthetic oligonucleotide
gcauccccuuuaauaaaac

SEQ ID NO: 1729474 - RNA, 19 nt, Artificial Sequence
  Description of Artificial Sequence: Synthetic oligonucleotide
augcucgauagaagcaguu

SEQ ID NO: 1729475 - RNA, 19 nt, Artificial Sequence
  Description of Artificial Sequence: Synthetic oligonucleotide
gccgcagguagaccacaag

SEQ ID NO: 1729476 - RNA, 19 nt, Artificial Sequence
  Description of Artificial Sequence: Synthetic oligonucleotide
caagguagucugaggugcu

SEQ ID NO: 1729477 - RNA, 19 nt, Artificial Sequence
  Description of Artificial Sequence: Synthetic oligonucleotide
gccgguagagaagguagac

SEQ ID NO: 1729478 - RNA, 19 nt, Artificial Sequence
  Description of Artificial Sequence: Synthetic oligonucleotide
aucauaggccagacaguua

SEQ ID NO: 1729479 - RNA, 19 nt, Artificial Sequence
  Description of Artificial Sequence: Synthetic oligonucleotide
gucgcucuccuugcacaug

SEQ ID NO: 1729480 - RNA, 19 nt, Artificial Sequence
  Description of Artificial Sequence: Synthetic oligonucleotide
gcuugcgccagggcgauga

SEQ ID NO: 1729481 - RNA, 19 nt, Artificial Sequence
  Description of Artificial Sequence: Synthetic oligonucleotide
cgaaugcucgauagaagca

SEQ ID NO: 1729482 - RNA, 19 nt, Artificial Sequence
  Description of Artificial Sequence: Synthetic oligonucleotide
cuacggaggucugcuucuc

SEQ ID NO: 1729483 - RNA, 19 nt, Artificial Sequence
  Description of Artificial Sequence: Synthetic oligonucleotide
aggccuggucuugcggaug

SEQ ID NO: 1729484 - RNA, 19 nt, Artificial Sequence
  Description of Artificial Sequence: Synthetic oligonucleotide
guguccaggccgguagaga

SEQ ID NO: 1729485 - RNA, 19 nt, Artificial Sequence
  Description of Artificial Sequence: Synthetic oligonucleotide
ggccagccggcccuauuug

SEQ ID NO: 1729486 - RNA, 19 nt, Artificial Sequence
  Description of Artificial Sequence: Synthetic oligonucleotide
cugcuggcagaacuccuua

SEQ ID NO: 1729487 - RNA, 19 nt, Artificial Sequence
  Description of Artificial Sequence: Synthetic oligonucleotide
gguagaccacaagguaguc

SEQ ID NO: 1729488 - RNA, 19 nt, Artificial Sequence
  Description of Artificial Sequence: Synthetic oligonucleotide
gcuacggaggucugcuucu

SEQ ID NO: 1729489 - RNA, 19 nt, Artificial Sequence
  Description of Artificial Sequence: Synthetic oligonucleotide
cagaggccuagccccuuca

SEQ ID NO: 1729490 - RNA, 19 nt, Artificial Sequence
  Description of Artificial Sequence: Synthetic oligonucleotide
gcccuauuuguagaggaua

SEQ ID NO: 1729491 - RNA, 19 nt, Artificial Sequence
  Description of Artificial Sequence: Synthetic oligonucleotide
ucgcugcagguagccugag

SEQ ID NO: 1729492 - RNA, 19 nt, Artificial Sequence
  Description of Artificial Sequence: Synthetic oligonucleotide
cugagccauaauggcuuca

SEQ ID NO: 1729493 - RNA, 19 nt, Artificial Sequence
  Description of Artificial Sequence: Synthetic oligonucleotide
ccaugaacguguuguggaa

SEQ ID NO: 1729494 - RNA, 19 nt, Artificial Sequence
  Description of Artificial Sequence: Synthetic oligonucleotide
cgcacacucaggcucacca

SEQ ID NO: 1729495 - RNA, 19 nt, Artificial Sequence
  Description of Artificial Sequence: Synthetic oligonucleotide
ucguaguguccaggccggu

SEQ ID NO: 1729496 - RNA, 19 nt, Artificial Sequence
  Description of Artificial Sequence: Synthetic oligonucleotide
cccuauuuguagaggauau

SEQ ID NO: 1729497 - RNA, 19 nt, Artificial Sequence
  Description of Artificial Sequence: Synthetic oligonucleotide
cagggcgaugauguggaua

SEQ ID NO: 1729498 - RNA, 19 nt, Artificial Sequence
  Description of Artificial Sequence: Synthetic oligonucleotide
ccacccucuaugaagugcu

SEQ ID NO: 1729499 - RNA, 19 nt, Artificial Sequence
  Description of Artificial Sequence: Synthetic oligonucleotide
ggagugaaauaugaccauu

SEQ ID NO: 1729500 - RNA, 19 nt, Artificial Sequence
  Description of Artificial Sequence: Synthetic oligonucleotide
ccaagugggagaagccgaa

SEQ ID NO: 1729501 - RNA, 19 nt, Artificial Sequence
  Description of Artificial Sequence: Synthetic oligonucleotide
gagaagccgaaugcucgau

SEQ ID NO: 1729502 - RNA, 19 nt, Artificial Sequence
  Description of Artificial Sequence: Synthetic oligonucleotide
caggccgguagagaaggua

SEQ ID NO: 1729503 - RNA, 19 nt, Artificial Sequence
  Description of Artificial Sequence: Synthetic oligonucleotide
ccggcccuauuuguagagg

SEQ ID NO: 1729504 - RNA, 19 nt, Artificial Sequence
  Description of Artificial Sequence: Synthetic oligonucleotide
gccaucaggccuggucuug

SEQ ID NO: 1729505 - RNA, 19 nt, Artificial Sequence
  Description of Artificial Sequence: Synthetic oligonucleotide
ccagaggauucugcacagc

SEQ ID NO: 1729506 - RNA, 19 nt, Artificial Sequence
  Description of Artificial Sequence: Synthetic oligonucleotide
ccuacuguacaugucuagu

SEQ ID NO: 1729507 - RNA, 19 nt, Artificial Sequence
  Description of Artificial Sequence: Synthetic oligonucleotide
ucgguccugcugagccaua

SEQ ID NO: 1729508 - RNA, 19 nt, Artificial Sequence
  Description of Artificial Sequence: Synthetic oligonucleotide
cagcagccaguagacaugu

SEQ ID NO: 1729509 - RNA, 19 nt, Artificial Sequence
  Description of Artificial Sequence: Synthetic oligonucleotide
cgccgccaucuuuaaacag

SEQ ID NO: 1729510 - RNA, 19 nt, Artificial Sequence
  Description of Artificial Sequence: Synthetic oligonucleotide
gcccucagggaagacaugu

SEQ ID NO: 1729511 - RNA, 19 nt, Artificial Sequence
  Description of Artificial Sequence: Synthetic oligonucleotide
cggcccuauuuguagagga

SEQ ID NO: 1729512 - RNA, 19 nt, Artificial Sequence
  Description of Artificial Sequence: Synthetic oligonucleotide
ggccgguagagaagguaga

SEQ ID NO: 1729513 - RNA, 19 nt, Artificial Sequence
  Description of Artificial Sequence: Synthetic oligonucleotide
acaguccggccacccucua

SEQ ID NO: 1729514 - RNA, 19 nt, Artificial Sequence
  Description of Artificial Sequence: Synthetic oligonucleotide
ggccuggucuugcggaugu

SEQ ID NO: 1729515 - RNA, 19 nt, Artificial Sequence
  Description of Artificial Sequence: Synthetic oligonucleotide
ccgccgccaucuuuaaaca

SEQ ID NO: 1729516 - RNA, 19 nt, Artificial Sequence
  Description of Artificial Sequence: Synthetic oligonucleotide
gccagacauacagcagcca

SEQ ID NO: 1729517 - RNA, 19 nt, Artificial Sequence
  Description of Artificial Sequence: Synthetic oligonucleotide
gccuagccccuucaaauuu

SEQ ID NO: 1729518 - RNA, 19 nt, Artificial Sequence
  Description of Artificial Sequence: Synthetic oligonucleotide
aguugccaucaggccuggu

SEQ ID NO: 1729519 - RNA, 19 nt, Artificial Sequence
  Description of Artificial Sequence: Synthetic oligonucleotide
ggucgcucuccuugcacau

SEQ ID NO: 1729520 - RNA, 19 nt, Artificial Sequence
  Description of Artificial Sequence: Synthetic oligonucleotide
cagcaaucucuuguugaau

SEQ ID NO: 1729521 - RNA, 19 nt, Artificial Sequence
  Description of Artificial Sequence: Synthetic oligonucleotide
ggccuagccccuucaaauu

SEQ ID NO: 1729522 - RNA, 19 nt, Artificial Sequence
  Description of Artificial Sequence: Synthetic oligonucleotide
cgauagaagcaguugccau

SEQ ID NO: 1729523 - RNA, 19 nt, Artificial Sequence
  Description of Artificial Sequence: Synthetic oligonucleotide
ccagccggcccuauuugua

SEQ ID NO: 1729524 - RNA, 19 nt, Artificial Sequence
  Description of Artificial Sequence: Synthetic oligonucleotide
gcuccgacaccagaggauu

SEQ ID NO: 1729525 - RNA, 19 nt, Artificial Sequence
  Description of Artificial Sequence: Synthetic oligonucleotide
gagguuccuccgccgccau

SEQ ID NO: 1729526 - RNA, 19 nt, Artificial Sequence
  Description of Artificial Sequence: Synthetic oligonucleotide
ggauauggucgcucuccuu

SEQ ID NO: 1729527 - RNA, 19 nt, Artificial Sequence
  Description of Artificial Sequence: Synthetic oligonucleotide
caggccuggucuugcggau

SEQ ID NO: 1729528 - RNA, 19 nt, Artificial Sequence
  Description of Artificial Sequence: Synthetic oligonucleotide
ccgcuccgacaccagagga

SEQ ID NO: 1729529 - RNA, 19 nt, Artificial Sequence
  Description of Artificial Sequence: Synthetic oligonucleotide
gcgccuccaagugggagaa

SEQ ID NO: 1729530 - RNA, 19 nt, Artificial Sequence
  Description of Artificial Sequence: Synthetic oligonucleotide
caagugggagaagccgaau

SEQ ID NO: 1729531 - RNA, 19 nt, Artificial Sequence
  Description of Artificial Sequence: Synthetic oligonucleotide
cuccgccgccaucuuuaaa

SEQ ID NO: 1729532 - RNA, 19 nt, Artificial Sequence
  Description of Artificial Sequence: Synthetic oligonucleotide
gccagccggcccuauuugu

SEQ ID NO: 1729533 - RNA, 19 nt, Artificial Sequence
  Description of Artificial Sequence: Synthetic oligonucleotide
gggcgaugauguggauaug

SEQ ID NO: 1729534 - RNA, 19 nt, Artificial Sequence
  Description of Artificial Sequence: Synthetic oligonucleotide
gcgccagggcgaugaugug

SEQ ID NO: 1729535 - RNA, 19 nt, Artificial Sequence
  Description of Artificial Sequence: Synthetic oligonucleotide
gcucagcuacggaggucug

SEQ ID NO: 1729536 - RNA, 19 nt, Artificial Sequence
  Description of Artificial Sequence: Synthetic oligonucleotide
ccucgauugugaacucagu

SEQ ID NO: 1729537 - RNA, 19 nt, Artificial Sequence
  Description of Artificial Sequence: Synthetic oligonucleotide
cgauaagguccaugaacgu

SEQ ID NO: 1729538 - RNA, 19 nt, Artificial Sequence
  Description of Artificial Sequence: Synthetic oligonucleotide
ggcccuauuuguagaggau

SEQ ID NO: 1729539 - RNA, 19 nt, Artificial Sequence
  Description of Artificial Sequence: Synthetic oligonucleotide
gcggauguaugaguacuuu

SEQ ID NO: 1729540 - RNA, 19 nt, Artificial Sequence
  Description of Artificial Sequence: Synthetic oligonucleotide
cggccacccucuaugaagu

SEQ ID NO: 1729541 - RNA, 19 nt, Artificial Sequence
  Description of Artificial Sequence: Synthetic oligonucleotide
caguccggccacccucuau

SEQ ID NO: 1729542 - RNA, 19 nt, Artificial Sequence
  Description of Artificial Sequence: Synthetic oligonucleotide
cuugcgccagggcgaugau

SEQ ID NO: 1729543 - RNA, 19 nt, Artificial Sequence
  Description of Artificial Sequence: Synthetic oligonucleotide
guuccuccgccgccaucuu

SEQ ID NO: 1729544 - RNA, 19 nt, Artificial Sequence
  Description of Artificial Sequence: Synthetic oligonucleotide
cagcuacggaggucugcuu

SEQ ID NO: 1729545 - RNA, 19 nt, Artificial Sequence
  Description of Artificial Sequence: Synthetic oligonucleotide
ccgcccucaccacggucca

SEQ ID NO: 1729546 - RNA, 19 nt, Artificial Sequence
  Description of Artificial Sequence: Synthetic oligonucleotide
ccucaccacgguccaugua

SEQ ID NO: 1729547 - RNA, 19 nt, Artificial Sequence
  Description of Artificial Sequence: Synthetic oligonucleotide
cguaguguccaggccggua

SEQ ID NO: 1729548 - RNA, 19 nt, Artificial Sequence
  Description of Artificial Sequence: Synthetic oligonucleotide
cgcuccgacaccagaggau

SEQ ID NO: 1729549 - RNA, 19 nt, Artificial Sequence
  Description of Artificial Sequence: Synthetic oligonucleotide
ggcuugcgccagggcgaug

SEQ ID NO: 1729550 - RNA, 19 nt, Artificial Sequence
  Description of Artificial Sequence: Synthetic oligonucleotide
gggcuugcgccagggcgau

SEQ ID NO: 1729551 - RNA, 19 nt, Artificial Sequence
  Description of Artificial Sequence: Synthetic oligonucleotide
cgccuccaagugggagaag

SEQ ID NO: 1729552 - RNA, 19 nt, Artificial Sequence
  Description of Artificial Sequence: Synthetic oligonucleotide
ccagggcgaugauguggau

SEQ ID NO: 1729553 - RNA, 19 nt, Artificial Sequence
  Description of Artificial Sequence: Synthetic oligonucleotide
aaucuguuaaaccagaauc

SEQ ID NO: 1729554 - RNA, 19 nt, Artificial Sequence
  Description of Artificial Sequence: Synthetic oligonucleotide
aaggauaaggcuuacagag

SEQ ID NO: 1729555 - RNA, 19 nt, Artificial Sequence
  Description of Artificial Sequence: Synthetic oligonucleotide
uccauuauuacuuaaacca

SEQ ID NO: 1729556 - RNA, 19 nt, Artificial Sequence
  Description of Artificial Sequence: Synthetic oligonucleotide
aagggcacaaacuaaacuc

SEQ ID NO: 1729557 - RNA, 19 nt, Artificial Sequence
  Description of Artificial Sequence: Synthetic oligonucleotide
aaaaguaugguuaggauag

SEQ ID NO: 1729558 - RNA, 19 nt, Artificial Sequence
  Description of Artificial Sequence: Synthetic oligonucleotide
uuuuauacaacauaugaaa

SEQ ID NO: 1729559 - RNA, 19 nt, Artificial Sequence
  Description of Artificial Sequence: Synthetic oligonucleotide
aaaggauaaaggauaaggc

SEQ ID NO: 1729560 - RNA, 19 nt, Artificial Sequence
  Description of Artificial Sequence: Synthetic oligonucleotide
aauauuugcucauggggac

SEQ ID NO: 1729561 - RNA, 19 nt, Artificial Sequence
  Description of Artificial Sequence: Synthetic oligonucleotide
gaaaggauaaaggauaagg

SEQ ID NO: 1729562 - RNA, 19 nt, Artificial Sequence
  Description of Artificial Sequence: Synthetic oligonucleotide
agaaauaaucucugcagcc

SEQ ID NO: 1729563 - RNA, 19 nt, Artificial Sequence
  Description of Artificial Sequence: Synthetic oligonucleotide
aauacugacgacacaaggc

SEQ ID NO: 1729564 - RNA, 19 nt, Artificial Sequence
  Description of Artificial Sequence: Synthetic oligonucleotide
uuaggauagagacucagag

SEQ ID NO: 1729565 - RNA, 19 nt, Artificial Sequence
  Description of Artificial Sequence: Synthetic oligonucleotide
ucuguauagacuucaaaag

SEQ ID NO: 1729566 - RNA, 19 nt, Artificial Sequence
  Description of Artificial Sequence: Synthetic oligonucleotide
auaacguuuucugaaaugc

SEQ ID NO: 1729567 - RNA, 19 nt, Artificial Sequence
  Description of Artificial Sequence: Synthetic oligonucleotide
aaggauaaaggauaaggcu

SEQ ID NO: 1729568 - RNA, 19 nt, Artificial Sequence
  Description of Artificial Sequence: Synthetic oligonucleotide
aaagaggcgcgccuaaggc

SEQ ID NO: 1729569 - RNA, 19 nt, Artificial Sequence
  Description of Artificial Sequence: Synthetic oligonucleotide
uaugaaaggauaaaggaua

SEQ ID NO: 1729570 - RNA, 19 nt, Artificial Sequence
  Description of Artificial Sequence: Synthetic oligonucleotide
cauucaauagcaaaacacc

SEQ ID NO: 1729571 - RNA, 19 nt, Artificial Sequence
  Description of Artificial Sequence: Synthetic oligonucleotide
acaucuauaaguuguguuc

SEQ ID NO: 1729572 - RNA, 19 nt, Artificial Sequence
  Description of Artificial Sequence: Synthetic oligonucleotide
acuuaaaccaguuugcugu

SEQ ID NO: 1729573 - RNA, 19 nt, Artificial Sequence
  Description of Artificial Sequence: Synthetic oligonucleotide
acagaaaucuguuaaacca

SEQ ID NO: 1729574 - RNA, 19 nt, Artificial Sequence
  Description of Artificial Sequence: Synthetic oligonucleotide
ugcgcuucgauacaaacag

SEQ ID NO: 1729575 - RNA, 19 nt, Artificial Sequence
  Description of Artificial Sequence: Synthetic oligonucleotide
ugggauaucauuuuacuac

SEQ ID NO: 1729576 - RNA, 19 nt, Artificial Sequence
  Description of Artificial Sequence: Synthetic oligonucleotide
auuuuaguuaagcugggag

SEQ ID NO: 1729577 - RNA, 19 nt, Artificial Sequence
  Description of Artificial Sequence: Synthetic oligonucleotide
auuacuuaaaccaguuugc

SEQ ID NO: 1729578 - RNA, 19 nt, Artificial Sequence
  Description of Artificial Sequence: Synthetic oligonucleotide
ugaaaugcuacauuugaga

SEQ ID NO: 1729579 - RNA, 19 nt, Artificial Sequence
  Description of Artificial Sequence: Synthetic oligonucleotide
acuuauaaauacugaacuc

SEQ ID NO: 1729580 - RNA, 19 nt, Artificial Sequence
  Description of Artificial Sequence: Synthetic oligonucleotide
acaguuauaggcuggcuac

SEQ ID NO: 1729581 - RNA, 19 nt, Artificial Sequence
  Description of Artificial Sequence: Synthetic oligonucleotide
aacgcuggccgcuaagugc

SEQ ID NO: 1729582 - RNA, 19 nt, Artificial Sequence
  Description of Artificial Sequence: Synthetic oligonucleotide
cauaacuuggcaauucucc

SEQ ID NO: 1729583 - RNA, 19 nt, Artificial Sequence
  Description of Artificial Sequence: Synthetic oligonucleotide
uggcauaacaguauuuuag

SEQ ID NO: 1729584 - RNA, 19 nt, Artificial Sequence
  Description of Artificial Sequence: Synthetic oligonucleotide
ugcauaaaguccuaggaca

SEQ ID NO: 1729585 - RNA, 19 nt, Artificial Sequence
  Description of Artificial Sequence: Synthetic oligonucleotide
acaguuauaacguuuucug

SEQ ID NO: 1729586 - RNA, 19 nt, Artificial Sequence
  Description of Artificial Sequence: Synthetic oligonucleotide
uuggugaucgcucagcuug

SEQ ID NO: 1729587 - RNA, 19 nt, Artificial Sequence
  Description of Artificial Sequence: Synthetic oligonucleotide
uggucaaugaauucuauac

SEQ ID NO: 1729588 - RNA, 19 nt, Artificial Sequence
  Description of Artificial Sequence: Synthetic oligonucleotide
cuuagacuuauaaauacug

SEQ ID NO: 1729589 - RNA, 19 nt, Artificial Sequence
  Description of Artificial Sequence: Synthetic oligonucleotide
aauucuauacaauuuuaua

SEQ ID NO: 1729590 - RNA, 19 nt, Artificial Sequence
  Description of Artificial Sequence: Synthetic oligonucleotide
augguuaggauagagacuc

SEQ ID NO: 1729591 - RNA, 19 nt, Artificial Sequence
  Description of Artificial Sequence: Synthetic oligonucleotide
uccaagagaacaaugcuac

SEQ ID NO: 1729592 - RNA, 19 nt, Artificial Sequence
  Description of Artificial Sequence: Synthetic oligonucleotide
aaaagaggcgcgccuaagg

SEQ ID NO: 1729593 - RNA, 19 nt, Artificial Sequence
  Description of Artificial Sequence: Synthetic oligonucleotide
aaucuagagguuugucuac

SEQ ID NO: 1729594 - RNA, 19 nt, Artificial Sequence
  Description of Artificial Sequence: Synthetic oligonucleotide
guaugguuaggauagagac

SEQ ID NO: 1729595 - RNA, 19 nt, Artificial Sequence
  Description of Artificial Sequence: Synthetic oligonucleotide
aaagcaacccacauuuugg

SEQ ID NO: 1729596 - RNA, 19 nt, Artificial Sequence
  Description of Artificial Sequence: Synthetic oligonucleotide
uuuuaguuaagcugggagu

SEQ ID NO: 1729597 - RNA, 19 nt, Artificial Sequence
  Description of Artificial Sequence: Synthetic oligonucleotide
uacccaacgcaucaguugg

SEQ ID NO: 1729598 - RNA, 19 nt, Artificial Sequence
  Description of Artificial Sequence: Synthetic oligonucleotide
augcauaaaguccuaggac

SEQ ID NO: 1729599 - RNA, 19 nt, Artificial Sequence
  Description of Artificial Sequence: Synthetic oligonucleotide
cauaugaaaggauaaagga

SEQ ID NO: 1729600 - RNA, 19 nt, Artificial Sequence
  Description of Artificial Sequence: Synthetic oligonucleotide
aaauaugccacaaaauuau

SEQ ID NO: 1729601 - RNA, 19 nt, Artificial Sequence
  Description of Artificial Sequence: Synthetic oligonucleotide
uuagacuuauaaauacuga

SEQ ID NO: 1729602 - RNA, 19 nt, Artificial Sequence
  Description of Artificial Sequence: Synthetic oligonucleotide
ugagagaaauuauuguaug

SEQ ID NO: 1729603 - RNA, 19 nt, Artificial Sequence
  Description of Artificial Sequence: Synthetic oligonucleotide
acauaugaaaggauaaagg

SEQ ID NO: 1729604 - RNA, 19 nt, Artificial Sequence
  Description of Artificial Sequence: Synthetic oligonucleotide
cuuacagagguauuuuagc

SEQ ID NO: 1729605 - RNA, 19 nt, Artificial Sequence
  Description of Artificial Sequence: Synthetic oligonucleotide
uauaaguuguguucccuag

SEQ ID NO: 1729606 - RNA, 19 nt, Artificial Sequence
  Description of Artificial Sequence: Synthetic oligonucleotide
agacuuauaaauacugaac

SEQ ID NO: 1729607 - RNA, 19 nt, Artificial Sequence
  Description of Artificial Sequence: Synthetic oligonucleotide
agagaggaaaggcggaugg

SEQ ID NO: 1729608 - RNA, 19 nt, Artificial Sequence
  Description of Artificial Sequence: Synthetic oligonucleotide
agaaucuagagguuugucu

SEQ ID NO: 1729609 - RNA, 19 nt, Artificial Sequence
  Description of Artificial Sequence: Synthetic oligonucleotide
uauaacguuuucugaaaug

SEQ ID NO: 1729610 - RNA, 19 nt, Artificial Sequence
  Description of Artificial Sequence: Synthetic oligonucleotide
aaguauaauugguucauuu

SEQ ID NO: 1729611 - RNA, 19 nt, Artificial Sequence
  Description of Artificial Sequence: Synthetic oligonucleotide
gcaauauuugcucaugggg

SEQ ID NO: 1729612 - RNA, 19 nt, Artificial Sequence
  Description of Artificial Sequence: Synthetic oligonucleotide
gacuuauaaauacugaacu

SEQ ID NO: 1729613 - RNA, 19 nt, Artificial Sequence
  Description of Artificial Sequence: Synthetic oligonucleotide
ugaauguaaugcaaauacu

SEQ ID NO: 1729614 - RNA, 19 nt, Artificial Sequence
  Description of Artificial Sequence: Synthetic oligonucleotide
agagaacaaugcuacacag

SEQ ID NO: 1729615 - RNA, 19 nt, Artificial Sequence
  Description of Artificial Sequence: Synthetic oligonucleotide
auacugacgacacaaggca

SEQ ID NO: 1729616 - RNA, 19 nt, Artificial Sequence
  Description of Artificial Sequence: Synthetic oligonucleotide
ucauuucacagcaacgccu

SEQ ID NO: 1729617 - RNA, 19 nt, Artificial Sequence
  Description of Artificial Sequence: Synthetic oligonucleotide
uaugggauaucauuuuacu

SEQ ID NO: 1729618 - RNA, 19 nt, Artificial Sequence
  Description of Artificial Sequence: Synthetic oligonucleotide
accugggaaaucuagccgg

SEQ ID NO: 1729619 - RNA, 19 nt, Artificial Sequence
  Description of Artificial Sequence: Synthetic oligonucleotide
uaauucuggcaauauuugc

SEQ ID NO: 1729620 - RNA, 19 nt, Artificial Sequence
  Description of Artificial Sequence: Synthetic oligonucleotide
gucucauuuacagauaccc

SEQ ID NO: 1729621 - RNA, 19 nt, Artificial Sequence
  Description of Artificial Sequence: Synthetic oligonucleotide
uucaauagcaaaacaccaa

SEQ ID NO: 1729622 - RNA, 19 nt, Artificial Sequence
  Description of Artificial Sequence: Synthetic oligonucleotide
aacaucuauaaguuguguu

SEQ ID NO: 1729623 - RNA, 19 nt, Artificial Sequence
  Description of Artificial Sequence: Synthetic oligonucleotide
aucuauaaguuguguuccc

SEQ ID NO: 1729624 - RNA, 19 nt, Artificial Sequence
  Description of Artificial Sequence: Synthetic oligonucleotide
cauuuacagauacccaacg

SEQ ID NO: 1729625 - RNA, 19 nt, Artificial Sequence
  Description of Artificial Sequence: Synthetic oligonucleotide
augagguuaauucuggcaa

SEQ ID NO: 1729626 - RNA, 19 nt, Artificial Sequence
  Description of Artificial Sequence: Synthetic oligonucleotide
uuacagauacccaacgcau

SEQ ID NO: 1729627 - RNA, 19 nt, Artificial Sequence
  Description of Artificial Sequence: Synthetic oligonucleotide
aaaguccuaggacaucugu

SEQ ID NO: 1729628 - RNA, 19 nt, Artificial Sequence
  Description of Artificial Sequence: Synthetic oligonucleotide
guaacagugacucucucuc

SEQ ID NO: 1729629 - RNA, 19 nt, Artificial Sequence
  Description of Artificial Sequence: Synthetic oligonucleotide
uaccugggaaaucuagccg

SEQ ID NO: 1729630 - RNA, 19 nt, Artificial Sequence
  Description of Artificial Sequence: Synthetic oligonucleotide
acagagguauuuuagcagu

SEQ ID NO: 1729631 - RNA, 19 nt, Artificial Sequence
  Description of Artificial Sequence: Synthetic oligonucleotide
caugacuccuacuucuucc

SEQ ID NO: 1729632 - RNA, 19 nt, Artificial Sequence
  Description of Artificial Sequence: Synthetic oligonucleotide
caauauuugcucaugggga

SEQ ID NO: 1729633 - RNA, 19 nt, Artificial Sequence
  Description of Artificial Sequence: Synthetic oligonucleotide
gacuugcacacuuuuauga

SEQ ID NO: 1729634 - RNA, 19 nt, Artificial Sequence
  Description of Artificial Sequence: Synthetic oligonucleotide
uaugguuaggauagagacu

SEQ ID NO: 1729635 - RNA, 19 nt, Artificial Sequence
  Description of Artificial Sequence: Synthetic oligonucleotide
uaaugggugacguaaccgu

SEQ ID NO: 1729636 - RNA, 19 nt, Artificial Sequence
  Description of Artificial Sequence: Synthetic oligonucleotide
accgugguaacagugacuc

SEQ ID NO: 1729637 - RNA, 19 nt, Artificial Sequence
  Description of Artificial Sequence: Synthetic oligonucleotide
ucaaugaauucuauacaau

SEQ ID NO: 1729638 - RNA, 19 nt, Artificial Sequence
  Description of Artificial Sequence: Synthetic oligonucleotide
auaacuuggcaauucucca

SEQ ID NO: 1729639 - RNA, 19 nt, Artificial Sequence
  Description of Artificial Sequence: Synthetic oligonucleotide
aaguuggccucuuaggcaa

SEQ ID NO: 1729640 - RNA, 19 nt, Artificial Sequence
  Description of Artificial Sequence: Synthetic oligonucleotide
ucucauuuacagauaccca

SEQ ID NO: 1729641 - RNA, 19 nt, Artificial Sequence
  Description of Artificial Sequence: Synthetic oligonucleotide
cucgcugcuaugcauaaag

SEQ ID NO: 1729642 - RNA, 19 nt, Artificial Sequence
  Description of Artificial Sequence: Synthetic oligonucleotide
caucuauaaguuguguucc

SEQ ID NO: 1729643 - RNA, 19 nt, Artificial Sequence
  Description of Artificial Sequence: Synthetic oligonucleotide
cuguuaaaccagaaucuag

SEQ ID NO: 1729644 - RNA, 19 nt, Artificial Sequence
  Description of Artificial Sequence: Synthetic oligonucleotide
gaaucuagagguuugucua

SEQ ID NO: 1729645 - RNA, 19 nt, Artificial Sequence
  Description of Artificial Sequence: Synthetic oligonucleotide
uuauaacguuuucugaaau

SEQ ID NO: 1729646 - RNA, 19 nt, Artificial Sequence
  Description of Artificial Sequence: Synthetic oligonucleotide
acagauacccaacgcauca

SEQ ID NO: 1729647 - RNA, 19 nt, Artificial Sequence
  Description of Artificial Sequence: Synthetic oligonucleotide
uggucucauuuacagauac

SEQ ID NO: 1729648 - RNA, 19 nt, Artificial Sequence
  Description of Artificial Sequence: Synthetic oligonucleotide
aaaccaguuugcugugcuc

SEQ ID NO: 1729649 - RNA, 19 nt, Artificial Sequence
  Description of Artificial Sequence: Synthetic oligonucleotide
uaaaguauaauugguucau

SEQ ID NO: 1729650 - RNA, 19 nt, Artificial Sequence
  Description of Artificial Sequence: Synthetic oligonucleotide
guaccugggaaaucuagcc

SEQ ID NO: 1729651 - RNA, 19 nt, Artificial Sequence
  Description of Artificial Sequence: Synthetic oligonucleotide
gagagaaauuauuguauga

SEQ ID NO: 1729652 - RNA, 19 nt, Artificial Sequence
  Description of Artificial Sequence: Synthetic oligonucleotide
aaguaugguuaggauagag

SEQ ID NO: 1729653 - RNA, 19 nt, Artificial Sequence
  Description of Artificial Sequence: Synthetic oligonucleotide
cauaacaguauuuuaguua

SEQ ID NO: 1729654 - RNA, 19 nt, Artificial Sequence
  Description of Artificial Sequence: Synthetic oligonucleotide
uuuggcauaugccacugua

SEQ ID NO: 1729655 - RNA, 19 nt, Artificial Sequence
  Description of Artificial Sequence: Synthetic oligonucleotide
caagagaacaaugcuacac

SEQ ID NO: 1729656 - RNA, 19 nt, Artificial Sequence
  Description of Artificial Sequence: Synthetic oligonucleotide
agucauuaccugccugggc

SEQ ID NO: 1729657 - RNA, 19 nt, Artificial Sequence
  Description of Artificial Sequence: Synthetic oligonucleotide
gacguaaccgugguaacag

SEQ ID NO: 1729658 - RNA, 19 nt, Artificial Sequence
  Description of Artificial Sequence: Synthetic oligonucleotide
cuaaugggugacguaaccg

SEQ ID NO: 1729659 - RNA, 19 nt, Artificial Sequence
  Description of Artificial Sequence: Synthetic oligonucleotide
auucaauagcaaaacacca

SEQ ID NO: 1729660 - RNA, 19 nt, Artificial Sequence
  Description of Artificial Sequence: Synthetic oligonucleotide
aguuggguggcauaacagu

SEQ ID NO: 1729661 - RNA, 19 nt, Artificial Sequence
  Description of Artificial Sequence: Synthetic oligonucleotide
auaauugguucauuugaaa

SEQ ID NO: 1729662 - RNA, 19 nt, Artificial Sequence
  Description of Artificial Sequence: Synthetic oligonucleotide
acguuuucugaaaugcuac

SEQ ID NO: 1729663 - RNA, 19 nt, Artificial Sequence
  Description of Artificial Sequence: Synthetic oligonucleotide
auaugaaaggauaaaggau

SEQ ID NO: 1729664 - RNA, 19 nt, Artificial Sequence
  Description of Artificial Sequence: Synthetic oligonucleotide
uaacguuuucugaaaugcu

SEQ ID NO: 1729665 - RNA, 19 nt, Artificial Sequence
  Description of Artificial Sequence: Synthetic oligonucleotide
ugggaaaucuagccgggug

SEQ ID NO: 1729666 - RNA, 19 nt, Artificial Sequence
  Description of Artificial Sequence: Synthetic oligonucleotide
ugccuugggacacaaggga

SEQ ID NO: 1729667 - RNA, 19 nt, Artificial Sequence
  Description of Artificial Sequence: Synthetic oligonucleotide
uaacagugacucucucucg

SEQ ID NO: 1729668 - RNA, 19 nt, Artificial Sequence
  Description of Artificial Sequence: Synthetic oligonucleotide
aucuguuaaaccagaaucu

SEQ ID NO: 1729669 - RNA, 19 nt, Artificial Sequence
  Description of Artificial Sequence: Synthetic oligonucleotide
uauuugcucauggggacag

SEQ ID NO: 1729670 - RNA, 19 nt, Artificial Sequence
  Description of Artificial Sequence: Synthetic oligonucleotide
gagguuugucuacuuagac

SEQ ID NO: 1729671 - RNA, 19 nt, Artificial Sequence
  Description of Artificial Sequence: Synthetic oligonucleotide
aaccaguuugcugugcuca

SEQ ID NO: 1729672 - RNA, 19 nt, Artificial Sequence
  Description of Artificial Sequence: Synthetic oligonucleotide
uuacuuaaaccaguuugcu

SEQ ID NO: 1729673 - RNA, 19 nt, Artificial Sequence
  Description of Artificial Sequence: Synthetic oligonucleotide
aaacaucuauaaguugugu

SEQ ID NO: 1729674 - RNA, 19 nt, Artificial Sequence
  Description of Artificial Sequence: Synthetic oligonucleotide
uaaccgugguaacagugac

SEQ ID NO: 1729675 - RNA, 19 nt, Artificial Sequence
  Description of Artificial Sequence: Synthetic oligonucleotide
uacugaacucaagaguuca

SEQ ID NO: 1729676 - RNA, 19 nt, Artificial Sequence
  Description of Artificial Sequence: Synthetic oligonucleotide
gggauaucauuuuacuacc

SEQ ID NO: 1729677 - RNA, 19 nt, Artificial Sequence
  Description of Artificial Sequence: Synthetic oligonucleotide
guuauaacguuuucugaaa

SEQ ID NO: 1729678 - RNA, 19 nt, Artificial Sequence
  Description of Artificial Sequence: Synthetic oligonucleotide
ugcucauggggacaguuau

SEQ ID NO: 1729679 - RNA, 19 nt, Artificial Sequence
  Description of Artificial Sequence: Synthetic oligonucleotide
aagaggcgcgccuaaggcu

SEQ ID NO: 1729680 - RNA, 19 nt, Artificial Sequence
  Description of Artificial Sequence: Synthetic oligonucleotide
uaacaguauuuuaguuaag

SEQ ID NO: 1729681 - RNA, 19 nt, Artificial Sequence
  Description of Artificial Sequence: Synthetic oligonucleotide
gggaaaucuagccgggugg

SEQ ID NO: 1729682 - RNA, 19 nt, Artificial Sequence
  Description of Artificial Sequence: Synthetic oligonucleotide
aggcauucacaguuauagg

SEQ ID NO: 1729683 - RNA, 19 nt, Artificial Sequence
  Description of Artificial Sequence: Synthetic oligonucleotide
uuuauggcuaaugggugac

SEQ ID NO: 1729684 - RNA, 19 nt, Artificial Sequence
  Description of Artificial Sequence: Synthetic oligonucleotide
acucaagaguucaugcuuc

SEQ ID NO: 1729685 - RNA, 19 nt, Artificial Sequence
  Description of Artificial Sequence: Synthetic oligonucleotide
agcaacccacauuuugguc

SEQ ID NO: 1729686 - RNA, 19 nt, Artificial Sequence
  Description of Artificial Sequence: Synthetic oligonucleotide
ucuguuaaaccagaaucua

SEQ ID NO: 1729687 - RNA, 19 nt, Artificial Sequence
  Description of Artificial Sequence: Synthetic oligonucleotide
aguccuaggacaucuguuu

SEQ ID NO: 1729688 - RNA, 19 nt, Artificial Sequence
  Description of Artificial Sequence: Synthetic oligonucleotide
auaaggcuuacagagguau

SEQ ID NO: 1729689 - RNA, 19 nt, Artificial Sequence
  Description of Artificial Sequence: Synthetic oligonucleotide
gagaacaaugcuacacagc

SEQ ID NO: 1729690 - RNA, 19 nt, Artificial Sequence
  Description of Artificial Sequence: Synthetic oligonucleotide
uaacuuggcaauucuccaa

SEQ ID NO: 1729691 - RNA, 19 nt, Artificial Sequence
  Description of Artificial Sequence: Synthetic oligonucleotide
guauuuuaguuaagcuggg

SEQ ID NO: 1729692 - RNA, 19 nt, Artificial Sequence
  Description of Artificial Sequence: Synthetic oligonucleotide
gauagagacucagaggcaa

SEQ ID NO: 1729693 - RNA, 19 nt, Artificial Sequence
  Description of Artificial Sequence: Synthetic oligonucleotide
ccauuauuacuuaaaccag

SEQ ID NO: 1729694 - RNA, 19 nt, Artificial Sequence
  Description of Artificial Sequence: Synthetic oligonucleotide
caguuuauggcuaaugggu

SEQ ID NO: 1729695 - RNA, 19 nt, Artificial Sequence
  Description of Artificial Sequence: Synthetic oligonucleotide
guucccuagcuagagggcg

SEQ ID NO: 1729696 - RNA, 19 nt, Artificial Sequence
  Description of Artificial Sequence: Synthetic oligonucleotide
aaugggugacguaaccgug

SEQ ID NO: 1729697 - RNA, 19 nt, Artificial Sequence
  Description of Artificial Sequence: Synthetic oligonucleotide
acuccuacuucuuccagaa

SEQ ID NO: 1729698 - RNA, 19 nt, Artificial Sequence
  Description of Artificial Sequence: Synthetic oligonucleotide
ugcugcguaaacaucuaua

SEQ ID NO: 1729699 - RNA, 19 nt, Artificial Sequence
  Description of Artificial Sequence: Synthetic oligonucleotide
caugcgcuucgauacaaac

SEQ ID NO: 1729700 - RNA, 19 nt, Artificial Sequence
  Description of Artificial Sequence: Synthetic oligonucleotide
acuugcacacuuuuaugaa

SEQ ID NO: 1729701 - RNA, 19 nt, Artificial Sequence
  Description of Artificial Sequence: Synthetic oligonucleotide
guuuauggcuaauggguga

SEQ ID NO: 1729702 - RNA, 19 nt, Artificial Sequence
  Description of Artificial Sequence: Synthetic oligonucleotide
uuauaggcuggcuacuguu

SEQ ID NO: 1729703 - RNA, 19 nt, Artificial Sequence
  Description of Artificial Sequence: Synthetic oligonucleotide
acuuagacuuauaaauacu

SEQ ID NO: 1729704 - RNA, 19 nt, Artificial Sequence
  Description of Artificial Sequence: Synthetic oligonucleotide
uauggcuaaugggugacgu

SEQ ID NO: 1729705 - RNA, 19 nt, Artificial Sequence
  Description of Artificial Sequence: Synthetic oligonucleotide
uauuuuaguuaagcuggga

SEQ ID NO: 1729706 - RNA, 19 nt, Artificial Sequence
  Description of Artificial Sequence: Synthetic oligonucleotide
gggacuagaaauaugccac

SEQ ID NO: 1729707 - RNA, 19 nt, Artificial Sequence
  Description of Artificial Sequence: Synthetic oligonucleotide
aguaugguuaggauagaga

SEQ ID NO: 1729708 - RNA, 19 nt, Artificial Sequence
  Description of Artificial Sequence: Synthetic oligonucleotide
cuggcuacuguucauuuca

SEQ ID NO: 1729709 - RNA, 19 nt, Artificial Sequence
  Description of Artificial Sequence: Synthetic oligonucleotide
auuaccugccugggcaggc

SEQ ID NO: 1729710 - RNA, 19 nt, Artificial Sequence
  Description of Artificial Sequence: Synthetic oligonucleotide
uuguguucccuagcuagag

SEQ ID NO: 1729711 - RNA, 19 nt, Artificial Sequence
  Description of Artificial Sequence: Synthetic oligonucleotide
uggcuaaugggugacguaa

SEQ ID NO: 1729712 - RNA, 19 nt, Artificial Sequence
  Description of Artificial Sequence: Synthetic oligonucleotide
uuggguggcauaacaguau

SEQ ID NO: 1729713 - RNA, 19 nt, Artificial Sequence
  Description of Artificial Sequence: Synthetic oligonucleotide
agauacccaacgcaucagu

SEQ ID NO: 1729714 - RNA, 19 nt, Artificial Sequence
  Description of Artificial Sequence: Synthetic oligonucleotide
ugagguuaauucuggcaau

SEQ ID NO: 1729715 - RNA, 19 nt, Artificial Sequence
  Description of Artificial Sequence: Synthetic oligonucleotide
uuaguuaagcugggaguca

SEQ ID NO: 1729716 - RNA, 19 nt, Artificial Sequence
  Description of Artificial Sequence: Synthetic oligonucleotide
ggcaacagaaaucuguuaa

SEQ ID NO: 1729717 - RNA, 19 nt, Artificial Sequence
  Description of Artificial Sequence: Synthetic oligonucleotide
ugcacacuuuuaugaaugu

SEQ ID NO: 1729718 - RNA, 19 nt, Artificial Sequence
  Description of Artificial Sequence: Synthetic oligonucleotide
ugacuccuacuucuuccag

SEQ ID NO: 1729719 - RNA, 19 nt, Artificial Sequence
  Description of Artificial Sequence: Synthetic oligonucleotide
aaacaccccugcaggaggg

SEQ ID NO: 1729720 - RNA, 19 nt, Artificial Sequence
  Description of Artificial Sequence: Synthetic oligonucleotide
gcagcaugcgcuucgauac

SEQ ID NO: 1729721 - RNA, 19 nt, Artificial Sequence
  Description of Artificial Sequence: Synthetic oligonucleotide
uuacuaccaauuccauuau

SEQ ID NO: 1729722 - RNA, 19 nt, Artificial Sequence
  Description of Artificial Sequence: Synthetic oligonucleotide
auggguaccugggaaaucu

SEQ ID NO: 1729723 - RNA, 19 nt, Artificial Sequence
  Description of Artificial Sequence: Synthetic oligonucleotide
gaggaaaggcggauggagc

SEQ ID NO: 1729724 - RNA, 19 nt, Artificial Sequence
  Description of Artificial Sequence: Synthetic oligonucleotide
ugcucuuggugaucgcuca

SEQ ID NO: 1729725 - RNA, 19 nt, Artificial Sequence
  Description of Artificial Sequence: Synthetic oligonucleotide
augacuccuacuucuucca

SEQ ID NO: 1729726 - RNA, 19 nt, Artificial Sequence
  Description of Artificial Sequence: Synthetic oligonucleotide
agcuagagggcgcugcugu

SEQ ID NO: 1729727 - RNA, 19 nt, Artificial Sequence
  Description of Artificial Sequence: Synthetic oligonucleotide
cuaaggcuaccauggguac

SEQ ID NO: 1729728 - RNA, 19 nt, Artificial Sequence
  Description of Artificial Sequence: Synthetic oligonucleotide
aggauaaggcuuacagagg

SEQ ID NO: 1729729 - RNA, 19 nt, Artificial Sequence
  Description of Artificial Sequence: Synthetic oligonucleotide
uuauggcuaaugggugacg

SEQ ID NO: 1729730 - RNA, 19 nt, Artificial Sequence
  Description of Artificial Sequence: Synthetic oligonucleotide
ccagucauuaccugccugg

SEQ ID NO: 1729731 - RNA, 19 nt, Artificial Sequence
  Description of Artificial Sequence: Synthetic oligonucleotide
aagcagagcggcccauuca

SEQ ID NO: 1729732 - RNA, 19 nt, Artificial Sequence
  Description of Artificial Sequence: Synthetic oligonucleotide
agaaaagcagcaugcgcuu

SEQ ID NO: 1729733 - RNA, 19 nt, Artificial Sequence
  Description of Artificial Sequence: Synthetic oligonucleotide
uuaaaccaguuugcugugc

SEQ ID NO: 1729734 - RNA, 19 nt, Artificial Sequence
  Description of Artificial Sequence: Synthetic oligonucleotide
auacugaacucaagaguuc

SEQ ID NO: 1729735 - RNA, 19 nt, Artificial Sequence
  Description of Artificial Sequence: Synthetic oligonucleotide
ucuagcuagugcugcguaa

SEQ ID NO: 1729736 - RNA, 19 nt, Artificial Sequence
  Description of Artificial Sequence: Synthetic oligonucleotide
aguuauaggcuggcuacug

SEQ ID NO: 1729737 - RNA, 19 nt, Artificial Sequence
  Description of Artificial Sequence: Synthetic oligonucleotide
uucccuagcuagagggcgc

SEQ ID NO: 1729738 - RNA, 19 nt, Artificial Sequence
  Description of Artificial Sequence: Synthetic oligonucleotide
gaacucaagaguucaugcu

SEQ ID NO: 1729739 - RNA, 19 nt, Artificial Sequence
  Description of Artificial Sequence: Synthetic oligonucleotide
ggggacuagaaauaugcca

SEQ ID NO: 1729740 - RNA, 19 nt, Artificial Sequence
  Description of Artificial Sequence: Synthetic oligonucleotide
aaaguauaauugguucauu

SEQ ID NO: 1729741 - RNA, 19 nt, Artificial Sequence
  Description of Artificial Sequence: Synthetic oligonucleotide
ugacguaaccgugguaaca

SEQ ID NO: 1729742 - RNA, 19 nt, Artificial Sequence
  Description of Artificial Sequence: Synthetic oligonucleotide
gacaguuauaacguuuucu

SEQ ID NO: 1729743 - RNA, 19 nt, Artificial Sequence
  Description of Artificial Sequence: Synthetic oligonucleotide
gacuccuacuucuuccaga

SEQ ID NO: 1729744 - RNA, 19 nt, Artificial Sequence
  Description of Artificial Sequence: Synthetic oligonucleotide
gcaaugagguuaauucugg

SEQ ID NO: 1729745 - RNA, 19 nt, Artificial Sequence
  Description of Artificial Sequence: Synthetic oligonucleotide
cuucgauacaaacagcagu

SEQ ID NO: 1729746 - RNA, 19 nt, Artificial Sequence
  Description of Artificial Sequence: Synthetic oligonucleotide
agagacucagaggcaacag

SEQ ID NO: 1729747 - RNA, 19 nt, Artificial Sequence
  Description of Artificial Sequence: Synthetic oligonucleotide
agcuugcauaacuuggcaa

SEQ ID NO: 1729748 - RNA, 19 nt, Artificial Sequence
  Description of Artificial Sequence: Synthetic oligonucleotide
gcaauucuccaagaaaagc

SEQ ID NO: 1729749 - RNA, 19 nt, Artificial Sequence
  Description of Artificial Sequence: Synthetic oligonucleotide
auaugccacaaaauuauuu

SEQ ID NO: 1729750 - RNA, 19 nt, Artificial Sequence
  Description of Artificial Sequence: Synthetic oligonucleotide
caguuauaacguuuucuga

SEQ ID NO: 1729751 - RNA, 19 nt, Artificial Sequence
  Description of Artificial Sequence: Synthetic oligonucleotide
uaguuaagcugggagucac

SEQ ID NO: 1729752 - RNA, 19 nt, Artificial Sequence
  Description of Artificial Sequence: Synthetic oligonucleotide
aggcggauggagcucaggu

SEQ ID NO: 1729753 - RNA, 19 nt, Artificial Sequence
  Description of Artificial Sequence: Synthetic oligonucleotide
caagaguucaugcuucaaa

SEQ ID NO: 1729754 - RNA, 19 nt, Artificial Sequence
  Description of Artificial Sequence: Synthetic oligonucleotide
ugcuucaaaagaggcgcgc

SEQ ID NO: 1729755 - RNA, 19 nt, Artificial Sequence
  Description of Artificial Sequence: Synthetic oligonucleotide
agcagagcggcccauucaa

SEQ ID NO: 1729756 - RNA, 19 nt, Artificial Sequence
  Description of Artificial Sequence: Synthetic oligonucleotide
gagaccaaauaaaguauaa

SEQ ID NO: 1729757 - RNA, 19 nt, Artificial Sequence
  Description of Artificial Sequence: Synthetic oligonucleotide
aaguuguguucccuagcua

SEQ ID NO: 1729758 - RNA, 19 nt, Artificial Sequence
  Description of Artificial Sequence: Synthetic oligonucleotide
ucucucucgcugcuaugca

SEQ ID NO: 1729759 - RNA, 19 nt, Artificial Sequence
  Description of Artificial Sequence: Synthetic oligonucleotide
agcagcaugcgcuucgaua

SEQ ID NO: 1729760 - RNA, 19 nt, Artificial Sequence
  Description of Artificial Sequence: Synthetic oligonucleotide
guccuaggacaucuguuug

SEQ ID NO: 1729761 - RNA, 19 nt, Artificial Sequence
  Description of Artificial Sequence: Synthetic oligonucleotide
agcaacgccugagagaaau

SEQ ID NO: 1729762 - RNA, 19 nt, Artificial Sequence
  Description of Artificial Sequence: Synthetic oligonucleotide
aauaugccacaaaauuauu

SEQ ID NO: 1729763 - RNA, 19 nt, Artificial Sequence
  Description of Artificial Sequence: Synthetic oligonucleotide
agggcacaaacuaaacucu

SEQ ID NO: 1729764 - RNA, 19 nt, Artificial Sequence
  Description of Artificial Sequence: Synthetic oligonucleotide
uaaggcuaccauggguacc

SEQ ID NO: 1729765 - RNA, 19 nt, Artificial Sequence
  Description of Artificial Sequence: Synthetic oligonucleotide
uacugacgacacaaggcau

SEQ ID NO: 1729766 - RNA, 19 nt, Artificial Sequence
  Description of Artificial Sequence: Synthetic oligonucleotide
aaaguaugguuaggauaga

SEQ ID NO: 1729767 - RNA, 19 nt, Artificial Sequence
  Description of Artificial Sequence: Synthetic oligonucleotide
gcugugcucaaguugggug

SEQ ID NO: 1729768 - RNA, 19 nt, Artificial Sequence
  Description of Artificial Sequence: Synthetic oligonucleotide
uggugaucgcucagcuugc

SEQ ID NO: 1729769 - RNA, 19 nt, Artificial Sequence
  Description of Artificial Sequence: Synthetic oligonucleotide
gcugcguaaacaucuauaa

SEQ ID NO: 1729770 - RNA, 19 nt, Artificial Sequence
  Description of Artificial Sequence: Synthetic oligonucleotide
cacauuuuggucucauuua

SEQ ID NO: 1729771 - RNA, 19 nt, Artificial Sequence
  Description of Artificial Sequence: Synthetic oligonucleotide
augaaaggauaaaggauaa

SEQ ID NO: 1729772 - RNA, 19 nt, Artificial Sequence
  Description of Artificial Sequence: Synthetic oligonucleotide
ucgcugcuaugcauaaagu

SEQ ID NO: 1729773 - RNA, 19 nt, Artificial Sequence
  Description of Artificial Sequence: Synthetic oligonucleotide
uucuagcuagugcugcgua

SEQ ID NO: 1729774 - RNA, 19 nt, Artificial Sequence
  Description of Artificial Sequence: Synthetic oligonucleotide
gguuaggauagagacucag

SEQ ID NO: 1729775 - RNA, 19 nt, Artificial Sequence
  Description of Artificial Sequence: Synthetic oligonucleotide
cauaugccacuguaaguca

SEQ ID NO: 1729776 - RNA, 19 nt, Artificial Sequence
  Description of Artificial Sequence: Synthetic oligonucleotide
acagugacucucucucgcu

SEQ ID NO: 1729777 - RNA, 19 nt, Artificial Sequence
  Description of Artificial Sequence: Synthetic oligonucleotide
gcuaaugggugacguaacc

SEQ ID NO: 1729778 - RNA, 19 nt, Artificial Sequence
  Description of Artificial Sequence: Synthetic oligonucleotide
uucaaaagaggcgcgccua

SEQ ID NO: 1729779 - RNA, 19 nt, Artificial Sequence
  Description of Artificial Sequence: Synthetic oligonucleotide
ugcuacauuugagaccaaa

SEQ ID NO: 1729780 - RNA, 19 nt, Artificial Sequence
  Description of Artificial Sequence: Synthetic oligonucleotide
aacgccugagagaaauuau

SEQ ID NO: 1729781 - RNA, 19 nt, Artificial Sequence
  Description of Artificial Sequence: Synthetic oligonucleotide
ggauaaggcuuacagaggu

SEQ ID NO: 1729782 - RNA, 19 nt, Artificial Sequence
  Description of Artificial Sequence: Synthetic oligonucleotide
ucuuccaacgcuggccgcu

SEQ ID NO: 1729783 - RNA, 19 nt, Artificial Sequence
  Description of Artificial Sequence: Synthetic oligonucleotide
caacgcaucaguuggucaa

SEQ ID NO: 1729784 - RNA, 19 nt, Artificial Sequence
  Description of Artificial Sequence: Synthetic oligonucleotide
agugcucuuggugaucgcu

SEQ ID NO: 1729785 - RNA, 19 nt, Artificial Sequence
  Description of Artificial Sequence: Synthetic oligonucleotide
guuaggauagagacucaga

SEQ ID NO: 1729786 - RNA, 19 nt, Artificial Sequence
  Description of Artificial Sequence: Synthetic oligonucleotide
ucuagagguuugucuacuu

SEQ ID NO: 1729787 - RNA, 19 nt, Artificial Sequence
  Description of Artificial Sequence: Synthetic oligonucleotide
ucauggggacaguuauaac

SEQ ID NO: 1729788 - RNA, 19 nt, Artificial Sequence
  Description of Artificial Sequence: Synthetic oligonucleotide
cuauaaguuguguucccua

SEQ ID NO: 1729789 - RNA, 19 nt, Artificial Sequence
  Description of Artificial Sequence: Synthetic oligonucleotide
ggacuugcacacuuuuaug

SEQ ID NO: 1729790 - RNA, 19 nt, Artificial Sequence
  Description of Artificial Sequence: Synthetic oligonucleotide
auauuugcucauggggaca

SEQ ID NO: 1729791 - RNA, 19 nt, Artificial Sequence
  Description of Artificial Sequence: Synthetic oligonucleotide
aggcacggaucaccaaguc

SEQ ID NO: 1729792 - RNA, 19 nt, Artificial Sequence
  Description of Artificial Sequence: Synthetic oligonucleotide
cucauggggacaguuauaa

SEQ ID NO: 1729793 - RNA, 19 nt, Artificial Sequence
  Description of Artificial Sequence: Synthetic oligonucleotide
gcgccuaaggcuaccaugg

SEQ ID NO: 1729794 - RNA, 19 nt, Artificial Sequence
  Description of Artificial Sequence: Synthetic oligonucleotide
uaaggcuuacagagguauu

SEQ ID NO: 1729795 - RNA, 19 nt, Artificial Sequence
  Description of Artificial Sequence: Synthetic oligonucleotide
gacuagaaauaugccacaa

SEQ ID NO: 1729796 - RNA, 19 nt, Artificial Sequence
  Description of Artificial Sequence: Synthetic oligonucleotide
aaguccuaggacaucuguu

SEQ ID NO: 1729797 - RNA, 19 nt, Artificial Sequence
  Description of Artificial Sequence: Synthetic oligonucleotide
uggcuacuguucauuucac

SEQ ID NO: 1729798 - RNA, 19 nt, Artificial Sequence
  Description of Artificial Sequence: Synthetic oligonucleotide
aaagcagcaugcgcuucga

SEQ ID NO: 1729799 - RNA, 19 nt, Artificial Sequence
  Description of Artificial Sequence: Synthetic oligonucleotide
agacuucuuccaacgcugg

SEQ ID NO: 1729800 - RNA, 19 nt, Artificial Sequence
  Description of Artificial Sequence: Synthetic oligonucleotide
gguaccugggaaaucuagc

SEQ ID NO: 1729801 - RNA, 19 nt, Artificial Sequence
  Description of Artificial Sequence: Synthetic oligonucleotide
gcuucuagcuagugcugcg

SEQ ID NO: 1729802 - RNA, 19 nt, Artificial Sequence
  Description of Artificial Sequence: Synthetic oligonucleotide
uacuaccaauuccauuauu

SEQ ID NO: 1729803 - RNA, 19 nt, Artificial Sequence
  Description of Artificial Sequence: Synthetic oligonucleotide
aguuugcugugcucaaguu

SEQ ID NO: 1729804 - RNA, 19 nt, Artificial Sequence
  Description of Artificial Sequence: Synthetic oligonucleotide
agcuagugcugcguaaaca

SEQ ID NO: 1729805 - RNA, 19 nt, Artificial Sequence
  Description of Artificial Sequence: Synthetic oligonucleotide
cacaguuauaggcuggcua

SEQ ID NO: 1729806 - RNA, 19 nt, Artificial Sequence
  Description of Artificial Sequence: Synthetic oligonucleotide
gcacaaacuaaacucuuaa

SEQ ID NO: 1729807 - RNA, 19 nt, Artificial Sequence
  Description of Artificial Sequence: Synthetic oligonucleotide
aaggcggauggagcucagg

SEQ ID NO: 1729808 - RNA, 19 nt, Artificial Sequence
  Description of Artificial Sequence: Synthetic oligonucleotide
cauaaaguccuaggacauc

SEQ ID NO: 1729809 - RNA, 19 nt, Artificial Sequence
  Description of Artificial Sequence: Synthetic oligonucleotide
ucaaguuggguggcauaac

SEQ ID NO: 1729810 - RNA, 19 nt, Artificial Sequence
  Description of Artificial Sequence: Synthetic oligonucleotide
cacagcaacgccugagaga

SEQ ID NO: 1729811 - RNA, 19 nt, Artificial Sequence
  Description of Artificial Sequence: Synthetic oligonucleotide
ugguuaggauagagacuca

SEQ ID NO: 1729812 - RNA, 19 nt, Artificial Sequence
  Description of Artificial Sequence: Synthetic oligonucleotide
augcgcuucgauacaaaca

SEQ ID NO: 1729813 - RNA, 19 nt, Artificial Sequence
  Description of Artificial Sequence: Synthetic oligonucleotide
ugcuaugcauaaaguccua

SEQ ID NO: 1729814 - RNA, 19 nt, Artificial Sequence
  Description of Artificial Sequence: Synthetic oligonucleotide
aacgcaucaguuggucaau

SEQ ID NO: 1729815 - RNA, 19 nt, Artificial Sequence
  Description of Artificial Sequence: Synthetic oligonucleotide
caucuuccagucauuaccu

SEQ ID NO: 1729816 - RNA, 19 nt, Artificial Sequence
  Description of Artificial Sequence: Synthetic oligonucleotide
aaccgugguaacagugacu

SEQ ID NO: 1729817 - RNA, 19 nt, Artificial Sequence
  Description of Artificial Sequence: Synthetic oligonucleotide
cagugacucucucucgcug

SEQ ID NO: 1729818 - RNA, 19 nt, Artificial Sequence
  Description of Artificial Sequence: Synthetic oligonucleotide
ccugagagaaauuauugua

SEQ ID NO: 1729819 - RNA, 19 nt, Artificial Sequence
  Description of Artificial Sequence: Synthetic oligonucleotide
guggcauaacaguauuuua

SEQ ID NO: 1729820 - RNA, 19 nt, Artificial Sequence
  Description of Artificial Sequence: Synthetic oligonucleotide
caacgcuggccgcuaagug

SEQ ID NO: 1729821 - RNA, 19 nt, Artificial Sequence
  Description of Artificial Sequence: Synthetic oligonucleotide
ggaaaucuagccggguggc

SEQ ID NO: 1729822 - RNA, 19 nt, Artificial Sequence
  Description of Artificial Sequence: Synthetic oligonucleotide
cauuaccugccugggcagg

SEQ ID NO: 1729823 - RNA, 19 nt, Artificial Sequence
  Description of Artificial Sequence: Synthetic oligonucleotide
gugacguaaccgugguaac

SEQ ID NO: 1729824 - RNA, 19 nt, Artificial Sequence
  Description of Artificial Sequence: Synthetic oligonucleotide
agguuaauucuggcaauau

SEQ ID NO: 1729825 - RNA, 19 nt, Artificial Sequence
  Description of Artificial Sequence: Synthetic oligonucleotide
gcuucgauacaaacagcag

SEQ ID NO: 1729826 - RNA, 19 nt, Artificial Sequence
  Description of Artificial Sequence: Synthetic oligonucleotide
cuugggacacaagggaaga

SEQ ID NO: 1729827 - RNA, 19 nt, Artificial Sequence
  Description of Artificial Sequence: Synthetic oligonucleotide
gcuaugcauaaaguccuag

SEQ ID NO: 1729828 - RNA, 19 nt, Artificial Sequence
  Description of Artificial Sequence: Synthetic oligonucleotide
gagguuaauucuggcaaua

SEQ ID NO: 1729829 - RNA, 19 nt, Artificial Sequence
  Description of Artificial Sequence: Synthetic oligonucleotide
ggacuagaaauaugccaca

SEQ ID NO: 1729830 - RNA, 19 nt, Artificial Sequence
  Description of Artificial Sequence: Synthetic oligonucleotide
cagauacccaacgcaucag

SEQ ID NO: 1729831 - RNA, 19 nt, Artificial Sequence
  Description of Artificial Sequence: Synthetic oligonucleotide
cuagagguuugucuacuua

SEQ ID NO: 1729832 - RNA, 19 nt, Artificial Sequence
  Description of Artificial Sequence: Synthetic oligonucleotide
acguaaccgugguaacagu

SEQ ID NO: 1729833 - RNA, 19 nt, Artificial Sequence
  Description of Artificial Sequence: Synthetic oligonucleotide
guuauaggcuggcuacugu

SEQ ID NO: 1729834 - RNA, 19 nt, Artificial Sequence
  Description of Artificial Sequence: Synthetic oligonucleotide
acugacgacacaaggcauu

SEQ ID NO: 1729835 - RNA, 19 nt, Artificial Sequence
  Description of Artificial Sequence: Synthetic oligonucleotide
gcaucaguuggucaaugaa

SEQ ID NO: 1729836 - RNA, 19 nt, Artificial Sequence
  Description of Artificial Sequence: Synthetic oligonucleotide
ccugggaaaucuagccggg

SEQ ID NO: 1729837 - RNA, 19 nt, Artificial Sequence
  Description of Artificial Sequence: Synthetic oligonucleotide
gcuucaaaagaggcgcgcc

SEQ ID NO: 1729838 - RNA, 19 nt, Artificial Sequence
  Description of Artificial Sequence: Synthetic oligonucleotide
ccggguggcuucuagcuag

SEQ ID NO: 1729839 - RNA, 19 nt, Artificial Sequence
  Description of Artificial Sequence: Synthetic oligonucleotide
caguuggucaaugaauucu

SEQ ID NO: 1729840 - RNA, 19 nt, Artificial Sequence
  Description of Artificial Sequence: Synthetic oligonucleotide
acgcuggccgcuaagugcu

SEQ ID NO: 1729841 - RNA, 19 nt, Artificial Sequence
  Description of Artificial Sequence: Synthetic oligonucleotide
cuagcuagugcugcguaaa

SEQ ID NO: 1729842 - RNA, 19 nt, Artificial Sequence
  Description of Artificial Sequence: Synthetic oligonucleotide
auggcuaaugggugacgua

SEQ ID NO: 1729843 - RNA, 19 nt, Artificial Sequence
  Description of Artificial Sequence: Synthetic oligonucleotide
cagcuugcauaacuuggca

SEQ ID NO: 1729844 - RNA, 19 nt, Artificial Sequence
  Description of Artificial Sequence: Synthetic oligonucleotide
ggccgcuaagugcucuugg

SEQ ID NO: 1729845 - RNA, 19 nt, Artificial Sequence
  Description of Artificial Sequence: Synthetic oligonucleotide
uaggcuggcuacuguucau

SEQ ID NO: 1729846 - RNA, 19 nt, Artificial Sequence
  Description of Artificial Sequence: Synthetic oligonucleotide
aagcagcaugcgcuucgau

SEQ ID NO: 1729847 - RNA, 19 nt, Artificial Sequence
  Description of Artificial Sequence: Synthetic oligonucleotide
gcuugcauaacuuggcaau

SEQ ID NO: 1729848 - RNA, 19 nt, Artificial Sequence
  Description of Artificial Sequence: Synthetic oligonucleotide
gauaaggcuuacagaggua

SEQ ID NO: 1729849 - RNA, 19 nt, Artificial Sequence
  Description of Artificial Sequence: Synthetic oligonucleotide
cgccugagagaaauuauug

SEQ ID NO: 1729850 - RNA, 19 nt, Artificial Sequence
  Description of Artificial Sequence: Synthetic oligonucleotide
agaggcgcgccuaaggcua

SEQ ID NO: 1729851 - RNA, 19 nt, Artificial Sequence
  Description of Artificial Sequence: Synthetic oligonucleotide
uggguaccugggaaaucua

SEQ ID NO: 1729852 - RNA, 19 nt, Artificial Sequence
  Description of Artificial Sequence: Synthetic oligonucleotide
cgugguaacagugacucuc

SEQ ID NO: 1729853 - RNA, 19 nt, Artificial Sequence
  Description of Artificial Sequence: Synthetic oligonucleotide
uagcuagagggcgcugcug

SEQ ID NO: 1729854 - RNA, 19 nt, Artificial Sequence
  Description of Artificial Sequence: Synthetic oligonucleotide
uuaccugccugggcaggca

SEQ ID NO: 1729855 - RNA, 19 nt, Artificial Sequence
  Description of Artificial Sequence: Synthetic oligonucleotide
cuucaaaagaggcgcgccu

SEQ ID NO: 1729856 - RNA, 19 nt, Artificial Sequence
  Description of Artificial Sequence: Synthetic oligonucleotide
acgccugagagaaauuauu

SEQ ID NO: 1729857 - RNA, 19 nt, Artificial Sequence
  Description of Artificial Sequence: Synthetic oligonucleotide
cgcuucgauacaaacagca

SEQ ID NO: 1729858 - RNA, 19 nt, Artificial Sequence
  Description of Artificial Sequence: Synthetic oligonucleotide
acugaacucaagaguucau

SEQ ID NO: 1729859 - RNA, 19 nt, Artificial Sequence
  Description of Artificial Sequence: Synthetic oligonucleotide
ggauaucauuuuacuacca

SEQ ID NO: 1729860 - RNA, 19 nt, Artificial Sequence
  Description of Artificial Sequence: Synthetic oligonucleotide
agcaugcgcuucgauacaa

SEQ ID NO: 1729861 - RNA, 19 nt, Artificial Sequence
  Description of Artificial Sequence: Synthetic oligonucleotide
caacgccugagagaaauua

SEQ ID NO: 1729862 - RNA, 19 nt, Artificial Sequence
  Description of Artificial Sequence: Synthetic oligonucleotide
aggcuuacagagguauuuu

SEQ ID NO: 1729863 - RNA, 19 nt, Artificial Sequence
  Description of Artificial Sequence: Synthetic oligonucleotide
aguuaagcugggagucaca

SEQ ID NO: 1729864 - RNA, 19 nt, Artificial Sequence
  Description of Artificial Sequence: Synthetic oligonucleotide
acggaucaccaagucacau

SEQ ID NO: 1729865 - RNA, 19 nt, Artificial Sequence
  Description of Artificial Sequence: Synthetic oligonucleotide
gaagagaggaaaggcggau

SEQ ID NO: 1729866 - RNA, 19 nt, Artificial Sequence
  Description of Artificial Sequence: Synthetic oligonucleotide
ggacaguuauaacguuuuc

SEQ ID NO: 1729867 - RNA, 19 nt, Artificial Sequence
  Description of Artificial Sequence: Synthetic oligonucleotide
ucccuagcuagagggcgcu

SEQ ID NO: 1729868 - RNA, 19 nt, Artificial Sequence
  Description of Artificial Sequence: Synthetic oligonucleotide
gauacccaacgcaucaguu

SEQ ID NO: 1729869 - RNA, 19 nt, Artificial Sequence
  Description of Artificial Sequence: Synthetic oligonucleotide
caguuugcugugcucaagu

SEQ ID NO: 1729870 - RNA, 19 nt, Artificial Sequence
  Description of Artificial Sequence: Synthetic oligonucleotide
acgcaucaguuggucaaug

SEQ ID NO: 1729871 - RNA, 19 nt, Artificial Sequence
  Description of Artificial Sequence: Synthetic oligonucleotide
ccuagcuagagggcgcugc

SEQ ID NO: 1729872 - RNA, 19 nt, Artificial Sequence
  Description of Artificial Sequence: Synthetic oligonucleotide
uggagaccagaaggucccc

SEQ ID NO: 1729873 - RNA, 19 nt, Artificial Sequence
  Description of Artificial Sequence: Synthetic oligonucleotide
cauggguaccugggaaauc

SEQ ID NO: 1729874 - RNA, 19 nt, Artificial Sequence
  Description of Artificial Sequence: Synthetic oligonucleotide
caaggcauucacaguuaua

SEQ ID NO: 1729875 - RNA, 19 nt, Artificial Sequence
  Description of Artificial Sequence: Synthetic oligonucleotide
ggcuuacagagguauuuua

SEQ ID NO: 1729876 - RNA, 19 nt, Artificial Sequence
  Description of Artificial Sequence: Synthetic oligonucleotide
cacggaucaccaagucaca

SEQ ID NO: 1729877 - RNA, 19 nt, Artificial Sequence
  Description of Artificial Sequence: Synthetic oligonucleotide
gguggcauaacaguauuuu

SEQ ID NO: 1729878 - RNA, 19 nt, Artificial Sequence
  Description of Artificial Sequence: Synthetic oligonucleotide
gcuggcuacuguucauuuc

SEQ ID NO: 1729879 - RNA, 19 nt, Artificial Sequence
  Description of Artificial Sequence: Synthetic oligonucleotide
gcauaacaguauuuuaguu

SEQ ID NO: 1729880 - RNA, 19 nt, Artificial Sequence
  Description of Artificial Sequence: Synthetic oligonucleotide
ggauagagacucagaggca

SEQ ID NO: 1729881 - RNA, 19 nt, Artificial Sequence
  Description of Artificial Sequence: Synthetic oligonucleotide
ucucgcugcuaugcauaaa

SEQ ID NO: 1729882 - RNA, 19 nt, Artificial Sequence
  Description of Artificial Sequence: Synthetic oligonucleotide
ggcuaaugggugacguaac

SEQ ID NO: 1729883 - RNA, 19 nt, Artificial Sequence
  Description of Artificial Sequence: Synthetic oligonucleotide
gugguaacagugacucucu

SEQ ID NO: 1729884 - RNA, 19 nt, Artificial Sequence
  Description of Artificial Sequence: Synthetic oligonucleotide
gcuagagggcgcugcugug

SEQ ID NO: 1729885 - RNA, 19 nt, Artificial Sequence
  Description of Artificial Sequence: Synthetic oligonucleotide
gcguaaacaucuauaaguu

SEQ ID NO: 1729886 - RNA, 19 nt, Artificial Sequence
  Description of Artificial Sequence: Synthetic oligonucleotide
cgcgccuaaggcuaccaug

SEQ ID NO: 1729887 - RNA, 19 nt, Artificial Sequence
  Description of Artificial Sequence: Synthetic oligonucleotide
ggcacaaacuaaacucuua

SEQ ID NO: 1729888 - RNA, 19 nt, Artificial Sequence
  Description of Artificial Sequence: Synthetic oligonucleotide
aggcgcgccuaaggcuacc

SEQ ID NO: 1729889 - RNA, 19 nt, Artificial Sequence
  Description of Artificial Sequence: Synthetic oligonucleotide
cuagcuagagggcgcugcu

SEQ ID NO: 1729890 - RNA, 19 nt, Artificial Sequence
  Description of Artificial Sequence: Synthetic oligonucleotide
ccaauuccauuauuacuua

SEQ ID NO: 1729891 - RNA, 19 nt, Artificial Sequence
  Description of Artificial Sequence: Synthetic oligonucleotide
gcuacauuugagaccaaau

SEQ ID NO: 1729892 - RNA, 19 nt, Artificial Sequence
  Description of Artificial Sequence: Synthetic oligonucleotide
aggcuggcuacuguucauu

SEQ ID NO: 1729893 - RNA, 19 nt, Artificial Sequence
  Description of Artificial Sequence: Synthetic oligonucleotide
ugacucucucucgcugcua

SEQ ID NO: 1729894 - RNA, 19 nt, Artificial Sequence
  Description of Artificial Sequence: Synthetic oligonucleotide
caggagggagacagugcaa

SEQ ID NO: 1729895 - RNA, 19 nt, Artificial Sequence
  Description of Artificial Sequence: Synthetic oligonucleotide
gcauaaaguccuaggacau

SEQ ID NO: 1729896 - RNA, 19 nt, Artificial Sequence
  Description of Artificial Sequence: Synthetic oligonucleotide
cagcaugcgcuucgauaca

SEQ ID NO: 1729897 - RNA, 19 nt, Artificial Sequence
  Description of Artificial Sequence: Synthetic oligonucleotide
cuugcauaacuuggcaauu

SEQ ID NO: 1729898 - RNA, 19 nt, Artificial Sequence
  Description of Artificial Sequence: Synthetic oligonucleotide
cgauacaaacagcaguuua

SEQ ID NO: 1729899 - RNA, 19 nt, Artificial Sequence
  Description of Artificial Sequence: Synthetic oligonucleotide
cuucuagcuagugcugcgu

SEQ ID NO: 1729900 - RNA, 19 nt, Artificial Sequence
  Description of Artificial Sequence: Synthetic oligonucleotide
gggacaguuauaacguuuu

SEQ ID NO: 1729901 - RNA, 19 nt, Artificial Sequence
  Description of Artificial Sequence: Synthetic oligonucleotide
gccuaaggcuaccaugggu

SEQ ID NO: 1729902 - RNA, 19 nt, Artificial Sequence
  Description of Artificial Sequence: Synthetic oligonucleotide
cagagguauuuuagcaguu

SEQ ID NO: 1729903 - RNA, 19 nt, Artificial Sequence
  Description of Artificial Sequence: Synthetic oligonucleotide
gaggcgcgccuaaggcuac

SEQ ID NO: 1729904 - RNA, 19 nt, Artificial Sequence
  Description of Artificial Sequence: Synthetic oligonucleotide
cuuggugaucgcucagcuu

SEQ ID NO: 1729905 - RNA, 19 nt, Artificial Sequence
  Description of Artificial Sequence: Synthetic oligonucleotide
gugaucgcucagcuugcau

SEQ ID NO: 1729906 - RNA, 19 nt, Artificial Sequence
  Description of Artificial Sequence: Synthetic oligonucleotide
gcgcuucgauacaaacagc

SEQ ID NO: 1729907 - RNA, 19 nt, Artificial Sequence
  Description of Artificial Sequence: Synthetic oligonucleotide
caguuauaggcuggcuacu

SEQ ID NO: 1729908 - RNA, 19 nt, Artificial Sequence
  Description of Artificial Sequence: Synthetic oligonucleotide
aguuggccucuuaggcaau

SEQ ID NO: 1729909 - RNA, 19 nt, Artificial Sequence
  Description of Artificial Sequence: Synthetic oligonucleotide
cacaggacuugcacacuuu

SEQ ID NO: 1729910 - RNA, 19 nt, Artificial Sequence
  Description of Artificial Sequence: Synthetic oligonucleotide
ggugaucgcucagcuugca

SEQ ID NO: 1729911 - RNA, 19 nt, Artificial Sequence
  Description of Artificial Sequence: Synthetic oligonucleotide
cgccuaaggcuaccauggg

SEQ ID NO: 1729912 - RNA, 19 nt, Artificial Sequence
  Description of Artificial Sequence: Synthetic oligonucleotide
cuuccaacgcuggccgcua

SEQ ID NO: 1729913 - RNA, 19 nt, Artificial Sequence
  Description of Artificial Sequence: Synthetic oligonucleotide
gagggcgcugcugugccuu

SEQ ID NO: 1729914 - RNA, 19 nt, Artificial Sequence
  Description of Artificial Sequence: Synthetic oligonucleotide
cugggaaaucuagccgggu

SEQ ID NO: 1729915 - RNA, 19 nt, Artificial Sequence
  Description of Artificial Sequence: Synthetic oligonucleotide
ggcuggcuacuguucauuu

SEQ ID NO: 1729916 - RNA, 19 nt, Artificial Sequence
  Description of Artificial Sequence: Synthetic oligonucleotide
gcucauggggacaguuaua

SEQ ID NO: 1729917 - RNA, 19 nt, Artificial Sequence
  Description of Artificial Sequence: Synthetic oligonucleotide
gggcacaaacuaaacucuu

SEQ ID NO: 1729918 - RNA, 19 nt, Artificial Sequence
  Description of Artificial Sequence: Synthetic oligonucleotide
gcaugcgcuucgauacaaa

SEQ ID NO: 1729919 - RNA, 19 nt, Artificial Sequence
  Description of Artificial Sequence: Synthetic oligonucleotide
ggcgcgccuaaggcuacca

SEQ ID NO: 1729920 - RNA, 19 nt, Artificial Sequence
  Description of Artificial Sequence: Synthetic oligonucleotide
cagcaacgccugagagaaa

SEQ ID NO: 1729921 - RNA, 19 nt, Artificial Sequence
  Description of Artificial Sequence: Synthetic oligonucleotide
augcuacauuugagaccaa

SEQ ID NO: 1729922 - RNA, 19 nt, Artificial Sequence
  Description of Artificial Sequence: Synthetic oligonucleotide
ccaacgcuggccgcuaagu

SEQ ID NO: 1729923 - RNA, 19 nt, Artificial Sequence
  Description of Artificial Sequence: Synthetic oligonucleotide
ccauggguaccugggaaau

SEQ ID NO: 1729924 - RNA, 19 nt, Artificial Sequence
  Description of Artificial Sequence: Synthetic oligonucleotide
cggaucaccaagucacauu

SEQ ID NO: 1729925 - RNA, 19 nt, Artificial Sequence
  Description of Artificial Sequence: Synthetic oligonucleotide
cccuagcuagagggcgcug

SEQ ID NO: 1729926 - RNA, 19 nt, Artificial Sequence
  Description of Artificial Sequence: Synthetic oligonucleotide
gcaagcagagcggcccauu

SEQ ID NO: 1729927 - RNA, 19 nt, Artificial Sequence
  Description of Artificial Sequence: Synthetic oligonucleotide
ccgugguaacagugacucu

SEQ ID NO: 1729928 - RNA, 19 nt, Artificial Sequence
  Description of Artificial Sequence: Synthetic oligonucleotide
gcgcgccuaaggcuaccau

SEQ ID NO: 1729929 - RNA, 19 nt, Artificial Sequence
  Description of Artificial Sequence: Synthetic oligonucleotide
  modified_base (7)..(7): a, c, u, g, unknown or other
aaaccunacacacagaagg

SEQ ID NO: 1729930 - RNA, 19 nt, Artificial Sequence
  Description of Artificial Sequence: Synthetic oligonucleotide
aaaauuagaaguccugugg

SEQ ID NO: 1729931 - RNA, 19 nt, Artificial Sequence
  Description of Artificial Sequence: Synthetic oligonucleotide
  modified_base (6)..(6): a, c, u, g, unknown or other
  modified_base (13)..(13): a, c, u, g, unknown or other
uuuaanaaaccunacacac

SEQ ID NO: 1729932 - RNA, 19 nt, Artificial Sequence
  Description of Artificial Sequence: Synthetic oligonucleotide
  modified_base (4)..(4): a, c, u, g, unknown or other
  modified_base (11)..(11): a, c, u, g, unknown or other
uaanaaaccunacacacag

SEQ ID NO: 1729933 - RNA, 19 nt, Artificial Sequence
  Description of Artificial Sequence: Synthetic oligonucleotide
uccauuauaaguuagguga

SEQ ID NO: 1729934 - RNA, 19 nt, Artificial Sequence
  Description of Artificial Sequence: Synthetic oligonucleotide
uauuuuaugucuaugauaa

SEQ ID NO: 1729935 - RNA, 19 nt, Artificial Sequence
  Description of Artificial Sequence: Synthetic oligonucleotide
aaaugaagggcgcugagac

SEQ ID NO: 1729936 - RNA, 19 nt, Artificial Sequence
  Description of Artificial Sequence: Synthetic oligonucleotide
  modified_base (8)..(8): a, c, u, g, unknown or other
  modified_base (15)..(15): a, c, u, g, unknown or other
ucuuuaanaaaccunacac

SEQ ID NO: 1729937 - RNA, 19 nt, Artificial Sequence
  Description of Artificial Sequence: Synthetic oligonucleotide
auaauuguaacuugaaaag

SEQ ID NO: 1729938 - RNA, 19 nt, Artificial Sequence
  Description of Artificial Sequence: Synthetic oligonucleotide
uuguaagaaaauuagaagu

SEQ ID NO: 1729939 - RNA, 19 nt, Artificial Sequence
  Description of Artificial Sequence: Synthetic oligonucleotide
acagcugacacucauaggg

SEQ ID NO: 1729940 - RNA, 19 nt, Artificial Sequence
  Description of Artificial Sequence: Synthetic oligonucleotide
aaguuagccaucugaaggc

SEQ ID NO: 1729941 - RNA, 19 nt, Artificial Sequence
  Description of Artificial Sequence: Synthetic oligonucleotide
uuuucauguaacuucagag

SEQ ID NO: 1729942 - RNA, 19 nt, Artificial Sequence
  Description of Artificial Sequence: Synthetic oligonucleotide
cuuuuauguaacuuaaggg

SEQ ID NO: 1729943 - RNA, 19 nt, Artificial Sequence
  Description of Artificial Sequence: Synthetic oligonucleotide
acucauacaauguuucucc

SEQ ID NO: 1729944 - RNA, 19 nt, Artificial Sequence
  Description of Artificial Sequence: Synthetic oligonucleotide
  modified_base (2)..(2): a, c, u, g, unknown or other
  modified_base (9)..(9): a, c, u, g, unknown or other
anaaaccunacacacagaa

SEQ ID NO: 1729945 - RNA, 19 nt, Artificial Sequence
  Description of Artificial Sequence: Synthetic oligonucleotide
aacuugaaaaggcuuugcc

SEQ ID NO: 1729946 - RNA, 19 nt, Artificial Sequence
  Description of Artificial Sequence: Synthetic oligonucleotide
gauaauuguaacuugaaaa

SEQ ID NO: 1729947 - RNA, 19 nt, Artificial Sequence
  Description of Artificial Sequence: Synthetic oligonucleotide
uauaaguuaggugauagag

SEQ ID NO: 1729948 - RNA, 19 nt, Artificial Sequence
  Description of Artificial Sequence: Synthetic oligonucleotide
aaucgaagauaauuguaac

SEQ ID NO: 1729949 - RNA, 19 nt, Artificial Sequence
  Description of Artificial Sequence: Synthetic oligonucleotide
aacuuaaggguccugugac

SEQ ID NO: 1729950 - RNA, 19 nt, Artificial Sequence
  Description of Artificial Sequence: Synthetic oligonucleotide
uccaugaacagacugaugu

SEQ ID NO: 1729951 - RNA, 19 nt, Artificial Sequence
  Description of Artificial Sequence: Synthetic oligonucleotide
aagccugacaccugaaggc

SEQ ID NO: 1729952 - RNA, 19 nt, Artificial Sequence
  Description of Artificial Sequence: Synthetic oligonucleotide
cuuguaagaaaauuagaag

SEQ ID NO: 1729953 - RNA, 19 nt, Artificial Sequence
  Description of Artificial Sequence: Synthetic oligonucleotide
uguaagaaaauuagaaguc

SEQ ID NO: 1729954 - RNA, 19 nt, Artificial Sequence
  Description of Artificial Sequence: Synthetic oligonucleotide
gaagacugacaucugaagg

SEQ ID NO: 1729955 - RNA, 19 nt, Artificial Sequence
  Description of Artificial Sequence: Synthetic oligonucleotide
acacucuugacacacauag

SEQ ID NO: 1729956 - RNA, 19 nt, Artificial Sequence
  Description of Artificial Sequence: Synthetic oligonucleotide
  modified_base (7)..(7): a, c, u, g, unknown or other
  modified_base (14)..(14): a, c, u, g, unknown or other
cuuuaanaaaccunacaca

SEQ ID NO: 1729957 - RNA, 19 nt, Artificial Sequence
  Description of Artificial Sequence: Synthetic oligonucleotide
uaaguuaggugauagaguc

SEQ ID NO: 1729958 - RNA, 19 nt, Artificial Sequence
  Description of Artificial Sequence: Synthetic oligonucleotide
augucuaugauaagaagcc

SEQ ID NO: 1729959 - RNA, 19 nt, Artificial Sequence
  Description of Artificial Sequence: Synthetic oligonucleotide
aguuauuuuaugucuauga

SEQ ID NO: 1729960 - RNA, 19 nt, Artificial Sequence
  Description of Artificial Sequence: Synthetic oligonucleotide
uucaacacuuguaagaaaa

SEQ ID NO: 1729961 - RNA, 19 nt, Artificial Sequence
  Description of Artificial Sequence: Synthetic oligonucleotide
aauuggagggcacugagau

SEQ ID NO: 1729962 - RNA, 19 nt, Artificial Sequence
  Description of Artificial Sequence: Synthetic oligonucleotide
uaugauaagaagccugaca

SEQ ID NO: 1729963 - RNA, 19 nt, Artificial Sequence
  Description of Artificial Sequence: Synthetic oligonucleotide
uucauguaacuucagagaa

SEQ ID NO: 1729964 - RNA, 19 nt, Artificial Sequence
  Description of Artificial Sequence: Synthetic oligonucleotide
uuucauguaacuucagaga

SEQ ID NO: 1729965 - RNA, 19 nt, Artificial Sequence
  Description of Artificial Sequence: Synthetic oligonucleotide
  modified_base (5)..(5): a, c, u, g, unknown or other
  modified_base (12)..(12): a, c, u, g, unknown or other
uuaanaaaccunacacaca

SEQ ID NO: 1729966 - RNA, 19 nt, Artificial Sequence
  Description of Artificial Sequence: Synthetic oligonucleotide
gaaaauuagaaguccugug

SEQ ID NO: 1729967 - RNA, 19 nt, Artificial Sequence
  Description of Artificial Sequence: Synthetic oligonucleotide
cauacaauguuucuccacc

SEQ ID NO: 1729968 - RNA, 19 nt, Artificial Sequence
  Description of Artificial Sequence: Synthetic oligonucleotide
aaugaagggcgcugagacc

SEQ ID NO: 1729969 - RNA, 19 nt, Artificial Sequence
  Description of Artificial Sequence: Synthetic oligonucleotide
uguagucauaguuaugaug

SEQ ID NO: 1729970 - RNA, 19 nt, Artificial Sequence
  Description of Artificial Sequence: Synthetic oligonucleotide
cuucuaaagaauuuaccac

SEQ ID NO: 1729971 - RNA, 19 nt, Artificial Sequence
  Description of Artificial Sequence: Synthetic oligonucleotide
gaauuuaccacacuguuua

SEQ ID NO: 1729972 - RNA, 19 nt, Artificial Sequence
  Description of Artificial Sequence: Synthetic oligonucleotide
  modified_base (14)..(14): a, c, u, g, unknown or other
caaaggucuuuaanaaacc

SEQ ID NO: 1729973 - RNA, 19 nt, Artificial Sequence
  Description of Artificial Sequence: Synthetic oligonucleotide
gaacuaugccgacugaagg

SEQ ID NO: 1729974 - RNA, 19 nt, Artificial Sequence
  Description of Artificial Sequence: Synthetic oligonucleotide
auuauaaguuaggugauag

SEQ ID NO: 1729975 - RNA, 19 nt, Artificial Sequence
  Description of Artificial Sequence: Synthetic oligonucleotide
uaugucgucuuucauguga

SEQ ID NO: 1729976 - RNA, 19 nt, Artificial Sequence
  Description of Artificial Sequence: Synthetic oligonucleotide
uaugugaaggcucugccac

SEQ ID NO: 1729977 - RNA, 19 nt, Artificial Sequence
  Description of Artificial Sequence: Synthetic oligonucleotide
auaguuaugauguccauua

SEQ ID NO: 1729978 - RNA, 19 nt, Artificial Sequence
  Description of Artificial Sequence: Synthetic oligonucleotide
ucuaaagaauuuaccacac

SEQ ID NO: 1729979 - RNA, 19 nt, Artificial Sequence
  Description of Artificial Sequence: Synthetic oligonucleotide
ugauagaguccaaaggucu

SEQ ID NO: 1729980 - RNA, 19 nt, Artificial Sequence
  Description of Artificial Sequence: Synthetic oligonucleotide
agucauaguuaugaugucc

SEQ ID NO: 1729981 - RNA, 19 nt, Artificial Sequence
  Description of Artificial Sequence: Synthetic oligonucleotide
gugaucgaagguaagagcg

SEQ ID NO: 1729982 - RNA, 19 nt, Artificial Sequence
  Description of Artificial Sequence: Synthetic oligonucleotide
cugauuaccgucauaauca

SEQ ID NO: 1729983 - RNA, 19 nt, Artificial Sequence
  Description of Artificial Sequence: Synthetic oligonucleotide
ucuuuacacucauacaaug

SEQ ID NO: 1729984 - RNA, 19 nt, Artificial Sequence
  Description of Artificial Sequence: Synthetic oligonucleotide
aagaauuuaccacacuguu

SEQ ID NO: 1729985 - RNA, 19 nt, Artificial Sequence
  Description of Artificial Sequence: Synthetic oligonucleotide
aaaucgaagauaauuguaa

SEQ ID NO: 1729986 - RNA, 19 nt, Artificial Sequence
  Description of Artificial Sequence: Synthetic oligonucleotide
  modified_base (16)..(16): a, c, u, g, unknown or other
aagucugaguuuccgngca

SEQ ID NO: 1729987 - RNA, 19 nt, Artificial Sequence
  Description of Artificial Sequence: Synthetic oligonucleotide
cuuucaugcaaucggagug

SEQ ID NO: 1729988 - RNA, 19 nt, Artificial Sequence
  Description of Artificial Sequence: Synthetic oligonucleotide
aacuaugccgacugaagga

SEQ ID NO: 1729989 - RNA, 19 nt, Artificial Sequence
  Description of Artificial Sequence: Synthetic oligonucleotide
uaucuaaagguuuucccac

SEQ ID NO: 1729990 - RNA, 19 nt, Artificial Sequence
  Description of Artificial Sequence: Synthetic oligonucleotide
uuuacacucauacaauguu

SEQ ID NO: 1729991 - RNA, 19 nt, Artificial Sequence
  Description of Artificial Sequence: Synthetic oligonucleotide
augaaaucgaagauaauug

SEQ ID NO: 1729992 - RNA, 19 nt, Artificial Sequence
  Description of Artificial Sequence: Synthetic oligonucleotide
ucuuuccucaguaugaauu

SEQ ID NO: 1729993 - RNA, 19 nt, Artificial Sequence
  Description of Artificial Sequence: Synthetic oligonucleotide
uguuaucacacugauuacc

SEQ ID NO: 1729994 - RNA, 19 nt, Artificial Sequence
  Description of Artificial Sequence: Synthetic oligonucleotide
guaagaaaauuagaagucc

SEQ ID NO: 1729995 - RNA, 19 nt, Artificial Sequence
  Description of Artificial Sequence: Synthetic oligonucleotide
  modified_base (18)..(18): a, c, u, g, unknown or other
aguccaaaggucuuuaana

SEQ ID NO: 1729996 - RNA, 19 nt, Artificial Sequence
  Description of Artificial Sequence: Synthetic oligonucleotide
aauguuucuccaccaugag

SEQ ID NO: 1729997 - RNA, 19 nt, Artificial Sequence
  Description of Artificial Sequence: Synthetic oligonucleotide
gauaugugaaggcucugcc

SEQ ID NO: 1729998 - RNA, 19 nt, Artificial Sequence
  Description of Artificial Sequence: Synthetic oligonucleotide
cucucaugcaaaugaaggg

SEQ ID NO: 1729999 - RNA, 19 nt, Artificial Sequence
  Description of Artificial Sequence: Synthetic oligonucleotide
uguaacuucagagaaguua

SEQ ID NO: 1730000 - RNA, 19 nt, Artificial Sequence
  Description of Artificial Sequence: Synthetic oligonucleotide
cacugggauaccuaaaggc

SEQ ID NO: 1730001 - RNA, 19 nt, Artificial Sequence
  Description of Artificial Sequence: Synthetic oligonucleotide
  modified_base (9)..(9): a, c, u, g, unknown or other
  modified_base (16)..(16): a, c, u, g, unknown or other
gucuuuaanaaaccunaca

SEQ ID NO: 1730002 - RNA, 19 nt, Artificial Sequence
  Description of Artificial Sequence: Synthetic oligonucleotide
gaugugugaagguuuuacc

SEQ ID NO: 1730003 - RNA, 19 nt, Artificial Sequence
  Description of Artificial Sequence: Synthetic oligonucleotide
acuugaaaaggcuuugcca

SEQ ID NO: 1730004 - RNA, 19 nt, Artificial Sequence
  Description of Artificial Sequence: Synthetic oligonucleotide
accgucauaaucauuuucg

SEQ ID NO: 1730005 - RNA, 19 nt, Artificial Sequence
  Description of Artificial Sequence: Synthetic oligonucleotide
aacuggaaguguuaucaca

SEQ ID NO: 1730006 - RNA, 19 nt, Artificial Sequence
  Description of Artificial Sequence: Synthetic oligonucleotide
uggaaguguuaucacacug

SEQ ID NO: 1730007 - RNA, 19 nt, Artificial Sequence
  Description of Artificial Sequence: Synthetic oligonucleotide
acuuguaagaaaauuagaa

SEQ ID NO: 1730008 - RNA, 19 nt, Artificial Sequence
  Description of Artificial Sequence: Synthetic oligonucleotide
uaacuuaaggguccuguga

SEQ ID NO: 1730009 - RNA, 19 nt, Artificial Sequence
  Description of Artificial Sequence: Synthetic oligonucleotide
agauaugugaaggcucugc

SEQ ID NO: 1730010 - RNA, 19 nt, Artificial Sequence
  Description of Artificial Sequence: Synthetic oligonucleotide
  modified_base (7)..(7): a, c, u, g, unknown or other
uuuccgngcauccuucaac

SEQ ID NO: 1730011 - RNA, 19 nt, Artificial Sequence
  Description of Artificial Sequence: Synthetic oligonucleotide
augugugaagguuuuacca

SEQ ID NO: 1730012 - RNA, 19 nt, Artificial Sequence
  Description of Artificial Sequence: Synthetic oligonucleotide
aagaaaauuagaaguccug

SEQ ID NO: 1730013 - RNA, 19 nt, Artificial Sequence
  Description of Artificial Sequence: Synthetic oligonucleotide
uccuccaacuuccuuguag

SEQ ID NO: 1730014 - RNA, 19 nt, Artificial Sequence
  Description of Artificial Sequence: Synthetic oligonucleotide
ucgaagauaauuguaacuu

SEQ ID NO: 1730015 - RNA, 19 nt, Artificial Sequence
  Description of Artificial Sequence: Synthetic oligonucleotide
acacuuguaagaaaauuag

SEQ ID NO: 1730016 - RNA, 19 nt, Artificial Sequence
  Description of Artificial Sequence: Synthetic oligonucleotide
aucgaagauaauuguaacu

SEQ ID NO: 1730017 - RNA, 19 nt, Artificial Sequence
  Description of Artificial Sequence: Synthetic oligonucleotide
auuuucgucagucuggcuu

SEQ ID NO: 1730018 - RNA, 19 nt, Artificial Sequence
  Description of Artificial Sequence: Synthetic oligonucleotide
cauuguuuacacucacagg

SEQ ID NO: 1730019 - RNA, 19 nt, Artificial Sequence
  Description of Artificial Sequence: Synthetic oligonucleotide
agaaguuagccaucugaag

SEQ ID NO: 1730020 - RNA, 19 nt, Artificial Sequence
  Description of Artificial Sequence: Synthetic oligonucleotide
  modified_base (13)..(13): a, c, u, g, unknown or other
ucugaguuuccgngcaucc

SEQ ID NO: 1730021 - RNA, 19 nt, Artificial Sequence
  Description of Artificial Sequence: Synthetic oligonucleotide
  modified_base (13)..(13): a, c, u, g, unknown or other
aaaggucuuuaanaaaccu

SEQ ID NO: 1730022 - RNA, 19 nt, Artificial Sequence
  Description of Artificial Sequence: Synthetic oligonucleotide
accaugaguuauuuuaugu

SEQ ID NO: 1730023 - RNA, 19 nt, Artificial Sequence
  Description of Artificial Sequence: Synthetic oligonucleotide
gaagauaauuguaacuuga

SEQ ID NO: 1730024 - RNA, 19 nt, Artificial Sequence
  Description of Artificial Sequence: Synthetic oligonucleotide
  modified_base (16)..(16): a, c, u, g, unknown or other
uccaaaggucuuuaanaaa

SEQ ID NO: 1730025 - RNA, 19 nt, Artificial Sequence
  Description of Artificial Sequence: Synthetic oligonucleotide
auuaccgucauaaucauuu

SEQ ID NO: 1730026 - RNA, 19 nt, Artificial Sequence
  Description of Artificial Sequence: Synthetic oligonucleotide
guuaugauguccauuauaa

SEQ ID NO: 1730027 - RNA, 19 nt, Artificial Sequence
  Description of Artificial Sequence: Synthetic oligonucleotide
guaacuggaaguguuauca

SEQ ID NO: 1730028 - RNA, 19 nt, Artificial Sequence
  Description of Artificial Sequence: Synthetic oligonucleotide
cuuguagucauaguuauga

SEQ ID NO: 1730029 - RNA, 19 nt, Artificial Sequence
  Description of Artificial Sequence: Synthetic oligonucleotide
aacuugagggcccugcuau

SEQ ID NO: 1730030 - RNA, 19 nt, Artificial Sequence
  Description of Artificial Sequence: Synthetic oligonucleotide
ucauguaacuugagggccc

SEQ ID NO: 1730031 - RNA, 19 nt, Artificial Sequence
  Description of Artificial Sequence: Synthetic oligonucleotide
aaggauuuaccacacucuu

SEQ ID NO: 1730032 - RNA, 19 nt, Artificial Sequence
  Description of Artificial Sequence: Synthetic oligonucleotide
gucgucuuucaugugaucg

SEQ ID NO: 1730033 - RNA, 19 nt, Artificial Sequence
  Description of Artificial Sequence: Synthetic oligonucleotide
ucccguaugaauucucuca

SEQ ID NO: 1730034 - RNA, 19 nt, Artificial Sequence
  Description of Artificial Sequence: Synthetic oligonucleotide
gguccugugacuucuaaag

SEQ ID NO: 1730035 - RNA, 19 nt, Artificial Sequence
  Description of Artificial Sequence: Synthetic oligonucleotide
aaucggagugaagacugac

SEQ ID NO: 1730036 - RNA, 19 nt, Artificial Sequence
  Description of Artificial Sequence: Synthetic oligonucleotide
ugauaagaagccugacacc

SEQ ID NO: 1730037 - RNA, 19 nt, Artificial Sequence
  Description of Artificial Sequence: Synthetic oligonucleotide
uguaacuuaaggguccugu

SEQ ID NO: 1730038 - RNA, 19 nt, Artificial Sequence
  Description of Artificial Sequence: Synthetic oligonucleotide
aguuaggugauagagucca

SEQ ID NO: 1730039 - RNA, 19 nt, Artificial Sequence
  Description of Artificial Sequence: Synthetic oligonucleotide
guaacuggagggcacuggg

SEQ ID NO: 1730040 - RNA, 19 nt, Artificial Sequence
  Description of Artificial Sequence: Synthetic oligonucleotide
aaguuaggugauagagucc

SEQ ID NO: 1730041 - RNA, 19 nt, Artificial Sequence
  Description of Artificial Sequence: Synthetic oligonucleotide
uuauaaguuaggugauaga

SEQ ID NO: 1730042 - RNA, 19 nt, Artificial Sequence
  Description of Artificial Sequence: Synthetic oligonucleotide
ucggagugaagacugacau

SEQ ID NO: 1730043 - RNA, 19 nt, Artificial Sequence
  Description of Artificial Sequence: Synthetic oligonucleotide
uaugccgacugaaggaucu

SEQ ID NO: 1730044 - RNA, 19 nt, Artificial Sequence
  Description of Artificial Sequence: Synthetic oligonucleotide
acacacagaagguccacuc

SEQ ID NO: 1730045 - RNA, 19 nt, Artificial Sequence
  Description of Artificial Sequence: Synthetic oligonucleotide
acaauguuucuccaccaug

SEQ ID NO: 1730046 - RNA, 19 nt, Artificial Sequence
  Description of Artificial Sequence: Synthetic oligonucleotide
guagucauaguuaugaugu

SEQ ID NO: 1730047 - RNA, 19 nt, Artificial Sequence
  Description of Artificial Sequence: Synthetic oligonucleotide
cuauaucuaaagguuuucc

SEQ ID NO: 1730048 - RNA, 19 nt, Artificial Sequence
  Description of Artificial Sequence: Synthetic oligonucleotide
  modified_base (17)..(17): a, c, u, g, unknown or other
gaagucugaguuuccgngc

SEQ ID NO: 1730049 - RNA, 19 nt, Artificial Sequence
  Description of Artificial Sequence: Synthetic oligonucleotide
aucauuuucgucagucugg

SEQ ID NO: 1730050 - RNA, 19 nt, Artificial Sequence
  Description of Artificial Sequence: Synthetic oligonucleotide
guaauuggagggcacugag

SEQ ID NO: 1730051 - RNA, 19 nt, Artificial Sequence
  Description of Artificial Sequence: Synthetic oligonucleotide
  modified_base (4)..(4): a, c, u, g, unknown or other
ccunacacacagaaggucc

SEQ ID NO: 1730052 - RNA, 19 nt, Artificial Sequence
  Description of Artificial Sequence: Synthetic oligonucleotide
uaagagcgaugugugaagg

SEQ ID NO: 1730053 - RNA, 19 nt, Artificial Sequence
  Description of Artificial Sequence: Synthetic oligonucleotide
aagguaagagcgaugugug

SEQ ID NO: 1730054 - RNA, 19 nt, Artificial Sequence
  Description of Artificial Sequence: Synthetic oligonucleotide
caugcaaucggagugaaga

SEQ ID NO: 1730055 - RNA, 19 nt, Artificial Sequence
  Description of Artificial Sequence: Synthetic oligonucleotide
uguccauuauaaguuaggu

SEQ ID NO: 1730056 - RNA, 19 nt, Artificial Sequence
  Description of Artificial Sequence: Synthetic oligonucleotide
augcaaucggagugaagac

SEQ ID NO: 1730057 - RNA, 19 nt, Artificial Sequence
  Description of Artificial Sequence: Synthetic oligonucleotide
ugugacuucuaaagaauuu

SEQ ID NO: 1730058 - RNA, 19 nt, Artificial Sequence
  Description of Artificial Sequence: Synthetic oligonucleotide
  modified_base (15)..(15): a, c, u, g, unknown or other
ccaaaggucuuuaanaaac

SEQ ID NO: 1730059 - RNA, 19 nt, Artificial Sequence
  Description of Artificial Sequence: Synthetic oligonucleotide
gauaagaagccugacaccu

SEQ ID NO: 1730060 - RNA, 19 nt, Artificial Sequence
  Description of Artificial Sequence: Synthetic oligonucleotide
  modified_base (6)..(6): a, c, u, g, unknown or other
uuccgngcauccuucaaca

SEQ ID NO: 1730061 - RNA, 19 nt, Artificial Sequence
  Description of Artificial Sequence: Synthetic oligonucleotide
guccauuauaaguuaggug

SEQ ID NO: 1730062 - RNA, 19 nt, Artificial Sequence
  Description of Artificial Sequence: Synthetic oligonucleotide
ugcuauaucuaaagguuuu

SEQ ID NO: 1730063 - RNA, 19 nt, Artificial Sequence
  Description of Artificial Sequence: Synthetic oligonucleotide
  modified_base (11)..(11): a, c, u, g, unknown or other
  modified_base (18)..(18): a, c, u, g, unknown or other
aggucuuuaanaaaccuna

SEQ ID NO: 1730064 - RNA, 19 nt, Artificial Sequence
  Description of Artificial Sequence: Synthetic oligonucleotide
ugaucgaagguaagagcga

SEQ ID NO: 1730065 - RNA, 19 nt, Artificial Sequence
  Description of Artificial Sequence: Synthetic oligonucleotide
  modified_base (3)..(3): a, c, u, g, unknown or other
  modified_base (10)..(10): a, c, u, g, unknown or other
aanaaaccunacacacaga

SEQ ID NO: 1730066 - RNA, 19 nt, Artificial Sequence
  Description of Artificial Sequence: Synthetic oligonucleotide
ucauauggguuuuccacuc

SEQ ID NO: 1730067 - RNA, 19 nt, Artificial Sequence
  Description of Artificial Sequence: Synthetic oligonucleotide
uccuacacagcugacacuc

SEQ ID NO: 1730068 - RNA, 19 nt, Artificial Sequence
  Description of Artificial Sequence: Synthetic oligonucleotide
uuuucgucagucuggcuuc

SEQ ID NO: 1730069 - RNA, 19 nt, Artificial Sequence
  Description of Artificial Sequence: Synthetic oligonucleotide
ggcgcugagaccucgaaag

SEQ ID NO: 1730070 - RNA, 19 nt, Artificial Sequence
  Description of Artificial Sequence: Synthetic oligonucleotide
ugaguuauuuuaugucuau

SEQ ID NO: 1730071 - RNA, 19 nt, Artificial Sequence
  Description of Artificial Sequence: Synthetic oligonucleotide
aguuaugauguccauuaua

SEQ ID NO: 1730072 - RNA, 19 nt, Artificial Sequence
  Description of Artificial Sequence: Synthetic oligonucleotide
uguaacuugagggcccugc

SEQ ID NO: 1730073 - RNA, 19 nt, Artificial Sequence
  Description of Artificial Sequence: Synthetic oligonucleotide
uucauguaauuggagggca

SEQ ID NO: 1730074 - RNA, 19 nt, Artificial Sequence
  Description of Artificial Sequence: Synthetic oligonucleotide
uguaacuggagggcacugg

SEQ ID NO: 1730075 - RNA, 19 nt, Artificial Sequence
  Description of Artificial Sequence: Synthetic oligonucleotide
ucauuuucgucagucuggc

SEQ ID NO: 1730076 - RNA, 19 nt, Artificial Sequence
  Description of Artificial Sequence: Synthetic oligonucleotide
gaagguaagagcgaugugu

SEQ ID NO: 1730077 - RNA, 19 nt, Artificial Sequence
  Description of Artificial Sequence: Synthetic oligonucleotide
auaugugaaggcucugcca

SEQ ID NO: 1730078 - RNA, 19 nt, Artificial Sequence
  Description of Artificial Sequence: Synthetic oligonucleotide
ucauguaacuggagggcac

SEQ ID NO: 1730079 - RNA, 19 nt, Artificial Sequence
  Description of Artificial Sequence: Synthetic oligonucleotide
  modified_base (11)..(11): a, c, u, g, unknown or other
ugaguuuccgngcauccuu

SEQ ID NO: 1730080 - RNA, 19 nt, Artificial Sequence
  Description of Artificial Sequence: Synthetic oligonucleotide
uaauuggagggcacugaga

SEQ ID NO: 1730081 - RNA, 19 nt, Artificial Sequence
  Description of Artificial Sequence: Synthetic oligonucleotide
uuucaugcaaucggaguga

SEQ ID NO: 1730082 - RNA, 19 nt, Artificial Sequence
  Description of Artificial Sequence: Synthetic oligonucleotide
  modified_base (5)..(5): a, c, u, g, unknown or other
accunacacacagaagguc

SEQ ID NO: 1730083 - RNA, 19 nt, Artificial Sequence
  Description of Artificial Sequence: Synthetic oligonucleotide
  modified_base (12)..(12): a, c, u, g, unknown or other
  modified_base (19)..(19): a, c, u, g, unknown or other
aaggucuuuaanaaaccun

SEQ ID NO: 1730084 - RNA, 19 nt, Artificial Sequence
  Description of Artificial Sequence: Synthetic oligonucleotide
auaaguuaggugauagagu

SEQ ID NO: 1730085 - RNA, 19 nt, Artificial Sequence
  Description of Artificial Sequence: Synthetic oligonucleotide
auacaauguuucuccacca

SEQ ID NO: 1730086 - RNA, 19 nt, Artificial Sequence
  Description of Artificial Sequence: Synthetic oligonucleotide
uucauguaacuggagggca

SEQ ID NO: 1730087 - RNA, 19 nt, Artificial Sequence
  Description of Artificial Sequence: Synthetic oligonucleotide
caugaguuauuuuaugucu

SEQ ID NO: 1730088 - RNA, 19 nt, Artificial Sequence
  Description of Artificial Sequence: Synthetic oligonucleotide
uaacuucagagaaguuagc

SEQ ID NO: 1730089 - RNA, 19 nt, Artificial Sequence
  Description of Artificial Sequence: Synthetic oligonucleotide
ugagggcccugcuauaucu

SEQ ID NO: 1730090 - RNA, 19 nt, Artificial Sequence
  Description of Artificial Sequence: Synthetic oligonucleotide
uguaauuggagggcacuga

SEQ ID NO: 1730091 - RNA, 19 nt, Artificial Sequence
  Description of Artificial Sequence: Synthetic oligonucleotide
ucgucuuucaugugaucga

SEQ ID NO: 1730092 - RNA, 19 nt, Artificial Sequence
  Description of Artificial Sequence: Synthetic oligonucleotide
acugggauaccuaaaggcu

SEQ ID NO: 1730093 - RNA, 19 nt, Artificial Sequence
  Description of Artificial Sequence: Synthetic oligonucleotide
aagagcgaugugugaaggu

SEQ ID NO: 1730094 - RNA, 19 nt, Artificial Sequence
  Description of Artificial Sequence: Synthetic oligonucleotide
acagaagguccacucgaag

SEQ ID NO: 1730095 - RNA, 19 nt, Artificial Sequence
  Description of Artificial Sequence: Synthetic oligonucleotide
agccugacaccugaaggcc

SEQ ID NO: 1730096 - RNA, 19 nt, Artificial Sequence
  Description of Artificial Sequence: Synthetic oligonucleotide
ucauguaauuggagggcac

SEQ ID NO: 1730097 - RNA, 19 nt, Artificial Sequence
  Description of Artificial Sequence: Synthetic oligonucleotide
uuagccaucugaaggcuuu

SEQ ID NO: 1730098 - RNA, 19 nt, Artificial Sequence
  Description of Artificial Sequence: Synthetic oligonucleotide
auauggguuuuccacucca

SEQ ID NO: 1730099 - RNA, 19 nt, Artificial Sequence
  Description of Artificial Sequence: Synthetic oligonucleotide
auguccauuauaaguuagg

SEQ ID NO: 1730100 - RNA, 19 nt, Artificial Sequence
  Description of Artificial Sequence: Synthetic oligonucleotide
uaacuugaaaaggcuuugc

SEQ ID NO: 1730101 - RNA, 19 nt, Artificial Sequence
  Description of Artificial Sequence: Synthetic oligonucleotide
gaaaucgaagauaauugua

SEQ ID NO: 1730102 - RNA, 19 nt, Artificial Sequence
  Description of Artificial Sequence: Synthetic oligonucleotide
cauccuucaacacuuguaa

SEQ ID NO: 1730103 - RNA, 19 nt, Artificial Sequence
  Description of Artificial Sequence: Synthetic oligonucleotide
ggugauagaguccaaaggu

SEQ ID NO: 1730104 - RNA, 19 nt, Artificial Sequence
  Description of Artificial Sequence: Synthetic oligonucleotide
aucuaaagguuuucccaca

SEQ ID NO: 1730105 - RNA, 19 nt, Artificial Sequence
  Description of Artificial Sequence: Synthetic oligonucleotide
uacaauguuucuccaccau

SEQ ID NO: 1730106 - RNA, 19 nt, Artificial Sequence
  Description of Artificial Sequence: Synthetic oligonucleotide
  modified_base (19)..(19): a, c, u, g, unknown or other
ucgaagucugaguuuccgn

SEQ ID NO: 1730107 - RNA, 19 nt, Artificial Sequence
  Description of Artificial Sequence: Synthetic oligonucleotide
ugcaaucggagugaagacu

SEQ ID NO: 1730108 - RNA, 19 nt, Artificial Sequence
  Description of Artificial Sequence: Synthetic oligonucleotide
gaguuauuuuaugucuaug

SEQ ID NO: 1730109 - RNA, 19 nt, Artificial Sequence
  Description of Artificial Sequence: Synthetic oligonucleotide
auggguuuuccacuccaug

SEQ ID NO: 1730110 - RNA, 19 nt, Artificial Sequence
  Description of Artificial Sequence: Synthetic oligonucleotide
uguggcuucuguucaaauu

SEQ ID NO: 1730111 - RNA, 19 nt, Artificial Sequence
  Description of Artificial Sequence: Synthetic oligonucleotide
accucgaaaggcuuuccca

SEQ ID NO: 1730112 - RNA, 19 nt, Artificial Sequence
  Description of Artificial Sequence: Synthetic oligonucleotide
  modified_base (6)..(6): a, c, u, g, unknown or other
aaccunacacacagaaggu

SEQ ID NO: 1730113 - RNA, 19 nt, Artificial Sequence
  Description of Artificial Sequence: Synthetic oligonucleotide
uaacuggaaguguuaucac

SEQ ID NO: 1730114 - RNA, 19 nt, Artificial Sequence
  Description of Artificial Sequence: Synthetic oligonucleotide
ggcacugggauaccuaaag

SEQ ID NO: 1730115 - RNA, 19 nt, Artificial Sequence
  Description of Artificial Sequence: Synthetic oligonucleotide
ggauuuaccacacucuuua

SEQ ID NO: 1730116 - RNA, 19 nt, Artificial Sequence
  Description of Artificial Sequence: Synthetic oligonucleotide
gauuuaccacacucuuuac

SEQ ID NO: 1730117 - RNA, 19 nt, Artificial Sequence
  Description of Artificial Sequence: Synthetic oligonucleotide
gaauucucucaugcaaaug

SEQ ID NO: 1730118 - RNA, 19 nt, Artificial Sequence
  Description of Artificial Sequence: Synthetic oligonucleotide
ugucuaugauaagaagccu

SEQ ID NO: 1730119 - RNA, 19 nt, Artificial Sequence
  Description of Artificial Sequence: Synthetic oligonucleotide
acaucugaaggcuuuccua

SEQ ID NO: 1730120 - RNA, 19 nt, Artificial Sequence
  Description of Artificial Sequence: Synthetic oligonucleotide
ugauuaccgucauaaucau

SEQ ID NO: 1730121 - RNA, 19 nt, Artificial Sequence
  Description of Artificial Sequence: Synthetic oligonucleotide
uauguaacuuaaggguccu

SEQ ID NO: 1730122 - RNA, 19 nt, Artificial Sequence
  Description of Artificial Sequence: Synthetic oligonucleotide
cucgaagucugaguuuccg

SEQ ID NO: 1730123 - RNA, 19 nt, Artificial Sequence
  Description of Artificial Sequence: Synthetic oligonucleotide
acaccugaaggccuuucca

SEQ ID NO: 1730124 - RNA, 19 nt, Artificial Sequence
  Description of Artificial Sequence: Synthetic oligonucleotide
cacuuguaagaaaauuaga

SEQ ID NO: 1730125 - RNA, 19 nt, Artificial Sequence
  Description of Artificial Sequence: Synthetic oligonucleotide
  modified_base (3)..(3): a, c, u, g, unknown or other
cunacacacagaaggucca

SEQ ID NO: 1730126 - RNA, 19 nt, Artificial Sequence
  Description of Artificial Sequence: Synthetic oligonucleotide
uaaggguccugugacuucu

SEQ ID NO: 1730127 - RNA, 19 nt, Artificial Sequence
  Description of Artificial Sequence: Synthetic oligonucleotide
ucaugcaaucggagugaag

SEQ ID NO: 1730128 - RNA, 19 nt, Artificial Sequence
  Description of Artificial Sequence: Synthetic oligonucleotide
gaccucgaaaggcuuuccc

SEQ ID NO: 1730129 - RNA, 19 nt, Artificial Sequence
  Description of Artificial Sequence: Synthetic oligonucleotide
acuuaaggguccugugacu

SEQ ID NO: 1730130 - RNA, 19 nt, Artificial Sequence
  Description of Artificial Sequence: Synthetic oligonucleotide
uuuccucaguaugaauucu

SEQ ID NO: 1730131 - RNA, 19 nt, Artificial Sequence
  Description of Artificial Sequence: Synthetic oligonucleotide
cacucauacaauguuucuc

SEQ ID NO: 1730132 - RNA, 19 nt, Artificial Sequence
  Description of Artificial Sequence: Synthetic oligonucleotide
auuagaaguccuguggcuu

SEQ ID NO: 1730133 - RNA, 19 nt, Artificial Sequence
  Description of Artificial Sequence: Synthetic oligonucleotide
caccaugaguuauuuuaug

SEQ ID NO: 1730134 - RNA, 19 nt, Artificial Sequence
  Description of Artificial Sequence: Synthetic oligonucleotide
aaggguaacuggaaguguu

SEQ ID NO: 1730135 - RNA, 19 nt, Artificial Sequence
  Description of Artificial Sequence: Synthetic oligonucleotide
agacugacaucugaaggcu

SEQ ID NO: 1730136 - RNA, 19 nt, Artificial Sequence
  Description of Artificial Sequence: Synthetic oligonucleotide
uuguagucauaguuaugau

SEQ ID NO: 1730137 - RNA, 19 nt, Artificial Sequence
  Description of Artificial Sequence: Synthetic oligonucleotide
uuccucaguaugaauucuu

SEQ ID NO: 1730138 - RNA, 19 nt, Artificial Sequence
  Description of Artificial Sequence: Synthetic oligonucleotide
ucauaguuaugauguccau

SEQ ID NO: 1730139 - RNA, 19 nt, Artificial Sequence
  Description of Artificial Sequence: Synthetic oligonucleotide
uauggguuuuccacuccau

SEQ ID NO: 1730140 - RNA, 19 nt, Artificial Sequence
  Description of Artificial Sequence: Synthetic oligonucleotide
gugauagaguccaaagguc

SEQ ID NO: 1730141 - RNA, 19 nt, Artificial Sequence
  Description of Artificial Sequence: Synthetic oligonucleotide
cuuuacacucauacaaugu

SEQ ID NO: 1730142 - RNA, 19 nt, Artificial Sequence
  Description of Artificial Sequence: Synthetic oligonucleotide
ggaacuaugccgacugaag

SEQ ID NO: 1730143 - RNA, 19 nt, Artificial Sequence
  Description of Artificial Sequence: Synthetic oligonucleotide
ccaugaguuauuuuauguc

SEQ ID NO: 1730144 - RNA, 19 nt, Artificial Sequence
  Description of Artificial Sequence: Synthetic oligonucleotide
acuaugccgacugaaggau

SEQ ID NO: 1730145 - RNA, 19 nt, Artificial Sequence
  Description of Artificial Sequence: Synthetic oligonucleotide
cacagcugacacucauagg

SEQ ID NO: 1730146 - RNA, 19 nt, Artificial Sequence
  Description of Artificial Sequence: Synthetic oligonucleotide
gcaaucggagugaagacug

SEQ ID NO: 1730147 - RNA, 19 nt, Artificial Sequence
  Description of Artificial Sequence: Synthetic oligonucleotide
uuaaggguccugugacuuc

SEQ ID NO: 1730148 - RNA, 19 nt, Artificial Sequence
  Description of Artificial Sequence: Synthetic oligonucleotide
uaacuugagggcccugcua

SEQ ID NO: 1730149 - RNA, 19 nt, Artificial Sequence
  Description of Artificial Sequence: Synthetic oligonucleotide
  modified_base (10)..(10): a, c, u, g, unknown or other
gaguuuccgngcauccuuc

SEQ ID NO: 1730150 - RNA, 19 nt, Artificial Sequence
  Description of Artificial Sequence: Synthetic oligonucleotide
agaauuuaccacacuguuu

SEQ ID NO: 1730151 - RNA, 19 nt, Artificial Sequence
  Description of Artificial Sequence: Synthetic oligonucleotide
ugagaccucgaaaggcuuu

SEQ ID NO: 1730152 - RNA, 19 nt, Artificial Sequence
  Description of Artificial Sequence: Synthetic oligonucleotide
  modified_base (9)..(9): a, c, u, g, unknown or other
aguuuccgngcauccuuca

SEQ ID NO: 1730153 - RNA, 19 nt, Artificial Sequence
  Description of Artificial Sequence: Synthetic oligonucleotide
agaccucgaaaggcuuucc

SEQ ID NO: 1730154 - RNA, 19 nt, Artificial Sequence
  Description of Artificial Sequence: Synthetic oligonucleotide
  modified_base (18)..(18): a, c, u, g, unknown or other
cgaagucugaguuuccgng

SEQ ID NO: 1730155 - RNA, 19 nt, Artificial Sequence
  Description of Artificial Sequence: Synthetic oligonucleotide
gcacugggauaccuaaagg

SEQ ID NO: 1730156 - RNA, 19 nt, Artificial Sequence
  Description of Artificial Sequence: Synthetic oligonucleotide
  modified_base (10)..(10): a, c, u, g, unknown or other
  modified_base (17)..(17): a, c, u, g, unknown or other
ggucuuuaanaaaccunac

SEQ ID NO: 1730157 - RNA, 19 nt, Artificial Sequence
  Description of Artificial Sequence: Synthetic oligonucleotide
agagcgaugugugaagguu

SEQ ID NO: 1730158 - RNA, 19 nt, Artificial Sequence
  Description of Artificial Sequence: Synthetic oligonucleotide
aguuagccaucugaaggcu

SEQ ID NO: 1730159 - RNA, 19 nt, Artificial Sequence
  Description of Artificial Sequence: Synthetic oligonucleotide
  modified_base (2)..(2): a, c, u, g, unknown or other
unacacacagaagguccac

SEQ ID NO: 1730160 - RNA, 19 nt, Artificial Sequence
  Description of Artificial Sequence: Synthetic oligonucleotide
aagguccacucgaagucug

SEQ ID NO: 1730161 - RNA, 19 nt, Artificial Sequence
  Description of Artificial Sequence: Synthetic oligonucleotide
augaguuauuuuaugucua

SEQ ID NO: 1730162 - RNA, 19 nt, Artificial Sequence
  Description of Artificial Sequence: Synthetic oligonucleotide
cacauuguuuacacucaca

SEQ ID NO: 1730163 - RNA, 19 nt, Artificial Sequence
  Description of Artificial Sequence: Synthetic oligonucleotide
cucauacaauguuucucca

SEQ ID NO: 1730164 - RNA, 19 nt, Artificial Sequence
  Description of Artificial Sequence: Synthetic oligonucleotide
cuuuccuacacagcugaca

SEQ ID NO: 1730165 - RNA, 19 nt, Artificial Sequence
  Description of Artificial Sequence: Synthetic oligonucleotide
gagggcacugagauaugug

SEQ ID NO: 1730166 - RNA, 19 nt, Artificial Sequence
  Description of Artificial Sequence: Synthetic oligonucleotide
uuaccgucauaaucauuuu

SEQ ID NO: 1730167 - RNA, 19 nt, Artificial Sequence
  Description of Artificial Sequence: Synthetic oligonucleotide
  modified_base (5)..(5): a, c, u, g, unknown or other
uccgngcauccuucaacac

SEQ ID NO: 1730168 - RNA, 19 nt, Artificial Sequence
  Description of Artificial Sequence: Synthetic oligonucleotide
ggcuuuccuacacagcuga

SEQ ID NO: 1730169 - RNA, 19 nt, Artificial Sequence
  Description of Artificial Sequence: Synthetic oligonucleotide
gaagggcgcugagaccucg

SEQ ID NO: 1730170 - RNA, 19 nt, Artificial Sequence
  Description of Artificial Sequence: Synthetic oligonucleotide
ucgucagucuggcuuccuc

SEQ ID NO: 1730171 - RNA, 19 nt, Artificial Sequence
  Description of Artificial Sequence: Synthetic oligonucleotide
auaagaagccugacaccug

SEQ ID NO: 1730172 - RNA, 19 nt, Artificial Sequence
  Description of Artificial Sequence: Synthetic oligonucleotide
aggaacuaugccgacugaa

SEQ ID NO: 1730173 - RNA, 19 nt, Artificial Sequence
  Description of Artificial Sequence: Synthetic oligonucleotide
acucgaagucugaguuucc

SEQ ID NO: 1730174 - RNA, 19 nt, Artificial Sequence
  Description of Artificial Sequence: Synthetic oligonucleotide
cuaugccgacugaaggauc

SEQ ID NO: 1730175 - RNA, 19 nt, Artificial Sequence
  Description of Artificial Sequence: Synthetic oligonucleotide
cucccguaugaauucucuc

SEQ ID NO: 1730176 - RNA, 19 nt, Artificial Sequence
  Description of Artificial Sequence: Synthetic oligonucleotide
uugagggcccugcuauauc

SEQ ID NO: 1730177 - RNA, 19 nt, Artificial Sequence
  Description of Artificial Sequence: Synthetic oligonucleotide
  modified_base (14)..(14): a, c, u, g, unknown or other
gucugaguuuccgngcauc

SEQ ID NO: 1730178 - RNA, 19 nt, Artificial Sequence
  Description of Artificial Sequence: Synthetic oligonucleotide
gguaacuggaaguguuauc

SEQ ID NO: 1730179 - RNA, 19 nt, Artificial Sequence
  Description of Artificial Sequence: Synthetic oligonucleotide
aucggagugaagacugaca

SEQ ID NO: 1730180 - RNA, 19 nt, Artificial Sequence
  Description of Artificial Sequence: Synthetic oligonucleotide
cagaagguccacucgaagu

SEQ ID NO: 1730181 - RNA, 19 nt, Artificial Sequence
  Description of Artificial Sequence: Synthetic oligonucleotide
cagucuggcuuccuccaac

SEQ ID NO: 1730182 - RNA, 19 nt, Artificial Sequence
  Description of Artificial Sequence: Synthetic oligonucleotide
gagaccucgaaaggcuuuc

SEQ ID NO: 1730183 - RNA, 19 nt, Artificial Sequence
  Description of Artificial Sequence: Synthetic oligonucleotide
uucaugcaaucggagugaa

SEQ ID NO: 1730184 - RNA, 19 nt, Artificial Sequence
  Description of Artificial Sequence: Synthetic oligonucleotide
auagaguccaaaggucuuu

SEQ ID NO: 1730185 - RNA, 19 nt, Artificial Sequence
  Description of Artificial Sequence: Synthetic oligonucleotide
uagaguccaaaggucuuua

SEQ ID NO: 1730186 - RNA, 19 nt, Artificial Sequence
  Description of Artificial Sequence: Synthetic oligonucleotide
gcccugcuauaucuaaagg

SEQ ID NO: 1730187 - RNA, 19 nt, Artificial Sequence
  Description of Artificial Sequence: Synthetic oligonucleotide
cuucaacacuuguaagaaa

SEQ ID NO: 1730188 - RNA, 19 nt, Artificial Sequence
  Description of Artificial Sequence: Synthetic oligonucleotide
ugucgucuuucaugugauc

SEQ ID NO: 1730189 - RNA, 19 nt, Artificial Sequence
  Description of Artificial Sequence: Synthetic oligonucleotide
uccuggcauucauaggguu

SEQ ID NO: 1730190 - RNA, 19 nt, Artificial Sequence
  Description of Artificial Sequence: Synthetic oligonucleotide
agggcccugcuauaucuaa

SEQ ID NO: 1730191 - RNA, 19 nt, Artificial Sequence
  Description of Artificial Sequence: Synthetic oligonucleotide
ccucaguaugaauucuuuc

SEQ ID NO: 1730192 - RNA, 19 nt, Artificial Sequence
  Description of Artificial Sequence: Synthetic oligonucleotide
auguaacuggagggcacug

SEQ ID NO: 1730193 - RNA, 19 nt, Artificial Sequence
  Description of Artificial Sequence: Synthetic oligonucleotide
acuggagggcacugggaua

SEQ ID NO: 1730194 - RNA, 19 nt, Artificial Sequence
  Description of Artificial Sequence: Synthetic oligonucleotide
gcuauaucuaaagguuuuc

SEQ ID NO: 1730195 - RNA, 19 nt, Artificial Sequence
  Description of Artificial Sequence: Synthetic oligonucleotide
cagagaaguuagccaucug

SEQ ID NO: 1730196 - RNA, 19 nt, Artificial Sequence
  Description of Artificial Sequence: Synthetic oligonucleotide
  modified_base (15)..(15): a, c, u, g, unknown or other
agucugaguuuccgngcau

SEQ ID NO: 1730197 - RNA, 19 nt, Artificial Sequence
  Description of Artificial Sequence: Synthetic oligonucleotide
augucgucuuucaugugau

SEQ ID NO: 1730198 - RNA, 19 nt, Artificial Sequence
  Description of Artificial Sequence: Synthetic oligonucleotide
cacucuugacacacauaga

SEQ ID NO: 1730199 - RNA, 19 nt, Artificial Sequence
  Description of Artificial Sequence: Synthetic oligonucleotide
cauuauaaguuaggugaua

SEQ ID NO: 1730200 - RNA, 19 nt, Artificial Sequence
  Description of Artificial Sequence: Synthetic oligonucleotide
aggauuuaccacacucuuu

SEQ ID NO: 1730201 - RNA, 19 nt, Artificial Sequence
  Description of Artificial Sequence: Synthetic oligonucleotide
gaagguccacucgaagucu

SEQ ID NO: 1730202 - RNA, 19 nt, Artificial Sequence
  Description of Artificial Sequence: Synthetic oligonucleotide
ugaagggcgcugagaccuc

SEQ ID NO: 1730203 - RNA, 19 nt, Artificial Sequence
  Description of Artificial Sequence: Synthetic oligonucleotide
cacagaagguccacucgaa

SEQ ID NO: 1730204 - RNA, 19 nt, Artificial Sequence
  Description of Artificial Sequence: Synthetic oligonucleotide
guaacuugagggcccugcu

SEQ ID NO: 1730205 - RNA, 19 nt, Artificial Sequence
  Description of Artificial Sequence: Synthetic oligonucleotide
  modified_base (8)..(8): a, c, u, g, unknown or other
guuuccgngcauccuucaa

SEQ ID NO: 1730206 - RNA, 19 nt, Artificial Sequence
  Description of Artificial Sequence: Synthetic oligonucleotide
ccugcuauaucuaaagguu

SEQ ID NO: 1730207 - RNA, 19 nt, Artificial Sequence
  Description of Artificial Sequence: Synthetic oligonucleotide
gcgcugagaccucgaaagg

SEQ ID NO: 1730208 - RNA, 19 nt, Artificial Sequence
  Description of Artificial Sequence: Synthetic oligonucleotide
auguaacuuaaggguccug

SEQ ID NO: 1730209 - RNA, 19 nt, Artificial Sequence
  Description of Artificial Sequence: Synthetic oligonucleotide
caaucggagugaagacuga

SEQ ID NO: 1730210 - RNA, 19 nt, Artificial Sequence
  Description of Artificial Sequence: Synthetic oligonucleotide
gauagaguccaaaggucuu

SEQ ID NO: 1730211 - RNA, 19 nt, Artificial Sequence
  Description of Artificial Sequence: Synthetic oligonucleotide
aggguccugugacuucuaa

SEQ ID NO: 1730212 - RNA, 19 nt, Artificial Sequence
  Description of Artificial Sequence: Synthetic oligonucleotide
gguccacucgaagucugag

SEQ ID NO: 1730213 - RNA, 19 nt, Artificial Sequence
  Description of Artificial Sequence: Synthetic oligonucleotide
cugcuauaucuaaagguuu

SEQ ID NO: 1730214 - RNA, 19 nt, Artificial Sequence
  Description of Artificial Sequence: Synthetic oligonucleotide
  modified_base (2)..(2): a, c, u, g, unknown or other
gngcauccuucaacacuug

SEQ ID NO: 1730215 - RNA, 19 nt, Artificial Sequence
  Description of Artificial Sequence: Synthetic oligonucleotide
cugggauaccuaaaggcuu

SEQ ID NO: 1730216 - RNA, 19 nt, Artificial Sequence
  Description of Artificial Sequence: Synthetic oligonucleotide
cugugacuucuaaagaauu

SEQ ID NO: 1730217 - RNA, 19 nt, Artificial Sequence
  Description of Artificial Sequence: Synthetic oligonucleotide
cauguaauuggagggcacu

SEQ ID NO: 1730218 - RNA, 19 nt, Artificial Sequence
  Description of Artificial Sequence: Synthetic oligonucleotide
agcgaugugugaagguuuu

SEQ ID NO: 1730219 - RNA, 19 nt, Artificial Sequence
  Description of Artificial Sequence: Synthetic oligonucleotide
ugacaccugaaggccuuuc

SEQ ID NO: 1730220 - RNA, 19 nt, Artificial Sequence
  Description of Artificial Sequence: Synthetic oligonucleotide
cgaugugugaagguuuuac

SEQ ID NO: 1730221 - RNA, 19 nt, Artificial Sequence
  Description of Artificial Sequence: Synthetic oligonucleotide
cuuaaggguccugugacuu

SEQ ID NO: 1730222 - RNA, 19 nt, Artificial Sequence
  Description of Artificial Sequence: Synthetic oligonucleotide
caacacuuguaagaaaauu

SEQ ID NO: 1730223 - RNA, 19 nt, Artificial Sequence
  Description of Artificial Sequence: Synthetic oligonucleotide
ccguaugaauucucucaug

SEQ ID NO: 1730224 - RNA, 19 nt, Artificial Sequence
  Description of Artificial Sequence: Synthetic oligonucleotide
cauaguuaugauguccauu

SEQ ID NO: 1730225 - RNA, 19 nt, Artificial Sequence
  Description of Artificial Sequence: Synthetic oligonucleotide
caugcaaaugaagggcgcu

SEQ ID NO: 1730226 - RNA, 19 nt, Artificial Sequence
  Description of Artificial Sequence: Synthetic oligonucleotide
agggcgcugagaccucgaa

SEQ ID NO: 1730227 - RNA, 19 nt, Artificial Sequence
  Description of Artificial Sequence: Synthetic oligonucleotide
guccacucgaagucugagu

SEQ ID NO: 1730228 - RNA, 19 nt, Artificial Sequence
  Description of Artificial Sequence: Synthetic oligonucleotide
cgguguguguucuuucaug

SEQ ID NO: 1730229 - RNA, 19 nt, Artificial Sequence
  Description of Artificial Sequence: Synthetic oligonucleotide
cuacacagcugacacucau

SEQ ID NO: 1730230 - RNA, 19 nt, Artificial Sequence
  Description of Artificial Sequence: Synthetic oligonucleotide
cauguaacuggagggcacu

SEQ ID NO: 1730231 - RNA, 19 nt, Artificial Sequence
  Description of Artificial Sequence: Synthetic oligonucleotide
gcauccuucaacacuugua

SEQ ID NO: 1730232 - RNA, 19 nt, Artificial Sequence
  Description of Artificial Sequence: Synthetic oligonucleotide
aagggcgcugagaccucga

SEQ ID NO: 1730233 - RNA, 19 nt, Artificial Sequence
  Description of Artificial Sequence: Synthetic oligonucleotide
auguaacuugagggcccug

SEQ ID NO: 1730234 - RNA, 19 nt, Artificial Sequence
  Description of Artificial Sequence: Synthetic oligonucleotide
gcugagaccucgaaaggcu

SEQ ID NO: 1730235 - RNA, 19 nt, Artificial Sequence
  Description of Artificial Sequence: Synthetic oligonucleotide
ggguccugugacuucuaaa

SEQ ID NO: 1730236 - RNA, 19 nt, Artificial Sequence
  Description of Artificial Sequence: Synthetic oligonucleotide
gagcgaugugugaagguuu

SEQ ID NO: 1730237 - RNA, 19 nt, Artificial Sequence
  Description of Artificial Sequence: Synthetic oligonucleotide
gucuuuccucaguaugaau

SEQ ID NO: 1730238 - RNA, 19 nt, Artificial Sequence
  Description of Artificial Sequence: Synthetic oligonucleotide
agguccacucgaagucuga

SEQ ID NO: 1730239 - RNA, 19 nt, Artificial Sequence
  Description of Artificial Sequence: Synthetic oligonucleotide
gauuaccgucauaaucauu

SEQ ID NO: 1730240 - RNA, 19 nt, Artificial Sequence
  Description of Artificial Sequence: Synthetic oligonucleotide
cauguaacuugagggcccu

SEQ ID NO: 1730241 - RNA, 19 nt, Artificial Sequence
  Description of Artificial Sequence: Synthetic oligonucleotide
ccauuauaaguuaggugau

SEQ ID NO: 1730242 - RNA, 19 nt, Artificial Sequence
  Description of Artificial Sequence: Synthetic oligonucleotide
cuugagggcccugcuauau

SEQ ID NO: 1730243 - RNA, 19 nt, Artificial Sequence
  Description of Artificial Sequence: Synthetic oligonucleotide
  modified_base (12)..(12): a, c, u, g, unknown or other
cugaguuuccgngcauccu

SEQ ID NO: 1730244 - RNA, 19 nt, Artificial Sequence
  Description of Artificial Sequence: Synthetic oligonucleotide
  modified_base (4)..(4): a, c, u, g, unknown or other
ccgngcauccuucaacacu

SEQ ID NO: 1730245 - RNA, 19 nt, Artificial Sequence
  Description of Artificial Sequence: Synthetic oligonucleotide
cugagaccucgaaaggcuu

SEQ ID NO: 1730246 - RNA, 19 nt, Artificial Sequence
  Description of Artificial Sequence: Synthetic oligonucleotide
cauuuucgucagucuggcu

SEQ ID NO: 1730247 - RNA, 19 nt, Artificial Sequence
  Description of Artificial Sequence: Synthetic oligonucleotide
aaggguccugugacuucua

SEQ ID NO: 1730248 - RNA, 19 nt, Artificial Sequence
  Description of Artificial Sequence: Synthetic oligonucleotide
gagggcccugcuauaucua

SEQ ID NO: 1730249 - RNA, 19 nt, Artificial Sequence
  Description of Artificial Sequence: Synthetic oligonucleotide
guuagccaucugaaggcuu

SEQ ID NO: 1730250 - RNA, 19 nt, Artificial Sequence
  Description of Artificial Sequence: Synthetic oligonucleotide
  modified_base (3)..(3): a, c, u, g, unknown or other
cgngcauccuucaacacuu

SEQ ID NO: 1730251 - RNA, 19 nt, Artificial Sequence
  Description of Artificial Sequence: Synthetic oligonucleotide
ccgucauaaucauuuucgu

SEQ ID NO: 1730252 - RNA, 19 nt, Artificial Sequence
  Description of Artificial Sequence: Synthetic oligonucleotide
ccaccaugaguuauuuuau

SEQ ID NO: 1730253 - RNA, 19 nt, Artificial Sequence
  Description of Artificial Sequence: Synthetic oligonucleotide
gacugacaucugaaggcuu

SEQ ID NO: 1730254 - RNA, 19 nt, Artificial Sequence
  Description of Artificial Sequence: Synthetic oligonucleotide
ggguaacuggaaguguuau

SEQ ID NO: 1730255 - RNA, 19 nt, Artificial Sequence
  Description of Artificial Sequence: Synthetic oligonucleotide
gggcgcugagaccucgaaa

SEQ ID NO: 1730256 - RNA, 19 nt, Artificial Sequence
  Description of Artificial Sequence: Synthetic oligonucleotide
gcuuuccuacacagcugac

SEQ ID NO: 1730257 - RNA, 19 nt, Artificial Sequence
  Description of Artificial Sequence: Synthetic oligonucleotide
cccguaugaauucucucau

SEQ ID NO: 1730258 - RNA, 19 nt, Artificial Sequence
  Description of Artificial Sequence: Synthetic oligonucleotide
gggcccugcuauaucuaaa

SEQ ID NO: 1730259 - RNA, 19 nt, Artificial Sequence
  Description of Artificial Sequence: Synthetic oligonucleotide
gccugacaccugaaggccu

SEQ ID NO: 1730260 - RNA, 19 nt, Artificial Sequence
  Description of Artificial Sequence: Synthetic oligonucleotide
gcgaugugugaagguuuua

SEQ ID NO: 1730261 - RNA, 19 nt, Artificial Sequence
  Description of Artificial Sequence: Synthetic oligonucleotide
ccgguguguguucuuucau

SEQ ID NO: 1730262 - RNA, 19 nt, Artificial Sequence
  Description of Artificial Sequence: Synthetic oligonucleotide
  modified_base (1)..(1): a, c, u, g, unknown or other
  modified_base (8)..(8): a, c, u, g, unknown or other
naaaccunacacacagaag

SEQ ID NO: 1730263 - RNA, 19 nt, Artificial Sequence
  Description of Artificial Sequence: Synthetic oligonucleotide
  modified_base (1)..(1): a, c, u, g, unknown or other
nacacacagaagguccacu

SEQ ID NO: 1730264 - RNA, 19 nt, Artificial Sequence
  Description of Artificial Sequence: Synthetic oligonucleotide
aauagauugagccauaccc

SEQ ID NO: 1730265 - RNA, 19 nt, Artificial Sequence
  Description of Artificial Sequence: Synthetic oligonucleotide
aaugggacaccuuaaacac

SEQ ID NO: 1730266 - RNA, 19 nt, Artificial Sequence
  Description of Artificial Sequence: Synthetic oligonucleotide
uaguauuaaauccaggggc

SEQ ID NO: 1730267 - RNA, 19 nt, Artificial Sequence
  Description of Artificial Sequence: Synthetic oligonucleotide
uguaaguuuauaaugagua

SEQ ID NO: 1730268 - RNA, 19 nt, Artificial Sequence
  Description of Artificial Sequence: Synthetic oligonucleotide
acuauuaaggugcugcugg

SEQ ID NO: 1730269 - RNA, 19 nt, Artificial Sequence
  Description of Artificial Sequence: Synthetic oligonucleotide
auccaauguaacuucagcc

SEQ ID NO: 1730270 - RNA, 19 nt, Artificial Sequence
  Description of Artificial Sequence: Synthetic oligonucleotide
aaauagauugagccauacc

SEQ ID NO: 1730271 - RNA, 19 nt, Artificial Sequence
  Description of Artificial Sequence: Synthetic oligonucleotide
ucuguuaaagcuacugggg

SEQ ID NO: 1730272 - RNA, 19 nt, Artificial Sequence
  Description of Artificial Sequence: Synthetic oligonucleotide
accuuaaacacccaagaac

SEQ ID NO: 1730273 - RNA, 19 nt, Artificial Sequence
  Description of Artificial Sequence: Synthetic oligonucleotide
uuuacgaccaauagugaag

SEQ ID NO: 1730274 - RNA, 19 nt, Artificial Sequence
  Description of Artificial Sequence: Synthetic oligonucleotide
auaguaaccaacuuuugug

SEQ ID NO: 1730275 - RNA, 19 nt, Artificial Sequence
  Description of Artificial Sequence: Synthetic oligonucleotide
uacauagacaauaacuucu

SEQ ID NO: 1730276 - RNA, 19 nt, Artificial Sequence
  Description of Artificial Sequence: Synthetic oligonucleotide
aauaguauaguaaccaacu

SEQ ID NO: 1730277 - RNA, 19 nt, Artificial Sequence
  Description of Artificial Sequence: Synthetic oligonucleotide
uuuauaaugaguaggugua

SEQ ID NO: 1730278 - RNA, 19 nt, Artificial Sequence
  Description of Artificial Sequence: Synthetic oligonucleotide
aacaauuccugcuggaugu

SEQ ID NO: 1730279 - RNA, 19 nt, Artificial Sequence
  Description of Artificial Sequence: Synthetic oligonucleotide
guaguauuaaauccagggg

SEQ ID NO: 1730280 - RNA, 19 nt, Artificial Sequence
  Description of Artificial Sequence: Synthetic oligonucleotide
uuugugagaacaauuccug

SEQ ID NO: 1730281 - RNA, 19 nt, Artificial Sequence
  Description of Artificial Sequence: Synthetic oligonucleotide
ucggauauguacaauguca

SEQ ID NO: 1730282 - RNA, 19 nt, Artificial Sequence
  Description of Artificial Sequence: Synthetic oligonucleotide
cauagauggaauaguauag

SEQ ID NO: 1730283 - RNA, 19 nt, Artificial Sequence
  Description of Artificial Sequence: Synthetic oligonucleotide
ugacauaggauuccggaag

SEQ ID NO: 1730284 - RNA, 19 nt, Artificial Sequence
  Description of Artificial Sequence: Synthetic oligonucleotide
aguauuaaauccaggggcc

SEQ ID NO: 1730285 - RNA, 19 nt, Artificial Sequence
  Description of Artificial Sequence: Synthetic oligonucleotide
agccauacccuuuacgacc

SEQ ID NO: 1730286 - RNA, 19 nt, Artificial Sequence
  Description of Artificial Sequence: Synthetic oligonucleotide
uuaucuguuggccaaacuc

SEQ ID NO: 1730287 - RNA, 19 nt, Artificial Sequence
  Description of Artificial Sequence: Synthetic oligonucleotide
caauagugaagucugaaac

SEQ ID NO: 1730288 - RNA, 19 nt, Artificial Sequence
  Description of Artificial Sequence: Synthetic oligonucleotide
aaagaugccuguccagcac

SEQ ID NO: 1730289 - RNA, 19 nt, Artificial Sequence
  Description of Artificial Sequence: Synthetic oligonucleotide
guugauaucagcaagucga

SEQ ID NO: 1730290 - RNA, 19 nt, Artificial Sequence
  Description of Artificial Sequence: Synthetic oligonucleotide
aacgacucaucauggaaag

SEQ ID NO: 1730291 - RNA, 19 nt, Artificial Sequence
  Description of Artificial Sequence: Synthetic oligonucleotide
ugagccauacccuuuacga

SEQ ID NO: 1730292 - RNA, 19 nt, Artificial Sequence
  Description of Artificial Sequence: Synthetic oligonucleotide
uccuauuuagcccuucacc

SEQ ID NO: 1730293 - RNA, 19 nt, Artificial Sequence
  Description of Artificial Sequence: Synthetic oligonucleotide
cuugcaacgacucaucaug

SEQ ID NO: 1730294 - RNA, 19 nt, Artificial Sequence
  Description of Artificial Sequence: Synthetic oligonucleotide
ugucguaguauuaaaucca

SEQ ID NO: 1730295 - RNA, 19 nt, Artificial Sequence
  Description of Artificial Sequence: Synthetic oligonucleotide
aucauggaaagauguuucc

SEQ ID NO: 1730296 - RNA, 19 nt, Artificial Sequence
  Description of Artificial Sequence: Synthetic oligonucleotide
uggcuuuugguuaucaucu

SEQ ID NO: 1730297 - RNA, 19 nt, Artificial Sequence
  Description of Artificial Sequence: Synthetic oligonucleotide
caaggucauccauagaugg

SEQ ID NO: 1730298 - RNA, 19 nt, Artificial Sequence
  Description of Artificial Sequence: Synthetic oligonucleotide
cugucguaguauuaaaucc

SEQ ID NO: 1730299 - RNA, 19 nt, Artificial Sequence
  Description of Artificial Sequence: Synthetic oligonucleotide
guaugucagacuauuaagg

SEQ ID NO: 1730300 - RNA, 19 nt, Artificial Sequence
  Description of Artificial Sequence: Synthetic oligonucleotide
aauccaggggccccaaagg

SEQ ID NO: 1730301 - RNA, 19 nt, Artificial Sequence
  Description of Artificial Sequence: Synthetic oligonucleotide
gauguuuuaucuguuggcc

SEQ ID NO: 1730302 - RNA, 19 nt, Artificial Sequence
  Description of Artificial Sequence: Synthetic oligonucleotide
acuuuugugagaacaauuc

SEQ ID NO: 1730303 - RNA, 19 nt, Artificial Sequence
  Description of Artificial Sequence: Synthetic oligonucleotide
uggaauaguauaguaacca

SEQ ID NO: 1730304 - RNA, 19 nt, Artificial Sequence
  Description of Artificial Sequence: Synthetic oligonucleotide
ccuuaaacacccaagaacc

SEQ ID NO: 1730305 - RNA, 19 nt, Artificial Sequence
  Description of Artificial Sequence: Synthetic oligonucleotide
uuccaaucuucccucauag

SEQ ID NO: 1730306 - RNA, 19 nt, Artificial Sequence
  Description of Artificial Sequence: Synthetic oligonucleotide
aaauuuagauuugucaaaa

SEQ ID NO: 1730307 - RNA, 19 nt, Artificial Sequence
  Description of Artificial Sequence: Synthetic oligonucleotide
ucugacauaggauuccgga

SEQ ID NO: 1730308 - RNA, 19 nt, Artificial Sequence
  Description of Artificial Sequence: Synthetic oligonucleotide
guaguaagagccuucugag

SEQ ID NO: 1730309 - RNA, 19 nt, Artificial Sequence
  Description of Artificial Sequence: Synthetic oligonucleotide
cauuucgcaaagcagcacg

SEQ ID NO: 1730310 - RNA, 19 nt, Artificial Sequence
  Description of Artificial Sequence: Synthetic oligonucleotide
uguuaaagcuacuggggcc

SEQ ID NO: 1730311 - RNA, 19 nt, Artificial Sequence
  Description of Artificial Sequence: Synthetic oligonucleotide
uccaaucuuagguugguug

SEQ ID NO: 1730312 - RNA, 19 nt, Artificial Sequence
  Description of Artificial Sequence: Synthetic oligonucleotide
uuguuugcaagccuuuggc

SEQ ID NO: 1730313 - RNA, 19 nt, Artificial Sequence
  Description of Artificial Sequence: Synthetic oligonucleotide
aaguuuauaaugaguaggu

SEQ ID NO: 1730314 - RNA, 19 nt, Artificial Sequence
  Description of Artificial Sequence: Synthetic oligonucleotide
cauugguaauuuuagcaag

SEQ ID NO: 1730315 - RNA, 19 nt, Artificial Sequence
  Description of Artificial Sequence: Synthetic oligonucleotide
gauaucagcaagucgaucu

SEQ ID NO: 1730316 - RNA, 19 nt, Artificial Sequence
  Description of Artificial Sequence: Synthetic oligonucleotide
ucaacuucuuugaaguagu

SEQ ID NO: 1730317 - RNA, 19 nt, Artificial Sequence
  Description of Artificial Sequence: Synthetic oligonucleotide
ucauccauagauggaauag

SEQ ID NO: 1730318 - RNA, 19 nt, Artificial Sequence
  Description of Artificial Sequence: Synthetic oligonucleotide
aucuacauagacaauaacu

SEQ ID NO: 1730319 - RNA, 19 nt, Artificial Sequence
  Description of Artificial Sequence: Synthetic oligonucleotide
aguuucaggacgguacucc

SEQ ID NO: 1730320 - RNA, 19 nt, Artificial Sequence
  Description of Artificial Sequence: Synthetic oligonucleotide
uaguaaccaacuuuuguga

SEQ ID NO: 1730321 - RNA, 19 nt, Artificial Sequence
  Description of Artificial Sequence: Synthetic oligonucleotide
uaguauaguaaccaacuuu

SEQ ID NO: 1730322 - RNA, 19 nt, Artificial Sequence
  Description of Artificial Sequence: Synthetic oligonucleotide
cuugaauugggcucccugc

SEQ ID NO: 1730323 - RNA, 19 nt, Artificial Sequence
  Description of Artificial Sequence: Synthetic oligonucleotide
auaggauuccggaagagag

SEQ ID NO: 1730324 - RNA, 19 nt, Artificial Sequence
  Description of Artificial Sequence: Synthetic oligonucleotide
aguaaccaacuuuugugag

SEQ ID NO: 1730325 - RNA, 19 nt, Artificial Sequence
  Description of Artificial Sequence: Synthetic oligonucleotide
gaauaguauaguaaccaac

SEQ ID NO: 1730326 - RNA, 19 nt, Artificial Sequence
  Description of Artificial Sequence: Synthetic oligonucleotide
uguuccaaauccuguacca

SEQ ID NO: 1730327 - RNA, 19 nt, Artificial Sequence
  Description of Artificial Sequence: Synthetic oligonucleotide
uuuggaucuguuaaagcua

SEQ ID NO: 1730328 - RNA, 19 nt, Artificial Sequence
  Description of Artificial Sequence: Synthetic oligonucleotide
guuguuugcaagccuuugg

SEQ ID NO: 1730329 - RNA, 19 nt, Artificial Sequence
  Description of Artificial Sequence: Synthetic oligonucleotide
uuggaucuguuaaagcuac

SEQ ID NO: 1730330 - RNA, 19 nt, Artificial Sequence
  Description of Artificial Sequence: Synthetic oligonucleotide
ucccucauaguugauauca

SEQ ID NO: 1730331 - RNA, 19 nt, Artificial Sequence
  Description of Artificial Sequence: Synthetic oligonucleotide
aaauacuagucccacuguu

SEQ ID NO: 1730332 - RNA, 19 nt, Artificial Sequence
  Description of Artificial Sequence: Synthetic oligonucleotide
uauuuagcccuucacccac

SEQ ID NO: 1730333 - RNA, 19 nt, Artificial Sequence
  Description of Artificial Sequence: Synthetic oligonucleotide
uucaggacgguacuccuug

SEQ ID NO: 1730334 - RNA, 19 nt, Artificial Sequence
  Description of Artificial Sequence: Synthetic oligonucleotide
uacccuuuacgaccaauag

SEQ ID NO: 1730335 - RNA, 19 nt, Artificial Sequence
  Description of Artificial Sequence: Synthetic oligonucleotide
uugagccauacccuuuacg

SEQ ID NO: 1730336 - RNA, 19 nt, Artificial Sequence
  Description of Artificial Sequence: Synthetic oligonucleotide
uaggaucugacauaggauu

SEQ ID NO: 1730337 - RNA, 19 nt, Artificial Sequence
  Description of Artificial Sequence: Synthetic oligonucleotide
auggaauaguauaguaacc

SEQ ID NO: 1730338 - RNA, 19 nt, Artificial Sequence
  Description of Artificial Sequence: Synthetic oligonucleotide
aguauaguaaccaacuuuu

SEQ ID NO: 1730339 - RNA, 19 nt, Artificial Sequence
  Description of Artificial Sequence: Synthetic oligonucleotide
cuguuaaagcuacuggggc

SEQ ID NO: 1730340 - RNA, 19 nt, Artificial Sequence
  Description of Artificial Sequence: Synthetic oligonucleotide
uguuggccaaacuccaucc

SEQ ID NO: 1730341 - RNA, 19 nt, Artificial Sequence
  Description of Artificial Sequence: Synthetic oligonucleotide
cuacauagacaauaacuuc

SEQ ID NO: 1730342 - RNA, 19 nt, Artificial Sequence
  Description of Artificial Sequence: Synthetic oligonucleotide
uguaccaaguccaguuccc

SEQ ID NO: 1730343 - RNA, 19 nt, Artificial Sequence
  Description of Artificial Sequence: Synthetic oligonucleotide
uugcaacgacucaucaugg

SEQ ID NO: 1730344 - RNA, 19 nt, Artificial Sequence
  Description of Artificial Sequence: Synthetic oligonucleotide
acaccuuaaacacccaaga

SEQ ID NO: 1730345 - RNA, 19 nt, Artificial Sequence
  Description of Artificial Sequence: Synthetic oligonucleotide
uuccuucgaguccauuucg

SEQ ID NO: 1730346 - RNA, 19 nt, Artificial Sequence
  Description of Artificial Sequence: Synthetic oligonucleotide
ccuauuuagcccuucaccc

SEQ ID NO: 1730347 - RNA, 19 nt, Artificial Sequence
  Description of Artificial Sequence: Synthetic oligonucleotide
uguuugcaagccuuuggcc

SEQ ID NO: 1730348 - RNA, 19 nt, Artificial Sequence
  Description of Artificial Sequence: Synthetic oligonucleotide
cccuuuacgaccaauagug

SEQ ID NO: 1730349 - RNA, 19 nt, Artificial Sequence
  Description of Artificial Sequence: Synthetic oligonucleotide
ggcucuuuauuaaacaccg

SEQ ID NO: 1730350 - RNA, 19 nt, Artificial Sequence
  Description of Artificial Sequence: Synthetic oligonucleotide
uuugcaagccuuuggccug

SEQ ID NO: 1730351 - RNA, 19 nt, Artificial Sequence
  Description of Artificial Sequence: Synthetic oligonucleotide
ugaguagguguaguaagag

SEQ ID NO: 1730352 - RNA, 19 nt, Artificial Sequence
  Description of Artificial Sequence: Synthetic oligonucleotide
cauuuggaucuguuaaagc

SEQ ID NO: 1730353 - RNA, 19 nt, Artificial Sequence
  Description of Artificial Sequence: Synthetic oligonucleotide
uuauaaugaguagguguag

SEQ ID NO: 1730354 - RNA, 19 nt, Artificial Sequence
  Description of Artificial Sequence: Synthetic oligonucleotide
uguaccaagaggcccucca

SEQ ID NO: 1730355 - RNA, 19 nt, Artificial Sequence
  Description of Artificial Sequence: Synthetic oligonucleotide
uauaaugaguagguguagu

SEQ ID NO: 1730356 - RNA, 19 nt, Artificial Sequence
  Description of Artificial Sequence: Synthetic oligonucleotide
gacaccuuaaacacccaag

SEQ ID NO: 1730357 - RNA, 19 nt, Artificial Sequence
  Description of Artificial Sequence: Synthetic oligonucleotide
ugaaguaguuuuggguggg

SEQ ID NO: 1730358 - RNA, 19 nt, Artificial Sequence
  Description of Artificial Sequence: Synthetic oligonucleotide
ugggcucuuuauuaaacac

SEQ ID NO: 1730359 - RNA, 19 nt, Artificial Sequence
  Description of Artificial Sequence: Synthetic oligonucleotide
accaacuuuugugagaaca

SEQ ID NO: 1730360 - RNA, 19 nt, Artificial Sequence
  Description of Artificial Sequence: Synthetic oligonucleotide
uucgaguccauuucgcaaa

SEQ ID NO: 1730361 - RNA, 19 nt, Artificial Sequence
  Description of Artificial Sequence: Synthetic oligonucleotide
gguguaaguuuauaaugag

SEQ ID NO: 1730362 - RNA, 19 nt, Artificial Sequence
  Description of Artificial Sequence: Synthetic oligonucleotide
auagugaagucugaaacaa

SEQ ID NO: 1730363 - RNA, 19 nt, Artificial Sequence
  Description of Artificial Sequence: Synthetic oligonucleotide
uccauagauggaauaguau

SEQ ID NO: 1730364 - RNA, 19 nt, Artificial Sequence
  Description of Artificial Sequence: Synthetic oligonucleotide
aagcccaaaauggcugucg

SEQ ID NO: 1730365 - RNA, 19 nt, Artificial Sequence
  Description of Artificial Sequence: Synthetic oligonucleotide
uuacgaccaauagugaagu

SEQ ID NO: 1730366 - RNA, 19 nt, Artificial Sequence
  Description of Artificial Sequence: Synthetic oligonucleotide
ucgcaaagcagcacgcaug

SEQ ID NO: 1730367 - RNA, 19 nt, Artificial Sequence
  Description of Artificial Sequence: Synthetic oligonucleotide
aacucucagggguuuguga

SEQ ID NO: 1730368 - RNA, 19 nt, Artificial Sequence
  Description of Artificial Sequence: Synthetic oligonucleotide
aucaucuacauagacaaua

SEQ ID NO: 1730369 - RNA, 19 nt, Artificial Sequence
  Description of Artificial Sequence: Synthetic oligonucleotide
ugguaauuuuagcaagguc

SEQ ID NO: 1730370 - RNA, 19 nt, Artificial Sequence
  Description of Artificial Sequence: Synthetic oligonucleotide
agguguaaguuuauaauga

SEQ ID NO: 1730371 - RNA, 19 nt, Artificial Sequence
  Description of Artificial Sequence: Synthetic oligonucleotide
auacuagucccacuguuau

SEQ ID NO: 1730372 - RNA, 19 nt, Artificial Sequence
  Description of Artificial Sequence: Synthetic oligonucleotide
uucacaucuccuucaaaau

SEQ ID NO: 1730373 - RNA, 19 nt, Artificial Sequence
  Description of Artificial Sequence: Synthetic oligonucleotide
uuuaucuguuggccaaacu

SEQ ID NO: 1730374 - RNA, 19 nt, Artificial Sequence
  Description of Artificial Sequence: Synthetic oligonucleotide
accgggauguuuuaucugu

SEQ ID NO: 1730375 - RNA, 19 nt, Artificial Sequence
  Description of Artificial Sequence: Synthetic oligonucleotide
gaucugacauaggauuccg

SEQ ID NO: 1730376 - RNA, 19 nt, Artificial Sequence
  Description of Artificial Sequence: Synthetic oligonucleotide
aucuuagguugguuguuuc

SEQ ID NO: 1730377 - RNA, 19 nt, Artificial Sequence
  Description of Artificial Sequence: Synthetic oligonucleotide
aaaauggcugucguaguau

SEQ ID NO: 1730378 - RNA, 19 nt, Artificial Sequence
  Description of Artificial Sequence: Synthetic oligonucleotide
auaaugaguagguguagua

SEQ ID NO: 1730379 - RNA, 19 nt, Artificial Sequence
  Description of Artificial Sequence: Synthetic oligonucleotide
aggcccuccaaucuuaggu

SEQ ID NO: 1730380 - RNA, 19 nt, Artificial Sequence
  Description of Artificial Sequence: Synthetic oligonucleotide
aacuucuuuccuucggaua

SEQ ID NO: 1730381 - RNA, 19 nt, Artificial Sequence
  Description of Artificial Sequence: Synthetic oligonucleotide
acgaccaauagugaagucu

SEQ ID NO: 1730382 - RNA, 19 nt, Artificial Sequence
  Description of Artificial Sequence: Synthetic oligonucleotide
uuuagcccuucacccacag

SEQ ID NO: 1730383 - RNA, 19 nt, Artificial Sequence
  Description of Artificial Sequence: Synthetic oligonucleotide
ucaucuugcaacgacucau

SEQ ID NO: 1730384 - RNA, 19 nt, Artificial Sequence
  Description of Artificial Sequence: Synthetic oligonucleotide
auagauugagccauacccu

SEQ ID NO: 1730385 - RNA, 19 nt, Artificial Sequence
  Description of Artificial Sequence: Synthetic oligonucleotide
aaagggugaguaugucaga

SEQ ID NO: 1730386 - RNA, 19 nt, Artificial Sequence
  Description of Artificial Sequence: Synthetic oligonucleotide
aguuuauaaugaguaggug

SEQ ID NO: 1730387 - RNA, 19 nt, Artificial Sequence
  Description of Artificial Sequence: Synthetic oligonucleotide
ucuuaggaucugacauagg

SEQ ID NO: 1730388 - RNA, 19 nt, Artificial Sequence
  Description of Artificial Sequence: Synthetic oligonucleotide
agggguuugugauuuggcu

SEQ ID NO: 1730389 - RNA, 19 nt, Artificial Sequence
  Description of Artificial Sequence: Synthetic oligonucleotide
aaauggcugucguaguauu

SEQ ID NO: 1730390 - RNA, 19 nt, Artificial Sequence
  Description of Artificial Sequence: Synthetic oligonucleotide
ucggucaucuugcaacgac

SEQ ID NO: 1730391 - RNA, 19 nt, Artificial Sequence
  Description of Artificial Sequence: Synthetic oligonucleotide
gaaaguaguugccuggccu

SEQ ID NO: 1730392 - RNA, 19 nt, Artificial Sequence
  Description of Artificial Sequence: Synthetic oligonucleotide
ggcgccaaagcccaaaaug

SEQ ID NO: 1730393 - RNA, 19 nt, Artificial Sequence
  Description of Artificial Sequence: Synthetic oligonucleotide
aauacuagucccacuguua

SEQ ID NO: 1730394 - RNA, 19 nt, Artificial Sequence
  Description of Artificial Sequence: Synthetic oligonucleotide
auugagccauacccuuuac

SEQ ID NO: 1730395 - RNA, 19 nt, Artificial Sequence
  Description of Artificial Sequence: Synthetic oligonucleotide
aaguaguuuugggugggug

SEQ ID NO: 1730396 - RNA, 19 nt, Artificial Sequence
  Description of Artificial Sequence: Synthetic oligonucleotide
uugauaucagcaagucgau

SEQ ID NO: 1730397 - RNA, 19 nt, Artificial Sequence
  Description of Artificial Sequence: Synthetic oligonucleotide
acuagucccacuguuauuu

SEQ ID NO: 1730398 - RNA, 19 nt, Artificial Sequence
  Description of Artificial Sequence: Synthetic oligonucleotide
ugguuaucaucuacauaga

SEQ ID NO: 1730399 - RNA, 19 nt, Artificial Sequence
  Description of Artificial Sequence: Synthetic oligonucleotide
uucgcaaagcagcacgcau

SEQ ID NO: 1730400 - RNA, 19 nt, Artificial Sequence
  Description of Artificial Sequence: Synthetic oligonucleotide
acaccgggauguuuuaucu

SEQ ID NO: 1730401 - RNA, 19 nt, Artificial Sequence
  Description of Artificial Sequence: Synthetic oligonucleotide
cuuuacgaccaauagugaa

SEQ ID NO: 1730402 - RNA, 19 nt, Artificial Sequence
  Description of Artificial Sequence: Synthetic oligonucleotide
ucgaguccauuucgcaaag

SEQ ID NO: 1730403 - RNA, 19 nt, Artificial Sequence
  Description of Artificial Sequence: Synthetic oligonucleotide
aggaucugacauaggauuc

SEQ ID NO: 1730404 - RNA, 19 nt, Artificial Sequence
  Description of Artificial Sequence: Synthetic oligonucleotide
cacgcauguucaaagcaac

SEQ ID NO: 1730405 - RNA, 19 nt, Artificial Sequence
  Description of Artificial Sequence: Synthetic oligonucleotide
uccaguucccagagucccg

SEQ ID NO: 1730406 - RNA, 19 nt, Artificial Sequence
  Description of Artificial Sequence: Synthetic oligonucleotide
ugauuuggcuguaccaguu

SEQ ID NO: 1730407 - RNA, 19 nt, Artificial Sequence
  Description of Artificial Sequence: Synthetic oligonucleotide
uggaaaguaguugccuggc

SEQ ID NO: 1730408 - RNA, 19 nt, Artificial Sequence
  Description of Artificial Sequence: Synthetic oligonucleotide
gaagcauuuggaucuguua

SEQ ID NO: 1730409 - RNA, 19 nt, Artificial Sequence
  Description of Artificial Sequence: Synthetic oligonucleotide
cuuccuucgaguccauuuc

SEQ ID NO: 1730410 - RNA, 19 nt, Artificial Sequence
  Description of Artificial Sequence: Synthetic oligonucleotide
guaacuucagccuuccuau

SEQ ID NO: 1730411 - RNA, 19 nt, Artificial Sequence
  Description of Artificial Sequence: Synthetic oligonucleotide
ucuugcaacgacucaucau

SEQ ID NO: 1730412 - RNA, 19 nt, Artificial Sequence
  Description of Artificial Sequence: Synthetic oligonucleotide
guaagcauuauuuucuauu

SEQ ID NO: 1730413 - RNA, 19 nt, Artificial Sequence
  Description of Artificial Sequence: Synthetic oligonucleotide
gagccauacccuuuacgac

SEQ ID NO: 1730414 - RNA, 19 nt, Artificial Sequence
  Description of Artificial Sequence: Synthetic oligonucleotide
ggcuccuguaccaagaggc

SEQ ID NO: 1730415 - RNA, 19 nt, Artificial Sequence
  Description of Artificial Sequence: Synthetic oligonucleotide
gcugucguaguauuaaauc

SEQ ID NO: 1730416 - RNA, 19 nt, Artificial Sequence
  Description of Artificial Sequence: Synthetic oligonucleotide
gacuauuaaggugcugcug

SEQ ID NO: 1730417 - RNA, 19 nt, Artificial Sequence
  Description of Artificial Sequence: Synthetic oligonucleotide
caucuacauagacaauaac

SEQ ID NO: 1730418 - RNA, 19 nt, Artificial Sequence
  Description of Artificial Sequence: Synthetic oligonucleotide
gguuaucaucuacauagac

SEQ ID NO: 1730419 - RNA, 19 nt, Artificial Sequence
  Description of Artificial Sequence: Synthetic oligonucleotide
uuagcccuucacccacagg

SEQ ID NO: 1730420 - RNA, 19 nt, Artificial Sequence
  Description of Artificial Sequence: Synthetic oligonucleotide
ugaguaugucagacuauua

SEQ ID NO: 1730421 - RNA, 19 nt, Artificial Sequence
  Description of Artificial Sequence: Synthetic oligonucleotide
uaguugauaucagcaaguc

SEQ ID NO: 1730422 - RNA, 19 nt, Artificial Sequence
  Description of Artificial Sequence: Synthetic oligonucleotide
cuggauguacaugguaagc

SEQ ID NO: 1730423 - RNA, 19 nt, Artificial Sequence
  Description of Artificial Sequence: Synthetic oligonucleotide
augggacaccuuaaacacc

SEQ ID NO: 1730424 - RNA, 19 nt, Artificial Sequence
  Description of Artificial Sequence: Synthetic oligonucleotide
ugccauuaagagucaucug

SEQ ID NO: 1730425 - RNA, 19 nt, Artificial Sequence
  Description of Artificial Sequence: Synthetic oligonucleotide
ccuucggauauguacaaug

SEQ ID NO: 1730426 - RNA, 19 nt, Artificial Sequence
  Description of Artificial Sequence: Synthetic oligonucleotide
ugcaacgacucaucaugga

SEQ ID NO: 1730427 - RNA, 19 nt, Artificial Sequence
  Description of Artificial Sequence: Synthetic oligonucleotide
cuccauccaauguaacuuc

SEQ ID NO: 1730428 - RNA, 19 nt, Artificial Sequence
  Description of Artificial Sequence: Synthetic oligonucleotide
aucuugcaacgacucauca

SEQ ID NO: 1730429 - RNA, 19 nt, Artificial Sequence
  Description of Artificial Sequence: Synthetic oligonucleotide
gauugagccauacccuuua

SEQ ID NO: 1730430 - RNA, 19 nt, Artificial Sequence
  Description of Artificial Sequence: Synthetic oligonucleotide
gcgccaaagcccaaaaugg

SEQ ID NO: 1730431 - RNA, 19 nt, Artificial Sequence
  Description of Artificial Sequence: Synthetic oligonucleotide
guucccagagucccgggug

SEQ ID NO: 1730432 - RNA, 19 nt, Artificial Sequence
  Description of Artificial Sequence: Synthetic oligonucleotide
aggucauccauagauggaa

SEQ ID NO: 1730433 - RNA, 19 nt, Artificial Sequence
  Description of Artificial Sequence: Synthetic oligonucleotide
ucgaucugggcucuuuauu

SEQ ID NO: 1730434 - RNA, 19 nt, Artificial Sequence
  Description of Artificial Sequence: Synthetic oligonucleotide
caacgacucaucauggaaa

SEQ ID NO: 1730435 - RNA, 19 nt, Artificial Sequence
  Description of Artificial Sequence: Synthetic oligonucleotide
accaguuguuugcaagccu

SEQ ID NO: 1730436 - RNA, 19 nt, Artificial Sequence
  Description of Artificial Sequence: Synthetic oligonucleotide
ucccuuuucauugguaauu

SEQ ID NO: 1730437 - RNA, 19 nt, Artificial Sequence
  Description of Artificial Sequence: Synthetic oligonucleotide
gaagucugaaacaaugcau

SEQ ID NO: 1730438 - RNA, 19 nt, Artificial Sequence
  Description of Artificial Sequence: Synthetic oligonucleotide
gcagcacgcauguucaaag

SEQ ID NO: 1730439 - RNA, 19 nt, Artificial Sequence
  Description of Artificial Sequence: Synthetic oligonucleotide
gcauuuggaucuguuaaag

SEQ ID NO: 1730440 - RNA, 19 nt, Artificial Sequence
  Description of Artificial Sequence: Synthetic oligonucleotide
uccaaucuucccucauagu

SEQ ID NO: 1730441 - RNA, 19 nt, Artificial Sequence
  Description of Artificial Sequence: Synthetic oligonucleotide
caaagaugccuguccagca

SEQ ID NO: 1730442 - RNA, 19 nt, Artificial Sequence
  Description of Artificial Sequence: Synthetic oligonucleotide
ggaauaguauaguaaccaa

SEQ ID NO: 1730443 - RNA, 19 nt, Artificial Sequence
  Description of Artificial Sequence: Synthetic oligonucleotide
uagguugguuguuuccaaa

SEQ ID NO: 1730444 - RNA, 19 nt, Artificial Sequence
  Description of Artificial Sequence: Synthetic oligonucleotide
ucuucccucauaguugaua

SEQ ID NO: 1730445 - RNA, 19 nt, Artificial Sequence
  Description of Artificial Sequence: Synthetic oligonucleotide
aggacgguacuccuugaau

SEQ ID NO: 1730446 - RNA, 19 nt, Artificial Sequence
  Description of Artificial Sequence: Synthetic oligonucleotide
agggugaguaugucagacu

SEQ ID NO: 1730447 - RNA, 19 nt, Artificial Sequence
  Description of Artificial Sequence: Synthetic oligonucleotide
ugaauugggcucccugcuu

SEQ ID NO: 1730448 - RNA, 19 nt, Artificial Sequence
  Description of Artificial Sequence: Synthetic oligonucleotide
uggauugguugguuucagu

SEQ ID NO: 1730449 - RNA, 19 nt, Artificial Sequence
  Description of Artificial Sequence: Synthetic oligonucleotide
agcccaaaauggcugucgu

SEQ ID NO: 1730450 - RNA, 19 nt, Artificial Sequence
  Description of Artificial Sequence: Synthetic oligonucleotide
acauaggauuccggaagag

SEQ ID NO: 1730451 - RNA, 19 nt, Artificial Sequence
  Description of Artificial Sequence: Synthetic oligonucleotide
gaggcccuccaaucuuagg

SEQ ID NO: 1730452 - RNA, 19 nt, Artificial Sequence
  Description of Artificial Sequence: Synthetic oligonucleotide
cugacauaggauuccggaa

SEQ ID NO: 1730453 - RNA, 19 nt, Artificial Sequence
  Description of Artificial Sequence: Synthetic oligonucleotide
accaauagugaagucugaa

SEQ ID NO: 1730454 - RNA, 19 nt, Artificial Sequence
  Description of Artificial Sequence: Synthetic oligonucleotide
gcuuuugguuaucaucuac

SEQ ID NO: 1730455 - RNA, 19 nt, Artificial Sequence
  Description of Artificial Sequence: Synthetic oligonucleotide
gggcucuuuauuaaacacc

SEQ ID NO: 1730456 - RNA, 19 nt, Artificial Sequence
  Description of Artificial Sequence: Synthetic oligonucleotide
cuucgaguccauuucgcaa

SEQ ID NO: 1730457 - RNA, 19 nt, Artificial Sequence
  Description of Artificial Sequence: Synthetic oligonucleotide
auggcugucguaguauuaa

SEQ ID NO: 1730458 - RNA, 19 nt, Artificial Sequence
  Description of Artificial Sequence: Synthetic oligonucleotide
agaauccugaaggccauau

SEQ ID NO: 1730459 - RNA, 19 nt, Artificial Sequence
  Description of Artificial Sequence: Synthetic oligonucleotide
cuagucccacuguuauuug

SEQ ID NO: 1730460 - RNA, 19 nt, Artificial Sequence
  Description of Artificial Sequence: Synthetic oligonucleotide
ugauaucagcaagucgauc

SEQ ID NO: 1730461 - RNA, 19 nt, Artificial Sequence
  Description of Artificial Sequence: Synthetic oligonucleotide
cuucggauauguacaaugu

SEQ ID NO: 1730462 - RNA, 19 nt, Artificial Sequence
  Description of Artificial Sequence: Synthetic oligonucleotide
cuauuaaggugcugcugga

SEQ ID NO: 1730463 - RNA, 19 nt, Artificial Sequence
  Description of Artificial Sequence: Synthetic oligonucleotide
uggccugacucuuguggca

SEQ ID NO: 1730464 - RNA, 19 nt, Artificial Sequence
  Description of Artificial Sequence: Synthetic oligonucleotide
guuaaagcuacuggggccu

SEQ ID NO: 1730465 - RNA, 19 nt, Artificial Sequence
  Description of Artificial Sequence: Synthetic oligonucleotide
acauagacaauaacuucuu

SEQ ID NO: 1730466 - RNA, 19 nt, Artificial Sequence
  Description of Artificial Sequence: Synthetic oligonucleotide
aaacacccaagaaccaguu

SEQ ID NO: 1730467 - RNA, 19 nt, Artificial Sequence
  Description of Artificial Sequence: Synthetic oligonucleotide
agguguaguaagagccuuc

SEQ ID NO: 1730468 - RNA, 19 nt, Artificial Sequence
  Description of Artificial Sequence: Synthetic oligonucleotide
auccauagauggaauagua

SEQ ID NO: 1730469 - RNA, 19 nt, Artificial Sequence
  Description of Artificial Sequence: Synthetic oligonucleotide
ucagacuauuaaggugcug

SEQ ID NO: 1730470 - RNA, 19 nt, Artificial Sequence
  Description of Artificial Sequence: Synthetic oligonucleotide
uggaucuguuaaagcuacu

SEQ ID NO: 1730471 - RNA, 19 nt, Artificial Sequence
  Description of Artificial Sequence: Synthetic oligonucleotide
aauggcugucguaguauua

SEQ ID NO: 1730472 - RNA, 19 nt, Artificial Sequence
  Description of Artificial Sequence: Synthetic oligonucleotide
uuccggaagagaggggagu

SEQ ID NO: 1730473 - RNA, 19 nt, Artificial Sequence
  Description of Artificial Sequence: Synthetic oligonucleotide
gggugaguaugucagacua

SEQ ID NO: 1730474 - RNA, 19 nt, Artificial Sequence
  Description of Artificial Sequence: Synthetic oligonucleotide
uggcugucguaguauuaaa

SEQ ID NO: 1730475 - RNA, 19 nt, Artificial Sequence
  Description of Artificial Sequence: Synthetic oligonucleotide
uagguguaguaagagccuu

SEQ ID NO: 1730476 - RNA, 19 nt, Artificial Sequence
  Description of Artificial Sequence: Synthetic oligonucleotide
guugccuggccugcagggg

SEQ ID NO: 1730477 - RNA, 19 nt, Artificial Sequence
  Description of Artificial Sequence: Synthetic oligonucleotide
ucaggacgguacuccuuga

SEQ ID NO: 1730478 - RNA, 19 nt, Artificial Sequence
  Description of Artificial Sequence: Synthetic oligonucleotide
auacccuuuacgaccaaua

SEQ ID NO: 1730479 - RNA, 19 nt, Artificial Sequence
  Description of Artificial Sequence: Synthetic oligonucleotide
caccgggauguuuuaucug

SEQ ID NO: 1730480 - RNA, 19 nt, Artificial Sequence
  Description of Artificial Sequence: Synthetic oligonucleotide
uccggaagagaggggaguc

SEQ ID NO: 1730481 - RNA, 19 nt, Artificial Sequence
  Description of Artificial Sequence: Synthetic oligonucleotide
uagcaaggucauccauaga

SEQ ID NO: 1730482 - RNA, 19 nt, Artificial Sequence
  Description of Artificial Sequence: Synthetic oligonucleotide
uccaaagggugaguauguc

SEQ ID NO: 1730483 - RNA, 19 nt, Artificial Sequence
  Description of Artificial Sequence: Synthetic oligonucleotide
uggugucguccacacugcu

SEQ ID NO: 1730484 - RNA, 19 nt, Artificial Sequence
  Description of Artificial Sequence: Synthetic oligonucleotide
caccuuaaacacccaagaa

SEQ ID NO: 1730485 - RNA, 19 nt, Artificial Sequence
  Description of Artificial Sequence: Synthetic oligonucleotide
uucccucauaguugauauc

SEQ ID NO: 1730486 - RNA, 19 nt, Artificial Sequence
  Description of Artificial Sequence: Synthetic oligonucleotide
gcaacgacucaucauggaa

SEQ ID NO: 1730487 - RNA, 19 nt, Artificial Sequence
  Description of Artificial Sequence: Synthetic oligonucleotide
uacgaccaauagugaaguc

SEQ ID NO: 1730488 - RNA, 19 nt, Artificial Sequence
  Description of Artificial Sequence: Synthetic oligonucleotide
cagcaagucgaucugggcu

SEQ ID NO: 1730489 - RNA, 19 nt, Artificial Sequence
  Description of Artificial Sequence: Synthetic oligonucleotide
agucgaucugggcucuuua

SEQ ID NO: 1730490 - RNA, 19 nt, Artificial Sequence
  Description of Artificial Sequence: Synthetic oligonucleotide
uacuagucccacuguuauu

SEQ ID NO: 1730491 - RNA, 19 nt, Artificial Sequence
  Description of Artificial Sequence: Synthetic oligonucleotide
aaccaguuucaggacggua

SEQ ID NO: 1730492 - RNA, 19 nt, Artificial Sequence
  Description of Artificial Sequence: Synthetic oligonucleotide
gugauuuggcuguaccagu

SEQ ID NO: 1730493 - RNA, 19 nt, Artificial Sequence
  Description of Artificial Sequence: Synthetic oligonucleotide
gacucuuguggcagggcga

SEQ ID NO: 1730494 - RNA, 19 nt, Artificial Sequence
  Description of Artificial Sequence: Synthetic oligonucleotide
agauguuuccucacugcuu

SEQ ID NO: 1730495 - RNA, 19 nt, Artificial Sequence
  Description of Artificial Sequence: Synthetic oligonucleotide
gcgagguguaaguuuauaa

SEQ ID NO: 1730496 - RNA, 19 nt, Artificial Sequence
  Description of Artificial Sequence: Synthetic oligonucleotide
ggaaagauguuuccucacu

SEQ ID NO: 1730497 - RNA, 19 nt, Artificial Sequence
  Description of Artificial Sequence: Synthetic oligonucleotide
cuuguggcagggcgaggug

SEQ ID NO: 1730498 - RNA, 19 nt, Artificial Sequence
  Description of Artificial Sequence: Synthetic oligonucleotide
uaacuucagccuuccuauu

SEQ ID NO: 1730499 - RNA, 19 nt, Artificial Sequence
  Description of Artificial Sequence: Synthetic oligonucleotide
aagcagcacgcauguucaa

SEQ ID NO: 1730500 - RNA, 19 nt, Artificial Sequence
  Description of Artificial Sequence: Synthetic oligonucleotide
ccuugaauugggcucccug

SEQ ID NO: 1730501 - RNA, 19 nt, Artificial Sequence
  Description of Artificial Sequence: Synthetic oligonucleotide
cuuccaaucuucccucaua

SEQ ID NO: 1730502 - RNA, 19 nt, Artificial Sequence
  Description of Artificial Sequence: Synthetic oligonucleotide
gauguacaugguaagcauu

SEQ ID NO: 1730503 - RNA, 19 nt, Artificial Sequence
  Description of Artificial Sequence: Synthetic oligonucleotide
uaguuuuggguggguguuc

SEQ ID NO: 1730504 - RNA, 19 nt, Artificial Sequence
  Description of Artificial Sequence: Synthetic oligonucleotide
agcagcacgcauguucaaa

SEQ ID NO: 1730505 - RNA, 19 nt, Artificial Sequence
  Description of Artificial Sequence: Synthetic oligonucleotide
ugguugguuucagucucuc

SEQ ID NO: 1730506 - RNA, 19 nt, Artificial Sequence
  Description of Artificial Sequence: Synthetic oligonucleotide
aguaguugccuggccugca

SEQ ID NO: 1730507 - RNA, 19 nt, Artificial Sequence
  Description of Artificial Sequence: Synthetic oligonucleotide
aagucgaucugggcucuuu

SEQ ID NO: 1730508 - RNA, 19 nt, Artificial Sequence
  Description of Artificial Sequence: Synthetic oligonucleotide
guaccaagaggcccuccaa

SEQ ID NO: 1730509 - RNA, 19 nt, Artificial Sequence
  Description of Artificial Sequence: Synthetic oligonucleotide
acaaugcauucucccuuuu

SEQ ID NO: 1730510 - RNA, 19 nt, Artificial Sequence
  Description of Artificial Sequence: Synthetic oligonucleotide
guaccaaguccaguuccca

SEQ ID NO: 1730511 - RNA, 19 nt, Artificial Sequence
  Description of Artificial Sequence: Synthetic oligonucleotide
cauccauagauggaauagu

SEQ ID NO: 1730512 - RNA, 19 nt, Artificial Sequence
  Description of Artificial Sequence: Synthetic oligonucleotide
gugaguaugucagacuauu

SEQ ID NO: 1730513 - RNA, 19 nt, Artificial Sequence
  Description of Artificial Sequence: Synthetic oligonucleotide
cuccaaagggugaguaugu

SEQ ID NO: 1730514 - RNA, 19 nt, Artificial Sequence
  Description of Artificial Sequence: Synthetic oligonucleotide
uccuucggauauguacaau

SEQ ID NO: 1730515 - RNA, 19 nt, Artificial Sequence
  Description of Artificial Sequence: Synthetic oligonucleotide
agauugagccauacccuuu

SEQ ID NO: 1730516 - RNA, 19 nt, Artificial Sequence
  Description of Artificial Sequence: Synthetic oligonucleotide
ggacaccuuaaacacccaa

SEQ ID NO: 1730517 - RNA, 19 nt, Artificial Sequence
  Description of Artificial Sequence: Synthetic oligonucleotide
ggaggugcagguuugccau

SEQ ID NO: 1730518 - RNA, 19 nt, Artificial Sequence
  Description of Artificial Sequence: Synthetic oligonucleotide
gguguaguaagagccuucu

SEQ ID NO: 1730519 - RNA, 19 nt, Artificial Sequence
  Description of Artificial Sequence: Synthetic oligonucleotide
guaguuuuggguggguguu

SEQ ID NO: 1730520 - RNA, 19 nt, Artificial Sequence
  Description of Artificial Sequence: Synthetic oligonucleotide
ccuucgaguccauuucgca

SEQ ID NO: 1730521 - RNA, 19 nt, Artificial Sequence
  Description of Artificial Sequence: Synthetic oligonucleotide
agucccgggugcuggcuua

SEQ ID NO: 1730522 - RNA, 19 nt, Artificial Sequence
  Description of Artificial Sequence: Synthetic oligonucleotide
cuguaccaagaggcccucc

SEQ ID NO: 1730523 - RNA, 19 nt, Artificial Sequence
  Description of Artificial Sequence: Synthetic oligonucleotide
cgggauguuuuaucuguug

SEQ ID NO: 1730524 - RNA, 19 nt, Artificial Sequence
  Description of Artificial Sequence: Synthetic oligonucleotide
ccuuuacgaccaauaguga

SEQ ID NO: 1730525 - RNA, 19 nt, Artificial Sequence
  Description of Artificial Sequence: Synthetic oligonucleotide
caacuuuugugagaacaau

SEQ ID NO: 1730526 - RNA, 19 nt, Artificial Sequence
  Description of Artificial Sequence: Synthetic oligonucleotide
gccauacccuuuacgacca

SEQ ID NO: 1730527 - RNA, 19 nt, Artificial Sequence
  Description of Artificial Sequence: Synthetic oligonucleotide
caggacgguacuccuugaa

SEQ ID NO: 1730528 - RNA, 19 nt, Artificial Sequence
  Description of Artificial Sequence: Synthetic oligonucleotide
ucccagagucccgggugcu

SEQ ID NO: 1730529 - RNA, 19 nt, Artificial Sequence
  Description of Artificial Sequence: Synthetic oligonucleotide
gcaaaggugcagucuucaa

SEQ ID NO: 1730530 - RNA, 19 nt, Artificial Sequence
  Description of Artificial Sequence: Synthetic oligonucleotide
ccgggugcuggcuuacuuc

SEQ ID NO: 1730531 - RNA, 19 nt, Artificial Sequence
  Description of Artificial Sequence: Synthetic oligonucleotide
cucccuuuucauugguaau

SEQ ID NO: 1730532 - RNA, 19 nt, Artificial Sequence
  Description of Artificial Sequence: Synthetic oligonucleotide
cacuguuauuugugccaaa

SEQ ID NO: 1730533 - RNA, 19 nt, Artificial Sequence
  Description of Artificial Sequence: Synthetic oligonucleotide
cacccagagcuguuccaaa

SEQ ID NO: 1730534 - RNA, 19 nt, Artificial Sequence
  Description of Artificial Sequence: Synthetic oligonucleotide
gucagacuauuaaggugcu

SEQ ID NO: 1730535 - RNA, 19 nt, Artificial Sequence
  Description of Artificial Sequence: Synthetic oligonucleotide
cgagguguaaguuuauaau

SEQ ID NO: 1730536 - RNA, 19 nt, Artificial Sequence
  Description of Artificial Sequence: Synthetic oligonucleotide
caagaggcccuccaaucuu

SEQ ID NO: 1730537 - RNA, 19 nt, Artificial Sequence
  Description of Artificial Sequence: Synthetic oligonucleotide
ggcagggcgagguguaagu

SEQ ID NO: 1730538 - RNA, 19 nt, Artificial Sequence
  Description of Artificial Sequence: Synthetic oligonucleotide
cagggcgagguguaaguuu

SEQ ID NO: 1730539 - RNA, 19 nt, Artificial Sequence
  Description of Artificial Sequence: Synthetic oligonucleotide
cucggucaucuugcaacga

SEQ ID NO: 1730540 - RNA, 19 nt, Artificial Sequence
  Description of Artificial Sequence: Synthetic oligonucleotide
gguuugccauuaagaguca

SEQ ID NO: 1730541 - RNA, 19 nt, Artificial Sequence
  Description of Artificial Sequence: Synthetic oligonucleotide
caacuucuuugaaguaguu

SEQ ID NO: 1730542 - RNA, 19 nt, Artificial Sequence
  Description of Artificial Sequence: Synthetic oligonucleotide
caguuguuugcaagccuuu

SEQ ID NO: 1730543 - RNA, 19 nt, Artificial Sequence
  Description of Artificial Sequence: Synthetic oligonucleotide
caaucuuagguugguuguu

SEQ ID NO: 1730544 - RNA, 19 nt, Artificial Sequence
  Description of Artificial Sequence: Synthetic oligonucleotide
cauacccuuuacgaccaau

SEQ ID NO: 1730545 - RNA, 19 nt, Artificial Sequence
  Description of Artificial Sequence: Synthetic oligonucleotide
cgcauguucaaagcaacaa

SEQ ID NO: 1730546 - RNA, 19 nt, Artificial Sequence
  Description of Artificial Sequence: Synthetic oligonucleotide
cucucagggguuugugauu

SEQ ID NO: 1730547 - RNA, 19 nt, Artificial Sequence
  Description of Artificial Sequence: Synthetic oligonucleotide
ggcugucguaguauuaaau

SEQ ID NO: 1730548 - RNA, 19 nt, Artificial Sequence
  Description of Artificial Sequence: Synthetic oligonucleotide
gcacccagagcuguuccaa

SEQ ID NO: 1730549 - RNA, 19 nt, Artificial Sequence
  Description of Artificial Sequence: Synthetic oligonucleotide
gcccaaaauggcugucgua

SEQ ID NO: 1730550 - RNA, 19 nt, Artificial Sequence
  Description of Artificial Sequence: Synthetic oligonucleotide
aggggccccaaaggcuccu

SEQ ID NO: 1730551 - RNA, 19 nt, Artificial Sequence
  Description of Artificial Sequence: Synthetic oligonucleotide
ucccgggugcuggcuuacu

SEQ ID NO: 1730552 - RNA, 19 nt, Artificial Sequence
  Description of Artificial Sequence: Synthetic oligonucleotide
ggggcgccaaagcccaaaa

SEQ ID NO: 1730553 - RNA, 19 nt, Artificial Sequence
  Description of Artificial Sequence: Synthetic oligonucleotide
ggugaguaugucagacuau

SEQ ID NO: 1730554 - RNA, 19 nt, Artificial Sequence
  Description of Artificial Sequence: Synthetic oligonucleotide
ggcgagguguaaguuuaua

SEQ ID NO: 1730555 - RNA, 19 nt, Artificial Sequence
  Description of Artificial Sequence: Synthetic oligonucleotide
cugcuggauugguugguuu

SEQ ID NO: 1730556 - RNA, 19 nt, Artificial Sequence
  Description of Artificial Sequence: Synthetic oligonucleotide
ggucauccauagauggaau

SEQ ID NO: 1730557 - RNA, 19 nt, Artificial Sequence
  Description of Artificial Sequence: Synthetic oligonucleotide
aucuucccucauaguugau

SEQ ID NO: 1730558 - RNA, 19 nt, Artificial Sequence
  Description of Artificial Sequence: Synthetic oligonucleotide
gucccgggugcuggcuuac

SEQ ID NO: 1730559 - RNA, 19 nt, Artificial Sequence
  Description of Artificial Sequence: Synthetic oligonucleotide
cgcaaagcagcacgcaugu

SEQ ID NO: 1730560 - RNA, 19 nt, Artificial Sequence
  Description of Artificial Sequence: Synthetic oligonucleotide
gguuugugauuuggcugua

SEQ ID NO: 1730561 - RNA, 19 nt, Artificial Sequence
  Description of Artificial Sequence: Synthetic oligonucleotide
cagaauccugaaggccaua

SEQ ID NO: 1730562 - RNA, 19 nt, Artificial Sequence
  Description of Artificial Sequence: Synthetic oligonucleotide
cggucaucuugcaacgacu

SEQ ID NO: 1730563 - RNA, 19 nt, Artificial Sequence
  Description of Artificial Sequence: Synthetic oligonucleotide
gggcgccaaagcccaaaau

SEQ ID NO: 1730564 - RNA, 19 nt, Artificial Sequence
  Description of Artificial Sequence: Synthetic oligonucleotide
gcaagccuuuggccugacu

SEQ ID NO: 1730565 - RNA, 19 nt, Artificial Sequence
  Description of Artificial Sequence: Synthetic oligonucleotide
gcagggcgagguguaaguu

SEQ ID NO: 1730566 - RNA, 19 nt, Artificial Sequence
  Description of Artificial Sequence: Synthetic oligonucleotide
ccgggauguuuuaucuguu

SEQ ID NO: 1730567 - RNA, 19 nt, Artificial Sequence
  Description of Artificial Sequence: Synthetic oligonucleotide
ccggaagagaggggagucu

SEQ ID NO: 1730568 - RNA, 19 nt, Artificial Sequence
  Description of Artificial Sequence: Synthetic oligonucleotide
ccauacccuuuacgaccaa

SEQ ID NO: 1730569 - RNA, 19 nt, Artificial Sequence
  Description of Artificial Sequence: Synthetic oligonucleotide
gggcgagguguaaguuuau

SEQ ID NO: 1730570 - RNA, 19 nt, Artificial Sequence
  Description of Artificial Sequence: Synthetic oligonucleotide
cccgggugcuggcuuacuu

SEQ ID NO: 1730571 - RNA, 19 nt, Artificial Sequence
  Description of Artificial Sequence: Synthetic oligonucleotide
aauucuaucucccagagag

SEQ ID NO: 1730572 - RNA, 19 nt, Artificial Sequence
  Description of Artificial Sequence: Synthetic oligonucleotide
uuagcuauaauauacaucu

SEQ ID NO: 1730573 - RNA, 19 nt, Artificial Sequence
  Description of Artificial Sequence: Synthetic oligonucleotide
aauaaacucaagcuacagc

SEQ ID NO: 1730574 - RNA, 19 nt, Artificial Sequence
  Description of Artificial Sequence: Synthetic oligonucleotide
aaugccaagucuuuucccc

SEQ ID NO: 1730575 - RNA, 19 nt, Artificial Sequence
  Description of Artificial Sequence: Synthetic oligonucleotide
ugaaccaucgucaucaaag

SEQ ID NO: 1730576 - RNA, 19 nt, Artificial Sequence
  Description of Artificial Sequence: Synthetic oligonucleotide
aaaccggaagcacaaaccc

SEQ ID NO: 1730577 - RNA, 19 nt, Artificial Sequence
  Description of Artificial Sequence: Synthetic oligonucleotide
auaaacucaagcuacagca

SEQ ID NO: 1730578 - RNA, 19 nt, Artificial Sequence
  Description of Artificial Sequence: Synthetic oligonucleotide
aauauacaucuucaacagc

SEQ ID NO: 1730579 - RNA, 19 nt, Artificial Sequence
  Description of Artificial Sequence: Synthetic oligonucleotide
aauaauuucuaaaccacuc

SEQ ID NO: 1730580 - RNA, 19 nt, Artificial Sequence
  Description of Artificial Sequence: Synthetic oligonucleotide
ucaagcuacagcaaaccgg

SEQ ID NO: 1730581 - RNA, 19 nt, Artificial Sequence
  Description of Artificial Sequence: Synthetic oligonucleotide
uagagaaucugcaacagca

SEQ ID NO: 1730582 - RNA, 19 nt, Artificial Sequence
  Description of Artificial Sequence: Synthetic oligonucleotide
aaugaaaauuuucuucaug

SEQ ID NO: 1730583 - RNA, 19 nt, Artificial Sequence
  Description of Artificial Sequence: Synthetic oligonucleotide
uauaugaucgacuuucugu

SEQ ID NO: 1730584 - RNA, 19 nt, Artificial Sequence
  Description of Artificial Sequence: Synthetic oligonucleotide
guuguuugcacauuuacug

SEQ ID NO: 1730585 - RNA, 19 nt, Artificial Sequence
  Description of Artificial Sequence: Synthetic oligonucleotide
ugaagaugcgaauuggucc

SEQ ID NO: 1730586 - RNA, 19 nt, Artificial Sequence
  Description of Artificial Sequence: Synthetic oligonucleotide
aaauauauggucauggaau

SEQ ID NO: 1730587 - RNA, 19 nt, Artificial Sequence
  Description of Artificial Sequence: Synthetic oligonucleotide
gauucuacggagcaucgcg

SEQ ID NO: 1730588 - RNA, 19 nt, Artificial Sequence
  Description of Artificial Sequence: Synthetic oligonucleotide
aaaccacucuauaugaucg

SEQ ID NO: 1730589 - RNA, 19 nt, Artificial Sequence
  Description of Artificial Sequence: Synthetic oligonucleotide
uucuguuuaacacucagau

SEQ ID NO: 1730590 - RNA, 19 nt, Artificial Sequence
  Description of Artificial Sequence: Synthetic oligonucleotide
ugcuucaucagcaaacgcc

SEQ ID NO: 1730591 - RNA, 19 nt, Artificial Sequence
  Description of Artificial Sequence: Synthetic oligonucleotide
uguccauuggaucaucucc

SEQ ID NO: 1730592 - RNA, 19 nt, Artificial Sequence
  Description of Artificial Sequence: Synthetic oligonucleotide
uuagcaaauucuaucuccc

SEQ ID NO: 1730593 - RNA, 19 nt, Artificial Sequence
  Description of Artificial Sequence: Synthetic oligonucleotide
ucuaaaccacucuauauga

SEQ ID NO: 1730594 - RNA, 19 nt, Artificial Sequence
  Description of Artificial Sequence: Synthetic oligonucleotide
aaccaucgucaucaaagcc

SEQ ID NO: 1730595 - RNA, 19 nt, Artificial Sequence
  Description of Artificial Sequence: Synthetic oligonucleotide
auauuauuuucuguccugc

SEQ ID NO: 1730596 - RNA, 19 nt, Artificial Sequence
  Description of Artificial Sequence: Synthetic oligonucleotide
aauauauggucauggaauu

SEQ ID NO: 1730597 - RNA, 19 nt, Artificial Sequence
  Description of Artificial Sequence: Synthetic oligonucleotide
ucgacuuucuguuuaacac

SEQ ID NO: 1730598 - RNA, 19 nt, Artificial Sequence
  Description of Artificial Sequence: Synthetic oligonucleotide
uccuuaagaauaucuaaca

SEQ ID NO: 1730599 - RNA, 19 nt, Artificial Sequence
  Description of Artificial Sequence: Synthetic oligonucleotide
aauugguccuugcuugggg

SEQ ID NO: 1730600 - RNA, 19 nt, Artificial Sequence
  Description of Artificial Sequence: Synthetic oligonucleotide
uugcuauagaugcagcugc

SEQ ID NO: 1730601 - RNA, 19 nt, Artificial Sequence
  Description of Artificial Sequence: Synthetic oligonucleotide
agaauuguccauuuccuca

SEQ ID NO: 1730602 - RNA, 19 nt, Artificial Sequence
  Description of Artificial Sequence: Synthetic oligonucleotide
aucuccucaaauccauucc

SEQ ID NO: 1730603 - RNA, 19 nt, Artificial Sequence
  Description of Artificial Sequence: Synthetic oligonucleotide
ugggaaauuucauuggcug

SEQ ID NO: 1730604 - RNA, 19 nt, Artificial Sequence
  Description of Artificial Sequence: Synthetic oligonucleotide
acgguagagaaucugcaac

SEQ ID NO: 1730605 - RNA, 19 nt, Artificial Sequence
  Description of Artificial Sequence: Synthetic oligonucleotide
aacagcuuaaaugaaaauu

SEQ ID NO: 1730606 - RNA, 19 nt, Artificial Sequence
  Description of Artificial Sequence: Synthetic oligonucleotide
auuuacugugcucaguuca

SEQ ID NO: 1730607 - RNA, 19 nt, Artificial Sequence
  Description of Artificial Sequence: Synthetic oligonucleotide
auauacaucuucaacagcu

SEQ ID NO: 1730608 - RNA, 19 nt, Artificial Sequence
  Description of Artificial Sequence: Synthetic oligonucleotide
aaauaaacucaagcuacag

SEQ ID NO: 1730609 - RNA, 19 nt, Artificial Sequence
  Description of Artificial Sequence: Synthetic oligonucleotide
gauauuaugugcgggaaac

SEQ ID NO: 1730610 - RNA, 19 nt, Artificial Sequence
  Description of Artificial Sequence: Synthetic oligonucleotide
cuaucucccagagagaagg

SEQ ID NO: 1730611 - RNA, 19 nt, Artificial Sequence
  Description of Artificial Sequence: Synthetic oligonucleotide
ucugauauuaugugcggga

SEQ ID NO: 1730612 - RNA, 19 nt, Artificial Sequence
  Description of Artificial Sequence: Synthetic oligonucleotide
cuucugggaaauuucauug

SEQ ID NO: 1730613 - RNA, 19 nt, Artificial Sequence
  Description of Artificial Sequence: Synthetic oligonucleotide
ugcuucguuguuaacuggg

SEQ ID NO: 1730614 - RNA, 19 nt, Artificial Sequence
  Description of Artificial Sequence: Synthetic oligonucleotide
ugcuuagcaaauucuaucu

SEQ ID NO: 1730615 - RNA, 19 nt, Artificial Sequence
  Description of Artificial Sequence: Synthetic oligonucleotide
ucauuaaaauaauuucuaa

SEQ ID NO: 1730616 - RNA, 19 nt, Artificial Sequence
  Description of Artificial Sequence: Synthetic oligonucleotide
cuuguacuaacucuugcag

SEQ ID NO: 1730617 - RNA, 19 nt, Artificial Sequence
  Description of Artificial Sequence: Synthetic oligonucleotide
ucuuguacuaacucuugca

SEQ ID NO: 1730618 - RNA, 19 nt, Artificial Sequence
  Description of Artificial Sequence: Synthetic oligonucleotide
uccaugaagaugcgaauug

SEQ ID NO: 1730619 - RNA, 19 nt, Artificial Sequence
  Description of Artificial Sequence: Synthetic oligonucleotide
uguuguuugcacauuuacu

SEQ ID NO: 1730620 - RNA, 19 nt, Artificial Sequence
  Description of Artificial Sequence: Synthetic oligonucleotide
ucaacuuucauguccuuaa

SEQ ID NO: 1730621 - RNA, 19 nt, Artificial Sequence
  Description of Artificial Sequence: Synthetic oligonucleotide
uucuaugccugcuaacugc

SEQ ID NO: 1730622 - RNA, 19 nt, Artificial Sequence
  Description of Artificial Sequence: Synthetic oligonucleotide
ugaagggaagaauugucca

SEQ ID NO: 1730623 - RNA, 19 nt, Artificial Sequence
  Description of Artificial Sequence: Synthetic oligonucleotide
agucuuuuccccuugaaua

SEQ ID NO: 1730624 - RNA, 19 nt, Artificial Sequence
  Description of Artificial Sequence: Synthetic oligonucleotide
accgagacaucccaguuuc

SEQ ID NO: 1730625 - RNA, 19 nt, Artificial Sequence
  Description of Artificial Sequence: Synthetic oligonucleotide
aggucuuuugccacgaggc

SEQ ID NO: 1730626 - RNA, 19 nt, Artificial Sequence
  Description of Artificial Sequence: Synthetic oligonucleotide
uuaacugggaacucccaca

SEQ ID NO: 1730627 - RNA, 19 nt, Artificial Sequence
  Description of Artificial Sequence: Synthetic oligonucleotide
aacuuucauguccuuaaga

SEQ ID NO: 1730628 - RNA, 19 nt, Artificial Sequence
  Description of Artificial Sequence: Synthetic oligonucleotide
ugaauaagccuuuccuuug

SEQ ID NO: 1730629 - RNA, 19 nt, Artificial Sequence
  Description of Artificial Sequence: Synthetic oligonucleotide
uguccuuaagaauaucuaa

SEQ ID NO: 1730630 - RNA, 19 nt, Artificial Sequence
  Description of Artificial Sequence: Synthetic oligonucleotide
uaucuuucuugcuauagau

SEQ ID NO: 1730631 - RNA, 19 nt, Artificial Sequence
  Description of Artificial Sequence: Synthetic oligonucleotide
caaaccggaagcacaaacc

SEQ ID NO: 1730632 - RNA, 19 nt, Artificial Sequence
  Description of Artificial Sequence: Synthetic oligonucleotide
uuguuguuugcacauuuac

SEQ ID NO: 1730633 - RNA, 19 nt, Artificial Sequence
  Description of Artificial Sequence: Synthetic oligonucleotide
uaaaccacucuauaugauc

SEQ ID NO: 1730634 - RNA, 19 nt, Artificial Sequence
  Description of Artificial Sequence: Synthetic oligonucleotide
uuaagugaacucuacuuua

SEQ ID NO: 1730635 - RNA, 19 nt, Artificial Sequence
  Description of Artificial Sequence: Synthetic oligonucleotide
uuucgaaaggccacuaguc

SEQ ID NO: 1730636 - RNA, 19 nt, Artificial Sequence
  Description of Artificial Sequence: Synthetic oligonucleotide
uucaacagcuuaaaugaaa

SEQ ID NO: 1730637 - RNA, 19 nt, Artificial Sequence
  Description of Artificial Sequence: Synthetic oligonucleotide
uaacugggaacucccacag

SEQ ID NO: 1730638 - RNA, 19 nt, Artificial Sequence
  Description of Artificial Sequence: Synthetic oligonucleotide
uucgaaaggccacuaguca

SEQ ID NO: 1730639 - RNA, 19 nt, Artificial Sequence
  Description of Artificial Sequence: Synthetic oligonucleotide
cucuauaugaucgacuuuc

SEQ ID NO: 1730640 - RNA, 19 nt, Artificial Sequence
  Description of Artificial Sequence: Synthetic oligonucleotide
uucauuggcuggaacagac

SEQ ID NO: 1730641 - RNA, 19 nt, Artificial Sequence
  Description of Artificial Sequence: Synthetic oligonucleotide
uuguuugaaaucagauggc

SEQ ID NO: 1730642 - RNA, 19 nt, Artificial Sequence
  Description of Artificial Sequence: Synthetic oligonucleotide
uucguuguuaacugggaac

SEQ ID NO: 1730643 - RNA, 19 nt, Artificial Sequence
  Description of Artificial Sequence: Synthetic oligonucleotide
uuguuaacugggaacuccc

SEQ ID NO: 1730644 - RNA, 19 nt, Artificial Sequence
  Description of Artificial Sequence: Synthetic oligonucleotide
uugaauaagccuuuccuuu

SEQ ID NO: 1730645 - RNA, 19 nt, Artificial Sequence
  Description of Artificial Sequence: Synthetic oligonucleotide
cuuuggauauuauuuucug

SEQ ID NO: 1730646 - RNA, 19 nt, Artificial Sequence
  Description of Artificial Sequence: Synthetic oligonucleotide
gaugcuucuguuucaggug

SEQ ID NO: 1730647 - RNA, 19 nt, Artificial Sequence
  Description of Artificial Sequence: Synthetic oligonucleotide
uauuauuuucuguccugcc

SEQ ID NO: 1730648 - RNA, 19 nt, Artificial Sequence
  Description of Artificial Sequence: Synthetic oligonucleotide
cuguuuaacacucagauau

SEQ ID NO: 1730649 - RNA, 19 nt, Artificial Sequence
  Description of Artificial Sequence: Synthetic oligonucleotide
ucuggcaauuuucaucucu

SEQ ID NO: 1730650 - RNA, 19 nt, Artificial Sequence
  Description of Artificial Sequence: Synthetic oligonucleotide
uguucauuuacuguggcua

SEQ ID NO: 1730651 - RNA, 19 nt, Artificial Sequence
  Description of Artificial Sequence: Synthetic oligonucleotide
uuaacgccgggauucuacg

SEQ ID NO: 1730652 - RNA, 19 nt, Artificial Sequence
  Description of Artificial Sequence: Synthetic oligonucleotide
gaaaucagauggcuucucc

SEQ ID NO: 1730653 - RNA, 19 nt, Artificial Sequence
  Description of Artificial Sequence: Synthetic oligonucleotide
ucugcuugucccacgguag

SEQ ID NO: 1730654 - RNA, 19 nt, Artificial Sequence
  Description of Artificial Sequence: Synthetic oligonucleotide
caucucugauauuaugugc

SEQ ID NO: 1730655 - RNA, 19 nt, Artificial Sequence
  Description of Artificial Sequence: Synthetic oligonucleotide
auuucauuggcuggaacag

SEQ ID NO: 1730656 - RNA, 19 nt, Artificial Sequence
  Description of Artificial Sequence: Synthetic oligonucleotide
ugucuucugggaaauuuca

SEQ ID NO: 1730657 - RNA, 19 nt, Artificial Sequence
  Description of Artificial Sequence: Synthetic oligonucleotide
cuuucuguuuaacacucag

SEQ ID NO: 1730658 - RNA, 19 nt, Artificial Sequence
  Description of Artificial Sequence: Synthetic oligonucleotide
caugauguuaagugaacuc

SEQ ID NO: 1730659 - RNA, 19 nt, Artificial Sequence
  Description of Artificial Sequence: Synthetic oligonucleotide
auaugaucgacuuucuguu

SEQ ID NO: 1730660 - RNA, 19 nt, Artificial Sequence
  Description of Artificial Sequence: Synthetic oligonucleotide
gaaccaucgucaucaaagc

SEQ ID NO: 1730661 - RNA, 19 nt, Artificial Sequence
  Description of Artificial Sequence: Synthetic oligonucleotide
ucuucuaugccugcuaacu

SEQ ID NO: 1730662 - RNA, 19 nt, Artificial Sequence
  Description of Artificial Sequence: Synthetic oligonucleotide
gaucuggcaauuuucaucu

SEQ ID NO: 1730663 - RNA, 19 nt, Artificial Sequence
  Description of Artificial Sequence: Synthetic oligonucleotide
aagucuuuuccccuugaau

SEQ ID NO: 1730664 - RNA, 19 nt, Artificial Sequence
  Description of Artificial Sequence: Synthetic oligonucleotide
augauguuaagugaacucu

SEQ ID NO: 1730665 - RNA, 19 nt, Artificial Sequence
  Description of Artificial Sequence: Synthetic oligonucleotide
accaacucagaacucagga

SEQ ID NO: 1730666 - RNA, 19 nt, Artificial Sequence
  Description of Artificial Sequence: Synthetic oligonucleotide
uuuuccccuugaauaagcc

SEQ ID NO: 1730667 - RNA, 19 nt, Artificial Sequence
  Description of Artificial Sequence: Synthetic oligonucleotide
cuaaucuuacucuucucuc

SEQ ID NO: 1730668 - RNA, 19 nt, Artificial Sequence
  Description of Artificial Sequence: Synthetic oligonucleotide
uugagucuccucucugucg

SEQ ID NO: 1730669 - RNA, 19 nt, Artificial Sequence
  Description of Artificial Sequence: Synthetic oligonucleotide
uggaucaucuccucaaauc

SEQ ID NO: 1730670 - RNA, 19 nt, Artificial Sequence
  Description of Artificial Sequence: Synthetic oligonucleotide
auggaauucugaaccaucg

SEQ ID NO: 1730671 - RNA, 19 nt, Artificial Sequence
  Description of Artificial Sequence: Synthetic oligonucleotide
cuaacucuugcagaagggg

SEQ ID NO: 1730672 - RNA, 19 nt, Artificial Sequence
  Description of Artificial Sequence: Synthetic oligonucleotide
ucuugcuauagaugcagcu

SEQ ID NO: 1730673 - RNA, 19 nt, Artificial Sequence
  Description of Artificial Sequence: Synthetic oligonucleotide
aacacucagauauggguuu

SEQ ID NO: 1730674 - RNA, 19 nt, Artificial Sequence
  Description of Artificial Sequence: Synthetic oligonucleotide
cuagucaccagcuccauga

SEQ ID NO: 1730675 - RNA, 19 nt, Artificial Sequence
  Description of Artificial Sequence: Synthetic oligonucleotide
uguuugaaaucagauggcu

SEQ ID NO: 1730676 - RNA, 19 nt, Artificial Sequence
  Description of Artificial Sequence: Synthetic oligonucleotide
uugucugcuugucccacgg

SEQ ID NO: 1730677 - RNA, 19 nt, Artificial Sequence
  Description of Artificial Sequence: Synthetic oligonucleotide
uuaugugcgggaaacuaau

SEQ ID NO: 1730678 - RNA, 19 nt, Artificial Sequence
  Description of Artificial Sequence: Synthetic oligonucleotide
agugaacucuacuuuauuu

SEQ ID NO: 1730679 - RNA, 19 nt, Artificial Sequence
  Description of Artificial Sequence: Synthetic oligonucleotide
ucuaugccugcuaacugca

SEQ ID NO: 1730680 - RNA, 19 nt, Artificial Sequence
  Description of Artificial Sequence: Synthetic oligonucleotide
uuccccuugaauaagccuu

SEQ ID NO: 1730681 - RNA, 19 nt, Artificial Sequence
  Description of Artificial Sequence: Synthetic oligonucleotide
uauagaugcagcugccagu

SEQ ID NO: 1730682 - RNA, 19 nt, Artificial Sequence
  Description of Artificial Sequence: Synthetic oligonucleotide
uuguuugcacauuuacugu

SEQ ID NO: 1730683 - RNA, 19 nt, Artificial Sequence
  Description of Artificial Sequence: Synthetic oligonucleotide
uccuuuguuugaaaucaga

SEQ ID NO: 1730684 - RNA, 19 nt, Artificial Sequence
  Description of Artificial Sequence: Synthetic oligonucleotide
ucgaaaggccacuagucac

SEQ ID NO: 1730685 - RNA, 19 nt, Artificial Sequence
  Description of Artificial Sequence: Synthetic oligonucleotide
uguggcuagcugcuuagca

SEQ ID NO: 1730686 - RNA, 19 nt, Artificial Sequence
  Description of Artificial Sequence: Synthetic oligonucleotide
auuaacgccgggauucuac

SEQ ID NO: 1730687 - RNA, 19 nt, Artificial Sequence
  Description of Artificial Sequence: Synthetic oligonucleotide
augugcgggaaacuaaucu

SEQ ID NO: 1730688 - RNA, 19 nt, Artificial Sequence
  Description of Artificial Sequence: Synthetic oligonucleotide
uuuucuguccugccgguuc

SEQ ID NO: 1730689 - RNA, 19 nt, Artificial Sequence
  Description of Artificial Sequence: Synthetic oligonucleotide
ugauguuaagugaacucua

SEQ ID NO: 1730690 - RNA, 19 nt, Artificial Sequence
  Description of Artificial Sequence: Synthetic oligonucleotide
guucauuuacuguggcuag

SEQ ID NO: 1730691 - RNA, 19 nt, Artificial Sequence
  Description of Artificial Sequence: Synthetic oligonucleotide
augaagaugcgaauugguc

SEQ ID NO: 1730692 - RNA, 19 nt, Artificial Sequence
  Description of Artificial Sequence: Synthetic oligonucleotide
ucguuguuaacugggaacu

SEQ ID NO: 1730693 - RNA, 19 nt, Artificial Sequence
  Description of Artificial Sequence: Synthetic oligonucleotide
ucuauaugaucgacuuucu

SEQ ID NO: 1730694 - RNA, 19 nt, Artificial Sequence
  Description of Artificial Sequence: Synthetic oligonucleotide
uuuacugugcucaguucaa

SEQ ID NO: 1730695 - RNA, 19 nt, Artificial Sequence
  Description of Artificial Sequence: Synthetic oligonucleotide
aucgacuuucuguuuaaca

SEQ ID NO: 1730696 - RNA, 19 nt, Artificial Sequence
  Description of Artificial Sequence: Synthetic oligonucleotide
uaagugaacucuacuuuau

SEQ ID NO: 1730697 - RNA, 19 nt, Artificial Sequence
  Description of Artificial Sequence: Synthetic oligonucleotide
aaauucuaucucccagaga

SEQ ID NO: 1730698 - RNA, 19 nt, Artificial Sequence
  Description of Artificial Sequence: Synthetic oligonucleotide
uaaacucaagcuacagcaa

SEQ ID NO: 1730699 - RNA, 19 nt, Artificial Sequence
  Description of Artificial Sequence: Synthetic oligonucleotide
acauuuacugugcucaguu

SEQ ID NO: 1730700 - RNA, 19 nt, Artificial Sequence
  Description of Artificial Sequence: Synthetic oligonucleotide
ugucccacgguagagaauc

SEQ ID NO: 1730701 - RNA, 19 nt, Artificial Sequence
  Description of Artificial Sequence: Synthetic oligonucleotide
uucuaucucccagagagaa

SEQ ID NO: 1730702 - RNA, 19 nt, Artificial Sequence
  Description of Artificial Sequence: Synthetic oligonucleotide
gcuacagcaaaccggaagc

SEQ ID NO: 1730703 - RNA, 19 nt, Artificial Sequence
  Description of Artificial Sequence: Synthetic oligonucleotide
uauggucauggaauucuga

SEQ ID NO: 1730704 - RNA, 19 nt, Artificial Sequence
  Description of Artificial Sequence: Synthetic oligonucleotide
ucagaacucaggaacucau

SEQ ID NO: 1730705 - RNA, 19 nt, Artificial Sequence
  Description of Artificial Sequence: Synthetic oligonucleotide
guuguuaacugggaacucc

SEQ ID NO: 1730706 - RNA, 19 nt, Artificial Sequence
  Description of Artificial Sequence: Synthetic oligonucleotide
aacgccgggauucuacgga

SEQ ID NO: 1730707 - RNA, 19 nt, Artificial Sequence
  Description of Artificial Sequence: Synthetic oligonucleotide
ucaugauguuaagugaacu

SEQ ID NO: 1730708 - RNA, 19 nt, Artificial Sequence
  Description of Artificial Sequence: Synthetic oligonucleotide
acaaaggaaggcccgagaa

SEQ ID NO: 1730709 - RNA, 19 nt, Artificial Sequence
  Description of Artificial Sequence: Synthetic oligonucleotide
ugauauuaugugcgggaaa

SEQ ID NO: 1730710 - RNA, 19 nt, Artificial Sequence
  Description of Artificial Sequence: Synthetic oligonucleotide
cuugcuauagaugcagcug

SEQ ID NO: 1730711 - RNA, 19 nt, Artificial Sequence
  Description of Artificial Sequence: Synthetic oligonucleotide
ucuaucucccagagagaag

SEQ ID NO: 1730712 - RNA, 19 nt, Artificial Sequence
  Description of Artificial Sequence: Synthetic oligonucleotide
uuugagucuccucucuguc

SEQ ID NO: 1730713 - RNA, 19 nt, Artificial Sequence
  Description of Artificial Sequence: Synthetic oligonucleotide
uauuaugugcgggaaacua

SEQ ID NO: 1730714 - RNA, 19 nt, Artificial Sequence
  Description of Artificial Sequence: Synthetic oligonucleotide
acugggaacucccacaguu

SEQ ID NO: 1730715 - RNA, 19 nt, Artificial Sequence
  Description of Artificial Sequence: Synthetic oligonucleotide
gauguuaagugaacucuac

SEQ ID NO: 1730716 - RNA, 19 nt, Artificial Sequence
  Description of Artificial Sequence: Synthetic oligonucleotide
uggucauggaauucugaac

SEQ ID NO: 1730717 - RNA, 19 nt, Artificial Sequence
  Description of Artificial Sequence: Synthetic oligonucleotide
uuccuuuguuugaaaucag

SEQ ID NO: 1730718 - RNA, 19 nt, Artificial Sequence
  Description of Artificial Sequence: Synthetic oligonucleotide
auggucauggaauucugaa

SEQ ID NO: 1730719 - RNA, 19 nt, Artificial Sequence
  Description of Artificial Sequence: Synthetic oligonucleotide
ugcgaauugguccuugcuu

SEQ ID NO: 1730720 - RNA, 19 nt, Artificial Sequence
  Description of Artificial Sequence: Synthetic oligonucleotide
gaagaugcgaauugguccu

SEQ ID NO: 1730721 - RNA, 19 nt, Artificial Sequence
  Description of Artificial Sequence: Synthetic oligonucleotide
cuggcaauuuucaucucug

SEQ ID NO: 1730722 - RNA, 19 nt, Artificial Sequence
  Description of Artificial Sequence: Synthetic oligonucleotide
guuaacugggaacucccac

SEQ ID NO: 1730723 - RNA, 19 nt, Artificial Sequence
  Description of Artificial Sequence: Synthetic oligonucleotide
ucuuuugccacgaggcuuu

SEQ ID NO: 1730724 - RNA, 19 nt, Artificial Sequence
  Description of Artificial Sequence: Synthetic oligonucleotide
ugccaaaaugucuuuggau

SEQ ID NO: 1730725 - RNA, 19 nt, Artificial Sequence
  Description of Artificial Sequence: Synthetic oligonucleotide
guagagaaucugcaacagc

SEQ ID NO: 1730726 - RNA, 19 nt, Artificial Sequence
  Description of Artificial Sequence: Synthetic oligonucleotide
cagaggacaaaggaaggcc

SEQ ID NO: 1730727 - RNA, 19 nt, Artificial Sequence
  Description of Artificial Sequence: Synthetic oligonucleotide
agaggcggcugcuaccaac

SEQ ID NO: 1730728 - RNA, 19 nt, Artificial Sequence
  Description of Artificial Sequence: Synthetic oligonucleotide
cuugcagaaggggaucugg

SEQ ID NO: 1730729 - RNA, 19 nt, Artificial Sequence
  Description of Artificial Sequence: Synthetic oligonucleotide
uguuaacugggaacuccca

SEQ ID NO: 1730730 - RNA, 19 nt, Artificial Sequence
  Description of Artificial Sequence: Synthetic oligonucleotide
caaaggaaggcccgagaag

SEQ ID NO: 1730731 - RNA, 19 nt, Artificial Sequence
  Description of Artificial Sequence: Synthetic oligonucleotide
acugaaucuggugcugugg

SEQ ID NO: 1730732 - RNA, 19 nt, Artificial Sequence
  Description of Artificial Sequence: Synthetic oligonucleotide
auucugaaccaucgucauc

SEQ ID NO: 1730733 - RNA, 19 nt, Artificial Sequence
  Description of Artificial Sequence: Synthetic oligonucleotide
aacucagaacucaggaacu

SEQ ID NO: 1730734 - RNA, 19 nt, Artificial Sequence
  Description of Artificial Sequence: Synthetic oligonucleotide
cuaccaacucagaacucag

SEQ ID NO: 1730735 - RNA, 19 nt, Artificial Sequence
  Description of Artificial Sequence: Synthetic oligonucleotide
uucuugcuauagaugcagc

SEQ ID NO: 1730736 - RNA, 19 nt, Artificial Sequence
  Description of Artificial Sequence: Synthetic oligonucleotide
ugcgggaaacuaaucuuac

SEQ ID NO: 1730737 - RNA, 19 nt, Artificial Sequence
  Description of Artificial Sequence: Synthetic oligonucleotide
ugccacgaggcuuuguugu

SEQ ID NO: 1730738 - RNA, 19 nt, Artificial Sequence
  Description of Artificial Sequence: Synthetic oligonucleotide
ucuguuuaacacucagaua

SEQ ID NO: 1730739 - RNA, 19 nt, Artificial Sequence
  Description of Artificial Sequence: Synthetic oligonucleotide
accacucuauaugaucgac

SEQ ID NO: 1730740 - RNA, 19 nt, Artificial Sequence
  Description of Artificial Sequence: Synthetic oligonucleotide
aaccacucuauaugaucga

SEQ ID NO: 1730741 - RNA, 19 nt, Artificial Sequence
  Description of Artificial Sequence: Synthetic oligonucleotide
caauuuucaucucugauau

SEQ ID NO: 1730742 - RNA, 19 nt, Artificial Sequence
  Description of Artificial Sequence: Synthetic oligonucleotide
cagaaggucuuuugccacg

SEQ ID NO: 1730743 - RNA, 19 nt, Artificial Sequence
  Description of Artificial Sequence: Synthetic oligonucleotide
cuauaugaucgacuuucug

SEQ ID NO: 1730744 - RNA, 19 nt, Artificial Sequence
  Description of Artificial Sequence: Synthetic oligonucleotide
gaugcgaauugguccuugc

SEQ ID NO: 1730745 - RNA, 19 nt, Artificial Sequence
  Description of Artificial Sequence: Synthetic oligonucleotide
aaacgccuuaaugucaaaa

SEQ ID NO: 1730746 - RNA, 19 nt, Artificial Sequence
  Description of Artificial Sequence: Synthetic oligonucleotide
uaacgccgggauucuacgg

SEQ ID NO: 1730747 - RNA, 19 nt, Artificial Sequence
  Description of Artificial Sequence: Synthetic oligonucleotide
cagcaaacgccuuaauguc

SEQ ID NO: 1730748 - RNA, 19 nt, Artificial Sequence
  Description of Artificial Sequence: Synthetic oligonucleotide
aagugaacucuacuuuauu

SEQ ID NO: 1730749 - RNA, 19 nt, Artificial Sequence
  Description of Artificial Sequence: Synthetic oligonucleotide
cucugauauuaugugcggg

SEQ ID NO: 1730750 - RNA, 19 nt, Artificial Sequence
  Description of Artificial Sequence: Synthetic oligonucleotide
uugaaaucagauggcuucu

SEQ ID NO: 1730751 - RNA, 19 nt, Artificial Sequence
  Description of Artificial Sequence: Synthetic oligonucleotide
aaacugaaucuggugcugu

SEQ ID NO: 1730752 - RNA, 19 nt, Artificial Sequence
  Description of Artificial Sequence: Synthetic oligonucleotide
uagcaaauucuaucuccca

SEQ ID NO: 1730753 - RNA, 19 nt, Artificial Sequence
  Description of Artificial Sequence: Synthetic oligonucleotide
uggcuagcugcuuagcaaa

SEQ ID NO: 1730754 - RNA, 19 nt, Artificial Sequence
  Description of Artificial Sequence: Synthetic oligonucleotide
aagggaagaauuguccauu

SEQ ID NO: 1730755 - RNA, 19 nt, Artificial Sequence
  Description of Artificial Sequence: Synthetic oligonucleotide
uuggaucaucuccucaaau

SEQ ID NO: 1730756 - RNA, 19 nt, Artificial Sequence
  Description of Artificial Sequence: Synthetic oligonucleotide
gaggacguauuaacgccgg

SEQ ID NO: 1730757 - RNA, 19 nt, Artificial Sequence
  Description of Artificial Sequence: Synthetic oligonucleotide
augaucgacuuucuguuua

SEQ ID NO: 1730758 - RNA, 19 nt, Artificial Sequence
  Description of Artificial Sequence: Synthetic oligonucleotide
ggaucuggcaauuuucauc

SEQ ID NO: 1730759 - RNA, 19 nt, Artificial Sequence
  Description of Artificial Sequence: Synthetic oligonucleotide
uuccggaccgagccguggg

SEQ ID NO: 1730760 - RNA, 19 nt, Artificial Sequence
  Description of Artificial Sequence: Synthetic oligonucleotide
aaggaaggcccgagaaggg

SEQ ID NO: 1730761 - RNA, 19 nt, Artificial Sequence
  Description of Artificial Sequence: Synthetic oligonucleotide
ggcgaggacguauuaacgc

SEQ ID NO: 1730762 - RNA, 19 nt, Artificial Sequence
  Description of Artificial Sequence: Synthetic oligonucleotide
caucccaguuuccagagga

SEQ ID NO: 1730763 - RNA, 19 nt, Artificial Sequence
  Description of Artificial Sequence: Synthetic oligonucleotide
cuaucuuucuugcuauaga

SEQ ID NO: 1730764 - RNA, 19 nt, Artificial Sequence
  Description of Artificial Sequence: Synthetic oligonucleotide
cauuggaucaucuccucaa

SEQ ID NO: 1730765 - RNA, 19 nt, Artificial Sequence
  Description of Artificial Sequence: Synthetic oligonucleotide
gcgaauugguccuugcuug

SEQ ID NO: 1730766 - RNA, 19 nt, Artificial Sequence
  Description of Artificial Sequence: Synthetic oligonucleotide
acucagaacucaggaacuc

SEQ ID NO: 1730767 - RNA, 19 nt, Artificial Sequence
  Description of Artificial Sequence: Synthetic oligonucleotide
uggcaauuuucaucucuga

SEQ ID NO: 1730768 - RNA, 19 nt, Artificial Sequence
  Description of Artificial Sequence: Synthetic oligonucleotide
guuaagugaacucuacuuu

SEQ ID NO: 1730769 - RNA, 19 nt, Artificial Sequence
  Description of Artificial Sequence: Synthetic oligonucleotide
ucuacggagcaucgcguaa

SEQ ID NO: 1730770 - RNA, 19 nt, Artificial Sequence
  Description of Artificial Sequence: Synthetic oligonucleotide
ucauuggcuggaacagacu

SEQ ID NO: 1730771 - RNA, 19 nt, Artificial Sequence
  Description of Artificial Sequence: Synthetic oligonucleotide
uggugcuguggucuuguac

SEQ ID NO: 1730772 - RNA, 19 nt, Artificial Sequence
  Description of Artificial Sequence: Synthetic oligonucleotide
aggggaucuggcaauuuuc

SEQ ID NO: 1730773 - RNA, 19 nt, Artificial Sequence
  Description of Artificial Sequence: Synthetic oligonucleotide
uuucauuggcuggaacaga

SEQ ID NO: 1730774 - RNA, 19 nt, Artificial Sequence
  Description of Artificial Sequence: Synthetic oligonucleotide
uuguccauuggaucaucuc

SEQ ID NO: 1730775 - RNA, 19 nt, Artificial Sequence
  Description of Artificial Sequence: Synthetic oligonucleotide
ugaucgacuuucuguuuaa

SEQ ID NO: 1730776 - RNA, 19 nt, Artificial Sequence
  Description of Artificial Sequence: Synthetic oligonucleotide
gaaggcccgagaaggggcg

SEQ ID NO: 1730777 - RNA, 19 nt, Artificial Sequence
  Description of Artificial Sequence: Synthetic oligonucleotide
uggcuaucuuucuugcuau

SEQ ID NO: 1730778 - RNA, 19 nt, Artificial Sequence
  Description of Artificial Sequence: Synthetic oligonucleotide
uccgacuugguugucugcu

SEQ ID NO: 1730779 - RNA, 19 nt, Artificial Sequence
  Description of Artificial Sequence: Synthetic oligonucleotide
ucaucagcaaacgccuuaa

SEQ ID NO: 1730780 - RNA, 19 nt, Artificial Sequence
  Description of Artificial Sequence: Synthetic oligonucleotide
cauuuacugugcucaguuc

SEQ ID NO: 1730781 - RNA, 19 nt, Artificial Sequence
  Description of Artificial Sequence: Synthetic oligonucleotide
aucgucaucaaagccugcu

SEQ ID NO: 1730782 - RNA, 19 nt, Artificial Sequence
  Description of Artificial Sequence: Synthetic oligonucleotide
acgaggcuuuguuguuugc

SEQ ID NO: 1730783 - RNA, 19 nt, Artificial Sequence
  Description of Artificial Sequence: Synthetic oligonucleotide
auuaugugcgggaaacuaa

SEQ ID NO: 1730784 - RNA, 19 nt, Artificial Sequence
  Description of Artificial Sequence: Synthetic oligonucleotide
ugcucaguucaacuuucau

SEQ ID NO: 1730785 - RNA, 19 nt, Artificial Sequence
  Description of Artificial Sequence: Synthetic oligonucleotide
uugccacgaggcuuuguug

SEQ ID NO: 1730786 - RNA, 19 nt, Artificial Sequence
  Description of Artificial Sequence: Synthetic oligonucleotide
gguagagaaucugcaacag

SEQ ID NO: 1730787 - RNA, 19 nt, Artificial Sequence
  Description of Artificial Sequence: Synthetic oligonucleotide
acuagucaccagcuccaug

SEQ ID NO: 1730788 - RNA, 19 nt, Artificial Sequence
  Description of Artificial Sequence: Synthetic oligonucleotide
ugaaucuggugcugugguc

SEQ ID NO: 1730789 - RNA, 19 nt, Artificial Sequence
  Description of Artificial Sequence: Synthetic oligonucleotide
ggaaauuucauuggcugga

SEQ ID NO: 1730790 - RNA, 19 nt, Artificial Sequence
  Description of Artificial Sequence: Synthetic oligonucleotide
gaaucuggugcuguggucu

SEQ ID NO: 1730791 - RNA, 19 nt, Artificial Sequence
  Description of Artificial Sequence: Synthetic oligonucleotide
gcuaucuuucuugcuauag

SEQ ID NO: 1730792 - RNA, 19 nt, Artificial Sequence
  Description of Artificial Sequence: Synthetic oligonucleotide
aggugaagggaagaauugu

SEQ ID NO: 1730793 - RNA, 19 nt, Artificial Sequence
  Description of Artificial Sequence: Synthetic oligonucleotide
aggacguauuaacgccggg

SEQ ID NO: 1730794 - RNA, 19 nt, Artificial Sequence
  Description of Artificial Sequence: Synthetic oligonucleotide
ucaguucaacuuucauguc

SEQ ID NO: 1730795 - RNA, 19 nt, Artificial Sequence
  Description of Artificial Sequence: Synthetic oligonucleotide
gacguauuaacgccgggau

SEQ ID NO: 1730796 - RNA, 19 nt, Artificial Sequence
  Description of Artificial Sequence: Synthetic oligonucleotide
gcgaggacguauuaacgcc

SEQ ID NO: 1730797 - RNA, 19 nt, Artificial Sequence
  Description of Artificial Sequence: Synthetic oligonucleotide
cacgaggcuuuguuguuug

SEQ ID NO: 1730798 - RNA, 19 nt, Artificial Sequence
  Description of Artificial Sequence: Synthetic oligonucleotide
auauuaugugcgggaaacu

SEQ ID NO: 1730799 - RNA, 19 nt, Artificial Sequence
  Description of Artificial Sequence: Synthetic oligonucleotide
caaacugaaucuggugcug

SEQ ID NO: 1730800 - RNA, 19 nt, Artificial Sequence
  Description of Artificial Sequence: Synthetic oligonucleotide
uccauuggaucaucuccuc

SEQ ID NO: 1730801 - RNA, 19 nt, Artificial Sequence
  Description of Artificial Sequence: Synthetic oligonucleotide
gaauaagccuuuccuuugu

SEQ ID NO: 1730802 - RNA, 19 nt, Artificial Sequence
  Description of Artificial Sequence: Synthetic oligonucleotide
gcaaaccggaagcacaaac

SEQ ID NO: 1730803 - RNA, 19 nt, Artificial Sequence
  Description of Artificial Sequence: Synthetic oligonucleotide
uccugccgguuccggaccg

SEQ ID NO: 1730804 - RNA, 19 nt, Artificial Sequence
  Description of Artificial Sequence: Synthetic oligonucleotide
ugcuugucccacgguagag

SEQ ID NO: 1730805 - RNA, 19 nt, Artificial Sequence
  Description of Artificial Sequence: Synthetic oligonucleotide
cuggcuaucuuucuugcua

SEQ ID NO: 1730806 - RNA, 19 nt, Artificial Sequence
  Description of Artificial Sequence: Synthetic oligonucleotide
ugguugucugcuuguccca

SEQ ID NO: 1730807 - RNA, 19 nt, Artificial Sequence
  Description of Artificial Sequence: Synthetic oligonucleotide
uucuacggagcaucgcgua

SEQ ID NO: 1730808 - RNA, 19 nt, Artificial Sequence
  Description of Artificial Sequence: Synthetic oligonucleotide
agcaaacgccuuaauguca

SEQ ID NO: 1730809 - RNA, 19 nt, Artificial Sequence
  Description of Artificial Sequence: Synthetic oligonucleotide
cuugaauaagccuuuccuu

SEQ ID NO: 1730810 - RNA, 19 nt, Artificial Sequence
  Description of Artificial Sequence: Synthetic oligonucleotide
cugcuaccaacucagaacu

SEQ ID NO: 1730811 - RNA, 19 nt, Artificial Sequence
  Description of Artificial Sequence: Synthetic oligonucleotide
cuugcuuggggaagcccuc

SEQ ID NO: 1730812 - RNA, 19 nt, Artificial Sequence
  Description of Artificial Sequence: Synthetic oligonucleotide
ucuuccucguguugcugaa

SEQ ID NO: 1730813 - RNA, 19 nt, Artificial Sequence
  Description of Artificial Sequence: Synthetic oligonucleotide
gugccaaaaugucuuugga

SEQ ID NO: 1730814 - RNA, 19 nt, Artificial Sequence
  Description of Artificial Sequence: Synthetic oligonucleotide
acgccgggauucuacggag

SEQ ID NO: 1730815 - RNA, 19 nt, Artificial Sequence
  Description of Artificial Sequence: Synthetic oligonucleotide
accggaagcacaaacccaa

SEQ ID NO: 1730816 - RNA, 19 nt, Artificial Sequence
  Description of Artificial Sequence: Synthetic oligonucleotide
cuugucccacgguagagaa

SEQ ID NO: 1730817 - RNA, 19 nt, Artificial Sequence
  Description of Artificial Sequence: Synthetic oligonucleotide
cacagccaccgagacaucc

SEQ ID NO: 1730818 - RNA, 19 nt, Artificial Sequence
  Description of Artificial Sequence: Synthetic oligonucleotide
ggauauuauuuucuguccu

SEQ ID NO: 1730819 - RNA, 19 nt, Artificial Sequence
  Description of Artificial Sequence: Synthetic oligonucleotide
uuacugugcucaguucaac

SEQ ID NO: 1730820 - RNA, 19 nt, Artificial Sequence
  Description of Artificial Sequence: Synthetic oligonucleotide
cuaugccugcuaacugcag

SEQ ID NO: 1730821 - RNA, 19 nt, Artificial Sequence
  Description of Artificial Sequence: Synthetic oligonucleotide
uacggagcaucgcguaaaa

SEQ ID NO: 1730822 - RNA, 19 nt, Artificial Sequence
  Description of Artificial Sequence: Synthetic oligonucleotide
aucuggcaauuuucaucuc

SEQ ID NO: 1730823 - RNA, 19 nt, Artificial Sequence
  Description of Artificial Sequence: Synthetic oligonucleotide
guggcuagcugcuuagcaa

SEQ ID NO: 1730824 - RNA, 19 nt, Artificial Sequence
  Description of Artificial Sequence: Synthetic oligonucleotide
uccccucuuuuguccauug

SEQ ID NO: 1730825 - RNA, 19 nt, Artificial Sequence
  Description of Artificial Sequence: Synthetic oligonucleotide
aucaucuccucaaauccau

SEQ ID NO: 1730826 - RNA, 19 nt, Artificial Sequence
  Description of Artificial Sequence: Synthetic oligonucleotide
ggcuguucauuuacugugg

SEQ ID NO: 1730827 - RNA, 19 nt, Artificial Sequence
  Description of Artificial Sequence: Synthetic oligonucleotide
gggaaacuaaucuuacucu

SEQ ID NO: 1730828 - RNA, 19 nt, Artificial Sequence
  Description of Artificial Sequence: Synthetic oligonucleotide
cgggaaacuaaucuuacuc

SEQ ID NO: 1730829 - RNA, 19 nt, Artificial Sequence
  Description of Artificial Sequence: Synthetic oligonucleotide
guuuccccucuuuugucca

SEQ ID NO: 1730830 - RNA, 19 nt, Artificial Sequence
  Description of Artificial Sequence: Synthetic oligonucleotide
agaaggucuuuugccacga

SEQ ID NO: 1730831 - RNA, 19 nt, Artificial Sequence
  Description of Artificial Sequence: Synthetic oligonucleotide
cguauuaacgccgggauuc

SEQ ID NO: 1730832 - RNA, 19 nt, Artificial Sequence
  Description of Artificial Sequence: Synthetic oligonucleotide
uccucguguugcugaagcu

SEQ ID NO: 1730833 - RNA, 19 nt, Artificial Sequence
  Description of Artificial Sequence: Synthetic oligonucleotide
ggggcgaggacguauuaac

SEQ ID NO: 1730834 - RNA, 19 nt, Artificial Sequence
  Description of Artificial Sequence: Synthetic oligonucleotide
uccccuugaauaagccuuu

SEQ ID NO: 1730835 - RNA, 19 nt, Artificial Sequence
  Description of Artificial Sequence: Synthetic oligonucleotide
agaaggggaugcuucuguu

SEQ ID NO: 1730836 - RNA, 19 nt, Artificial Sequence
  Description of Artificial Sequence: Synthetic oligonucleotide
acucuauaugaucgacuuu

SEQ ID NO: 1730837 - RNA, 19 nt, Artificial Sequence
  Description of Artificial Sequence: Synthetic oligonucleotide
ccaugaagaugcgaauugg

SEQ ID NO: 1730838 - RNA, 19 nt, Artificial Sequence
  Description of Artificial Sequence: Synthetic oligonucleotide
gucgccuugagucucugcu

SEQ ID NO: 1730839 - RNA, 19 nt, Artificial Sequence
  Description of Artificial Sequence: Synthetic oligonucleotide
gcuguucauuuacuguggc

SEQ ID NO: 1730840 - RNA, 19 nt, Artificial Sequence
  Description of Artificial Sequence: Synthetic oligonucleotide
cuucguuguuaacugggaa

SEQ ID NO: 1730841 - RNA, 19 nt, Artificial Sequence
  Description of Artificial Sequence: Synthetic oligonucleotide
cacucuauaugaucgacuu

SEQ ID NO: 1730842 - RNA, 19 nt, Artificial Sequence
  Description of Artificial Sequence: Synthetic oligonucleotide
caguuuccccucuuuuguc

SEQ ID NO: 1730843 - RNA, 19 nt, Artificial Sequence
  Description of Artificial Sequence: Synthetic oligonucleotide
auucuacggagcaucgcgu

SEQ ID NO: 1730844 - RNA, 19 nt, Artificial Sequence
  Description of Artificial Sequence: Synthetic oligonucleotide
ugcuaccaacucagaacuc

SEQ ID NO: 1730845 - RNA, 19 nt, Artificial Sequence
  Description of Artificial Sequence: Synthetic oligonucleotide
ccugcuaacugcagccugc

SEQ ID NO: 1730846 - RNA, 19 nt, Artificial Sequence
  Description of Artificial Sequence: Synthetic oligonucleotide
gaucgacuuucuguuuaac

SEQ ID NO: 1730847 - RNA, 19 nt, Artificial Sequence
  Description of Artificial Sequence: Synthetic oligonucleotide
acguauuaacgccgggauu

SEQ ID NO: 1730848 - RNA, 19 nt, Artificial Sequence
  Description of Artificial Sequence: Synthetic oligonucleotide
ccgagaaggggcgaggacg

SEQ ID NO: 1730849 - RNA, 19 nt, Artificial Sequence
  Description of Artificial Sequence: Synthetic oligonucleotide
ucccacgguagagaaucug

SEQ ID NO: 1730850 - RNA, 19 nt, Artificial Sequence
  Description of Artificial Sequence: Synthetic oligonucleotide
ucugaaccaucgucaucaa

SEQ ID NO: 1730851 - RNA, 19 nt, Artificial Sequence
  Description of Artificial Sequence: Synthetic oligonucleotide
cgaaaggccacuagucacc

SEQ ID NO: 1730852 - RNA, 19 nt, Artificial Sequence
  Description of Artificial Sequence: Synthetic oligonucleotide
ugucgccuugagucucugc

SEQ ID NO: 1730853 - RNA, 19 nt, Artificial Sequence
  Description of Artificial Sequence: Synthetic oligonucleotide
ugucugcuugucccacggu

SEQ ID NO: 1730854 - RNA, 19 nt, Artificial Sequence
  Description of Artificial Sequence: Synthetic oligonucleotide
caacagcagaggcggcugc

SEQ ID NO: 1730855 - RNA, 19 nt, Artificial Sequence
  Description of Artificial Sequence: Synthetic oligonucleotide
cugauauuaugugcgggaa

SEQ ID NO: 1730856 - RNA, 19 nt, Artificial Sequence
  Description of Artificial Sequence: Synthetic oligonucleotide
agaugcgaauugguccuug

SEQ ID NO: 1730857 - RNA, 19 nt, Artificial Sequence
  Description of Artificial Sequence: Synthetic oligonucleotide
gcggcugcuaccaacucag

SEQ ID NO: 1730858 - RNA, 19 nt, Artificial Sequence
  Description of Artificial Sequence: Synthetic oligonucleotide
cagugccaaaaugucuuug

SEQ ID NO: 1730859 - RNA, 19 nt, Artificial Sequence
  Description of Artificial Sequence: Synthetic oligonucleotide
agaaggggcgaggacguau

SEQ ID NO: 1730860 - RNA, 19 nt, Artificial Sequence
  Description of Artificial Sequence: Synthetic oligonucleotide
cacgguagagaaucugcaa

SEQ ID NO: 1730861 - RNA, 19 nt, Artificial Sequence
  Description of Artificial Sequence: Synthetic oligonucleotide
gggauucuacggagcaucg

SEQ ID NO: 1730862 - RNA, 19 nt, Artificial Sequence
  Description of Artificial Sequence: Synthetic oligonucleotide
cuccgacuugguugucugc

SEQ ID NO: 1730863 - RNA, 19 nt, Artificial Sequence
  Description of Artificial Sequence: Synthetic oligonucleotide
gggcgaggacguauuaacg

SEQ ID NO: 1730864 - RNA, 19 nt, Artificial Sequence
  Description of Artificial Sequence: Synthetic oligonucleotide
auucuaucucccagagaga

SEQ ID NO: 1730865 - RNA, 19 nt, Artificial Sequence
  Description of Artificial Sequence: Synthetic oligonucleotide
ggaaggcccgagaaggggc

SEQ ID NO: 1730866 - RNA, 19 nt, Artificial Sequence
  Description of Artificial Sequence: Synthetic oligonucleotide
ggucuuguacuaacucuug

SEQ ID NO: 1730867 - RNA, 19 nt, Artificial Sequence
  Description of Artificial Sequence: Synthetic oligonucleotide
uccggaccgagccgugggu

SEQ ID NO: 1730868 - RNA, 19 nt, Artificial Sequence
  Description of Artificial Sequence: Synthetic oligonucleotide
aaggggcgaggacguauua

SEQ ID NO: 1730869 - RNA, 19 nt, Artificial Sequence
  Description of Artificial Sequence: Synthetic oligonucleotide
gacuugguugucugcuugu

SEQ ID NO: 1730870 - RNA, 19 nt, Artificial Sequence
  Description of Artificial Sequence: Synthetic oligonucleotide
acuuucuguuuaacacuca

SEQ ID NO: 1730871 - RNA, 19 nt, Artificial Sequence
  Description of Artificial Sequence: Synthetic oligonucleotide
cccuugaauaagccuuucc

SEQ ID NO: 1730872 - RNA, 19 nt, Artificial Sequence
  Description of Artificial Sequence: Synthetic oligonucleotide
agccugcuucguuguuaac

SEQ ID NO: 1730873 - RNA, 19 nt, Artificial Sequence
  Description of Artificial Sequence: Synthetic oligonucleotide
uugucccacgguagagaau

SEQ ID NO: 1730874 - RNA, 19 nt, Artificial Sequence
  Description of Artificial Sequence: Synthetic oligonucleotide
ugccgguuccggaccgagc

SEQ ID NO: 1730875 - RNA, 19 nt, Artificial Sequence
  Description of Artificial Sequence: Synthetic oligonucleotide
ugcuguggucuuguacuaa

SEQ ID NO: 1730876 - RNA, 19 nt, Artificial Sequence
  Description of Artificial Sequence: Synthetic oligonucleotide
cugaaucuggugcuguggu

SEQ ID NO: 1730877 - RNA, 19 nt, Artificial Sequence
  Description of Artificial Sequence: Synthetic oligonucleotide
guccauuggaucaucuccu

SEQ ID NO: 1730878 - RNA, 19 nt, Artificial Sequence
  Description of Artificial Sequence: Synthetic oligonucleotide
ggacguauuaacgccggga

SEQ ID NO: 1730879 - RNA, 19 nt, Artificial Sequence
  Description of Artificial Sequence: Synthetic oligonucleotide
agccuuuccuuuguuugaa

SEQ ID NO: 1730880 - RNA, 19 nt, Artificial Sequence
  Description of Artificial Sequence: Synthetic oligonucleotide
ggacaaaggaaggcccgag

SEQ ID NO: 1730881 - RNA, 19 nt, Artificial Sequence
  Description of Artificial Sequence: Synthetic oligonucleotide
guuccggaccgagccgugg

SEQ ID NO: 1730882 - RNA, 19 nt, Artificial Sequence
  Description of Artificial Sequence: Synthetic oligonucleotide
cuacagcaaaccggaagca

SEQ ID NO: 1730883 - RNA, 19 nt, Artificial Sequence
  Description of Artificial Sequence: Synthetic oligonucleotide
gaaggggaugcuucuguuu

SEQ ID NO: 1730884 - RNA, 19 nt, Artificial Sequence
  Description of Artificial Sequence: Synthetic oligonucleotide
ugccugcuaacugcagccu

SEQ ID NO: 1730885 - RNA, 19 nt, Artificial Sequence
  Description of Artificial Sequence: Synthetic oligonucleotide
gcuccgacuugguugucug

SEQ ID NO: 1730886 - RNA, 19 nt, Artificial Sequence
  Description of Artificial Sequence: Synthetic oligonucleotide
gugcgggaaacuaaucuua

SEQ ID NO: 1730887 - RNA, 19 nt, Artificial Sequence
  Description of Artificial Sequence: Synthetic oligonucleotide
uauuaacgccgggauucua

SEQ ID NO: 1730888 - RNA, 19 nt, Artificial Sequence
  Description of Artificial Sequence: Synthetic oligonucleotide
uggcuggaacagacuggcu

SEQ ID NO: 1730889 - RNA, 19 nt, Artificial Sequence
  Description of Artificial Sequence: Synthetic oligonucleotide
ggggaugcuucuguuucag

SEQ ID NO: 1730890 - RNA, 19 nt, Artificial Sequence
  Description of Artificial Sequence: Synthetic oligonucleotide
ggcugcuaccaacucagaa

SEQ ID NO: 1730891 - RNA, 19 nt, Artificial Sequence
  Description of Artificial Sequence: Synthetic oligonucleotide
aagaugcgaauugguccuu

SEQ ID NO: 1730892 - RNA, 19 nt, Artificial Sequence
  Description of Artificial Sequence: Synthetic oligonucleotide
ggauucuacggagcaucgc

SEQ ID NO: 1730893 - RNA, 19 nt, Artificial Sequence
  Description of Artificial Sequence: Synthetic oligonucleotide
cugcuugucccacgguaga

SEQ ID NO: 1730894 - RNA, 19 nt, Artificial Sequence
  Description of Artificial Sequence: Synthetic oligonucleotide
cugcaacagcagaggcggc

SEQ ID NO: 1730895 - RNA, 19 nt, Artificial Sequence
  Description of Artificial Sequence: Synthetic oligonucleotide
cuggaacagacuggcuauc

SEQ ID NO: 1730896 - RNA, 19 nt, Artificial Sequence
  Description of Artificial Sequence: Synthetic oligonucleotide
cuguggcuagcugcuuagc

SEQ ID NO: 1730897 - RNA, 19 nt, Artificial Sequence
  Description of Artificial Sequence: Synthetic oligonucleotide
gcaaacgccuuaaugucaa

SEQ ID NO: 1730898 - RNA, 19 nt, Artificial Sequence
  Description of Artificial Sequence: Synthetic oligonucleotide
cuacggagcaucgcguaaa

SEQ ID NO: 1730899 - RNA, 19 nt, Artificial Sequence
  Description of Artificial Sequence: Synthetic oligonucleotide
ccaacucagaacucaggaa

SEQ ID NO: 1730900 - RNA, 19 nt, Artificial Sequence
  Description of Artificial Sequence: Synthetic oligonucleotide
gccgggauucuacggagca

SEQ ID NO: 1730901 - RNA, 19 nt, Artificial Sequence
  Description of Artificial Sequence: Synthetic oligonucleotide
aggggcgaggacguauuaa

SEQ ID NO: 1730902 - RNA, 19 nt, Artificial Sequence
  Description of Artificial Sequence: Synthetic oligonucleotide
aaggcccgagaaggggcga

SEQ ID NO: 1730903 - RNA, 19 nt, Artificial Sequence
  Description of Artificial Sequence: Synthetic oligonucleotide
cugaaccaucgucaucaaa

SEQ ID NO: 1730904 - RNA, 19 nt, Artificial Sequence
  Description of Artificial Sequence: Synthetic oligonucleotide
ccaaaaugucuuuggauau

SEQ ID NO: 1730905 - RNA, 19 nt, Artificial Sequence
  Description of Artificial Sequence: Synthetic oligonucleotide
ccacgguagagaaucugca

SEQ ID NO: 1730906 - RNA, 19 nt, Artificial Sequence
  Description of Artificial Sequence: Synthetic oligonucleotide
gguugucugcuugucccac

SEQ ID NO: 1730907 - RNA, 19 nt, Artificial Sequence
  Description of Artificial Sequence: Synthetic oligonucleotide
cuguggucuuguacuaacu

SEQ ID NO: 1730908 - RNA, 19 nt, Artificial Sequence
  Description of Artificial Sequence: Synthetic oligonucleotide
cagaaggggaucuggcaau

SEQ ID NO: 1730909 - RNA, 19 nt, Artificial Sequence
  Description of Artificial Sequence: Synthetic oligonucleotide
gugcuguggucuuguacua

SEQ ID NO: 1730910 - RNA, 19 nt, Artificial Sequence
  Description of Artificial Sequence: Synthetic oligonucleotide
guccuugcuuggggaagcc

SEQ ID NO: 1730911 - RNA, 19 nt, Artificial Sequence
  Description of Artificial Sequence: Synthetic oligonucleotide
gcuucguuguuaacuggga

SEQ ID NO: 1730912 - RNA, 19 nt, Artificial Sequence
  Description of Artificial Sequence: Synthetic oligonucleotide
gcagcuccgacuugguugu

SEQ ID NO: 1730913 - RNA, 19 nt, Artificial Sequence
  Description of Artificial Sequence: Synthetic oligonucleotide
aggcccgagaaggggcgag

SEQ ID NO: 1730914 - RNA, 19 nt, Artificial Sequence
  Description of Artificial Sequence: Synthetic oligonucleotide
guauuaacgccgggauucu

SEQ ID NO: 1730915 - RNA, 19 nt, Artificial Sequence
  Description of Artificial Sequence: Synthetic oligonucleotide
uuccccucuuuuguccauu

SEQ ID NO: 1730916 - RNA, 19 nt, Artificial Sequence
  Description of Artificial Sequence: Synthetic oligonucleotide
cuuugagaauaucccuuuu

SEQ ID NO: 1730917 - RNA, 19 nt, Artificial Sequence
  Description of Artificial Sequence: Synthetic oligonucleotide
ggucuuuugccacgaggcu

SEQ ID NO: 1730918 - RNA, 19 nt, Artificial Sequence
  Description of Artificial Sequence: Synthetic oligonucleotide
cugccgguuccggaccgag

SEQ ID NO: 1730919 - RNA, 19 nt, Artificial Sequence
  Description of Artificial Sequence: Synthetic oligonucleotide
cuuuugccacgaggcuuug

SEQ ID NO: 1730920 - RNA, 19 nt, Artificial Sequence
  Description of Artificial Sequence: Synthetic oligonucleotide
ccaggugaagggaagaauu

SEQ ID NO: 1730921 - RNA, 19 nt, Artificial Sequence
  Description of Artificial Sequence: Synthetic oligonucleotide
gcagaggcggcugcuacca

SEQ ID NO: 1730922 - RNA, 19 nt, Artificial Sequence
  Description of Artificial Sequence: Synthetic oligonucleotide
cucccagagagaaggggau

SEQ ID NO: 1730923 - RNA, 19 nt, Artificial Sequence
  Description of Artificial Sequence: Synthetic oligonucleotide
ccggaagcacaaacccaag

SEQ ID NO: 1730924 - RNA, 19 nt, Artificial Sequence
  Description of Artificial Sequence: Synthetic oligonucleotide
ccccucuuuuguccauugg

SEQ ID NO: 1730925 - RNA, 19 nt, Artificial Sequence
  Description of Artificial Sequence: Synthetic oligonucleotide
gugcucaguucaacuuuca

SEQ ID NO: 1730926 - RNA, 19 nt, Artificial Sequence
  Description of Artificial Sequence: Synthetic oligonucleotide
gccugcuucguuguuaacu

SEQ ID NO: 1730927 - RNA, 19 nt, Artificial Sequence
  Description of Artificial Sequence: Synthetic oligonucleotide
gcuugucccacgguagaga

SEQ ID NO: 1730928 - RNA, 19 nt, Artificial Sequence
  Description of Artificial Sequence: Synthetic oligonucleotide
ccauuggaucaucuccuca

SEQ ID NO: 1730929 - RNA, 19 nt, Artificial Sequence
  Description of Artificial Sequence: Synthetic oligonucleotide
caaacgccuuaaugucaaa

SEQ ID NO: 1730930 - RNA, 19 nt, Artificial Sequence
  Description of Artificial Sequence: Synthetic oligonucleotide
ccucuuuuguccauuggau

SEQ ID NO: 1730931 - RNA, 19 nt, Artificial Sequence
  Description of Artificial Sequence: Synthetic oligonucleotide
cgggauucuacggagcauc

SEQ ID NO: 1730932 - RNA, 19 nt, Artificial Sequence
  Description of Artificial Sequence: Synthetic oligonucleotide
cacauuuacugugcucagu

SEQ ID NO: 1730933 - RNA, 19 nt, Artificial Sequence
  Description of Artificial Sequence: Synthetic oligonucleotide
cagaacucaggaacucauu

SEQ ID NO: 1730934 - RNA, 19 nt, Artificial Sequence
  Description of Artificial Sequence: Synthetic oligonucleotide
gaaggggcgaggacguauu

SEQ ID NO: 1730935 - RNA, 19 nt, Artificial Sequence
  Description of Artificial Sequence: Synthetic oligonucleotide
ccgagacaucccaguuucc

SEQ ID NO: 1730936 - RNA, 19 nt, Artificial Sequence
  Description of Artificial Sequence: Synthetic oligonucleotide
cugggaacucccacaguuu

SEQ ID NO: 1730937 - RNA, 19 nt, Artificial Sequence
  Description of Artificial Sequence: Synthetic oligonucleotide
ggcccgagaaggggcgagg

SEQ ID NO: 1730938 - RNA, 19 nt, Artificial Sequence
  Description of Artificial Sequence: Synthetic oligonucleotide
ccacucuauaugaucgacu

SEQ ID NO: 1730939 - RNA, 19 nt, Artificial Sequence
  Description of Artificial Sequence: Synthetic oligonucleotide
gcgggaaacuaaucuuacu

SEQ ID NO: 1730940 - RNA, 19 nt, Artificial Sequence
  Description of Artificial Sequence: Synthetic oligonucleotide
gccaccgagacaucccagu

SEQ ID NO: 1730941 - RNA, 19 nt, Artificial Sequence
  Description of Artificial Sequence: Synthetic oligonucleotide
cgagacaucccaguuucca

SEQ ID NO: 1730942 - RNA, 19 nt, Artificial Sequence
  Description of Artificial Sequence: Synthetic oligonucleotide
ggaccgagccguggguggc

SEQ ID NO: 1730943 - RNA, 19 nt, Artificial Sequence
  Description of Artificial Sequence: Synthetic oligonucleotide
ggcuaucuuucuugcuaua

SEQ ID NO: 1730944 - RNA, 19 nt, Artificial Sequence
  Description of Artificial Sequence: Synthetic oligonucleotide
gaccgagccguggguggca

SEQ ID NO: 1730945 - RNA, 19 nt, Artificial Sequence
  Description of Artificial Sequence: Synthetic oligonucleotide
cugucgccuugagucucug

SEQ ID NO: 1730946 - RNA, 19 nt, Artificial Sequence
  Description of Artificial Sequence: Synthetic oligonucleotide
ccaagucuuuuccccuuga

SEQ ID NO: 1730947 - RNA, 19 nt, Artificial Sequence
  Description of Artificial Sequence: Synthetic oligonucleotide
cccgagaaggggcgaggac

SEQ ID NO: 1730948 - RNA, 19 nt, Artificial Sequence
  Description of Artificial Sequence: Synthetic oligonucleotide
caccgagacaucccaguuu

SEQ ID NO: 1730949 - RNA, 19 nt, Artificial Sequence
  Description of Artificial Sequence: Synthetic oligonucleotide
gaaggggaucuggcaauuu

SEQ ID NO: 1730950 - RNA, 19 nt, Artificial Sequence
  Description of Artificial Sequence: Synthetic oligonucleotide
gccuugagucucugcuguc

SEQ ID NO: 1730951 - RNA, 19 nt, Artificial Sequence
  Description of Artificial Sequence: Synthetic oligonucleotide
cguuguuaacugggaacuc

SEQ ID NO: 1730952 - RNA, 19 nt, Artificial Sequence
  Description of Artificial Sequence: Synthetic oligonucleotide
caucagcaaacgccuuaau

SEQ ID NO: 1730953 - RNA, 19 nt, Artificial Sequence
  Description of Artificial Sequence: Synthetic oligonucleotide
gguuccggaccgagccgug

SEQ ID NO: 1730954 - RNA, 19 nt, Artificial Sequence
  Description of Artificial Sequence: Synthetic oligonucleotide
cgccgggauucuacggagc

SEQ ID NO: 1730955 - RNA, 19 nt, Artificial Sequence
  Description of Artificial Sequence: Synthetic oligonucleotide
ccggaccgagccgugggug

SEQ ID NO: 1730956 - RNA, 19 nt, Artificial Sequence
  Description of Artificial Sequence: Synthetic oligonucleotide
ccccaaaggcuguucauuu

SEQ ID NO: 1730957 - RNA, 19 nt, Artificial Sequence
  Description of Artificial Sequence: Synthetic oligonucleotide
gcccgagaaggggcgagga

SEQ ID NO: 1730958 - RNA, 19 nt, Artificial Sequence
  Description of Artificial Sequence: Synthetic oligonucleotide
ccccuugaauaagccuuuc

SEQ ID NO: 1730959 - RNA, 19 nt, Artificial Sequence
  Description of Artificial Sequence: Synthetic oligonucleotide
cagaggcggcugcuaccaa

SEQ ID NO: 1730960 - RNA, 19 nt, Artificial Sequence
  Description of Artificial Sequence: Synthetic oligonucleotide
gucccacgguagagaaucu

SEQ ID NO: 1730961 - RNA, 19 nt, Artificial Sequence
  Description of Artificial Sequence: Synthetic oligonucleotide
cguggguggcacacacaca

SEQ ID NO: 1730962 - RNA, 19 nt, Artificial Sequence
  Description of Artificial Sequence: Synthetic oligonucleotide
cagcuccgacuugguuguc

SEQ ID NO: 1730963 - RNA, 19 nt, Artificial Sequence
  Description of Artificial Sequence: Synthetic oligonucleotide
ccagugccaaaaugucuuu

SEQ ID NO: 1730964 - RNA, 19 nt, Artificial Sequence
  Description of Artificial Sequence: Synthetic oligonucleotide
ccaccgagacaucccaguu

SEQ ID NO: 1730965 - RNA, 19 nt, Artificial Sequence
  Description of Artificial Sequence: Synthetic oligonucleotide
ccgacuugguugucugcuu

SEQ ID NO: 1730966 - RNA, 19 nt, Artificial Sequence
  Description of Artificial Sequence: Synthetic oligonucleotide
ccgagccguggguggcaca

SEQ ID NO: 1730967 - RNA, 19 nt, Artificial Sequence
  Description of Artificial Sequence: Synthetic oligonucleotide
ccugccgguuccggaccga

SEQ ID NO: 1730968 - RNA, 19 nt, Artificial Sequence
  Description of Artificial Sequence: Synthetic oligonucleotide
ccgggauucuacggagcau

SEQ ID NO: 1730969 - RNA, 19 nt, Artificial Sequence
  Description of Artificial Sequence: Synthetic oligonucleotide
gaugaaagaacuuguaccg

SEQ ID NO: 1730970 - RNA, 19 nt, Artificial Sequence
  Description of Artificial Sequence: Synthetic oligonucleotide
aagacugaaugacuaauac

SEQ ID NO: 1730971 - RNA, 19 nt, Artificial Sequence
  Description of Artificial Sequence: Synthetic oligonucleotide
ugaugaaagaacuuguacc

SEQ ID NO: 1730972 - RNA, 19 nt, Artificial Sequence
  Description of Artificial Sequence: Synthetic oligonucleotide
aaugauuaagucuucuaca

SEQ ID NO: 1730973 - RNA, 19 nt, Artificial Sequence
  Description of Artificial Sequence: Synthetic oligonucleotide
uaguuaauaguuuguaagg

SEQ ID NO: 1730974 - RNA, 19 nt, Artificial Sequence
  Description of Artificial Sequence: Synthetic oligonucleotide
gacucuacaagacaugagg

SEQ ID NO: 1730975 - RNA, 19 nt, Artificial Sequence
  Description of Artificial Sequence: Synthetic oligonucleotide
aagacaugaggucaagggg

SEQ ID NO: 1730976 - RNA, 19 nt, Artificial Sequence
  Description of Artificial Sequence: Synthetic oligonucleotide
augauuaagucuucuacac

SEQ ID NO: 1730977 - RNA, 19 nt, Artificial Sequence
  Description of Artificial Sequence: Synthetic oligonucleotide
cuaaugaugacuguggcgg

SEQ ID NO: 1730978 - RNA, 19 nt, Artificial Sequence
  Description of Artificial Sequence: Synthetic oligonucleotide
ugagauagauuacagagaa

SEQ ID NO: 1730979 - RNA, 19 nt, Artificial Sequence
  Description of Artificial Sequence: Synthetic oligonucleotide
uuaauaguuuguaaggccu

SEQ ID NO: 1730980 - RNA, 19 nt, Artificial Sequence
  Description of Artificial Sequence: Synthetic oligonucleotide
aguuaauaguuuguaaggc

SEQ ID NO: 1730981 - RNA, 19 nt, Artificial Sequence
  Description of Artificial Sequence: Synthetic oligonucleotide
gacugaaugacuaauacac

SEQ ID NO: 1730982 - RNA, 19 nt, Artificial Sequence
  Description of Artificial Sequence: Synthetic oligonucleotide
uagauuacagagaaaucag

SEQ ID NO: 1730983 - RNA, 19 nt, Artificial Sequence
  Description of Artificial Sequence: Synthetic oligonucleotide
ugauaauaggcaucggcgg

SEQ ID NO: 1730984 - RNA, 19 nt, Artificial Sequence
  Description of Artificial Sequence: Synthetic oligonucleotide
uguaccgaccugaaaaggg

SEQ ID NO: 1730985 - RNA, 19 nt, Artificial Sequence
  Description of Artificial Sequence: Synthetic oligonucleotide
ugaggugucuaucacaaug

SEQ ID NO: 1730986 - RNA, 19 nt, Artificial Sequence
  Description of Artificial Sequence: Synthetic oligonucleotide
auagauuacagagaaauca

SEQ ID NO: 1730987 - RNA, 19 nt, Artificial Sequence
  Description of Artificial Sequence: Synthetic oligonucleotide
auugcauuguauauuaccg

SEQ ID NO: 1730988 - RNA, 19 nt, Artificial Sequence
  Description of Artificial Sequence: Synthetic oligonucleotide
aagcacucgucccaggggc

SEQ ID NO: 1730989 - RNA, 19 nt, Artificial Sequence
  Description of Artificial Sequence: Synthetic oligonucleotide
aaauccgaugcuaacugcc

SEQ ID NO: 1730990 - RNA, 19 nt, Artificial Sequence
  Description of Artificial Sequence: Synthetic oligonucleotide
uuguauauuaccgugggca

SEQ ID NO: 1730991 - RNA, 19 nt, Artificial Sequence
  Description of Artificial Sequence: Synthetic oligonucleotide
aaucugugcacgaaguuac

SEQ ID NO: 1730992 - RNA, 19 nt, Artificial Sequence
  Description of Artificial Sequence: Synthetic oligonucleotide
cuuccaaucacccggaccc

SEQ ID NO: 1730993 - RNA, 19 nt, Artificial Sequence
  Description of Artificial Sequence: Synthetic oligonucleotide
augacuaauacacaccuca

SEQ ID NO: 1730994 - RNA, 19 nt, Artificial Sequence
  Description of Artificial Sequence: Synthetic oligonucleotide
ugggugagcacacacuugg

SEQ ID NO: 1730995 - RNA, 19 nt, Artificial Sequence
  Description of Artificial Sequence: Synthetic oligonucleotide
ugaaugacuaauacacacc

SEQ ID NO: 1730996 - RNA, 19 nt, Artificial Sequence
  Description of Artificial Sequence: Synthetic oligonucleotide
ugauuaagucuucuacacg

SEQ ID NO: 1730997 - RNA, 19 nt, Artificial Sequence
  Description of Artificial Sequence: Synthetic oligonucleotide
ugcacgaaguuacaggugc

SEQ ID NO: 1730998 - RNA, 19 nt, Artificial Sequence
  Description of Artificial Sequence: Synthetic oligonucleotide
ugauuuauugcauuguaua

SEQ ID NO: 1730999 - RNA, 19 nt, Artificial Sequence
  Description of Artificial Sequence: Synthetic oligonucleotide
uauauuaccgugggcaggg

SEQ ID NO: 1731000 - RNA, 19 nt, Artificial Sequence
  Description of Artificial Sequence: Synthetic oligonucleotide
agauagauuacagagaaau

SEQ ID NO: 1731001 - RNA, 19 nt, Artificial Sequence
  Description of Artificial Sequence: Synthetic oligonucleotide
uacaugagauagauuacag

SEQ ID NO: 1731002 - RNA, 19 nt, Artificial Sequence
  Description of Artificial Sequence: Synthetic oligonucleotide
ucuacaagacaugagguca

SEQ ID NO: 1731003 - RNA, 19 nt, Artificial Sequence
  Description of Artificial Sequence: Synthetic oligonucleotide
acuuguaccgaccugaaaa

SEQ ID NO: 1731004 - RNA, 19 nt, Artificial Sequence
  Description of Artificial Sequence: Synthetic oligonucleotide
aaagaacuuguaccgaccu

SEQ ID NO: 1731005 - RNA, 19 nt, Artificial Sequence
  Description of Artificial Sequence: Synthetic oligonucleotide
ucacaagagauuuagguuu

SEQ ID NO: 1731006 - RNA, 19 nt, Artificial Sequence
  Description of Artificial Sequence: Synthetic oligonucleotide
uguauauuaccgugggcag

SEQ ID NO: 1731007 - RNA, 19 nt, Artificial Sequence
  Description of Artificial Sequence: Synthetic oligonucleotide
aucggggucacguuugggc

SEQ ID NO: 1731008 - RNA, 19 nt, Artificial Sequence
  Description of Artificial Sequence: Synthetic oligonucleotide
ucugucacaagaucugcag

SEQ ID NO: 1731009 - RNA, 19 nt, Artificial Sequence
  Description of Artificial Sequence: Synthetic oligonucleotide
gaaccaaggccuucgagag

SEQ ID NO: 1731010 - RNA, 19 nt, Artificial Sequence
  Description of Artificial Sequence: Synthetic oligonucleotide
cauuguauauuaccguggg

SEQ ID NO: 1731011 - RNA, 19 nt, Artificial Sequence
  Description of Artificial Sequence: Synthetic oligonucleotide
gauaauaggcaucggcggc

SEQ ID NO: 1731012 - RNA, 19 nt, Artificial Sequence
  Description of Artificial Sequence: Synthetic oligonucleotide
auuguauauuaccgugggc

SEQ ID NO: 1731013 - RNA, 19 nt, Artificial Sequence
  Description of Artificial Sequence: Synthetic oligonucleotide
caaugaaccugugugaagg

SEQ ID NO: 1731014 - RNA, 19 nt, Artificial Sequence
  Description of Artificial Sequence: Synthetic oligonucleotide
gaccccaugagccuuggcg

SEQ ID NO: 1731015 - RNA, 19 nt, Artificial Sequence
  Description of Artificial Sequence: Synthetic oligonucleotide
ugaaagaacuuguaccgac

SEQ ID NO: 1731016 - RNA, 19 nt, Artificial Sequence
  Description of Artificial Sequence: Synthetic oligonucleotide
ugcuaacugccacaguagg

SEQ ID NO: 1731017 - RNA, 19 nt, Artificial Sequence
  Description of Artificial Sequence: Synthetic oligonucleotide
agcagugaaggccaaacug

SEQ ID NO: 1731018 - RNA, 19 nt, Artificial Sequence
  Description of Artificial Sequence: Synthetic oligonucleotide
ugaaaagggcuacaugaga

SEQ ID NO: 1731019 - RNA, 19 nt, Artificial Sequence
  Description of Artificial Sequence: Synthetic oligonucleotide
uuaagucuucuacacggug

SEQ ID NO: 1731020 - RNA, 19 nt, Artificial Sequence
  Description of Artificial Sequence: Synthetic oligonucleotide
uaauaguuuguaaggccug

SEQ ID NO: 1731021 - RNA, 19 nt, Artificial Sequence
  Description of Artificial Sequence: Synthetic oligonucleotide
acaguagggaaucugugca

SEQ ID NO: 1731022 - RNA, 19 nt, Artificial Sequence
  Description of Artificial Sequence: Synthetic oligonucleotide
uuucgcaacucagaaauga

SEQ ID NO: 1731023 - RNA, 19 nt, Artificial Sequence
  Description of Artificial Sequence: Synthetic oligonucleotide
cugaugaaagaacuuguac

SEQ ID NO: 1731024 - RNA, 19 nt, Artificial Sequence
  Description of Artificial Sequence: Synthetic oligonucleotide
aggugucuaucacaaugcc

SEQ ID NO: 1731025 - RNA, 19 nt, Artificial Sequence
  Description of Artificial Sequence: Synthetic oligonucleotide
gaucacuccgaauuccagc

SEQ ID NO: 1731026 - RNA, 19 nt, Artificial Sequence
  Description of Artificial Sequence: Synthetic oligonucleotide
cuuguaccgaccugaaaag

SEQ ID NO: 1731027 - RNA, 19 nt, Artificial Sequence
  Description of Artificial Sequence: Synthetic oligonucleotide
aaucagcucagcaccgagc

SEQ ID NO: 1731028 - RNA, 19 nt, Artificial Sequence
  Description of Artificial Sequence: Synthetic oligonucleotide
uaguuuguaaggccugagc

SEQ ID NO: 1731029 - RNA, 19 nt, Artificial Sequence
  Description of Artificial Sequence: Synthetic oligonucleotide
ugaaggaaaccgcuuucgc

SEQ ID NO: 1731030 - RNA, 19 nt, Artificial Sequence
  Description of Artificial Sequence: Synthetic oligonucleotide
gaaugacuaauacacaccu

SEQ ID NO: 1731031 - RNA, 19 nt, Artificial Sequence
  Description of Artificial Sequence: Synthetic oligonucleotide
cuggugaacugcaaauccg

SEQ ID NO: 1731032 - RNA, 19 nt, Artificial Sequence
  Description of Artificial Sequence: Synthetic oligonucleotide
aacaccggaggcuccgcac

SEQ ID NO: 1731033 - RNA, 19 nt, Artificial Sequence
  Description of Artificial Sequence: Synthetic oligonucleotide
ggcuacaugagauagauua

SEQ ID NO: 1731034 - RNA, 19 nt, Artificial Sequence
  Description of Artificial Sequence: Synthetic oligonucleotide
gggucgaugauccagguug

SEQ ID NO: 1731035 - RNA, 19 nt, Artificial Sequence
  Description of Artificial Sequence: Synthetic oligonucleotide
cugaaaagggcuacaugag

SEQ ID NO: 1731036 - RNA, 19 nt, Artificial Sequence
  Description of Artificial Sequence: Synthetic oligonucleotide
agacugaaugacuaauaca

SEQ ID NO: 1731037 - RNA, 19 nt, Artificial Sequence
  Description of Artificial Sequence: Synthetic oligonucleotide
cugugcacgaaguuacagg

SEQ ID NO: 1731038 - RNA, 19 nt, Artificial Sequence
  Description of Artificial Sequence: Synthetic oligonucleotide
cacgcuuuucuucagugag

SEQ ID NO: 1731039 - RNA, 19 nt, Artificial Sequence
  Description of Artificial Sequence: Synthetic oligonucleotide
aaugacuaauacacaccuc

SEQ ID NO: 1731040 - RNA, 19 nt, Artificial Sequence
  Description of Artificial Sequence: Synthetic oligonucleotide
auacacaccucacaagaga

SEQ ID NO: 1731041 - RNA, 19 nt, Artificial Sequence
  Description of Artificial Sequence: Synthetic oligonucleotide
ugagcuaugagcgcugcca

SEQ ID NO: 1731042 - RNA, 19 nt, Artificial Sequence
  Description of Artificial Sequence: Synthetic oligonucleotide
ugucgagacacgcuuuucu

SEQ ID NO: 1731043 - RNA, 19 nt, Artificial Sequence
  Description of Artificial Sequence: Synthetic oligonucleotide
auaauaggcaucggcggcg

SEQ ID NO: 1731044 - RNA, 19 nt, Artificial Sequence
  Description of Artificial Sequence: Synthetic oligonucleotide
aagaacuuguaccgaccug

SEQ ID NO: 1731045 - RNA, 19 nt, Artificial Sequence
  Description of Artificial Sequence: Synthetic oligonucleotide
gaaggaaaccgcuuucgca

SEQ ID NO: 1731046 - RNA, 19 nt, Artificial Sequence
  Description of Artificial Sequence: Synthetic oligonucleotide
aguagggaaucugugcacg

SEQ ID NO: 1731047 - RNA, 19 nt, Artificial Sequence
  Description of Artificial Sequence: Synthetic oligonucleotide
agugccaagguggagcuuc

SEQ ID NO: 1731048 - RNA, 19 nt, Artificial Sequence
  Description of Artificial Sequence: Synthetic oligonucleotide
uacacaccucacaagagau

SEQ ID NO: 1731049 - RNA, 19 nt, Artificial Sequence
  Description of Artificial Sequence: Synthetic oligonucleotide
ucgcugcucggcuucaucg

SEQ ID NO: 1731050 - RNA, 19 nt, Artificial Sequence
  Description of Artificial Sequence: Synthetic oligonucleotide
acaugagauagauuacaga

SEQ ID NO: 1731051 - RNA, 19 nt, Artificial Sequence
  Description of Artificial Sequence: Synthetic oligonucleotide
aaucaagacugaaugacua

SEQ ID NO: 1731052 - RNA, 19 nt, Artificial Sequence
  Description of Artificial Sequence: Synthetic oligonucleotide
gacacgcuuuucuucagug

SEQ ID NO: 1731053 - RNA, 19 nt, Artificial Sequence
  Description of Artificial Sequence: Synthetic oligonucleotide
uccguaguuaauaguuugu

SEQ ID NO: 1731054 - RNA, 19 nt, Artificial Sequence
  Description of Artificial Sequence: Synthetic oligonucleotide
gaaagaacuuguaccgacc

SEQ ID NO: 1731055 - RNA, 19 nt, Artificial Sequence
  Description of Artificial Sequence: Synthetic oligonucleotide
gauggggucgaugauccag

SEQ ID NO: 1731056 - RNA, 19 nt, Artificial Sequence
  Description of Artificial Sequence: Synthetic oligonucleotide
gauuacagagaaaucagcu

SEQ ID NO: 1731057 - RNA, 19 nt, Artificial Sequence
  Description of Artificial Sequence: Synthetic oligonucleotide
ugcaaauccgaugcuaacu

SEQ ID NO: 1731058 - RNA, 19 nt, Artificial Sequence
  Description of Artificial Sequence: Synthetic oligonucleotide
acuugucaucaucccgucc

SEQ ID NO: 1731059 - RNA, 19 nt, Artificial Sequence
  Description of Artificial Sequence: Synthetic oligonucleotide
cucuaaugaugacuguggc

SEQ ID NO: 1731060 - RNA, 19 nt, Artificial Sequence
  Description of Artificial Sequence: Synthetic oligonucleotide
acggugaucugucucuguc

SEQ ID NO: 1731061 - RNA, 19 nt, Artificial Sequence
  Description of Artificial Sequence: Synthetic oligonucleotide
uguggcucacuugucauca

SEQ ID NO: 1731062 - RNA, 19 nt, Artificial Sequence
  Description of Artificial Sequence: Synthetic oligonucleotide
agcuuuauuaccugagauu

SEQ ID NO: 1731063 - RNA, 19 nt, Artificial Sequence
  Description of Artificial Sequence: Synthetic oligonucleotide
guccguaguuaauaguuug

SEQ ID NO: 1731064 - RNA, 19 nt, Artificial Sequence
  Description of Artificial Sequence: Synthetic oligonucleotide
agguggagcuuccaaucac

SEQ ID NO: 1731065 - RNA, 19 nt, Artificial Sequence
  Description of Artificial Sequence: Synthetic oligonucleotide
aauaggcaucggcggcgcc

SEQ ID NO: 1731066 - RNA, 19 nt, Artificial Sequence
  Description of Artificial Sequence: Synthetic oligonucleotide
cucuacaagacaugagguc

SEQ ID NO: 1731067 - RNA, 19 nt, Artificial Sequence
  Description of Artificial Sequence: Synthetic oligonucleotide
aaucacccggaccccauga

SEQ ID NO: 1731068 - RNA, 19 nt, Artificial Sequence
  Description of Artificial Sequence: Synthetic oligonucleotide
ccugaaaagggcuacauga

SEQ ID NO: 1731069 - RNA, 19 nt, Artificial Sequence
  Description of Artificial Sequence: Synthetic oligonucleotide
caaauccgaugcuaacugc

SEQ ID NO: 1731070 - RNA, 19 nt, Artificial Sequence
  Description of Artificial Sequence: Synthetic oligonucleotide
auccgaugcuaacugccac

SEQ ID NO: 1731071 - RNA, 19 nt, Artificial Sequence
  Description of Artificial Sequence: Synthetic oligonucleotide
uuguaccgaccugaaaagg

SEQ ID NO: 1731072 - RNA, 19 nt, Artificial Sequence
  Description of Artificial Sequence: Synthetic oligonucleotide
ucugugcacgaaguuacag

SEQ ID NO: 1731073 - RNA, 19 nt, Artificial Sequence
  Description of Artificial Sequence: Synthetic oligonucleotide
ugaucugucccgcccgcag

SEQ ID NO: 1731074 - RNA, 19 nt, Artificial Sequence
  Description of Artificial Sequence: Synthetic oligonucleotide
ucaagacugaaugacuaau

SEQ ID NO: 1731075 - RNA, 19 nt, Artificial Sequence
  Description of Artificial Sequence: Synthetic oligonucleotide
cacuccgaauuccagcucc

SEQ ID NO: 1731076 - RNA, 19 nt, Artificial Sequence
  Description of Artificial Sequence: Synthetic oligonucleotide
uuauugcauuguauauuac

SEQ ID NO: 1731077 - RNA, 19 nt, Artificial Sequence
  Description of Artificial Sequence: Synthetic oligonucleotide
ucacguuugggcccaauuu

SEQ ID NO: 1731078 - RNA, 19 nt, Artificial Sequence
  Description of Artificial Sequence: Synthetic oligonucleotide
agaaaugauuaagucuucu

SEQ ID NO: 1731079 - RNA, 19 nt, Artificial Sequence
  Description of Artificial Sequence: Synthetic oligonucleotide
ucaucaucccguccguagu

SEQ ID NO: 1731080 - RNA, 19 nt, Artificial Sequence
  Description of Artificial Sequence: Synthetic oligonucleotide
guauauuaccgugggcagg

SEQ ID NO: 1731081 - RNA, 19 nt, Artificial Sequence
  Description of Artificial Sequence: Synthetic oligonucleotide
agaaaucagcucagcaccg

SEQ ID NO: 1731082 - RNA, 19 nt, Artificial Sequence
  Description of Artificial Sequence: Synthetic oligonucleotide
cugaugaucugucccgccc

SEQ ID NO: 1731083 - RNA, 19 nt, Artificial Sequence
  Description of Artificial Sequence: Synthetic oligonucleotide
gagauuuagguuuggcucu

SEQ ID NO: 1731084 - RNA, 19 nt, Artificial Sequence
  Description of Artificial Sequence: Synthetic oligonucleotide
uauuaccgugggcagggga

SEQ ID NO: 1731085 - RNA, 19 nt, Artificial Sequence
  Description of Artificial Sequence: Synthetic oligonucleotide
ucggggucacguuugggcc

SEQ ID NO: 1731086 - RNA, 19 nt, Artificial Sequence
  Description of Artificial Sequence: Synthetic oligonucleotide
cacacuuggccccggaggc

SEQ ID NO: 1731087 - RNA, 19 nt, Artificial Sequence
  Description of Artificial Sequence: Synthetic oligonucleotide
cuuggcguguagcagccgc

SEQ ID NO: 1731088 - RNA, 19 nt, Artificial Sequence
  Description of Artificial Sequence: Synthetic oligonucleotide
ugcaaugaaccugugugaa

SEQ ID NO: 1731089 - RNA, 19 nt, Artificial Sequence
  Description of Artificial Sequence: Synthetic oligonucleotide
cuaacugccacaguaggga

SEQ ID NO: 1731090 - RNA, 19 nt, Artificial Sequence
  Description of Artificial Sequence: Synthetic oligonucleotide
auuaccgugggcaggggag

SEQ ID NO: 1731091 - RNA, 19 nt, Artificial Sequence
  Description of Artificial Sequence: Synthetic oligonucleotide
gcaaauccgaugcuaacug

SEQ ID NO: 1731092 - RNA, 19 nt, Artificial Sequence
  Description of Artificial Sequence: Synthetic oligonucleotide
ggccaaacugauaauaggc

SEQ ID NO: 1731093 - RNA, 19 nt, Artificial Sequence
  Description of Artificial Sequence: Synthetic oligonucleotide
uucgcaacucagaaaugau

SEQ ID NO: 1731094 - RNA, 19 nt, Artificial Sequence
  Description of Artificial Sequence: Synthetic oligonucleotide
uuugucgagacacgcuuuu

SEQ ID NO: 1731095 - RNA, 19 nt, Artificial Sequence
  Description of Artificial Sequence: Synthetic oligonucleotide
gcagcgacgacucuacaag

SEQ ID NO: 1731096 - RNA, 19 nt, Artificial Sequence
  Description of Artificial Sequence: Synthetic oligonucleotide
acaagaucugcagcggaag

SEQ ID NO: 1731097 - RNA, 19 nt, Artificial Sequence
  Description of Artificial Sequence: Synthetic oligonucleotide
ccaccuucagaucaguucc

SEQ ID NO: 1731098 - RNA, 19 nt, Artificial Sequence
  Description of Artificial Sequence: Synthetic oligonucleotide
ucagaucaguuccgcgugc

SEQ ID NO: 1731099 - RNA, 19 nt, Artificial Sequence
  Description of Artificial Sequence: Synthetic oligonucleotide
cacguuugggcccaauuuc

SEQ ID NO: 1731100 - RNA, 19 nt, Artificial Sequence
  Description of Artificial Sequence: Synthetic oligonucleotide
ggcgccugaagccagguag

SEQ ID NO: 1731101 - RNA, 19 nt, Artificial Sequence
  Description of Artificial Sequence: Synthetic oligonucleotide
uaugagcgcugccaucucu

SEQ ID NO: 1731102 - RNA, 19 nt, Artificial Sequence
  Description of Artificial Sequence: Synthetic oligonucleotide
ucgaugauccagguugggc

SEQ ID NO: 1731103 - RNA, 19 nt, Artificial Sequence
  Description of Artificial Sequence: Synthetic oligonucleotide
aacugauaauaggcaucgg

SEQ ID NO: 1731104 - RNA, 19 nt, Artificial Sequence
  Description of Artificial Sequence: Synthetic oligonucleotide
acucuacaagacaugaggu

SEQ ID NO: 1731105 - RNA, 19 nt, Artificial Sequence
  Description of Artificial Sequence: Synthetic oligonucleotide
accuucagaucaguuccgc

SEQ ID NO: 1731106 - RNA, 19 nt, Artificial Sequence
  Description of Artificial Sequence: Synthetic oligonucleotide
aucaagacugaaugacuaa

SEQ ID NO: 1731107 - RNA, 19 nt, Artificial Sequence
  Description of Artificial Sequence: Synthetic oligonucleotide
aauccgaugcuaacugcca

SEQ ID NO: 1731108 - RNA, 19 nt, Artificial Sequence
  Description of Artificial Sequence: Synthetic oligonucleotide
ucgagacacgcuuuucuuc

SEQ ID NO: 1731109 - RNA, 19 nt, Artificial Sequence
  Description of Artificial Sequence: Synthetic oligonucleotide
ucgcaacucagaaaugauu

SEQ ID NO: 1731110 - RNA, 19 nt, Artificial Sequence
  Description of Artificial Sequence: Synthetic oligonucleotide
agcgacgacucuacaagac

SEQ ID NO: 1731111 - RNA, 19 nt, Artificial Sequence
  Description of Artificial Sequence: Synthetic oligonucleotide
uaccgaccugaaaagggcu

SEQ ID NO: 1731112 - RNA, 19 nt, Artificial Sequence
  Description of Artificial Sequence: Synthetic oligonucleotide
ucccguccguaguuaauag

SEQ ID NO: 1731113 - RNA, 19 nt, Artificial Sequence
  Description of Artificial Sequence: Synthetic oligonucleotide
acgacucuacaagacauga

SEQ ID NO: 1731114 - RNA, 19 nt, Artificial Sequence
  Description of Artificial Sequence: Synthetic oligonucleotide
gucacaagaucugcagcgg

SEQ ID NO: 1731115 - RNA, 19 nt, Artificial Sequence
  Description of Artificial Sequence: Synthetic oligonucleotide
auaguuuguaaggccugag

SEQ ID NO: 1731116 - RNA, 19 nt, Artificial Sequence
  Description of Artificial Sequence: Synthetic oligonucleotide
caagccgugccuccgcccg

SEQ ID NO: 1731117 - RNA, 19 nt, Artificial Sequence
  Description of Artificial Sequence: Synthetic oligonucleotide
gcauuguauauuaccgugg

SEQ ID NO: 1731118 - RNA, 19 nt, Artificial Sequence
  Description of Artificial Sequence: Synthetic oligonucleotide
guuacaggugccgucgaug

SEQ ID NO: 1731119 - RNA, 19 nt, Artificial Sequence
  Description of Artificial Sequence: Synthetic oligonucleotide
guaccgaccugaaaagggc

SEQ ID NO: 1731120 - RNA, 19 nt, Artificial Sequence
  Description of Artificial Sequence: Synthetic oligonucleotide
aacugcaaauccgaugcua

SEQ ID NO: 1731121 - RNA, 19 nt, Artificial Sequence
  Description of Artificial Sequence: Synthetic oligonucleotide
uuuugucgagacacgcuuu

SEQ ID NO: 1731122 - RNA, 19 nt, Artificial Sequence
  Description of Artificial Sequence: Synthetic oligonucleotide
accugagauuuacauucug

SEQ ID NO: 1731123 - RNA, 19 nt, Artificial Sequence
  Description of Artificial Sequence: Synthetic oligonucleotide
ucuacacggugaucugucu

SEQ ID NO: 1731124 - RNA, 19 nt, Artificial Sequence
  Description of Artificial Sequence: Synthetic oligonucleotide
accugaggugucuaucaca

SEQ ID NO: 1731125 - RNA, 19 nt, Artificial Sequence
  Description of Artificial Sequence: Synthetic oligonucleotide
agcuaugagcgcugccauc

SEQ ID NO: 1731126 - RNA, 19 nt, Artificial Sequence
  Description of Artificial Sequence: Synthetic oligonucleotide
uuaccgugggcaggggagg

SEQ ID NO: 1731127 - RNA, 19 nt, Artificial Sequence
  Description of Artificial Sequence: Synthetic oligonucleotide
guuuguaaggccugagcua

SEQ ID NO: 1731128 - RNA, 19 nt, Artificial Sequence
  Description of Artificial Sequence: Synthetic oligonucleotide
cuucaucgcggcuccgccg

SEQ ID NO: 1731129 - RNA, 19 nt, Artificial Sequence
  Description of Artificial Sequence: Synthetic oligonucleotide
agcagcgacgacucuacaa

SEQ ID NO: 1731130 - RNA, 19 nt, Artificial Sequence
  Description of Artificial Sequence: Synthetic oligonucleotide
gagaccuggagccgcuggc

SEQ ID NO: 1731131 - RNA, 19 nt, Artificial Sequence
  Description of Artificial Sequence: Synthetic oligonucleotide
aaccgcuuucgcaacucag

SEQ ID NO: 1731132 - RNA, 19 nt, Artificial Sequence
  Description of Artificial Sequence: Synthetic oligonucleotide
aaguuacaggugccgucga

SEQ ID NO: 1731133 - RNA, 19 nt, Artificial Sequence
  Description of Artificial Sequence: Synthetic oligonucleotide
agcaccgagcugugugugg

SEQ ID NO: 1731134 - RNA, 19 nt, Artificial Sequence
  Description of Artificial Sequence: Synthetic oligonucleotide
gagacacgcuuuucuucag

SEQ ID NO: 1731135 - RNA, 19 nt, Artificial Sequence
  Description of Artificial Sequence: Synthetic oligonucleotide
augaaagaacuuguaccga

SEQ ID NO: 1731136 - RNA, 19 nt, Artificial Sequence
  Description of Artificial Sequence: Synthetic oligonucleotide
cuucccgccaagccgugcc

SEQ ID NO: 1731137 - RNA, 19 nt, Artificial Sequence
  Description of Artificial Sequence: Synthetic oligonucleotide
gaucugucccgcccgcagc

SEQ ID NO: 1731138 - RNA, 19 nt, Artificial Sequence
  Description of Artificial Sequence: Synthetic oligonucleotide
cucgccuucccgccaagcc

SEQ ID NO: 1731139 - RNA, 19 nt, Artificial Sequence
  Description of Artificial Sequence: Synthetic oligonucleotide
augcuaacugccacaguag

SEQ ID NO: 1731140 - RNA, 19 nt, Artificial Sequence
  Description of Artificial Sequence: Synthetic oligonucleotide
gcuuucgcaacucagaaau

SEQ ID NO: 1731141 - RNA, 19 nt, Artificial Sequence
  Description of Artificial Sequence: Synthetic oligonucleotide
gacgacucuacaagacaug

SEQ ID NO: 1731142 - RNA, 19 nt, Artificial Sequence
  Description of Artificial Sequence: Synthetic oligonucleotide
guaucggggucacguuugg

SEQ ID NO: 1731143 - RNA, 19 nt, Artificial Sequence
  Description of Artificial Sequence: Synthetic oligonucleotide
caguagggaaucugugcac

SEQ ID NO: 1731144 - RNA, 19 nt, Artificial Sequence
  Description of Artificial Sequence: Synthetic oligonucleotide
cugcaaauccgaugcuaac

SEQ ID NO: 1731145 - RNA, 19 nt, Artificial Sequence
  Description of Artificial Sequence: Synthetic oligonucleotide
caggaucccacucguugcc

SEQ ID NO: 1731146 - RNA, 19 nt, Artificial Sequence
  Description of Artificial Sequence: Synthetic oligonucleotide
agugguggaucacuccgaa

SEQ ID NO: 1731147 - RNA, 19 nt, Artificial Sequence
  Description of Artificial Sequence: Synthetic oligonucleotide
uaauaggcaucggcggcgc

SEQ ID NO: 1731148 - RNA, 19 nt, Artificial Sequence
  Description of Artificial Sequence: Synthetic oligonucleotide
cuacacggugaucugucuc

SEQ ID NO: 1731149 - RNA, 19 nt, Artificial Sequence
  Description of Artificial Sequence: Synthetic oligonucleotide
aucacccggaccccaugag

SEQ ID NO: 1731150 - RNA, 19 nt, Artificial Sequence
  Description of Artificial Sequence: Synthetic oligonucleotide
aggaauacuuucaggguau

SEQ ID NO: 1731151 - RNA, 19 nt, Artificial Sequence
  Description of Artificial Sequence: Synthetic oligonucleotide
uccuggugaacugcaaauc

SEQ ID NO: 1731152 - RNA, 19 nt, Artificial Sequence
  Description of Artificial Sequence: Synthetic oligonucleotide
gcuaacugccacaguaggg

SEQ ID NO: 1731153 - RNA, 19 nt, Artificial Sequence
  Description of Artificial Sequence: Synthetic oligonucleotide
guggaucacuccgaauucc

SEQ ID NO: 1731154 - RNA, 19 nt, Artificial Sequence
  Description of Artificial Sequence: Synthetic oligonucleotide
agaucugcagcggaaguuu

SEQ ID NO: 1731155 - RNA, 19 nt, Artificial Sequence
  Description of Artificial Sequence: Synthetic oligonucleotide
ccggcaaggaguugcagcc

SEQ ID NO: 1731156 - RNA, 19 nt, Artificial Sequence
  Description of Artificial Sequence: Synthetic oligonucleotide
caaucaagacugaaugacu

SEQ ID NO: 1731157 - RNA, 19 nt, Artificial Sequence
  Description of Artificial Sequence: Synthetic oligonucleotide
guacagccgcuccucagug

SEQ ID NO: 1731158 - RNA, 19 nt, Artificial Sequence
  Description of Artificial Sequence: Synthetic oligonucleotide
augagcgcugccaucucuc

SEQ ID NO: 1731159 - RNA, 19 nt, Artificial Sequence
  Description of Artificial Sequence: Synthetic oligonucleotide
acgcuuuucuucagugagg

SEQ ID NO: 1731160 - RNA, 19 nt, Artificial Sequence
  Description of Artificial Sequence: Synthetic oligonucleotide
gagggcuuuucugaugauc

SEQ ID NO: 1731161 - RNA, 19 nt, Artificial Sequence
  Description of Artificial Sequence: Synthetic oligonucleotide
agggcccgagagcaaguuc

SEQ ID NO: 1731162 - RNA, 19 nt, Artificial Sequence
  Description of Artificial Sequence: Synthetic oligonucleotide
uuguaaggccugagcuaug

SEQ ID NO: 1731163 - RNA, 19 nt, Artificial Sequence
  Description of Artificial Sequence: Synthetic oligonucleotide
uuggcguguagcagccgcu

SEQ ID NO: 1731164 - RNA, 19 nt, Artificial Sequence
  Description of Artificial Sequence: Synthetic oligonucleotide
gcaaugaaccugugugaag

SEQ ID NO: 1731165 - RNA, 19 nt, Artificial Sequence
  Description of Artificial Sequence: Synthetic oligonucleotide
ugcucggcuucaucgcggc

SEQ ID NO: 1731166 - RNA, 19 nt, Artificial Sequence
  Description of Artificial Sequence: Synthetic oligonucleotide
acucguugccgccgccaac

SEQ ID NO: 1731167 - RNA, 19 nt, Artificial Sequence
  Description of Artificial Sequence: Synthetic oligonucleotide
gaaaccgcuuucgcaacuc

SEQ ID NO: 1731168 - RNA, 19 nt, Artificial Sequence
  Description of Artificial Sequence: Synthetic oligonucleotide
ucaucccguccguaguuaa

SEQ ID NO: 1731169 - RNA, 19 nt, Artificial Sequence
  Description of Artificial Sequence: Synthetic oligonucleotide
cucacaagagauuuagguu

SEQ ID NO: 1731170 - RNA, 19 nt, Artificial Sequence
  Description of Artificial Sequence: Synthetic oligonucleotide
aaggccuucgagagaucug

SEQ ID NO: 1731171 - RNA, 19 nt, Artificial Sequence
  Description of Artificial Sequence: Synthetic oligonucleotide
cuacaagacaugaggucaa

SEQ ID NO: 1731172 - RNA, 19 nt, Artificial Sequence
  Description of Artificial Sequence: Synthetic oligonucleotide
ugagcgcugccaucucucu

SEQ ID NO: 1731173 - RNA, 19 nt, Artificial Sequence
  Description of Artificial Sequence: Synthetic oligonucleotide
gcuuccaaucacccggacc

SEQ ID NO: 1731174 - RNA, 19 nt, Artificial Sequence
  Description of Artificial Sequence: Synthetic oligonucleotide
acgaaguuacaggugccgu

SEQ ID NO: 1731175 - RNA, 19 nt, Artificial Sequence
  Description of Artificial Sequence: Synthetic oligonucleotide
guagggaaucugugcacga

SEQ ID NO: 1731176 - RNA, 19 nt, Artificial Sequence
  Description of Artificial Sequence: Synthetic oligonucleotide
acguuugggcccaauuucu

SEQ ID NO: 1731177 - RNA, 19 nt, Artificial Sequence
  Description of Artificial Sequence: Synthetic oligonucleotide
cugauuuauugcauuguau

SEQ ID NO: 1731178 - RNA, 19 nt, Artificial Sequence
  Description of Artificial Sequence: Synthetic oligonucleotide
ugaggucaagggguccacc

SEQ ID NO: 1731179 - RNA, 19 nt, Artificial Sequence
  Description of Artificial Sequence: Synthetic oligonucleotide
gguggaucacuccgaauuc

SEQ ID NO: 1731180 - RNA, 19 nt, Artificial Sequence
  Description of Artificial Sequence: Synthetic oligonucleotide
caucggcggcgccugaagc

SEQ ID NO: 1731181 - RNA, 19 nt, Artificial Sequence
  Description of Artificial Sequence: Synthetic oligonucleotide
auguugcucaggaauacuu

SEQ ID NO: 1731182 - RNA, 19 nt, Artificial Sequence
  Description of Artificial Sequence: Synthetic oligonucleotide
aguuacaggugccgucgau

SEQ ID NO: 1731183 - RNA, 19 nt, Artificial Sequence
  Description of Artificial Sequence: Synthetic oligonucleotide
ccuucgagagaucugucuc

SEQ ID NO: 1731184 - RNA, 19 nt, Artificial Sequence
  Description of Artificial Sequence: Synthetic oligonucleotide
cacaagaucugcagcggaa

SEQ ID NO: 1731185 - RNA, 19 nt, Artificial Sequence
  Description of Artificial Sequence: Synthetic oligonucleotide
uccaaucacccggacccca

SEQ ID NO: 1731186 - RNA, 19 nt, Artificial Sequence
  Description of Artificial Sequence: Synthetic oligonucleotide
accgagcuguguguggcuc

SEQ ID NO: 1731187 - RNA, 19 nt, Artificial Sequence
  Description of Artificial Sequence: Synthetic oligonucleotide
uagggaaucugugcacgaa

SEQ ID NO: 1731188 - RNA, 19 nt, Artificial Sequence
  Description of Artificial Sequence: Synthetic oligonucleotide
uccaccugaggugucuauc

SEQ ID NO: 1731189 - RNA, 19 nt, Artificial Sequence
  Description of Artificial Sequence: Synthetic oligonucleotide
aggaucccacucguugccg

SEQ ID NO: 1731190 - RNA, 19 nt, Artificial Sequence
  Description of Artificial Sequence: Synthetic oligonucleotide
gguaucggggucacguuug

SEQ ID NO: 1731191 - RNA, 19 nt, Artificial Sequence
  Description of Artificial Sequence: Synthetic oligonucleotide
accgcuuucgcaacucaga

SEQ ID NO: 1731192 - RNA, 19 nt, Artificial Sequence
  Description of Artificial Sequence: Synthetic oligonucleotide
cacuugucaucaucccguc

SEQ ID NO: 1731193 - RNA, 19 nt, Artificial Sequence
  Description of Artificial Sequence: Synthetic oligonucleotide
gccaaacugauaauaggca

SEQ ID NO: 1731194 - RNA, 19 nt, Artificial Sequence
  Description of Artificial Sequence: Synthetic oligonucleotide
ggucgaugauccagguugg

SEQ ID NO: 1731195 - RNA, 19 nt, Artificial Sequence
  Description of Artificial Sequence: Synthetic oligonucleotide
gccggcaaggaguugcagc

SEQ ID NO: 1731196 - RNA, 19 nt, Artificial Sequence
  Description of Artificial Sequence: Synthetic oligonucleotide
gcuacaugagauagauuac

SEQ ID NO: 1731197 - RNA, 19 nt, Artificial Sequence
  Description of Artificial Sequence: Synthetic oligonucleotide
uggggucgaugauccaggu

SEQ ID NO: 1731198 - RNA, 19 nt, Artificial Sequence
  Description of Artificial Sequence: Synthetic oligonucleotide
auauuaccgugggcagggg

SEQ ID NO: 1731199 - RNA, 19 nt, Artificial Sequence
  Description of Artificial Sequence: Synthetic oligonucleotide
uaggcaucggcggcgccug

SEQ ID NO: 1731200 - RNA, 19 nt, Artificial Sequence
  Description of Artificial Sequence: Synthetic oligonucleotide
ggugucuaucacaaugcca

SEQ ID NO: 1731201 - RNA, 19 nt, Artificial Sequence
  Description of Artificial Sequence: Synthetic oligonucleotide
acugcaccgccacuucgaa

SEQ ID NO: 1731202 - RNA, 19 nt, Artificial Sequence
  Description of Artificial Sequence: Synthetic oligonucleotide
gagauagauuacagagaaa

SEQ ID NO: 1731203 - RNA, 19 nt, Artificial Sequence
  Description of Artificial Sequence: Synthetic oligonucleotide
uucaggguaucggggucac

SEQ ID NO: 1731204 - RNA, 19 nt, Artificial Sequence
  Description of Artificial Sequence: Synthetic oligonucleotide
ggaucacuccgaauuccag

SEQ ID NO: 1731205 - RNA, 19 nt, Artificial Sequence
  Description of Artificial Sequence: Synthetic oligonucleotide
ugucccgcccgcagcgcca

SEQ ID NO: 1731206 - RNA, 19 nt, Artificial Sequence
  Description of Artificial Sequence: Synthetic oligonucleotide
aucccguccguaguuaaua

SEQ ID NO: 1731207 - RNA, 19 nt, Artificial Sequence
  Description of Artificial Sequence: Synthetic oligonucleotide
caaucacccggaccccaug

SEQ ID NO: 1731208 - RNA, 19 nt, Artificial Sequence
  Description of Artificial Sequence: Synthetic oligonucleotide
gugcacgaaguuacaggug

SEQ ID NO: 1731209 - RNA, 19 nt, Artificial Sequence
  Description of Artificial Sequence: Synthetic oligonucleotide
cugcaccgccacuucgaag

SEQ ID NO: 1731210 - RNA, 19 nt, Artificial Sequence
  Description of Artificial Sequence: Synthetic oligonucleotide
cucguugccgccgccaaca

SEQ ID NO: 1731211 - RNA, 19 nt, Artificial Sequence
  Description of Artificial Sequence: Synthetic oligonucleotide
uugucgagacacgcuuuuc

SEQ ID NO: 1731212 - RNA, 19 nt, Artificial Sequence
  Description of Artificial Sequence: Synthetic oligonucleotide
uucucgccuucccgccaag

SEQ ID NO: 1731213 - RNA, 19 nt, Artificial Sequence
  Description of Artificial Sequence: Synthetic oligonucleotide
gcuucaucgcggcuccgcc

SEQ ID NO: 1731214 - RNA, 19 nt, Artificial Sequence
  Description of Artificial Sequence: Synthetic oligonucleotide
gucuaucacaaugccaccu

SEQ ID NO: 1731215 - RNA, 19 nt, Artificial Sequence
  Description of Artificial Sequence: Synthetic oligonucleotide
ucaggguaucggggucacg

SEQ ID NO: 1731216 - RNA, 19 nt, Artificial Sequence
  Description of Artificial Sequence: Synthetic oligonucleotide
gcgacgacucuacaagaca

SEQ ID NO: 1731217 - RNA, 19 nt, Artificial Sequence
  Description of Artificial Sequence: Synthetic oligonucleotide
gugggugagcacacacuug

SEQ ID NO: 1731218 - RNA, 19 nt, Artificial Sequence
  Description of Artificial Sequence: Synthetic oligonucleotide
gcuguguguggcucacuug

SEQ ID NO: 1731219 - RNA, 19 nt, Artificial Sequence
  Description of Artificial Sequence: Synthetic oligonucleotide
cagcgacgacucuacaaga

SEQ ID NO: 1731220 - RNA, 19 nt, Artificial Sequence
  Description of Artificial Sequence: Synthetic oligonucleotide
cuaugagcgcugccaucuc

SEQ ID NO: 1731221 - RNA, 19 nt, Artificial Sequence
  Description of Artificial Sequence: Synthetic oligonucleotide
cagugguggaucacuccga

SEQ ID NO: 1731222 - RNA, 19 nt, Artificial Sequence
  Description of Artificial Sequence: Synthetic oligonucleotide
ugagggcuuuucugaugau

SEQ ID NO: 1731223 - RNA, 19 nt, Artificial Sequence
  Description of Artificial Sequence: Synthetic oligonucleotide
cguaguuaauaguuuguaa

SEQ ID NO: 1731224 - RNA, 19 nt, Artificial Sequence
  Description of Artificial Sequence: Synthetic oligonucleotide
gcgccgugcagcaggaagg

SEQ ID NO: 1731225 - RNA, 19 nt, Artificial Sequence
  Description of Artificial Sequence: Synthetic oligonucleotide
aggguaucggggucacguu

SEQ ID NO: 1731226 - RNA, 19 nt, Artificial Sequence
  Description of Artificial Sequence: Synthetic oligonucleotide
gccacuucgaagcacucgu

SEQ ID NO: 1731227 - RNA, 19 nt, Artificial Sequence
  Description of Artificial Sequence: Synthetic oligonucleotide
ccgucgauggggucgauga

SEQ ID NO: 1731228 - RNA, 19 nt, Artificial Sequence
  Description of Artificial Sequence: Synthetic oligonucleotide
cucgcugcucggcuucauc

SEQ ID NO: 1731229 - RNA, 19 nt, Artificial Sequence
  Description of Artificial Sequence: Synthetic oligonucleotide
caagaucugcagcggaagu

SEQ ID NO: 1731230 - RNA, 19 nt, Artificial Sequence
  Description of Artificial Sequence: Synthetic oligonucleotide
gcuaugagcgcugccaucu

SEQ ID NO: 1731231 - RNA, 19 nt, Artificial Sequence
  Description of Artificial Sequence: Synthetic oligonucleotide
uggcguguagcagccgcuc

SEQ ID NO: 1731232 - RNA, 19 nt, Artificial Sequence
  Description of Artificial Sequence: Synthetic oligonucleotide
agcgccaacugcaccgcca

SEQ ID NO: 1731233 - RNA, 19 nt, Artificial Sequence
  Description of Artificial Sequence: Synthetic oligonucleotide
cugguaccagcagcgacga

SEQ ID NO: 1731234 - RNA, 19 nt, Artificial Sequence
  Description of Artificial Sequence: Synthetic oligonucleotide
ggcguguagcagccgcucc

SEQ ID NO: 1731235 - RNA, 19 nt, Artificial Sequence
  Description of Artificial Sequence: Synthetic oligonucleotide
cgaaguuacaggugccguc

SEQ ID NO: 1731236 - RNA, 19 nt, Artificial Sequence
  Description of Artificial Sequence: Synthetic oligonucleotide
uggagccgcuggccauugc

SEQ ID NO: 1731237 - RNA, 19 nt, Artificial Sequence
  Description of Artificial Sequence: Synthetic oligonucleotide
gucgagacacgcuuuucuu

SEQ ID NO: 1731238 - RNA, 19 nt, Artificial Sequence
  Description of Artificial Sequence: Synthetic oligonucleotide
caaggccuucgagagaucu

SEQ ID NO: 1731239 - RNA, 19 nt, Artificial Sequence
  Description of Artificial Sequence: Synthetic oligonucleotide
cgacucuacaagacaugag

SEQ ID NO: 1731240 - RNA, 19 nt, Artificial Sequence
  Description of Artificial Sequence: Synthetic oligonucleotide
gguguacagccgcuccuca

SEQ ID NO: 1731241 - RNA, 19 nt, Artificial Sequence
  Description of Artificial Sequence: Synthetic oligonucleotide
gcaccgagcuguguguggc

SEQ ID NO: 1731242 - RNA, 19 nt, Artificial Sequence
  Description of Artificial Sequence: Synthetic oligonucleotide
gcaucggcggcgccugaag

SEQ ID NO: 1731243 - RNA, 19 nt, Artificial Sequence
  Description of Artificial Sequence: Synthetic oligonucleotide
uggccccuccugccggugu

SEQ ID NO: 1731244 - RNA, 19 nt, Artificial Sequence
  Description of Artificial Sequence: Synthetic oligonucleotide
augaucugucccgcccgca

SEQ ID NO: 1731245 - RNA, 19 nt, Artificial Sequence
  Description of Artificial Sequence: Synthetic oligonucleotide
cagcaccgagcugugugug

SEQ ID NO: 1731246 - RNA, 19 nt, Artificial Sequence
  Description of Artificial Sequence: Synthetic oligonucleotide
ugccaagguggagcuucca

SEQ ID NO: 1731247 - RNA, 19 nt, Artificial Sequence
  Description of Artificial Sequence: Synthetic oligonucleotide
accgaccugaaaagggcua

SEQ ID NO: 1731248 - RNA, 19 nt, Artificial Sequence
  Description of Artificial Sequence: Synthetic oligonucleotide
ccuccugccgguguacagc

SEQ ID NO: 1731249 - RNA, 19 nt, Artificial Sequence
  Description of Artificial Sequence: Synthetic oligonucleotide
cuucuacacggugaucugu

SEQ ID NO: 1731250 - RNA, 19 nt, Artificial Sequence
  Description of Artificial Sequence: Synthetic oligonucleotide
gugccaagguggagcuucc

SEQ ID NO: 1731251 - RNA, 19 nt, Artificial Sequence
  Description of Artificial Sequence: Synthetic oligonucleotide
ggcuucaucgcggcuccgc

SEQ ID NO: 1731252 - RNA, 19 nt, Artificial Sequence
  Description of Artificial Sequence: Synthetic oligonucleotide
ggaauacuuucaggguauc

SEQ ID NO: 1731253 - RNA, 19 nt, Artificial Sequence
  Description of Artificial Sequence: Synthetic oligonucleotide
cuucucgccuucccgccaa

SEQ ID NO: 1731254 - RNA, 19 nt, Artificial Sequence
  Description of Artificial Sequence: Synthetic oligonucleotide
ugguaccagcagcgacgac

SEQ ID NO: 1731255 - RNA, 19 nt, Artificial Sequence
  Description of Artificial Sequence: Synthetic oligonucleotide
gaaggccggcaaggaguug

SEQ ID NO: 1731256 - RNA, 19 nt, Artificial Sequence
  Description of Artificial Sequence: Synthetic oligonucleotide
gucacguuugggcccaauu

SEQ ID NO: 1731257 - RNA, 19 nt, Artificial Sequence
  Description of Artificial Sequence: Synthetic oligonucleotide
caacaccggaggcuccgca

SEQ ID NO: 1731258 - RNA, 19 nt, Artificial Sequence
  Description of Artificial Sequence: Synthetic oligonucleotide
gcguguagcagccgcucca

SEQ ID NO: 1731259 - RNA, 19 nt, Artificial Sequence
  Description of Artificial Sequence: Synthetic oligonucleotide
cauguugcucaggaauacu

SEQ ID NO: 1731260 - RNA, 19 nt, Artificial Sequence
  Description of Artificial Sequence: Synthetic oligonucleotide
cagcgccaacugcaccgcc

SEQ ID NO: 1731261 - RNA, 19 nt, Artificial Sequence
  Description of Artificial Sequence: Synthetic oligonucleotide
gggaaucugugcacgaagu

SEQ ID NO: 1731262 - RNA, 19 nt, Artificial Sequence
  Description of Artificial Sequence: Synthetic oligonucleotide
gcugcggcuggacccagga

SEQ ID NO: 1731263 - RNA, 19 nt, Artificial Sequence
  Description of Artificial Sequence: Synthetic oligonucleotide
ccaacugcaccgccacuuc

SEQ ID NO: 1731264 - RNA, 19 nt, Artificial Sequence
  Description of Artificial Sequence: Synthetic oligonucleotide
ccgaccugaaaagggcuac

SEQ ID NO: 1731265 - RNA, 19 nt, Artificial Sequence
  Description of Artificial Sequence: Synthetic oligonucleotide
cagcagugaaggccaaacu

SEQ ID NO: 1731266 - RNA, 19 nt, Artificial Sequence
  Description of Artificial Sequence: Synthetic oligonucleotide
ccccaugagccuuggcgug

SEQ ID NO: 1731267 - RNA, 19 nt, Artificial Sequence
  Description of Artificial Sequence: Synthetic oligonucleotide
gcgccaacugcaccgccac

SEQ ID NO: 1731268 - RNA, 19 nt, Artificial Sequence
  Description of Artificial Sequence: Synthetic oligonucleotide
gccaagccgugccuccgcc

SEQ ID NO: 1731269 - RNA, 19 nt, Artificial Sequence
  Description of Artificial Sequence: Synthetic oligonucleotide
ucccgccaagccgugccuc

SEQ ID NO: 1731270 - RNA, 19 nt, Artificial Sequence
  Description of Artificial Sequence: Synthetic oligonucleotide
gggugagcacacacuuggc

SEQ ID NO: 1731271 - RNA, 19 nt, Artificial Sequence
  Description of Artificial Sequence: Synthetic oligonucleotide
gcgccugaagccagguagc

SEQ ID NO: 1731272 - RNA, 19 nt, Artificial Sequence
  Description of Artificial Sequence: Synthetic oligonucleotide
ccaagccgugccuccgccc

SEQ ID NO: 1731273 - RNA, 19 nt, Artificial Sequence
  Description of Artificial Sequence: Synthetic oligonucleotide
ggaaaccgcuuucgcaacu

SEQ ID NO: 1731274 - RNA, 19 nt, Artificial Sequence
  Description of Artificial Sequence: Synthetic oligonucleotide
caccgccacuucgaagcac

SEQ ID NO: 1731275 - RNA, 19 nt, Artificial Sequence
  Description of Artificial Sequence: Synthetic oligonucleotide
cgcgccgugcagcaggaag

SEQ ID NO: 1731276 - RNA, 19 nt, Artificial Sequence
  Description of Artificial Sequence: Synthetic oligonucleotide
cacucguugccgccgccaa

SEQ ID NO: 1731277 - RNA, 19 nt, Artificial Sequence
  Description of Artificial Sequence: Synthetic oligonucleotide
ccguccguaguuaauaguu

SEQ ID NO: 1731278 - RNA, 19 nt, Artificial Sequence
  Description of Artificial Sequence: Synthetic oligonucleotide
gaggcuccgcacgcucuuc

SEQ ID NO: 1731279 - RNA, 19 nt, Artificial Sequence
  Description of Artificial Sequence: Synthetic oligonucleotide
caucaucccguccguaguu

SEQ ID NO: 1731280 - RNA, 19 nt, Artificial Sequence
  Description of Artificial Sequence: Synthetic oligonucleotide
gaucugcagcggaaguuuu

SEQ ID NO: 1731281 - RNA, 19 nt, Artificial Sequence
  Description of Artificial Sequence: Synthetic oligonucleotide
ccgcuuucgcaacucagaa

SEQ ID NO: 1731282 - RNA, 19 nt, Artificial Sequence
  Description of Artificial Sequence: Synthetic oligonucleotide
ccgccgccaacaccggagg

SEQ ID NO: 1731283 - RNA, 19 nt, Artificial Sequence
  Description of Artificial Sequence: Synthetic oligonucleotide
cgugccuccgcccgcgcgc

SEQ ID NO: 1731284 - RNA, 19 nt, Artificial Sequence
  Description of Artificial Sequence: Synthetic oligonucleotide
cgccacuucgaagcacucg

SEQ ID NO: 1731285 - RNA, 19 nt, Artificial Sequence
  Description of Artificial Sequence: Synthetic oligonucleotide
ggugaacugcaaauccgau

SEQ ID NO: 1731286 - RNA, 19 nt, Artificial Sequence
  Description of Artificial Sequence: Synthetic oligonucleotide
cacggugaucugucucugu

SEQ ID NO: 1731287 - RNA, 19 nt, Artificial Sequence
  Description of Artificial Sequence: Synthetic oligonucleotide
caggugccgucgauggggu

SEQ ID NO: 1731288 - RNA, 19 nt, Artificial Sequence
  Description of Artificial Sequence: Synthetic oligonucleotide
caucccguccguaguuaau

SEQ ID NO: 1731289 - RNA, 19 nt, Artificial Sequence
  Description of Artificial Sequence: Synthetic oligonucleotide
ggguaucggggucacguuu

SEQ ID NO: 1731290 - RNA, 19 nt, Artificial Sequence
  Description of Artificial Sequence: Synthetic oligonucleotide
cuccgccgggccccgccac

SEQ ID NO: 1731291 - RNA, 19 nt, Artificial Sequence
  Description of Artificial Sequence: Synthetic oligonucleotide
cagcagcgacgacucuaca

SEQ ID NO: 1731292 - RNA, 19 nt, Artificial Sequence
  Description of Artificial Sequence: Synthetic oligonucleotide
gccgucgauggggucgaug

SEQ ID NO: 1731293 - RNA, 19 nt, Artificial Sequence
  Description of Artificial Sequence: Synthetic oligonucleotide
ggccggcaaggaguugcag

SEQ ID NO: 1731294 - RNA, 19 nt, Artificial Sequence
  Description of Artificial Sequence: Synthetic oligonucleotide
aggcaucggcggcgccuga

SEQ ID NO: 1731295 - RNA, 19 nt, Artificial Sequence
  Description of Artificial Sequence: Synthetic oligonucleotide
cgcgugcugcggcuggacc

SEQ ID NO: 1731296 - RNA, 19 nt, Artificial Sequence
  Description of Artificial Sequence: Synthetic oligonucleotide
gccaacugcaccgccacuu

SEQ ID NO: 1731297 - RNA, 19 nt, Artificial Sequence
  Description of Artificial Sequence: Synthetic oligonucleotide
ccgugccuccgcccgcgcg

SEQ ID NO: 1731298 - RNA, 19 nt, Artificial Sequence
  Description of Artificial Sequence: Synthetic oligonucleotide
ccuuggcguguagcagccg

SEQ ID NO: 1731299 - RNA, 19 nt, Artificial Sequence
  Description of Artificial Sequence: Synthetic oligonucleotide
caccgagcuguguguggcu

SEQ ID NO: 1731300 - RNA, 19 nt, Artificial Sequence
  Description of Artificial Sequence: Synthetic oligonucleotide
cgccgugcagcaggaaggc

SEQ ID NO: 1731301 - RNA, 19 nt, Artificial Sequence
  Description of Artificial Sequence: Synthetic oligonucleotide
ggaaggccggcaaggaguu

SEQ ID NO: 1731302 - RNA, 19 nt, Artificial Sequence
  Description of Artificial Sequence: Synthetic oligonucleotide
ccgccaagccgugccuccg

SEQ ID NO: 1731303 - RNA, 19 nt, Artificial Sequence
  Description of Artificial Sequence: Synthetic oligonucleotide
cuccgcccgcgcgccgugc

SEQ ID NO: 1731304 - RNA, 19 nt, Artificial Sequence
  Description of Artificial Sequence: Synthetic oligonucleotide
cccguccguaguuaauagu

SEQ ID NO: 1731305 - RNA, 19 nt, Artificial Sequence
  Description of Artificial Sequence: Synthetic oligonucleotide
ccgccacuucgaagcacuc

SEQ ID NO: 1731306 - RNA, 19 nt, Artificial Sequence
  Description of Artificial Sequence: Synthetic oligonucleotide
gagcuguguguggcucacu

SEQ ID NO: 1731307 - RNA, 19 nt, Artificial Sequence
  Description of Artificial Sequence: Synthetic oligonucleotide
gguccaccugaggugucua

SEQ ID NO: 1731308 - RNA, 19 nt, Artificial Sequence
  Description of Artificial Sequence: Synthetic oligonucleotide
cgccaagccgugccuccgc

SEQ ID NO: 1731309 - RNA, 19 nt, Artificial Sequence
  Description of Artificial Sequence: Synthetic oligonucleotide
ggggucgaugauccagguu

SEQ ID NO: 1731310 - RNA, 19 nt, Artificial Sequence
  Description of Artificial Sequence: Synthetic oligonucleotide
ggaggcuccgcacgcucuu

SEQ ID NO: 1731311 - RNA, 19 nt, Artificial Sequence
  Description of Artificial Sequence: Synthetic oligonucleotide
ggcaucggcggcgccugaa

SEQ ID NO: 1731312 - RNA, 19 nt, Artificial Sequence
  Description of Artificial Sequence: Synthetic oligonucleotide
ccacucguugccgccgcca

SEQ ID NO: 1731313 - RNA, 19 nt, Artificial Sequence
  Description of Artificial Sequence: Synthetic oligonucleotide
cguccguaguuaauaguuu

SEQ ID NO: 1731314 - RNA, 19 nt, Artificial Sequence
  Description of Artificial Sequence: Synthetic oligonucleotide
cgugcugcggcuggaccca

SEQ ID NO: 1731315 - RNA, 19 nt, Artificial Sequence
  Description of Artificial Sequence: Synthetic oligonucleotide
ccgguguacagccgcuccu

SEQ ID NO: 1731316 - RNA, 19 nt, Artificial Sequence
  Description of Artificial Sequence: Synthetic oligonucleotide
ugccgucgauggggucgau

SEQ ID NO: 1731317 - RNA, 19 nt, Artificial Sequence
  Description of Artificial Sequence: Synthetic oligonucleotide
gcgcugccaucucucuggu

SEQ ID NO: 1731318 - RNA, 19 nt, Artificial Sequence
  Description of Artificial Sequence: Synthetic oligonucleotide
ccaugagccuuggcgugua

SEQ ID NO: 1731319 - RNA, 19 nt, Artificial Sequence
  Description of Artificial Sequence: Synthetic oligonucleotide
cgauggggucgaugaucca

SEQ ID NO: 1731320 - RNA, 19 nt, Artificial Sequence
  Description of Artificial Sequence: Synthetic oligonucleotide
ccgcgugcugcggcuggac

SEQ ID NO: 1731321 - RNA, 19 nt, Artificial Sequence
  Description of Artificial Sequence: Synthetic oligonucleotide
gcucggcuucaucgcggcu

SEQ ID NO: 1731322 - RNA, 19 nt, Artificial Sequence
  Description of Artificial Sequence: Synthetic oligonucleotide
cccaugagccuuggcgugu

SEQ ID NO: 1731323 - RNA, 19 nt, Artificial Sequence
  Description of Artificial Sequence: Synthetic oligonucleotide
gggcuacaugagauagauu

SEQ ID NO: 1731324 - RNA, 19 nt, Artificial Sequence
  Description of Artificial Sequence: Synthetic oligonucleotide
ccgcacgcucuucucgccu

SEQ ID NO: 1731325 - RNA, 19 nt, Artificial Sequence
  Description of Artificial Sequence: Synthetic oligonucleotide
ggucacguuugggcccaau

SEQ ID NO: 1731326 - RNA, 19 nt, Artificial Sequence
  Description of Artificial Sequence: Synthetic oligonucleotide
ccuccucgcugcucggcuu

SEQ ID NO: 1731327 - RNA, 19 nt, Artificial Sequence
  Description of Artificial Sequence: Synthetic oligonucleotide
ccuggagccgcuggccauu

SEQ ID NO: 1731328 - RNA, 19 nt, Artificial Sequence
  Description of Artificial Sequence: Synthetic oligonucleotide
gggucacguuugggcccaa

SEQ ID NO: 1731329 - RNA, 19 nt, Artificial Sequence
  Description of Artificial Sequence: Synthetic oligonucleotide
gcgcgccgugcagcaggaa

SEQ ID NO: 1731330 - RNA, 19 nt, Artificial Sequence
  Description of Artificial Sequence: Synthetic oligonucleotide
auagguaucguauaguccc

SEQ ID NO: 1731331 - RNA, 19 nt, Artificial Sequence
  Description of Artificial Sequence: Synthetic oligonucleotide
aaaauauugcuccaccuac

SEQ ID NO: 1731332 - RNA, 19 nt, Artificial Sequence
  Description of Artificial Sequence: Synthetic oligonucleotide
aauuaauccuauguggagc

SEQ ID NO: 1731333 - RNA, 19 nt, Artificial Sequence
  Description of Artificial Sequence: Synthetic oligonucleotide
ugagacauaaguuugccag

SEQ ID NO: 1731334 - RNA, 19 nt, Artificial Sequence
  Description of Artificial Sequence: Synthetic oligonucleotide
aagggugucuuucaaacac

SEQ ID NO: 1731335 - RNA, 19 nt, Artificial Sequence
  Description of Artificial Sequence: Synthetic oligonucleotide
gaagauauuuagaugaagg

SEQ ID NO: 1731336 - RNA, 19 nt, Artificial Sequence
  Description of Artificial Sequence: Synthetic oligonucleotide
aaagaacuaaaguauguca

SEQ ID NO: 1731337 - RNA, 19 nt, Artificial Sequence
  Description of Artificial Sequence: Synthetic oligonucleotide
uaauauacuagccuccugc

SEQ ID NO: 1731338 - RNA, 19 nt, Artificial Sequence
  Description of Artificial Sequence: Synthetic oligonucleotide
aauggaagcuacuagauuu

SEQ ID NO: 1731339 - RNA, 19 nt, Artificial Sequence
  Description of Artificial Sequence: Synthetic oligonucleotide
uuuuagcaaagacacaucc

SEQ ID NO: 1731340 - RNA, 19 nt, Artificial Sequence
  Description of Artificial Sequence: Synthetic oligonucleotide
agaacaacagaucaggaug

SEQ ID NO: 1731341 - RNA, 19 nt, Artificial Sequence
  Description of Artificial Sequence: Synthetic oligonucleotide
aguauguccaguauggugc

SEQ ID NO: 1731342 - RNA, 19 nt, Artificial Sequence
  Description of Artificial Sequence: Synthetic oligonucleotide
cuugaagauauuuagauga

SEQ ID NO: 1731343 - RNA, 19 nt, Artificial Sequence
  Description of Artificial Sequence: Synthetic oligonucleotide
aauauaauaauuaauccua

SEQ ID NO: 1731344 - RNA, 19 nt, Artificial Sequence
  Description of Artificial Sequence: Synthetic oligonucleotide
uuuuauagaucauuauugc

SEQ ID NO: 1731345 - RNA, 19 nt, Artificial Sequence
  Description of Artificial Sequence: Synthetic oligonucleotide
aaaguaugucaucauauca

SEQ ID NO: 1731346 - RNA, 19 nt, Artificial Sequence
  Description of Artificial Sequence: Synthetic oligonucleotide
uauagauaauauacuagcc

SEQ ID NO: 1731347 - RNA, 19 nt, Artificial Sequence
  Description of Artificial Sequence: Synthetic oligonucleotide
auaaagacgaucauuaaag

SEQ ID NO: 1731348 - RNA, 19 nt, Artificial Sequence
  Description of Artificial Sequence: Synthetic oligonucleotide
auaaguuugccagugagcg

SEQ ID NO: 1731349 - RNA, 19 nt, Artificial Sequence
  Description of Artificial Sequence: Synthetic oligonucleotide
uauccauagaacaacauau

SEQ ID NO: 1731350 - RNA, 19 nt, Artificial Sequence
  Description of Artificial Sequence: Synthetic oligonucleotide
aagauauuuagaugaaggu

SEQ ID NO: 1731351 - RNA, 19 nt, Artificial Sequence
  Description of Artificial Sequence: Synthetic oligonucleotide
aaagacgaucauuaaagcu

SEQ ID NO: 1731352 - RNA, 19 nt, Artificial Sequence
  Description of Artificial Sequence: Synthetic oligonucleotide
uauagucccacauuguugc

SEQ ID NO: 1731353 - RNA, 19 nt, Artificial Sequence
  Description of Artificial Sequence: Synthetic oligonucleotide
uugaacaggaaaauauugc

SEQ ID NO: 1731354 - RNA, 19 nt, Artificial Sequence
  Description of Artificial Sequence: Synthetic oligonucleotide
aauagguaucguauagucc

SEQ ID NO: 1731355 - RNA, 19 nt, Artificial Sequence
  Description of Artificial Sequence: Synthetic oligonucleotide
uaagguauaaaggcaaggg

SEQ ID NO: 1731356 - RNA, 19 nt, Artificial Sequence
  Description of Artificial Sequence: Synthetic oligonucleotide
auagauaauauacuagccu

SEQ ID NO: 1731357 - RNA, 19 nt, Artificial Sequence
  Description of Artificial Sequence: Synthetic oligonucleotide
ucuagaauagguaucguau

SEQ ID NO: 1731358 - RNA, 19 nt, Artificial Sequence
  Description of Artificial Sequence: Synthetic oligonucleotide
uuacuagucagucaauaug

SEQ ID NO: 1731359 - RNA, 19 nt, Artificial Sequence
  Description of Artificial Sequence: Synthetic oligonucleotide
aucgauggcauccagugac

SEQ ID NO: 1731360 - RNA, 19 nt, Artificial Sequence
  Description of Artificial Sequence: Synthetic oligonucleotide
gaaaugaccauugcuaucc

SEQ ID NO: 1731361 - RNA, 19 nt, Artificial Sequence
  Description of Artificial Sequence: Synthetic oligonucleotide
auuucuagaauagguaucg

SEQ ID NO: 1731362 - RNA, 19 nt, Artificial Sequence
  Description of Artificial Sequence: Synthetic oligonucleotide
agcgcaguaaaacaagaac

SEQ ID NO: 1731363 - RNA, 19 nt, Artificial Sequence
  Description of Artificial Sequence: Synthetic oligonucleotide
uagaauagguaucguauag

SEQ ID NO: 1731364 - RNA, 19 nt, Artificial Sequence
  Description of Artificial Sequence: Synthetic oligonucleotide
ugaaggaucacauggaaau

SEQ ID NO: 1731365 - RNA, 19 nt, Artificial Sequence
  Description of Artificial Sequence: Synthetic oligonucleotide
auaguagauccauucuugc

SEQ ID NO: 1731366 - RNA, 19 nt, Artificial Sequence
  Description of Artificial Sequence: Synthetic oligonucleotide
uagauaauauacuagccuc

SEQ ID NO: 1731367 - RNA, 19 nt, Artificial Sequence
  Description of Artificial Sequence: Synthetic oligonucleotide
uguggaaagagagucacag

SEQ ID NO: 1731368 - RNA, 19 nt, Artificial Sequence
  Description of Artificial Sequence: Synthetic oligonucleotide
gucaauaugcuugugaacc

SEQ ID NO: 1731369 - RNA, 19 nt, Artificial Sequence
  Description of Artificial Sequence: Synthetic oligonucleotide
cuuccaaaucucaauaccc

SEQ ID NO: 1731370 - RNA, 19 nt, Artificial Sequence
  Description of Artificial Sequence: Synthetic oligonucleotide
aaguauguccaguauggug

SEQ ID NO: 1731371 - RNA, 19 nt, Artificial Sequence
  Description of Artificial Sequence: Synthetic oligonucleotide
uaauuaauccuauguggag

SEQ ID NO: 1731372 - RNA, 19 nt, Artificial Sequence
  Description of Artificial Sequence: Synthetic oligonucleotide
agaacuaaaguaugucauc

SEQ ID NO: 1731373 - RNA, 19 nt, Artificial Sequence
  Description of Artificial Sequence: Synthetic oligonucleotide
uuuauguuuuacauuuaac

SEQ ID NO: 1731374 - RNA, 19 nt, Artificial Sequence
  Description of Artificial Sequence: Synthetic oligonucleotide
aagguauaaaggcaagggu

SEQ ID NO: 1731375 - RNA, 19 nt, Artificial Sequence
  Description of Artificial Sequence: Synthetic oligonucleotide
aucucaguuacauccacuc

SEQ ID NO: 1731376 - RNA, 19 nt, Artificial Sequence
  Description of Artificial Sequence: Synthetic oligonucleotide
guagacaauauaaagacga

SEQ ID NO: 1731377 - RNA, 19 nt, Artificial Sequence
  Description of Artificial Sequence: Synthetic oligonucleotide
aucguauagucccacauug

SEQ ID NO: 1731378 - RNA, 19 nt, Artificial Sequence
  Description of Artificial Sequence: Synthetic oligonucleotide
cauuaaagcuaccugaauc

SEQ ID NO: 1731379 - RNA, 19 nt, Artificial Sequence
  Description of Artificial Sequence: Synthetic oligonucleotide
aauauacuagccuccugca

SEQ ID NO: 1731380 - RNA, 19 nt, Artificial Sequence
  Description of Artificial Sequence: Synthetic oligonucleotide
agauauuuagaugaaggug

SEQ ID NO: 1731381 - RNA, 19 nt, Artificial Sequence
  Description of Artificial Sequence: Synthetic oligonucleotide
auaucaaaugaagaaauga

SEQ ID NO: 1731382 - RNA, 19 nt, Artificial Sequence
  Description of Artificial Sequence: Synthetic oligonucleotide
gaauagguaucguauaguc

SEQ ID NO: 1731383 - RNA, 19 nt, Artificial Sequence
  Description of Artificial Sequence: Synthetic oligonucleotide
aagaacaacagaucaggau

SEQ ID NO: 1731384 - RNA, 19 nt, Artificial Sequence
  Description of Artificial Sequence: Synthetic oligonucleotide
agauaauauacuagccucc

SEQ ID NO: 1731385 - RNA, 19 nt, Artificial Sequence
  Description of Artificial Sequence: Synthetic oligonucleotide
uuaagguauaaaggcaagg

SEQ ID NO: 1731386 - RNA, 19 nt, Artificial Sequence
  Description of Artificial Sequence: Synthetic oligonucleotide
aauggccauaaauacugug

SEQ ID NO: 1731387 - RNA, 19 nt, Artificial Sequence
  Description of Artificial Sequence: Synthetic oligonucleotide
uccauagaacaacauauuc

SEQ ID NO: 1731388 - RNA, 19 nt, Artificial Sequence
  Description of Artificial Sequence: Synthetic oligonucleotide
aagacccggaccaacaaac

SEQ ID NO: 1731389 - RNA, 19 nt, Artificial Sequence
  Description of Artificial Sequence: Synthetic oligonucleotide
acauaauggaagcuacuag

SEQ ID NO: 1731390 - RNA, 19 nt, Artificial Sequence
  Description of Artificial Sequence: Synthetic oligonucleotide
uaaagacgaucauuaaagc

SEQ ID NO: 1731391 - RNA, 19 nt, Artificial Sequence
  Description of Artificial Sequence: Synthetic oligonucleotide
uauagaucauuauugccaa

SEQ ID NO: 1731392 - RNA, 19 nt, Artificial Sequence
  Description of Artificial Sequence: Synthetic oligonucleotide
ccaauauaauaauuaaucc

SEQ ID NO: 1731393 - RNA, 19 nt, Artificial Sequence
  Description of Artificial Sequence: Synthetic oligonucleotide
aagacgaucauuaaagcua

SEQ ID NO: 1731394 - RNA, 19 nt, Artificial Sequence
  Description of Artificial Sequence: Synthetic oligonucleotide
uauuucuagaauagguauc

SEQ ID NO: 1731395 - RNA, 19 nt, Artificial Sequence
  Description of Artificial Sequence: Synthetic oligonucleotide
uauacuagccuccugcaua

SEQ ID NO: 1731396 - RNA, 19 nt, Artificial Sequence
  Description of Artificial Sequence: Synthetic oligonucleotide
agacacaaagaacuaaagu

SEQ ID NO: 1731397 - RNA, 19 nt, Artificial Sequence
  Description of Artificial Sequence: Synthetic oligonucleotide
uaaaguaugucaucauauc

SEQ ID NO: 1731398 - RNA, 19 nt, Artificial Sequence
  Description of Artificial Sequence: Synthetic oligonucleotide
uaaagcuaccugaaucuca

SEQ ID NO: 1731399 - RNA, 19 nt, Artificial Sequence
  Description of Artificial Sequence: Synthetic oligonucleotide
auaauuaauccuaugugga

SEQ ID NO: 1731400 - RNA, 19 nt, Artificial Sequence
  Description of Artificial Sequence: Synthetic oligonucleotide
aaauuugcagacacaaaga

SEQ ID NO: 1731401 - RNA, 19 nt, Artificial Sequence
  Description of Artificial Sequence: Synthetic oligonucleotide
ggugucuugaaauuugcag

SEQ ID NO: 1731402 - RNA, 19 nt, Artificial Sequence
  Description of Artificial Sequence: Synthetic oligonucleotide
uacuacuccaagaacugga

SEQ ID NO: 1731403 - RNA, 19 nt, Artificial Sequence
  Description of Artificial Sequence: Synthetic oligonucleotide
agaaaugaccauugcuauc

SEQ ID NO: 1731404 - RNA, 19 nt, Artificial Sequence
  Description of Artificial Sequence: Synthetic oligonucleotide
uccagugacugguagauaa

SEQ ID NO: 1731405 - RNA, 19 nt, Artificial Sequence
  Description of Artificial Sequence: Synthetic oligonucleotide
aaggugucuugaaauuugc

SEQ ID NO: 1731406 - RNA, 19 nt, Artificial Sequence
  Description of Artificial Sequence: Synthetic oligonucleotide
cauaaguuugccagugagc

SEQ ID NO: 1731407 - RNA, 19 nt, Artificial Sequence
  Description of Artificial Sequence: Synthetic oligonucleotide
agacaauauaaagacgauc

SEQ ID NO: 1731408 - RNA, 19 nt, Artificial Sequence
  Description of Artificial Sequence: Synthetic oligonucleotide
auuguugcaccuccaaaug

SEQ ID NO: 1731409 - RNA, 19 nt, Artificial Sequence
  Description of Artificial Sequence: Synthetic oligonucleotide
uuccuucacacauagguuc

SEQ ID NO: 1731410 - RNA, 19 nt, Artificial Sequence
  Description of Artificial Sequence: Synthetic oligonucleotide
caauauaauaauuaauccu

SEQ ID NO: 1731411 - RNA, 19 nt, Artificial Sequence
  Description of Artificial Sequence: Synthetic oligonucleotide
uggccauaaauacugugga

SEQ ID NO: 1731412 - RNA, 19 nt, Artificial Sequence
  Description of Artificial Sequence: Synthetic oligonucleotide
aauauugcuccaccuacua

SEQ ID NO: 1731413 - RNA, 19 nt, Artificial Sequence
  Description of Artificial Sequence: Synthetic oligonucleotide
auggccauaaauacugugg

SEQ ID NO: 1731414 - RNA, 19 nt, Artificial Sequence
  Description of Artificial Sequence: Synthetic oligonucleotide
agcuacuagauuuauguuu

SEQ ID NO: 1731415 - RNA, 19 nt, Artificial Sequence
  Description of Artificial Sequence: Synthetic oligonucleotide
gaagauauaguucacuuuu

SEQ ID NO: 1731416 - RNA, 19 nt, Artificial Sequence
  Description of Artificial Sequence: Synthetic oligonucleotide
aaguaugucaucauaucaa

SEQ ID NO: 1731417 - RNA, 19 nt, Artificial Sequence
  Description of Artificial Sequence: Synthetic oligonucleotide
aauacuguggaaagagagu

SEQ ID NO: 1731418 - RNA, 19 nt, Artificial Sequence
  Description of Artificial Sequence: Synthetic oligonucleotide
uuauuaaaauauuggucua

SEQ ID NO: 1731419 - RNA, 19 nt, Artificial Sequence
  Description of Artificial Sequence: Synthetic oligonucleotide
aacacugguaccugcaaua

SEQ ID NO: 1731420 - RNA, 19 nt, Artificial Sequence
  Description of Artificial Sequence: Synthetic oligonucleotide
gaacuaaaguaugucauca

SEQ ID NO: 1731421 - RNA, 19 nt, Artificial Sequence
  Description of Artificial Sequence: Synthetic oligonucleotide
uaguagauccauucuugcc

SEQ ID NO: 1731422 - RNA, 19 nt, Artificial Sequence
  Description of Artificial Sequence: Synthetic oligonucleotide
uucccaagcgaacagcaac

SEQ ID NO: 1731423 - RNA, 19 nt, Artificial Sequence
  Description of Artificial Sequence: Synthetic oligonucleotide
gccaauauaauaauuaauc

SEQ ID NO: 1731424 - RNA, 19 nt, Artificial Sequence
  Description of Artificial Sequence: Synthetic oligonucleotide
acaacauauucaucuauaa

SEQ ID NO: 1731425 - RNA, 19 nt, Artificial Sequence
  Description of Artificial Sequence: Synthetic oligonucleotide
agcggaauccauuggagca

SEQ ID NO: 1731426 - RNA, 19 nt, Artificial Sequence
  Description of Artificial Sequence: Synthetic oligonucleotide
uccaguaaagcugcagcgg

SEQ ID NO: 1731427 - RNA, 19 nt, Artificial Sequence
  Description of Artificial Sequence: Synthetic oligonucleotide
auaagaggauuuccuucac

SEQ ID NO: 1731428 - RNA, 19 nt, Artificial Sequence
  Description of Artificial Sequence: Synthetic oligonucleotide
guccaguaaagcugcagcg

SEQ ID NO: 1731429 - RNA, 19 nt, Artificial Sequence
  Description of Artificial Sequence: Synthetic oligonucleotide
ugucaucauaucaaaugaa

SEQ ID NO: 1731430 - RNA, 19 nt, Artificial Sequence
  Description of Artificial Sequence: Synthetic oligonucleotide
aguaugucaucauaucaaa

SEQ ID NO: 1731431 - RNA, 19 nt, Artificial Sequence
  Description of Artificial Sequence: Synthetic oligonucleotide
ugcuuguugauaugaaguc

SEQ ID NO: 1731432 - RNA, 19 nt, Artificial Sequence
  Description of Artificial Sequence: Synthetic oligonucleotide
gaaaauauugcuccaccua

SEQ ID NO: 1731433 - RNA, 19 nt, Artificial Sequence
  Description of Artificial Sequence: Synthetic oligonucleotide
agacgaucauuaaagcuac

SEQ ID NO: 1731434 - RNA, 19 nt, Artificial Sequence
  Description of Artificial Sequence: Synthetic oligonucleotide
acuaaaguaugucaucaua

SEQ ID NO: 1731435 - RNA, 19 nt, Artificial Sequence
  Description of Artificial Sequence: Synthetic oligonucleotide
ugcuauccauagaacaaca

SEQ ID NO: 1731436 - RNA, 19 nt, Artificial Sequence
  Description of Artificial Sequence: Synthetic oligonucleotide
aacuaaaguaugucaucau

SEQ ID NO: 1731437 - RNA, 19 nt, Artificial Sequence
  Description of Artificial Sequence: Synthetic oligonucleotide
caagcgaacagcaacugca

SEQ ID NO: 1731438 - RNA, 19 nt, Artificial Sequence
  Description of Artificial Sequence: Synthetic oligonucleotide
caggauguguucccaagcg

SEQ ID NO: 1731439 - RNA, 19 nt, Artificial Sequence
  Description of Artificial Sequence: Synthetic oligonucleotide
ugagcgcaguaaaacaaga

SEQ ID NO: 1731440 - RNA, 19 nt, Artificial Sequence
  Description of Artificial Sequence: Synthetic oligonucleotide
aguuacauccacucuucca

SEQ ID NO: 1731441 - RNA, 19 nt, Artificial Sequence
  Description of Artificial Sequence: Synthetic oligonucleotide
auaauuugaacaggaaaau

SEQ ID NO: 1731442 - RNA, 19 nt, Artificial Sequence
  Description of Artificial Sequence: Synthetic oligonucleotide
uaccugcaauaguagaucc

SEQ ID NO: 1731443 - RNA, 19 nt, Artificial Sequence
  Description of Artificial Sequence: Synthetic oligonucleotide
gauggcgaggccgaugagg

SEQ ID NO: 1731444 - RNA, 19 nt, Artificial Sequence
  Description of Artificial Sequence: Synthetic oligonucleotide
uuugugcaauuuuagcaaa

SEQ ID NO: 1731445 - RNA, 19 nt, Artificial Sequence
  Description of Artificial Sequence: Synthetic oligonucleotide
ugugcaauuuuagcaaaga

SEQ ID NO: 1731446 - RNA, 19 nt, Artificial Sequence
  Description of Artificial Sequence: Synthetic oligonucleotide
uucuagaauagguaucgua

SEQ ID NO: 1731447 - RNA, 19 nt, Artificial Sequence
  Description of Artificial Sequence: Synthetic oligonucleotide
acagccaugaucaaacagu

SEQ ID NO: 1731448 - RNA, 19 nt, Artificial Sequence
  Description of Artificial Sequence: Synthetic oligonucleotide
ugaagauauaguucacuuu

SEQ ID NO: 1731449 - RNA, 19 nt, Artificial Sequence
  Description of Artificial Sequence: Synthetic oligonucleotide
uuuccugggguuacuaguc

SEQ ID NO: 1731450 - RNA, 19 nt, Artificial Sequence
  Description of Artificial Sequence: Synthetic oligonucleotide
uguugcaccuccaaaugua

SEQ ID NO: 1731451 - RNA, 19 nt, Artificial Sequence
  Description of Artificial Sequence: Synthetic oligonucleotide
ugguagauaaagaguccca

SEQ ID NO: 1731452 - RNA, 19 nt, Artificial Sequence
  Description of Artificial Sequence: Synthetic oligonucleotide
aguaaagcugcagcggcgg

SEQ ID NO: 1731453 - RNA, 19 nt, Artificial Sequence
  Description of Artificial Sequence: Synthetic oligonucleotide
uauggugccuccucuguga

SEQ ID NO: 1731454 - RNA, 19 nt, Artificial Sequence
  Description of Artificial Sequence: Synthetic oligonucleotide
cugguagauaaagaguccc

SEQ ID NO: 1731455 - RNA, 19 nt, Artificial Sequence
  Description of Artificial Sequence: Synthetic oligonucleotide
auaaccuuauagauaauau

SEQ ID NO: 1731456 - RNA, 19 nt, Artificial Sequence
  Description of Artificial Sequence: Synthetic oligonucleotide
aaaagacccggaccaacaa

SEQ ID NO: 1731457 - RNA, 19 nt, Artificial Sequence
  Description of Artificial Sequence: Synthetic oligonucleotide
agucccagggcacauaaaa

SEQ ID NO: 1731458 - RNA, 19 nt, Artificial Sequence
  Description of Artificial Sequence: Synthetic oligonucleotide
cauagaacaacauauucau

SEQ ID NO: 1731459 - RNA, 19 nt, Artificial Sequence
  Description of Artificial Sequence: Synthetic oligonucleotide
aaggcaagggugucuuuca

SEQ ID NO: 1731460 - RNA, 19 nt, Artificial Sequence
  Description of Artificial Sequence: Synthetic oligonucleotide
aucaggauguguucccaag

SEQ ID NO: 1731461 - RNA, 19 nt, Artificial Sequence
  Description of Artificial Sequence: Synthetic oligonucleotide
uuguugcaccuccaaaugu

SEQ ID NO: 1731462 - RNA, 19 nt, Artificial Sequence
  Description of Artificial Sequence: Synthetic oligonucleotide
agaucauuauugccaauau

SEQ ID NO: 1731463 - RNA, 19 nt, Artificial Sequence
  Description of Artificial Sequence: Synthetic oligonucleotide
caugaucaaacaguucccc

SEQ ID NO: 1731464 - RNA, 19 nt, Artificial Sequence
  Description of Artificial Sequence: Synthetic oligonucleotide
auaaagagucccagggcac

SEQ ID NO: 1731465 - RNA, 19 nt, Artificial Sequence
  Description of Artificial Sequence: Synthetic oligonucleotide
auaauauacuagccuccug

SEQ ID NO: 1731466 - RNA, 19 nt, Artificial Sequence
  Description of Artificial Sequence: Synthetic oligonucleotide
cuauguggagcccagguga

SEQ ID NO: 1731467 - RNA, 19 nt, Artificial Sequence
  Description of Artificial Sequence: Synthetic oligonucleotide
uagacaauauaaagacgau

SEQ ID NO: 1731468 - RNA, 19 nt, Artificial Sequence
  Description of Artificial Sequence: Synthetic oligonucleotide
uugugaaccuguucaggug

SEQ ID NO: 1731469 - RNA, 19 nt, Artificial Sequence
  Description of Artificial Sequence: Synthetic oligonucleotide
ugaagucuugaagauauuu

SEQ ID NO: 1731470 - RNA, 19 nt, Artificial Sequence
  Description of Artificial Sequence: Synthetic oligonucleotide
aaagacccggaccaacaaa

SEQ ID NO: 1731471 - RNA, 19 nt, Artificial Sequence
  Description of Artificial Sequence: Synthetic oligonucleotide
aaauauugcuccaccuacu

SEQ ID NO: 1731472 - RNA, 19 nt, Artificial Sequence
  Description of Artificial Sequence: Synthetic oligonucleotide
ucccaagcgaacagcaacu

SEQ ID NO: 1731473 - RNA, 19 nt, Artificial Sequence
  Description of Artificial Sequence: Synthetic oligonucleotide
gauaugaagucuugaagau

SEQ ID NO: 1731474 - RNA, 19 nt, Artificial Sequence
  Description of Artificial Sequence: Synthetic oligonucleotide
aaugaccauugcuauccau

SEQ ID NO: 1731475 - RNA, 19 nt, Artificial Sequence
  Description of Artificial Sequence: Synthetic oligonucleotide
augagcacuagagugguga

SEQ ID NO: 1731476 - RNA, 19 nt, Artificial Sequence
  Description of Artificial Sequence: Synthetic oligonucleotide
acgaucauuaaagcuaccu

SEQ ID NO: 1731477 - RNA, 19 nt, Artificial Sequence
  Description of Artificial Sequence: Synthetic oligonucleotide
uaucguauagucccacauu

SEQ ID NO: 1731478 - RNA, 19 nt, Artificial Sequence
  Description of Artificial Sequence: Synthetic oligonucleotide
agacauaaguuugccagug

SEQ ID NO: 1731479 - RNA, 19 nt, Artificial Sequence
  Description of Artificial Sequence: Synthetic oligonucleotide
uccccuaaaggagaacaag

SEQ ID NO: 1731480 - RNA, 19 nt, Artificial Sequence
  Description of Artificial Sequence: Synthetic oligonucleotide
guauagucccacauuguug

SEQ ID NO: 1731481 - RNA, 19 nt, Artificial Sequence
  Description of Artificial Sequence: Synthetic oligonucleotide
agaacaacauauucaucua

SEQ ID NO: 1731482 - RNA, 19 nt, Artificial Sequence
  Description of Artificial Sequence: Synthetic oligonucleotide
uugcuauccauagaacaac

SEQ ID NO: 1731483 - RNA, 19 nt, Artificial Sequence
  Description of Artificial Sequence: Synthetic oligonucleotide
uaauccuauguggagccca

SEQ ID NO: 1731484 - RNA, 19 nt, Artificial Sequence
  Description of Artificial Sequence: Synthetic oligonucleotide
cuaaaguaugucaucauau

SEQ ID NO: 1731485 - RNA, 19 nt, Artificial Sequence
  Description of Artificial Sequence: Synthetic oligonucleotide
uaaguuugccagugagcgc

SEQ ID NO: 1731486 - RNA, 19 nt, Artificial Sequence
  Description of Artificial Sequence: Synthetic oligonucleotide
aaaugaccauugcuaucca

SEQ ID NO: 1731487 - RNA, 19 nt, Artificial Sequence
  Description of Artificial Sequence: Synthetic oligonucleotide
ggugccuccucugugaccg

SEQ ID NO: 1731488 - RNA, 19 nt, Artificial Sequence
  Description of Artificial Sequence: Synthetic oligonucleotide
acuagccuccugcauaaga

SEQ ID NO: 1731489 - RNA, 19 nt, Artificial Sequence
  Description of Artificial Sequence: Synthetic oligonucleotide
cacagccaugaucaaacag

SEQ ID NO: 1731490 - RNA, 19 nt, Artificial Sequence
  Description of Artificial Sequence: Synthetic oligonucleotide
agaauagguaucguauagu

SEQ ID NO: 1731491 - RNA, 19 nt, Artificial Sequence
  Description of Artificial Sequence: Synthetic oligonucleotide
aguauggugccuccucugu

SEQ ID NO: 1731492 - RNA, 19 nt, Artificial Sequence
  Description of Artificial Sequence: Synthetic oligonucleotide
acagcgacucucccaccgc

SEQ ID NO: 1731493 - RNA, 19 nt, Artificial Sequence
  Description of Artificial Sequence: Synthetic oligonucleotide
auagaacaacauauucauc

SEQ ID NO: 1731494 - RNA, 19 nt, Artificial Sequence
  Description of Artificial Sequence: Synthetic oligonucleotide
agcuaccugaaucucaguu

SEQ ID NO: 1731495 - RNA, 19 nt, Artificial Sequence
  Description of Artificial Sequence: Synthetic oligonucleotide
ucgaacagcgacucuccca

SEQ ID NO: 1731496 - RNA, 19 nt, Artificial Sequence
  Description of Artificial Sequence: Synthetic oligonucleotide
aagcuacuagauuuauguu

SEQ ID NO: 1731497 - RNA, 19 nt, Artificial Sequence
  Description of Artificial Sequence: Synthetic oligonucleotide
gguagauaaagagucccag

SEQ ID NO: 1731498 - RNA, 19 nt, Artificial Sequence
  Description of Artificial Sequence: Synthetic oligonucleotide
cagguugauggcgaggccg

SEQ ID NO: 1731499 - RNA, 19 nt, Artificial Sequence
  Description of Artificial Sequence: Synthetic oligonucleotide
caguaaagcugcagcggcg

SEQ ID NO: 1731500 - RNA, 19 nt, Artificial Sequence
  Description of Artificial Sequence: Synthetic oligonucleotide
uccugggguuacuagucag

SEQ ID NO: 1731501 - RNA, 19 nt, Artificial Sequence
  Description of Artificial Sequence: Synthetic oligonucleotide
ucguauagucccacauugu

SEQ ID NO: 1731502 - RNA, 19 nt, Artificial Sequence
  Description of Artificial Sequence: Synthetic oligonucleotide
uuaaagcuaccugaaucuc

SEQ ID NO: 1731503 - RNA, 19 nt, Artificial Sequence
  Description of Artificial Sequence: Synthetic oligonucleotide
uucacacauagguuccccu

SEQ ID NO: 1731504 - RNA, 19 nt, Artificial Sequence
  Description of Artificial Sequence: Synthetic oligonucleotide
aauccuauguggagcccag

SEQ ID NO: 1731505 - RNA, 19 nt, Artificial Sequence
  Description of Artificial Sequence: Synthetic oligonucleotide
gacauaauggaagcuacua

SEQ ID NO: 1731506 - RNA, 19 nt, Artificial Sequence
  Description of Artificial Sequence: Synthetic oligonucleotide
cuauccauagaacaacaua

SEQ ID NO: 1731507 - RNA, 19 nt, Artificial Sequence
  Description of Artificial Sequence: Synthetic oligonucleotide
uauuuagaugaaggugucu

SEQ ID NO: 1731508 - RNA, 19 nt, Artificial Sequence
  Description of Artificial Sequence: Synthetic oligonucleotide
aaucucaguuacauccacu

SEQ ID NO: 1731509 - RNA, 19 nt, Artificial Sequence
  Description of Artificial Sequence: Synthetic oligonucleotide
cugguaccugcaauaguag

SEQ ID NO: 1731510 - RNA, 19 nt, Artificial Sequence
  Description of Artificial Sequence: Synthetic oligonucleotide
uagguaucguauaguccca

SEQ ID NO: 1731511 - RNA, 19 nt, Artificial Sequence
  Description of Artificial Sequence: Synthetic oligonucleotide
cuucaguuuuauuucuaga

SEQ ID NO: 1731512 - RNA, 19 nt, Artificial Sequence
  Description of Artificial Sequence: Synthetic oligonucleotide
ugugagcuaucaccaauuu

SEQ ID NO: 1731513 - RNA, 19 nt, Artificial Sequence
  Description of Artificial Sequence: Synthetic oligonucleotide
gacccggaccaacaaacac

SEQ ID NO: 1731514 - RNA, 19 nt, Artificial Sequence
  Description of Artificial Sequence: Synthetic oligonucleotide
gaaagagagucacagccau

SEQ ID NO: 1731515 - RNA, 19 nt, Artificial Sequence
  Description of Artificial Sequence: Synthetic oligonucleotide
cccuaaaggagaacaagag

SEQ ID NO: 1731516 - RNA, 19 nt, Artificial Sequence
  Description of Artificial Sequence: Synthetic oligonucleotide
ucacacauagguuccccua

SEQ ID NO: 1731517 - RNA, 19 nt, Artificial Sequence
  Description of Artificial Sequence: Synthetic oligonucleotide
auauacuagccuccugcau

SEQ ID NO: 1731518 - RNA, 19 nt, Artificial Sequence
  Description of Artificial Sequence: Synthetic oligonucleotide
aggauguguucccaagcga

SEQ ID NO: 1731519 - RNA, 19 nt, Artificial Sequence
  Description of Artificial Sequence: Synthetic oligonucleotide
uuacauccacucuuccaaa

SEQ ID NO: 1731520 - RNA, 19 nt, Artificial Sequence
  Description of Artificial Sequence: Synthetic oligonucleotide
uuccccuaaaggagaacaa

SEQ ID NO: 1731521 - RNA, 19 nt, Artificial Sequence
  Description of Artificial Sequence: Synthetic oligonucleotide
ucucccaccgcgguguagc

SEQ ID NO: 1731522 - RNA, 19 nt, Artificial Sequence
  Description of Artificial Sequence: Synthetic oligonucleotide
uuugccagugagcgcagua

SEQ ID NO: 1731523 - RNA, 19 nt, Artificial Sequence
  Description of Artificial Sequence: Synthetic oligonucleotide
guuccccuaaaggagaaca

SEQ ID NO: 1731524 - RNA, 19 nt, Artificial Sequence
  Description of Artificial Sequence: Synthetic oligonucleotide
agguuccccuaacugcuuc

SEQ ID NO: 1731525 - RNA, 19 nt, Artificial Sequence
  Description of Artificial Sequence: Synthetic oligonucleotide
cauaaccuuauagauaaua

SEQ ID NO: 1731526 - RNA, 19 nt, Artificial Sequence
  Description of Artificial Sequence: Synthetic oligonucleotide
uuccugggguuacuaguca

SEQ ID NO: 1731527 - RNA, 19 nt, Artificial Sequence
  Description of Artificial Sequence: Synthetic oligonucleotide
gauguguucccaagcgaac

SEQ ID NO: 1731528 - RNA, 19 nt, Artificial Sequence
  Description of Artificial Sequence: Synthetic oligonucleotide
uccauuggagcagccaggu

SEQ ID NO: 1731529 - RNA, 19 nt, Artificial Sequence
  Description of Artificial Sequence: Synthetic oligonucleotide
gacauaaguuugccaguga

SEQ ID NO: 1731530 - RNA, 19 nt, Artificial Sequence
  Description of Artificial Sequence: Synthetic oligonucleotide
agaugagcacuagaguggu

SEQ ID NO: 1731531 - RNA, 19 nt, Artificial Sequence
  Description of Artificial Sequence: Synthetic oligonucleotide
gggguuacuagucagucaa

SEQ ID NO: 1731532 - RNA, 19 nt, Artificial Sequence
  Description of Artificial Sequence: Synthetic oligonucleotide
cuugugaaccuguucaggu

SEQ ID NO: 1731533 - RNA, 19 nt, Artificial Sequence
  Description of Artificial Sequence: Synthetic oligonucleotide
guaccugcaauaguagauc

SEQ ID NO: 1731534 - RNA, 19 nt, Artificial Sequence
  Description of Artificial Sequence: Synthetic oligonucleotide
caucccaacaaaggagcag

SEQ ID NO: 1731535 - RNA, 19 nt, Artificial Sequence
  Description of Artificial Sequence: Synthetic oligonucleotide
gaacaacauauucaucuau

SEQ ID NO: 1731536 - RNA, 19 nt, Artificial Sequence
  Description of Artificial Sequence: Synthetic oligonucleotide
ccuuauagauaauauacua

SEQ ID NO: 1731537 - RNA, 19 nt, Artificial Sequence
  Description of Artificial Sequence: Synthetic oligonucleotide
agguaucguauagucccac

SEQ ID NO: 1731538 - RNA, 19 nt, Artificial Sequence
  Description of Artificial Sequence: Synthetic oligonucleotide
gaacaacagaucaggaugu

SEQ ID NO: 1731539 - RNA, 19 nt, Artificial Sequence
  Description of Artificial Sequence: Synthetic oligonucleotide
ccaguaaagcugcagcggc

SEQ ID NO: 1731540 - RNA, 19 nt, Artificial Sequence
  Description of Artificial Sequence: Synthetic oligonucleotide
guauggugccuccucugug

SEQ ID NO: 1731541 - RNA, 19 nt, Artificial Sequence
  Description of Artificial Sequence: Synthetic oligonucleotide
ucgauggcauccagugacu

SEQ ID NO: 1731542 - RNA, 19 nt, Artificial Sequence
  Description of Artificial Sequence: Synthetic oligonucleotide
aauaccccugagacauaag

SEQ ID NO: 1731543 - RNA, 19 nt, Artificial Sequence
  Description of Artificial Sequence: Synthetic oligonucleotide
guuacuagucagucaauau

SEQ ID NO: 1731544 - RNA, 19 nt, Artificial Sequence
  Description of Artificial Sequence: Synthetic oligonucleotide
uuucuagaauagguaucgu

SEQ ID NO: 1731545 - RNA, 19 nt, Artificial Sequence
  Description of Artificial Sequence: Synthetic oligonucleotide
aacaaaagacccggaccaa

SEQ ID NO: 1731546 - RNA, 19 nt, Artificial Sequence
  Description of Artificial Sequence: Synthetic oligonucleotide
cagugagcgcaguaaaaca

SEQ ID NO: 1731547 - RNA, 19 nt, Artificial Sequence
  Description of Artificial Sequence: Synthetic oligonucleotide
ugaccagguugauggcgag

SEQ ID NO: 1731548 - RNA, 19 nt, Artificial Sequence
  Description of Artificial Sequence: Synthetic oligonucleotide
gguguagcggugcuccucc

SEQ ID NO: 1731549 - RNA, 19 nt, Artificial Sequence
  Description of Artificial Sequence: Synthetic oligonucleotide
augaccauugcuauccaua

SEQ ID NO: 1731550 - RNA, 19 nt, Artificial Sequence
  Description of Artificial Sequence: Synthetic oligonucleotide
gagacauaaguuugccagu

SEQ ID NO: 1731551 - RNA, 19 nt, Artificial Sequence
  Description of Artificial Sequence: Synthetic oligonucleotide
uaccugaaucucaguuaca

SEQ ID NO: 1731552 - RNA, 19 nt, Artificial Sequence
  Description of Artificial Sequence: Synthetic oligonucleotide
acuagucagucaauaugcu

SEQ ID NO: 1731553 - RNA, 19 nt, Artificial Sequence
  Description of Artificial Sequence: Synthetic oligonucleotide
uccugcauaagaggauuuc

SEQ ID NO: 1731554 - RNA, 19 nt, Artificial Sequence
  Description of Artificial Sequence: Synthetic oligonucleotide
uggcuugcuucccaucgau

SEQ ID NO: 1731555 - RNA, 19 nt, Artificial Sequence
  Description of Artificial Sequence: Synthetic oligonucleotide
aguuccccuaaaggagaac

SEQ ID NO: 1731556 - RNA, 19 nt, Artificial Sequence
  Description of Artificial Sequence: Synthetic oligonucleotide
ucccaacaaaggagcagaa

SEQ ID NO: 1731557 - RNA, 19 nt, Artificial Sequence
  Description of Artificial Sequence: Synthetic oligonucleotide
acccggaccaacaaacaca

SEQ ID NO: 1731558 - RNA, 19 nt, Artificial Sequence
  Description of Artificial Sequence: Synthetic oligonucleotide
caccuacuacuccaagaac

SEQ ID NO: 1731559 - RNA, 19 nt, Artificial Sequence
  Description of Artificial Sequence: Synthetic oligonucleotide
aagcuaccugaaucucagu

SEQ ID NO: 1731560 - RNA, 19 nt, Artificial Sequence
  Description of Artificial Sequence: Synthetic oligonucleotide
gaucaggauguguucccaa

SEQ ID NO: 1731561 - RNA, 19 nt, Artificial Sequence
  Description of Artificial Sequence: Synthetic oligonucleotide
agacauaauggaagcuacu

SEQ ID NO: 1731562 - RNA, 19 nt, Artificial Sequence
  Description of Artificial Sequence: Synthetic oligonucleotide
cagcgacucucccaccgcg

SEQ ID NO: 1731563 - RNA, 19 nt, Artificial Sequence
  Description of Artificial Sequence: Synthetic oligonucleotide
cucgaacagcgacucuccc

SEQ ID NO: 1731564 - RNA, 19 nt, Artificial Sequence
  Description of Artificial Sequence: Synthetic oligonucleotide
ucccaucgauggcauccag

SEQ ID NO: 1731565 - RNA, 19 nt, Artificial Sequence
  Description of Artificial Sequence: Synthetic oligonucleotide
cugcauaagaggauuuccu

SEQ ID NO: 1731566 - RNA, 19 nt, Artificial Sequence
  Description of Artificial Sequence: Synthetic oligonucleotide
guaucguauagucccacau

SEQ ID NO: 1731567 - RNA, 19 nt, Artificial Sequence
  Description of Artificial Sequence: Synthetic oligonucleotide
gguauaaaggcaagggugu

SEQ ID NO: 1731568 - RNA, 19 nt, Artificial Sequence
  Description of Artificial Sequence: Synthetic oligonucleotide
caauaguagauccauucuu

SEQ ID NO: 1731569 - RNA, 19 nt, Artificial Sequence
  Description of Artificial Sequence: Synthetic oligonucleotide
cugcguggcgcugagcggc

SEQ ID NO: 1731570 - RNA, 19 nt, Artificial Sequence
  Description of Artificial Sequence: Synthetic oligonucleotide
auagucccacauuguugca

SEQ ID NO: 1731571 - RNA, 19 nt, Artificial Sequence
  Description of Artificial Sequence: Synthetic oligonucleotide
cucaguuacauccacucuu

SEQ ID NO: 1731572 - RNA, 19 nt, Artificial Sequence
  Description of Artificial Sequence: Synthetic oligonucleotide
guauaaaggcaaggguguc

SEQ ID NO: 1731573 - RNA, 19 nt, Artificial Sequence
  Description of Artificial Sequence: Synthetic oligonucleotide
agccaugaucaaacaguuc

SEQ ID NO: 1731574 - RNA, 19 nt, Artificial Sequence
  Description of Artificial Sequence: Synthetic oligonucleotide
auccauagaacaacauauu

SEQ ID NO: 1731575 - RNA, 19 nt, Artificial Sequence
  Description of Artificial Sequence: Synthetic oligonucleotide
uucccaucgauggcaucca

SEQ ID NO: 1731576 - RNA, 19 nt, Artificial Sequence
  Description of Artificial Sequence: Synthetic oligonucleotide
cgaacagcgacucucccac

SEQ ID NO: 1731577 - RNA, 19 nt, Artificial Sequence
  Description of Artificial Sequence: Synthetic oligonucleotide
gaacagcgacucucccacc

SEQ ID NO: 1731578 - RNA, 19 nt, Artificial Sequence
  Description of Artificial Sequence: Synthetic oligonucleotide
gugaccagguugauggcga

SEQ ID NO: 1731579 - RNA, 19 nt, Artificial Sequence
  Description of Artificial Sequence: Synthetic oligonucleotide
gagcgcaguaaaacaagaa

SEQ ID NO: 1731580 - RNA, 19 nt, Artificial Sequence
  Description of Artificial Sequence: Synthetic oligonucleotide
gcuaccugaaucucaguua

SEQ ID NO: 1731581 - RNA, 19 nt, Artificial Sequence
  Description of Artificial Sequence: Synthetic oligonucleotide
caggugcuuguugauauga

SEQ ID NO: 1731582 - RNA, 19 nt, Artificial Sequence
  Description of Artificial Sequence: Synthetic oligonucleotide
uggugccuccucugugacc

SEQ ID NO: 1731583 - RNA, 19 nt, Artificial Sequence
  Description of Artificial Sequence: Synthetic oligonucleotide
agggugucuuucaaacaca

SEQ ID NO: 1731584 - RNA, 19 nt, Artificial Sequence
  Description of Artificial Sequence: Synthetic oligonucleotide
gguaucguauagucccaca

SEQ ID NO: 1731585 - RNA, 19 nt, Artificial Sequence
  Description of Artificial Sequence: Synthetic oligonucleotide
ccaagcgaacagcaacugc

SEQ ID NO: 1731586 - RNA, 19 nt, Artificial Sequence
  Description of Artificial Sequence: Synthetic oligonucleotide
ccuauguggagcccaggug

SEQ ID NO: 1731587 - RNA, 19 nt, Artificial Sequence
  Description of Artificial Sequence: Synthetic oligonucleotide
ccccuaaaggagaacaaga

SEQ ID NO: 1731588 - RNA, 19 nt, Artificial Sequence
  Description of Artificial Sequence: Synthetic oligonucleotide
accugcaauaguagaucca

SEQ ID NO: 1731589 - RNA, 19 nt, Artificial Sequence
  Description of Artificial Sequence: Synthetic oligonucleotide
agcgacucucccaccgcgg

SEQ ID NO: 1731590 - RNA, 19 nt, Artificial Sequence
  Description of Artificial Sequence: Synthetic oligonucleotide
auccuauguggagcccagg

SEQ ID NO: 1731591 - RNA, 19 nt, Artificial Sequence
  Description of Artificial Sequence: Synthetic oligonucleotide
gguuacuagucagucaaua

SEQ ID NO: 1731592 - RNA, 19 nt, Artificial Sequence
  Description of Artificial Sequence: Synthetic oligonucleotide
uauguccaguauggugccu

SEQ ID NO: 1731593 - RNA, 19 nt, Artificial Sequence
  Description of Artificial Sequence: Synthetic oligonucleotide
caauaccccugagacauaa

SEQ ID NO: 1731594 - RNA, 19 nt, Artificial Sequence
  Description of Artificial Sequence: Synthetic oligonucleotide
ucccaccgcgguguagcgg

SEQ ID NO: 1731595 - RNA, 19 nt, Artificial Sequence
  Description of Artificial Sequence: Synthetic oligonucleotide
caugugagcuaucaccaau

SEQ ID NO: 1731596 - RNA, 19 nt, Artificial Sequence
  Description of Artificial Sequence: Synthetic oligonucleotide
cuagucagucaauaugcuu

SEQ ID NO: 1731597 - RNA, 19 nt, Artificial Sequence
  Description of Artificial Sequence: Synthetic oligonucleotide
cucccaccgcgguguagcg

SEQ ID NO: 1731598 - RNA, 19 nt, Artificial Sequence
  Description of Artificial Sequence: Synthetic oligonucleotide
cuguggaaagagagucaca

SEQ ID NO: 1731599 - RNA, 19 nt, Artificial Sequence
  Description of Artificial Sequence: Synthetic oligonucleotide
caucgauggcauccaguga

SEQ ID NO: 1731600 - RNA, 19 nt, Artificial Sequence
  Description of Artificial Sequence: Synthetic oligonucleotide
gcggaauccauuggagcag

SEQ ID NO: 1731601 - RNA, 19 nt, Artificial Sequence
  Description of Artificial Sequence: Synthetic oligonucleotide
gcuacuagauuuauguuuu

SEQ ID NO: 1731602 - RNA, 19 nt, Artificial Sequence
  Description of Artificial Sequence: Synthetic oligonucleotide
gucagucaauaugcuugug

SEQ ID NO: 1731603 - RNA, 19 nt, Artificial Sequence
  Description of Artificial Sequence: Synthetic oligonucleotide
auccaaacauuaagguaua

SEQ ID NO: 1731604 - RNA, 19 nt, Artificial Sequence
  Description of Artificial Sequence: Synthetic oligonucleotide
agacccggaccaacaaaca

SEQ ID NO: 1731605 - RNA, 19 nt, Artificial Sequence
  Description of Artificial Sequence: Synthetic oligonucleotide
ggaccaacaaacacagugu

SEQ ID NO: 1731606 - RNA, 19 nt, Artificial Sequence
  Description of Artificial Sequence: Synthetic oligonucleotide
uacuagccuccugcauaag

SEQ ID NO: 1731607 - RNA, 19 nt, Artificial Sequence
  Description of Artificial Sequence: Synthetic oligonucleotide
gguaccugcaauaguagau

SEQ ID NO: 1731608 - RNA, 19 nt, Artificial Sequence
  Description of Artificial Sequence: Synthetic oligonucleotide
gacucucccaccgcggugu

SEQ ID NO: 1731609 - RNA, 19 nt, Artificial Sequence
  Description of Artificial Sequence: Synthetic oligonucleotide
accgcgguguagcggugcu

SEQ ID NO: 1731610 - RNA, 19 nt, Artificial Sequence
  Description of Artificial Sequence: Synthetic oligonucleotide
gcucgaacagcgacucucc

SEQ ID NO: 1731611 - RNA, 19 nt, Artificial Sequence
  Description of Artificial Sequence: Synthetic oligonucleotide
aguuugccagugagcgcag

SEQ ID NO: 1731612 - RNA, 19 nt, Artificial Sequence
  Description of Artificial Sequence: Synthetic oligonucleotide
cacauagguuccccuaacu

SEQ ID NO: 1731613 - RNA, 19 nt, Artificial Sequence
  Description of Artificial Sequence: Synthetic oligonucleotide
cuggcuugcuucccaucga

SEQ ID NO: 1731614 - RNA, 19 nt, Artificial Sequence
  Description of Artificial Sequence: Synthetic oligonucleotide
gugagcuaucaccaauuuu

SEQ ID NO: 1731615 - RNA, 19 nt, Artificial Sequence
  Description of Artificial Sequence: Synthetic oligonucleotide
caauggccauaaauacugu

SEQ ID NO: 1731616 - RNA, 19 nt, Artificial Sequence
  Description of Artificial Sequence: Synthetic oligonucleotide
ggaauccauuggagcagcc

SEQ ID NO: 1731617 - RNA, 19 nt, Artificial Sequence
  Description of Artificial Sequence: Synthetic oligonucleotide
  modified_base (15)..(15): a, c, u, g, unknown or other
cuccacgccgccgcngcug

SEQ ID NO: 1731618 - RNA, 19 nt, Artificial Sequence
  Description of Artificial Sequence: Synthetic oligonucleotide
acauaaccuuauagauaau

SEQ ID NO: 1731619 - RNA, 19 nt, Artificial Sequence
  Description of Artificial Sequence: Synthetic oligonucleotide
caccgcgguguagcggugc

SEQ ID NO: 1731620 - RNA, 19 nt, Artificial Sequence
  Description of Artificial Sequence: Synthetic oligonucleotide
  modified_base (3)..(3): a, c, u, g, unknown or other
gcngcugcguggcgcugag

SEQ ID NO: 1731621 - RNA, 19 nt, Artificial Sequence
  Description of Artificial Sequence: Synthetic oligonucleotide
cccaauggccauaaauacu

SEQ ID NO: 1731622 - RNA, 19 nt, Artificial Sequence
  Description of Artificial Sequence: Synthetic oligonucleotide
ccccuaacugcuucuccuc

SEQ ID NO: 1731623 - RNA, 19 nt, Artificial Sequence
  Description of Artificial Sequence: Synthetic oligonucleotide
ggcuugcuucccaucgaug

SEQ ID NO: 1731624 - RNA, 19 nt, Artificial Sequence
  Description of Artificial Sequence: Synthetic oligonucleotide
cgcgguguagcggugcucc

SEQ ID NO: 1731625 - RNA, 19 nt, Artificial Sequence
  Description of Artificial Sequence: Synthetic oligonucleotide
cacugguaccugcaauagu

SEQ ID NO: 1731626 - RNA, 19 nt, Artificial Sequence
  Description of Artificial Sequence: Synthetic oligonucleotide
cuccaagaacuggaaagau

SEQ ID NO: 1731627 - RNA, 19 nt, Artificial Sequence
  Description of Artificial Sequence: Synthetic oligonucleotide
cccaagcgaacagcaacug

SEQ ID NO: 1731628 - RNA, 19 nt, Artificial Sequence
  Description of Artificial Sequence: Synthetic oligonucleotide
gguuccccuaacugcuucu

SEQ ID NO: 1731629 - RNA, 19 nt, Artificial Sequence
  Description of Artificial Sequence: Synthetic oligonucleotide
ccugcaauaguagauccau

SEQ ID NO: 1731630 - RNA, 19 nt, Artificial Sequence
  Description of Artificial Sequence: Synthetic oligonucleotide
gcggcucgaacagcgacuc

SEQ ID NO: 1731631 - RNA, 19 nt, Artificial Sequence
  Description of Artificial Sequence: Synthetic oligonucleotide
cugcaauaguagauccauu

SEQ ID NO: 1731632 - RNA, 19 nt, Artificial Sequence
  Description of Artificial Sequence: Synthetic oligonucleotide
cacauuuguugcagacuuu

SEQ ID NO: 1731633 - RNA, 19 nt, Artificial Sequence
  Description of Artificial Sequence: Synthetic oligonucleotide
cggaauccauuggagcagc

SEQ ID NO: 1731634 - RNA, 19 nt, Artificial Sequence
  Description of Artificial Sequence: Synthetic oligonucleotide
gagucccagggcacauaaa

SEQ ID NO: 1731635 - RNA, 19 nt, Artificial Sequence
  Description of Artificial Sequence: Synthetic oligonucleotide
ccagugacugguagauaaa

SEQ ID NO: 1731636 - RNA, 19 nt, Artificial Sequence
  Description of Artificial Sequence: Synthetic oligonucleotide
  modified_base (9)..(9): a, c, u, g, unknown or other
gccgccgcngcugcguggc

SEQ ID NO: 1731637 - RNA, 19 nt, Artificial Sequence
  Description of Artificial Sequence: Synthetic oligonucleotide
cuccugcauaagaggauuu

SEQ ID NO: 1731638 - RNA, 19 nt, Artificial Sequence
  Description of Artificial Sequence: Synthetic oligonucleotide
cagcggcggcucgaacagc

SEQ ID NO: 1731639 - RNA, 19 nt, Artificial Sequence
  Description of Artificial Sequence: Synthetic oligonucleotide
  modified_base (2)..(2): a, c, u, g, unknown or other
cngcugcguggcgcugagc

SEQ ID NO: 1731640 - RNA, 19 nt, Artificial Sequence
  Description of Artificial Sequence: Synthetic oligonucleotide
cccaccgcgguguagcggu

SEQ ID NO: 1731641 - RNA, 19 nt, Artificial Sequence
  Description of Artificial Sequence: Synthetic oligonucleotide
cccaucgauggcauccagu

SEQ ID NO: 1731642 - RNA, 19 nt, Artificial Sequence
  Description of Artificial Sequence: Synthetic oligonucleotide
gcgacucucccaccgcggu

SEQ ID NO: 1731643 - RNA, 19 nt, Artificial Sequence
  Description of Artificial Sequence: Synthetic oligonucleotide
cggcggcucgaacagcgac

SEQ ID NO: 1731644 - RNA, 19 nt, Artificial Sequence
  Description of Artificial Sequence: Synthetic oligonucleotide
gcgaggccgaugaggguga

SEQ ID NO: 1731645 - RNA, 19 nt, Artificial Sequence
  Description of Artificial Sequence: Synthetic oligonucleotide
  modified_base (7)..(7): a, c, u, g, unknown or other
cgccgcngcugcguggcgc

SEQ ID NO: 1731646 - RNA, 19 nt, Artificial Sequence
  Description of Artificial Sequence: Synthetic oligonucleotide
cgacucucccaccgcggug

SEQ ID NO: 1731647 - RNA, 19 nt, Artificial Sequence
  Description of Artificial Sequence: Synthetic oligonucleotide
  modified_base (10)..(10): a, c, u, g, unknown or other
cgccgccgcngcugcgugg

SEQ ID NO: 1731648 - RNA, 19 nt, Artificial Sequence
  Description of Artificial Sequence: Synthetic oligonucleotide
  modified_base (6)..(6): a, c, u, g, unknown or other
gccgcngcugcguggcgcu

SEQ ID NO: 1731649 - RNA, 19 nt, Artificial Sequence
  Description of Artificial Sequence: Synthetic oligonucleotide
ccuccugcauaagaggauu

SEQ ID NO: 1731650 - RNA, 19 nt, Artificial Sequence
  Description of Artificial Sequence: Synthetic oligonucleotide
cgguguagcggugcuccuc

SEQ ID NO: 1731651 - RNA, 19 nt, Artificial Sequence
  Description of Artificial Sequence: Synthetic oligonucleotide
ccaccgcgguguagcggug

SEQ ID NO: 1731652 - RNA, 19 nt, Artificial Sequence
  Description of Artificial Sequence: Synthetic oligonucleotide
  modified_base (8)..(8): a, c, u, g, unknown or other
ccgccgcngcugcguggcg

SEQ ID NO: 1731653 - RNA, 19 nt, Artificial Sequence
  Description of Artificial Sequence: Synthetic oligonucleotide
gcgguguagcggugcuccu

SEQ ID NO: 1731654 - RNA, 19 nt, Artificial Sequence
  Description of Artificial Sequence: Synthetic oligonucleotide
  modified_base (4)..(4): a, c, u, g, unknown or other
cgcngcugcguggcgcuga

SEQ ID NO: 1731655 - RNA, 19 nt, Artificial Sequence
  Description of Artificial Sequence: Synthetic oligonucleotide
ccgcgguguagcggugcuc

SEQ ID NO: 1731656 - RNA, 19 nt, Artificial Sequence
  Description of Artificial Sequence: Synthetic oligonucleotide
ccggaccaacaaacacagu

SEQ ID NO: 1731657 - RNA, 19 nt, Artificial Sequence
  Description of Artificial Sequence: Synthetic oligonucleotide
  modified_base (5)..(5): a, c, u, g, unknown or other
ccgcngcugcguggcgcug

SEQ ID NO: 1731658 - RNA, 19 nt, Artificial Sequence
  Description of Artificial Sequence: Synthetic oligonucleotide
cggcucgaacagcgacucu

SEQ ID NO: 1731659 - RNA, 19 nt, Artificial Sequence
  Description of Artificial Sequence: Synthetic oligonucleotide
  modified_base (1)..(1): a, c, u, g, unknown or other
ngcugcguggcgcugagcg

SEQ ID NO: 1731660 - RNA, 19 nt, Artificial Sequence
  Description of Artificial Sequence: Synthetic oligonucleotide
auuuguucugcuuaaaggc

SEQ ID NO: 1731661 - RNA, 19 nt, Artificial Sequence
  Description of Artificial Sequence: Synthetic oligonucleotide
caaauuuccacccacagcc

SEQ ID NO: 1731662 - RNA, 19 nt, Artificial Sequence
  Description of Artificial Sequence: Synthetic oligonucleotide
uuugcuaacacugaugacc

SEQ ID NO: 1731663 - RNA, 19 nt, Artificial Sequence
  Description of Artificial Sequence: Synthetic oligonucleotide
auuuauuaaggcaaggaac

SEQ ID NO: 1731664 - RNA, 19 nt, Artificial Sequence
  Description of Artificial Sequence: Synthetic oligonucleotide
ucuugcuuaaucuuggggc

SEQ ID NO: 1731665 - RNA, 19 nt, Artificial Sequence
  Description of Artificial Sequence: Synthetic oligonucleotide
uggucaguucaucagagcg

SEQ ID NO: 1731666 - RNA, 19 nt, Artificial Sequence
  Description of Artificial Sequence: Synthetic oligonucleotide
auaaauguagaucggaaga

SEQ ID NO: 1731667 - RNA, 19 nt, Artificial Sequence
  Description of Artificial Sequence: Synthetic oligonucleotide
cauuuguucugcuuaaagg

SEQ ID NO: 1731668 - RNA, 19 nt, Artificial Sequence
  Description of Artificial Sequence: Synthetic oligonucleotide
aaaccagguauauuuaccu

SEQ ID NO: 1731669 - RNA, 19 nt, Artificial Sequence
  Description of Artificial Sequence: Synthetic oligonucleotide
cauaaauguagaucggaag

SEQ ID NO: 1731670 - RNA, 19 nt, Artificial Sequence
  Description of Artificial Sequence: Synthetic oligonucleotide
gaaaccacagugcauaaca

SEQ ID NO: 1731671 - RNA, 19 nt, Artificial Sequence
  Description of Artificial Sequence: Synthetic oligonucleotide
cugacuuaggucauaaaug

SEQ ID NO: 1731672 - RNA, 19 nt, Artificial Sequence
  Description of Artificial Sequence: Synthetic oligonucleotide
aagucgugugugcugggcc

SEQ ID NO: 1731673 - RNA, 19 nt, Artificial Sequence
  Description of Artificial Sequence: Synthetic oligonucleotide
acuuaggucauaaauguag

SEQ ID NO: 1731674 - RNA, 19 nt, Artificial Sequence
  Description of Artificial Sequence: Synthetic oligonucleotide
uuagaacauguucuguacc

SEQ ID NO: 1731675 - RNA, 19 nt, Artificial Sequence
  Description of Artificial Sequence: Synthetic oligonucleotide
uaccuuuagaaccacgacu

SEQ ID NO: 1731676 - RNA, 19 nt, Artificial Sequence
  Description of Artificial Sequence: Synthetic oligonucleotide
guagggguaguccuggugg

SEQ ID NO: 1731677 - RNA, 19 nt, Artificial Sequence
  Description of Artificial Sequence: Synthetic oligonucleotide
acaaacuugcccaucaguc

SEQ ID NO: 1731678 - RNA, 19 nt, Artificial Sequence
  Description of Artificial Sequence: Synthetic oligonucleotide
acauuuguucugcuuaaag

SEQ ID NO: 1731679 - RNA, 19 nt, Artificial Sequence
  Description of Artificial Sequence: Synthetic oligonucleotide
ugaauugcuuccucuuccg

SEQ ID NO: 1731680 - RNA, 19 nt, Artificial Sequence
  Description of Artificial Sequence: Synthetic oligonucleotide
uaacacugaugaccgacgg

SEQ ID NO: 1731681 - RNA, 19 nt, Artificial Sequence
  Description of Artificial Sequence: Synthetic oligonucleotide
auagucacaagugugggug

SEQ ID NO: 1731682 - RNA, 19 nt, Artificial Sequence
  Description of Artificial Sequence: Synthetic oligonucleotide
aacacugaugaccgacggg

SEQ ID NO: 1731683 - RNA, 19 nt, Artificial Sequence
  Description of Artificial Sequence: Synthetic oligonucleotide
uguucuguaccugaauugc

SEQ ID NO: 1731684 - RNA, 19 nt, Artificial Sequence
  Description of Artificial Sequence: Synthetic oligonucleotide
accuuuagaaccacgacuc

SEQ ID NO: 1731685 - RNA, 19 nt, Artificial Sequence
  Description of Artificial Sequence: Synthetic oligonucleotide
agagcgggcaaauuuccac

SEQ ID NO: 1731686 - RNA, 19 nt, Artificial Sequence
  Description of Artificial Sequence: Synthetic oligonucleotide
uagaacauguucuguaccu

SEQ ID NO: 1731687 - RNA, 19 nt, Artificial Sequence
  Description of Artificial Sequence: Synthetic oligonucleotide
acaagcaccaucguuuagg

SEQ ID NO: 1731688 - RNA, 19 nt, Artificial Sequence
  Description of Artificial Sequence: Synthetic oligonucleotide
uguagaucggaagacaaaa

SEQ ID NO: 1731689 - RNA, 19 nt, Artificial Sequence
  Description of Artificial Sequence: Synthetic oligonucleotide
agcaccaucguuuaggcua

SEQ ID NO: 1731690 - RNA, 19 nt, Artificial Sequence
  Description of Artificial Sequence: Synthetic oligonucleotide
aaguaugcagcaguuggag

SEQ ID NO: 1731691 - RNA, 19 nt, Artificial Sequence
  Description of Artificial Sequence: Synthetic oligonucleotide
aagguucucaccuguguga

SEQ ID NO: 1731692 - RNA, 19 nt, Artificial Sequence
  Description of Artificial Sequence: Synthetic oligonucleotide
ucaccuccagcccggaucg

SEQ ID NO: 1731693 - RNA, 19 nt, Artificial Sequence
  Description of Artificial Sequence: Synthetic oligonucleotide
ucugaaaccacagugcaua

SEQ ID NO: 1731694 - RNA, 19 nt, Artificial Sequence
  Description of Artificial Sequence: Synthetic oligonucleotide
aaccagguauauuuaccug

SEQ ID NO: 1731695 - RNA, 19 nt, Artificial Sequence
  Description of Artificial Sequence: Synthetic oligonucleotide
accagguauauuuaccuga

SEQ ID NO: 1731696 - RNA, 19 nt, Artificial Sequence
  Description of Artificial Sequence: Synthetic oligonucleotide
aaauguagaucggaagaca

SEQ ID NO: 1731697 - RNA, 19 nt, Artificial Sequence
  Description of Artificial Sequence: Synthetic oligonucleotide
cauuugguaccuuuagaac

SEQ ID NO: 1731698 - RNA, 19 nt, Artificial Sequence
  Description of Artificial Sequence: Synthetic oligonucleotide
aggaacuauauagaaaaca

SEQ ID NO: 1731699 - RNA, 19 nt, Artificial Sequence
  Description of Artificial Sequence: Synthetic oligonucleotide
uuuuccggggccacgaccu

SEQ ID NO: 1731700 - RNA, 19 nt, Artificial Sequence
  Description of Artificial Sequence: Synthetic oligonucleotide
agcgggcaaauuuccaccc

SEQ ID NO: 1731701 - RNA, 19 nt, Artificial Sequence
  Description of Artificial Sequence: Synthetic oligonucleotide
guaguugggccccggaugg

SEQ ID NO: 1731702 - RNA, 19 nt, Artificial Sequence
  Description of Artificial Sequence: Synthetic oligonucleotide
aaggaacuauauagaaaac

SEQ ID NO: 1731703 - RNA, 19 nt, Artificial Sequence
  Description of Artificial Sequence: Synthetic oligonucleotide
accauuguacaaauuauug

SEQ ID NO: 1731704 - RNA, 19 nt, Artificial Sequence
  Description of Artificial Sequence: Synthetic oligonucleotide
aaggugugccuugagauga

SEQ ID NO: 1731705 - RNA, 19 nt, Artificial Sequence
  Description of Artificial Sequence: Synthetic oligonucleotide
uugcacaucugaaaccaca

SEQ ID NO: 1731706 - RNA, 19 nt, Artificial Sequence
  Description of Artificial Sequence: Synthetic oligonucleotide
auguucuguaccugaauug

SEQ ID NO: 1731707 - RNA, 19 nt, Artificial Sequence
  Description of Artificial Sequence: Synthetic oligonucleotide
aucggauaguugaagcugc

SEQ ID NO: 1731708 - RNA, 19 nt, Artificial Sequence
  Description of Artificial Sequence: Synthetic oligonucleotide
gaucggauaguugaagcug

SEQ ID NO: 1731709 - RNA, 19 nt, Artificial Sequence
  Description of Artificial Sequence: Synthetic oligonucleotide
accacgacucacaagcacc

SEQ ID NO: 1731710 - RNA, 19 nt, Artificial Sequence
  Description of Artificial Sequence: Synthetic oligonucleotide
uuccguuugcgguagugcc

SEQ ID NO: 1731711 - RNA, 19 nt, Artificial Sequence
  Description of Artificial Sequence: Synthetic oligonucleotide
ugagacuugagacggcauc

SEQ ID NO: 1731712 - RNA, 19 nt, Artificial Sequence
  Description of Artificial Sequence: Synthetic oligonucleotide
ugugaguuccgaaggugug

SEQ ID NO: 1731713 - RNA, 19 nt, Artificial Sequence
  Description of Artificial Sequence: Synthetic oligonucleotide
aaaggcauacuugggaaaa

SEQ ID NO: 1731714 - RNA, 19 nt, Artificial Sequence
  Description of Artificial Sequence: Synthetic oligonucleotide
uguacucgcugccaggcgu

SEQ ID NO: 1731715 - RNA, 19 nt, Artificial Sequence
  Description of Artificial Sequence: Synthetic oligonucleotide
uggcggaauguacacuggg

SEQ ID NO: 1731716 - RNA, 19 nt, Artificial Sequence
  Description of Artificial Sequence: Synthetic oligonucleotide
uuacagaauaaaccaggua

SEQ ID NO: 1731717 - RNA, 19 nt, Artificial Sequence
  Description of Artificial Sequence: Synthetic oligonucleotide
acgacucacaagcaccauc

SEQ ID NO: 1731718 - RNA, 19 nt, Artificial Sequence
  Description of Artificial Sequence: Synthetic oligonucleotide
uccucgggacucaugguag

SEQ ID NO: 1731719 - RNA, 19 nt, Artificial Sequence
  Description of Artificial Sequence: Synthetic oligonucleotide
agucgugugugcugggccg

SEQ ID NO: 1731720 - RNA, 19 nt, Artificial Sequence
  Description of Artificial Sequence: Synthetic oligonucleotide
aaauuuccacccacagccg

SEQ ID NO: 1731721 - RNA, 19 nt, Artificial Sequence
  Description of Artificial Sequence: Synthetic oligonucleotide
uauuuaccugacuuagguc

SEQ ID NO: 1731722 - RNA, 19 nt, Artificial Sequence
  Description of Artificial Sequence: Synthetic oligonucleotide
ucggccacgaagccgcccg

SEQ ID NO: 1731723 - RNA, 19 nt, Artificial Sequence
  Description of Artificial Sequence: Synthetic oligonucleotide
gcuauuagaacauguucug

SEQ ID NO: 1731724 - RNA, 19 nt, Artificial Sequence
  Description of Artificial Sequence: Synthetic oligonucleotide
gguaauggagagaugagac

SEQ ID NO: 1731725 - RNA, 19 nt, Artificial Sequence
  Description of Artificial Sequence: Synthetic oligonucleotide
agaugagaacucuuaguau

SEQ ID NO: 1731726 - RNA, 19 nt, Artificial Sequence
  Description of Artificial Sequence: Synthetic oligonucleotide
cuugcuuaaucuuggggca

SEQ ID NO: 1731727 - RNA, 19 nt, Artificial Sequence
  Description of Artificial Sequence: Synthetic oligonucleotide
aaaguaugcagcaguugga

SEQ ID NO: 1731728 - RNA, 19 nt, Artificial Sequence
  Description of Artificial Sequence: Synthetic oligonucleotide
acggcaucuggucuggcag

SEQ ID NO: 1731729 - RNA, 19 nt, Artificial Sequence
  Description of Artificial Sequence: Synthetic oligonucleotide
guugccggcagccacgccc

SEQ ID NO: 1731730 - RNA, 19 nt, Artificial Sequence
  Description of Artificial Sequence: Synthetic oligonucleotide
ucaaaguaugcagcaguug

SEQ ID NO: 1731731 - RNA, 19 nt, Artificial Sequence
  Description of Artificial Sequence: Synthetic oligonucleotide
uggcaguucuuuuccgggg

SEQ ID NO: 1731732 - RNA, 19 nt, Artificial Sequence
  Description of Artificial Sequence: Synthetic oligonucleotide
uagucacaagugugggugg

SEQ ID NO: 1731733 - RNA, 19 nt, Artificial Sequence
  Description of Artificial Sequence: Synthetic oligonucleotide
uaaaggcauacuugggaaa

SEQ ID NO: 1731734 - RNA, 19 nt, Artificial Sequence
  Description of Artificial Sequence: Synthetic oligonucleotide
uccagcccggaucggauag

SEQ ID NO: 1731735 - RNA, 19 nt, Artificial Sequence
  Description of Artificial Sequence: Synthetic oligonucleotide
gagcgggcaaauuuccacc

SEQ ID NO: 1731736 - RNA, 19 nt, Artificial Sequence
  Description of Artificial Sequence: Synthetic oligonucleotide
aauguacacuggguccaac

SEQ ID NO: 1731737 - RNA, 19 nt, Artificial Sequence
  Description of Artificial Sequence: Synthetic oligonucleotide
ucuagggaccggccgacug

SEQ ID NO: 1731738 - RNA, 19 nt, Artificial Sequence
  Description of Artificial Sequence: Synthetic oligonucleotide
ugaguuccgaaggugugcc

SEQ ID NO: 1731739 - RNA, 19 nt, Artificial Sequence
  Description of Artificial Sequence: Synthetic oligonucleotide
cuuuagaaccacgacucac

SEQ ID NO: 1731740 - RNA, 19 nt, Artificial Sequence
  Description of Artificial Sequence: Synthetic oligonucleotide
uucuguaccugaauugcuu

SEQ ID NO: 1731741 - RNA, 19 nt, Artificial Sequence
  Description of Artificial Sequence: Synthetic oligonucleotide
ugugugaguuccgaaggug

SEQ ID NO: 1731742 - RNA, 19 nt, Artificial Sequence
  Description of Artificial Sequence: Synthetic oligonucleotide
ugguaccuuuagaaccacg

SEQ ID NO: 1731743 - RNA, 19 nt, Artificial Sequence
  Description of Artificial Sequence: Synthetic oligonucleotide
uuuaccugacuuaggucau

SEQ ID NO: 1731744 - RNA, 19 nt, Artificial Sequence
  Description of Artificial Sequence: Synthetic oligonucleotide
ugguaagguucucaccugu

SEQ ID NO: 1731745 - RNA, 19 nt, Artificial Sequence
  Description of Artificial Sequence: Synthetic oligonucleotide
uuuaggcuauuagaacaug

SEQ ID NO: 1731746 - RNA, 19 nt, Artificial Sequence
  Description of Artificial Sequence: Synthetic oligonucleotide
uugucaaaguaugcagcag

SEQ ID NO: 1731747 - RNA, 19 nt, Artificial Sequence
  Description of Artificial Sequence: Synthetic oligonucleotide
agcaguuggagaacucugg

SEQ ID NO: 1731748 - RNA, 19 nt, Artificial Sequence
  Description of Artificial Sequence: Synthetic oligonucleotide
uugcgguagugccugguca

SEQ ID NO: 1731749 - RNA, 19 nt, Artificial Sequence
  Description of Artificial Sequence: Synthetic oligonucleotide
acgucauugauguccgcca

SEQ ID NO: 1731750 - RNA, 19 nt, Artificial Sequence
  Description of Artificial Sequence: Synthetic oligonucleotide
aacuugcccaucaguccgc

SEQ ID NO: 1731751 - RNA, 19 nt, Artificial Sequence
  Description of Artificial Sequence: Synthetic oligonucleotide
ggggccacgaccuucuucc

SEQ ID NO: 1731752 - RNA, 19 nt, Artificial Sequence
  Description of Artificial Sequence: Synthetic oligonucleotide
uuccucgggacucauggua

SEQ ID NO: 1731753 - RNA, 19 nt, Artificial Sequence
  Description of Artificial Sequence: Synthetic oligonucleotide
guaccuuuagaaccacgac

SEQ ID NO: 1731754 - RNA, 19 nt, Artificial Sequence
  Description of Artificial Sequence: Synthetic oligonucleotide
uaccugaauugcuuccucu

SEQ ID NO: 1731755 - RNA, 19 nt, Artificial Sequence
  Description of Artificial Sequence: Synthetic oligonucleotide
acagccgucccagucacag

SEQ ID NO: 1731756 - RNA, 19 nt, Artificial Sequence
  Description of Artificial Sequence: Synthetic oligonucleotide
uuugcgguagugccugguc

SEQ ID NO: 1731757 - RNA, 19 nt, Artificial Sequence
  Description of Artificial Sequence: Synthetic oligonucleotide
gguggcaguucuuuuccgg

SEQ ID NO: 1731758 - RNA, 19 nt, Artificial Sequence
  Description of Artificial Sequence: Synthetic oligonucleotide
cacgucauugauguccgcc

SEQ ID NO: 1731759 - RNA, 19 nt, Artificial Sequence
  Description of Artificial Sequence: Synthetic oligonucleotide
caugguagggguaguccug

SEQ ID NO: 1731760 - RNA, 19 nt, Artificial Sequence
  Description of Artificial Sequence: Synthetic oligonucleotide
cuuuuccggggccacgacc

SEQ ID NO: 1731761 - RNA, 19 nt, Artificial Sequence
  Description of Artificial Sequence: Synthetic oligonucleotide
gcccaaaugggucucuagg

SEQ ID NO: 1731762 - RNA, 19 nt, Artificial Sequence
  Description of Artificial Sequence: Synthetic oligonucleotide
guacaaauuauugcacauc

SEQ ID NO: 1731763 - RNA, 19 nt, Artificial Sequence
  Description of Artificial Sequence: Synthetic oligonucleotide
ucgggacucaugguagggg

SEQ ID NO: 1731764 - RNA, 19 nt, Artificial Sequence
  Description of Artificial Sequence: Synthetic oligonucleotide
augaccgacgggcugcugu

SEQ ID NO: 1731765 - RNA, 19 nt, Artificial Sequence
  Description of Artificial Sequence: Synthetic oligonucleotide
auuaaggcaaggaacuaua

SEQ ID NO: 1731766 - RNA, 19 nt, Artificial Sequence
  Description of Artificial Sequence: Synthetic oligonucleotide
ucuugguaauggagagaug

SEQ ID NO: 1731767 - RNA, 19 nt, Artificial Sequence
  Description of Artificial Sequence: Synthetic oligonucleotide
gguaguugggccccggaug

SEQ ID NO: 1731768 - RNA, 19 nt, Artificial Sequence
  Description of Artificial Sequence: Synthetic oligonucleotide
agaacucuuaguauagguu

SEQ ID NO: 1731769 - RNA, 19 nt, Artificial Sequence
  Description of Artificial Sequence: Synthetic oligonucleotide
agccugcauagucacaagu

SEQ ID NO: 1731770 - RNA, 19 nt, Artificial Sequence
  Description of Artificial Sequence: Synthetic oligonucleotide
cugccaggcgugcucagcg

SEQ ID NO: 1731771 - RNA, 19 nt, Artificial Sequence
  Description of Artificial Sequence: Synthetic oligonucleotide
acaaauuauugcacaucug

SEQ ID NO: 1731772 - RNA, 19 nt, Artificial Sequence
  Description of Artificial Sequence: Synthetic oligonucleotide
ccugugugaguuccgaagg

SEQ ID NO: 1731773 - RNA, 19 nt, Artificial Sequence
  Description of Artificial Sequence: Synthetic oligonucleotide
ggucaguucaucagagcgg

SEQ ID NO: 1731774 - RNA, 19 nt, Artificial Sequence
  Description of Artificial Sequence: Synthetic oligonucleotide
aucaguccgccaccuggcg

SEQ ID NO: 1731775 - RNA, 19 nt, Artificial Sequence
  Description of Artificial Sequence: Synthetic oligonucleotide
acgaagccgcccgaggggc

SEQ ID NO: 1731776 - RNA, 19 nt, Artificial Sequence
  Description of Artificial Sequence: Synthetic oligonucleotide
acagaauaaaccagguaua

SEQ ID NO: 1731777 - RNA, 19 nt, Artificial Sequence
  Description of Artificial Sequence: Synthetic oligonucleotide
cgacucacaagcaccaucg

SEQ ID NO: 1731778 - RNA, 19 nt, Artificial Sequence
  Description of Artificial Sequence: Synthetic oligonucleotide
aacucuuaguauagguuuu

SEQ ID NO: 1731779 - RNA, 19 nt, Artificial Sequence
  Description of Artificial Sequence: Synthetic oligonucleotide
ucacaagcaccaucguuua

SEQ ID NO: 1731780 - RNA, 19 nt, Artificial Sequence
  Description of Artificial Sequence: Synthetic oligonucleotide
acucuuaguauagguuuug

SEQ ID NO: 1731781 - RNA, 19 nt, Artificial Sequence
  Description of Artificial Sequence: Synthetic oligonucleotide
acucacaagcaccaucguu

SEQ ID NO: 1731782 - RNA, 19 nt, Artificial Sequence
  Description of Artificial Sequence: Synthetic oligonucleotide
ucggauaguugaagcugca

SEQ ID NO: 1731783 - RNA, 19 nt, Artificial Sequence
  Description of Artificial Sequence: Synthetic oligonucleotide
cugaugaccgacgggcugc

SEQ ID NO: 1731784 - RNA, 19 nt, Artificial Sequence
  Description of Artificial Sequence: Synthetic oligonucleotide
aacauguucuguaccugaa

SEQ ID NO: 1731785 - RNA, 19 nt, Artificial Sequence
  Description of Artificial Sequence: Synthetic oligonucleotide
cucacaagcaccaucguuu

SEQ ID NO: 1731786 - RNA, 19 nt, Artificial Sequence
  Description of Artificial Sequence: Synthetic oligonucleotide
ggcaaggaacuauauagaa

SEQ ID NO: 1731787 - RNA, 19 nt, Artificial Sequence
  Description of Artificial Sequence: Synthetic oligonucleotide
cacgaagccgcccgagggg

SEQ ID NO: 1731788 - RNA, 19 nt, Artificial Sequence
  Description of Artificial Sequence: Synthetic oligonucleotide
gguaccuuuagaaccacga

SEQ ID NO: 1731789 - RNA, 19 nt, Artificial Sequence
  Description of Artificial Sequence: Synthetic oligonucleotide
acucaugguagggguaguc

SEQ ID NO: 1731790 - RNA, 19 nt, Artificial Sequence
  Description of Artificial Sequence: Synthetic oligonucleotide
agcccuccaccuguguugc

SEQ ID NO: 1731791 - RNA, 19 nt, Artificial Sequence
  Description of Artificial Sequence: Synthetic oligonucleotide
ggaggagaccgauucuugc

SEQ ID NO: 1731792 - RNA, 19 nt, Artificial Sequence
  Description of Artificial Sequence: Synthetic oligonucleotide
ugcuuaaucuuggggcaca

SEQ ID NO: 1731793 - RNA, 19 nt, Artificial Sequence
  Description of Artificial Sequence: Synthetic oligonucleotide
agaauaaaccagguauauu

SEQ ID NO: 1731794 - RNA, 19 nt, Artificial Sequence
  Description of Artificial Sequence: Synthetic oligonucleotide
uggaauccuggcggaagag

SEQ ID NO: 1731795 - RNA, 19 nt, Artificial Sequence
  Description of Artificial Sequence: Synthetic oligonucleotide
guaauggagagaugagacu

SEQ ID NO: 1731796 - RNA, 19 nt, Artificial Sequence
  Description of Artificial Sequence: Synthetic oligonucleotide
ggucucuagggaccggccg

SEQ ID NO: 1731797 - RNA, 19 nt, Artificial Sequence
  Description of Artificial Sequence: Synthetic oligonucleotide
aggcgugcucagcgaagcc

SEQ ID NO: 1731798 - RNA, 19 nt, Artificial Sequence
  Description of Artificial Sequence: Synthetic oligonucleotide
aguugggccccggaugggg

SEQ ID NO: 1731799 - RNA, 19 nt, Artificial Sequence
  Description of Artificial Sequence: Synthetic oligonucleotide
aggagaccgauucuugcuu

SEQ ID NO: 1731800 - RNA, 19 nt, Artificial Sequence
  Description of Artificial Sequence: Synthetic oligonucleotide
ggcuauuagaacauguucu

SEQ ID NO: 1731801 - RNA, 19 nt, Artificial Sequence
  Description of Artificial Sequence: Synthetic oligonucleotide
gugaguuccgaaggugugc

SEQ ID NO: 1731802 - RNA, 19 nt, Artificial Sequence
  Description of Artificial Sequence: Synthetic oligonucleotide
cguuuaggcuauuagaaca

SEQ ID NO: 1731803 - RNA, 19 nt, Artificial Sequence
  Description of Artificial Sequence: Synthetic oligonucleotide
gcaguuggagaacucuggc

SEQ ID NO: 1731804 - RNA, 19 nt, Artificial Sequence
  Description of Artificial Sequence: Synthetic oligonucleotide
aaguuugcuuaaauuuaua

SEQ ID NO: 1731805 - RNA, 19 nt, Artificial Sequence
  Description of Artificial Sequence: Synthetic oligonucleotide
aggcaaggaacuauauaga

SEQ ID NO: 1731806 - RNA, 19 nt, Artificial Sequence
  Description of Artificial Sequence: Synthetic oligonucleotide
ggaauccuggcggaagagg

SEQ ID NO: 1731807 - RNA, 19 nt, Artificial Sequence
  Description of Artificial Sequence: Synthetic oligonucleotide
uugcuuaaucuuggggcac

SEQ ID NO: 1731808 - RNA, 19 nt, Artificial Sequence
  Description of Artificial Sequence: Synthetic oligonucleotide
gaggagaccgauucuugcu

SEQ ID NO: 1731809 - RNA, 19 nt, Artificial Sequence
  Description of Artificial Sequence: Synthetic oligonucleotide
ugugcaggaggagaccgau

SEQ ID NO: 1731810 - RNA, 19 nt, Artificial Sequence
  Description of Artificial Sequence: Synthetic oligonucleotide
gaccggccgacugugcagg

SEQ ID NO: 1731811 - RNA, 19 nt, Artificial Sequence
  Description of Artificial Sequence: Synthetic oligonucleotide
ugcgcggcgggccaccgcu

SEQ ID NO: 1731812 - RNA, 19 nt, Artificial Sequence
  Description of Artificial Sequence: Synthetic oligonucleotide
gacggcaucuggucuggca

SEQ ID NO: 1731813 - RNA, 19 nt, Artificial Sequence
  Description of Artificial Sequence: Synthetic oligonucleotide
guaagguucucaccugugu

SEQ ID NO: 1731814 - RNA, 19 nt, Artificial Sequence
  Description of Artificial Sequence: Synthetic oligonucleotide
cuguacucgcugccaggcg

SEQ ID NO: 1731815 - RNA, 19 nt, Artificial Sequence
  Description of Artificial Sequence: Synthetic oligonucleotide
gacgggcugcuguacucgc

SEQ ID NO: 1731816 - RNA, 19 nt, Artificial Sequence
  Description of Artificial Sequence: Synthetic oligonucleotide
uccccucuuugguuugggc

SEQ ID NO: 1731817 - RNA, 19 nt, Artificial Sequence
  Description of Artificial Sequence: Synthetic oligonucleotide
ugcagcaguuggagaacuc

SEQ ID NO: 1731818 - RNA, 19 nt, Artificial Sequence
  Description of Artificial Sequence: Synthetic oligonucleotide
guggcugccguccgggcug

SEQ ID NO: 1731819 - RNA, 19 nt, Artificial Sequence
  Description of Artificial Sequence: Synthetic oligonucleotide
ggaauguacacugggucca

SEQ ID NO: 1731820 - RNA, 19 nt, Artificial Sequence
  Description of Artificial Sequence: Synthetic oligonucleotide
ggcucccucauuugguacc

SEQ ID NO: 1731821 - RNA, 19 nt, Artificial Sequence
  Description of Artificial Sequence: Synthetic oligonucleotide
guaccugaauugcuuccuc

SEQ ID NO: 1731822 - RNA, 19 nt, Artificial Sequence
  Description of Artificial Sequence: Synthetic oligonucleotide
gacugugcaggaggagacc

SEQ ID NO: 1731823 - RNA, 19 nt, Artificial Sequence
  Description of Artificial Sequence: Synthetic oligonucleotide
cugcuguggcggaauguac

SEQ ID NO: 1731824 - RNA, 19 nt, Artificial Sequence
  Description of Artificial Sequence: Synthetic oligonucleotide
uccgccaccuggcggcuga

SEQ ID NO: 1731825 - RNA, 19 nt, Artificial Sequence
  Description of Artificial Sequence: Synthetic oligonucleotide
guagaggagcccuccaccu

SEQ ID NO: 1731826 - RNA, 19 nt, Artificial Sequence
  Description of Artificial Sequence: Synthetic oligonucleotide
caggcgugcucagcgaagc

SEQ ID NO: 1731827 - RNA, 19 nt, Artificial Sequence
  Description of Artificial Sequence: Synthetic oligonucleotide
uagggaccggccgacugug

SEQ ID NO: 1731828 - RNA, 19 nt, Artificial Sequence
  Description of Artificial Sequence: Synthetic oligonucleotide
gccugcauagucacaagug

SEQ ID NO: 1731829 - RNA, 19 nt, Artificial Sequence
  Description of Artificial Sequence: Synthetic oligonucleotide
ugcuaacacugaugaccga

SEQ ID NO: 1731830 - RNA, 19 nt, Artificial Sequence
  Description of Artificial Sequence: Synthetic oligonucleotide
gaacccgguggcaugagcu

SEQ ID NO: 1731831 - RNA, 19 nt, Artificial Sequence
  Description of Artificial Sequence: Synthetic oligonucleotide
ugcccguugcugagcugag

SEQ ID NO: 1731832 - RNA, 19 nt, Artificial Sequence
  Description of Artificial Sequence: Synthetic oligonucleotide
ucucuagggaccggccgac

SEQ ID NO: 1731833 - RNA, 19 nt, Artificial Sequence
  Description of Artificial Sequence: Synthetic oligonucleotide
caacuccggccgcaggagc

SEQ ID NO: 1731834 - RNA, 19 nt, Artificial Sequence
  Description of Artificial Sequence: Synthetic oligonucleotide
cguugcugagcugaggucc

SEQ ID NO: 1731835 - RNA, 19 nt, Artificial Sequence
  Description of Artificial Sequence: Synthetic oligonucleotide
auguagaucggaagacaaa

SEQ ID NO: 1731836 - RNA, 19 nt, Artificial Sequence
  Description of Artificial Sequence: Synthetic oligonucleotide
ugaccgacgggcugcugua

SEQ ID NO: 1731837 - RNA, 19 nt, Artificial Sequence
  Description of Artificial Sequence: Synthetic oligonucleotide
guuuaggcuauuagaacau

SEQ ID NO: 1731838 - RNA, 19 nt, Artificial Sequence
  Description of Artificial Sequence: Synthetic oligonucleotide
gacuuaggucauaaaugua

SEQ ID NO: 1731839 - RNA, 19 nt, Artificial Sequence
  Description of Artificial Sequence: Synthetic oligonucleotide
gggcucacgucauugaugu

SEQ ID NO: 1731840 - RNA, 19 nt, Artificial Sequence
  Description of Artificial Sequence: Synthetic oligonucleotide
ccacgaagccgcccgaggg

SEQ ID NO: 1731841 - RNA, 19 nt, Artificial Sequence
  Description of Artificial Sequence: Synthetic oligonucleotide
ccugaauugcuuccucuuc

SEQ ID NO: 1731842 - RNA, 19 nt, Artificial Sequence
  Description of Artificial Sequence: Synthetic oligonucleotide
gguaagguucucaccugug

SEQ ID NO: 1731843 - RNA, 19 nt, Artificial Sequence
  Description of Artificial Sequence: Synthetic oligonucleotide
gcaguucuuuuccggggcc

SEQ ID NO: 1731844 - RNA, 19 nt, Artificial Sequence
  Description of Artificial Sequence: Synthetic oligonucleotide
uuccgaaggugugccuuga

SEQ ID NO: 1731845 - RNA, 19 nt, Artificial Sequence
  Description of Artificial Sequence: Synthetic oligonucleotide
cuauuagaacauguucugu

SEQ ID NO: 1731846 - RNA, 19 nt, Artificial Sequence
  Description of Artificial Sequence: Synthetic oligonucleotide
ggguggcaguucuuuuccg

SEQ ID NO: 1731847 - RNA, 19 nt, Artificial Sequence
  Description of Artificial Sequence: Synthetic oligonucleotide
aucugaaaccacagugcau

SEQ ID NO: 1731848 - RNA, 19 nt, Artificial Sequence
  Description of Artificial Sequence: Synthetic oligonucleotide
cugaaaccacagugcauaa

SEQ ID NO: 1731849 - RNA, 19 nt, Artificial Sequence
  Description of Artificial Sequence: Synthetic oligonucleotide
ccugacuuaggucauaaau

SEQ ID NO: 1731850 - RNA, 19 nt, Artificial Sequence
  Description of Artificial Sequence: Synthetic oligonucleotide
aggguaguugggccccgga

SEQ ID NO: 1731851 - RNA, 19 nt, Artificial Sequence
  Description of Artificial Sequence: Synthetic oligonucleotide
cagaauaaaccagguauau

SEQ ID NO: 1731852 - RNA, 19 nt, Artificial Sequence
  Description of Artificial Sequence: Synthetic oligonucleotide
gccuuugcuaacacugaug

SEQ ID NO: 1731853 - RNA, 19 nt, Artificial Sequence
  Description of Artificial Sequence: Synthetic oligonucleotide
uagugccuggucaguucau

SEQ ID NO: 1731854 - RNA, 19 nt, Artificial Sequence
  Description of Artificial Sequence: Synthetic oligonucleotide
guacucgcugccaggcgug

SEQ ID NO: 1731855 - RNA, 19 nt, Artificial Sequence
  Description of Artificial Sequence: Synthetic oligonucleotide
cagagcgggcaaauuucca

SEQ ID NO: 1731856 - RNA, 19 nt, Artificial Sequence
  Description of Artificial Sequence: Synthetic oligonucleotide
ggguaguccugguggggag

SEQ ID NO: 1731857 - RNA, 19 nt, Artificial Sequence
  Description of Artificial Sequence: Synthetic oligonucleotide
ggagcucggccacgaagcc

SEQ ID NO: 1731858 - RNA, 19 nt, Artificial Sequence
  Description of Artificial Sequence: Synthetic oligonucleotide
gccacgaagccgcccgagg

SEQ ID NO: 1731859 - RNA, 19 nt, Artificial Sequence
  Description of Artificial Sequence: Synthetic oligonucleotide
ggaccggccgacugugcag

SEQ ID NO: 1731860 - RNA, 19 nt, Artificial Sequence
  Description of Artificial Sequence: Synthetic oligonucleotide
ggaacccgguggcaugagc

SEQ ID NO: 1731861 - RNA, 19 nt, Artificial Sequence
  Description of Artificial Sequence: Synthetic oligonucleotide
agcaguuccucgggacuca

SEQ ID NO: 1731862 - RNA, 19 nt, Artificial Sequence
  Description of Artificial Sequence: Synthetic oligonucleotide
uacucgcugccaggcgugc

SEQ ID NO: 1731863 - RNA, 19 nt, Artificial Sequence
  Description of Artificial Sequence: Synthetic oligonucleotide
agaccgauucuugcuuaau

SEQ ID NO: 1731864 - RNA, 19 nt, Artificial Sequence
  Description of Artificial Sequence: Synthetic oligonucleotide
accaucguuuaggcuauua

SEQ ID NO: 1731865 - RNA, 19 nt, Artificial Sequence
  Description of Artificial Sequence: Synthetic oligonucleotide
guagggcgccaccaccaca

SEQ ID NO: 1731866 - RNA, 19 nt, Artificial Sequence
  Description of Artificial Sequence: Synthetic oligonucleotide
uugggccccggauggggau

SEQ ID NO: 1731867 - RNA, 19 nt, Artificial Sequence
  Description of Artificial Sequence: Synthetic oligonucleotide
cuggcggaagaggcaggcc

SEQ ID NO: 1731868 - RNA, 19 nt, Artificial Sequence
  Description of Artificial Sequence: Synthetic oligonucleotide
gggauggaauccuggcgga

SEQ ID NO: 1731869 - RNA, 19 nt, Artificial Sequence
  Description of Artificial Sequence: Synthetic oligonucleotide
cuggcucccucauuuggua

SEQ ID NO: 1731870 - RNA, 19 nt, Artificial Sequence
  Description of Artificial Sequence: Synthetic oligonucleotide
ccggauggggauggaaucc

SEQ ID NO: 1731871 - RNA, 19 nt, Artificial Sequence
  Description of Artificial Sequence: Synthetic oligonucleotide
augagacuugagacggcau

SEQ ID NO: 1731872 - RNA, 19 nt, Artificial Sequence
  Description of Artificial Sequence: Synthetic oligonucleotide
cugugcaggaggagaccga

SEQ ID NO: 1731873 - RNA, 19 nt, Artificial Sequence
  Description of Artificial Sequence: Synthetic oligonucleotide
ggcacaugcgcggcgggcc

SEQ ID NO: 1731874 - RNA, 19 nt, Artificial Sequence
  Description of Artificial Sequence: Synthetic oligonucleotide
aggugugccuugagaugag

SEQ ID NO: 1731875 - RNA, 19 nt, Artificial Sequence
  Description of Artificial Sequence: Synthetic oligonucleotide
ggagaccgauucuugcuua

SEQ ID NO: 1731876 - RNA, 19 nt, Artificial Sequence
  Description of Artificial Sequence: Synthetic oligonucleotide
gaagccgcccgaggggcuc

SEQ ID NO: 1731877 - RNA, 19 nt, Artificial Sequence
  Description of Artificial Sequence: Synthetic oligonucleotide
cgacugugcaggaggagac

SEQ ID NO: 1731878 - RNA, 19 nt, Artificial Sequence
  Description of Artificial Sequence: Synthetic oligonucleotide
cugugugaguuccgaaggu

SEQ ID NO: 1731879 - RNA, 19 nt, Artificial Sequence
  Description of Artificial Sequence: Synthetic oligonucleotide
uuccggggccacgaccuuc

SEQ ID NO: 1731880 - RNA, 19 nt, Artificial Sequence
  Description of Artificial Sequence: Synthetic oligonucleotide
aggaacccgguggcaugag

SEQ ID NO: 1731881 - RNA, 19 nt, Artificial Sequence
  Description of Artificial Sequence: Synthetic oligonucleotide
ccaggcgugcucagcgaag

SEQ ID NO: 1731882 - RNA, 19 nt, Artificial Sequence
  Description of Artificial Sequence: Synthetic oligonucleotide
cgggcaaauuuccacccac

SEQ ID NO: 1731883 - RNA, 19 nt, Artificial Sequence
  Description of Artificial Sequence: Synthetic oligonucleotide
cuagggaccggccgacugu

SEQ ID NO: 1731884 - RNA, 19 nt, Artificial Sequence
  Description of Artificial Sequence: Synthetic oligonucleotide
cagguauauuuaccugacu

SEQ ID NO: 1731885 - RNA, 19 nt, Artificial Sequence
  Description of Artificial Sequence: Synthetic oligonucleotide
ccguuugcgguagugccug

SEQ ID NO: 1731886 - RNA, 19 nt, Artificial Sequence
  Description of Artificial Sequence: Synthetic oligonucleotide
ggcgggccaccgcuguagg

SEQ ID NO: 1731887 - RNA, 19 nt, Artificial Sequence
  Description of Artificial Sequence: Synthetic oligonucleotide
acgcccgggucaccuccag

SEQ ID NO: 1731888 - RNA, 19 nt, Artificial Sequence
  Description of Artificial Sequence: Synthetic oligonucleotide
gaugaccgacgggcugcug

SEQ ID NO: 1731889 - RNA, 19 nt, Artificial Sequence
  Description of Artificial Sequence: Synthetic oligonucleotide
gggguaguccuggugggga

SEQ ID NO: 1731890 - RNA, 19 nt, Artificial Sequence
  Description of Artificial Sequence: Synthetic oligonucleotide
guugggccccggaugggga

SEQ ID NO: 1731891 - RNA, 19 nt, Artificial Sequence
  Description of Artificial Sequence: Synthetic oligonucleotide
gcugcuguggcggaaugua

SEQ ID NO: 1731892 - RNA, 19 nt, Artificial Sequence
  Description of Artificial Sequence: Synthetic oligonucleotide
gaccgacgggcugcuguac

SEQ ID NO: 1731893 - RNA, 19 nt, Artificial Sequence
  Description of Artificial Sequence: Synthetic oligonucleotide
cuugcccaucaguccgcca

SEQ ID NO: 1731894 - RNA, 19 nt, Artificial Sequence
  Description of Artificial Sequence: Synthetic oligonucleotide
caugcgcggcgggccaccg

SEQ ID NO: 1731895 - RNA, 19 nt, Artificial Sequence
  Description of Artificial Sequence: Synthetic oligonucleotide
ucgugugugcugggccggu

SEQ ID NO: 1731896 - RNA, 19 nt, Artificial Sequence
  Description of Artificial Sequence: Synthetic oligonucleotide
ccgaaggugugccuugaga

SEQ ID NO: 1731897 - RNA, 19 nt, Artificial Sequence
  Description of Artificial Sequence: Synthetic oligonucleotide
cacugaugaccgacgggcu

SEQ ID NO: 1731898 - RNA, 19 nt, Artificial Sequence
  Description of Artificial Sequence: Synthetic oligonucleotide
ggggcacaugcgcggcggg

SEQ ID NO: 1731899 - RNA, 19 nt, Artificial Sequence
  Description of Artificial Sequence: Synthetic oligonucleotide
ccaacuccggccgcaggag

SEQ ID NO: 1731900 - RNA, 19 nt, Artificial Sequence
  Description of Artificial Sequence: Synthetic oligonucleotide
agcgcccaaaugggucucu

SEQ ID NO: 1731901 - RNA, 19 nt, Artificial Sequence
  Description of Artificial Sequence: Synthetic oligonucleotide
accggccgacugugcagga

SEQ ID NO: 1731902 - RNA, 19 nt, Artificial Sequence
  Description of Artificial Sequence: Synthetic oligonucleotide
ccgacugugcaggaggaga

SEQ ID NO: 1731903 - RNA, 19 nt, Artificial Sequence
  Description of Artificial Sequence: Synthetic oligonucleotide
ggaggguaguugggccccg

SEQ ID NO: 1731904 - RNA, 19 nt, Artificial Sequence
  Description of Artificial Sequence: Synthetic oligonucleotide
gcgggcaaauuuccaccca

SEQ ID NO: 1731905 - RNA, 19 nt, Artificial Sequence
  Description of Artificial Sequence: Synthetic oligonucleotide
ccguugcugagcugagguc

SEQ ID NO: 1731906 - RNA, 19 nt, Artificial Sequence
  Description of Artificial Sequence: Synthetic oligonucleotide
guuugcgguagugccuggu

SEQ ID NO: 1731907 - RNA, 19 nt, Artificial Sequence
  Description of Artificial Sequence: Synthetic oligonucleotide
ugccguccgggcugccuuu

SEQ ID NO: 1731908 - RNA, 19 nt, Artificial Sequence
  Description of Artificial Sequence: Synthetic oligonucleotide
ggcggaauguacacugggu

SEQ ID NO: 1731909 - RNA, 19 nt, Artificial Sequence
  Description of Artificial Sequence: Synthetic oligonucleotide
gacucaugguagggguagu

SEQ ID NO: 1731910 - RNA, 19 nt, Artificial Sequence
  Description of Artificial Sequence: Synthetic oligonucleotide
ggcgccaccaccacagggu

SEQ ID NO: 1731911 - RNA, 19 nt, Artificial Sequence
  Description of Artificial Sequence: Synthetic oligonucleotide
cacaugcgcggcgggccac

SEQ ID NO: 1731912 - RNA, 19 nt, Artificial Sequence
  Description of Artificial Sequence: Synthetic oligonucleotide
cccucauuugguaccuuua

SEQ ID NO: 1731913 - RNA, 19 nt, Artificial Sequence
  Description of Artificial Sequence: Synthetic oligonucleotide
cuccagcccggaucggaua

SEQ ID NO: 1731914 - RNA, 19 nt, Artificial Sequence
  Description of Artificial Sequence: Synthetic oligonucleotide
cgacgggcugcuguacucg

SEQ ID NO: 1731915 - RNA, 19 nt, Artificial Sequence
  Description of Artificial Sequence: Synthetic oligonucleotide
caccgcuguagggcgccac

SEQ ID NO: 1731916 - RNA, 19 nt, Artificial Sequence
  Description of Artificial Sequence: Synthetic oligonucleotide
ggccacgaagccgcccgag

SEQ ID NO: 1731917 - RNA, 19 nt, Artificial Sequence
  Description of Artificial Sequence: Synthetic oligonucleotide
gguggcugccguccgggcu

SEQ ID NO: 1731918 - RNA, 19 nt, Artificial Sequence
  Description of Artificial Sequence: Synthetic oligonucleotide
gccaccgcuguagggcgcc

SEQ ID NO: 1731919 - RNA, 19 nt, Artificial Sequence
  Description of Artificial Sequence: Synthetic oligonucleotide
ggauggaauccuggcggaa

SEQ ID NO: 1731920 - RNA, 19 nt, Artificial Sequence
  Description of Artificial Sequence: Synthetic oligonucleotide
gcacaugcgcggcgggcca

SEQ ID NO: 1731921 - RNA, 19 nt, Artificial Sequence
  Description of Artificial Sequence: Synthetic oligonucleotide
cacgcccgggucaccucca

SEQ ID NO: 1731922 - RNA, 19 nt, Artificial Sequence
  Description of Artificial Sequence: Synthetic oligonucleotide
ggguaguugggccccggau

SEQ ID NO: 1731923 - RNA, 19 nt, Artificial Sequence
  Description of Artificial Sequence: Synthetic oligonucleotide
gccuugagaugagaacucu

SEQ ID NO: 1731924 - RNA, 19 nt, Artificial Sequence
  Description of Artificial Sequence: Synthetic oligonucleotide
cacagccgucccagucaca

SEQ ID NO: 1731925 - RNA, 19 nt, Artificial Sequence
  Description of Artificial Sequence: Synthetic oligonucleotide
ggcaggaaaggaggguagu

SEQ ID NO: 1731926 - RNA, 19 nt, Artificial Sequence
  Description of Artificial Sequence: Synthetic oligonucleotide
cccggaucggauaguugaa

SEQ ID NO: 1731927 - RNA, 19 nt, Artificial Sequence
  Description of Artificial Sequence: Synthetic oligonucleotide
ccgggcugccuuugcuaac

SEQ ID NO: 1731928 - RNA, 19 nt, Artificial Sequence
  Description of Artificial Sequence: Synthetic oligonucleotide
guccagcgcccaaaugggu

SEQ ID NO: 1731929 - RNA, 19 nt, Artificial Sequence
  Description of Artificial Sequence: Synthetic oligonucleotide
gcaccaucguuuaggcuau

SEQ ID NO: 1731930 - RNA, 19 nt, Artificial Sequence
  Description of Artificial Sequence: Synthetic oligonucleotide
ccggccgacugugcaggag

SEQ ID NO: 1731931 - RNA, 19 nt, Artificial Sequence
  Description of Artificial Sequence: Synthetic oligonucleotide
ccguccgggcugccuuugc

SEQ ID NO: 1731932 - RNA, 19 nt, Artificial Sequence
  Description of Artificial Sequence: Synthetic oligonucleotide
ggccaccgcuguagggcgc

SEQ ID NO: 1731933 - RNA, 19 nt, Artificial Sequence
  Description of Artificial Sequence: Synthetic oligonucleotide
cugccguccgggcugccuu

SEQ ID NO: 1731934 - RNA, 19 nt, Artificial Sequence
  Description of Artificial Sequence: Synthetic oligonucleotide
ccccggauggggauggaau

SEQ ID NO: 1731935 - RNA, 19 nt, Artificial Sequence
  Description of Artificial Sequence: Synthetic oligonucleotide
cagccgucccagucacagu

SEQ ID NO: 1731936 - RNA, 19 nt, Artificial Sequence
  Description of Artificial Sequence: Synthetic oligonucleotide
cgggcugccuuugcuaaca

SEQ ID NO: 1731937 - RNA, 19 nt, Artificial Sequence
  Description of Artificial Sequence: Synthetic oligonucleotide
cggggccacgaccuucuuc

SEQ ID NO: 1731938 - RNA, 19 nt, Artificial Sequence
  Description of Artificial Sequence: Synthetic oligonucleotide
gccguccgggcugccuuug

SEQ ID NO: 1731939 - RNA, 19 nt, Artificial Sequence
  Description of Artificial Sequence: Synthetic oligonucleotide
ccggccgcaggagcucggc

SEQ ID NO: 1731940 - RNA, 19 nt, Artificial Sequence
  Description of Artificial Sequence: Synthetic oligonucleotide
ccgguggcaugagcucuug

SEQ ID NO: 1731941 - RNA, 19 nt, Artificial Sequence
  Description of Artificial Sequence: Synthetic oligonucleotide
gcgugcucagcgaagccuu

SEQ ID NO: 1731942 - RNA, 19 nt, Artificial Sequence
  Description of Artificial Sequence: Synthetic oligonucleotide
cagcccggaucggauaguu

SEQ ID NO: 1731943 - RNA, 19 nt, Artificial Sequence
  Description of Artificial Sequence: Synthetic oligonucleotide
gugcaggaggagaccgauu

SEQ ID NO: 1731944 - RNA, 19 nt, Artificial Sequence
  Description of Artificial Sequence: Synthetic oligonucleotide
gccccggauggggauggaa

SEQ ID NO: 1731945 - RNA, 19 nt, Artificial Sequence
  Description of Artificial Sequence: Synthetic oligonucleotide
gcugccguccgggcugccu

SEQ ID NO: 1731946 - RNA, 19 nt, Artificial Sequence
  Description of Artificial Sequence: Synthetic oligonucleotide
ccgugggagguggcgcaga

SEQ ID NO: 1731947 - RNA, 19 nt, Artificial Sequence
  Description of Artificial Sequence: Synthetic oligonucleotide
cccgaggggcucacgucau

SEQ ID NO: 1731948 - RNA, 19 nt, Artificial Sequence
  Description of Artificial Sequence: Synthetic oligonucleotide
gcggcgggccaccgcugua

SEQ ID NO: 1731949 - RNA, 19 nt, Artificial Sequence
  Description of Artificial Sequence: Synthetic oligonucleotide
cccgguggcaugagcucuu

SEQ ID NO: 1731950 - RNA, 19 nt, Artificial Sequence
  Description of Artificial Sequence: Synthetic oligonucleotide
ccgccaccuggcggcugag

SEQ ID NO: 1731951 - RNA, 19 nt, Artificial Sequence
  Description of Artificial Sequence: Synthetic oligonucleotide
ggcugccguccgggcugcc

SEQ ID NO: 1731952 - RNA, 19 nt, Artificial Sequence
  Description of Artificial Sequence: Synthetic oligonucleotide
cgaagccgcccgaggggcu

SEQ ID NO: 1731953 - RNA, 19 nt, Artificial Sequence
  Description of Artificial Sequence: Synthetic oligonucleotide
ccaccgcuguagggcgcca

SEQ ID NO: 1731954 - RNA, 19 nt, Artificial Sequence
  Description of Artificial Sequence: Synthetic oligonucleotide
caccaucguuuaggcuauu

SEQ ID NO: 1731955 - RNA, 19 nt, Artificial Sequence
  Description of Artificial Sequence: Synthetic oligonucleotide
ccgaggggcucacgucauu

SEQ ID NO: 1731956 - RNA, 19 nt, Artificial Sequence
  Description of Artificial Sequence: Synthetic oligonucleotide
cgcggcgggccaccgcugu

SEQ ID NO: 1731957 - RNA, 19 nt, Artificial Sequence
  Description of Artificial Sequence: Synthetic oligonucleotide
aaaaucuagaagcagagcu

SEQ ID NO: 1731958 - RNA, 19 nt, Artificial Sequence
  Description of Artificial Sequence: Synthetic oligonucleotide
ucaaaugagcccuugaagg

SEQ ID NO: 1731959 - RNA, 19 nt, Artificial Sequence
  Description of Artificial Sequence: Synthetic oligonucleotide
aacaguaaccaugaggugc

SEQ ID NO: 1731960 - RNA, 19 nt, Artificial Sequence
  Description of Artificial Sequence: Synthetic oligonucleotide
ucucacaagaguuugagcc

SEQ ID NO: 1731961 - RNA, 19 nt, Artificial Sequence
  Description of Artificial Sequence: Synthetic oligonucleotide
uccuuuaugaauaggaccc

SEQ ID NO: 1731962 - RNA, 19 nt, Artificial Sequence
  Description of Artificial Sequence: Synthetic oligonucleotide
uaauagguagucaacaccc

SEQ ID NO: 1731963 - RNA, 19 nt, Artificial Sequence
  Description of Artificial Sequence: Synthetic oligonucleotide
aaacaguguauacaauggc

SEQ ID NO: 1731964 - RNA, 19 nt, Artificial Sequence
  Description of Artificial Sequence: Synthetic oligonucleotide
uuaucaaagagcucgaugu

SEQ ID NO: 1731965 - RNA, 19 nt, Artificial Sequence
  Description of Artificial Sequence: Synthetic oligonucleotide
cacaccaacauuuaaacag

SEQ ID NO: 1731966 - RNA, 19 nt, Artificial Sequence
  Description of Artificial Sequence: Synthetic oligonucleotide
gaagcaaugacuccagggg

SEQ ID NO: 1731967 - RNA, 19 nt, Artificial Sequence
  Description of Artificial Sequence: Synthetic oligonucleotide
ugaaaaucuagaagcagag

SEQ ID NO: 1731968 - RNA, 19 nt, Artificial Sequence
  Description of Artificial Sequence: Synthetic oligonucleotide
acuuaagaagcccuaauag

SEQ ID NO: 1731969 - RNA, 19 nt, Artificial Sequence
  Description of Artificial Sequence: Synthetic oligonucleotide
aggagugucacuuaagaag

SEQ ID NO: 1731970 - RNA, 19 nt, Artificial Sequence
  Description of Artificial Sequence: Synthetic oligonucleotide
auaaaugcgggcuucgggg

SEQ ID NO: 1731971 - RNA, 19 nt, Artificial Sequence
  Description of Artificial Sequence: Synthetic oligonucleotide
auacgugucaaacucacuc

SEQ ID NO: 1731972 - RNA, 19 nt, Artificial Sequence
  Description of Artificial Sequence: Synthetic oligonucleotide
acugcaagucaauugggcc

SEQ ID NO: 1731973 - RNA, 19 nt, Artificial Sequence
  Description of Artificial Sequence: Synthetic oligonucleotide
agaaccgucaaaugagccc

SEQ ID NO: 1731974 - RNA, 19 nt, Artificial Sequence
  Description of Artificial Sequence: Synthetic oligonucleotide
aaacucauaaaacaugauu

SEQ ID NO: 1731975 - RNA, 19 nt, Artificial Sequence
  Description of Artificial Sequence: Synthetic oligonucleotide
uccuacagaaaacaccagg

SEQ ID NO: 1731976 - RNA, 19 nt, Artificial Sequence
  Description of Artificial Sequence: Synthetic oligonucleotide
uaaauaccacaacaaaggc

SEQ ID NO: 1731977 - RNA, 19 nt, Artificial Sequence
  Description of Artificial Sequence: Synthetic oligonucleotide
guaaccaugaggugcaggg

SEQ ID NO: 1731978 - RNA, 19 nt, Artificial Sequence
  Description of Artificial Sequence: Synthetic oligonucleotide
aagaagcccuaauagguag

SEQ ID NO: 1731979 - RNA, 19 nt, Artificial Sequence
  Description of Artificial Sequence: Synthetic oligonucleotide
uuuaugaauaggacccucc

SEQ ID NO: 1731980 - RNA, 19 nt, Artificial Sequence
  Description of Artificial Sequence: Synthetic oligonucleotide
uucuucaacauauugucgu

SEQ ID NO: 1731981 - RNA, 19 nt, Artificial Sequence
  Description of Artificial Sequence: Synthetic oligonucleotide
aauugacugguguaggagu

SEQ ID NO: 1731982 - RNA, 19 nt, Artificial Sequence
  Description of Artificial Sequence: Synthetic oligonucleotide
agucaauugggccaccaac

SEQ ID NO: 1731983 - RNA, 19 nt, Artificial Sequence
  Description of Artificial Sequence: Synthetic oligonucleotide
uuuggaacgacugacgcug

SEQ ID NO: 1731984 - RNA, 19 nt, Artificial Sequence
  Description of Artificial Sequence: Synthetic oligonucleotide
uugucgucagaauugacug

SEQ ID NO: 1731985 - RNA, 19 nt, Artificial Sequence
  Description of Artificial Sequence: Synthetic oligonucleotide
cuaauagguagucaacacc

SEQ ID NO: 1731986 - RNA, 19 nt, Artificial Sequence
  Description of Artificial Sequence: Synthetic oligonucleotide
cacacagccucucagaacc

SEQ ID NO: 1731987 - RNA, 19 nt, Artificial Sequence
  Description of Artificial Sequence: Synthetic oligonucleotide
ucacauacgugucaaacuc

SEQ ID NO: 1731988 - RNA, 19 nt, Artificial Sequence
  Description of Artificial Sequence: Synthetic oligonucleotide
ucauaaaacaugauuugua

SEQ ID NO: 1731989 - RNA, 19 nt, Artificial Sequence
  Description of Artificial Sequence: Synthetic oligonucleotide
auagaugugcaacagacuu

SEQ ID NO: 1731990 - RNA, 19 nt, Artificial Sequence
  Description of Artificial Sequence: Synthetic oligonucleotide
cucagaaccgucaaaugag

SEQ ID NO: 1731991 - RNA, 19 nt, Artificial Sequence
  Description of Artificial Sequence: Synthetic oligonucleotide
cauaaaaggaccagcagca

SEQ ID NO: 1731992 - RNA, 19 nt, Artificial Sequence
  Description of Artificial Sequence: Synthetic oligonucleotide
aaauguucagggucuccuc

SEQ ID NO: 1731993 - RNA, 19 nt, Artificial Sequence
  Description of Artificial Sequence: Synthetic oligonucleotide
aagaguuugagcccucaga

SEQ ID NO: 1731994 - RNA, 19 nt, Artificial Sequence
  Description of Artificial Sequence: Synthetic oligonucleotide
uucaacauauugucgucag

SEQ ID NO: 1731995 - RNA, 19 nt, Artificial Sequence
  Description of Artificial Sequence: Synthetic oligonucleotide
ucuagaagcagagcuuugg

SEQ ID NO: 1731996 - RNA, 19 nt, Artificial Sequence
  Description of Artificial Sequence: Synthetic oligonucleotide
ugccgaaacaguaaccaug

SEQ ID NO: 1731997 - RNA, 19 nt, Artificial Sequence
  Description of Artificial Sequence: Synthetic oligonucleotide
aguuugagcccucagacaa

SEQ ID NO: 1731998 - RNA, 19 nt, Artificial Sequence
  Description of Artificial Sequence: Synthetic oligonucleotide
uucaugcuagcccugaaaa

SEQ ID NO: 1731999 - RNA, 19 nt, Artificial Sequence
  Description of Artificial Sequence: Synthetic oligonucleotide
ugcauugucagguccucgg

SEQ ID NO: 1732000 - RNA, 19 nt, Artificial Sequence
  Description of Artificial Sequence: Synthetic oligonucleotide
uucacuuuuacucccuaaa

SEQ ID NO: 1732001 - RNA, 19 nt, Artificial Sequence
  Description of Artificial Sequence: Synthetic oligonucleotide
aaauaccacaacaaaggcu

SEQ ID NO: 1732002 - RNA, 19 nt, Artificial Sequence
  Description of Artificial Sequence: Synthetic oligonucleotide
guccuuuaugaauaggacc

SEQ ID NO: 1732003 - RNA, 19 nt, Artificial Sequence
  Description of Artificial Sequence: Synthetic oligonucleotide
acucgcucgauccucuccc

SEQ ID NO: 1732004 - RNA, 19 nt, Artificial Sequence
  Description of Artificial Sequence: Synthetic oligonucleotide
uugccaaccacacagccuc

SEQ ID NO: 1732005 - RNA, 19 nt, Artificial Sequence
  Description of Artificial Sequence: Synthetic oligonucleotide
ucauacuuuuccuccaaga

SEQ ID NO: 1732006 - RNA, 19 nt, Artificial Sequence
  Description of Artificial Sequence: Synthetic oligonucleotide
cuagaaaugcugacuacug

SEQ ID NO: 1732007 - RNA, 19 nt, Artificial Sequence
  Description of Artificial Sequence: Synthetic oligonucleotide
gucaaaugagcccuugaag

SEQ ID NO: 1732008 - RNA, 19 nt, Artificial Sequence
  Description of Artificial Sequence: Synthetic oligonucleotide
gaugggagcgcccagccgc

SEQ ID NO: 1732009 - RNA, 19 nt, Artificial Sequence
  Description of Artificial Sequence: Synthetic oligonucleotide
ugaacuagaaaugcugacu

SEQ ID NO: 1732010 - RNA, 19 nt, Artificial Sequence
  Description of Artificial Sequence: Synthetic oligonucleotide
ugacuacugcucuucaugc

SEQ ID NO: 1732011 - RNA, 19 nt, Artificial Sequence
  Description of Artificial Sequence: Synthetic oligonucleotide
gaaggagugucacuuaaga

SEQ ID NO: 1732012 - RNA, 19 nt, Artificial Sequence
  Description of Artificial Sequence: Synthetic oligonucleotide
augaauaggacccucccau

SEQ ID NO: 1732013 - RNA, 19 nt, Artificial Sequence
  Description of Artificial Sequence: Synthetic oligonucleotide
agaccagugauucacugga

SEQ ID NO: 1732014 - RNA, 19 nt, Artificial Sequence
  Description of Artificial Sequence: Synthetic oligonucleotide
gggaaaguuuaucaaagag

SEQ ID NO: 1732015 - RNA, 19 nt, Artificial Sequence
  Description of Artificial Sequence: Synthetic oligonucleotide
accaacucauucugcacac

SEQ ID NO: 1732016 - RNA, 19 nt, Artificial Sequence
  Description of Artificial Sequence: Synthetic oligonucleotide
agcccugaaaaucuagaag

SEQ ID NO: 1732017 - RNA, 19 nt, Artificial Sequence
  Description of Artificial Sequence: Synthetic oligonucleotide
ucagaaccgucaaaugagc

SEQ ID NO: 1732018 - RNA, 19 nt, Artificial Sequence
  Description of Artificial Sequence: Synthetic oligonucleotide
cugaaaaucuagaagcaga

SEQ ID NO: 1732019 - RNA, 19 nt, Artificial Sequence
  Description of Artificial Sequence: Synthetic oligonucleotide
acauauugucgucagaauu

SEQ ID NO: 1732020 - RNA, 19 nt, Artificial Sequence
  Description of Artificial Sequence: Synthetic oligonucleotide
uagacgauagaugugcaac

SEQ ID NO: 1732021 - RNA, 19 nt, Artificial Sequence
  Description of Artificial Sequence: Synthetic oligonucleotide
aaugggagguaccccgaag

SEQ ID NO: 1732022 - RNA, 19 nt, Artificial Sequence
  Description of Artificial Sequence: Synthetic oligonucleotide
uguggauccuccguacucg

SEQ ID NO: 1732023 - RNA, 19 nt, Artificial Sequence
  Description of Artificial Sequence: Synthetic oligonucleotide
aaacaguaaccaugaggug

SEQ ID NO: 1732024 - RNA, 19 nt, Artificial Sequence
  Description of Artificial Sequence: Synthetic oligonucleotide
aacauauugucgucagaau

SEQ ID NO: 1732025 - RNA, 19 nt, Artificial Sequence
  Description of Artificial Sequence: Synthetic oligonucleotide
ugaaggagugucacuuaag

SEQ ID NO: 1732026 - RNA, 19 nt, Artificial Sequence
  Description of Artificial Sequence: Synthetic oligonucleotide
cucacaagaguuugagccc

SEQ ID NO: 1732027 - RNA, 19 nt, Artificial Sequence
  Description of Artificial Sequence: Synthetic oligonucleotide
aaugacuccaggggaaaug

SEQ ID NO: 1732028 - RNA, 19 nt, Artificial Sequence
  Description of Artificial Sequence: Synthetic oligonucleotide
gaauugacugguguaggag

SEQ ID NO: 1732029 - RNA, 19 nt, Artificial Sequence
  Description of Artificial Sequence: Synthetic oligonucleotide
gaacuagaaaugcugacua

SEQ ID NO: 1732030 - RNA, 19 nt, Artificial Sequence
  Description of Artificial Sequence: Synthetic oligonucleotide
caaucuuucggcccuggcc

SEQ ID NO: 1732031 - RNA, 19 nt, Artificial Sequence
  Description of Artificial Sequence: Synthetic oligonucleotide
aauaggacccucccauuaa

SEQ ID NO: 1732032 - RNA, 19 nt, Artificial Sequence
  Description of Artificial Sequence: Synthetic oligonucleotide
aaggagugucacuuaagaa

SEQ ID NO: 1732033 - RNA, 19 nt, Artificial Sequence
  Description of Artificial Sequence: Synthetic oligonucleotide
ugucgucagaauugacugg

SEQ ID NO: 1732034 - RNA, 19 nt, Artificial Sequence
  Description of Artificial Sequence: Synthetic oligonucleotide
uuuaaacaguguauacaau

SEQ ID NO: 1732035 - RNA, 19 nt, Artificial Sequence
  Description of Artificial Sequence: Synthetic oligonucleotide
uccaagagccgagaaagcc

SEQ ID NO: 1732036 - RNA, 19 nt, Artificial Sequence
  Description of Artificial Sequence: Synthetic oligonucleotide
ggacccucccauuaaagcg

SEQ ID NO: 1732037 - RNA, 19 nt, Artificial Sequence
  Description of Artificial Sequence: Synthetic oligonucleotide
cugacuacugcucuucaug

SEQ ID NO: 1732038 - RNA, 19 nt, Artificial Sequence
  Description of Artificial Sequence: Synthetic oligonucleotide
uacgugucaaacucacuca

SEQ ID NO: 1732039 - RNA, 19 nt, Artificial Sequence
  Description of Artificial Sequence: Synthetic oligonucleotide
ucucacauacgugucaaac

SEQ ID NO: 1732040 - RNA, 19 nt, Artificial Sequence
  Description of Artificial Sequence: Synthetic oligonucleotide
accauggaauguuugccag

SEQ ID NO: 1732041 - RNA, 19 nt, Artificial Sequence
  Description of Artificial Sequence: Synthetic oligonucleotide
ccauaaaaggaccagcagc

SEQ ID NO: 1732042 - RNA, 19 nt, Artificial Sequence
  Description of Artificial Sequence: Synthetic oligonucleotide
caugcuagcccugaaaauc

SEQ ID NO: 1732043 - RNA, 19 nt, Artificial Sequence
  Description of Artificial Sequence: Synthetic oligonucleotide
auugucgucagaauugacu

SEQ ID NO: 1732044 - RNA, 19 nt, Artificial Sequence
  Description of Artificial Sequence: Synthetic oligonucleotide
ucaaacucacucauacuuu

SEQ ID NO: 1732045 - RNA, 19 nt, Artificial Sequence
  Description of Artificial Sequence: Synthetic oligonucleotide
ucgucugggcgcuugaugu

SEQ ID NO: 1732046 - RNA, 19 nt, Artificial Sequence
  Description of Artificial Sequence: Synthetic oligonucleotide
ucccuuucuugcuugguug

SEQ ID NO: 1732047 - RNA, 19 nt, Artificial Sequence
  Description of Artificial Sequence: Synthetic oligonucleotide
agaagugcauugucagguc

SEQ ID NO: 1732048 - RNA, 19 nt, Artificial Sequence
  Description of Artificial Sequence: Synthetic oligonucleotide
gaaaaucuagaagcagagc

SEQ ID NO: 1732049 - RNA, 19 nt, Artificial Sequence
  Description of Artificial Sequence: Synthetic oligonucleotide
aguggacacagcugccggc

SEQ ID NO: 1732050 - RNA, 19 nt, Artificial Sequence
  Description of Artificial Sequence: Synthetic oligonucleotide
cucccauuaaagcgcaggg

SEQ ID NO: 1732051 - RNA, 19 nt, Artificial Sequence
  Description of Artificial Sequence: Synthetic oligonucleotide
agaauugacugguguagga

SEQ ID NO: 1732052 - RNA, 19 nt, Artificial Sequence
  Description of Artificial Sequence: Synthetic oligonucleotide
auguggauccuccguacuc

SEQ ID NO: 1732053 - RNA, 19 nt, Artificial Sequence
  Description of Artificial Sequence: Synthetic oligonucleotide
gacuuccgcaaucuuucgg

SEQ ID NO: 1732054 - RNA, 19 nt, Artificial Sequence
  Description of Artificial Sequence: Synthetic oligonucleotide
auugucagguccucggcca

SEQ ID NO: 1732055 - RNA, 19 nt, Artificial Sequence
  Description of Artificial Sequence: Synthetic oligonucleotide
gauccuccguacucgcucg

SEQ ID NO: 1732056 - RNA, 19 nt, Artificial Sequence
  Description of Artificial Sequence: Synthetic oligonucleotide
auuucauccccgaugacgu

SEQ ID NO: 1732057 - RNA, 19 nt, Artificial Sequence
  Description of Artificial Sequence: Synthetic oligonucleotide
ucaauugggccaccaacuc

SEQ ID NO: 1732058 - RNA, 19 nt, Artificial Sequence
  Description of Artificial Sequence: Synthetic oligonucleotide
cuccguacucgcucgaucc

SEQ ID NO: 1732059 - RNA, 19 nt, Artificial Sequence
  Description of Artificial Sequence: Synthetic oligonucleotide
uuugagcccucagacaagc

SEQ ID NO: 1732060 - RNA, 19 nt, Artificial Sequence
  Description of Artificial Sequence: Synthetic oligonucleotide
acucaacauucacuuuuac

SEQ ID NO: 1732061 - RNA, 19 nt, Artificial Sequence
  Description of Artificial Sequence: Synthetic oligonucleotide
gaaaacaccaggacucaac

SEQ ID NO: 1732062 - RNA, 19 nt, Artificial Sequence
  Description of Artificial Sequence: Synthetic oligonucleotide
cacugcaagucaauugggc

SEQ ID NO: 1732063 - RNA, 19 nt, Artificial Sequence
  Description of Artificial Sequence: Synthetic oligonucleotide
cugaacuagaaaugcugac

SEQ ID NO: 1732064 - RNA, 19 nt, Artificial Sequence
  Description of Artificial Sequence: Synthetic oligonucleotide
agacgauagaugugcaaca

SEQ ID NO: 1732065 - RNA, 19 nt, Artificial Sequence
  Description of Artificial Sequence: Synthetic oligonucleotide
gacgauagaugugcaacag

SEQ ID NO: 1732066 - RNA, 19 nt, Artificial Sequence
  Description of Artificial Sequence: Synthetic oligonucleotide
ugauucacuggacggcucu

SEQ ID NO: 1732067 - RNA, 19 nt, Artificial Sequence
  Description of Artificial Sequence: Synthetic oligonucleotide
ggagugucacuuaagaagc

SEQ ID NO: 1732068 - RNA, 19 nt, Artificial Sequence
  Description of Artificial Sequence: Synthetic oligonucleotide
ucgguggcauagacgauag

SEQ ID NO: 1732069 - RNA, 19 nt, Artificial Sequence
  Description of Artificial Sequence: Synthetic oligonucleotide
uaaagcgcagggaaaguuu

SEQ ID NO: 1732070 - RNA, 19 nt, Artificial Sequence
  Description of Artificial Sequence: Synthetic oligonucleotide
ucggggaacucaaccuugg

SEQ ID NO: 1732071 - RNA, 19 nt, Artificial Sequence
  Description of Artificial Sequence: Synthetic oligonucleotide
ucuucaacauauugucguc

SEQ ID NO: 1732072 - RNA, 19 nt, Artificial Sequence
  Description of Artificial Sequence: Synthetic oligonucleotide
uaggacccucccauuaaag

SEQ ID NO: 1732073 - RNA, 19 nt, Artificial Sequence
  Description of Artificial Sequence: Synthetic oligonucleotide
agagcuuuggaacgacuga

SEQ ID NO: 1732074 - RNA, 19 nt, Artificial Sequence
  Description of Artificial Sequence: Synthetic oligonucleotide
uugauguggauccuccgua

SEQ ID NO: 1732075 - RNA, 19 nt, Artificial Sequence
  Description of Artificial Sequence: Synthetic oligonucleotide
acugacgcugggucaggcc

SEQ ID NO: 1732076 - RNA, 19 nt, Artificial Sequence
  Description of Artificial Sequence: Synthetic oligonucleotide
cagagcuuuggaacgacug

SEQ ID NO: 1732077 - RNA, 19 nt, Artificial Sequence
  Description of Artificial Sequence: Synthetic oligonucleotide
ugggucaggcccuagugga

SEQ ID NO: 1732078 - RNA, 19 nt, Artificial Sequence
  Description of Artificial Sequence: Synthetic oligonucleotide
agcccuaauagguagucaa

SEQ ID NO: 1732079 - RNA, 19 nt, Artificial Sequence
  Description of Artificial Sequence: Synthetic oligonucleotide
ucaacauauugucgucaga

SEQ ID NO: 1732080 - RNA, 19 nt, Artificial Sequence
  Description of Artificial Sequence: Synthetic oligonucleotide
uaaaugcgggcuucgggga

SEQ ID NO: 1732081 - RNA, 19 nt, Artificial Sequence
  Description of Artificial Sequence: Synthetic oligonucleotide
cagaaccgucaaaugagcc

SEQ ID NO: 1732082 - RNA, 19 nt, Artificial Sequence
  Description of Artificial Sequence: Synthetic oligonucleotide
ucacuuaagaagcccuaau

SEQ ID NO: 1732083 - RNA, 19 nt, Artificial Sequence
  Description of Artificial Sequence: Synthetic oligonucleotide
uccgcaaucuuucggcccu

SEQ ID NO: 1732084 - RNA, 19 nt, Artificial Sequence
  Description of Artificial Sequence: Synthetic oligonucleotide
cauugucagguccucggcc

SEQ ID NO: 1732085 - RNA, 19 nt, Artificial Sequence
  Description of Artificial Sequence: Synthetic oligonucleotide
aaacaccaggacucaacau

SEQ ID NO: 1732086 - RNA, 19 nt, Artificial Sequence
  Description of Artificial Sequence: Synthetic oligonucleotide
ugggucaacacagaagcaa

SEQ ID NO: 1732087 - RNA, 19 nt, Artificial Sequence
  Description of Artificial Sequence: Synthetic oligonucleotide
cugacgcugggucaggccc

SEQ ID NO: 1732088 - RNA, 19 nt, Artificial Sequence
  Description of Artificial Sequence: Synthetic oligonucleotide
gcauagacgauagaugugc

SEQ ID NO: 1732089 - RNA, 19 nt, Artificial Sequence
  Description of Artificial Sequence: Synthetic oligonucleotide
ugggagguaccccgaagcc

SEQ ID NO: 1732090 - RNA, 19 nt, Artificial Sequence
  Description of Artificial Sequence: Synthetic oligonucleotide
uagguagucaacacccaua

SEQ ID NO: 1732091 - RNA, 19 nt, Artificial Sequence
  Description of Artificial Sequence: Synthetic oligonucleotide
aaugcgggcuucggggaac

SEQ ID NO: 1732092 - RNA, 19 nt, Artificial Sequence
  Description of Artificial Sequence: Synthetic oligonucleotide
acucacucauacuuuuccu

SEQ ID NO: 1732093 - RNA, 19 nt, Artificial Sequence
  Description of Artificial Sequence: Synthetic oligonucleotide
caaaugagcccuugaagga

SEQ ID NO: 1732094 - RNA, 19 nt, Artificial Sequence
  Description of Artificial Sequence: Synthetic oligonucleotide
acuacugcucuucaugcua

SEQ ID NO: 1732095 - RNA, 19 nt, Artificial Sequence
  Description of Artificial Sequence: Synthetic oligonucleotide
ugauguggauccuccguac

SEQ ID NO: 1732096 - RNA, 19 nt, Artificial Sequence
  Description of Artificial Sequence: Synthetic oligonucleotide
acguccuuuaugaauagga

SEQ ID NO: 1732097 - RNA, 19 nt, Artificial Sequence
  Description of Artificial Sequence: Synthetic oligonucleotide
auagguagucaacacccau

SEQ ID NO: 1732098 - RNA, 19 nt, Artificial Sequence
  Description of Artificial Sequence: Synthetic oligonucleotide
gaugacguccuuuaugaau

SEQ ID NO: 1732099 - RNA, 19 nt, Artificial Sequence
  Description of Artificial Sequence: Synthetic oligonucleotide
gaacgacugacgcuggguc

SEQ ID NO: 1732100 - RNA, 19 nt, Artificial Sequence
  Description of Artificial Sequence: Synthetic oligonucleotide
uuccuacagaaaacaccag

SEQ ID NO: 1732101 - RNA, 19 nt, Artificial Sequence
  Description of Artificial Sequence: Synthetic oligonucleotide
aauagguagucaacaccca

SEQ ID NO: 1732102 - RNA, 19 nt, Artificial Sequence
  Description of Artificial Sequence: Synthetic oligonucleotide
uaaccaugaggugcagggg

SEQ ID NO: 1732103 - RNA, 19 nt, Artificial Sequence
  Description of Artificial Sequence: Synthetic oligonucleotide
gacccucccauuaaagcgc

SEQ ID NO: 1732104 - RNA, 19 nt, Artificial Sequence
  Description of Artificial Sequence: Synthetic oligonucleotide
gaaaugcugacuacugcuc

SEQ ID NO: 1732105 - RNA, 19 nt, Artificial Sequence
  Description of Artificial Sequence: Synthetic oligonucleotide
aaugagcccuugaaggagu

SEQ ID NO: 1732106 - RNA, 19 nt, Artificial Sequence
  Description of Artificial Sequence: Synthetic oligonucleotide
auauugucgucagaauuga

SEQ ID NO: 1732107 - RNA, 19 nt, Artificial Sequence
  Description of Artificial Sequence: Synthetic oligonucleotide
uccucguccaggugauggg

SEQ ID NO: 1732108 - RNA, 19 nt, Artificial Sequence
  Description of Artificial Sequence: Synthetic oligonucleotide
guggcauagacgauagaug

SEQ ID NO: 1732109 - RNA, 19 nt, Artificial Sequence
  Description of Artificial Sequence: Synthetic oligonucleotide
ccagugauucacuggacgg

SEQ ID NO: 1732110 - RNA, 19 nt, Artificial Sequence
  Description of Artificial Sequence: Synthetic oligonucleotide
uaccccgaagccugcacag

SEQ ID NO: 1732111 - RNA, 19 nt, Artificial Sequence
  Description of Artificial Sequence: Synthetic oligonucleotide
cuuccgcaaucuuucggcc

SEQ ID NO: 1732112 - RNA, 19 nt, Artificial Sequence
  Description of Artificial Sequence: Synthetic oligonucleotide
uuccgcaaucuuucggccc

SEQ ID NO: 1732113 - RNA, 19 nt, Artificial Sequence
  Description of Artificial Sequence: Synthetic oligonucleotide
aacucaaccuuggucugcu

SEQ ID NO: 1732114 - RNA, 19 nt, Artificial Sequence
  Description of Artificial Sequence: Synthetic oligonucleotide
uggaacgacugacgcuggg

SEQ ID NO: 1732115 - RNA, 19 nt, Artificial Sequence
  Description of Artificial Sequence: Synthetic oligonucleotide
ugacguccuuuaugaauag

SEQ ID NO: 1732116 - RNA, 19 nt, Artificial Sequence
  Description of Artificial Sequence: Synthetic oligonucleotide
acgugugaaacaaacagua

SEQ ID NO: 1732117 - RNA, 19 nt, Artificial Sequence
  Description of Artificial Sequence: Synthetic oligonucleotide
agacuuccgcaaucuuucg

SEQ ID NO: 1732118 - RNA, 19 nt, Artificial Sequence
  Description of Artificial Sequence: Synthetic oligonucleotide
cgauagaugugcaacagac

SEQ ID NO: 1732119 - RNA, 19 nt, Artificial Sequence
  Description of Artificial Sequence: Synthetic oligonucleotide
auagacgauagaugugcaa

SEQ ID NO: 1732120 - RNA, 19 nt, Artificial Sequence
  Description of Artificial Sequence: Synthetic oligonucleotide
agugauucacuggacggcu

SEQ ID NO: 1732121 - RNA, 19 nt, Artificial Sequence
  Description of Artificial Sequence: Synthetic oligonucleotide
uuaaagcgcagggaaaguu

SEQ ID NO: 1732122 - RNA, 19 nt, Artificial Sequence
  Description of Artificial Sequence: Synthetic oligonucleotide
ugcaagucaauugggccac

SEQ ID NO: 1732123 - RNA, 19 nt, Artificial Sequence
  Description of Artificial Sequence: Synthetic oligonucleotide
acgauagaugugcaacaga

SEQ ID NO: 1732124 - RNA, 19 nt, Artificial Sequence
  Description of Artificial Sequence: Synthetic oligonucleotide
gagcuuuggaacgacugac

SEQ ID NO: 1732125 - RNA, 19 nt, Artificial Sequence
  Description of Artificial Sequence: Synthetic oligonucleotide
ggcgguaucaggcaccaug

SEQ ID NO: 1732126 - RNA, 19 nt, Artificial Sequence
  Description of Artificial Sequence: Synthetic oligonucleotide
uuggaacgacugacgcugg

SEQ ID NO: 1732127 - RNA, 19 nt, Artificial Sequence
  Description of Artificial Sequence: Synthetic oligonucleotide
acaguaaccaugaggugca

SEQ ID NO: 1732128 - RNA, 19 nt, Artificial Sequence
  Description of Artificial Sequence: Synthetic oligonucleotide
ucaugcuagcccugaaaau

SEQ ID NO: 1732129 - RNA, 19 nt, Artificial Sequence
  Description of Artificial Sequence: Synthetic oligonucleotide
uccuccaagagccgagaaa

SEQ ID NO: 1732130 - RNA, 19 nt, Artificial Sequence
  Description of Artificial Sequence: Synthetic oligonucleotide
gaauaggacccucccauua

SEQ ID NO: 1732131 - RNA, 19 nt, Artificial Sequence
  Description of Artificial Sequence: Synthetic oligonucleotide
uauugucgucagaauugac

SEQ ID NO: 1732132 - RNA, 19 nt, Artificial Sequence
  Description of Artificial Sequence: Synthetic oligonucleotide
caccaacauuuaaacagug

SEQ ID NO: 1732133 - RNA, 19 nt, Artificial Sequence
  Description of Artificial Sequence: Synthetic oligonucleotide
guucagaaggggugcacac

SEQ ID NO: 1732134 - RNA, 19 nt, Artificial Sequence
  Description of Artificial Sequence: Synthetic oligonucleotide
aagugcauugucagguccu

SEQ ID NO: 1732135 - RNA, 19 nt, Artificial Sequence
  Description of Artificial Sequence: Synthetic oligonucleotide
uucagaaggggugcacacc

SEQ ID NO: 1732136 - RNA, 19 nt, Artificial Sequence
  Description of Artificial Sequence: Synthetic oligonucleotide
gucaacacagaagcaauga

SEQ ID NO: 1732137 - RNA, 19 nt, Artificial Sequence
  Description of Artificial Sequence: Synthetic oligonucleotide
agcuuuggaacgacugacg

SEQ ID NO: 1732138 - RNA, 19 nt, Artificial Sequence
  Description of Artificial Sequence: Synthetic oligonucleotide
caagagccgagaaagccca

SEQ ID NO: 1732139 - RNA, 19 nt, Artificial Sequence
  Description of Artificial Sequence: Synthetic oligonucleotide
ccuaauagguagucaacac

SEQ ID NO: 1732140 - RNA, 19 nt, Artificial Sequence
  Description of Artificial Sequence: Synthetic oligonucleotide
acaccaacauuuaaacagu

SEQ ID NO: 1732141 - RNA, 19 nt, Artificial Sequence
  Description of Artificial Sequence: Synthetic oligonucleotide
guccucguccaggugaugg

SEQ ID NO: 1732142 - RNA, 19 nt, Artificial Sequence
  Description of Artificial Sequence: Synthetic oligonucleotide
augacguccuuuaugaaua

SEQ ID NO: 1732143 - RNA, 19 nt, Artificial Sequence
  Description of Artificial Sequence: Synthetic oligonucleotide
gagcugccgaaacaguaac

SEQ ID NO: 1732144 - RNA, 19 nt, Artificial Sequence
  Description of Artificial Sequence: Synthetic oligonucleotide
auucacuuuuacucccuaa

SEQ ID NO: 1732145 - RNA, 19 nt, Artificial Sequence
  Description of Artificial Sequence: Synthetic oligonucleotide
cuagcccugaaaaucuaga

SEQ ID NO: 1732146 - RNA, 19 nt, Artificial Sequence
  Description of Artificial Sequence: Synthetic oligonucleotide
ggcaccauggaauguuugc

SEQ ID NO: 1732147 - RNA, 19 nt, Artificial Sequence
  Description of Artificial Sequence: Synthetic oligonucleotide
gacguccuuuaugaauagg

SEQ ID NO: 1732148 - RNA, 19 nt, Artificial Sequence
  Description of Artificial Sequence: Synthetic oligonucleotide
cagacaagcuuguucagaa

SEQ ID NO: 1732149 - RNA, 19 nt, Artificial Sequence
  Description of Artificial Sequence: Synthetic oligonucleotide
uccucauaaaugcgggcuu

SEQ ID NO: 1732150 - RNA, 19 nt, Artificial Sequence
  Description of Artificial Sequence: Synthetic oligonucleotide
agggcugacgugugaaaca

SEQ ID NO: 1732151 - RNA, 19 nt, Artificial Sequence
  Description of Artificial Sequence: Synthetic oligonucleotide
agccgagaaagcccagcuc

SEQ ID NO: 1732152 - RNA, 19 nt, Artificial Sequence
  Description of Artificial Sequence: Synthetic oligonucleotide
acgugucaaacucacucau

SEQ ID NO: 1732153 - RNA, 19 nt, Artificial Sequence
  Description of Artificial Sequence: Synthetic oligonucleotide
cuuuaugaauaggacccuc

SEQ ID NO: 1732154 - RNA, 19 nt, Artificial Sequence
  Description of Artificial Sequence: Synthetic oligonucleotide
ccuccaagagccgagaaag

SEQ ID NO: 1732155 - RNA, 19 nt, Artificial Sequence
  Description of Artificial Sequence: Synthetic oligonucleotide
aaaugcgggcuucggggaa

SEQ ID NO: 1732156 - RNA, 19 nt, Artificial Sequence
  Description of Artificial Sequence: Synthetic oligonucleotide
ccaagagccgagaaagccc

SEQ ID NO: 1732157 - RNA, 19 nt, Artificial Sequence
  Description of Artificial Sequence: Synthetic oligonucleotide
cagugauucacuggacggc

SEQ ID NO: 1732158 - RNA, 19 nt, Artificial Sequence
  Description of Artificial Sequence: Synthetic oligonucleotide
ggcucugaacuagaaaugc

SEQ ID NO: 1732159 - RNA, 19 nt, Artificial Sequence
  Description of Artificial Sequence: Synthetic oligonucleotide
agugcauugucagguccuc

SEQ ID NO: 1732160 - RNA, 19 nt, Artificial Sequence
  Description of Artificial Sequence: Synthetic oligonucleotide
ccuacagaaaacaccagga

SEQ ID NO: 1732161 - RNA, 19 nt, Artificial Sequence
  Description of Artificial Sequence: Synthetic oligonucleotide
ucgucagaauugacuggug

SEQ ID NO: 1732162 - RNA, 19 nt, Artificial Sequence
  Description of Artificial Sequence: Synthetic oligonucleotide
auuaaagcgcagggaaagu

SEQ ID NO: 1732163 - RNA, 19 nt, Artificial Sequence
  Description of Artificial Sequence: Synthetic oligonucleotide
guggacacagcugccggcg

SEQ ID NO: 1732164 - RNA, 19 nt, Artificial Sequence
  Description of Artificial Sequence: Synthetic oligonucleotide
aggggaaaugggagguacc

SEQ ID NO: 1732165 - RNA, 19 nt, Artificial Sequence
  Description of Artificial Sequence: Synthetic oligonucleotide
cuagaagcagagcuuugga

SEQ ID NO: 1732166 - RNA, 19 nt, Artificial Sequence
  Description of Artificial Sequence: Synthetic oligonucleotide
gaaccgucaaaugagcccu

SEQ ID NO: 1732167 - RNA, 19 nt, Artificial Sequence
  Description of Artificial Sequence: Synthetic oligonucleotide
ucauccccgaugacguccu

SEQ ID NO: 1732168 - RNA, 19 nt, Artificial Sequence
  Description of Artificial Sequence: Synthetic oligonucleotide
aacagacuuccgcaaucuu

SEQ ID NO: 1732169 - RNA, 19 nt, Artificial Sequence
  Description of Artificial Sequence: Synthetic oligonucleotide
cucguccaggugaugggag

SEQ ID NO: 1732170 - RNA, 19 nt, Artificial Sequence
  Description of Artificial Sequence: Synthetic oligonucleotide
gccauaaaaggaccagcag

SEQ ID NO: 1732171 - RNA, 19 nt, Artificial Sequence
  Description of Artificial Sequence: Synthetic oligonucleotide
ucaggcaccauggaauguu

SEQ ID NO: 1732172 - RNA, 19 nt, Artificial Sequence
  Description of Artificial Sequence: Synthetic oligonucleotide
auaggacccucccauuaaa

SEQ ID NO: 1732173 - RNA, 19 nt, Artificial Sequence
  Description of Artificial Sequence: Synthetic oligonucleotide
ugcugacuacugcucuuca

SEQ ID NO: 1732174 - RNA, 19 nt, Artificial Sequence
  Description of Artificial Sequence: Synthetic oligonucleotide
accaacauuuaaacagugu

SEQ ID NO: 1732175 - RNA, 19 nt, Artificial Sequence
  Description of Artificial Sequence: Synthetic oligonucleotide
uggacggcucugaacuaga

SEQ ID NO: 1732176 - RNA, 19 nt, Artificial Sequence
  Description of Artificial Sequence: Synthetic oligonucleotide
uguucccaucccugggagc

SEQ ID NO: 1732177 - RNA, 19 nt, Artificial Sequence
  Description of Artificial Sequence: Synthetic oligonucleotide
gagcccuugaaggaguguc

SEQ ID NO: 1732178 - RNA, 19 nt, Artificial Sequence
  Description of Artificial Sequence: Synthetic oligonucleotide
uuuuggcuggccugcucac

SEQ ID NO: 1732179 - RNA, 19 nt, Artificial Sequence
  Description of Artificial Sequence: Synthetic oligonucleotide
gaacucaaccuuggucugc

SEQ ID NO: 1732180 - RNA, 19 nt, Artificial Sequence
  Description of Artificial Sequence: Synthetic oligonucleotide
gucugggcgcuugaugugg

SEQ ID NO: 1732181 - RNA, 19 nt, Artificial Sequence
  Description of Artificial Sequence: Synthetic oligonucleotide
caccauggaauguuugcca

SEQ ID NO: 1732182 - RNA, 19 nt, Artificial Sequence
  Description of Artificial Sequence: Synthetic oligonucleotide
cugacgugugaaacaaaca

SEQ ID NO: 1732183 - RNA, 19 nt, Artificial Sequence
  Description of Artificial Sequence: Synthetic oligonucleotide
ugaauaggacccucccauu

SEQ ID NO: 1732184 - RNA, 19 nt, Artificial Sequence
  Description of Artificial Sequence: Synthetic oligonucleotide
gugaugggagcgcccagcc

SEQ ID NO: 1732185 - RNA, 19 nt, Artificial Sequence
  Description of Artificial Sequence: Synthetic oligonucleotide
ucuucaugcuagcccugaa

SEQ ID NO: 1732186 - RNA, 19 nt, Artificial Sequence
  Description of Artificial Sequence: Synthetic oligonucleotide
aagcagagcuuuggaacga

SEQ ID NO: 1732187 - RNA, 19 nt, Artificial Sequence
  Description of Artificial Sequence: Synthetic oligonucleotide
acgacugacgcugggucag

SEQ ID NO: 1732188 - RNA, 19 nt, Artificial Sequence
  Description of Artificial Sequence: Synthetic oligonucleotide
augcuagcccugaaaaucu

SEQ ID NO: 1732189 - RNA, 19 nt, Artificial Sequence
  Description of Artificial Sequence: Synthetic oligonucleotide
gcugacgugugaaacaaac

SEQ ID NO: 1732190 - RNA, 19 nt, Artificial Sequence
  Description of Artificial Sequence: Synthetic oligonucleotide
aagcccuaauagguaguca

SEQ ID NO: 1732191 - RNA, 19 nt, Artificial Sequence
  Description of Artificial Sequence: Synthetic oligonucleotide
cacuggacggcucugaacu

SEQ ID NO: 1732192 - RNA, 19 nt, Artificial Sequence
  Description of Artificial Sequence: Synthetic oligonucleotide
cacauacgugucaaacuca

SEQ ID NO: 1732193 - RNA, 19 nt, Artificial Sequence
  Description of Artificial Sequence: Synthetic oligonucleotide
ggcuucggggaacucaacc

SEQ ID NO: 1732194 - RNA, 19 nt, Artificial Sequence
  Description of Artificial Sequence: Synthetic oligonucleotide
uccccgaugacguccuuua

SEQ ID NO: 1732195 - RNA, 19 nt, Artificial Sequence
  Description of Artificial Sequence: Synthetic oligonucleotide
cauagacgauagaugugca

SEQ ID NO: 1732196 - RNA, 19 nt, Artificial Sequence
  Description of Artificial Sequence: Synthetic oligonucleotide
cucacauacgugucaaacu

SEQ ID NO: 1732197 - RNA, 19 nt, Artificial Sequence
  Description of Artificial Sequence: Synthetic oligonucleotide
ggagguaccccgaagccug

SEQ ID NO: 1732198 - RNA, 19 nt, Artificial Sequence
  Description of Artificial Sequence: Synthetic oligonucleotide
uccguacucgcucgauccu

SEQ ID NO: 1732199 - RNA, 19 nt, Artificial Sequence
  Description of Artificial Sequence: Synthetic oligonucleotide
uccaggugaugggagcgcc

SEQ ID NO: 1732200 - RNA, 19 nt, Artificial Sequence
  Description of Artificial Sequence: Synthetic oligonucleotide
acagacuuccgcaaucuuu

SEQ ID NO: 1732201 - RNA, 19 nt, Artificial Sequence
  Description of Artificial Sequence: Synthetic oligonucleotide
ccugaaaaucuagaagcag

SEQ ID NO: 1732202 - RNA, 19 nt, Artificial Sequence
  Description of Artificial Sequence: Synthetic oligonucleotide
ugcacaccugggucaacac

SEQ ID NO: 1732203 - RNA, 19 nt, Artificial Sequence
  Description of Artificial Sequence: Synthetic oligonucleotide
caauugggccaccaacuca

SEQ ID NO: 1732204 - RNA, 19 nt, Artificial Sequence
  Description of Artificial Sequence: Synthetic oligonucleotide
ggccacugcaagucaauug

SEQ ID NO: 1732205 - RNA, 19 nt, Artificial Sequence
  Description of Artificial Sequence: Synthetic oligonucleotide
gaugugcaacagacuuccg

SEQ ID NO: 1732206 - RNA, 19 nt, Artificial Sequence
  Description of Artificial Sequence: Synthetic oligonucleotide
gcgguaucaggcaccaugg

SEQ ID NO: 1732207 - RNA, 19 nt, Artificial Sequence
  Description of Artificial Sequence: Synthetic oligonucleotide
cuggacggcucugaacuag

SEQ ID NO: 1732208 - RNA, 19 nt, Artificial Sequence
  Description of Artificial Sequence: Synthetic oligonucleotide
cucgauccucucccguucc

SEQ ID NO: 1732209 - RNA, 19 nt, Artificial Sequence
  Description of Artificial Sequence: Synthetic oligonucleotide
ugcaggggccacugcaagu

SEQ ID NO: 1732210 - RNA, 19 nt, Artificial Sequence
  Description of Artificial Sequence: Synthetic oligonucleotide
gauagaugugcaacagacu

SEQ ID NO: 1732211 - RNA, 19 nt, Artificial Sequence
  Description of Artificial Sequence: Synthetic oligonucleotide
ugacgcugggucaggcccu

SEQ ID NO: 1732212 - RNA, 19 nt, Artificial Sequence
  Description of Artificial Sequence: Synthetic oligonucleotide
gacggcucugaacuagaaa

SEQ ID NO: 1732213 - RNA, 19 nt, Artificial Sequence
  Description of Artificial Sequence: Synthetic oligonucleotide
gcucucacaagaguuugag

SEQ ID NO: 1732214 - RNA, 19 nt, Artificial Sequence
  Description of Artificial Sequence: Synthetic oligonucleotide
ccgaugacguccuuuauga

SEQ ID NO: 1732215 - RNA, 19 nt, Artificial Sequence
  Description of Artificial Sequence: Synthetic oligonucleotide
gauucacuggacggcucug

SEQ ID NO: 1732216 - RNA, 19 nt, Artificial Sequence
  Description of Artificial Sequence: Synthetic oligonucleotide
guuugccaggccuguuccc

SEQ ID NO: 1732217 - RNA, 19 nt, Artificial Sequence
  Description of Artificial Sequence: Synthetic oligonucleotide
gucaauugggccaccaacu

SEQ ID NO: 1732218 - RNA, 19 nt, Artificial Sequence
  Description of Artificial Sequence: Synthetic oligonucleotide
cucgcucgauccucucccg

SEQ ID NO: 1732219 - RNA, 19 nt, Artificial Sequence
  Description of Artificial Sequence: Synthetic oligonucleotide
cagggcugacgugugaaac

SEQ ID NO: 1732220 - RNA, 19 nt, Artificial Sequence
  Description of Artificial Sequence: Synthetic oligonucleotide
gcugccgaaacaguaacca

SEQ ID NO: 1732221 - RNA, 19 nt, Artificial Sequence
  Description of Artificial Sequence: Synthetic oligonucleotide
cuucaugcuagcccugaaa

SEQ ID NO: 1732222 - RNA, 19 nt, Artificial Sequence
  Description of Artificial Sequence: Synthetic oligonucleotide
ccauggaauguuugccagg

SEQ ID NO: 1732223 - RNA, 19 nt, Artificial Sequence
  Description of Artificial Sequence: Synthetic oligonucleotide
cccuuucuugcuugguugg

SEQ ID NO: 1732224 - RNA, 19 nt, Artificial Sequence
  Description of Artificial Sequence: Synthetic oligonucleotide
gcuuguucagaaggggugc

SEQ ID NO: 1732225 - RNA, 19 nt, Artificial Sequence
  Description of Artificial Sequence: Synthetic oligonucleotide
uugagcccucagacaagcu

SEQ ID NO: 1732226 - RNA, 19 nt, Artificial Sequence
  Description of Artificial Sequence: Synthetic oligonucleotide
gcaccauggaauguuugcc

SEQ ID NO: 1732227 - RNA, 19 nt, Artificial Sequence
  Description of Artificial Sequence: Synthetic oligonucleotide
ucguccucguccaggugau

SEQ ID NO: 1732228 - RNA, 19 nt, Artificial Sequence
  Description of Artificial Sequence: Synthetic oligonucleotide
ugcuagcccugaaaaucua

SEQ ID NO: 1732229 - RNA, 19 nt, Artificial Sequence
  Description of Artificial Sequence: Synthetic oligonucleotide
ggccauaaaaggaccagca

SEQ ID NO: 1732230 - RNA, 19 nt, Artificial Sequence
  Description of Artificial Sequence: Synthetic oligonucleotide
gugcauugucagguccucg

SEQ ID NO: 1732231 - RNA, 19 nt, Artificial Sequence
  Description of Artificial Sequence: Synthetic oligonucleotide
guaccccgaagccugcaca

SEQ ID NO: 1732232 - RNA, 19 nt, Artificial Sequence
  Description of Artificial Sequence: Synthetic oligonucleotide
gcaacagacuuccgcaauc

SEQ ID NO: 1732233 - RNA, 19 nt, Artificial Sequence
  Description of Artificial Sequence: Synthetic oligonucleotide
uuucauccccgaugacguc

SEQ ID NO: 1732234 - RNA, 19 nt, Artificial Sequence
  Description of Artificial Sequence: Synthetic oligonucleotide
agaagcccuaauagguagu

SEQ ID NO: 1732235 - RNA, 19 nt, Artificial Sequence
  Description of Artificial Sequence: Synthetic oligonucleotide
ccacugcaagucaauuggg

SEQ ID NO: 1732236 - RNA, 19 nt, Artificial Sequence
  Description of Artificial Sequence: Synthetic oligonucleotide
gcugggucaggcccuagug

SEQ ID NO: 1732237 - RNA, 19 nt, Artificial Sequence
  Description of Artificial Sequence: Synthetic oligonucleotide
gccgaaacaguaaccauga

SEQ ID NO: 1732238 - RNA, 19 nt, Artificial Sequence
  Description of Artificial Sequence: Synthetic oligonucleotide
ccucccauuaaagcgcagg

SEQ ID NO: 1732239 - RNA, 19 nt, Artificial Sequence
  Description of Artificial Sequence: Synthetic oligonucleotide
ggccuguucccaucccugg

SEQ ID NO: 1732240 - RNA, 19 nt, Artificial Sequence
  Description of Artificial Sequence: Synthetic oligonucleotide
gucgucagaauugacuggu

SEQ ID NO: 1732241 - RNA, 19 nt, Artificial Sequence
  Description of Artificial Sequence: Synthetic oligonucleotide
ugacugguguaggaguauu

SEQ ID NO: 1732242 - RNA, 19 nt, Artificial Sequence
  Description of Artificial Sequence: Synthetic oligonucleotide
guaagcucccuuucuugcu

SEQ ID NO: 1732243 - RNA, 19 nt, Artificial Sequence
  Description of Artificial Sequence: Synthetic oligonucleotide
aggacucaacauucacuuu

SEQ ID NO: 1732244 - RNA, 19 nt, Artificial Sequence
  Description of Artificial Sequence: Synthetic oligonucleotide
gcugccggcgguaucaggc

SEQ ID NO: 1732245 - RNA, 19 nt, Artificial Sequence
  Description of Artificial Sequence: Synthetic oligonucleotide
ggacucaacauucacuuuu

SEQ ID NO: 1732246 - RNA, 19 nt, Artificial Sequence
  Description of Artificial Sequence: Synthetic oligonucleotide
gacuacugcucuucaugcu

SEQ ID NO: 1732247 - RNA, 19 nt, Artificial Sequence
  Description of Artificial Sequence: Synthetic oligonucleotide
gucacuuaagaagcccuaa

SEQ ID NO: 1732248 - RNA, 19 nt, Artificial Sequence
  Description of Artificial Sequence: Synthetic oligonucleotide
gcgcagggaaaguuuauca

SEQ ID NO: 1732249 - RNA, 19 nt, Artificial Sequence
  Description of Artificial Sequence: Synthetic oligonucleotide
ucgcucgauccucucccgu

SEQ ID NO: 1732250 - RNA, 19 nt, Artificial Sequence
  Description of Artificial Sequence: Synthetic oligonucleotide
ugccggcgguaucaggcac

SEQ ID NO: 1732251 - RNA, 19 nt, Artificial Sequence
  Description of Artificial Sequence: Synthetic oligonucleotide
gccgagaaagcccagcucu

SEQ ID NO: 1732252 - RNA, 19 nt, Artificial Sequence
  Description of Artificial Sequence: Synthetic oligonucleotide
gcauugucagguccucggc

SEQ ID NO: 1732253 - RNA, 19 nt, Artificial Sequence
  Description of Artificial Sequence: Synthetic oligonucleotide
gcuagcccugaaaaucuag

SEQ ID NO: 1732254 - RNA, 19 nt, Artificial Sequence
  Description of Artificial Sequence: Synthetic oligonucleotide
cuugccaaccacacagccu

SEQ ID NO: 1732255 - RNA, 19 nt, Artificial Sequence
  Description of Artificial Sequence: Synthetic oligonucleotide
gcacaccaacauuuaaaca

SEQ ID NO: 1732256 - RNA, 19 nt, Artificial Sequence
  Description of Artificial Sequence: Synthetic oligonucleotide
gucaggcccuaguggacac

SEQ ID NO: 1732257 - RNA, 19 nt, Artificial Sequence
  Description of Artificial Sequence: Synthetic oligonucleotide
aagagccgagaaagcccag

SEQ ID NO: 1732258 - RNA, 19 nt, Artificial Sequence
  Description of Artificial Sequence: Synthetic oligonucleotide
gaccagugauucacuggac

SEQ ID NO: 1732259 - RNA, 19 nt, Artificial Sequence
  Description of Artificial Sequence: Synthetic oligonucleotide
cugggucaacacagaagca

SEQ ID NO: 1732260 - RNA, 19 nt, Artificial Sequence
  Description of Artificial Sequence: Synthetic oligonucleotide
ggugaugggagcgcccagc

SEQ ID NO: 1732261 - RNA, 19 nt, Artificial Sequence
  Description of Artificial Sequence: Synthetic oligonucleotide
accgucaaaugagcccuug

SEQ ID NO: 1732262 - RNA, 19 nt, Artificial Sequence
  Description of Artificial Sequence: Synthetic oligonucleotide
ugagcccuugaaggagugu

SEQ ID NO: 1732263 - RNA, 19 nt, Artificial Sequence
  Description of Artificial Sequence: Synthetic oligonucleotide
ugccaaccacacagccucu

SEQ ID NO: 1732264 - RNA, 19 nt, Artificial Sequence
  Description of Artificial Sequence: Synthetic oligonucleotide
aggccuguucccaucccug

SEQ ID NO: 1732265 - RNA, 19 nt, Artificial Sequence
  Description of Artificial Sequence: Synthetic oligonucleotide
agcccuugaaggaguguca

SEQ ID NO: 1732266 - RNA, 19 nt, Artificial Sequence
  Description of Artificial Sequence: Synthetic oligonucleotide
acuggacggcucugaacua

SEQ ID NO: 1732267 - RNA, 19 nt, Artificial Sequence
  Description of Artificial Sequence: Synthetic oligonucleotide
ggcucucacauacguguca

SEQ ID NO: 1732268 - RNA, 19 nt, Artificial Sequence
  Description of Artificial Sequence: Synthetic oligonucleotide
aggcaccauggaauguuug

SEQ ID NO: 1732269 - RNA, 19 nt, Artificial Sequence
  Description of Artificial Sequence: Synthetic oligonucleotide
ggcccuaguggacacagcu

SEQ ID NO: 1732270 - RNA, 19 nt, Artificial Sequence
  Description of Artificial Sequence: Synthetic oligonucleotide
agcgcccagccgccccacc

SEQ ID NO: 1732271 - RNA, 19 nt, Artificial Sequence
  Description of Artificial Sequence: Synthetic oligonucleotide
augagcccuugaaggagug

SEQ ID NO: 1732272 - RNA, 19 nt, Artificial Sequence
  Description of Artificial Sequence: Synthetic oligonucleotide
caguguauacaauggcuuu

SEQ ID NO: 1732273 - RNA, 19 nt, Artificial Sequence
  Description of Artificial Sequence: Synthetic oligonucleotide
caccaggacucaacauuca

SEQ ID NO: 1732274 - RNA, 19 nt, Artificial Sequence
  Description of Artificial Sequence: Synthetic oligonucleotide
ucccaucccugggagcgga

SEQ ID NO: 1732275 - RNA, 19 nt, Artificial Sequence
  Description of Artificial Sequence: Synthetic oligonucleotide
cucuucaugcuagcccuga

SEQ ID NO: 1732276 - RNA, 19 nt, Artificial Sequence
  Description of Artificial Sequence: Synthetic oligonucleotide
aggugggcccggucgucug

SEQ ID NO: 1732277 - RNA, 19 nt, Artificial Sequence
  Description of Artificial Sequence: Synthetic oligonucleotide
ggcccggucgucugggcgc

SEQ ID NO: 1732278 - RNA, 19 nt, Artificial Sequence
  Description of Artificial Sequence: Synthetic oligonucleotide
gagguaccccgaagccugc

SEQ ID NO: 1732279 - RNA, 19 nt, Artificial Sequence
  Description of Artificial Sequence: Synthetic oligonucleotide
ggugggcccggucgucugg

SEQ ID NO: 1732280 - RNA, 19 nt, Artificial Sequence
  Description of Artificial Sequence: Synthetic oligonucleotide
ccauuaaagcgcagggaaa

SEQ ID NO: 1732281 - RNA, 19 nt, Artificial Sequence
  Description of Artificial Sequence: Synthetic oligonucleotide
cauacgugucaaacucacu

SEQ ID NO: 1732282 - RNA, 19 nt, Artificial Sequence
  Description of Artificial Sequence: Synthetic oligonucleotide
ggcugcuugccaaccacac

SEQ ID NO: 1732283 - RNA, 19 nt, Artificial Sequence
  Description of Artificial Sequence: Synthetic oligonucleotide
gggcccggucgucugggcg

SEQ ID NO: 1732284 - RNA, 19 nt, Artificial Sequence
  Description of Artificial Sequence: Synthetic oligonucleotide
gugggcccggucgucuggg

SEQ ID NO: 1732285 - RNA, 19 nt, Artificial Sequence
  Description of Artificial Sequence: Synthetic oligonucleotide
caccugggucaacacagaa

SEQ ID NO: 1732286 - RNA, 19 nt, Artificial Sequence
  Description of Artificial Sequence: Synthetic oligonucleotide
agcccucagacaagcuugu

SEQ ID NO: 1732287 - RNA, 19 nt, Artificial Sequence
  Description of Artificial Sequence: Synthetic oligonucleotide
gcucgauccucucccguuc

SEQ ID NO: 1732288 - RNA, 19 nt, Artificial Sequence
  Description of Artificial Sequence: Synthetic oligonucleotide
ccgagaaagcccagcucug

SEQ ID NO: 1732289 - RNA, 19 nt, Artificial Sequence
  Description of Artificial Sequence: Synthetic oligonucleotide
guacucgcucgauccucuc

SEQ ID NO: 1732290 - RNA, 19 nt, Artificial Sequence
  Description of Artificial Sequence: Synthetic oligonucleotide
gcccuaauagguagucaac

SEQ ID NO: 1732291 - RNA, 19 nt, Artificial Sequence
  Description of Artificial Sequence: Synthetic oligonucleotide
cuucggggaacucaaccuu

SEQ ID NO: 1732292 - RNA, 19 nt, Artificial Sequence
  Description of Artificial Sequence: Synthetic oligonucleotide
cucucacauacgugucaaa

SEQ ID NO: 1732293 - RNA, 19 nt, Artificial Sequence
  Description of Artificial Sequence: Synthetic oligonucleotide
uccuccguacucgcucgau

SEQ ID NO: 1732294 - RNA, 19 nt, Artificial Sequence
  Description of Artificial Sequence: Synthetic oligonucleotide
ugggcccggucgucugggc

SEQ ID NO: 1732295 - RNA, 19 nt, Artificial Sequence
  Description of Artificial Sequence: Synthetic oligonucleotide
gcccuugaaggagugucac

SEQ ID NO: 1732296 - RNA, 19 nt, Artificial Sequence
  Description of Artificial Sequence: Synthetic oligonucleotide
gggcugacgugugaaacaa

SEQ ID NO: 1732297 - RNA, 19 nt, Artificial Sequence
  Description of Artificial Sequence: Synthetic oligonucleotide
cacagcugccggcgguauc

SEQ ID NO: 1732298 - RNA, 19 nt, Artificial Sequence
  Description of Artificial Sequence: Synthetic oligonucleotide
cgucaaaugagcccuugaa

SEQ ID NO: 1732299 - RNA, 19 nt, Artificial Sequence
  Description of Artificial Sequence: Synthetic oligonucleotide
aaccgucaaaugagcccuu

SEQ ID NO: 1732300 - RNA, 19 nt, Artificial Sequence
  Description of Artificial Sequence: Synthetic oligonucleotide
ccgaaacaguaaccaugag

SEQ ID NO: 1732301 - RNA, 19 nt, Artificial Sequence
  Description of Artificial Sequence: Synthetic oligonucleotide
ccuguucccaucccuggga

SEQ ID NO: 1732302 - RNA, 19 nt, Artificial Sequence
  Description of Artificial Sequence: Synthetic oligonucleotide
auccccgaugacguccuuu

SEQ ID NO: 1732303 - RNA, 19 nt, Artificial Sequence
  Description of Artificial Sequence: Synthetic oligonucleotide
aggggccacugcaagucaa

SEQ ID NO: 1732304 - RNA, 19 nt, Artificial Sequence
  Description of Artificial Sequence: Synthetic oligonucleotide
cugccgaaacaguaaccau

SEQ ID NO: 1732305 - RNA, 19 nt, Artificial Sequence
  Description of Artificial Sequence: Synthetic oligonucleotide
gacugguguaggaguauuu

SEQ ID NO: 1732306 - RNA, 19 nt, Artificial Sequence
  Description of Artificial Sequence: Synthetic oligonucleotide
caggggccacugcaaguca

SEQ ID NO: 1732307 - RNA, 19 nt, Artificial Sequence
  Description of Artificial Sequence: Synthetic oligonucleotide
ccuccguacucgcucgauc

SEQ ID NO: 1732308 - RNA, 19 nt, Artificial Sequence
  Description of Artificial Sequence: Synthetic oligonucleotide
ggaacgacugacgcugggu

SEQ ID NO: 1732309 - RNA, 19 nt, Artificial Sequence
  Description of Artificial Sequence: Synthetic oligonucleotide
gggagcgcccagccgcccc

SEQ ID NO: 1732310 - RNA, 19 nt, Artificial Sequence
  Description of Artificial Sequence: Synthetic oligonucleotide
ugggagcgcccagccgccc

SEQ ID NO: 1732311 - RNA, 19 nt, Artificial Sequence
  Description of Artificial Sequence: Synthetic oligonucleotide
gguggaggugggcccgguc

SEQ ID NO: 1732312 - RNA, 19 nt, Artificial Sequence
  Description of Artificial Sequence: Synthetic oligonucleotide
gccggcgguaucaggcacc

SEQ ID NO: 1732313 - RNA, 19 nt, Artificial Sequence
  Description of Artificial Sequence: Synthetic oligonucleotide
gcugacuacugcucuucau

SEQ ID NO: 1732314 - RNA, 19 nt, Artificial Sequence
  Description of Artificial Sequence: Synthetic oligonucleotide
gggagguaccccgaagccu

SEQ ID NO: 1732315 - RNA, 19 nt, Artificial Sequence
  Description of Artificial Sequence: Synthetic oligonucleotide
ccgucaaaugagcccuuga

SEQ ID NO: 1732316 - RNA, 19 nt, Artificial Sequence
  Description of Artificial Sequence: Synthetic oligonucleotide
ggagcgcccagccgcccca

SEQ ID NO: 1732317 - RNA, 19 nt, Artificial Sequence
  Description of Artificial Sequence: Synthetic oligonucleotide
ccguacucgcucgauccuc

SEQ ID NO: 1732318 - RNA, 19 nt, Artificial Sequence
  Description of Artificial Sequence: Synthetic oligonucleotide
caggcaccauggaauguuu

SEQ ID NO: 1732319 - RNA, 19 nt, Artificial Sequence
  Description of Artificial Sequence: Synthetic oligonucleotide
caaugacuccaggggaaau

SEQ ID NO: 1732320 - RNA, 19 nt, Artificial Sequence
  Description of Artificial Sequence: Synthetic oligonucleotide
gacgcugggucaggcccua

SEQ ID NO: 1732321 - RNA, 19 nt, Artificial Sequence
  Description of Artificial Sequence: Synthetic oligonucleotide
ugcgggcuucggggaacuc

SEQ ID NO: 1732322 - RNA, 19 nt, Artificial Sequence
  Description of Artificial Sequence: Synthetic oligonucleotide
ggacggcucugaacuagaa

SEQ ID NO: 1732323 - RNA, 19 nt, Artificial Sequence
  Description of Artificial Sequence: Synthetic oligonucleotide
ccuuuaugaauaggacccu

SEQ ID NO: 1732324 - RNA, 19 nt, Artificial Sequence
  Description of Artificial Sequence: Synthetic oligonucleotide
acgcugggucaggcccuag

SEQ ID NO: 1732325 - RNA, 19 nt, Artificial Sequence
  Description of Artificial Sequence: Synthetic oligonucleotide
cccaucccugggagcggag

SEQ ID NO: 1732326 - RNA, 19 nt, Artificial Sequence
  Description of Artificial Sequence: Synthetic oligonucleotide
gcagagcuuuggaacgacu

SEQ ID NO: 1732327 - RNA, 19 nt, Artificial Sequence
  Description of Artificial Sequence: Synthetic oligonucleotide
cucggccauccugggccuc

SEQ ID NO: 1732328 - RNA, 19 nt, Artificial Sequence
  Description of Artificial Sequence: Synthetic oligonucleotide
gggcagggcugacguguga

SEQ ID NO: 1732329 - RNA, 19 nt, Artificial Sequence
  Description of Artificial Sequence: Synthetic oligonucleotide
ggcugacgugugaaacaaa

SEQ ID NO: 1732330 - RNA, 19 nt, Artificial Sequence
  Description of Artificial Sequence: Synthetic oligonucleotide
cgaugacguccuuuaugaa

SEQ ID NO: 1732331 - RNA, 19 nt, Artificial Sequence
  Description of Artificial Sequence: Synthetic oligonucleotide
gggcuucggggaacucaac

SEQ ID NO: 1732332 - RNA, 19 nt, Artificial Sequence
  Description of Artificial Sequence: Synthetic oligonucleotide
cguacucgcucgauccucu

SEQ ID NO: 1732333 - RNA, 19 nt, Artificial Sequence
  Description of Artificial Sequence: Synthetic oligonucleotide
ccggucgucugggcgcuug

SEQ ID NO: 1732334 - RNA, 19 nt, Artificial Sequence
  Description of Artificial Sequence: Synthetic oligonucleotide
cgacugacgcugggucagg

SEQ ID NO: 1732335 - RNA, 19 nt, Artificial Sequence
  Description of Artificial Sequence: Synthetic oligonucleotide
ccggcgguaucaggcacca

SEQ ID NO: 1732336 - RNA, 19 nt, Artificial Sequence
  Description of Artificial Sequence: Synthetic oligonucleotide
ccgcaaucuuucggcccug

SEQ ID NO: 1732337 - RNA, 19 nt, Artificial Sequence
  Description of Artificial Sequence: Synthetic oligonucleotide
ggggccacugcaagucaau

SEQ ID NO: 1732338 - RNA, 19 nt, Artificial Sequence
  Description of Artificial Sequence: Synthetic oligonucleotide
gcgcccagccgccccaccu

SEQ ID NO: 1732339 - RNA, 19 nt, Artificial Sequence
  Description of Artificial Sequence: Synthetic oligonucleotide
gcccagccgccccaccugu

SEQ ID NO: 1732340 - RNA, 19 nt, Artificial Sequence
  Description of Artificial Sequence: Synthetic oligonucleotide
ggucgucugggcgcuugau

SEQ ID NO: 1732341 - RNA, 19 nt, Artificial Sequence
  Description of Artificial Sequence: Synthetic oligonucleotide
gccgccccaccuguggccu

SEQ ID NO: 1732342 - RNA, 19 nt, Artificial Sequence
  Description of Artificial Sequence: Synthetic oligonucleotide
cgguggcauagacgauaga

SEQ ID NO: 1732343 - RNA, 19 nt, Artificial Sequence
  Description of Artificial Sequence: Synthetic oligonucleotide
ccgccccaccuguggccuc

SEQ ID NO: 1732344 - RNA, 19 nt, Artificial Sequence
  Description of Artificial Sequence: Synthetic oligonucleotide
cggucgucugggcgcuuga

SEQ ID NO: 1732345 - RNA, 19 nt, Artificial Sequence
  Description of Artificial Sequence: Synthetic oligonucleotide
cauccccgaugacguccuu

SEQ ID NO: 1732346 - RNA, 19 nt, Artificial Sequence
  Description of Artificial Sequence: Synthetic oligonucleotide
ccccgaugacguccuuuau

SEQ ID NO: 1732347 - RNA, 19 nt, Artificial Sequence
  Description of Artificial Sequence: Synthetic oligonucleotide
cccggucgucugggcgcuu

SEQ ID NO: 1732348 - RNA, 19 nt, Artificial Sequence
  Description of Artificial Sequence: Synthetic oligonucleotide
aguaaaaucaaauaaauac

SEQ ID NO: 1732349 - RNA, 19 nt, Artificial Sequence
  Description of Artificial Sequence: Synthetic oligonucleotide
aaaagaagcauaugaugcc

SEQ ID NO: 1732350 - RNA, 19 nt, Artificial Sequence
  Description of Artificial Sequence: Synthetic oligonucleotide
auauuuaaugaacauuacc

SEQ ID NO: 1732351 - RNA, 19 nt, Artificial Sequence
  Description of Artificial Sequence: Synthetic oligonucleotide
auaaaauucagcuuaauaa

SEQ ID NO: 1732352 - RNA, 19 nt, Artificial Sequence
  Description of Artificial Sequence: Synthetic oligonucleotide
uauuugucaaauuacagca

SEQ ID NO: 1732353 - RNA, 19 nt, Artificial Sequence
  Description of Artificial Sequence: Synthetic oligonucleotide
uauuauucggucuucgugg

SEQ ID NO: 1732354 - RNA, 19 nt, Artificial Sequence
  Description of Artificial Sequence: Synthetic oligonucleotide
auaaauacuauauacagua

SEQ ID NO: 1732355 - RNA, 19 nt, Artificial Sequence
  Description of Artificial Sequence: Synthetic oligonucleotide
aaccuguucaguucguucc

SEQ ID NO: 1732356 - RNA, 19 nt, Artificial Sequence
  Description of Artificial Sequence: Synthetic oligonucleotide
uuauuugucaaauuacagc

SEQ ID NO: 1732357 - RNA, 19 nt, Artificial Sequence
  Description of Artificial Sequence: Synthetic oligonucleotide
gaaaagaagcauaugaugc

SEQ ID NO: 1732358 - RNA, 19 nt, Artificial Sequence
  Description of Artificial Sequence: Synthetic oligonucleotide
uaauuaaagaaaagaagca

SEQ ID NO: 1732359 - RNA, 19 nt, Artificial Sequence
  Description of Artificial Sequence: Synthetic oligonucleotide
aaagucauuuuaaaugagc

SEQ ID NO: 1732360 - RNA, 19 nt, Artificial Sequence
  Description of Artificial Sequence: Synthetic oligonucleotide
aaauacuuuugcuccauuc

SEQ ID NO: 1732361 - RNA, 19 nt, Artificial Sequence
  Description of Artificial Sequence: Synthetic oligonucleotide
uugaagauaucuacaauag

SEQ ID NO: 1732362 - RNA, 19 nt, Artificial Sequence
  Description of Artificial Sequence: Synthetic oligonucleotide
aauggcuacauuuauaauu

SEQ ID NO: 1732363 - RNA, 19 nt, Artificial Sequence
  Description of Artificial Sequence: Synthetic oligonucleotide
acaaacaagaaauauauuu

SEQ ID NO: 1732364 - RNA, 19 nt, Artificial Sequence
  Description of Artificial Sequence: Synthetic oligonucleotide
uaaaugagcaucuauaaua

SEQ ID NO: 1732365 - RNA, 19 nt, Artificial Sequence
  Description of Artificial Sequence: Synthetic oligonucleotide
acacauagauuuuaaaguc

SEQ ID NO: 1732366 - RNA, 19 nt, Artificial Sequence
  Description of Artificial Sequence: Synthetic oligonucleotide
aaaugagcaucuauaauac

SEQ ID NO: 1732367 - RNA, 19 nt, Artificial Sequence
  Description of Artificial Sequence: Synthetic oligonucleotide
aacauuaccacauaaccua

SEQ ID NO: 1732368 - RNA, 19 nt, Artificial Sequence
  Description of Artificial Sequence: Synthetic oligonucleotide
uaaaauucagcuuaauaaa

SEQ ID NO: 1732369 - RNA, 19 nt, Artificial Sequence
  Description of Artificial Sequence: Synthetic oligonucleotide
aauucuaaaauagucauuu

SEQ ID NO: 1732370 - RNA, 19 nt, Artificial Sequence
  Description of Artificial Sequence: Synthetic oligonucleotide
aauacuuuugcuccauuca

SEQ ID NO: 1732371 - RNA, 19 nt, Artificial Sequence
  Description of Artificial Sequence: Synthetic oligonucleotide
uauaauuggcuucaacuug

SEQ ID NO: 1732372 - RNA, 19 nt, Artificial Sequence
  Description of Artificial Sequence: Synthetic oligonucleotide
cauaugaugccuauagggg

SEQ ID NO: 1732373 - RNA, 19 nt, Artificial Sequence
  Description of Artificial Sequence: Synthetic oligonucleotide
aauuuguuguauuugggaa

SEQ ID NO: 1732374 - RNA, 19 nt, Artificial Sequence
  Description of Artificial Sequence: Synthetic oligonucleotide
agauaucuacaauaggagg

SEQ ID NO: 1732375 - RNA, 19 nt, Artificial Sequence
  Description of Artificial Sequence: Synthetic oligonucleotide
gacaauguaaccauaauuc

SEQ ID NO: 1732376 - RNA, 19 nt, Artificial Sequence
  Description of Artificial Sequence: Synthetic oligonucleotide
ugugucaucacccucacau

SEQ ID NO: 1732377 - RNA, 19 nt, Artificial Sequence
  Description of Artificial Sequence: Synthetic oligonucleotide
acaguuacaaaugaaauca

SEQ ID NO: 1732378 - RNA, 19 nt, Artificial Sequence
  Description of Artificial Sequence: Synthetic oligonucleotide
aauuaaaauccagaucuag

SEQ ID NO: 1732379 - RNA, 19 nt, Artificial Sequence
  Description of Artificial Sequence: Synthetic oligonucleotide
uuuugcuccauucaugugu

SEQ ID NO: 1732380 - RNA, 19 nt, Artificial Sequence
  Description of Artificial Sequence: Synthetic oligonucleotide
aaaauuacguagcuggaaa

SEQ ID NO: 1732381 - RNA, 19 nt, Artificial Sequence
  Description of Artificial Sequence: Synthetic oligonucleotide
uuauuauucggucuucgug

SEQ ID NO: 1732382 - RNA, 19 nt, Artificial Sequence
  Description of Artificial Sequence: Synthetic oligonucleotide
aaagauggcuuucuagaag

SEQ ID NO: 1732383 - RNA, 19 nt, Artificial Sequence
  Description of Artificial Sequence: Synthetic oligonucleotide
ugagacuucacuaauuaaa

SEQ ID NO: 1732384 - RNA, 19 nt, Artificial Sequence
  Description of Artificial Sequence: Synthetic oligonucleotide
ucagaauucugcaaauacc

SEQ ID NO: 1732385 - RNA, 19 nt, Artificial Sequence
  Description of Artificial Sequence: Synthetic oligonucleotide
agaacaaguugugaaaagc

SEQ ID NO: 1732386 - RNA, 19 nt, Artificial Sequence
  Description of Artificial Sequence: Synthetic oligonucleotide
uauacaccaguucucauca

SEQ ID NO: 1732387 - RNA, 19 nt, Artificial Sequence
  Description of Artificial Sequence: Synthetic oligonucleotide
ugaagauaucuacaauagg

SEQ ID NO: 1732388 - RNA, 19 nt, Artificial Sequence
  Description of Artificial Sequence: Synthetic oligonucleotide
gcaaauaccacagugaggg

SEQ ID NO: 1732389 - RNA, 19 nt, Artificial Sequence
  Description of Artificial Sequence: Synthetic oligonucleotide
uuuuguugaaguuacuggu

SEQ ID NO: 1732390 - RNA, 19 nt, Artificial Sequence
  Description of Artificial Sequence: Synthetic oligonucleotide
ucuucuaucagccguguca

SEQ ID NO: 1732391 - RNA, 19 nt, Artificial Sequence
  Description of Artificial Sequence: Synthetic oligonucleotide
guuacaaaugaaaucagcc

SEQ ID NO: 1732392 - RNA, 19 nt, Artificial Sequence
  Description of Artificial Sequence: Synthetic oligonucleotide
auuauuguagccaauucuc

SEQ ID NO: 1732393 - RNA, 19 nt, Artificial Sequence
  Description of Artificial Sequence: Synthetic oligonucleotide
uugguuugcuuucagaaga

SEQ ID NO: 1732394 - RNA, 19 nt, Artificial Sequence
  Description of Artificial Sequence: Synthetic oligonucleotide
aaucagggacaauguaacc

SEQ ID NO: 1732395 - RNA, 19 nt, Artificial Sequence
  Description of Artificial Sequence: Synthetic oligonucleotide
ucacuaauuaaagaaaaga

SEQ ID NO: 1732396 - RNA, 19 nt, Artificial Sequence
  Description of Artificial Sequence: Synthetic oligonucleotide
uucuagaaggcaaagcaca

SEQ ID NO: 1732397 - RNA, 19 nt, Artificial Sequence
  Description of Artificial Sequence: Synthetic oligonucleotide
auuaucugugucaucaccc

SEQ ID NO: 1732398 - RNA, 19 nt, Artificial Sequence
  Description of Artificial Sequence: Synthetic oligonucleotide
aguaccuucuuccaaaaca

SEQ ID NO: 1732399 - RNA, 19 nt, Artificial Sequence
  Description of Artificial Sequence: Synthetic oligonucleotide
uucgugguuauauacacca

SEQ ID NO: 1732400 - RNA, 19 nt, Artificial Sequence
  Description of Artificial Sequence: Synthetic oligonucleotide
aaccauaauucauauuuca

SEQ ID NO: 1732401 - RNA, 19 nt, Artificial Sequence
  Description of Artificial Sequence: Synthetic oligonucleotide
ucauuuuaaaugagcaucu

SEQ ID NO: 1732402 - RNA, 19 nt, Artificial Sequence
  Description of Artificial Sequence: Synthetic oligonucleotide
aaagacugguuauauaaaa

SEQ ID NO: 1732403 - RNA, 19 nt, Artificial Sequence
  Description of Artificial Sequence: Synthetic oligonucleotide
uuuaaagugcaacuccuac

SEQ ID NO: 1732404 - RNA, 19 nt, Artificial Sequence
  Description of Artificial Sequence: Synthetic oligonucleotide
aagauaucuacaauaggag

SEQ ID NO: 1732405 - RNA, 19 nt, Artificial Sequence
  Description of Artificial Sequence: Synthetic oligonucleotide
uacaauaggagggaagagg

SEQ ID NO: 1732406 - RNA, 19 nt, Artificial Sequence
  Description of Artificial Sequence: Synthetic oligonucleotide
auauacaccaguucucauc

SEQ ID NO: 1732407 - RNA, 19 nt, Artificial Sequence
  Description of Artificial Sequence: Synthetic oligonucleotide
agacugguuauauaaaaug

SEQ ID NO: 1732408 - RNA, 19 nt, Artificial Sequence
  Description of Artificial Sequence: Synthetic oligonucleotide
uaaagugcaacuccuacuc

SEQ ID NO: 1732409 - RNA, 19 nt, Artificial Sequence
  Description of Artificial Sequence: Synthetic oligonucleotide
aagugcaacuccuacucuc

SEQ ID NO: 1732410 - RNA, 19 nt, Artificial Sequence
  Description of Artificial Sequence: Synthetic oligonucleotide
aguacauacucccuaaagu

SEQ ID NO: 1732411 - RNA, 19 nt, Artificial Sequence
  Description of Artificial Sequence: Synthetic oligonucleotide
aacuugaagauaucuacaa

SEQ ID NO: 1732412 - RNA, 19 nt, Artificial Sequence
  Description of Artificial Sequence: Synthetic oligonucleotide
aguuacugguuauuaguac

SEQ ID NO: 1732413 - RNA, 19 nt, Artificial Sequence
  Description of Artificial Sequence: Synthetic oligonucleotide
ugguuauuaguacauacuc

SEQ ID NO: 1732414 - RNA, 19 nt, Artificial Sequence
  Description of Artificial Sequence: Synthetic oligonucleotide
ugaaaucagccuaggagag

SEQ ID NO: 1732415 - RNA, 19 nt, Artificial Sequence
  Description of Artificial Sequence: Synthetic oligonucleotide
uucaguucguuccuuaugu

SEQ ID NO: 1732416 - RNA, 19 nt, Artificial Sequence
  Description of Artificial Sequence: Synthetic oligonucleotide
uucuguuugcucuaaggcc

SEQ ID NO: 1732417 - RNA, 19 nt, Artificial Sequence
  Description of Artificial Sequence: Synthetic oligonucleotide
uuuacuguugguuugcuuu

SEQ ID NO: 1732418 - RNA, 19 nt, Artificial Sequence
  Description of Artificial Sequence: Synthetic oligonucleotide
guuagcguaaguaaaauca

SEQ ID NO: 1732419 - RNA, 19 nt, Artificial Sequence
  Description of Artificial Sequence: Synthetic oligonucleotide
acaguuaggguuuuauuug

SEQ ID NO: 1732420 - RNA, 19 nt, Artificial Sequence
  Description of Artificial Sequence: Synthetic oligonucleotide
ugucaucacccucacaucc

SEQ ID NO: 1732421 - RNA, 19 nt, Artificial Sequence
  Description of Artificial Sequence: Synthetic oligonucleotide
uuauuguagccaauucucc

SEQ ID NO: 1732422 - RNA, 19 nt, Artificial Sequence
  Description of Artificial Sequence: Synthetic oligonucleotide
uuauaauuggcuucaacuu

SEQ ID NO: 1732423 - RNA, 19 nt, Artificial Sequence
  Description of Artificial Sequence: Synthetic oligonucleotide
ucuuggcucaacaugaaaa

SEQ ID NO: 1732424 - RNA, 19 nt, Artificial Sequence
  Description of Artificial Sequence: Synthetic oligonucleotide
aauaggagggaagagggca

SEQ ID NO: 1732425 - RNA, 19 nt, Artificial Sequence
  Description of Artificial Sequence: Synthetic oligonucleotide
aacaaguugugaaaagcuc

SEQ ID NO: 1732426 - RNA, 19 nt, Artificial Sequence
  Description of Artificial Sequence: Synthetic oligonucleotide
aaauuacagcagcucaaag

SEQ ID NO: 1732427 - RNA, 19 nt, Artificial Sequence
  Description of Artificial Sequence: Synthetic oligonucleotide
gcauaugaugccuauaggg

SEQ ID NO: 1732428 - RNA, 19 nt, Artificial Sequence
  Description of Artificial Sequence: Synthetic oligonucleotide
ugaaguuacugguuauuag

SEQ ID NO: 1732429 - RNA, 19 nt, Artificial Sequence
  Description of Artificial Sequence: Synthetic oligonucleotide
uaguacauacucccuaaag

SEQ ID NO: 1732430 - RNA, 19 nt, Artificial Sequence
  Description of Artificial Sequence: Synthetic oligonucleotide
aguuacaaaugaaaucagc

SEQ ID NO: 1732431 - RNA, 19 nt, Artificial Sequence
  Description of Artificial Sequence: Synthetic oligonucleotide
aguaacauauaaaauucag

SEQ ID NO: 1732432 - RNA, 19 nt, Artificial Sequence
  Description of Artificial Sequence: Synthetic oligonucleotide
ucuacaauaggagggaaga

SEQ ID NO: 1732433 - RNA, 19 nt, Artificial Sequence
  Description of Artificial Sequence: Synthetic oligonucleotide
uauuguagccaauucuccc

SEQ ID NO: 1732434 - RNA, 19 nt, Artificial Sequence
  Description of Artificial Sequence: Synthetic oligonucleotide
agggguuucaauuucacaa

SEQ ID NO: 1732435 - RNA, 19 nt, Artificial Sequence
  Description of Artificial Sequence: Synthetic oligonucleotide
uagcuggaaauuauuguag

SEQ ID NO: 1732436 - RNA, 19 nt, Artificial Sequence
  Description of Artificial Sequence: Synthetic oligonucleotide
aguuagcguaaguaaaauc

SEQ ID NO: 1732437 - RNA, 19 nt, Artificial Sequence
  Description of Artificial Sequence: Synthetic oligonucleotide
uccaguucacuuauuauuc

SEQ ID NO: 1732438 - RNA, 19 nt, Artificial Sequence
  Description of Artificial Sequence: Synthetic oligonucleotide
aaaaucagggacaauguaa

SEQ ID NO: 1732439 - RNA, 19 nt, Artificial Sequence
  Description of Artificial Sequence: Synthetic oligonucleotide
ucuauaauacaguuacaaa

SEQ ID NO: 1732440 - RNA, 19 nt, Artificial Sequence
  Description of Artificial Sequence: Synthetic oligonucleotide
uacauuuauaauuggcuuc

SEQ ID NO: 1732441 - RNA, 19 nt, Artificial Sequence
  Description of Artificial Sequence: Synthetic oligonucleotide
ucaauuucacaaacaagaa

SEQ ID NO: 1732442 - RNA, 19 nt, Artificial Sequence
  Description of Artificial Sequence: Synthetic oligonucleotide
augagcaucuauaauacag

SEQ ID NO: 1732443 - RNA, 19 nt, Artificial Sequence
  Description of Artificial Sequence: Synthetic oligonucleotide
augauuaucugugucauca

SEQ ID NO: 1732444 - RNA, 19 nt, Artificial Sequence
  Description of Artificial Sequence: Synthetic oligonucleotide
uugauuacuggcaauguuu

SEQ ID NO: 1732445 - RNA, 19 nt, Artificial Sequence
  Description of Artificial Sequence: Synthetic oligonucleotide
guaaccauaauucauauuu

SEQ ID NO: 1732446 - RNA, 19 nt, Artificial Sequence
  Description of Artificial Sequence: Synthetic oligonucleotide
uuucuagaaggcaaagcac

SEQ ID NO: 1732447 - RNA, 19 nt, Artificial Sequence
  Description of Artificial Sequence: Synthetic oligonucleotide
uuaaaugagcaucuauaau

SEQ ID NO: 1732448 - RNA, 19 nt, Artificial Sequence
  Description of Artificial Sequence: Synthetic oligonucleotide
agguauuuugcauaaaauu

SEQ ID NO: 1732449 - RNA, 19 nt, Artificial Sequence
  Description of Artificial Sequence: Synthetic oligonucleotide
uuuaaaguccuuuucuguu

SEQ ID NO: 1732450 - RNA, 19 nt, Artificial Sequence
  Description of Artificial Sequence: Synthetic oligonucleotide
uucacuuauuauucggucu

SEQ ID NO: 1732451 - RNA, 19 nt, Artificial Sequence
  Description of Artificial Sequence: Synthetic oligonucleotide
gucauuuuaaaugagcauc

SEQ ID NO: 1732452 - RNA, 19 nt, Artificial Sequence
  Description of Artificial Sequence: Synthetic oligonucleotide
ucaaauuacagcagcucaa

SEQ ID NO: 1732453 - RNA, 19 nt, Artificial Sequence
  Description of Artificial Sequence: Synthetic oligonucleotide
uauuugggaaucagaauuc

SEQ ID NO: 1732454 - RNA, 19 nt, Artificial Sequence
  Description of Artificial Sequence: Synthetic oligonucleotide
ucuucgugguuauauacac

SEQ ID NO: 1732455 - RNA, 19 nt, Artificial Sequence
  Description of Artificial Sequence: Synthetic oligonucleotide
ucauugauuacuggcaaug

SEQ ID NO: 1732456 - RNA, 19 nt, Artificial Sequence
  Description of Artificial Sequence: Synthetic oligonucleotide
auaugaugccuauaggggu

SEQ ID NO: 1732457 - RNA, 19 nt, Artificial Sequence
  Description of Artificial Sequence: Synthetic oligonucleotide
uaucagccgugucaaauag

SEQ ID NO: 1732458 - RNA, 19 nt, Artificial Sequence
  Description of Artificial Sequence: Synthetic oligonucleotide
uauuaguacauacucccua

SEQ ID NO: 1732459 - RNA, 19 nt, Artificial Sequence
  Description of Artificial Sequence: Synthetic oligonucleotide
ucccuuucuucuaucagcc

SEQ ID NO: 1732460 - RNA, 19 nt, Artificial Sequence
  Description of Artificial Sequence: Synthetic oligonucleotide
uuagcguaaguaaaaucaa

SEQ ID NO: 1732461 - RNA, 19 nt, Artificial Sequence
  Description of Artificial Sequence: Synthetic oligonucleotide
uggaaauuauuguagccaa

SEQ ID NO: 1732462 - RNA, 19 nt, Artificial Sequence
  Description of Artificial Sequence: Synthetic oligonucleotide
aaauuacguagcuggaaau

SEQ ID NO: 1732463 - RNA, 19 nt, Artificial Sequence
  Description of Artificial Sequence: Synthetic oligonucleotide
augaacauuaccacauaac

SEQ ID NO: 1732464 - RNA, 19 nt, Artificial Sequence
  Description of Artificial Sequence: Synthetic oligonucleotide
ucugcaaagauuucccaaa

SEQ ID NO: 1732465 - RNA, 19 nt, Artificial Sequence
  Description of Artificial Sequence: Synthetic oligonucleotide
uuuugagguauuuugcaua

SEQ ID NO: 1732466 - RNA, 19 nt, Artificial Sequence
  Description of Artificial Sequence: Synthetic oligonucleotide
gauuucccaaaugucauug

SEQ ID NO: 1732467 - RNA, 19 nt, Artificial Sequence
  Description of Artificial Sequence: Synthetic oligonucleotide
ugggucaguaccuucuucc

SEQ ID NO: 1732468 - RNA, 19 nt, Artificial Sequence
  Description of Artificial Sequence: Synthetic oligonucleotide
uucaacuugaagauaucua

SEQ ID NO: 1732469 - RNA, 19 nt, Artificial Sequence
  Description of Artificial Sequence: Synthetic oligonucleotide
uauagggguuucaauuuca

SEQ ID NO: 1732470 - RNA, 19 nt, Artificial Sequence
  Description of Artificial Sequence: Synthetic oligonucleotide
uuggcuucaacuugaagau

SEQ ID NO: 1732471 - RNA, 19 nt, Artificial Sequence
  Description of Artificial Sequence: Synthetic oligonucleotide
uacucccuaaaguauacac

SEQ ID NO: 1732472 - RNA, 19 nt, Artificial Sequence
  Description of Artificial Sequence: Synthetic oligonucleotide
aacuccuacucucuuggcu

SEQ ID NO: 1732473 - RNA, 19 nt, Artificial Sequence
  Description of Artificial Sequence: Synthetic oligonucleotide
aauccagaucuagaguauc

SEQ ID NO: 1732474 - RNA, 19 nt, Artificial Sequence
  Description of Artificial Sequence: Synthetic oligonucleotide
guuacugguuauuaguaca

SEQ ID NO: 1732475 - RNA, 19 nt, Artificial Sequence
  Description of Artificial Sequence: Synthetic oligonucleotide
auggcuacauuuauaauug

SEQ ID NO: 1732476 - RNA, 19 nt, Artificial Sequence
  Description of Artificial Sequence: Synthetic oligonucleotide
ucuagaaggcaaagcacac

SEQ ID NO: 1732477 - RNA, 19 nt, Artificial Sequence
  Description of Artificial Sequence: Synthetic oligonucleotide
uuauuaguacauacucccu

SEQ ID NO: 1732478 - RNA, 19 nt, Artificial Sequence
  Description of Artificial Sequence: Synthetic oligonucleotide
aaugagcaucuauaauaca

SEQ ID NO: 1732479 - RNA, 19 nt, Artificial Sequence
  Description of Artificial Sequence: Synthetic oligonucleotide
caguucacuuauuauucgg

SEQ ID NO: 1732480 - RNA, 19 nt, Artificial Sequence
  Description of Artificial Sequence: Synthetic oligonucleotide
agcaauucuaaaauaguca

SEQ ID NO: 1732481 - RNA, 19 nt, Artificial Sequence
  Description of Artificial Sequence: Synthetic oligonucleotide
ugcaaagauuucccaaaug

SEQ ID NO: 1732482 - RNA, 19 nt, Artificial Sequence
  Description of Artificial Sequence: Synthetic oligonucleotide
aagaacacugaaaagucau

SEQ ID NO: 1732483 - RNA, 19 nt, Artificial Sequence
  Description of Artificial Sequence: Synthetic oligonucleotide
auuaguacauacucccuaa

SEQ ID NO: 1732484 - RNA, 19 nt, Artificial Sequence
  Description of Artificial Sequence: Synthetic oligonucleotide
caaauagucauccaggccu

SEQ ID NO: 1732485 - RNA, 19 nt, Artificial Sequence
  Description of Artificial Sequence: Synthetic oligonucleotide
ugucauugauuacuggcaa

SEQ ID NO: 1732486 - RNA, 19 nt, Artificial Sequence
  Description of Artificial Sequence: Synthetic oligonucleotide
acauuuauaauuggcuuca

SEQ ID NO: 1732487 - RNA, 19 nt, Artificial Sequence
  Description of Artificial Sequence: Synthetic oligonucleotide
ugacccuucuguuauuuac

SEQ ID NO: 1732488 - RNA, 19 nt, Artificial Sequence
  Description of Artificial Sequence: Synthetic oligonucleotide
gaaguuacugguuauuagu

SEQ ID NO: 1732489 - RNA, 19 nt, Artificial Sequence
  Description of Artificial Sequence: Synthetic oligonucleotide
caguucguuccuuaugucc

SEQ ID NO: 1732490 - RNA, 19 nt, Artificial Sequence
  Description of Artificial Sequence: Synthetic oligonucleotide
gucaaauuacagcagcuca

SEQ ID NO: 1732491 - RNA, 19 nt, Artificial Sequence
  Description of Artificial Sequence: Synthetic oligonucleotide
uguuguauuugggaaucag

SEQ ID NO: 1732492 - RNA, 19 nt, Artificial Sequence
  Description of Artificial Sequence: Synthetic oligonucleotide
uuacugguuauuaguacau

SEQ ID NO: 1732493 - RNA, 19 nt, Artificial Sequence
  Description of Artificial Sequence: Synthetic oligonucleotide
ucacuuauuauucggucuu

SEQ ID NO: 1732494 - RNA, 19 nt, Artificial Sequence
  Description of Artificial Sequence: Synthetic oligonucleotide
ucuagaguaucugcaaaga

SEQ ID NO: 1732495 - RNA, 19 nt, Artificial Sequence
  Description of Artificial Sequence: Synthetic oligonucleotide
gcuuucagaagacugagac

SEQ ID NO: 1732496 - RNA, 19 nt, Artificial Sequence
  Description of Artificial Sequence: Synthetic oligonucleotide
ugauuacuggcaauguuuu

SEQ ID NO: 1732497 - RNA, 19 nt, Artificial Sequence
  Description of Artificial Sequence: Synthetic oligonucleotide
ccugcuaugauuaucugug

SEQ ID NO: 1732498 - RNA, 19 nt, Artificial Sequence
  Description of Artificial Sequence: Synthetic oligonucleotide
gagcaauucuaaaauaguc

SEQ ID NO: 1732499 - RNA, 19 nt, Artificial Sequence
  Description of Artificial Sequence: Synthetic oligonucleotide
aaucccugcuaugauuauc

SEQ ID NO: 1732500 - RNA, 19 nt, Artificial Sequence
  Description of Artificial Sequence: Synthetic oligonucleotide
acuuauuauucggucuucg

SEQ ID NO: 1732501 - RNA, 19 nt, Artificial Sequence
  Description of Artificial Sequence: Synthetic oligonucleotide
uuaucugugucaucacccu

SEQ ID NO: 1732502 - RNA, 19 nt, Artificial Sequence
  Description of Artificial Sequence: Synthetic oligonucleotide
cacacauagauuuuaaagu

SEQ ID NO: 1732503 - RNA, 19 nt, Artificial Sequence
  Description of Artificial Sequence: Synthetic oligonucleotide
aaaucagccuaggagaguu

SEQ ID NO: 1732504 - RNA, 19 nt, Artificial Sequence
  Description of Artificial Sequence: Synthetic oligonucleotide
agucauuuuaaaugagcau

SEQ ID NO: 1732505 - RNA, 19 nt, Artificial Sequence
  Description of Artificial Sequence: Synthetic oligonucleotide
agccgugucaaauagucau

SEQ ID NO: 1732506 - RNA, 19 nt, Artificial Sequence
  Description of Artificial Sequence: Synthetic oligonucleotide
accagcauugggucaguac

SEQ ID NO: 1732507 - RNA, 19 nt, Artificial Sequence
  Description of Artificial Sequence: Synthetic oligonucleotide
acaaguugugaaaagcucu

SEQ ID NO: 1732508 - RNA, 19 nt, Artificial Sequence
  Description of Artificial Sequence: Synthetic oligonucleotide
uuuuaaagugcaacuccua

SEQ ID NO: 1732509 - RNA, 19 nt, Artificial Sequence
  Description of Artificial Sequence: Synthetic oligonucleotide
uuaaaguccuuuucuguuu

SEQ ID NO: 1732510 - RNA, 19 nt, Artificial Sequence
  Description of Artificial Sequence: Synthetic oligonucleotide
cagccuaggagaguuagcg

SEQ ID NO: 1732511 - RNA, 19 nt, Artificial Sequence
  Description of Artificial Sequence: Synthetic oligonucleotide
guacauacucccuaaagua

SEQ ID NO: 1732512 - RNA, 19 nt, Artificial Sequence
  Description of Artificial Sequence: Synthetic oligonucleotide
ugcuaugauuaucuguguc

SEQ ID NO: 1732513 - RNA, 19 nt, Artificial Sequence
  Description of Artificial Sequence: Synthetic oligonucleotide
ugguuauauacaccaguuc

SEQ ID NO: 1732514 - RNA, 19 nt, Artificial Sequence
  Description of Artificial Sequence: Synthetic oligonucleotide
uaaccuacuuugcuuuugu

SEQ ID NO: 1732515 - RNA, 19 nt, Artificial Sequence
  Description of Artificial Sequence: Synthetic oligonucleotide
aaagugcaacuccuacucu

SEQ ID NO: 1732516 - RNA, 19 nt, Artificial Sequence
  Description of Artificial Sequence: Synthetic oligonucleotide
ucccagaacaaguugugaa

SEQ ID NO: 1732517 - RNA, 19 nt, Artificial Sequence
  Description of Artificial Sequence: Synthetic oligonucleotide
agaauucugcaaauaccac

SEQ ID NO: 1732518 - RNA, 19 nt, Artificial Sequence
  Description of Artificial Sequence: Synthetic oligonucleotide
aucagggacaauguaacca

SEQ ID NO: 1732519 - RNA, 19 nt, Artificial Sequence
  Description of Artificial Sequence: Synthetic oligonucleotide
ugcugccuuaaccuguuca

SEQ ID NO: 1732520 - RNA, 19 nt, Artificial Sequence
  Description of Artificial Sequence: Synthetic oligonucleotide
aauuacguagcuggaaauu

SEQ ID NO: 1732521 - RNA, 19 nt, Artificial Sequence
  Description of Artificial Sequence: Synthetic oligonucleotide
gguuauauacaccaguucu

SEQ ID NO: 1732522 - RNA, 19 nt, Artificial Sequence
  Description of Artificial Sequence: Synthetic oligonucleotide
auaauuggcuucaacuuga

SEQ ID NO: 1732523 - RNA, 19 nt, Artificial Sequence
  Description of Artificial Sequence: Synthetic oligonucleotide
guagcuggaaauuauugua

SEQ ID NO: 1732524 - RNA, 19 nt, Artificial Sequence
  Description of Artificial Sequence: Synthetic oligonucleotide
uaugaugccuauagggguu

SEQ ID NO: 1732525 - RNA, 19 nt, Artificial Sequence
  Description of Artificial Sequence: Synthetic oligonucleotide
auaucuacaauaggaggga

SEQ ID NO: 1732526 - RNA, 19 nt, Artificial Sequence
  Description of Artificial Sequence: Synthetic oligonucleotide
uagcguaaguaaaaucaaa

SEQ ID NO: 1732527 - RNA, 19 nt, Artificial Sequence
  Description of Artificial Sequence: Synthetic oligonucleotide
uaguguuuggaaagcucca

SEQ ID NO: 1732528 - RNA, 19 nt, Artificial Sequence
  Description of Artificial Sequence: Synthetic oligonucleotide
aaagcacacauagauuuua

SEQ ID NO: 1732529 - RNA, 19 nt, Artificial Sequence
  Description of Artificial Sequence: Synthetic oligonucleotide
uuacguagcuggaaauuau

SEQ ID NO: 1732530 - RNA, 19 nt, Artificial Sequence
  Description of Artificial Sequence: Synthetic oligonucleotide
cucucuuggcucaacauga

SEQ ID NO: 1732531 - RNA, 19 nt, Artificial Sequence
  Description of Artificial Sequence: Synthetic oligonucleotide
guucacuuauuauucgguc

SEQ ID NO: 1732532 - RNA, 19 nt, Artificial Sequence
  Description of Artificial Sequence: Synthetic oligonucleotide
auuauucggucuucguggu

SEQ ID NO: 1732533 - RNA, 19 nt, Artificial Sequence
  Description of Artificial Sequence: Synthetic oligonucleotide
ucacccucacauccaauga

SEQ ID NO: 1732534 - RNA, 19 nt, Artificial Sequence
  Description of Artificial Sequence: Synthetic oligonucleotide
auugauuacuggcaauguu

SEQ ID NO: 1732535 - RNA, 19 nt, Artificial Sequence
  Description of Artificial Sequence: Synthetic oligonucleotide
ugucaaauuacagcagcuc

SEQ ID NO: 1732536 - RNA, 19 nt, Artificial Sequence
  Description of Artificial Sequence: Synthetic oligonucleotide
gguuauuaguacauacucc

SEQ ID NO: 1732537 - RNA, 19 nt, Artificial Sequence
  Description of Artificial Sequence: Synthetic oligonucleotide
guuauauacaccaguucuc

SEQ ID NO: 1732538 - RNA, 19 nt, Artificial Sequence
  Description of Artificial Sequence: Synthetic oligonucleotide
uggcuacauuuauaauugg

SEQ ID NO: 1732539 - RNA, 19 nt, Artificial Sequence
  Description of Artificial Sequence: Synthetic oligonucleotide
caaaaccucucugaucugc

SEQ ID NO: 1732540 - RNA, 19 nt, Artificial Sequence
  Description of Artificial Sequence: Synthetic oligonucleotide
auguaaccauaauucauau

SEQ ID NO: 1732541 - RNA, 19 nt, Artificial Sequence
  Description of Artificial Sequence: Synthetic oligonucleotide
aauaccacagugaggggaa

SEQ ID NO: 1732542 - RNA, 19 nt, Artificial Sequence
  Description of Artificial Sequence: Synthetic oligonucleotide
uucaaaucccugcuaugau

SEQ ID NO: 1732543 - RNA, 19 nt, Artificial Sequence
  Description of Artificial Sequence: Synthetic oligonucleotide
acauuaccacauaaccuac

SEQ ID NO: 1732544 - RNA, 19 nt, Artificial Sequence
  Description of Artificial Sequence: Synthetic oligonucleotide
agagcaauucuaaaauagu

SEQ ID NO: 1732545 - RNA, 19 nt, Artificial Sequence
  Description of Artificial Sequence: Synthetic oligonucleotide
cuucgugguuauauacacc

SEQ ID NO: 1732546 - RNA, 19 nt, Artificial Sequence
  Description of Artificial Sequence: Synthetic oligonucleotide
aucugcaaagauuucccaa

SEQ ID NO: 1732547 - RNA, 19 nt, Artificial Sequence
  Description of Artificial Sequence: Synthetic oligonucleotide
aaguuacugguuauuagua

SEQ ID NO: 1732548 - RNA, 19 nt, Artificial Sequence
  Description of Artificial Sequence: Synthetic oligonucleotide
caaaugaaaucagccuagg

SEQ ID NO: 1732549 - RNA, 19 nt, Artificial Sequence
  Description of Artificial Sequence: Synthetic oligonucleotide
acugguuauauaaaaugau

SEQ ID NO: 1732550 - RNA, 19 nt, Artificial Sequence
  Description of Artificial Sequence: Synthetic oligonucleotide
uuacuguugguuugcuuuc

SEQ ID NO: 1732551 - RNA, 19 nt, Artificial Sequence
  Description of Artificial Sequence: Synthetic oligonucleotide
gaggaaccagcauuggguc

SEQ ID NO: 1732552 - RNA, 19 nt, Artificial Sequence
  Description of Artificial Sequence: Synthetic oligonucleotide
caguucucaucaaaguguc

SEQ ID NO: 1732553 - RNA, 19 nt, Artificial Sequence
  Description of Artificial Sequence: Synthetic oligonucleotide
agcguaaguaaaaucaaau

SEQ ID NO: 1732554 - RNA, 19 nt, Artificial Sequence
  Description of Artificial Sequence: Synthetic oligonucleotide
aauucucccagaacaaguu

SEQ ID NO: 1732555 - RNA, 19 nt, Artificial Sequence
  Description of Artificial Sequence: Synthetic oligonucleotide
ucgugguuauauacaccag

SEQ ID NO: 1732556 - RNA, 19 nt, Artificial Sequence
  Description of Artificial Sequence: Synthetic oligonucleotide
acccuucuguuauuuacug

SEQ ID NO: 1732557 - RNA, 19 nt, Artificial Sequence
  Description of Artificial Sequence: Synthetic oligonucleotide
uguugaaguuacugguuau

SEQ ID NO: 1732558 - RNA, 19 nt, Artificial Sequence
  Description of Artificial Sequence: Synthetic oligonucleotide
ccuuauguccagcaguucc

SEQ ID NO: 1732559 - RNA, 19 nt, Artificial Sequence
  Description of Artificial Sequence: Synthetic oligonucleotide
auagggguuucaauuucac

SEQ ID NO: 1732560 - RNA, 19 nt, Artificial Sequence
  Description of Artificial Sequence: Synthetic oligonucleotide
aguucguuccuuaugucca

SEQ ID NO: 1732561 - RNA, 19 nt, Artificial Sequence
  Description of Artificial Sequence: Synthetic oligonucleotide
uccaaugacccuucuguua

SEQ ID NO: 1732562 - RNA, 19 nt, Artificial Sequence
  Description of Artificial Sequence: Synthetic oligonucleotide
uauucggucuucgugguua

SEQ ID NO: 1732563 - RNA, 19 nt, Artificial Sequence
  Description of Artificial Sequence: Synthetic oligonucleotide
aguguuuggaaagcuccag

SEQ ID NO: 1732564 - RNA, 19 nt, Artificial Sequence
  Description of Artificial Sequence: Synthetic oligonucleotide
guucaguucguuccuuaug

SEQ ID NO: 1732565 - RNA, 19 nt, Artificial Sequence
  Description of Artificial Sequence: Synthetic oligonucleotide
caacuugaagauaucuaca

SEQ ID NO: 1732566 - RNA, 19 nt, Artificial Sequence
  Description of Artificial Sequence: Synthetic oligonucleotide
ugguuugcuuucagaagac

SEQ ID NO: 1732567 - RNA, 19 nt, Artificial Sequence
  Description of Artificial Sequence: Synthetic oligonucleotide
gaacauuaccacauaaccu

SEQ ID NO: 1732568 - RNA, 19 nt, Artificial Sequence
  Description of Artificial Sequence: Synthetic oligonucleotide
ugauuaucugugucaucac

SEQ ID NO: 1732569 - RNA, 19 nt, Artificial Sequence
  Description of Artificial Sequence: Synthetic oligonucleotide
acaccaguucucaucaaag

SEQ ID NO: 1732570 - RNA, 19 nt, Artificial Sequence
  Description of Artificial Sequence: Synthetic oligonucleotide
uagggguuucaauuucaca

SEQ ID NO: 1732571 - RNA, 19 nt, Artificial Sequence
  Description of Artificial Sequence: Synthetic oligonucleotide
agaagcauaugaugccuau

SEQ ID NO: 1732572 - RNA, 19 nt, Artificial Sequence
  Description of Artificial Sequence: Synthetic oligonucleotide
acauccaaugacccuucug

SEQ ID NO: 1732573 - RNA, 19 nt, Artificial Sequence
  Description of Artificial Sequence: Synthetic oligonucleotide
caaaucccugcuaugauua

SEQ ID NO: 1732574 - RNA, 19 nt, Artificial Sequence
  Description of Artificial Sequence: Synthetic oligonucleotide
aaaaccucucugaucugcu

SEQ ID NO: 1732575 - RNA, 19 nt, Artificial Sequence
  Description of Artificial Sequence: Synthetic oligonucleotide
aaauuaaaauccagaucua

SEQ ID NO: 1732576 - RNA, 19 nt, Artificial Sequence
  Description of Artificial Sequence: Synthetic oligonucleotide
ugccuuaaccuguucaguu

SEQ ID NO: 1732577 - RNA, 19 nt, Artificial Sequence
  Description of Artificial Sequence: Synthetic oligonucleotide
aaucagaauucugcaaaua

SEQ ID NO: 1732578 - RNA, 19 nt, Artificial Sequence
  Description of Artificial Sequence: Synthetic oligonucleotide
auuacguagcuggaaauua

SEQ ID NO: 1732579 - RNA, 19 nt, Artificial Sequence
  Description of Artificial Sequence: Synthetic oligonucleotide
aucagccuaggagaguuag

SEQ ID NO: 1732580 - RNA, 19 nt, Artificial Sequence
  Description of Artificial Sequence: Synthetic oligonucleotide
acuguugguuugcuuucag

SEQ ID NO: 1732581 - RNA, 19 nt, Artificial Sequence
  Description of Artificial Sequence: Synthetic oligonucleotide
ccuuaaccuguucaguucg

SEQ ID NO: 1732582 - RNA, 19 nt, Artificial Sequence
  Description of Artificial Sequence: Synthetic oligonucleotide
aguucacuuauuauucggu

SEQ ID NO: 1732583 - RNA, 19 nt, Artificial Sequence
  Description of Artificial Sequence: Synthetic oligonucleotide
auacaguaacauauaaaau

SEQ ID NO: 1732584 - RNA, 19 nt, Artificial Sequence
  Description of Artificial Sequence: Synthetic oligonucleotide
ucagccuaggagaguuagc

SEQ ID NO: 1732585 - RNA, 19 nt, Artificial Sequence
  Description of Artificial Sequence: Synthetic oligonucleotide
aucuacaauaggagggaag

SEQ ID NO: 1732586 - RNA, 19 nt, Artificial Sequence
  Description of Artificial Sequence: Synthetic oligonucleotide
uuugcaguccugguacugu

SEQ ID NO: 1732587 - RNA, 19 nt, Artificial Sequence
  Description of Artificial Sequence: Synthetic oligonucleotide
aaugacccuucuguuauuu

SEQ ID NO: 1732588 - RNA, 19 nt, Artificial Sequence
  Description of Artificial Sequence: Synthetic oligonucleotide
aagugucccuuucuucuau

SEQ ID NO: 1732589 - RNA, 19 nt, Artificial Sequence
  Description of Artificial Sequence: Synthetic oligonucleotide
cauauuucaaaucccugcu

SEQ ID NO: 1732590 - RNA, 19 nt, Artificial Sequence
  Description of Artificial Sequence: Synthetic oligonucleotide
uguucaguucguuccuuau

SEQ ID NO: 1732591 - RNA, 19 nt, Artificial Sequence
  Description of Artificial Sequence: Synthetic oligonucleotide
uuuccuuccuuuugaggua

SEQ ID NO: 1732592 - RNA, 19 nt, Artificial Sequence
  Description of Artificial Sequence: Synthetic oligonucleotide
gucaguaccuucuuccaaa

SEQ ID NO: 1732593 - RNA, 19 nt, Artificial Sequence
  Description of Artificial Sequence: Synthetic oligonucleotide
ucguuccuuauguccagca

SEQ ID NO: 1732594 - RNA, 19 nt, Artificial Sequence
  Description of Artificial Sequence: Synthetic oligonucleotide
ucaucacccucacauccaa

SEQ ID NO: 1732595 - RNA, 19 nt, Artificial Sequence
  Description of Artificial Sequence: Synthetic oligonucleotide
ucccuaaaguauacacuuc

SEQ ID NO: 1732596 - RNA, 19 nt, Artificial Sequence
  Description of Artificial Sequence: Synthetic oligonucleotide
aguuaggguuuuauuuguc

SEQ ID NO: 1732597 - RNA, 19 nt, Artificial Sequence
  Description of Artificial Sequence: Synthetic oligonucleotide
gaaauuauuguagccaauu

SEQ ID NO: 1732598 - RNA, 19 nt, Artificial Sequence
  Description of Artificial Sequence: Synthetic oligonucleotide
agaguuagcguaaguaaaa

SEQ ID NO: 1732599 - RNA, 19 nt, Artificial Sequence
  Description of Artificial Sequence: Synthetic oligonucleotide
uagccaauucucccagaac

SEQ ID NO: 1732600 - RNA, 19 nt, Artificial Sequence
  Description of Artificial Sequence: Synthetic oligonucleotide
agcacacauagauuuuaaa

SEQ ID NO: 1732601 - RNA, 19 nt, Artificial Sequence
  Description of Artificial Sequence: Synthetic oligonucleotide
gcugccuuaaccuguucag

SEQ ID NO: 1732602 - RNA, 19 nt, Artificial Sequence
  Description of Artificial Sequence: Synthetic oligonucleotide
ggucuucgugguuauauac

SEQ ID NO: 1732603 - RNA, 19 nt, Artificial Sequence
  Description of Artificial Sequence: Synthetic oligonucleotide
aaaucccugcuaugauuau

SEQ ID NO: 1732604 - RNA, 19 nt, Artificial Sequence
  Description of Artificial Sequence: Synthetic oligonucleotide
caaagauggcuuucuagaa

SEQ ID NO: 1732605 - RNA, 19 nt, Artificial Sequence
  Description of Artificial Sequence: Synthetic oligonucleotide
acucccuaaaguauacacu

SEQ ID NO: 1732606 - RNA, 19 nt, Artificial Sequence
  Description of Artificial Sequence: Synthetic oligonucleotide
acguagcuggaaauuauug

SEQ ID NO: 1732607 - RNA, 19 nt, Artificial Sequence
  Description of Artificial Sequence: Synthetic oligonucleotide
ggcuacauuuauaauuggc

SEQ ID NO: 1732608 - RNA, 19 nt, Artificial Sequence
  Description of Artificial Sequence: Synthetic oligonucleotide
agacugagacuucacuaau

SEQ ID NO: 1732609 - RNA, 19 nt, Artificial Sequence
  Description of Artificial Sequence: Synthetic oligonucleotide
ucggucuucgugguuauau

SEQ ID NO: 1732610 - RNA, 19 nt, Artificial Sequence
  Description of Artificial Sequence: Synthetic oligonucleotide
guaccuucuuccaaaacaa

SEQ ID NO: 1732611 - RNA, 19 nt, Artificial Sequence
  Description of Artificial Sequence: Synthetic oligonucleotide
cauucaugugucaccaaaa

SEQ ID NO: 1732612 - RNA, 19 nt, Artificial Sequence
  Description of Artificial Sequence: Synthetic oligonucleotide
cacaguuaggguuuuauuu

SEQ ID NO: 1732613 - RNA, 19 nt, Artificial Sequence
  Description of Artificial Sequence: Synthetic oligonucleotide
cuguuugcucuaaggcccc

SEQ ID NO: 1732614 - RNA, 19 nt, Artificial Sequence
  Description of Artificial Sequence: Synthetic oligonucleotide
cccucuaguguuuggaaag

SEQ ID NO: 1732615 - RNA, 19 nt, Artificial Sequence
  Description of Artificial Sequence: Synthetic oligonucleotide
ucaguucguuccuuauguc

SEQ ID NO: 1732616 - RNA, 19 nt, Artificial Sequence
  Description of Artificial Sequence: Synthetic oligonucleotide
cagaagacugagacuucac

SEQ ID NO: 1732617 - RNA, 19 nt, Artificial Sequence
  Description of Artificial Sequence: Synthetic oligonucleotide
cugguuauuaguacauacu

SEQ ID NO: 1732618 - RNA, 19 nt, Artificial Sequence
  Description of Artificial Sequence: Synthetic oligonucleotide
acacaguuaggguuuuauu

SEQ ID NO: 1732619 - RNA, 19 nt, Artificial Sequence
  Description of Artificial Sequence: Synthetic oligonucleotide
aaauagucauccaggccuu

SEQ ID NO: 1732620 - RNA, 19 nt, Artificial Sequence
  Description of Artificial Sequence: Synthetic oligonucleotide
gcaaagcacacauagauuu

SEQ ID NO: 1732621 - RNA, 19 nt, Artificial Sequence
  Description of Artificial Sequence: Synthetic oligonucleotide
auuuacuguugguuugcuu

SEQ ID NO: 1732622 - RNA, 19 nt, Artificial Sequence
  Description of Artificial Sequence: Synthetic oligonucleotide
uuguucuugcugccuuaac

SEQ ID NO: 1732623 - RNA, 19 nt, Artificial Sequence
  Description of Artificial Sequence: Synthetic oligonucleotide
gguggaggaaccagcauug

SEQ ID NO: 1732624 - RNA, 19 nt, Artificial Sequence
  Description of Artificial Sequence: Synthetic oligonucleotide
uguagccaauucucccaga

SEQ ID NO: 1732625 - RNA, 19 nt, Artificial Sequence
  Description of Artificial Sequence: Synthetic oligonucleotide
guuccuguugcucaguuuu

SEQ ID NO: 1732626 - RNA, 19 nt, Artificial Sequence
  Description of Artificial Sequence: Synthetic oligonucleotide
aggaaccagcauuggguca

SEQ ID NO: 1732627 - RNA, 19 nt, Artificial Sequence
  Description of Artificial Sequence: Synthetic oligonucleotide
agugcaacuccuacucucu

SEQ ID NO: 1732628 - RNA, 19 nt, Artificial Sequence
  Description of Artificial Sequence: Synthetic oligonucleotide
cugguuauauaaaaugauu

SEQ ID NO: 1732629 - RNA, 19 nt, Artificial Sequence
  Description of Artificial Sequence: Synthetic oligonucleotide
aaccuacuuugcuuuuguu

SEQ ID NO: 1732630 - RNA, 19 nt, Artificial Sequence
  Description of Artificial Sequence: Synthetic oligonucleotide
cucccuaaaguauacacuu

SEQ ID NO: 1732631 - RNA, 19 nt, Artificial Sequence
  Description of Artificial Sequence: Synthetic oligonucleotide
aagaagcauaugaugccua

SEQ ID NO: 1732632 - RNA, 19 nt, Artificial Sequence
  Description of Artificial Sequence: Synthetic oligonucleotide
gucuucgugguuauauaca

SEQ ID NO: 1732633 - RNA, 19 nt, Artificial Sequence
  Description of Artificial Sequence: Synthetic oligonucleotide
ugccuauagggguuucaau

SEQ ID NO: 1732634 - RNA, 19 nt, Artificial Sequence
  Description of Artificial Sequence: Synthetic oligonucleotide
uuccuguugcucaguuuuc

SEQ ID NO: 1732635 - RNA, 19 nt, Artificial Sequence
  Description of Artificial Sequence: Synthetic oligonucleotide
uuguuguauuugggaauca

SEQ ID NO: 1732636 - RNA, 19 nt, Artificial Sequence
  Description of Artificial Sequence: Synthetic oligonucleotide
uacuguugguuugcuuuca

SEQ ID NO: 1732637 - RNA, 19 nt, Artificial Sequence
  Description of Artificial Sequence: Synthetic oligonucleotide
caucuauaauacaguuaca

SEQ ID NO: 1732638 - RNA, 19 nt, Artificial Sequence
  Description of Artificial Sequence: Synthetic oligonucleotide
agccuaggagaguuagcgu

SEQ ID NO: 1732639 - RNA, 19 nt, Artificial Sequence
  Description of Artificial Sequence: Synthetic oligonucleotide
gagcaucuauaauacaguu

SEQ ID NO: 1732640 - RNA, 19 nt, Artificial Sequence
  Description of Artificial Sequence: Synthetic oligonucleotide
agggacaauguaaccauaa

SEQ ID NO: 1732641 - RNA, 19 nt, Artificial Sequence
  Description of Artificial Sequence: Synthetic oligonucleotide
agcaucuauaauacaguua

SEQ ID NO: 1732642 - RNA, 19 nt, Artificial Sequence
  Description of Artificial Sequence: Synthetic oligonucleotide
gcguaaguaaaaucaaaua

SEQ ID NO: 1732643 - RNA, 19 nt, Artificial Sequence
  Description of Artificial Sequence: Synthetic oligonucleotide
gcuuucuagaaggcaaagc

SEQ ID NO: 1732644 - RNA, 19 nt, Artificial Sequence
  Description of Artificial Sequence: Synthetic oligonucleotide
cuccauucaugugucacca

SEQ ID NO: 1732645 - RNA, 19 nt, Artificial Sequence
  Description of Artificial Sequence: Synthetic oligonucleotide
caacuccuacucucuuggc

SEQ ID NO: 1732646 - RNA, 19 nt, Artificial Sequence
  Description of Artificial Sequence: Synthetic oligonucleotide
ucccugcuaugauuaucug

SEQ ID NO: 1732647 - RNA, 19 nt, Artificial Sequence
  Description of Artificial Sequence: Synthetic oligonucleotide
uuccagugcagagcccugc

SEQ ID NO: 1732648 - RNA, 19 nt, Artificial Sequence
  Description of Artificial Sequence: Synthetic oligonucleotide
cugagacuucacuaauuaa

SEQ ID NO: 1732649 - RNA, 19 nt, Artificial Sequence
  Description of Artificial Sequence: Synthetic oligonucleotide
ccuuuugagguauuuugca

SEQ ID NO: 1732650 - RNA, 19 nt, Artificial Sequence
  Description of Artificial Sequence: Synthetic oligonucleotide
cccuaaaguauacacuuca

SEQ ID NO: 1732651 - RNA, 19 nt, Artificial Sequence
  Description of Artificial Sequence: Synthetic oligonucleotide
gaugccuauagggguuuca

SEQ ID NO: 1732652 - RNA, 19 nt, Artificial Sequence
  Description of Artificial Sequence: Synthetic oligonucleotide
uacugguuauuaguacaua

SEQ ID NO: 1732653 - RNA, 19 nt, Artificial Sequence
  Description of Artificial Sequence: Synthetic oligonucleotide
ugcgggcugcucacuuucc

SEQ ID NO: 1732654 - RNA, 19 nt, Artificial Sequence
  Description of Artificial Sequence: Synthetic oligonucleotide
cuacucucuuggcucaaca

SEQ ID NO: 1732655 - RNA, 19 nt, Artificial Sequence
  Description of Artificial Sequence: Synthetic oligonucleotide
cuagaaggcaaagcacaca

SEQ ID NO: 1732656 - RNA, 19 nt, Artificial Sequence
  Description of Artificial Sequence: Synthetic oligonucleotide
ccgugucaaauagucaucc

SEQ ID NO: 1732657 - RNA, 19 nt, Artificial Sequence
  Description of Artificial Sequence: Synthetic oligonucleotide
gggguuucaauuucacaaa

SEQ ID NO: 1732658 - RNA, 19 nt, Artificial Sequence
  Description of Artificial Sequence: Synthetic oligonucleotide
auacucccuaaaguauaca

SEQ ID NO: 1732659 - RNA, 19 nt, Artificial Sequence
  Description of Artificial Sequence: Synthetic oligonucleotide
guggaggaaccagcauugg

SEQ ID NO: 1732660 - RNA, 19 nt, Artificial Sequence
  Description of Artificial Sequence: Synthetic oligonucleotide
augccuauagggguuucaa

SEQ ID NO: 1732661 - RNA, 19 nt, Artificial Sequence
  Description of Artificial Sequence: Synthetic oligonucleotide
cacuuauuauucggucuuc

SEQ ID NO: 1732662 - RNA, 19 nt, Artificial Sequence
  Description of Artificial Sequence: Synthetic oligonucleotide
cuagaguaucugcaaagau

SEQ ID NO: 1732663 - RNA, 19 nt, Artificial Sequence
  Description of Artificial Sequence: Synthetic oligonucleotide
gggaaucagaauucugcaa

SEQ ID NO: 1732664 - RNA, 19 nt, Artificial Sequence
  Description of Artificial Sequence: Synthetic oligonucleotide
auucggucuucgugguuau

SEQ ID NO: 1732665 - RNA, 19 nt, Artificial Sequence
  Description of Artificial Sequence: Synthetic oligonucleotide
caguuaggguuuuauuugu

SEQ ID NO: 1732666 - RNA, 19 nt, Artificial Sequence
  Description of Artificial Sequence: Synthetic oligonucleotide
gccuaggagaguuagcgua

SEQ ID NO: 1732667 - RNA, 19 nt, Artificial Sequence
  Description of Artificial Sequence: Synthetic oligonucleotide
cuacuuugcuuuuguugaa

SEQ ID NO: 1732668 - RNA, 19 nt, Artificial Sequence
  Description of Artificial Sequence: Synthetic oligonucleotide
gaagcauaugaugccuaua

SEQ ID NO: 1732669 - RNA, 19 nt, Artificial Sequence
  Description of Artificial Sequence: Synthetic oligonucleotide
ggaggaaccagcauugggu

SEQ ID NO: 1732670 - RNA, 19 nt, Artificial Sequence
  Description of Artificial Sequence: Synthetic oligonucleotide
gaguaucugcaaagauuuc

SEQ ID NO: 1732671 - RNA, 19 nt, Artificial Sequence
  Description of Artificial Sequence: Synthetic oligonucleotide
ccaguucucaucaaagugu

SEQ ID NO: 1732672 - RNA, 19 nt, Artificial Sequence
  Description of Artificial Sequence: Synthetic oligonucleotide
gagcccugcgggcugcuca

SEQ ID NO: 1732673 - RNA, 19 nt, Artificial Sequence
  Description of Artificial Sequence: Synthetic oligonucleotide
gccuuaaccuguucaguuc

SEQ ID NO: 1732674 - RNA, 19 nt, Artificial Sequence
  Description of Artificial Sequence: Synthetic oligonucleotide
ccaauucucccagaacaag

SEQ ID NO: 1732675 - RNA, 19 nt, Artificial Sequence
  Description of Artificial Sequence: Synthetic oligonucleotide
cugcgggcugcucacuuuc

SEQ ID NO: 1732676 - RNA, 19 nt, Artificial Sequence
  Description of Artificial Sequence: Synthetic oligonucleotide
augacccuucuguuauuua

SEQ ID NO: 1732677 - RNA, 19 nt, Artificial Sequence
  Description of Artificial Sequence: Synthetic oligonucleotide
ggcuuucuagaaggcaaag

SEQ ID NO: 1732678 - RNA, 19 nt, Artificial Sequence
  Description of Artificial Sequence: Synthetic oligonucleotide
gaguuagcguaaguaaaau

SEQ ID NO: 1732679 - RNA, 19 nt, Artificial Sequence
  Description of Artificial Sequence: Synthetic oligonucleotide
caaguugugaaaagcucuu

SEQ ID NO: 1732680 - RNA, 19 nt, Artificial Sequence
  Description of Artificial Sequence: Synthetic oligonucleotide
cucugaucugcugguccag

SEQ ID NO: 1732681 - RNA, 19 nt, Artificial Sequence
  Description of Artificial Sequence: Synthetic oligonucleotide
cuccuacucucuuggcuca

SEQ ID NO: 1732682 - RNA, 19 nt, Artificial Sequence
  Description of Artificial Sequence: Synthetic oligonucleotide
gugguuauauacaccaguu

SEQ ID NO: 1732683 - RNA, 19 nt, Artificial Sequence
  Description of Artificial Sequence: Synthetic oligonucleotide
caauucuaaaauagucauu

SEQ ID NO: 1732684 - RNA, 19 nt, Artificial Sequence
  Description of Artificial Sequence: Synthetic oligonucleotide
cauuaccacauaaccuacu

SEQ ID NO: 1732685 - RNA, 19 nt, Artificial Sequence
  Description of Artificial Sequence: Synthetic oligonucleotide
ggccaaaaccucucugauc

SEQ ID NO: 1732686 - RNA, 19 nt, Artificial Sequence
  Description of Artificial Sequence: Synthetic oligonucleotide
uccuuauguccagcaguuc

SEQ ID NO: 1732687 - RNA, 19 nt, Artificial Sequence
  Description of Artificial Sequence: Synthetic oligonucleotide
cuguuauuuacuguugguu

SEQ ID NO: 1732688 - RNA, 19 nt, Artificial Sequence
  Description of Artificial Sequence: Synthetic oligonucleotide
auacaccaguucucaucaa

SEQ ID NO: 1732689 - RNA, 19 nt, Artificial Sequence
  Description of Artificial Sequence: Synthetic oligonucleotide
gccuauagggguuucaauu

SEQ ID NO: 1732690 - RNA, 19 nt, Artificial Sequence
  Description of Artificial Sequence: Synthetic oligonucleotide
caucaaagugucccuuucu

SEQ ID NO: 1732691 - RNA, 19 nt, Artificial Sequence
  Description of Artificial Sequence: Synthetic oligonucleotide
gaaaucagccuaggagagu

SEQ ID NO: 1732692 - RNA, 19 nt, Artificial Sequence
  Description of Artificial Sequence: Synthetic oligonucleotide
aucagccgugucaaauagu

SEQ ID NO: 1732693 - RNA, 19 nt, Artificial Sequence
  Description of Artificial Sequence: Synthetic oligonucleotide
ccuaaaguauacacuucaa

SEQ ID NO: 1732694 - RNA, 19 nt, Artificial Sequence
  Description of Artificial Sequence: Synthetic oligonucleotide
gggucaguaccuucuucca

SEQ ID NO: 1732695 - RNA, 19 nt, Artificial Sequence
  Description of Artificial Sequence: Synthetic oligonucleotide
ccucuaguguuuggaaagc

SEQ ID NO: 1732696 - RNA, 19 nt, Artificial Sequence
  Description of Artificial Sequence: Synthetic oligonucleotide
uggcuucaacuugaagaua

SEQ ID NO: 1732697 - RNA, 19 nt, Artificial Sequence
  Description of Artificial Sequence: Synthetic oligonucleotide
agcauugggucaguaccuu

SEQ ID NO: 1732698 - RNA, 19 nt, Artificial Sequence
  Description of Artificial Sequence: Synthetic oligonucleotide
ccauucaugugucaccaaa

SEQ ID NO: 1732699 - RNA, 19 nt, Artificial Sequence
  Description of Artificial Sequence: Synthetic oligonucleotide
ggucaguaccuucuuccaa

SEQ ID NO: 1732700 - RNA, 19 nt, Artificial Sequence
  Description of Artificial Sequence: Synthetic oligonucleotide
cuguucaguucguuccuua

SEQ ID NO: 1732701 - RNA, 19 nt, Artificial Sequence
  Description of Artificial Sequence: Synthetic oligonucleotide
aaucagccuaggagaguua

SEQ ID NO: 1732702 - RNA, 19 nt, Artificial Sequence
  Description of Artificial Sequence: Synthetic oligonucleotide
cagcauugggucaguaccu

SEQ ID NO: 1732703 - RNA, 19 nt, Artificial Sequence
  Description of Artificial Sequence: Synthetic oligonucleotide
cuuaaccuguucaguucgu

SEQ ID NO: 1732704 - RNA, 19 nt, Artificial Sequence
  Description of Artificial Sequence: Synthetic oligonucleotide
augaugccuauagggguuu

SEQ ID NO: 1732705 - RNA, 19 nt, Artificial Sequence
  Description of Artificial Sequence: Synthetic oligonucleotide
cguuccuuauguccagcag

SEQ ID NO: 1732706 - RNA, 19 nt, Artificial Sequence
  Description of Artificial Sequence: Synthetic oligonucleotide
cucacagguggaggaacca

SEQ ID NO: 1732707 - RNA, 19 nt, Artificial Sequence
  Description of Artificial Sequence: Synthetic oligonucleotide
ugaugccuauagggguuuc

SEQ ID NO: 1732708 - RNA, 19 nt, Artificial Sequence
  Description of Artificial Sequence: Synthetic oligonucleotide
cauuuauaauuggcuucaa

SEQ ID NO: 1732709 - RNA, 19 nt, Artificial Sequence
  Description of Artificial Sequence: Synthetic oligonucleotide
gcauugggucaguaccuuc

SEQ ID NO: 1732710 - RNA, 19 nt, Artificial Sequence
  Description of Artificial Sequence: Synthetic oligonucleotide
gacugagacuucacuaauu

SEQ ID NO: 1732711 - RNA, 19 nt, Artificial Sequence
  Description of Artificial Sequence: Synthetic oligonucleotide
cacuucaauuuguuguauu

SEQ ID NO: 1732712 - RNA, 19 nt, Artificial Sequence
  Description of Artificial Sequence: Synthetic oligonucleotide
ugcacacaguuaggguuuu

SEQ ID NO: 1732713 - RNA, 19 nt, Artificial Sequence
  Description of Artificial Sequence: Synthetic oligonucleotide
aaccagcauugggucagua

SEQ ID NO: 1732714 - RNA, 19 nt, Artificial Sequence
  Description of Artificial Sequence: Synthetic oligonucleotide
cugcuaugauuaucugugu

SEQ ID NO: 1732715 - RNA, 19 nt, Artificial Sequence
  Description of Artificial Sequence: Synthetic oligonucleotide
uccuacucucuuggcucaa

SEQ ID NO: 1732716 - RNA, 19 nt, Artificial Sequence
  Description of Artificial Sequence: Synthetic oligonucleotide
gcgggcugcucacuuuccc

SEQ ID NO: 1732717 - RNA, 19 nt, Artificial Sequence
  Description of Artificial Sequence: Synthetic oligonucleotide
gggaagagggcacaacauu

SEQ ID NO: 1732718 - RNA, 19 nt, Artificial Sequence
  Description of Artificial Sequence: Synthetic oligonucleotide
ccuauagggguuucaauuu

SEQ ID NO: 1732719 - RNA, 19 nt, Artificial Sequence
  Description of Artificial Sequence: Synthetic oligonucleotide
ccaaaaccucucugaucug

SEQ ID NO: 1732720 - RNA, 19 nt, Artificial Sequence
  Description of Artificial Sequence: Synthetic oligonucleotide
cgugguuauauacaccagu

SEQ ID NO: 1732721 - RNA, 19 nt, Artificial Sequence
  Description of Artificial Sequence: Synthetic oligonucleotide
gccgugucaaauagucauc

SEQ ID NO: 1732722 - RNA, 19 nt, Artificial Sequence
  Description of Artificial Sequence: Synthetic oligonucleotide
gcucaaagauggcuuucua

SEQ ID NO: 1732723 - RNA, 19 nt, Artificial Sequence
  Description of Artificial Sequence: Synthetic oligonucleotide
gcucacuuucccacuugca

SEQ ID NO: 1732724 - RNA, 19 nt, Artificial Sequence
  Description of Artificial Sequence: Synthetic oligonucleotide
gguuugcuuucagaagacu

SEQ ID NO: 1732725 - RNA, 19 nt, Artificial Sequence
  Description of Artificial Sequence: Synthetic oligonucleotide
cccugcuaugauuaucugu

SEQ ID NO: 1732726 - RNA, 19 nt, Artificial Sequence
  Description of Artificial Sequence: Synthetic oligonucleotide
ccccucuaguguuuggaaa

SEQ ID NO: 1732727 - RNA, 19 nt, Artificial Sequence
  Description of Artificial Sequence: Synthetic oligonucleotide
cgugucaaauagucaucca

SEQ ID NO: 1732728 - RNA, 19 nt, Artificial Sequence
  Description of Artificial Sequence: Synthetic oligonucleotide
ggcaaagcacacauagauu

SEQ ID NO: 1732729 - RNA, 19 nt, Artificial Sequence
  Description of Artificial Sequence: Synthetic oligonucleotide
gcaguccugguacuguuuu

SEQ ID NO: 1732730 - RNA, 19 nt, Artificial Sequence
  Description of Artificial Sequence: Synthetic oligonucleotide
cggucuucgugguuauaua

SEQ ID NO: 1732731 - RNA, 19 nt, Artificial Sequence
  Description of Artificial Sequence: Synthetic oligonucleotide
cugguccaguucacuuauu

SEQ ID NO: 1732732 - RNA, 19 nt, Artificial Sequence
  Description of Artificial Sequence: Synthetic oligonucleotide
ccuguucaguucguuccuu

SEQ ID NO: 1732733 - RNA, 19 nt, Artificial Sequence
  Description of Artificial Sequence: Synthetic oligonucleotide
ccugcgggcugcucacuuu

SEQ ID NO: 1732734 - RNA, 19 nt, Artificial Sequence
  Description of Artificial Sequence: Synthetic oligonucleotide
aacucgagcacucaaaugu

SEQ ID NO: 1732735 - RNA, 19 nt, Artificial Sequence
  Description of Artificial Sequence: Synthetic oligonucleotide
gugauuacugcucaaagcc

SEQ ID NO: 1732736 - RNA, 19 nt, Artificial Sequence
  Description of Artificial Sequence: Synthetic oligonucleotide
gaguuaaacaacuccuugg

SEQ ID NO: 1732737 - RNA, 19 nt, Artificial Sequence
  Description of Artificial Sequence: Synthetic oligonucleotide
auuccauucacgcuugcgg

SEQ ID NO: 1732738 - RNA, 19 nt, Artificial Sequence
  Description of Artificial Sequence: Synthetic oligonucleotide
uuagggaucuuccugcuug

SEQ ID NO: 1732739 - RNA, 19 nt, Artificial Sequence
  Description of Artificial Sequence: Synthetic oligonucleotide
uuaaacaacuccuuggaua

SEQ ID NO: 1732740 - RNA, 19 nt, Artificial Sequence
  Description of Artificial Sequence: Synthetic oligonucleotide
aaacuguuugaugaggcuc

SEQ ID NO: 1732741 - RNA, 19 nt, Artificial Sequence
  Description of Artificial Sequence: Synthetic oligonucleotide
auagaaaagauuccauuca

SEQ ID NO: 1732742 - RNA, 19 nt, Artificial Sequence
  Description of Artificial Sequence: Synthetic oligonucleotide
agcuuagggaucuuccugc

SEQ ID NO: 1732743 - RNA, 19 nt, Artificial Sequence
  Description of Artificial Sequence: Synthetic oligonucleotide
aguacuuagcgauggcagc

SEQ ID NO: 1732744 - RNA, 19 nt, Artificial Sequence
  Description of Artificial Sequence: Synthetic oligonucleotide
aaaggggucagguacuuga

SEQ ID NO: 1732745 - RNA, 19 nt, Artificial Sequence
  Description of Artificial Sequence: Synthetic oligonucleotide
cuugaagccucucucaggg

SEQ ID NO: 1732746 - RNA, 19 nt, Artificial Sequence
  Description of Artificial Sequence: Synthetic oligonucleotide
uacuugaccacaacagcgg

SEQ ID NO: 1732747 - RNA, 19 nt, Artificial Sequence
  Description of Artificial Sequence: Synthetic oligonucleotide
gucuccaaaguacuuagcg

SEQ ID NO: 1732748 - RNA, 19 nt, Artificial Sequence
  Description of Artificial Sequence: Synthetic oligonucleotide
ucaucauaucugcugaagc

SEQ ID NO: 1732749 - RNA, 19 nt, Artificial Sequence
  Description of Artificial Sequence: Synthetic oligonucleotide
ucugauagaaaagauucca

SEQ ID NO: 1732750 - RNA, 19 nt, Artificial Sequence
  Description of Artificial Sequence: Synthetic oligonucleotide
uaaacaacuccuuggauau

SEQ ID NO: 1732751 - RNA, 19 nt, Artificial Sequence
  Description of Artificial Sequence: Synthetic oligonucleotide
aucauaucugcugaagccc

SEQ ID NO: 1732752 - RNA, 19 nt, Artificial Sequence
  Description of Artificial Sequence: Synthetic oligonucleotide
ucuuacuccagcuacugcu

SEQ ID NO: 1732753 - RNA, 19 nt, Artificial Sequence
  Description of Artificial Sequence: Synthetic oligonucleotide
guagaaaggggucagguac

SEQ ID NO: 1732754 - RNA, 19 nt, Artificial Sequence
  Description of Artificial Sequence: Synthetic oligonucleotide
acaguucuggaucgaagcc

SEQ ID NO: 1732755 - RNA, 19 nt, Artificial Sequence
  Description of Artificial Sequence: Synthetic oligonucleotide
caucauaucugcugaagcc

SEQ ID NO: 1732756 - RNA, 19 nt, Artificial Sequence
  Description of Artificial Sequence: Synthetic oligonucleotide
aacagcggcagccucuuuc

SEQ ID NO: 1732757 - RNA, 19 nt, Artificial Sequence
  Description of Artificial Sequence: Synthetic oligonucleotide
ugugcagucuucuggcucg

SEQ ID NO: 1732758 - RNA, 19 nt, Artificial Sequence
  Description of Artificial Sequence: Synthetic oligonucleotide
cuucuuuagaacacuggcc

SEQ ID NO: 1732759 - RNA, 19 nt, Artificial Sequence
  Description of Artificial Sequence: Synthetic oligonucleotide
uagaaaagauuccauucac

SEQ ID NO: 1732760 - RNA, 19 nt, Artificial Sequence
  Description of Artificial Sequence: Synthetic oligonucleotide
aaaacuguuugaugaggcu

SEQ ID NO: 1732761 - RNA, 19 nt, Artificial Sequence
  Description of Artificial Sequence: Synthetic oligonucleotide
agugcugugaucacuggcc

SEQ ID NO: 1732762 - RNA, 19 nt, Artificial Sequence
  Description of Artificial Sequence: Synthetic oligonucleotide
uagagugcuaggcugaccu

SEQ ID NO: 1732763 - RNA, 19 nt, Artificial Sequence
  Description of Artificial Sequence: Synthetic oligonucleotide
cuugugugcagucuucugg

SEQ ID NO: 1732764 - RNA, 19 nt, Artificial Sequence
  Description of Artificial Sequence: Synthetic oligonucleotide
agcacugcaacucuuggug

SEQ ID NO: 1732765 - RNA, 19 nt, Artificial Sequence
  Description of Artificial Sequence: Synthetic oligonucleotide
aacucuuggugccaccguc

SEQ ID NO: 1732766 - RNA, 19 nt, Artificial Sequence
  Description of Artificial Sequence: Synthetic oligonucleotide
uuccauucacgcuugcggg

SEQ ID NO: 1732767 - RNA, 19 nt, Artificial Sequence
  Description of Artificial Sequence: Synthetic oligonucleotide
ugaucacuggccaaggcac

SEQ ID NO: 1732768 - RNA, 19 nt, Artificial Sequence
  Description of Artificial Sequence: Synthetic oligonucleotide
acgccagucagcuucacuc

SEQ ID NO: 1732769 - RNA, 19 nt, Artificial Sequence
  Description of Artificial Sequence: Synthetic oligonucleotide
ucuggaucgaagccguucc

SEQ ID NO: 1732770 - RNA, 19 nt, Artificial Sequence
  Description of Artificial Sequence: Synthetic oligonucleotide
ugaccuucaggacagcugu

SEQ ID NO: 1732771 - RNA, 19 nt, Artificial Sequence
  Description of Artificial Sequence: Synthetic oligonucleotide
uggugauuacugcucaaag

SEQ ID NO: 1732772 - RNA, 19 nt, Artificial Sequence
  Description of Artificial Sequence: Synthetic oligonucleotide
ucauaucugcugaagcccc

SEQ ID NO: 1732773 - RNA, 19 nt, Artificial Sequence
  Description of Artificial Sequence: Synthetic oligonucleotide
ucaccuuauucucagugcu

SEQ ID NO: 1732774 - RNA, 19 nt, Artificial Sequence
  Description of Artificial Sequence: Synthetic oligonucleotide
acucaaaugugccugggcu

SEQ ID NO: 1732775 - RNA, 19 nt, Artificial Sequence
  Description of Artificial Sequence: Synthetic oligonucleotide
uagaacacuggccuuguac

SEQ ID NO: 1732776 - RNA, 19 nt, Artificial Sequence
  Description of Artificial Sequence: Synthetic oligonucleotide
acuugaccacaacagcggc

SEQ ID NO: 1732777 - RNA, 19 nt, Artificial Sequence
  Description of Artificial Sequence: Synthetic oligonucleotide
aaaguacuuagcgauggca

SEQ ID NO: 1732778 - RNA, 19 nt, Artificial Sequence
  Description of Artificial Sequence: Synthetic oligonucleotide
ugauagaaaagauuccauu

SEQ ID NO: 1732779 - RNA, 19 nt, Artificial Sequence
  Description of Artificial Sequence: Synthetic oligonucleotide
caaagccuccuccagaagc

SEQ ID NO: 1732780 - RNA, 19 nt, Artificial Sequence
  Description of Artificial Sequence: Synthetic oligonucleotide
ugaagccucucucagggga

SEQ ID NO: 1732781 - RNA, 19 nt, Artificial Sequence
  Description of Artificial Sequence: Synthetic oligonucleotide
ucuccaaaguacuuagcga

SEQ ID NO: 1732782 - RNA, 19 nt, Artificial Sequence
  Description of Artificial Sequence: Synthetic oligonucleotide
cuuagcgauggcagcaugg

SEQ ID NO: 1732783 - RNA, 19 nt, Artificial Sequence
  Description of Artificial Sequence: Synthetic oligonucleotide
gagcugaccauccuuggag

SEQ ID NO: 1732784 - RNA, 19 nt, Artificial Sequence
  Description of Artificial Sequence: Synthetic oligonucleotide
auagucauugggcucugag

SEQ ID NO: 1732785 - RNA, 19 nt, Artificial Sequence
  Description of Artificial Sequence: Synthetic oligonucleotide
gaagccguuccccuggaag

SEQ ID NO: 1732786 - RNA, 19 nt, Artificial Sequence
  Description of Artificial Sequence: Synthetic oligonucleotide
uuggcauuccggaaugccc

SEQ ID NO: 1732787 - RNA, 19 nt, Artificial Sequence
  Description of Artificial Sequence: Synthetic oligonucleotide
uccaggagaguuaaacaac

SEQ ID NO: 1732788 - RNA, 19 nt, Artificial Sequence
  Description of Artificial Sequence: Synthetic oligonucleotide
gaugccaggagcugagagc

SEQ ID NO: 1732789 - RNA, 19 nt, Artificial Sequence
  Description of Artificial Sequence: Synthetic oligonucleotide
ugauuacugcucaaagccu

SEQ ID NO: 1732790 - RNA, 19 nt, Artificial Sequence
  Description of Artificial Sequence: Synthetic oligonucleotide
agguugaccaucuuggcau

SEQ ID NO: 1732791 - RNA, 19 nt, Artificial Sequence
  Description of Artificial Sequence: Synthetic oligonucleotide
caagcuucuuccuuacggc

SEQ ID NO: 1732792 - RNA, 19 nt, Artificial Sequence
  Description of Artificial Sequence: Synthetic oligonucleotide
ucgagcacucaaaugugcc

SEQ ID NO: 1732793 - RNA, 19 nt, Artificial Sequence
  Description of Artificial Sequence: Synthetic oligonucleotide
ucugcggccucccucauac

SEQ ID NO: 1732794 - RNA, 19 nt, Artificial Sequence
  Description of Artificial Sequence: Synthetic oligonucleotide
ugaacucgagcacucaaau

SEQ ID NO: 1732795 - RNA, 19 nt, Artificial Sequence
  Description of Artificial Sequence: Synthetic oligonucleotide
uggcauuccggaaugcccc

SEQ ID NO: 1732796 - RNA, 19 nt, Artificial Sequence
  Description of Artificial Sequence: Synthetic oligonucleotide
uugugugcagucuucuggc

SEQ ID NO: 1732797 - RNA, 19 nt, Artificial Sequence
  Description of Artificial Sequence: Synthetic oligonucleotide
uaugaaccugcccuccuug

SEQ ID NO: 1732798 - RNA, 19 nt, Artificial Sequence
  Description of Artificial Sequence: Synthetic oligonucleotide
ucaaaugugccugggcucc

SEQ ID NO: 1732799 - RNA, 19 nt, Artificial Sequence
  Description of Artificial Sequence: Synthetic oligonucleotide
ugcuugaagccucucucag

SEQ ID NO: 1732800 - RNA, 19 nt, Artificial Sequence
  Description of Artificial Sequence: Synthetic oligonucleotide
auucucagugcugugauca

SEQ ID NO: 1732801 - RNA, 19 nt, Artificial Sequence
  Description of Artificial Sequence: Synthetic oligonucleotide
uuauucucagugcugugau

SEQ ID NO: 1732802 - RNA, 19 nt, Artificial Sequence
  Description of Artificial Sequence: Synthetic oligonucleotide
ugaccaucuuggcauuccg

SEQ ID NO: 1732803 - RNA, 19 nt, Artificial Sequence
  Description of Artificial Sequence: Synthetic oligonucleotide
cauaggucacgccagucag

SEQ ID NO: 1732804 - RNA, 19 nt, Artificial Sequence
  Description of Artificial Sequence: Synthetic oligonucleotide
gacacucagucugaacucg

SEQ ID NO: 1732805 - RNA, 19 nt, Artificial Sequence
  Description of Artificial Sequence: Synthetic oligonucleotide
agguacuugaccacaacag

SEQ ID NO: 1732806 - RNA, 19 nt, Artificial Sequence
  Description of Artificial Sequence: Synthetic oligonucleotide
acggcugcaggacucuggc

SEQ ID NO: 1732807 - RNA, 19 nt, Artificial Sequence
  Description of Artificial Sequence: Synthetic oligonucleotide
ccagcuacugcuaugcucc

SEQ ID NO: 1732808 - RNA, 19 nt, Artificial Sequence
  Description of Artificial Sequence: Synthetic oligonucleotide
uggugcgucuccaaaguac

SEQ ID NO: 1732809 - RNA, 19 nt, Artificial Sequence
  Description of Artificial Sequence: Synthetic oligonucleotide
cagcaggucaucucugugg

SEQ ID NO: 1732810 - RNA, 19 nt, Artificial Sequence
  Description of Artificial Sequence: Synthetic oligonucleotide
uccggaaugccccaugcuc

SEQ ID NO: 1732811 - RNA, 19 nt, Artificial Sequence
  Description of Artificial Sequence: Synthetic oligonucleotide
agaugccaggagcugagag

SEQ ID NO: 1732812 - RNA, 19 nt, Artificial Sequence
  Description of Artificial Sequence: Synthetic oligonucleotide
gacacauaggucacgccag

SEQ ID NO: 1732813 - RNA, 19 nt, Artificial Sequence
  Description of Artificial Sequence: Synthetic oligonucleotide
ucagucugaacucgagcac

SEQ ID NO: 1732814 - RNA, 19 nt, Artificial Sequence
  Description of Artificial Sequence: Synthetic oligonucleotide
ugcggccucccucauacag

SEQ ID NO: 1732815 - RNA, 19 nt, Artificial Sequence
  Description of Artificial Sequence: Synthetic oligonucleotide
cuuuggcgcaggcaggugg

SEQ ID NO: 1732816 - RNA, 19 nt, Artificial Sequence
  Description of Artificial Sequence: Synthetic oligonucleotide
acauaggucacgccaguca

SEQ ID NO: 1732817 - RNA, 19 nt, Artificial Sequence
  Description of Artificial Sequence: Synthetic oligonucleotide
gauuccauucacgcuugcg

SEQ ID NO: 1732818 - RNA, 19 nt, Artificial Sequence
  Description of Artificial Sequence: Synthetic oligonucleotide
ucagcuucacucucacagc

SEQ ID NO: 1732819 - RNA, 19 nt, Artificial Sequence
  Description of Artificial Sequence: Synthetic oligonucleotide
uacugcuaugcuccaagcu

SEQ ID NO: 1732820 - RNA, 19 nt, Artificial Sequence
  Description of Artificial Sequence: Synthetic oligonucleotide
uucacacuccuuccaggag

SEQ ID NO: 1732821 - RNA, 19 nt, Artificial Sequence
  Description of Artificial Sequence: Synthetic oligonucleotide
ugacgucuccugaucuugg

SEQ ID NO: 1732822 - RNA, 19 nt, Artificial Sequence
  Description of Artificial Sequence: Synthetic oligonucleotide
gagcuuagggaucuuccug

SEQ ID NO: 1732823 - RNA, 19 nt, Artificial Sequence
  Description of Artificial Sequence: Synthetic oligonucleotide
uccuguagagugcuaggcu

SEQ ID NO: 1732824 - RNA, 19 nt, Artificial Sequence
  Description of Artificial Sequence: Synthetic oligonucleotide
ugagcuuagggaucuuccu

SEQ ID NO: 1732825 - RNA, 19 nt, Artificial Sequence
  Description of Artificial Sequence: Synthetic oligonucleotide
cuuuagaacacuggccuug

SEQ ID NO: 1732826 - RNA, 19 nt, Artificial Sequence
  Description of Artificial Sequence: Synthetic oligonucleotide
cagcuucacucucacagcg

SEQ ID NO: 1732827 - RNA, 19 nt, Artificial Sequence
  Description of Artificial Sequence: Synthetic oligonucleotide
aucucugcccucgucaccg

SEQ ID NO: 1732828 - RNA, 19 nt, Artificial Sequence
  Description of Artificial Sequence: Synthetic oligonucleotide
ugcagccuggugauuacug

SEQ ID NO: 1732829 - RNA, 19 nt, Artificial Sequence
  Description of Artificial Sequence: Synthetic oligonucleotide
ucaggggacagucuucauc

SEQ ID NO: 1732830 - RNA, 19 nt, Artificial Sequence
  Description of Artificial Sequence: Synthetic oligonucleotide
gaacucgagcacucaaaug

SEQ ID NO: 1732831 - RNA, 19 nt, Artificial Sequence
  Description of Artificial Sequence: Synthetic oligonucleotide
caggucuuacuccagcuac

SEQ ID NO: 1732832 - RNA, 19 nt, Artificial Sequence
  Description of Artificial Sequence: Synthetic oligonucleotide
uuagcgauggcagcauggc

SEQ ID NO: 1732833 - RNA, 19 nt, Artificial Sequence
  Description of Artificial Sequence: Synthetic oligonucleotide
ugcuucugauagaaaagau

SEQ ID NO: 1732834 - RNA, 19 nt, Artificial Sequence
  Description of Artificial Sequence: Synthetic oligonucleotide
uguagaaaggggucaggua

SEQ ID NO: 1732835 - RNA, 19 nt, Artificial Sequence
  Description of Artificial Sequence: Synthetic oligonucleotide
cagccuuuggcgcaggcag

SEQ ID NO: 1732836 - RNA, 19 nt, Artificial Sequence
  Description of Artificial Sequence: Synthetic oligonucleotide
cugagagcuggcaauguuc

SEQ ID NO: 1732837 - RNA, 19 nt, Artificial Sequence
  Description of Artificial Sequence: Synthetic oligonucleotide
ccaagcuucuuccuuacgg

SEQ ID NO: 1732838 - RNA, 19 nt, Artificial Sequence
  Description of Artificial Sequence: Synthetic oligonucleotide
ugugggacacauaggucac

SEQ ID NO: 1732839 - RNA, 19 nt, Artificial Sequence
  Description of Artificial Sequence: Synthetic oligonucleotide
caguucuggaucgaagccg

SEQ ID NO: 1732840 - RNA, 19 nt, Artificial Sequence
  Description of Artificial Sequence: Synthetic oligonucleotide
uacggcugcaggacucugg

SEQ ID NO: 1732841 - RNA, 19 nt, Artificial Sequence
  Description of Artificial Sequence: Synthetic oligonucleotide
uuugcccuugcgcaggcuc

SEQ ID NO: 1732842 - RNA, 19 nt, Artificial Sequence
  Description of Artificial Sequence: Synthetic oligonucleotide
cucgagcacucaaaugugc

SEQ ID NO: 1732843 - RNA, 19 nt, Artificial Sequence
  Description of Artificial Sequence: Synthetic oligonucleotide
cuaugcuccaagcuucuuc

SEQ ID NO: 1732844 - RNA, 19 nt, Artificial Sequence
  Description of Artificial Sequence: Synthetic oligonucleotide
ugagcaggugcuuggcccc

SEQ ID NO: 1732845 - RNA, 19 nt, Artificial Sequence
  Description of Artificial Sequence: Synthetic oligonucleotide
uccagcuacugcuaugcuc

SEQ ID NO: 1732846 - RNA, 19 nt, Artificial Sequence
  Description of Artificial Sequence: Synthetic oligonucleotide
cacugcaacucuuggugcc

SEQ ID NO: 1732847 - RNA, 19 nt, Artificial Sequence
  Description of Artificial Sequence: Synthetic oligonucleotide
uccauucacgcuugcgggc

SEQ ID NO: 1732848 - RNA, 19 nt, Artificial Sequence
  Description of Artificial Sequence: Synthetic oligonucleotide
cauaucugcugaagccccg

SEQ ID NO: 1732849 - RNA, 19 nt, Artificial Sequence
  Description of Artificial Sequence: Synthetic oligonucleotide
cucaaaugugccugggcuc

SEQ ID NO: 1732850 - RNA, 19 nt, Artificial Sequence
  Description of Artificial Sequence: Synthetic oligonucleotide
ucucucaggggacagucuu

SEQ ID NO: 1732851 - RNA, 19 nt, Artificial Sequence
  Description of Artificial Sequence: Synthetic oligonucleotide
gugaucacuggccaaggca

SEQ ID NO: 1732852 - RNA, 19 nt, Artificial Sequence
  Description of Artificial Sequence: Synthetic oligonucleotide
cuucaggacagcuguggac

SEQ ID NO: 1732853 - RNA, 19 nt, Artificial Sequence
  Description of Artificial Sequence: Synthetic oligonucleotide
cugaccuucaggacagcug

SEQ ID NO: 1732854 - RNA, 19 nt, Artificial Sequence
  Description of Artificial Sequence: Synthetic oligonucleotide
cugcuaugcuccaagcuuc

SEQ ID NO: 1732855 - RNA, 19 nt, Artificial Sequence
  Description of Artificial Sequence: Synthetic oligonucleotide
ucucacagcgggcacgauc

SEQ ID NO: 1732856 - RNA, 19 nt, Artificial Sequence
  Description of Artificial Sequence: Synthetic oligonucleotide
agguggugcgucuccaaag

SEQ ID NO: 1732857 - RNA, 19 nt, Artificial Sequence
  Description of Artificial Sequence: Synthetic oligonucleotide
ucugugggacacauagguc

SEQ ID NO: 1732858 - RNA, 19 nt, Artificial Sequence
  Description of Artificial Sequence: Synthetic oligonucleotide
uccuuguagaaagggguca

SEQ ID NO: 1732859 - RNA, 19 nt, Artificial Sequence
  Description of Artificial Sequence: Synthetic oligonucleotide
ggugaauucuucugucuug

SEQ ID NO: 1732860 - RNA, 19 nt, Artificial Sequence
  Description of Artificial Sequence: Synthetic oligonucleotide
aagauuccauucacgcuug

SEQ ID NO: 1732861 - RNA, 19 nt, Artificial Sequence
  Description of Artificial Sequence: Synthetic oligonucleotide
acgcuugcgggccucaucu

SEQ ID NO: 1732862 - RNA, 19 nt, Artificial Sequence
  Description of Artificial Sequence: Synthetic oligonucleotide
accuucuuuagaacacugg

SEQ ID NO: 1732863 - RNA, 19 nt, Artificial Sequence
  Description of Artificial Sequence: Synthetic oligonucleotide
ugggacacauaggucacgc

SEQ ID NO: 1732864 - RNA, 19 nt, Artificial Sequence
  Description of Artificial Sequence: Synthetic oligonucleotide
accuuauucucagugcugu

SEQ ID NO: 1732865 - RNA, 19 nt, Artificial Sequence
  Description of Artificial Sequence: Synthetic oligonucleotide
cacacuccuuccaggagag

SEQ ID NO: 1732866 - RNA, 19 nt, Artificial Sequence
  Description of Artificial Sequence: Synthetic oligonucleotide
uaggucacgccagucagcu

SEQ ID NO: 1732867 - RNA, 19 nt, Artificial Sequence
  Description of Artificial Sequence: Synthetic oligonucleotide
augccaggagcugagagcu

SEQ ID NO: 1732868 - RNA, 19 nt, Artificial Sequence
  Description of Artificial Sequence: Synthetic oligonucleotide
cuuggcauuccggaaugcc

SEQ ID NO: 1732869 - RNA, 19 nt, Artificial Sequence
  Description of Artificial Sequence: Synthetic oligonucleotide
uccugcuugaagccucucu

SEQ ID NO: 1732870 - RNA, 19 nt, Artificial Sequence
  Description of Artificial Sequence: Synthetic oligonucleotide
ggcaauguucuccagucac

SEQ ID NO: 1732871 - RNA, 19 nt, Artificial Sequence
  Description of Artificial Sequence: Synthetic oligonucleotide
agauuccauucacgcuugc

SEQ ID NO: 1732872 - RNA, 19 nt, Artificial Sequence
  Description of Artificial Sequence: Synthetic oligonucleotide
ucugagggcucaaccccag

SEQ ID NO: 1732873 - RNA, 19 nt, Artificial Sequence
  Description of Artificial Sequence: Synthetic oligonucleotide
aacuugugugcagucuucu

SEQ ID NO: 1732874 - RNA, 19 nt, Artificial Sequence
  Description of Artificial Sequence: Synthetic oligonucleotide
uuuggcgcaggcagguggu

SEQ ID NO: 1732875 - RNA, 19 nt, Artificial Sequence
  Description of Artificial Sequence: Synthetic oligonucleotide
ucucaggggacagucuuca

SEQ ID NO: 1732876 - RNA, 19 nt, Artificial Sequence
  Description of Artificial Sequence: Synthetic oligonucleotide
uugaagccucucucagggg

SEQ ID NO: 1732877 - RNA, 19 nt, Artificial Sequence
  Description of Artificial Sequence: Synthetic oligonucleotide
gaaugccccaugcuccagc

SEQ ID NO: 1732878 - RNA, 19 nt, Artificial Sequence
  Description of Artificial Sequence: Synthetic oligonucleotide
cuuccuuacggcugcagga

SEQ ID NO: 1732879 - RNA, 19 nt, Artificial Sequence
  Description of Artificial Sequence: Synthetic oligonucleotide
ucccucauacaguucugga

SEQ ID NO: 1732880 - RNA, 19 nt, Artificial Sequence
  Description of Artificial Sequence: Synthetic oligonucleotide
uggaucgaagccguucccc

SEQ ID NO: 1732881 - RNA, 19 nt, Artificial Sequence
  Description of Artificial Sequence: Synthetic oligonucleotide
acuugugugcagucuucug

SEQ ID NO: 1732882 - RNA, 19 nt, Artificial Sequence
  Description of Artificial Sequence: Synthetic oligonucleotide
gcuaggcugaccuucagga

SEQ ID NO: 1732883 - RNA, 19 nt, Artificial Sequence
  Description of Artificial Sequence: Synthetic oligonucleotide
cuccuuguagaaagggguc

SEQ ID NO: 1732884 - RNA, 19 nt, Artificial Sequence
  Description of Artificial Sequence: Synthetic oligonucleotide
cuuauucucagugcuguga

SEQ ID NO: 1732885 - RNA, 19 nt, Artificial Sequence
  Description of Artificial Sequence: Synthetic oligonucleotide
auggcagcauggcggcacc

SEQ ID NO: 1732886 - RNA, 19 nt, Artificial Sequence
  Description of Artificial Sequence: Synthetic oligonucleotide
auacaguucuggaucgaag

SEQ ID NO: 1732887 - RNA, 19 nt, Artificial Sequence
  Description of Artificial Sequence: Synthetic oligonucleotide
cugcaggucagcuccauca

SEQ ID NO: 1732888 - RNA, 19 nt, Artificial Sequence
  Description of Artificial Sequence: Synthetic oligonucleotide
gaucgaagccguuccccug

SEQ ID NO: 1732889 - RNA, 19 nt, Artificial Sequence
  Description of Artificial Sequence: Synthetic oligonucleotide
auaggucacgccagucagc

SEQ ID NO: 1732890 - RNA, 19 nt, Artificial Sequence
  Description of Artificial Sequence: Synthetic oligonucleotide
augucauagagcugaccau

SEQ ID NO: 1732891 - RNA, 19 nt, Artificial Sequence
  Description of Artificial Sequence: Synthetic oligonucleotide
aggaauugguugaggggcg

SEQ ID NO: 1732892 - RNA, 19 nt, Artificial Sequence
  Description of Artificial Sequence: Synthetic oligonucleotide
agagcugaccauccuugga

SEQ ID NO: 1732893 - RNA, 19 nt, Artificial Sequence
  Description of Artificial Sequence: Synthetic oligonucleotide
ugcccuccuuguagaaagg

SEQ ID NO: 1732894 - RNA, 19 nt, Artificial Sequence
  Description of Artificial Sequence: Synthetic oligonucleotide
gccuuguacagguugacca

SEQ ID NO: 1732895 - RNA, 19 nt, Artificial Sequence
  Description of Artificial Sequence: Synthetic oligonucleotide
uggcaauguucuccaguca

SEQ ID NO: 1732896 - RNA, 19 nt, Artificial Sequence
  Description of Artificial Sequence: Synthetic oligonucleotide
gauggcagcauggcggcac

SEQ ID NO: 1732897 - RNA, 19 nt, Artificial Sequence
  Description of Artificial Sequence: Synthetic oligonucleotide
ugcuaugcuccaagcuucu

SEQ ID NO: 1732898 - RNA, 19 nt, Artificial Sequence
  Description of Artificial Sequence: Synthetic oligonucleotide
ccuguagagugcuaggcug

SEQ ID NO: 1732899 - RNA, 19 nt, Artificial Sequence
  Description of Artificial Sequence: Synthetic oligonucleotide
uuccuuacggcugcaggac

SEQ ID NO: 1732900 - RNA, 19 nt, Artificial Sequence
  Description of Artificial Sequence: Synthetic oligonucleotide
caccguccaugucauagag

SEQ ID NO: 1732901 - RNA, 19 nt, Artificial Sequence
  Description of Artificial Sequence: Synthetic oligonucleotide
uaucugcugaagccccgca

SEQ ID NO: 1732902 - RNA, 19 nt, Artificial Sequence
  Description of Artificial Sequence: Synthetic oligonucleotide
cuccaaaguacuuagcgau

SEQ ID NO: 1732903 - RNA, 19 nt, Artificial Sequence
  Description of Artificial Sequence: Synthetic oligonucleotide
agucugaacucgagcacuc

SEQ ID NO: 1732904 - RNA, 19 nt, Artificial Sequence
  Description of Artificial Sequence: Synthetic oligonucleotide
ugugugcagucuucuggcu

SEQ ID NO: 1732905 - RNA, 19 nt, Artificial Sequence
  Description of Artificial Sequence: Synthetic oligonucleotide
caccuuauucucagugcug

SEQ ID NO: 1732906 - RNA, 19 nt, Artificial Sequence
  Description of Artificial Sequence: Synthetic oligonucleotide
cuuguggaucucagccacc

SEQ ID NO: 1732907 - RNA, 19 nt, Artificial Sequence
  Description of Artificial Sequence: Synthetic oligonucleotide
uauucucagugcugugauc

SEQ ID NO: 1732908 - RNA, 19 nt, Artificial Sequence
  Description of Artificial Sequence: Synthetic oligonucleotide
cuugcgggccucaucucug

SEQ ID NO: 1732909 - RNA, 19 nt, Artificial Sequence
  Description of Artificial Sequence: Synthetic oligonucleotide
acuuagcgauggcagcaug

SEQ ID NO: 1732910 - RNA, 19 nt, Artificial Sequence
  Description of Artificial Sequence: Synthetic oligonucleotide
uagggaucuuccugcuuga

SEQ ID NO: 1732911 - RNA, 19 nt, Artificial Sequence
  Description of Artificial Sequence: Synthetic oligonucleotide
gaggcucugggccucuuuc

SEQ ID NO: 1732912 - RNA, 19 nt, Artificial Sequence
  Description of Artificial Sequence: Synthetic oligonucleotide
guacuuagcgauggcagca

SEQ ID NO: 1732913 - RNA, 19 nt, Artificial Sequence
  Description of Artificial Sequence: Synthetic oligonucleotide
uccuuacggcugcaggacu

SEQ ID NO: 1732914 - RNA, 19 nt, Artificial Sequence
  Description of Artificial Sequence: Synthetic oligonucleotide
cugcuucugauagaaaaga

SEQ ID NO: 1732915 - RNA, 19 nt, Artificial Sequence
  Description of Artificial Sequence: Synthetic oligonucleotide
ugcgucuccaaaguacuua

SEQ ID NO: 1732916 - RNA, 19 nt, Artificial Sequence
  Description of Artificial Sequence: Synthetic oligonucleotide
cuugcagugagcaggugcu

SEQ ID NO: 1732917 - RNA, 19 nt, Artificial Sequence
  Description of Artificial Sequence: Synthetic oligonucleotide
gggacacucagucugaacu

SEQ ID NO: 1732918 - RNA, 19 nt, Artificial Sequence
  Description of Artificial Sequence: Synthetic oligonucleotide
agcggcagccucuuucaca

SEQ ID NO: 1732919 - RNA, 19 nt, Artificial Sequence
  Description of Artificial Sequence: Synthetic oligonucleotide
gucuuacuccagcuacugc

SEQ ID NO: 1732920 - RNA, 19 nt, Artificial Sequence
  Description of Artificial Sequence: Synthetic oligonucleotide
caacuugugugcagucuuc

SEQ ID NO: 1732921 - RNA, 19 nt, Artificial Sequence
  Description of Artificial Sequence: Synthetic oligonucleotide
ugaggggcgaagccucuuc

SEQ ID NO: 1732922 - RNA, 19 nt, Artificial Sequence
  Description of Artificial Sequence: Synthetic oligonucleotide
gcgucuccaaaguacuuag

SEQ ID NO: 1732923 - RNA, 19 nt, Artificial Sequence
  Description of Artificial Sequence: Synthetic oligonucleotide
gguggugaauucuucuguc

SEQ ID NO: 1732924 - RNA, 19 nt, Artificial Sequence
  Description of Artificial Sequence: Synthetic oligonucleotide
ucacgggccuucacuguga

SEQ ID NO: 1732925 - RNA, 19 nt, Artificial Sequence
  Description of Artificial Sequence: Synthetic oligonucleotide
acacauaggucacgccagu

SEQ ID NO: 1732926 - RNA, 19 nt, Artificial Sequence
  Description of Artificial Sequence: Synthetic oligonucleotide
cuuggaggccuuguggauc

SEQ ID NO: 1732927 - RNA, 19 nt, Artificial Sequence
  Description of Artificial Sequence: Synthetic oligonucleotide
uguagagugcuaggcugac

SEQ ID NO: 1732928 - RNA, 19 nt, Artificial Sequence
  Description of Artificial Sequence: Synthetic oligonucleotide
cuugaccacaacagcggca

SEQ ID NO: 1732929 - RNA, 19 nt, Artificial Sequence
  Description of Artificial Sequence: Synthetic oligonucleotide
gcuguggacuugcagugag

SEQ ID NO: 1732930 - RNA, 19 nt, Artificial Sequence
  Description of Artificial Sequence: Synthetic oligonucleotide
ccagucaccuuauucucag

SEQ ID NO: 1732931 - RNA, 19 nt, Artificial Sequence
  Description of Artificial Sequence: Synthetic oligonucleotide
gugacgucuccugaucuug

SEQ ID NO: 1732932 - RNA, 19 nt, Artificial Sequence
  Description of Artificial Sequence: Synthetic oligonucleotide
cagucuucuggcucgccuc

SEQ ID NO: 1732933 - RNA, 19 nt, Artificial Sequence
  Description of Artificial Sequence: Synthetic oligonucleotide
cauccuuggaggccuugug

SEQ ID NO: 1732934 - RNA, 19 nt, Artificial Sequence
  Description of Artificial Sequence: Synthetic oligonucleotide
ggagaguuaaacaacuccu

SEQ ID NO: 1732935 - RNA, 19 nt, Artificial Sequence
  Description of Artificial Sequence: Synthetic oligonucleotide
ugcaacucuuggugccacc

SEQ ID NO: 1732936 - RNA, 19 nt, Artificial Sequence
  Description of Artificial Sequence: Synthetic oligonucleotide
gagcugagagcuggcaaug

SEQ ID NO: 1732937 - RNA, 19 nt, Artificial Sequence
  Description of Artificial Sequence: Synthetic oligonucleotide
accgcuaccuccagaaccu

SEQ ID NO: 1732938 - RNA, 19 nt, Artificial Sequence
  Description of Artificial Sequence: Synthetic oligonucleotide
agcaggugugagguugggg

SEQ ID NO: 1732939 - RNA, 19 nt, Artificial Sequence
  Description of Artificial Sequence: Synthetic oligonucleotide
acucgagcacucaaaugug

SEQ ID NO: 1732940 - RNA, 19 nt, Artificial Sequence
  Description of Artificial Sequence: Synthetic oligonucleotide
cuguggacuugcagugagc

SEQ ID NO: 1732941 - RNA, 19 nt, Artificial Sequence
  Description of Artificial Sequence: Synthetic oligonucleotide
uggcucgccuccacaggag

SEQ ID NO: 1732942 - RNA, 19 nt, Artificial Sequence
  Description of Artificial Sequence: Synthetic oligonucleotide
gcaacucuuggugccaccg

SEQ ID NO: 1732943 - RNA, 19 nt, Artificial Sequence
  Description of Artificial Sequence: Synthetic oligonucleotide
ucauacaguucuggaucga

SEQ ID NO: 1732944 - RNA, 19 nt, Artificial Sequence
  Description of Artificial Sequence: Synthetic oligonucleotide
cugugaucacuggccaagg

SEQ ID NO: 1732945 - RNA, 19 nt, Artificial Sequence
  Description of Artificial Sequence: Synthetic oligonucleotide
gauaugaaccugcccuccu

SEQ ID NO: 1732946 - RNA, 19 nt, Artificial Sequence
  Description of Artificial Sequence: Synthetic oligonucleotide
cugaacucgagcacucaaa

SEQ ID NO: 1732947 - RNA, 19 nt, Artificial Sequence
  Description of Artificial Sequence: Synthetic oligonucleotide
gccaccguccaugucauag

SEQ ID NO: 1732948 - RNA, 19 nt, Artificial Sequence
  Description of Artificial Sequence: Synthetic oligonucleotide
ccggaaugccccaugcucc

SEQ ID NO: 1732949 - RNA, 19 nt, Artificial Sequence
  Description of Artificial Sequence: Synthetic oligonucleotide
agccguuccccuggaaggg

SEQ ID NO: 1732950 - RNA, 19 nt, Artificial Sequence
  Description of Artificial Sequence: Synthetic oligonucleotide
cuggaucgaagccguuccc

SEQ ID NO: 1732951 - RNA, 19 nt, Artificial Sequence
  Description of Artificial Sequence: Synthetic oligonucleotide
aaccuucaucauaucugcu

SEQ ID NO: 1732952 - RNA, 19 nt, Artificial Sequence
  Description of Artificial Sequence: Synthetic oligonucleotide
cauuccggaaugccccaug

SEQ ID NO: 1732953 - RNA, 19 nt, Artificial Sequence
  Description of Artificial Sequence: Synthetic oligonucleotide
gaucuugggccuggagcag

SEQ ID NO: 1732954 - RNA, 19 nt, Artificial Sequence
  Description of Artificial Sequence: Synthetic oligonucleotide
cuuacuccagcuacugcua

SEQ ID NO: 1732955 - RNA, 19 nt, Artificial Sequence
  Description of Artificial Sequence: Synthetic oligonucleotide
cucgucaccgcuaccucca

SEQ ID NO: 1732956 - RNA, 19 nt, Artificial Sequence
  Description of Artificial Sequence: Synthetic oligonucleotide
ucuuggcauuccggaaugc

SEQ ID NO: 1732957 - RNA, 19 nt, Artificial Sequence
  Description of Artificial Sequence: Synthetic oligonucleotide
acgggccuucacugugagc

SEQ ID NO: 1732958 - RNA, 19 nt, Artificial Sequence
  Description of Artificial Sequence: Synthetic oligonucleotide
gaaaggggucagguacuug

SEQ ID NO: 1732959 - RNA, 19 nt, Artificial Sequence
  Description of Artificial Sequence: Synthetic oligonucleotide
aggggcgaagccucuucug

SEQ ID NO: 1732960 - RNA, 19 nt, Artificial Sequence
  Description of Artificial Sequence: Synthetic oligonucleotide
ucugcccucgucaccgcua

SEQ ID NO: 1732961 - RNA, 19 nt, Artificial Sequence
  Description of Artificial Sequence: Synthetic oligonucleotide
cagaaccuucaucauaucu

SEQ ID NO: 1732962 - RNA, 19 nt, Artificial Sequence
  Description of Artificial Sequence: Synthetic oligonucleotide
ugcugugaucacuggccaa

SEQ ID NO: 1732963 - RNA, 19 nt, Artificial Sequence
  Description of Artificial Sequence: Synthetic oligonucleotide
cugauagaaaagauuccau

SEQ ID NO: 1732964 - RNA, 19 nt, Artificial Sequence
  Description of Artificial Sequence: Synthetic oligonucleotide
ggcgaagccucuucugagc

SEQ ID NO: 1732965 - RNA, 19 nt, Artificial Sequence
  Description of Artificial Sequence: Synthetic oligonucleotide
ucaccgcuaccuccagaac

SEQ ID NO: 1732966 - RNA, 19 nt, Artificial Sequence
  Description of Artificial Sequence: Synthetic oligonucleotide
cuggccuuguacagguuga

SEQ ID NO: 1732967 - RNA, 19 nt, Artificial Sequence
  Description of Artificial Sequence: Synthetic oligonucleotide
uugcgggccucaucucugc

SEQ ID NO: 1732968 - RNA, 19 nt, Artificial Sequence
  Description of Artificial Sequence: Synthetic oligonucleotide
cucucaggggacagucuuc

SEQ ID NO: 1732969 - RNA, 19 nt, Artificial Sequence
  Description of Artificial Sequence: Synthetic oligonucleotide
accacaacagcggcagccu

SEQ ID NO: 1732970 - RNA, 19 nt, Artificial Sequence
  Description of Artificial Sequence: Synthetic oligonucleotide
gugcugugaucacuggcca

SEQ ID NO: 1732971 - RNA, 19 nt, Artificial Sequence
  Description of Artificial Sequence: Synthetic oligonucleotide
agcgggcacgaucauggaa

SEQ ID NO: 1732972 - RNA, 19 nt, Artificial Sequence
  Description of Artificial Sequence: Synthetic oligonucleotide
uacuuagcgauggcagcau

SEQ ID NO: 1732973 - RNA, 19 nt, Artificial Sequence
  Description of Artificial Sequence: Synthetic oligonucleotide
ggucuuacuccagcuacug

SEQ ID NO: 1732974 - RNA, 19 nt, Artificial Sequence
  Description of Artificial Sequence: Synthetic oligonucleotide
cagccaccuucuuuagaac

SEQ ID NO: 1732975 - RNA, 19 nt, Artificial Sequence
  Description of Artificial Sequence: Synthetic oligonucleotide
cuucaucauaucugcugaa

SEQ ID NO: 1732976 - RNA, 19 nt, Artificial Sequence
  Description of Artificial Sequence: Synthetic oligonucleotide
cuccaacuugugugcaguc

SEQ ID NO: 1732977 - RNA, 19 nt, Artificial Sequence
  Description of Artificial Sequence: Synthetic oligonucleotide
cugcucaaagccuccucca

SEQ ID NO: 1732978 - RNA, 19 nt, Artificial Sequence
  Description of Artificial Sequence: Synthetic oligonucleotide
guggugaauucuucugucu

SEQ ID NO: 1732979 - RNA, 19 nt, Artificial Sequence
  Description of Artificial Sequence: Synthetic oligonucleotide
ucgucaccgcuaccuccag

SEQ ID NO: 1732980 - RNA, 19 nt, Artificial Sequence
  Description of Artificial Sequence: Synthetic oligonucleotide
acagccuuuggcgcaggca

SEQ ID NO: 1732981 - RNA, 19 nt, Artificial Sequence
  Description of Artificial Sequence: Synthetic oligonucleotide
cugaggucugggccgcuug

SEQ ID NO: 1732982 - RNA, 19 nt, Artificial Sequence
  Description of Artificial Sequence: Synthetic oligonucleotide
gacucuggcaguggucaca

SEQ ID NO: 1732983 - RNA, 19 nt, Artificial Sequence
  Description of Artificial Sequence: Synthetic oligonucleotide
cauacaguucuggaucgaa

SEQ ID NO: 1732984 - RNA, 19 nt, Artificial Sequence
  Description of Artificial Sequence: Synthetic oligonucleotide
acucucacagcgggcacga

SEQ ID NO: 1732985 - RNA, 19 nt, Artificial Sequence
  Description of Artificial Sequence: Synthetic oligonucleotide
ucgaagccguuccccugga

SEQ ID NO: 1732986 - RNA, 19 nt, Artificial Sequence
  Description of Artificial Sequence: Synthetic oligonucleotide
gagaguuaaacaacuccuu

SEQ ID NO: 1732987 - RNA, 19 nt, Artificial Sequence
  Description of Artificial Sequence: Synthetic oligonucleotide
guagagugcuaggcugacc

SEQ ID NO: 1732988 - RNA, 19 nt, Artificial Sequence
  Description of Artificial Sequence: Synthetic oligonucleotide
ucuuggugccaccguccau

SEQ ID NO: 1732989 - RNA, 19 nt, Artificial Sequence
  Description of Artificial Sequence: Synthetic oligonucleotide
gagcaggugugagguuggg

SEQ ID NO: 1732990 - RNA, 19 nt, Artificial Sequence
  Description of Artificial Sequence: Synthetic oligonucleotide
aggucuuacuccagcuacu

SEQ ID NO: 1732991 - RNA, 19 nt, Artificial Sequence
  Description of Artificial Sequence: Synthetic oligonucleotide
auucacgcuugcgggccuc

SEQ ID NO: 1732992 - RNA, 19 nt, Artificial Sequence
  Description of Artificial Sequence: Synthetic oligonucleotide
caucuuggcauuccggaau

SEQ ID NO: 1732993 - RNA, 19 nt, Artificial Sequence
  Description of Artificial Sequence: Synthetic oligonucleotide
cugcccucgucaccgcuac

SEQ ID NO: 1732994 - RNA, 19 nt, Artificial Sequence
  Description of Artificial Sequence: Synthetic oligonucleotide
cacauaggucacgccaguc

SEQ ID NO: 1732995 - RNA, 19 nt, Artificial Sequence
  Description of Artificial Sequence: Synthetic oligonucleotide
cacgggccuucacugugag

SEQ ID NO: 1732996 - RNA, 19 nt, Artificial Sequence
  Description of Artificial Sequence: Synthetic oligonucleotide
agccucuucugagcccuuc

SEQ ID NO: 1732997 - RNA, 19 nt, Artificial Sequence
  Description of Artificial Sequence: Synthetic oligonucleotide
cagugagcaggugcuuggc

SEQ ID NO: 1732998 - RNA, 19 nt, Artificial Sequence
  Description of Artificial Sequence: Synthetic oligonucleotide
cuggugauuacugcucaaa

SEQ ID NO: 1732999 - RNA, 19 nt, Artificial Sequence
  Description of Artificial Sequence: Synthetic oligonucleotide
gcgauggcagcauggcggc

SEQ ID NO: 1733000 - RNA, 19 nt, Artificial Sequence
  Description of Artificial Sequence: Synthetic oligonucleotide
ggucacagccuuuggcgca

SEQ ID NO: 1733001 - RNA, 19 nt, Artificial Sequence
  Description of Artificial Sequence: Synthetic oligonucleotide
cauugggcucugagggcuc

SEQ ID NO: 1733002 - RNA, 19 nt, Artificial Sequence
  Description of Artificial Sequence: Synthetic oligonucleotide
ugcgcaggcucaucugcuu

SEQ ID NO: 1733003 - RNA, 19 nt, Artificial Sequence
  Description of Artificial Sequence: Synthetic oligonucleotide
ggggcgaagccucuucuga

SEQ ID NO: 1733004 - RNA, 19 nt, Artificial Sequence
  Description of Artificial Sequence: Synthetic oligonucleotide
gaauugguugaggggcgaa

SEQ ID NO: 1733005 - RNA, 19 nt, Artificial Sequence
  Description of Artificial Sequence: Synthetic oligonucleotide
gguugaggggcgaagccuc

SEQ ID NO: 1733006 - RNA, 19 nt, Artificial Sequence
  Description of Artificial Sequence: Synthetic oligonucleotide
acuccuuccaggagaguua

SEQ ID NO: 1733007 - RNA, 19 nt, Artificial Sequence
  Description of Artificial Sequence: Synthetic oligonucleotide
agagugcuaggcugaccuu

SEQ ID NO: 1733008 - RNA, 19 nt, Artificial Sequence
  Description of Artificial Sequence: Synthetic oligonucleotide
ucucugcccucgucaccgc

SEQ ID NO: 1733009 - RNA, 19 nt, Artificial Sequence
  Description of Artificial Sequence: Synthetic oligonucleotide
acacucagucugaacucga

SEQ ID NO: 1733010 - RNA, 19 nt, Artificial Sequence
  Description of Artificial Sequence: Synthetic oligonucleotide
ccauucacgcuugcgggcc

SEQ ID NO: 1733011 - RNA, 19 nt, Artificial Sequence
  Description of Artificial Sequence: Synthetic oligonucleotide
cacagcgggcacgaucaug

SEQ ID NO: 1733012 - RNA, 19 nt, Artificial Sequence
  Description of Artificial Sequence: Synthetic oligonucleotide
ccucuuugcccuugcgcag

SEQ ID NO: 1733013 - RNA, 19 nt, Artificial Sequence
  Description of Artificial Sequence: Synthetic oligonucleotide
guugaccaucuuggcauuc

SEQ ID NO: 1733014 - RNA, 19 nt, Artificial Sequence
  Description of Artificial Sequence: Synthetic oligonucleotide
ccuccuuguagaaaggggu

SEQ ID NO: 1733015 - RNA, 19 nt, Artificial Sequence
  Description of Artificial Sequence: Synthetic oligonucleotide
acaacagcggcagccucuu

SEQ ID NO: 1733016 - RNA, 19 nt, Artificial Sequence
  Description of Artificial Sequence: Synthetic oligonucleotide
ccaggagaguuaaacaacu

SEQ ID NO: 1733017 - RNA, 19 nt, Artificial Sequence
  Description of Artificial Sequence: Synthetic oligonucleotide
ugggcucugagggcucaac

SEQ ID NO: 1733018 - RNA, 19 nt, Artificial Sequence
  Description of Artificial Sequence: Synthetic oligonucleotide
gguggugcgucuccaaagu

SEQ ID NO: 1733019 - RNA, 19 nt, Artificial Sequence
  Description of Artificial Sequence: Synthetic oligonucleotide
gucuccugaucuugggccu

SEQ ID NO: 1733020 - RNA, 19 nt, Artificial Sequence
  Description of Artificial Sequence: Synthetic oligonucleotide
ugcagucuucuggcucgcc

SEQ ID NO: 1733021 - RNA, 19 nt, Artificial Sequence
  Description of Artificial Sequence: Synthetic oligonucleotide
uccuuccaggagaguuaaa

SEQ ID NO: 1733022 - RNA, 19 nt, Artificial Sequence
  Description of Artificial Sequence: Synthetic oligonucleotide
cacaacagcggcagccucu

SEQ ID NO: 1733023 - RNA, 19 nt, Artificial Sequence
  Description of Artificial Sequence: Synthetic oligonucleotide
gccucccucauacaguucu

SEQ ID NO: 1733024 - RNA, 19 nt, Artificial Sequence
  Description of Artificial Sequence: Synthetic oligonucleotide
uucacgcuugcgggccuca

SEQ ID NO: 1733025 - RNA, 19 nt, Artificial Sequence
  Description of Artificial Sequence: Synthetic oligonucleotide
ggagcugagagcuggcaau

SEQ ID NO: 1733026 - RNA, 19 nt, Artificial Sequence
  Description of Artificial Sequence: Synthetic oligonucleotide
caggugcuuggccccuccc

SEQ ID NO: 1733027 - RNA, 19 nt, Artificial Sequence
  Description of Artificial Sequence: Synthetic oligonucleotide
cacgcuugcgggccucauc

SEQ ID NO: 1733028 - RNA, 19 nt, Artificial Sequence
  Description of Artificial Sequence: Synthetic oligonucleotide
agccucuuucacagagaug

SEQ ID NO: 1733029 - RNA, 19 nt, Artificial Sequence
  Description of Artificial Sequence: Synthetic oligonucleotide
ccaagauggaggaauuggu

SEQ ID NO: 1733030 - RNA, 19 nt, Artificial Sequence
  Description of Artificial Sequence: Synthetic oligonucleotide
cagccucuuucacagagau

SEQ ID NO: 1733031 - RNA, 19 nt, Artificial Sequence
  Description of Artificial Sequence: Synthetic oligonucleotide
gcucgccuccacaggaggg

SEQ ID NO: 1733032 - RNA, 19 nt, Artificial Sequence
  Description of Artificial Sequence: Synthetic oligonucleotide
uuggcgcaggcagguggug

SEQ ID NO: 1733033 - RNA, 19 nt, Artificial Sequence
  Description of Artificial Sequence: Synthetic oligonucleotide
ggaucgaagccguuccccu

SEQ ID NO: 1733034 - RNA, 19 nt, Artificial Sequence
  Description of Artificial Sequence: Synthetic oligonucleotide
ggggugacgucuccugauc

SEQ ID NO: 1733035 - RNA, 19 nt, Artificial Sequence
  Description of Artificial Sequence: Synthetic oligonucleotide
cuccuuccaggagaguuaa

SEQ ID NO: 1733036 - RNA, 19 nt, Artificial Sequence
  Description of Artificial Sequence: Synthetic oligonucleotide
gacuugcagugagcaggug

SEQ ID NO: 1733037 - RNA, 19 nt, Artificial Sequence
  Description of Artificial Sequence: Synthetic oligonucleotide
ucugggccgcuugccugcc

SEQ ID NO: 1733038 - RNA, 19 nt, Artificial Sequence
  Description of Artificial Sequence: Synthetic oligonucleotide
cucuggcaguggucacagc

SEQ ID NO: 1733039 - RNA, 19 nt, Artificial Sequence
  Description of Artificial Sequence: Synthetic oligonucleotide
caucugcuucugauagaaa

SEQ ID NO: 1733040 - RNA, 19 nt, Artificial Sequence
  Description of Artificial Sequence: Synthetic oligonucleotide
gaucacuggccaaggcacu

SEQ ID NO: 1733041 - RNA, 19 nt, Artificial Sequence
  Description of Artificial Sequence: Synthetic oligonucleotide
ggugcgucuccaaaguacu

SEQ ID NO: 1733042 - RNA, 19 nt, Artificial Sequence
  Description of Artificial Sequence: Synthetic oligonucleotide
ccugaucuugggccuggag

SEQ ID NO: 1733043 - RNA, 19 nt, Artificial Sequence
  Description of Artificial Sequence: Synthetic oligonucleotide
ugcccucgucaccgcuacc

SEQ ID NO: 1733044 - RNA, 19 nt, Artificial Sequence
  Description of Artificial Sequence: Synthetic oligonucleotide
guggugcgucuccaaagua

SEQ ID NO: 1733045 - RNA, 19 nt, Artificial Sequence
  Description of Artificial Sequence: Synthetic oligonucleotide
uggccccucccugggacac

SEQ ID NO: 1733046 - RNA, 19 nt, Artificial Sequence
  Description of Artificial Sequence: Synthetic oligonucleotide
gccagucagcuucacucuc

SEQ ID NO: 1733047 - RNA, 19 nt, Artificial Sequence
  Description of Artificial Sequence: Synthetic oligonucleotide
uggccaaggcacugcccuu

SEQ ID NO: 1733048 - RNA, 19 nt, Artificial Sequence
  Description of Artificial Sequence: Synthetic oligonucleotide
gccucugcggccucccuca

SEQ ID NO: 1733049 - RNA, 19 nt, Artificial Sequence
  Description of Artificial Sequence: Synthetic oligonucleotide
uccugaucuugggccugga

SEQ ID NO: 1733050 - RNA, 19 nt, Artificial Sequence
  Description of Artificial Sequence: Synthetic oligonucleotide
ccucucucaggggacaguc

SEQ ID NO: 1733051 - RNA, 19 nt, Artificial Sequence
  Description of Artificial Sequence: Synthetic oligonucleotide
ccguuccccuggaagggcc

SEQ ID NO: 1733052 - RNA, 19 nt, Artificial Sequence
  Description of Artificial Sequence: Synthetic oligonucleotide
ggcauuccggaaugcccca

SEQ ID NO: 1733053 - RNA, 19 nt, Artificial Sequence
  Description of Artificial Sequence: Synthetic oligonucleotide
gucacgccagucagcuuca

SEQ ID NO: 1733054 - RNA, 19 nt, Artificial Sequence
  Description of Artificial Sequence: Synthetic oligonucleotide
uugcagugagcaggugcuu

SEQ ID NO: 1733055 - RNA, 19 nt, Artificial Sequence
  Description of Artificial Sequence: Synthetic oligonucleotide
cagcggcagccucuuucac

SEQ ID NO: 1733056 - RNA, 19 nt, Artificial Sequence
  Description of Artificial Sequence: Synthetic oligonucleotide
gccuucacugugagcuuag

SEQ ID NO: 1733057 - RNA, 19 nt, Artificial Sequence
  Description of Artificial Sequence: Synthetic oligonucleotide
gucaucucugugggacaca

SEQ ID NO: 1733058 - RNA, 19 nt, Artificial Sequence
  Description of Artificial Sequence: Synthetic oligonucleotide
ggaaugccccaugcuccag

SEQ ID NO: 1733059 - RNA, 19 nt, Artificial Sequence
  Description of Artificial Sequence: Synthetic oligonucleotide
gggccgcuugccugccugg

SEQ ID NO: 1733060 - RNA, 19 nt, Artificial Sequence
  Description of Artificial Sequence: Synthetic oligonucleotide
gugcagucuucuggcucgc

SEQ ID NO: 1733061 - RNA, 19 nt, Artificial Sequence
  Description of Artificial Sequence: Synthetic oligonucleotide
gcagucuucuggcucgccu

SEQ ID NO: 1733062 - RNA, 19 nt, Artificial Sequence
  Description of Artificial Sequence: Synthetic oligonucleotide
gggugacgucuccugaucu

SEQ ID NO: 1733063 - RNA, 19 nt, Artificial Sequence
  Description of Artificial Sequence: Synthetic oligonucleotide
gcuugcgggccucaucucu

SEQ ID NO: 1733064 - RNA, 19 nt, Artificial Sequence
  Description of Artificial Sequence: Synthetic oligonucleotide
cucucucaggggacagucu

SEQ ID NO: 1733065 - RNA, 19 nt, Artificial Sequence
  Description of Artificial Sequence: Synthetic oligonucleotide
gcucaaccccagcacugca

SEQ ID NO: 1733066 - RNA, 19 nt, Artificial Sequence
  Description of Artificial Sequence: Synthetic oligonucleotide
gcgcaggcucaucugcuuc

SEQ ID NO: 1733067 - RNA, 19 nt, Artificial Sequence
  Description of Artificial Sequence: Synthetic oligonucleotide
cauagucauugggcucuga

SEQ ID NO: 1733068 - RNA, 19 nt, Artificial Sequence
  Description of Artificial Sequence: Synthetic oligonucleotide
gccgcuugccugccugggc

SEQ ID NO: 1733069 - RNA, 19 nt, Artificial Sequence
  Description of Artificial Sequence: Synthetic oligonucleotide
caaaugugccugggcucca

SEQ ID NO: 1733070 - RNA, 19 nt, Artificial Sequence
  Description of Artificial Sequence: Synthetic oligonucleotide
uccccuggaagggcccgau

SEQ ID NO: 1733071 - RNA, 19 nt, Artificial Sequence
  Description of Artificial Sequence: Synthetic oligonucleotide
gcuuagggaucuuccugcu

SEQ ID NO: 1733072 - RNA, 19 nt, Artificial Sequence
  Description of Artificial Sequence: Synthetic oligonucleotide
ggaggccuuguggaucuca

SEQ ID NO: 1733073 - RNA, 19 nt, Artificial Sequence
  Description of Artificial Sequence: Synthetic oligonucleotide
caacucuuggugccaccgu

SEQ ID NO: 1733074 - RNA, 19 nt, Artificial Sequence
  Description of Artificial Sequence: Synthetic oligonucleotide
ggccgcuugccugccuggg

SEQ ID NO: 1733075 - RNA, 19 nt, Artificial Sequence
  Description of Artificial Sequence: Synthetic oligonucleotide
cuuagggaucuuccugcuu

SEQ ID NO: 1733076 - RNA, 19 nt, Artificial Sequence
  Description of Artificial Sequence: Synthetic oligonucleotide
ucacgcuugcgggccucau

SEQ ID NO: 1733077 - RNA, 19 nt, Artificial Sequence
  Description of Artificial Sequence: Synthetic oligonucleotide
acacuccuuccaggagagu

SEQ ID NO: 1733078 - RNA, 19 nt, Artificial Sequence
  Description of Artificial Sequence: Synthetic oligonucleotide
aggucacgccagucagcuu

SEQ ID NO: 1733079 - RNA, 19 nt, Artificial Sequence
  Description of Artificial Sequence: Synthetic oligonucleotide
gcuccaacuugugugcagu

SEQ ID NO: 1733080 - RNA, 19 nt, Artificial Sequence
  Description of Artificial Sequence: Synthetic oligonucleotide
cccucauacaguucuggau

SEQ ID NO: 1733081 - RNA, 19 nt, Artificial Sequence
  Description of Artificial Sequence: Synthetic oligonucleotide
cguuccccuggaagggccc

SEQ ID NO: 1733082 - RNA, 19 nt, Artificial Sequence
  Description of Artificial Sequence: Synthetic oligonucleotide
ggugacgucuccugaucuu

SEQ ID NO: 1733083 - RNA, 19 nt, Artificial Sequence
  Description of Artificial Sequence: Synthetic oligonucleotide
ccacaacagcggcagccuc

SEQ ID NO: 1733084 - RNA, 19 nt, Artificial Sequence
  Description of Artificial Sequence: Synthetic oligonucleotide
gccguuccccuggaagggc

SEQ ID NO: 1733085 - RNA, 19 nt, Artificial Sequence
  Description of Artificial Sequence: Synthetic oligonucleotide
ccaacuugugugcagucuu

SEQ ID NO: 1733086 - RNA, 19 nt, Artificial Sequence
  Description of Artificial Sequence: Synthetic oligonucleotide
gaugaggcucugggccucu

SEQ ID NO: 1733087 - RNA, 19 nt, Artificial Sequence
  Description of Artificial Sequence: Synthetic oligonucleotide
cacgccagucagcuucacu

SEQ ID NO: 1733088 - RNA, 19 nt, Artificial Sequence
  Description of Artificial Sequence: Synthetic oligonucleotide
cacugcccuuggccucagc

SEQ ID NO: 1733089 - RNA, 19 nt, Artificial Sequence
  Description of Artificial Sequence: Synthetic oligonucleotide
cagcgggcacgaucaugga

SEQ ID NO: 1733090 - RNA, 19 nt, Artificial Sequence
  Description of Artificial Sequence: Synthetic oligonucleotide
cgcuaccuccagaaccuuc

SEQ ID NO: 1733091 - RNA, 19 nt, Artificial Sequence
  Description of Artificial Sequence: Synthetic oligonucleotide
cauucacgcuugcgggccu

SEQ ID NO: 1733092 - RNA, 19 nt, Artificial Sequence
  Description of Artificial Sequence: Synthetic oligonucleotide
ugccaccguccaugucaua

SEQ ID NO: 1733093 - RNA, 19 nt, Artificial Sequence
  Description of Artificial Sequence: Synthetic oligonucleotide
gcccucgucaccgcuaccu

SEQ ID NO: 1733094 - RNA, 19 nt, Artificial Sequence
  Description of Artificial Sequence: Synthetic oligonucleotide
gcagugcucacgggccuuc

SEQ ID NO: 1733095 - RNA, 19 nt, Artificial Sequence
  Description of Artificial Sequence: Synthetic oligonucleotide
cggaaugccccaugcucca

SEQ ID NO: 1733096 - RNA, 19 nt, Artificial Sequence
  Description of Artificial Sequence: Synthetic oligonucleotide
cgagcacucaaaugugccu

SEQ ID NO: 1733097 - RNA, 19 nt, Artificial Sequence
  Description of Artificial Sequence: Synthetic oligonucleotide
gcccuuggccucagccaag

SEQ ID NO: 1733098 - RNA, 19 nt, Artificial Sequence
  Description of Artificial Sequence: Synthetic oligonucleotide
cagugcucacgggccuuca

SEQ ID NO: 1733099 - RNA, 19 nt, Artificial Sequence
  Description of Artificial Sequence: Synthetic oligonucleotide
gcuuggccccucccuggga

SEQ ID NO: 1733100 - RNA, 19 nt, Artificial Sequence
  Description of Artificial Sequence: Synthetic oligonucleotide
cucugcccucgucaccgcu

SEQ ID NO: 1733101 - RNA, 19 nt, Artificial Sequence
  Description of Artificial Sequence: Synthetic oligonucleotide
cugcggccucccucauaca

SEQ ID NO: 1733102 - RNA, 19 nt, Artificial Sequence
  Description of Artificial Sequence: Synthetic oligonucleotide
gugccaccguccaugucau

SEQ ID NO: 1733103 - RNA, 19 nt, Artificial Sequence
  Description of Artificial Sequence: Synthetic oligonucleotide
cucugcggccucccucaua

SEQ ID NO: 1733104 - RNA, 19 nt, Artificial Sequence
  Description of Artificial Sequence: Synthetic oligonucleotide
ccuuuggcgcaggcaggug

SEQ ID NO: 1733105 - RNA, 19 nt, Artificial Sequence
  Description of Artificial Sequence: Synthetic oligonucleotide
cccugcagccuggugauua

SEQ ID NO: 1733106 - RNA, 19 nt, Artificial Sequence
  Description of Artificial Sequence: Synthetic oligonucleotide
augaggcucugggccucuu

SEQ ID NO: 1733107 - RNA, 19 nt, Artificial Sequence
  Description of Artificial Sequence: Synthetic oligonucleotide
cugcagccuggugauuacu

SEQ ID NO: 1733108 - RNA, 19 nt, Artificial Sequence
  Description of Artificial Sequence: Synthetic oligonucleotide
cccuugcgcaggcucaucu

SEQ ID NO: 1733109 - RNA, 19 nt, Artificial Sequence
  Description of Artificial Sequence: Synthetic oligonucleotide
ccugcccuccuuguagaaa

SEQ ID NO: 1733110 - RNA, 19 nt, Artificial Sequence
  Description of Artificial Sequence: Synthetic oligonucleotide
gugcgucuccaaaguacuu

SEQ ID NO: 1733111 - RNA, 19 nt, Artificial Sequence
  Description of Artificial Sequence: Synthetic oligonucleotide
cccuuggccucagccaaga

SEQ ID NO: 1733112 - RNA, 19 nt, Artificial Sequence
  Description of Artificial Sequence: Synthetic oligonucleotide
ccgcuugccugccugggcu

SEQ ID NO: 1733113 - RNA, 19 nt, Artificial Sequence
  Description of Artificial Sequence: Synthetic oligonucleotide
gcggccucccucauacagu

SEQ ID NO: 1733114 - RNA, 19 nt, Artificial Sequence
  Description of Artificial Sequence: Synthetic oligonucleotide
cgggcacgaucauggaaaa

SEQ ID NO: 1733115 - RNA, 19 nt, Artificial Sequence
  Description of Artificial Sequence: Synthetic oligonucleotide
ggccucccucauacaguuc

SEQ ID NO: 1733116 - RNA, 19 nt, Artificial Sequence
  Description of Artificial Sequence: Synthetic oligonucleotide
cgucaccgcuaccuccaga

SEQ ID NO: 1733117 - RNA, 19 nt, Artificial Sequence
  Description of Artificial Sequence: Synthetic oligonucleotide
ggcuuccuguagagugcua

SEQ ID NO: 1733118 - RNA, 19 nt, Artificial Sequence
  Description of Artificial Sequence: Synthetic oligonucleotide
gcccuugcgcaggcucauc

SEQ ID NO: 1733119 - RNA, 19 nt, Artificial Sequence
  Description of Artificial Sequence: Synthetic oligonucleotide
gcauuccggaaugccccau

SEQ ID NO: 1733120 - RNA, 19 nt, Artificial Sequence
  Description of Artificial Sequence: Synthetic oligonucleotide
gggcccgaugcaggucuua

SEQ ID NO: 1733121 - RNA, 19 nt, Artificial Sequence
  Description of Artificial Sequence: Synthetic oligonucleotide
cgaagccguuccccuggaa

SEQ ID NO: 1733122 - RNA, 19 nt, Artificial Sequence
  Description of Artificial Sequence: Synthetic oligonucleotide
ccgcuaccuccagaaccuu

SEQ ID NO: 1733123 - RNA, 19 nt, Artificial Sequence
  Description of Artificial Sequence: Synthetic oligonucleotide
aaaguguuuggugugaucc

SEQ ID NO: 1733124 - RNA, 19 nt, Artificial Sequence
  Description of Artificial Sequence: Synthetic oligonucleotide
aauccagccaacuuuagug

SEQ ID NO: 1733125 - RNA, 19 nt, Artificial Sequence
  Description of Artificial Sequence: Synthetic oligonucleotide
aguucuaucacugagcuag

SEQ ID NO: 1733126 - RNA, 19 nt, Artificial Sequence
  Description of Artificial Sequence: Synthetic oligonucleotide
uucuauguccucaagugcg

SEQ ID NO: 1733127 - RNA, 19 nt, Artificial Sequence
  Description of Artificial Sequence: Synthetic oligonucleotide
  modified_base (5)..(5): a, c, u, g, unknown or other
aggunaaccuucuuguucc

SEQ ID NO: 1733128 - RNA, 19 nt, Artificial Sequence
  Description of Artificial Sequence: Synthetic oligonucleotide
cuaggaauugcacaaaugc

SEQ ID NO: 1733129 - RNA, 19 nt, Artificial Sequence
  Description of Artificial Sequence: Synthetic oligonucleotide
aacuuuagugucuacuguc

SEQ ID NO: 1733130 - RNA, 19 nt, Artificial Sequence
  Description of Artificial Sequence: Synthetic oligonucleotide
uauuucauuauccuuggga

SEQ ID NO: 1733131 - RNA, 19 nt, Artificial Sequence
  Description of Artificial Sequence: Synthetic oligonucleotide
ucucugaagaucuuaggcg

SEQ ID NO: 1733132 - RNA, 19 nt, Artificial Sequence
  Description of Artificial Sequence: Synthetic oligonucleotide
aaaguucuaucacugagcu

SEQ ID NO: 1733133 - RNA, 19 nt, Artificial Sequence
  Description of Artificial Sequence: Synthetic oligonucleotide
  modified_base (14)..(14): a, c, u, g, unknown or other
agugucaucaggunaaccu

SEQ ID NO: 1733134 - RNA, 19 nt, Artificial Sequence
  Description of Artificial Sequence: Synthetic oligonucleotide
ucaagugcgagcaagcacc

SEQ ID NO: 1733135 - RNA, 19 nt, Artificial Sequence
  Description of Artificial Sequence: Synthetic oligonucleotide
uuuacuggaggaaucaucu

SEQ ID NO: 1733136 - RNA, 19 nt, Artificial Sequence
  Description of Artificial Sequence: Synthetic oligonucleotide
ugauauuggaaacugacau

SEQ ID NO: 1733137 - RNA, 19 nt, Artificial Sequence
  Description of Artificial Sequence: Synthetic oligonucleotide
aagcauaugccauuucuuc

SEQ ID NO: 1733138 - RNA, 19 nt, Artificial Sequence
  Description of Artificial Sequence: Synthetic oligonucleotide
cuuuagugucauuagagcc

SEQ ID NO: 1733139 - RNA, 19 nt, Artificial Sequence
  Description of Artificial Sequence: Synthetic oligonucleotide
uaggaauugcacaaaugcg

SEQ ID NO: 1733140 - RNA, 19 nt, Artificial Sequence
  Description of Artificial Sequence: Synthetic oligonucleotide
uucucugaagaucuuaggc

SEQ ID NO: 1733141 - RNA, 19 nt, Artificial Sequence
  Description of Artificial Sequence: Synthetic oligonucleotide
ucacugaugacucugagua

SEQ ID NO: 1733142 - RNA, 19 nt, Artificial Sequence
  Description of Artificial Sequence: Synthetic oligonucleotide
ugacauucugaauugcagg

SEQ ID NO: 1733143 - RNA, 19 nt, Artificial Sequence
  Description of Artificial Sequence: Synthetic oligonucleotide
auucuauguccucaagugc

SEQ ID NO: 1733144 - RNA, 19 nt, Artificial Sequence
  Description of Artificial Sequence: Synthetic oligonucleotide
gaaacgguaacugacauuc

SEQ ID NO: 1733145 - RNA, 19 nt, Artificial Sequence
  Description of Artificial Sequence: Synthetic oligonucleotide
ucuccagucaccuucauuc

SEQ ID NO: 1733146 - RNA, 19 nt, Artificial Sequence
  Description of Artificial Sequence: Synthetic oligonucleotide
aggaagauauuucauuauc

SEQ ID NO: 1733147 - RNA, 19 nt, Artificial Sequence
  Description of Artificial Sequence: Synthetic oligonucleotide
aaagugcucucccuucggc

SEQ ID NO: 1733148 - RNA, 19 nt, Artificial Sequence
  Description of Artificial Sequence: Synthetic oligonucleotide
auauuggaaacugacauug

SEQ ID NO: 1733149 - RNA, 19 nt, Artificial Sequence
  Description of Artificial Sequence: Synthetic oligonucleotide
cuaucacugagcuaguaag

SEQ ID NO: 1733150 - RNA, 19 nt, Artificial Sequence
  Description of Artificial Sequence: Synthetic oligonucleotide
uuggauucaaucucuuuag

SEQ ID NO: 1733151 - RNA, 19 nt, Artificial Sequence
  Description of Artificial Sequence: Synthetic oligonucleotide
cauucuauguccucaagug

SEQ ID NO: 1733152 - RNA, 19 nt, Artificial Sequence
  Description of Artificial Sequence: Synthetic oligonucleotide
cucuuuagugucauuagag

SEQ ID NO: 1733153 - RNA, 19 nt, Artificial Sequence
  Description of Artificial Sequence: Synthetic oligonucleotide
uccacuuaugaacccauag

SEQ ID NO: 1733154 - RNA, 19 nt, Artificial Sequence
  Description of Artificial Sequence: Synthetic oligonucleotide
uaggcgaaaaguucuauca

SEQ ID NO: 1733155 - RNA, 19 nt, Artificial Sequence
  Description of Artificial Sequence: Synthetic oligonucleotide
ucaccuucauucuaugucc

SEQ ID NO: 1733156 - RNA, 19 nt, Artificial Sequence
  Description of Artificial Sequence: Synthetic oligonucleotide
aagaucuuaggcgaaaagu

SEQ ID NO: 1733157 - RNA, 19 nt, Artificial Sequence
  Description of Artificial Sequence: Synthetic oligonucleotide
auuagagccauuucuccag

SEQ ID NO: 1733158 - RNA, 19 nt, Artificial Sequence
  Description of Artificial Sequence: Synthetic oligonucleotide
aggaauugcacaaaugcgg

SEQ ID NO: 1733159 - RNA, 19 nt, Artificial Sequence
  Description of Artificial Sequence: Synthetic oligonucleotide
aacgguaacugacauucug

SEQ ID NO: 1733160 - RNA, 19 nt, Artificial Sequence
  Description of Artificial Sequence: Synthetic oligonucleotide
uccaguuucugaaaagugu

SEQ ID NO: 1733161 - RNA, 19 nt, Artificial Sequence
  Description of Artificial Sequence: Synthetic oligonucleotide
ugacugacaggugaaacgg

SEQ ID NO: 1733162 - RNA, 19 nt, Artificial Sequence
  Description of Artificial Sequence: Synthetic oligonucleotide
aauugcacaaaugcgguga

SEQ ID NO: 1733163 - RNA, 19 nt, Artificial Sequence
  Description of Artificial Sequence: Synthetic oligonucleotide
ucauucuauguccucaagu

SEQ ID NO: 1733164 - RNA, 19 nt, Artificial Sequence
  Description of Artificial Sequence: Synthetic oligonucleotide
gauucaaucucuuuagugu

SEQ ID NO: 1733165 - RNA, 19 nt, Artificial Sequence
  Description of Artificial Sequence: Synthetic oligonucleotide
aagauauuucauuauccuu

SEQ ID NO: 1733166 - RNA, 19 nt, Artificial Sequence
  Description of Artificial Sequence: Synthetic oligonucleotide
  modified_base (8)..(8): a, c, u, g, unknown or other
aucaggunaaccuucuugu

SEQ ID NO: 1733167 - RNA, 19 nt, Artificial Sequence
  Description of Artificial Sequence: Synthetic oligonucleotide
uggcuuuccacuuaugaac

SEQ ID NO: 1733168 - RNA, 19 nt, Artificial Sequence
  Description of Artificial Sequence: Synthetic oligonucleotide
aaaagugcucucccuucgg

SEQ ID NO: 1733169 - RNA, 19 nt, Artificial Sequence
  Description of Artificial Sequence: Synthetic oligonucleotide
ucauuagagccauuucucc

SEQ ID NO: 1733170 - RNA, 19 nt, Artificial Sequence
  Description of Artificial Sequence: Synthetic oligonucleotide
cauaguuggauucaaucuc

SEQ ID NO: 1733171 - RNA, 19 nt, Artificial Sequence
  Description of Artificial Sequence: Synthetic oligonucleotide
ucacugagcuaguaagugg

SEQ ID NO: 1733172 - RNA, 19 nt, Artificial Sequence
  Description of Artificial Sequence: Synthetic oligonucleotide
cuuucucugaagaucuuag

SEQ ID NO: 1733173 - RNA, 19 nt, Artificial Sequence
  Description of Artificial Sequence: Synthetic oligonucleotide
ucuucaacaucacagccua

SEQ ID NO: 1733174 - RNA, 19 nt, Artificial Sequence
  Description of Artificial Sequence: Synthetic oligonucleotide
ucucuuuagugucauuaga

SEQ ID NO: 1733175 - RNA, 19 nt, Artificial Sequence
  Description of Artificial Sequence: Synthetic oligonucleotide
uaguaaguggcuuuccacu

SEQ ID NO: 1733176 - RNA, 19 nt, Artificial Sequence
  Description of Artificial Sequence: Synthetic oligonucleotide
ucuaucacugagcuaguaa

SEQ ID NO: 1733177 - RNA, 19 nt, Artificial Sequence
  Description of Artificial Sequence: Synthetic oligonucleotide
gaagaucuuaggcgaaaag

SEQ ID NO: 1733178 - RNA, 19 nt, Artificial Sequence
  Description of Artificial Sequence: Synthetic oligonucleotide
ugacucugaguacauggcc

SEQ ID NO: 1733179 - RNA, 19 nt, Artificial Sequence
  Description of Artificial Sequence: Synthetic oligonucleotide
ucgccaaaggugauggugc

SEQ ID NO: 1733180 - RNA, 19 nt, Artificial Sequence
  Description of Artificial Sequence: Synthetic oligonucleotide
  modified_base (2)..(2): a, c, u, g, unknown or other
unaaccuucuuguuccuuc

SEQ ID NO: 1733181 - RNA, 19 nt, Artificial Sequence
  Description of Artificial Sequence: Synthetic oligonucleotide
gaagauauuucauuauccu

SEQ ID NO: 1733182 - RNA, 19 nt, Artificial Sequence
  Description of Artificial Sequence: Synthetic oligonucleotide
gaggaaucaucuuucucug

SEQ ID NO: 1733183 - RNA, 19 nt, Artificial Sequence
  Description of Artificial Sequence: Synthetic oligonucleotide
  modified_base (9)..(9): a, c, u, g, unknown or other
caucaggunaaccuucuug

SEQ ID NO: 1733184 - RNA, 19 nt, Artificial Sequence
  Description of Artificial Sequence: Synthetic oligonucleotide
aggcgaaaaguucuaucac

SEQ ID NO: 1733185 - RNA, 19 nt, Artificial Sequence
  Description of Artificial Sequence: Synthetic oligonucleotide
aguggcuuuccacuuauga

SEQ ID NO: 1733186 - RNA, 19 nt, Artificial Sequence
  Description of Artificial Sequence: Synthetic oligonucleotide
acugacauuguugaucuug

SEQ ID NO: 1733187 - RNA, 19 nt, Artificial Sequence
  Description of Artificial Sequence: Synthetic oligonucleotide
ucuuccaagcauaugccau

SEQ ID NO: 1733188 - RNA, 19 nt, Artificial Sequence
  Description of Artificial Sequence: Synthetic oligonucleotide
uucaaucucuuuaguguca

SEQ ID NO: 1733189 - RNA, 19 nt, Artificial Sequence
  Description of Artificial Sequence: Synthetic oligonucleotide
cauacuucccuucuucaac

SEQ ID NO: 1733190 - RNA, 19 nt, Artificial Sequence
  Description of Artificial Sequence: Synthetic oligonucleotide
ucaucuuucucugaagauc

SEQ ID NO: 1733191 - RNA, 19 nt, Artificial Sequence
  Description of Artificial Sequence: Synthetic oligonucleotide
uuaugaacccauaguugga

SEQ ID NO: 1733192 - RNA, 19 nt, Artificial Sequence
  Description of Artificial Sequence: Synthetic oligonucleotide
uaucacugagcuaguaagu

SEQ ID NO: 1733193 - RNA, 19 nt, Artificial Sequence
  Description of Artificial Sequence: Synthetic oligonucleotide
ugaguacauggccuugucc

SEQ ID NO: 1733194 - RNA, 19 nt, Artificial Sequence
  Description of Artificial Sequence: Synthetic oligonucleotide
uuucugaaaaguguuuggu

SEQ ID NO: 1733195 - RNA, 19 nt, Artificial Sequence
  Description of Artificial Sequence: Synthetic oligonucleotide
uaugccauuucuucauacu

SEQ ID NO: 1733196 - RNA, 19 nt, Artificial Sequence
  Description of Artificial Sequence: Synthetic oligonucleotide
aaaugcggugacugacagg

SEQ ID NO: 1733197 - RNA, 19 nt, Artificial Sequence
  Description of Artificial Sequence: Synthetic oligonucleotide
uauccuugggaagauguug

SEQ ID NO: 1733198 - RNA, 19 nt, Artificial Sequence
  Description of Artificial Sequence: Synthetic oligonucleotide
gcaagcaucuucuuuacug

SEQ ID NO: 1733199 - RNA, 19 nt, Artificial Sequence
  Description of Artificial Sequence: Synthetic oligonucleotide
ucaugagcaaugcaagcau

SEQ ID NO: 1733200 - RNA, 19 nt, Artificial Sequence
  Description of Artificial Sequence: Synthetic oligonucleotide
ugcggugacugacagguga

SEQ ID NO: 1733201 - RNA, 19 nt, Artificial Sequence
  Description of Artificial Sequence: Synthetic oligonucleotide
acagccuaggaauugcaca

SEQ ID NO: 1733202 - RNA, 19 nt, Artificial Sequence
  Description of Artificial Sequence: Synthetic oligonucleotide
aggugaaacgguaacugac

SEQ ID NO: 1733203 - RNA, 19 nt, Artificial Sequence
  Description of Artificial Sequence: Synthetic oligonucleotide
cuugggaagauguuguaga

SEQ ID NO: 1733204 - RNA, 19 nt, Artificial Sequence
  Description of Artificial Sequence: Synthetic oligonucleotide
agauguuguagagcuggcc

SEQ ID NO: 1733205 - RNA, 19 nt, Artificial Sequence
  Description of Artificial Sequence: Synthetic oligonucleotide
ggaagauauuucauuaucc

SEQ ID NO: 1733206 - RNA, 19 nt, Artificial Sequence
  Description of Artificial Sequence: Synthetic oligonucleotide
aucacagccuaggaauugc

SEQ ID NO: 1733207 - RNA, 19 nt, Artificial Sequence
  Description of Artificial Sequence: Synthetic oligonucleotide
cugaaaaguguuuggugug

SEQ ID NO: 1733208 - RNA, 19 nt, Artificial Sequence
  Description of Artificial Sequence: Synthetic oligonucleotide
  modified_base (12)..(12): a, c, u, g, unknown or other
ugucaucaggunaaccuuc

SEQ ID NO: 1733209 - RNA, 19 nt, Artificial Sequence
  Description of Artificial Sequence: Synthetic oligonucleotide
gaauugcaggcucagcuuc

SEQ ID NO: 1733210 - RNA, 19 nt, Artificial Sequence
  Description of Artificial Sequence: Synthetic oligonucleotide
uucauucuauguccucaag

SEQ ID NO: 1733211 - RNA, 19 nt, Artificial Sequence
  Description of Artificial Sequence: Synthetic oligonucleotide
augacucugaguacauggc

SEQ ID NO: 1733212 - RNA, 19 nt, Artificial Sequence
  Description of Artificial Sequence: Synthetic oligonucleotide
auacuucccuucuucaaca

SEQ ID NO: 1733213 - RNA, 19 nt, Artificial Sequence
  Description of Artificial Sequence: Synthetic oligonucleotide
acuuaugaacccauaguug

SEQ ID NO: 1733214 - RNA, 19 nt, Artificial Sequence
  Description of Artificial Sequence: Synthetic oligonucleotide
acuggaggaaucaucuuuc

SEQ ID NO: 1733215 - RNA, 19 nt, Artificial Sequence
  Description of Artificial Sequence: Synthetic oligonucleotide
agcaccagugucuuccaag

SEQ ID NO: 1733216 - RNA, 19 nt, Artificial Sequence
  Description of Artificial Sequence: Synthetic oligonucleotide
uccaguagucucagcaucu

SEQ ID NO: 1733217 - RNA, 19 nt, Artificial Sequence
  Description of Artificial Sequence: Synthetic oligonucleotide
acaggugaaacgguaacug

SEQ ID NO: 1733218 - RNA, 19 nt, Artificial Sequence
  Description of Artificial Sequence: Synthetic oligonucleotide
uuaggcgaaaaguucuauc

SEQ ID NO: 1733219 - RNA, 19 nt, Artificial Sequence
  Description of Artificial Sequence: Synthetic oligonucleotide
agugcgagcaagcaccagu

SEQ ID NO: 1733220 - RNA, 19 nt, Artificial Sequence
  Description of Artificial Sequence: Synthetic oligonucleotide
aaguguuuggugugaucca

SEQ ID NO: 1733221 - RNA, 19 nt, Artificial Sequence
  Description of Artificial Sequence: Synthetic oligonucleotide
ucuauguccucaagugcga

SEQ ID NO: 1733222 - RNA, 19 nt, Artificial Sequence
  Description of Artificial Sequence: Synthetic oligonucleotide
uccaggaagauauuucauu

SEQ ID NO: 1733223 - RNA, 19 nt, Artificial Sequence
  Description of Artificial Sequence: Synthetic oligonucleotide
ucuucuuuacuggaggaau

SEQ ID NO: 1733224 - RNA, 19 nt, Artificial Sequence
  Description of Artificial Sequence: Synthetic oligonucleotide
uuggugugauccaggaaga

SEQ ID NO: 1733225 - RNA, 19 nt, Artificial Sequence
  Description of Artificial Sequence: Synthetic oligonucleotide
cucugaagaucuuaggcga

SEQ ID NO: 1733226 - RNA, 19 nt, Artificial Sequence
  Description of Artificial Sequence: Synthetic oligonucleotide
gaucuuaggcgaaaaguuc

SEQ ID NO: 1733227 - RNA, 19 nt, Artificial Sequence
  Description of Artificial Sequence: Synthetic oligonucleotide
gaauugcacaaaugcggug

SEQ ID NO: 1733228 - RNA, 19 nt, Artificial Sequence
  Description of Artificial Sequence: Synthetic oligonucleotide
aagugcucucccuucggca

SEQ ID NO: 1733229 - RNA, 19 nt, Artificial Sequence
  Description of Artificial Sequence: Synthetic oligonucleotide
agagccauuucuccaguca

SEQ ID NO: 1733230 - RNA, 19 nt, Artificial Sequence
  Description of Artificial Sequence: Synthetic oligonucleotide
  modified_base (6)..(6): a, c, u, g, unknown or other
caggunaaccuucuuguuc

SEQ ID NO: 1733231 - RNA, 19 nt, Artificial Sequence
  Description of Artificial Sequence: Synthetic oligonucleotide
uauguccucaagugcgagc

SEQ ID NO: 1733232 - RNA, 19 nt, Artificial Sequence
  Description of Artificial Sequence: Synthetic oligonucleotide
uauuggaaacugacauugu

SEQ ID NO: 1733233 - RNA, 19 nt, Artificial Sequence
  Description of Artificial Sequence: Synthetic oligonucleotide
aucacugaugacucugagu

SEQ ID NO: 1733234 - RNA, 19 nt, Artificial Sequence
  Description of Artificial Sequence: Synthetic oligonucleotide
uggauucaaucucuuuagu

SEQ ID NO: 1733235 - RNA, 19 nt, Artificial Sequence
  Description of Artificial Sequence: Synthetic oligonucleotide
aguuuucuccaguuucuga

SEQ ID NO: 1733236 - RNA, 19 nt, Artificial Sequence
  Description of Artificial Sequence: Synthetic oligonucleotide
caaaugcggugacugacag

SEQ ID NO: 1733237 - RNA, 19 nt, Artificial Sequence
  Description of Artificial Sequence: Synthetic oligonucleotide
uuguagagcuggcccauca

SEQ ID NO: 1733238 - RNA, 19 nt, Artificial Sequence
  Description of Artificial Sequence: Synthetic oligonucleotide
cuccaguuucugaaaagug

SEQ ID NO: 1733239 - RNA, 19 nt, Artificial Sequence
  Description of Artificial Sequence: Synthetic oligonucleotide
gagcaaugcaagcaucuuc

SEQ ID NO: 1733240 - RNA, 19 nt, Artificial Sequence
  Description of Artificial Sequence: Synthetic oligonucleotide
uuuccacuuaugaacccau

SEQ ID NO: 1733241 - RNA, 19 nt, Artificial Sequence
  Description of Artificial Sequence: Synthetic oligonucleotide
gagccauuucuccagucac

SEQ ID NO: 1733242 - RNA, 19 nt, Artificial Sequence
  Description of Artificial Sequence: Synthetic oligonucleotide
agaucuuaggcgaaaaguu

SEQ ID NO: 1733243 - RNA, 19 nt, Artificial Sequence
  Description of Artificial Sequence: Synthetic oligonucleotide
aguguuuggugugauccag

SEQ ID NO: 1733244 - RNA, 19 nt, Artificial Sequence
  Description of Artificial Sequence: Synthetic oligonucleotide
ugagcuaguaaguggcuuu

SEQ ID NO: 1733245 - RNA, 19 nt, Artificial Sequence
  Description of Artificial Sequence: Synthetic oligonucleotide
auaguuggauucaaucucu

SEQ ID NO: 1733246 - RNA, 19 nt, Artificial Sequence
  Description of Artificial Sequence: Synthetic oligonucleotide
aucuuaggcgaaaaguucu

SEQ ID NO: 1733247 - RNA, 19 nt, Artificial Sequence
  Description of Artificial Sequence: Synthetic oligonucleotide
accagugucuuccaagcau

SEQ ID NO: 1733248 - RNA, 19 nt, Artificial Sequence
  Description of Artificial Sequence: Synthetic oligonucleotide
auccagccaacuuuagugu

SEQ ID NO: 1733249 - RNA, 19 nt, Artificial Sequence
  Description of Artificial Sequence: Synthetic oligonucleotide
aguagucucagcaucuccu

SEQ ID NO: 1733250 - RNA, 19 nt, Artificial Sequence
  Description of Artificial Sequence: Synthetic oligonucleotide
ugaauugcaggcucagcuu

SEQ ID NO: 1733251 - RNA, 19 nt, Artificial Sequence
  Description of Artificial Sequence: Synthetic oligonucleotide
  modified_base (7)..(7): a, c, u, g, unknown or other
ucaggunaaccuucuuguu

SEQ ID NO: 1733252 - RNA, 19 nt, Artificial Sequence
  Description of Artificial Sequence: Synthetic oligonucleotide
uaugaacccauaguuggau

SEQ ID NO: 1733253 - RNA, 19 nt, Artificial Sequence
  Description of Artificial Sequence: Synthetic oligonucleotide
cauuagagccauuucucca

SEQ ID NO: 1733254 - RNA, 19 nt, Artificial Sequence
  Description of Artificial Sequence: Synthetic oligonucleotide
ucucccuucggcaggugga

SEQ ID NO: 1733255 - RNA, 19 nt, Artificial Sequence
  Description of Artificial Sequence: Synthetic oligonucleotide
aguaaguggcuuuccacuu

SEQ ID NO: 1733256 - RNA, 19 nt, Artificial Sequence
  Description of Artificial Sequence: Synthetic oligonucleotide
cucaagugcgagcaagcac

SEQ ID NO: 1733257 - RNA, 19 nt, Artificial Sequence
  Description of Artificial Sequence: Synthetic oligonucleotide
uuagugucauuagagccau

SEQ ID NO: 1733258 - RNA, 19 nt, Artificial Sequence
  Description of Artificial Sequence: Synthetic oligonucleotide
agugucauuagagccauuu

SEQ ID NO: 1733259 - RNA, 19 nt, Artificial Sequence
  Description of Artificial Sequence: Synthetic oligonucleotide
auguccucaagugcgagca

SEQ ID NO: 1733260 - RNA, 19 nt, Artificial Sequence
  Description of Artificial Sequence: Synthetic oligonucleotide
  modified_base (17)..(17): a, c, u, g, unknown or other
cucagugucaucaggunaa

SEQ ID NO: 1733261 - RNA, 19 nt, Artificial Sequence
  Description of Artificial Sequence: Synthetic oligonucleotide
ucuuaggcgaaaaguucua

SEQ ID NO: 1733262 - RNA, 19 nt, Artificial Sequence
  Description of Artificial Sequence: Synthetic oligonucleotide
uagucucagcaucuccuga

SEQ ID NO: 1733263 - RNA, 19 nt, Artificial Sequence
  Description of Artificial Sequence: Synthetic oligonucleotide
uucugaauugcaggcucag

SEQ ID NO: 1733264 - RNA, 19 nt, Artificial Sequence
  Description of Artificial Sequence: Synthetic oligonucleotide
caugagcaaugcaagcauc

SEQ ID NO: 1733265 - RNA, 19 nt, Artificial Sequence
  Description of Artificial Sequence: Synthetic oligonucleotide
uguccaguagucucagcau

SEQ ID NO: 1733266 - RNA, 19 nt, Artificial Sequence
  Description of Artificial Sequence: Synthetic oligonucleotide
agccauuucuccagucacc

SEQ ID NO: 1733267 - RNA, 19 nt, Artificial Sequence
  Description of Artificial Sequence: Synthetic oligonucleotide
accuucauucuauguccuc

SEQ ID NO: 1733268 - RNA, 19 nt, Artificial Sequence
  Description of Artificial Sequence: Synthetic oligonucleotide
cacaaaugcggugacugac

SEQ ID NO: 1733269 - RNA, 19 nt, Artificial Sequence
  Description of Artificial Sequence: Synthetic oligonucleotide
acuuuagugucuacuguca

SEQ ID NO: 1733270 - RNA, 19 nt, Artificial Sequence
  Description of Artificial Sequence: Synthetic oligonucleotide
ucacagccuaggaauugca

SEQ ID NO: 1733271 - RNA, 19 nt, Artificial Sequence
  Description of Artificial Sequence: Synthetic oligonucleotide
uucuuguuccuuccauguc

SEQ ID NO: 1733272 - RNA, 19 nt, Artificial Sequence
  Description of Artificial Sequence: Synthetic oligonucleotide
acugacauucugaauugca

SEQ ID NO: 1733273 - RNA, 19 nt, Artificial Sequence
  Description of Artificial Sequence: Synthetic oligonucleotide
agucaccuucauucuaugu

SEQ ID NO: 1733274 - RNA, 19 nt, Artificial Sequence
  Description of Artificial Sequence: Synthetic oligonucleotide
ugaagaucuuaggcgaaaa

SEQ ID NO: 1733275 - RNA, 19 nt, Artificial Sequence
  Description of Artificial Sequence: Synthetic oligonucleotide
cucgccaaaggugauggug

SEQ ID NO: 1733276 - RNA, 19 nt, Artificial Sequence
  Description of Artificial Sequence: Synthetic oligonucleotide
cucaugagcaaugcaagca

SEQ ID NO: 1733277 - RNA, 19 nt, Artificial Sequence
  Description of Artificial Sequence: Synthetic oligonucleotide
aaccuucuuguuccuucca

SEQ ID NO: 1733278 - RNA, 19 nt, Artificial Sequence
  Description of Artificial Sequence: Synthetic oligonucleotide
augagcaaugcaagcaucu

SEQ ID NO: 1733279 - RNA, 19 nt, Artificial Sequence
  Description of Artificial Sequence: Synthetic oligonucleotide
uccagccaacuuuaguguc

SEQ ID NO: 1733280 - RNA, 19 nt, Artificial Sequence
  Description of Artificial Sequence: Synthetic oligonucleotide
ucugaguacauggccuugu

SEQ ID NO: 1733281 - RNA, 19 nt, Artificial Sequence
  Description of Artificial Sequence: Synthetic oligonucleotide
cugaauugcaggcucagcu

SEQ ID NO: 1733282 - RNA, 19 nt, Artificial Sequence
  Description of Artificial Sequence: Synthetic oligonucleotide
  modified_base (16)..(16): a, c, u, g, unknown or other
ucagugucaucaggunaac

SEQ ID NO: 1733283 - RNA, 19 nt, Artificial Sequence
  Description of Artificial Sequence: Synthetic oligonucleotide
gcaagcaccagugucuucc

SEQ ID NO: 1733284 - RNA, 19 nt, Artificial Sequence
  Description of Artificial Sequence: Synthetic oligonucleotide
ugaaacgguaacugacauu

SEQ ID NO: 1733285 - RNA, 19 nt, Artificial Sequence
  Description of Artificial Sequence: Synthetic oligonucleotide
caguagucucagcaucucc

SEQ ID NO: 1733286 - RNA, 19 nt, Artificial Sequence
  Description of Artificial Sequence: Synthetic oligonucleotide
caucacugaugacucugag

SEQ ID NO: 1733287 - RNA, 19 nt, Artificial Sequence
  Description of Artificial Sequence: Synthetic oligonucleotide
  modified_base (10)..(10): a, c, u, g, unknown or other
ucaucaggunaaccuucuu

SEQ ID NO: 1733288 - RNA, 19 nt, Artificial Sequence
  Description of Artificial Sequence: Synthetic oligonucleotide
aauugcaggcucagcuucu

SEQ ID NO: 1733289 - RNA, 19 nt, Artificial Sequence
  Description of Artificial Sequence: Synthetic oligonucleotide
ugcaagcaucuucuuuacu

SEQ ID NO: 1733290 - RNA, 19 nt, Artificial Sequence
  Description of Artificial Sequence: Synthetic oligonucleotide
cacagccuaggaauugcac

SEQ ID NO: 1733291 - RNA, 19 nt, Artificial Sequence
  Description of Artificial Sequence: Synthetic oligonucleotide
gcgaaaaguucuaucacug

SEQ ID NO: 1733292 - RNA, 19 nt, Artificial Sequence
  Description of Artificial Sequence: Synthetic oligonucleotide
guccaguagucucagcauc

SEQ ID NO: 1733293 - RNA, 19 nt, Artificial Sequence
  Description of Artificial Sequence: Synthetic oligonucleotide
cccauaguuggauucaauc

SEQ ID NO: 1733294 - RNA, 19 nt, Artificial Sequence
  Description of Artificial Sequence: Synthetic oligonucleotide
acgguaacugacauucuga

SEQ ID NO: 1733295 - RNA, 19 nt, Artificial Sequence
  Description of Artificial Sequence: Synthetic oligonucleotide
auccuugggaagauguugu

SEQ ID NO: 1733296 - RNA, 19 nt, Artificial Sequence
  Description of Artificial Sequence: Synthetic oligonucleotide
acaaaugcggugacugaca

SEQ ID NO: 1733297 - RNA, 19 nt, Artificial Sequence
  Description of Artificial Sequence: Synthetic oligonucleotide
aaguucuaucacugagcua

SEQ ID NO: 1733298 - RNA, 19 nt, Artificial Sequence
  Description of Artificial Sequence: Synthetic oligonucleotide
cacuuaugaacccauaguu

SEQ ID NO: 1733299 - RNA, 19 nt, Artificial Sequence
  Description of Artificial Sequence: Synthetic oligonucleotide
gcaccagugucuuccaagc

SEQ ID NO: 1733300 - RNA, 19 nt, Artificial Sequence
  Description of Artificial Sequence: Synthetic oligonucleotide
ugacauuguugaucuugaa

SEQ ID NO: 1733301 - RNA, 19 nt, Artificial Sequence
  Description of Artificial Sequence: Synthetic oligonucleotide
gaauccagccaacuuuagu

SEQ ID NO: 1733302 - RNA, 19 nt, Artificial Sequence
  Description of Artificial Sequence: Synthetic oligonucleotide
ucuuuacuggaggaaucau

SEQ ID NO: 1733303 - RNA, 19 nt, Artificial Sequence
  Description of Artificial Sequence: Synthetic oligonucleotide
cagccuaggaauugcacaa

SEQ ID NO: 1733304 - RNA, 19 nt, Artificial Sequence
  Description of Artificial Sequence: Synthetic oligonucleotide
gugucauuagagccauuuc

SEQ ID NO: 1733305 - RNA, 19 nt, Artificial Sequence
  Description of Artificial Sequence: Synthetic oligonucleotide
cacugaugacucugaguac

SEQ ID NO: 1733306 - RNA, 19 nt, Artificial Sequence
  Description of Artificial Sequence: Synthetic oligonucleotide
cuuuccacuuaugaaccca

SEQ ID NO: 1733307 - RNA, 19 nt, Artificial Sequence
  Description of Artificial Sequence: Synthetic oligonucleotide
ccuaggaauugcacaaaug

SEQ ID NO: 1733308 - RNA, 19 nt, Artificial Sequence
  Description of Artificial Sequence: Synthetic oligonucleotide
cuucauucuauguccucaa

SEQ ID NO: 1733309 - RNA, 19 nt, Artificial Sequence
  Description of Artificial Sequence: Synthetic oligonucleotide
caggugaaacgguaacuga

SEQ ID NO: 1733310 - RNA, 19 nt, Artificial Sequence
  Description of Artificial Sequence: Synthetic oligonucleotide
uaguuggauucaaucucuu

SEQ ID NO: 1733311 - RNA, 19 nt, Artificial Sequence
  Description of Artificial Sequence: Synthetic oligonucleotide
ugcgagcaagcaccagugu

SEQ ID NO: 1733312 - RNA, 19 nt, Artificial Sequence
  Description of Artificial Sequence: Synthetic oligonucleotide
caucacagccuaggaauug

SEQ ID NO: 1733313 - RNA, 19 nt, Artificial Sequence
  Description of Artificial Sequence: Synthetic oligonucleotide
uccaagcauaugccauuuc

SEQ ID NO: 1733314 - RNA, 19 nt, Artificial Sequence
  Description of Artificial Sequence: Synthetic oligonucleotide
gacucugaguacauggccu

SEQ ID NO: 1733315 - RNA, 19 nt, Artificial Sequence
  Description of Artificial Sequence: Synthetic oligonucleotide
augaacccauaguuggauu

SEQ ID NO: 1733316 - RNA, 19 nt, Artificial Sequence
  Description of Artificial Sequence: Synthetic oligonucleotide
cuucaacaucacagccuag

SEQ ID NO: 1733317 - RNA, 19 nt, Artificial Sequence
  Description of Artificial Sequence: Synthetic oligonucleotide
cuauguccucaagugcgag

SEQ ID NO: 1733318 - RNA, 19 nt, Artificial Sequence
  Description of Artificial Sequence: Synthetic oligonucleotide
agccaacuuuagugucuac

SEQ ID NO: 1733319 - RNA, 19 nt, Artificial Sequence
  Description of Artificial Sequence: Synthetic oligonucleotide
uugcaggcucagcuucuca

SEQ ID NO: 1733320 - RNA, 19 nt, Artificial Sequence
  Description of Artificial Sequence: Synthetic oligonucleotide
ggugaaacgguaacugaca

SEQ ID NO: 1733321 - RNA, 19 nt, Artificial Sequence
  Description of Artificial Sequence: Synthetic oligonucleotide
aacccauaguuggauucaa

SEQ ID NO: 1733322 - RNA, 19 nt, Artificial Sequence
  Description of Artificial Sequence: Synthetic oligonucleotide
guggaauccagccaacuuu

SEQ ID NO: 1733323 - RNA, 19 nt, Artificial Sequence
  Description of Artificial Sequence: Synthetic oligonucleotide
uuccacuuaugaacccaua

SEQ ID NO: 1733324 - RNA, 19 nt, Artificial Sequence
  Description of Artificial Sequence: Synthetic oligonucleotide
uagagccauuucuccaguc

SEQ ID NO: 1733325 - RNA, 19 nt, Artificial Sequence
  Description of Artificial Sequence: Synthetic oligonucleotide
gugcgagcaagcaccagug

SEQ ID NO: 1733326 - RNA, 19 nt, Artificial Sequence
  Description of Artificial Sequence: Synthetic oligonucleotide
aaacgguaacugacauucu

SEQ ID NO: 1733327 - RNA, 19 nt, Artificial Sequence
  Description of Artificial Sequence: Synthetic oligonucleotide
agcaagcaccagugucuuc

SEQ ID NO: 1733328 - RNA, 19 nt, Artificial Sequence
  Description of Artificial Sequence: Synthetic oligonucleotide
ugagcaaugcaagcaucuu

SEQ ID NO: 1733329 - RNA, 19 nt, Artificial Sequence
  Description of Artificial Sequence: Synthetic oligonucleotide
acugacaggugaaacggua

SEQ ID NO: 1733330 - RNA, 19 nt, Artificial Sequence
  Description of Artificial Sequence: Synthetic oligonucleotide
uacuucccuucuucaacau

SEQ ID NO: 1733331 - RNA, 19 nt, Artificial Sequence
  Description of Artificial Sequence: Synthetic oligonucleotide
ggcgaaaaguucuaucacu

SEQ ID NO: 1733332 - RNA, 19 nt, Artificial Sequence
  Description of Artificial Sequence: Synthetic oligonucleotide
cagucaccuucauucuaug

SEQ ID NO: 1733333 - RNA, 19 nt, Artificial Sequence
  Description of Artificial Sequence: Synthetic oligonucleotide
uuccaagcauaugccauuu

SEQ ID NO: 1733334 - RNA, 19 nt, Artificial Sequence
  Description of Artificial Sequence: Synthetic oligonucleotide
aagcaccagugucuuccaa

SEQ ID NO: 1733335 - RNA, 19 nt, Artificial Sequence
  Description of Artificial Sequence: Synthetic oligonucleotide
  modified_base (15)..(15): a, c, u, g, unknown or other
cagugucaucaggunaacc

SEQ ID NO: 1733336 - RNA, 19 nt, Artificial Sequence
  Description of Artificial Sequence: Synthetic oligonucleotide
ccaggaagauauuucauua

SEQ ID NO: 1733337 - RNA, 19 nt, Artificial Sequence
  Description of Artificial Sequence: Synthetic oligonucleotide
uccuugggaagauguugua

SEQ ID NO: 1733338 - RNA, 19 nt, Artificial Sequence
  Description of Artificial Sequence: Synthetic oligonucleotide
guaaguggcuuuccacuua

SEQ ID NO: 1733339 - RNA, 19 nt, Artificial Sequence
  Description of Artificial Sequence: Synthetic oligonucleotide
aagugcgagcaagcaccag

SEQ ID NO: 1733340 - RNA, 19 nt, Artificial Sequence
  Description of Artificial Sequence: Synthetic oligonucleotide
gcuuuccacuuaugaaccc

SEQ ID NO: 1733341 - RNA, 19 nt, Artificial Sequence
  Description of Artificial Sequence: Synthetic oligonucleotide
caacuuuagugucuacugu

SEQ ID NO: 1733342 - RNA, 19 nt, Artificial Sequence
  Description of Artificial Sequence: Synthetic oligonucleotide
gcgagcaagcaccaguguc

SEQ ID NO: 1733343 - RNA, 19 nt, Artificial Sequence
  Description of Artificial Sequence: Synthetic oligonucleotide
ccauaguuggauucaaucu

SEQ ID NO: 1733344 - RNA, 19 nt, Artificial Sequence
  Description of Artificial Sequence: Synthetic oligonucleotide
caaagcgcucgccaaaggu

SEQ ID NO: 1733345 - RNA, 19 nt, Artificial Sequence
  Description of Artificial Sequence: Synthetic oligonucleotide
gugaaacgguaacugacau

SEQ ID NO: 1733346 - RNA, 19 nt, Artificial Sequence
  Description of Artificial Sequence: Synthetic oligonucleotide
uugcacaaaugcggugacu

SEQ ID NO: 1733347 - RNA, 19 nt, Artificial Sequence
  Description of Artificial Sequence: Synthetic oligonucleotide
acugagcuaguaaguggcu

SEQ ID NO: 1733348 - RNA, 19 nt, Artificial Sequence
  Description of Artificial Sequence: Synthetic oligonucleotide
caagugcgagcaagcacca

SEQ ID NO: 1733349 - RNA, 19 nt, Artificial Sequence
  Description of Artificial Sequence: Synthetic oligonucleotide
caagcauaugccauuucuu

SEQ ID NO: 1733350 - RNA, 19 nt, Artificial Sequence
  Description of Artificial Sequence: Synthetic oligonucleotide
gcuggcccaucacugauga

SEQ ID NO: 1733351 - RNA, 19 nt, Artificial Sequence
  Description of Artificial Sequence: Synthetic oligonucleotide
ggaauugcacaaaugcggu

SEQ ID NO: 1733352 - RNA, 19 nt, Artificial Sequence
  Description of Artificial Sequence: Synthetic oligonucleotide
aaguggcuuuccacuuaug

SEQ ID NO: 1733353 - RNA, 19 nt, Artificial Sequence
  Description of Artificial Sequence: Synthetic oligonucleotide
cucugaguacauggccuug

SEQ ID NO: 1733354 - RNA, 19 nt, Artificial Sequence
  Description of Artificial Sequence: Synthetic oligonucleotide
caggaagauauuucauuau

SEQ ID NO: 1733355 - RNA, 19 nt, Artificial Sequence
  Description of Artificial Sequence: Synthetic oligonucleotide
gaaaaguguuuggugugau

SEQ ID NO: 1733356 - RNA, 19 nt, Artificial Sequence
  Description of Artificial Sequence: Synthetic oligonucleotide
cauaugccauuucuucaua

SEQ ID NO: 1733357 - RNA, 19 nt, Artificial Sequence
  Description of Artificial Sequence: Synthetic oligonucleotide
uggugugauccaggaagau

SEQ ID NO: 1733358 - RNA, 19 nt, Artificial Sequence
  Description of Artificial Sequence: Synthetic oligonucleotide
cauggccuuguccaguagu

SEQ ID NO: 1733359 - RNA, 19 nt, Artificial Sequence
  Description of Artificial Sequence: Synthetic oligonucleotide
gcauaugccauuucuucau

SEQ ID NO: 1733360 - RNA, 19 nt, Artificial Sequence
  Description of Artificial Sequence: Synthetic oligonucleotide
ccuucauucuauguccuca

SEQ ID NO: 1733361 - RNA, 19 nt, Artificial Sequence
  Description of Artificial Sequence: Synthetic oligonucleotide
cugaagaucuuaggcgaaa

SEQ ID NO: 1733362 - RNA, 19 nt, Artificial Sequence
  Description of Artificial Sequence: Synthetic oligonucleotide
cuuccaagcauaugccauu

SEQ ID NO: 1733363 - RNA, 19 nt, Artificial Sequence
  Description of Artificial Sequence: Synthetic oligonucleotide
ggugugauccaggaagaua

SEQ ID NO: 1733364 - RNA, 19 nt, Artificial Sequence
  Description of Artificial Sequence: Synthetic oligonucleotide
agcuggcccaucacugaug

SEQ ID NO: 1733365 - RNA, 19 nt, Artificial Sequence
  Description of Artificial Sequence: Synthetic oligonucleotide
gcacaaaugcggugacuga

SEQ ID NO: 1733366 - RNA, 19 nt, Artificial Sequence
  Description of Artificial Sequence: Synthetic oligonucleotide
gguaacugacauucugaau

SEQ ID NO: 1733367 - RNA, 19 nt, Artificial Sequence
  Description of Artificial Sequence: Synthetic oligonucleotide
  modified_base (11)..(11): a, c, u, g, unknown or other
gucaucaggunaaccuucu

SEQ ID NO: 1733368 - RNA, 19 nt, Artificial Sequence
  Description of Artificial Sequence: Synthetic oligonucleotide
  modified_base (13)..(13): a, c, u, g, unknown or other
gugucaucaggunaaccuu

SEQ ID NO: 1733369 - RNA, 19 nt, Artificial Sequence
  Description of Artificial Sequence: Synthetic oligonucleotide
agccuaggaauugcacaaa

SEQ ID NO: 1733370 - RNA, 19 nt, Artificial Sequence
  Description of Artificial Sequence: Synthetic oligonucleotide
gugauccaggaagauauuu

SEQ ID NO: 1733371 - RNA, 19 nt, Artificial Sequence
  Description of Artificial Sequence: Synthetic oligonucleotide
cgaaaaguucuaucacuga

SEQ ID NO: 1733372 - RNA, 19 nt, Artificial Sequence
  Description of Artificial Sequence: Synthetic oligonucleotide
caguuucugaaaaguguuu

SEQ ID NO: 1733373 - RNA, 19 nt, Artificial Sequence
  Description of Artificial Sequence: Synthetic oligonucleotide
gccaacuuuagugucuacu

SEQ ID NO: 1733374 - RNA, 19 nt, Artificial Sequence
  Description of Artificial Sequence: Synthetic oligonucleotide
gacugacaggugaaacggu

SEQ ID NO: 1733375 - RNA, 19 nt, Artificial Sequence
  Description of Artificial Sequence: Synthetic oligonucleotide
acccauaguuggauucaau

SEQ ID NO: 1733376 - RNA, 19 nt, Artificial Sequence
  Description of Artificial Sequence: Synthetic oligonucleotide
ccacuuaugaacccauagu

SEQ ID NO: 1733377 - RNA, 19 nt, Artificial Sequence
  Description of Artificial Sequence: Synthetic oligonucleotide
  modified_base (4)..(4): a, c, u, g, unknown or other
ggunaaccuucuuguuccu

SEQ ID NO: 1733378 - RNA, 19 nt, Artificial Sequence
  Description of Artificial Sequence: Synthetic oligonucleotide
cuggcccaucacugaugac

SEQ ID NO: 1733379 - RNA, 19 nt, Artificial Sequence
  Description of Artificial Sequence: Synthetic oligonucleotide
cuuaggcgaaaaguucuau

SEQ ID NO: 1733380 - RNA, 19 nt, Artificial Sequence
  Description of Artificial Sequence: Synthetic oligonucleotide
gccauuucuccagucaccu

SEQ ID NO: 1733381 - RNA, 19 nt, Artificial Sequence
  Description of Artificial Sequence: Synthetic oligonucleotide
uagugucauuagagccauu

SEQ ID NO: 1733382 - RNA, 19 nt, Artificial Sequence
  Description of Artificial Sequence: Synthetic oligonucleotide
cagccaacuuuagugucua

SEQ ID NO: 1733383 - RNA, 19 nt, Artificial Sequence
  Description of Artificial Sequence: Synthetic oligonucleotide
cgagcaagcaccagugucu

SEQ ID NO: 1733384 - RNA, 19 nt, Artificial Sequence
  Description of Artificial Sequence: Synthetic oligonucleotide
gccuaggaauugcacaaau

SEQ ID NO: 1733385 - RNA, 19 nt, Artificial Sequence
  Description of Artificial Sequence: Synthetic oligonucleotide
cagugucuuccaagcauau

SEQ ID NO: 1733386 - RNA, 19 nt, Artificial Sequence
  Description of Artificial Sequence: Synthetic oligonucleotide
  modified_base (3)..(3): a, c, u, g, unknown or other
gunaaccuucuuguuccuu

SEQ ID NO: 1733387 - RNA, 19 nt, Artificial Sequence
  Description of Artificial Sequence: Synthetic oligonucleotide
ccagccaacuuuagugucu

SEQ ID NO: 1733388 - RNA, 19 nt, Artificial Sequence
  Description of Artificial Sequence: Synthetic oligonucleotide
cugagcuaguaaguggcuu

SEQ ID NO: 1733389 - RNA, 19 nt, Artificial Sequence
  Description of Artificial Sequence: Synthetic oligonucleotide
augcggugacugacaggug

SEQ ID NO: 1733390 - RNA, 19 nt, Artificial Sequence
  Description of Artificial Sequence: Synthetic oligonucleotide
guucuaucacugagcuagu

SEQ ID NO: 1733391 - RNA, 19 nt, Artificial Sequence
  Description of Artificial Sequence: Synthetic oligonucleotide
ccucaagugcgagcaagca

SEQ ID NO: 1733392 - RNA, 19 nt, Artificial Sequence
  Description of Artificial Sequence: Synthetic oligonucleotide
agcgcucgccaaaggugau

SEQ ID NO: 1733393 - RNA, 19 nt, Artificial Sequence
  Description of Artificial Sequence: Synthetic oligonucleotide
gcggugacugacaggugaa

SEQ ID NO: 1733394 - RNA, 19 nt, Artificial Sequence
  Description of Artificial Sequence: Synthetic oligonucleotide
gccaaaggugauggugcaa

SEQ ID NO: 1733395 - RNA, 19 nt, Artificial Sequence
  Description of Artificial Sequence: Synthetic oligonucleotide
cgccaaaggugauggugca

SEQ ID NO: 1733396 - RNA, 19 nt, Artificial Sequence
  Description of Artificial Sequence: Synthetic oligonucleotide
gcucucccuucggcaggug

SEQ ID NO: 1733397 - RNA, 19 nt, Artificial Sequence
  Description of Artificial Sequence: Synthetic oligonucleotide
cggugacugacaggugaaa

SEQ ID NO: 1733398 - RNA, 19 nt, Artificial Sequence
  Description of Artificial Sequence: Synthetic oligonucleotide
  modified_base (1)..(1): a, c, u, g, unknown or other
naaccuucuuguuccuucc

SEQ ID NO: 1733399 - RNA, 19 nt, Artificial Sequence
  Description of Artificial Sequence: Synthetic oligonucleotide
ugaauuugcucacagaucc

SEQ ID NO: 1733400 - RNA, 19 nt, Artificial Sequence
  Description of Artificial Sequence: Synthetic oligonucleotide
aauaaaagcagacacugga

SEQ ID NO: 1733401 - RNA, 19 nt, Artificial Sequence
  Description of Artificial Sequence: Synthetic oligonucleotide
aaggaauccagcuaucuuc

SEQ ID NO: 1733402 - RNA, 19 nt, Artificial Sequence
  Description of Artificial Sequence: Synthetic oligonucleotide
uaggaagugaauaauauac

SEQ ID NO: 1733403 - RNA, 19 nt, Artificial Sequence
  Description of Artificial Sequence: Synthetic oligonucleotide
aauugauccgcacagugag

SEQ ID NO: 1733404 - RNA, 19 nt, Artificial Sequence
  Description of Artificial Sequence: Synthetic oligonucleotide
aauccagcuaucuucuggc

SEQ ID NO: 1733405 - RNA, 19 nt, Artificial Sequence
  Description of Artificial Sequence: Synthetic oligonucleotide
uggauauaugcucagaacc

SEQ ID NO: 1733406 - RNA, 19 nt, Artificial Sequence
  Description of Artificial Sequence: Synthetic oligonucleotide
uuagcuaggacgcuuaagc

SEQ ID NO: 1733407 - RNA, 19 nt, Artificial Sequence
  Description of Artificial Sequence: Synthetic oligonucleotide
acaucucucgauuaaauuc

SEQ ID NO: 1733408 - RNA, 19 nt, Artificial Sequence
  Description of Artificial Sequence: Synthetic oligonucleotide
auagcucuacuucuaaagc

SEQ ID NO: 1733409 - RNA, 19 nt, Artificial Sequence
  Description of Artificial Sequence: Synthetic oligonucleotide
uuaagucuucuccagaaca

SEQ ID NO: 1733410 - RNA, 19 nt, Artificial Sequence
  Description of Artificial Sequence: Synthetic oligonucleotide
aucauuauggcugucagag

SEQ ID NO: 1733411 - RNA, 19 nt, Artificial Sequence
  Description of Artificial Sequence: Synthetic oligonucleotide
aacaugaauuugcucacag

SEQ ID NO: 1733412 - RNA, 19 nt, Artificial Sequence
  Description of Artificial Sequence: Synthetic oligonucleotide
aaucucagacaccuuuugg

SEQ ID NO: 1733413 - RNA, 19 nt, Artificial Sequence
  Description of Artificial Sequence: Synthetic oligonucleotide
cucucgauuaaauuccucg

SEQ ID NO: 1733414 - RNA, 19 nt, Artificial Sequence
  Description of Artificial Sequence: Synthetic oligonucleotide
aaggcacggguuuaugagc

SEQ ID NO: 1733415 - RNA, 19 nt, Artificial Sequence
  Description of Artificial Sequence: Synthetic oligonucleotide
gcuuuuguaauuucaagcg

SEQ ID NO: 1733416 - RNA, 19 nt, Artificial Sequence
  Description of Artificial Sequence: Synthetic oligonucleotide
ucucgauuaaauuccucgg

SEQ ID NO: 1733417 - RNA, 19 nt, Artificial Sequence
  Description of Artificial Sequence: Synthetic oligonucleotide
aauggcauuaaugaguaaa

SEQ ID NO: 1733418 - RNA, 19 nt, Artificial Sequence
  Description of Artificial Sequence: Synthetic oligonucleotide
caucucucgauuaaauucc

SEQ ID NO: 1733419 - RNA, 19 nt, Artificial Sequence
  Description of Artificial Sequence: Synthetic oligonucleotide
cauagcucuacuucuaaag

SEQ ID NO: 1733420 - RNA, 19 nt, Artificial Sequence
  Description of Artificial Sequence: Synthetic oligonucleotide
uauugcaggaaauaagguc

SEQ ID NO: 1733421 - RNA, 19 nt, Artificial Sequence
  Description of Artificial Sequence: Synthetic oligonucleotide
aagcccuaauacaucaucc

SEQ ID NO: 1733422 - RNA, 19 nt, Artificial Sequence
  Description of Artificial Sequence: Synthetic oligonucleotide
gaugccaacaugaauuugc

SEQ ID NO: 1733423 - RNA, 19 nt, Artificial Sequence
  Description of Artificial Sequence: Synthetic oligonucleotide
gaauccagcuaucuucugg

SEQ ID NO: 1733424 - RNA, 19 nt, Artificial Sequence
  Description of Artificial Sequence: Synthetic oligonucleotide
auuaaugaguaaaggaauc

SEQ ID NO: 1733425 - RNA, 19 nt, Artificial Sequence
  Description of Artificial Sequence: Synthetic oligonucleotide
uuuuaggaagugaauaaua

SEQ ID NO: 1733426 - RNA, 19 nt, Artificial Sequence
  Description of Artificial Sequence: Synthetic oligonucleotide
agcuaggacgcuuaagccg

SEQ ID NO: 1733427 - RNA, 19 nt, Artificial Sequence
  Description of Artificial Sequence: Synthetic oligonucleotide
auugcaggaaauaagguca

SEQ ID NO: 1733428 - RNA, 19 nt, Artificial Sequence
  Description of Artificial Sequence: Synthetic oligonucleotide
ucgauuaaauuccucggcu

SEQ ID NO: 1733429 - RNA, 19 nt, Artificial Sequence
  Description of Artificial Sequence: Synthetic oligonucleotide
caugcaacgaucaauggca

SEQ ID NO: 1733430 - RNA, 19 nt, Artificial Sequence
  Description of Artificial Sequence: Synthetic oligonucleotide
agaauugauccgcacagug

SEQ ID NO: 1733431 - RNA, 19 nt, Artificial Sequence
  Description of Artificial Sequence: Synthetic oligonucleotide
uccaaaguagcauuccgca

SEQ ID NO: 1733432 - RNA, 19 nt, Artificial Sequence
  Description of Artificial Sequence: Synthetic oligonucleotide
cuuuuguaauuucaagcgc

SEQ ID NO: 1733433 - RNA, 19 nt, Artificial Sequence
  Description of Artificial Sequence: Synthetic oligonucleotide
uaccgagacacuauugcag

SEQ ID NO: 1733434 - RNA, 19 nt, Artificial Sequence
  Description of Artificial Sequence: Synthetic oligonucleotide
uucuaaagcggacacugga

SEQ ID NO: 1733435 - RNA, 19 nt, Artificial Sequence
  Description of Artificial Sequence: Synthetic oligonucleotide
gagagauaagcacuuccag

SEQ ID NO: 1733436 - RNA, 19 nt, Artificial Sequence
  Description of Artificial Sequence: Synthetic oligonucleotide
agaaaggaguaagaauggc

SEQ ID NO: 1733437 - RNA, 19 nt, Artificial Sequence
  Description of Artificial Sequence: Synthetic oligonucleotide
ucuacuucuaaagcggaca

SEQ ID NO: 1733438 - RNA, 19 nt, Artificial Sequence
  Description of Artificial Sequence: Synthetic oligonucleotide
cacagcguaccuuagcuag

SEQ ID NO: 1733439 - RNA, 19 nt, Artificial Sequence
  Description of Artificial Sequence: Synthetic oligonucleotide
accgagacacuauugcagg

SEQ ID NO: 1733440 - RNA, 19 nt, Artificial Sequence
  Description of Artificial Sequence: Synthetic oligonucleotide
uguaauuucaagcgccuuu

SEQ ID NO: 1733441 - RNA, 19 nt, Artificial Sequence
  Description of Artificial Sequence: Synthetic oligonucleotide
ucaagcgccuuuauuaaaa

SEQ ID NO: 1733442 - RNA, 19 nt, Artificial Sequence
  Description of Artificial Sequence: Synthetic oligonucleotide
uaugagucccgauuacuug

SEQ ID NO: 1733443 - RNA, 19 nt, Artificial Sequence
  Description of Artificial Sequence: Synthetic oligonucleotide
uaaugaguaaaggaaucca

SEQ ID NO: 1733444 - RNA, 19 nt, Artificial Sequence
  Description of Artificial Sequence: Synthetic oligonucleotide
uuuccuugaugccaacaug

SEQ ID NO: 1733445 - RNA, 19 nt, Artificial Sequence
  Description of Artificial Sequence: Synthetic oligonucleotide
agacacuggagcuuggcug

SEQ ID NO: 1733446 - RNA, 19 nt, Artificial Sequence
  Description of Artificial Sequence: Synthetic oligonucleotide
acgcuuaagccguucggcc

SEQ ID NO: 1733447 - RNA, 19 nt, Artificial Sequence
  Description of Artificial Sequence: Synthetic oligonucleotide
caauaauuuccuugaugcc

SEQ ID NO: 1733448 - RNA, 19 nt, Artificial Sequence
  Description of Artificial Sequence: Synthetic oligonucleotide
auaauauacuucaauaauu

SEQ ID NO: 1733449 - RNA, 19 nt, Artificial Sequence
  Description of Artificial Sequence: Synthetic oligonucleotide
guucaugcaacgaucaaug

SEQ ID NO: 1733450 - RNA, 19 nt, Artificial Sequence
  Description of Artificial Sequence: Synthetic oligonucleotide
cucgauuaaauuccucggc

SEQ ID NO: 1733451 - RNA, 19 nt, Artificial Sequence
  Description of Artificial Sequence: Synthetic oligonucleotide
aacaucucucgauuaaauu

SEQ ID NO: 1733452 - RNA, 19 nt, Artificial Sequence
  Description of Artificial Sequence: Synthetic oligonucleotide
acaccuuuuggcaugcuac

SEQ ID NO: 1733453 - RNA, 19 nt, Artificial Sequence
  Description of Artificial Sequence: Synthetic oligonucleotide
ucuaaagcggacacuggaa

SEQ ID NO: 1733454 - RNA, 19 nt, Artificial Sequence
  Description of Artificial Sequence: Synthetic oligonucleotide
auuucgcagaauugauccg

SEQ ID NO: 1733455 - RNA, 19 nt, Artificial Sequence
  Description of Artificial Sequence: Synthetic oligonucleotide
uuucgcagaauugauccgc

SEQ ID NO: 1733456 - RNA, 19 nt, Artificial Sequence
  Description of Artificial Sequence: Synthetic oligonucleotide
aagccguucggccccugcc

SEQ ID NO: 1733457 - RNA, 19 nt, Artificial Sequence
  Description of Artificial Sequence: Synthetic oligonucleotide
uaacucuguucaugcaacg

SEQ ID NO: 1733458 - RNA, 19 nt, Artificial Sequence
  Description of Artificial Sequence: Synthetic oligonucleotide
cucacuagaggcagaagug

SEQ ID NO: 1733459 - RNA, 19 nt, Artificial Sequence
  Description of Artificial Sequence: Synthetic oligonucleotide
caaggcacggguuuaugag

SEQ ID NO: 1733460 - RNA, 19 nt, Artificial Sequence
  Description of Artificial Sequence: Synthetic oligonucleotide
agcucuacuucuaaagcgg

SEQ ID NO: 1733461 - RNA, 19 nt, Artificial Sequence
  Description of Artificial Sequence: Synthetic oligonucleotide
aaucguggcuuccccugac

SEQ ID NO: 1733462 - RNA, 19 nt, Artificial Sequence
  Description of Artificial Sequence: Synthetic oligonucleotide
accaaugcaaggcacgggu

SEQ ID NO: 1733463 - RNA, 19 nt, Artificial Sequence
  Description of Artificial Sequence: Synthetic oligonucleotide
uuucaagcgccuuuauuaa

SEQ ID NO: 1733464 - RNA, 19 nt, Artificial Sequence
  Description of Artificial Sequence: Synthetic oligonucleotide
cagagucggagcaaggaag

SEQ ID NO: 1733465 - RNA, 19 nt, Artificial Sequence
  Description of Artificial Sequence: Synthetic oligonucleotide
uccccugacagguucacug

SEQ ID NO: 1733466 - RNA, 19 nt, Artificial Sequence
  Description of Artificial Sequence: Synthetic oligonucleotide
acaccaauuucgcagaauu

SEQ ID NO: 1733467 - RNA, 19 nt, Artificial Sequence
  Description of Artificial Sequence: Synthetic oligonucleotide
aagcgccuuuauuaaaaca

SEQ ID NO: 1733468 - RNA, 19 nt, Artificial Sequence
  Description of Artificial Sequence: Synthetic oligonucleotide
ucagaaucguggcuucccc

SEQ ID NO: 1733469 - RNA, 19 nt, Artificial Sequence
  Description of Artificial Sequence: Synthetic oligonucleotide
aacguccaaaguagcauuc

SEQ ID NO: 1733470 - RNA, 19 nt, Artificial Sequence
  Description of Artificial Sequence: Synthetic oligonucleotide
agaaucguggcuuccccug

SEQ ID NO: 1733471 - RNA, 19 nt, Artificial Sequence
  Description of Artificial Sequence: Synthetic oligonucleotide
agccuuguuaucuuuugga

SEQ ID NO: 1733472 - RNA, 19 nt, Artificial Sequence
  Description of Artificial Sequence: Synthetic oligonucleotide
uaagguccggauuuuccug

SEQ ID NO: 1733473 - RNA, 19 nt, Artificial Sequence
  Description of Artificial Sequence: Synthetic oligonucleotide
agauaagcacuuccaggag

SEQ ID NO: 1733474 - RNA, 19 nt, Artificial Sequence
  Description of Artificial Sequence: Synthetic oligonucleotide
agauccucuggguuucccg

SEQ ID NO: 1733475 - RNA, 19 nt, Artificial Sequence
  Description of Artificial Sequence: Synthetic oligonucleotide
aaccauucaagaguccaca

SEQ ID NO: 1733476 - RNA, 19 nt, Artificial Sequence
  Description of Artificial Sequence: Synthetic oligonucleotide
agucccgauuacuuggaag

SEQ ID NO: 1733477 - RNA, 19 nt, Artificial Sequence
  Description of Artificial Sequence: Synthetic oligonucleotide
uuucccguggagacggcag

SEQ ID NO: 1733478 - RNA, 19 nt, Artificial Sequence
  Description of Artificial Sequence: Synthetic oligonucleotide
agaaccauucaagagucca

SEQ ID NO: 1733479 - RNA, 19 nt, Artificial Sequence
  Description of Artificial Sequence: Synthetic oligonucleotide
ucuauagccugcuccauuu

SEQ ID NO: 1733480 - RNA, 19 nt, Artificial Sequence
  Description of Artificial Sequence: Synthetic oligonucleotide
auccacaacguccaaagua

SEQ ID NO: 1733481 - RNA, 19 nt, Artificial Sequence
  Description of Artificial Sequence: Synthetic oligonucleotide
uagcuaggacgcuuaagcc

SEQ ID NO: 1733482 - RNA, 19 nt, Artificial Sequence
  Description of Artificial Sequence: Synthetic oligonucleotide
uaaaggaauccagcuaucu

SEQ ID NO: 1733483 - RNA, 19 nt, Artificial Sequence
  Description of Artificial Sequence: Synthetic oligonucleotide
gucggagcaaggaaggagg

SEQ ID NO: 1733484 - RNA, 19 nt, Artificial Sequence
  Description of Artificial Sequence: Synthetic oligonucleotide
cacagguggauauaugcuc

SEQ ID NO: 1733485 - RNA, 19 nt, Artificial Sequence
  Description of Artificial Sequence: Synthetic oligonucleotide
guccggauuuuccugaggc

SEQ ID NO: 1733486 - RNA, 19 nt, Artificial Sequence
  Description of Artificial Sequence: Synthetic oligonucleotide
uguucaugcaacgaucaau

SEQ ID NO: 1733487 - RNA, 19 nt, Artificial Sequence
  Description of Artificial Sequence: Synthetic oligonucleotide
auggcauuaaugaguaaag

SEQ ID NO: 1733488 - RNA, 19 nt, Artificial Sequence
  Description of Artificial Sequence: Synthetic oligonucleotide
uccuuucuauccagcaagc

SEQ ID NO: 1733489 - RNA, 19 nt, Artificial Sequence
  Description of Artificial Sequence: Synthetic oligonucleotide
uggaagucgggagaaaagu

SEQ ID NO: 1733490 - RNA, 19 nt, Artificial Sequence
  Description of Artificial Sequence: Synthetic oligonucleotide
gagacggcaguggaagucg

SEQ ID NO: 1733491 - RNA, 19 nt, Artificial Sequence
  Description of Artificial Sequence: Synthetic oligonucleotide
uaaagcggacacuggaaaa

SEQ ID NO: 1733492 - RNA, 19 nt, Artificial Sequence
  Description of Artificial Sequence: Synthetic oligonucleotide
caauuucgcagaauugauc

SEQ ID NO: 1733493 - RNA, 19 nt, Artificial Sequence
  Description of Artificial Sequence: Synthetic oligonucleotide
acgaucaauggcauuaaug

SEQ ID NO: 1733494 - RNA, 19 nt, Artificial Sequence
  Description of Artificial Sequence: Synthetic oligonucleotide
cuucuaaagcggacacugg

SEQ ID NO: 1733495 - RNA, 19 nt, Artificial Sequence
  Description of Artificial Sequence: Synthetic oligonucleotide
ucacugcugccucauuaag

SEQ ID NO: 1733496 - RNA, 19 nt, Artificial Sequence
  Description of Artificial Sequence: Synthetic oligonucleotide
gccucauuaagucuucucc

SEQ ID NO: 1733497 - RNA, 19 nt, Artificial Sequence
  Description of Artificial Sequence: Synthetic oligonucleotide
ucuccagaacaucucucga

SEQ ID NO: 1733498 - RNA, 19 nt, Artificial Sequence
  Description of Artificial Sequence: Synthetic oligonucleotide
uuccuuaacucuguucaug

SEQ ID NO: 1733499 - RNA, 19 nt, Artificial Sequence
  Description of Artificial Sequence: Synthetic oligonucleotide
caugaauuugcucacagau

SEQ ID NO: 1733500 - RNA, 19 nt, Artificial Sequence
  Description of Artificial Sequence: Synthetic oligonucleotide
gcuaccgagacacuauugc

SEQ ID NO: 1733501 - RNA, 19 nt, Artificial Sequence
  Description of Artificial Sequence: Synthetic oligonucleotide
gacgcuuaagccguucggc

SEQ ID NO: 1733502 - RNA, 19 nt, Artificial Sequence
  Description of Artificial Sequence: Synthetic oligonucleotide
auaagcacuuccaggagcu

SEQ ID NO: 1733503 - RNA, 19 nt, Artificial Sequence
  Description of Artificial Sequence: Synthetic oligonucleotide
ugggauaccugauccuucu

SEQ ID NO: 1733504 - RNA, 19 nt, Artificial Sequence
  Description of Artificial Sequence: Synthetic oligonucleotide
aggacgcuuaagccguucg

SEQ ID NO: 1733505 - RNA, 19 nt, Artificial Sequence
  Description of Artificial Sequence: Synthetic oligonucleotide
agcccuaauacaucauccu

SEQ ID NO: 1733506 - RNA, 19 nt, Artificial Sequence
  Description of Artificial Sequence: Synthetic oligonucleotide
uucgcagaauugauccgca

SEQ ID NO: 1733507 - RNA, 19 nt, Artificial Sequence
  Description of Artificial Sequence: Synthetic oligonucleotide
uauccagcaagcacccuau

SEQ ID NO: 1733508 - RNA, 19 nt, Artificial Sequence
  Description of Artificial Sequence: Synthetic oligonucleotide
acaugaauuugcucacaga

SEQ ID NO: 1733509 - RNA, 19 nt, Artificial Sequence
  Description of Artificial Sequence: Synthetic oligonucleotide
cuuccucugaccaguauga

SEQ ID NO: 1733510 - RNA, 19 nt, Artificial Sequence
  Description of Artificial Sequence: Synthetic oligonucleotide
uucgccgacccucacuaga

SEQ ID NO: 1733511 - RNA, 19 nt, Artificial Sequence
  Description of Artificial Sequence: Synthetic oligonucleotide
gcguaccuuagcuaggacg

SEQ ID NO: 1733512 - RNA, 19 nt, Artificial Sequence
  Description of Artificial Sequence: Synthetic oligonucleotide
cuggguuucccguggagac

SEQ ID NO: 1733513 - RNA, 19 nt, Artificial Sequence
  Description of Artificial Sequence: Synthetic oligonucleotide
uugcaggaaauaaggucac

SEQ ID NO: 1733514 - RNA, 19 nt, Artificial Sequence
  Description of Artificial Sequence: Synthetic oligonucleotide
acguccaaaguagcauucc

SEQ ID NO: 1733515 - RNA, 19 nt, Artificial Sequence
  Description of Artificial Sequence: Synthetic oligonucleotide
caucacagcgucucacagc

SEQ ID NO: 1733516 - RNA, 19 nt, Artificial Sequence
  Description of Artificial Sequence: Synthetic oligonucleotide
uuuaugagcucuugaucuu

SEQ ID NO: 1733517 - RNA, 19 nt, Artificial Sequence
  Description of Artificial Sequence: Synthetic oligonucleotide
cacuagaggcagaagugac

SEQ ID NO: 1733518 - RNA, 19 nt, Artificial Sequence
  Description of Artificial Sequence: Synthetic oligonucleotide
gcucagaaccaaaacaucc

SEQ ID NO: 1733519 - RNA, 19 nt, Artificial Sequence
  Description of Artificial Sequence: Synthetic oligonucleotide
ugcuaccgagacacuauug

SEQ ID NO: 1733520 - RNA, 19 nt, Artificial Sequence
  Description of Artificial Sequence: Synthetic oligonucleotide
uuggaagcccuaauacauc

SEQ ID NO: 1733521 - RNA, 19 nt, Artificial Sequence
  Description of Artificial Sequence: Synthetic oligonucleotide
ccuaucauagcucuacuuc

SEQ ID NO: 1733522 - RNA, 19 nt, Artificial Sequence
  Description of Artificial Sequence: Synthetic oligonucleotide
cauuaaugaguaaaggaau

SEQ ID NO: 1733523 - RNA, 19 nt, Artificial Sequence
  Description of Artificial Sequence: Synthetic oligonucleotide
caccuuuuggcaugcuacc

SEQ ID NO: 1733524 - RNA, 19 nt, Artificial Sequence
  Description of Artificial Sequence: Synthetic oligonucleotide
ucgccgacccucacuagag

SEQ ID NO: 1733525 - RNA, 19 nt, Artificial Sequence
  Description of Artificial Sequence: Synthetic oligonucleotide
guggagacggcaguggaag

SEQ ID NO: 1733526 - RNA, 19 nt, Artificial Sequence
  Description of Artificial Sequence: Synthetic oligonucleotide
ucauagcucuacuucuaaa

SEQ ID NO: 1733527 - RNA, 19 nt, Artificial Sequence
  Description of Artificial Sequence: Synthetic oligonucleotide
gaauugauccgcacaguga

SEQ ID NO: 1733528 - RNA, 19 nt, Artificial Sequence
  Description of Artificial Sequence: Synthetic oligonucleotide
cguaccuuagcuaggacgc

SEQ ID NO: 1733529 - RNA, 19 nt, Artificial Sequence
  Description of Artificial Sequence: Synthetic oligonucleotide
uccucaucauuauggcugu

SEQ ID NO: 1733530 - RNA, 19 nt, Artificial Sequence
  Description of Artificial Sequence: Synthetic oligonucleotide
agaggcagaagugaccgca

SEQ ID NO: 1733531 - RNA, 19 nt, Artificial Sequence
  Description of Artificial Sequence: Synthetic oligonucleotide
ugucauccagcugggauac

SEQ ID NO: 1733532 - RNA, 19 nt, Artificial Sequence
  Description of Artificial Sequence: Synthetic oligonucleotide
uuauggcugucagaguugu

SEQ ID NO: 1733533 - RNA, 19 nt, Artificial Sequence
  Description of Artificial Sequence: Synthetic oligonucleotide
gaguaaaggaauccagcua

SEQ ID NO: 1733534 - RNA, 19 nt, Artificial Sequence
  Description of Artificial Sequence: Synthetic oligonucleotide
ucggagcaaggaaggaggc

SEQ ID NO: 1733535 - RNA, 19 nt, Artificial Sequence
  Description of Artificial Sequence: Synthetic oligonucleotide
aacgaucaauggcauuaau

SEQ ID NO: 1733536 - RNA, 19 nt, Artificial Sequence
  Description of Artificial Sequence: Synthetic oligonucleotide
aguaugagucccgauuacu

SEQ ID NO: 1733537 - RNA, 19 nt, Artificial Sequence
  Description of Artificial Sequence: Synthetic oligonucleotide
gguuuaugagcucuugauc

SEQ ID NO: 1733538 - RNA, 19 nt, Artificial Sequence
  Description of Artificial Sequence: Synthetic oligonucleotide
acaacguccaaaguagcau

SEQ ID NO: 1733539 - RNA, 19 nt, Artificial Sequence
  Description of Artificial Sequence: Synthetic oligonucleotide
caccaauuucgcagaauug

SEQ ID NO: 1733540 - RNA, 19 nt, Artificial Sequence
  Description of Artificial Sequence: Synthetic oligonucleotide
cgaucaauggcauuaauga

SEQ ID NO: 1733541 - RNA, 19 nt, Artificial Sequence
  Description of Artificial Sequence: Synthetic oligonucleotide
aagcacccuaucauagcuc

SEQ ID NO: 1733542 - RNA, 19 nt, Artificial Sequence
  Description of Artificial Sequence: Synthetic oligonucleotide
caagcgccuuuauuaaaac

SEQ ID NO: 1733543 - RNA, 19 nt, Artificial Sequence
  Description of Artificial Sequence: Synthetic oligonucleotide
uuuuggcaugcuaccgaga

SEQ ID NO: 1733544 - RNA, 19 nt, Artificial Sequence
  Description of Artificial Sequence: Synthetic oligonucleotide
acacuauugcaggaaauaa

SEQ ID NO: 1733545 - RNA, 19 nt, Artificial Sequence
  Description of Artificial Sequence: Synthetic oligonucleotide
ucagccacuaagguccgga

SEQ ID NO: 1733546 - RNA, 19 nt, Artificial Sequence
  Description of Artificial Sequence: Synthetic oligonucleotide
uucaagcgccuuuauuaaa

SEQ ID NO: 1733547 - RNA, 19 nt, Artificial Sequence
  Description of Artificial Sequence: Synthetic oligonucleotide
gagacacuauugcaggaaa

SEQ ID NO: 1733548 - RNA, 19 nt, Artificial Sequence
  Description of Artificial Sequence: Synthetic oligonucleotide
gaaccauucaagaguccac

SEQ ID NO: 1733549 - RNA, 19 nt, Artificial Sequence
  Description of Artificial Sequence: Synthetic oligonucleotide
ugaucucaucagaaauauc

SEQ ID NO: 1733550 - RNA, 19 nt, Artificial Sequence
  Description of Artificial Sequence: Synthetic oligonucleotide
gacacuauugcaggaaaua

SEQ ID NO: 1733551 - RNA, 19 nt, Artificial Sequence
  Description of Artificial Sequence: Synthetic oligonucleotide
acagguggauauaugcuca

SEQ ID NO: 1733552 - RNA, 19 nt, Artificial Sequence
  Description of Artificial Sequence: Synthetic oligonucleotide
ugccgaacucgccaucaca

SEQ ID NO: 1733553 - RNA, 19 nt, Artificial Sequence
  Description of Artificial Sequence: Synthetic oligonucleotide
cuaaagcggacacuggaaa

SEQ ID NO: 1733554 - RNA, 19 nt, Artificial Sequence
  Description of Artificial Sequence: Synthetic oligonucleotide
cugaggcaagcucuggaug

SEQ ID NO: 1733555 - RNA, 19 nt, Artificial Sequence
  Description of Artificial Sequence: Synthetic oligonucleotide
cuuagcuaggacgcuuaag

SEQ ID NO: 1733556 - RNA, 19 nt, Artificial Sequence
  Description of Artificial Sequence: Synthetic oligonucleotide
uuggcaugcuaccgagaca

SEQ ID NO: 1733557 - RNA, 19 nt, Artificial Sequence
  Description of Artificial Sequence: Synthetic oligonucleotide
auuauggcugucagaguug

SEQ ID NO: 1733558 - RNA, 19 nt, Artificial Sequence
  Description of Artificial Sequence: Synthetic oligonucleotide
ggauauaugcucagaacca

SEQ ID NO: 1733559 - RNA, 19 nt, Artificial Sequence
  Description of Artificial Sequence: Synthetic oligonucleotide
agccguucggccccugccg

SEQ ID NO: 1733560 - RNA, 19 nt, Artificial Sequence
  Description of Artificial Sequence: Synthetic oligonucleotide
cuaccgagacacuauugca

SEQ ID NO: 1733561 - RNA, 19 nt, Artificial Sequence
  Description of Artificial Sequence: Synthetic oligonucleotide
uccucggcugucuccuggg

SEQ ID NO: 1733562 - RNA, 19 nt, Artificial Sequence
  Description of Artificial Sequence: Synthetic oligonucleotide
gaagucgggagaaaagugu

SEQ ID NO: 1733563 - RNA, 19 nt, Artificial Sequence
  Description of Artificial Sequence: Synthetic oligonucleotide
cacaacguccaaaguagca

SEQ ID NO: 1733564 - RNA, 19 nt, Artificial Sequence
  Description of Artificial Sequence: Synthetic oligonucleotide
guggaagucgggagaaaag

SEQ ID NO: 1733565 - RNA, 19 nt, Artificial Sequence
  Description of Artificial Sequence: Synthetic oligonucleotide
agaacaucucucgauuaaa

SEQ ID NO: 1733566 - RNA, 19 nt, Artificial Sequence
  Description of Artificial Sequence: Synthetic oligonucleotide
agcguaccuuagcuaggac

SEQ ID NO: 1733567 - RNA, 19 nt, Artificial Sequence
  Description of Artificial Sequence: Synthetic oligonucleotide
cucugaccaguaugagucc

SEQ ID NO: 1733568 - RNA, 19 nt, Artificial Sequence
  Description of Artificial Sequence: Synthetic oligonucleotide
agugaccgcagcuccgcug

SEQ ID NO: 1733569 - RNA, 19 nt, Artificial Sequence
  Description of Artificial Sequence: Synthetic oligonucleotide
uggguuucccguggagacg

SEQ ID NO: 1733570 - RNA, 19 nt, Artificial Sequence
  Description of Artificial Sequence: Synthetic oligonucleotide
ucccgauuacuuggaagcc

SEQ ID NO: 1733571 - RNA, 19 nt, Artificial Sequence
  Description of Artificial Sequence: Synthetic oligonucleotide
cucaugaguuggcugcaug

SEQ ID NO: 1733572 - RNA, 19 nt, Artificial Sequence
  Description of Artificial Sequence: Synthetic oligonucleotide
auugauccgcacagugagg

SEQ ID NO: 1733573 - RNA, 19 nt, Artificial Sequence
  Description of Artificial Sequence: Synthetic oligonucleotide
agcauuccgcaccagcuuu

SEQ ID NO: 1733574 - RNA, 19 nt, Artificial Sequence
  Description of Artificial Sequence: Synthetic oligonucleotide
ggauaccugauccuucuuc

SEQ ID NO: 1733575 - RNA, 19 nt, Artificial Sequence
  Description of Artificial Sequence: Synthetic oligonucleotide
cagguggauauaugcucag

SEQ ID NO: 1733576 - RNA, 19 nt, Artificial Sequence
  Description of Artificial Sequence: Synthetic oligonucleotide
gucagaaucguggcuuccc

SEQ ID NO: 1733577 - RNA, 19 nt, Artificial Sequence
  Description of Artificial Sequence: Synthetic oligonucleotide
uaagccguucggccccugc

SEQ ID NO: 1733578 - RNA, 19 nt, Artificial Sequence
  Description of Artificial Sequence: Synthetic oligonucleotide
uacuucuaaagcggacacu

SEQ ID NO: 1733579 - RNA, 19 nt, Artificial Sequence
  Description of Artificial Sequence: Synthetic oligonucleotide
ucgggagaaaagugugguc

SEQ ID NO: 1733580 - RNA, 19 nt, Artificial Sequence
  Description of Artificial Sequence: Synthetic oligonucleotide
ggaagucgggagaaaagug

SEQ ID NO: 1733581 - RNA, 19 nt, Artificial Sequence
  Description of Artificial Sequence: Synthetic oligonucleotide
caguaugagucccgauuac

SEQ ID NO: 1733582 - RNA, 19 nt, Artificial Sequence
  Description of Artificial Sequence: Synthetic oligonucleotide
ggacgcuuaagccguucgg

SEQ ID NO: 1733583 - RNA, 19 nt, Artificial Sequence
  Description of Artificial Sequence: Synthetic oligonucleotide
cugggauaccugauccuuc

SEQ ID NO: 1733584 - RNA, 19 nt, Artificial Sequence
  Description of Artificial Sequence: Synthetic oligonucleotide
ucacagcguaccuuagcua

SEQ ID NO: 1733585 - RNA, 19 nt, Artificial Sequence
  Description of Artificial Sequence: Synthetic oligonucleotide
augcucucaccaaugcaag

SEQ ID NO: 1733586 - RNA, 19 nt, Artificial Sequence
  Description of Artificial Sequence: Synthetic oligonucleotide
ggagagauaagcacuucca

SEQ ID NO: 1733587 - RNA, 19 nt, Artificial Sequence
  Description of Artificial Sequence: Synthetic oligonucleotide
cccuaauacaucauccuca

SEQ ID NO: 1733588 - RNA, 19 nt, Artificial Sequence
  Description of Artificial Sequence: Synthetic oligonucleotide
cuauugcaggaaauaaggu

SEQ ID NO: 1733589 - RNA, 19 nt, Artificial Sequence
  Description of Artificial Sequence: Synthetic oligonucleotide
gcuuaagccguucggcccc

SEQ ID NO: 1733590 - RNA, 19 nt, Artificial Sequence
  Description of Artificial Sequence: Synthetic oligonucleotide
cgaacucgccaucacagcg

SEQ ID NO: 1733591 - RNA, 19 nt, Artificial Sequence
  Description of Artificial Sequence: Synthetic oligonucleotide
gaaucguggcuuccccuga

SEQ ID NO: 1733592 - RNA, 19 nt, Artificial Sequence
  Description of Artificial Sequence: Synthetic oligonucleotide
caucauuauggcugucaga

SEQ ID NO: 1733593 - RNA, 19 nt, Artificial Sequence
  Description of Artificial Sequence: Synthetic oligonucleotide
cuaagguccggauuuuccu

SEQ ID NO: 1733594 - RNA, 19 nt, Artificial Sequence
  Description of Artificial Sequence: Synthetic oligonucleotide
uagaggcagaagugaccgc

SEQ ID NO: 1733595 - RNA, 19 nt, Artificial Sequence
  Description of Artificial Sequence: Synthetic oligonucleotide
agcugggauaccugauccu

SEQ ID NO: 1733596 - RNA, 19 nt, Artificial Sequence
  Description of Artificial Sequence: Synthetic oligonucleotide
acagcguaccuuagcuagg

SEQ ID NO: 1733597 - RNA, 19 nt, Artificial Sequence
  Description of Artificial Sequence: Synthetic oligonucleotide
agcaaggaaggaggcugcg

SEQ ID NO: 1733598 - RNA, 19 nt, Artificial Sequence
  Description of Artificial Sequence: Synthetic oligonucleotide
ucggcugucuccugggcuu

SEQ ID NO: 1733599 - RNA, 19 nt, Artificial Sequence
  Description of Artificial Sequence: Synthetic oligonucleotide
agguccggauuuuccugag

SEQ ID NO: 1733600 - RNA, 19 nt, Artificial Sequence
  Description of Artificial Sequence: Synthetic oligonucleotide
gauccucuggguuucccgu

SEQ ID NO: 1733601 - RNA, 19 nt, Artificial Sequence
  Description of Artificial Sequence: Synthetic oligonucleotide
auccucuggguuucccgug

SEQ ID NO: 1733602 - RNA, 19 nt, Artificial Sequence
  Description of Artificial Sequence: Synthetic oligonucleotide
aagugaccgcagcuccgcu

SEQ ID NO: 1733603 - RNA, 19 nt, Artificial Sequence
  Description of Artificial Sequence: Synthetic oligonucleotide
acccuaucauagcucuacu

SEQ ID NO: 1733604 - RNA, 19 nt, Artificial Sequence
  Description of Artificial Sequence: Synthetic oligonucleotide
augccaacaugaauuugcu

SEQ ID NO: 1733605 - RNA, 19 nt, Artificial Sequence
  Description of Artificial Sequence: Synthetic oligonucleotide
gcaagcacccuaucauagc

SEQ ID NO: 1733606 - RNA, 19 nt, Artificial Sequence
  Description of Artificial Sequence: Synthetic oligonucleotide
gccgaacucgccaucacag

SEQ ID NO: 1733607 - RNA, 19 nt, Artificial Sequence
  Description of Artificial Sequence: Synthetic oligonucleotide
aggcacggguuuaugagcu

SEQ ID NO: 1733608 - RNA, 19 nt, Artificial Sequence
  Description of Artificial Sequence: Synthetic oligonucleotide
auccagcuaucuucuggcu

SEQ ID NO: 1733609 - RNA, 19 nt, Artificial Sequence
  Description of Artificial Sequence: Synthetic oligonucleotide
gcaacgaucaauggcauua

SEQ ID NO: 1733610 - RNA, 19 nt, Artificial Sequence
  Description of Artificial Sequence: Synthetic oligonucleotide
ucgcagaauugauccgcac

SEQ ID NO: 1733611 - RNA, 19 nt, Artificial Sequence
  Description of Artificial Sequence: Synthetic oligonucleotide
auccagcaagcacccuauc

SEQ ID NO: 1733612 - RNA, 19 nt, Artificial Sequence
  Description of Artificial Sequence: Synthetic oligonucleotide
acggcaguggaagucggga

SEQ ID NO: 1733613 - RNA, 19 nt, Artificial Sequence
  Description of Artificial Sequence: Synthetic oligonucleotide
guaaaggaauccagcuauc

SEQ ID NO: 1733614 - RNA, 19 nt, Artificial Sequence
  Description of Artificial Sequence: Synthetic oligonucleotide
agcgucucacagcguaccu

SEQ ID NO: 1733615 - RNA, 19 nt, Artificial Sequence
  Description of Artificial Sequence: Synthetic oligonucleotide
gauggagagauaagcacuu

SEQ ID NO: 1733616 - RNA, 19 nt, Artificial Sequence
  Description of Artificial Sequence: Synthetic oligonucleotide
gccgacccucacuagaggc

SEQ ID NO: 1733617 - RNA, 19 nt, Artificial Sequence
  Description of Artificial Sequence: Synthetic oligonucleotide
ugcaacgaucaauggcauu

SEQ ID NO: 1733618 - RNA, 19 nt, Artificial Sequence
  Description of Artificial Sequence: Synthetic oligonucleotide
augcuaccgagacacuauu

SEQ ID NO: 1733619 - RNA, 19 nt, Artificial Sequence
  Description of Artificial Sequence: Synthetic oligonucleotide
caccaaugcaaggcacggg

SEQ ID NO: 1733620 - RNA, 19 nt, Artificial Sequence
  Description of Artificial Sequence: Synthetic oligonucleotide
gcccuaauacaucauccuc

SEQ ID NO: 1733621 - RNA, 19 nt, Artificial Sequence
  Description of Artificial Sequence: Synthetic oligonucleotide
gaacaucucucgauuaaau

SEQ ID NO: 1733622 - RNA, 19 nt, Artificial Sequence
  Description of Artificial Sequence: Synthetic oligonucleotide
agccacuaagguccggauu

SEQ ID NO: 1733623 - RNA, 19 nt, Artificial Sequence
  Description of Artificial Sequence: Synthetic oligonucleotide
cagcgucucacagcguacc

SEQ ID NO: 1733624 - RNA, 19 nt, Artificial Sequence
  Description of Artificial Sequence: Synthetic oligonucleotide
aucucucgauuaaauuccu

SEQ ID NO: 1733625 - RNA, 19 nt, Artificial Sequence
  Description of Artificial Sequence: Synthetic oligonucleotide
agacaccaauuucgcagaa

SEQ ID NO: 1733626 - RNA, 19 nt, Artificial Sequence
  Description of Artificial Sequence: Synthetic oligonucleotide
cguccaaaguagcauuccg

SEQ ID NO: 1733627 - RNA, 19 nt, Artificial Sequence
  Description of Artificial Sequence: Synthetic oligonucleotide
agacacuauugcaggaaau

SEQ ID NO: 1733628 - RNA, 19 nt, Artificial Sequence
  Description of Artificial Sequence: Synthetic oligonucleotide
acggguuuaugagcucuug

SEQ ID NO: 1733629 - RNA, 19 nt, Artificial Sequence
  Description of Artificial Sequence: Synthetic oligonucleotide
cugggcuucgccgacccuc

SEQ ID NO: 1733630 - RNA, 19 nt, Artificial Sequence
  Description of Artificial Sequence: Synthetic oligonucleotide
ggcaguggaagucgggaga

SEQ ID NO: 1733631 - RNA, 19 nt, Artificial Sequence
  Description of Artificial Sequence: Synthetic oligonucleotide
gcaaggcacggguuuauga

SEQ ID NO: 1733632 - RNA, 19 nt, Artificial Sequence
  Description of Artificial Sequence: Synthetic oligonucleotide
uaccuuagcuaggacgcuu

SEQ ID NO: 1733633 - RNA, 19 nt, Artificial Sequence
  Description of Artificial Sequence: Synthetic oligonucleotide
gaguaagaauggccuggaa

SEQ ID NO: 1733634 - RNA, 19 nt, Artificial Sequence
  Description of Artificial Sequence: Synthetic oligonucleotide
cugaucucaucagaaauau

SEQ ID NO: 1733635 - RNA, 19 nt, Artificial Sequence
  Description of Artificial Sequence: Synthetic oligonucleotide
guccacaguaaggaucaca

SEQ ID NO: 1733636 - RNA, 19 nt, Artificial Sequence
  Description of Artificial Sequence: Synthetic oligonucleotide
gcugagugaguuccuuaac

SEQ ID NO: 1733637 - RNA, 19 nt, Artificial Sequence
  Description of Artificial Sequence: Synthetic oligonucleotide
ggcugaucucaucagaaau

SEQ ID NO: 1733638 - RNA, 19 nt, Artificial Sequence
  Description of Artificial Sequence: Synthetic oligonucleotide
ucuauccagcaagcacccu

SEQ ID NO: 1733639 - RNA, 19 nt, Artificial Sequence
  Description of Artificial Sequence: Synthetic oligonucleotide
gcagaagugaccgcagcuc

SEQ ID NO: 1733640 - RNA, 19 nt, Artificial Sequence
  Description of Artificial Sequence: Synthetic oligonucleotide
cuucgccgacccucacuag

SEQ ID NO: 1733641 - RNA, 19 nt, Artificial Sequence
  Description of Artificial Sequence: Synthetic oligonucleotide
cacuaagguccggauuuuc

SEQ ID NO: 1733642 - RNA, 19 nt, Artificial Sequence
  Description of Artificial Sequence: Synthetic oligonucleotide
gaacucgccaucacagcgu

SEQ ID NO: 1733643 - RNA, 19 nt, Artificial Sequence
  Description of Artificial Sequence: Synthetic oligonucleotide
guaugagucccgauuacuu

SEQ ID NO: 1733644 - RNA, 19 nt, Artificial Sequence
  Description of Artificial Sequence: Synthetic oligonucleotide
gcugaucucaucagaaaua

SEQ ID NO: 1733645 - RNA, 19 nt, Artificial Sequence
  Description of Artificial Sequence: Synthetic oligonucleotide
cccgauuacuuggaagccc

SEQ ID NO: 1733646 - RNA, 19 nt, Artificial Sequence
  Description of Artificial Sequence: Synthetic oligonucleotide
ccucacuagaggcagaagu

SEQ ID NO: 1733647 - RNA, 19 nt, Artificial Sequence
  Description of Artificial Sequence: Synthetic oligonucleotide
cgcuuaagccguucggccc

SEQ ID NO: 1733648 - RNA, 19 nt, Artificial Sequence
  Description of Artificial Sequence: Synthetic oligonucleotide
cuuccccugacagguucac

SEQ ID NO: 1733649 - RNA, 19 nt, Artificial Sequence
  Description of Artificial Sequence: Synthetic oligonucleotide
gagucggagcaaggaagga

SEQ ID NO: 1733650 - RNA, 19 nt, Artificial Sequence
  Description of Artificial Sequence: Synthetic oligonucleotide
ccaguaugagucccgauua

SEQ ID NO: 1733651 - RNA, 19 nt, Artificial Sequence
  Description of Artificial Sequence: Synthetic oligonucleotide
gagucccgauuacuuggaa

SEQ ID NO: 1733652 - RNA, 19 nt, Artificial Sequence
  Description of Artificial Sequence: Synthetic oligonucleotide
ccccugacagguucacugc

SEQ ID NO: 1733653 - RNA, 19 nt, Artificial Sequence
  Description of Artificial Sequence: Synthetic oligonucleotide
uaggacgcuuaagccguuc

SEQ ID NO: 1733654 - RNA, 19 nt, Artificial Sequence
  Description of Artificial Sequence: Synthetic oligonucleotide
ccgaacucgccaucacagc

SEQ ID NO: 1733655 - RNA, 19 nt, Artificial Sequence
  Description of Artificial Sequence: Synthetic oligonucleotide
cagggugauccccugauuu

SEQ ID NO: 1733656 - RNA, 19 nt, Artificial Sequence
  Description of Artificial Sequence: Synthetic oligonucleotide
gcuaggacgcuuaagccgu

SEQ ID NO: 1733657 - RNA, 19 nt, Artificial Sequence
  Description of Artificial Sequence: Synthetic oligonucleotide
gcuucgccgacccucacua

SEQ ID NO: 1733658 - RNA, 19 nt, Artificial Sequence
  Description of Artificial Sequence: Synthetic oligonucleotide
caacguccaaaguagcauu

SEQ ID NO: 1733659 - RNA, 19 nt, Artificial Sequence
  Description of Artificial Sequence: Synthetic oligonucleotide
cugccgaacucgccaucac

SEQ ID NO: 1733660 - RNA, 19 nt, Artificial Sequence
  Description of Artificial Sequence: Synthetic oligonucleotide
cagcguaccuuagcuagga

SEQ ID NO: 1733661 - RNA, 19 nt, Artificial Sequence
  Description of Artificial Sequence: Synthetic oligonucleotide
ggcuuccccugacagguuc

SEQ ID NO: 1733662 - RNA, 19 nt, Artificial Sequence
  Description of Artificial Sequence: Synthetic oligonucleotide
caaugcaaggcacggguuu

SEQ ID NO: 1733663 - RNA, 19 nt, Artificial Sequence
  Description of Artificial Sequence: Synthetic oligonucleotide
augcaacgaucaauggcau

SEQ ID NO: 1733664 - RNA, 19 nt, Artificial Sequence
  Description of Artificial Sequence: Synthetic oligonucleotide
guuucccguggagacggca

SEQ ID NO: 1733665 - RNA, 19 nt, Artificial Sequence
  Description of Artificial Sequence: Synthetic oligonucleotide
uuccccugacagguucacu

SEQ ID NO: 1733666 - RNA, 19 nt, Artificial Sequence
  Description of Artificial Sequence: Synthetic oligonucleotide
accuuagcuaggacgcuua

SEQ ID NO: 1733667 - RNA, 19 nt, Artificial Sequence
  Description of Artificial Sequence: Synthetic oligonucleotide
caacgaucaauggcauuaa

SEQ ID NO: 1733668 - RNA, 19 nt, Artificial Sequence
  Description of Artificial Sequence: Synthetic oligonucleotide
ggucagaaucguggcuucc

SEQ ID NO: 1733669 - RNA, 19 nt, Artificial Sequence
  Description of Artificial Sequence: Synthetic oligonucleotide
gcggcugccgaacucgcca

SEQ ID NO: 1733670 - RNA, 19 nt, Artificial Sequence
  Description of Artificial Sequence: Synthetic oligonucleotide
gaguuguccucagaaccau

SEQ ID NO: 1733671 - RNA, 19 nt, Artificial Sequence
  Description of Artificial Sequence: Synthetic oligonucleotide
cucagccacuaagguccgg

SEQ ID NO: 1733672 - RNA, 19 nt, Artificial Sequence
  Description of Artificial Sequence: Synthetic oligonucleotide
ccuaauacaucauccucau

SEQ ID NO: 1733673 - RNA, 19 nt, Artificial Sequence
  Description of Artificial Sequence: Synthetic oligonucleotide
caauggcauuaaugaguaa

SEQ ID NO: 1733674 - RNA, 19 nt, Artificial Sequence
  Description of Artificial Sequence: Synthetic oligonucleotide
gacaccaauuucgcagaau

SEQ ID NO: 1733675 - RNA, 19 nt, Artificial Sequence
  Description of Artificial Sequence: Synthetic oligonucleotide
aguuguccucagaaccauu

SEQ ID NO: 1733676 - RNA, 19 nt, Artificial Sequence
  Description of Artificial Sequence: Synthetic oligonucleotide
uuaagccguucggccccug

SEQ ID NO: 1733677 - RNA, 19 nt, Artificial Sequence
  Description of Artificial Sequence: Synthetic oligonucleotide
ccggauuuuccugaggcaa

SEQ ID NO: 1733678 - RNA, 19 nt, Artificial Sequence
  Description of Artificial Sequence: Synthetic oligonucleotide
ccgauuacuuggaagcccu

SEQ ID NO: 1733679 - RNA, 19 nt, Artificial Sequence
  Description of Artificial Sequence: Synthetic oligonucleotide
gcugccgaacucgccauca

SEQ ID NO: 1733680 - RNA, 19 nt, Artificial Sequence
  Description of Artificial Sequence: Synthetic oligonucleotide
gccguucggccccugccgc

SEQ ID NO: 1733681 - RNA, 19 nt, Artificial Sequence
  Description of Artificial Sequence: Synthetic oligonucleotide
gcaugcuaccgagacacua

SEQ ID NO: 1733682 - RNA, 19 nt, Artificial Sequence
  Description of Artificial Sequence: Synthetic oligonucleotide
ccgcacagugaggugacac

SEQ ID NO: 1733683 - RNA, 19 nt, Artificial Sequence
  Description of Artificial Sequence: Synthetic oligonucleotide
gaccaguaugagucccgau

SEQ ID NO: 1733684 - RNA, 19 nt, Artificial Sequence
  Description of Artificial Sequence: Synthetic oligonucleotide
cgacccucacuagaggcag

SEQ ID NO: 1733685 - RNA, 19 nt, Artificial Sequence
  Description of Artificial Sequence: Synthetic oligonucleotide
ccgacccucacuagaggca

SEQ ID NO: 1733686 - RNA, 19 nt, Artificial Sequence
  Description of Artificial Sequence: Synthetic oligonucleotide
cggcaguggaagucgggag

SEQ ID NO: 1733687 - RNA, 19 nt, Artificial Sequence
  Description of Artificial Sequence: Synthetic oligonucleotide
cccugccgcuguauuuccg

SEQ ID NO: 1733688 - RNA, 19 nt, Artificial Sequence
  Description of Artificial Sequence: Synthetic oligonucleotide
cagaauugauccgcacagu

SEQ ID NO: 1733689 - RNA, 19 nt, Artificial Sequence
  Description of Artificial Sequence: Synthetic oligonucleotide
gacccucacuagaggcaga

SEQ ID NO: 1733690 - RNA, 19 nt, Artificial Sequence
  Description of Artificial Sequence: Synthetic oligonucleotide
gcugccucauuaagucuuc

SEQ ID NO: 1733691 - RNA, 19 nt, Artificial Sequence
  Description of Artificial Sequence: Synthetic oligonucleotide
ggcacggguuuaugagcuc

SEQ ID NO: 1733692 - RNA, 19 nt, Artificial Sequence
  Description of Artificial Sequence: Synthetic oligonucleotide
ccgagacacuauugcagga

SEQ ID NO: 1733693 - RNA, 19 nt, Artificial Sequence
  Description of Artificial Sequence: Synthetic oligonucleotide
guaccuuagcuaggacgcu

SEQ ID NO: 1733694 - RNA, 19 nt, Artificial Sequence
  Description of Artificial Sequence: Synthetic oligonucleotide
uucggccccugccgcugua

SEQ ID NO: 1733695 - RNA, 19 nt, Artificial Sequence
  Description of Artificial Sequence: Synthetic oligonucleotide
cgucucacagcguaccuua

SEQ ID NO: 1733696 - RNA, 19 nt, Artificial Sequence
  Description of Artificial Sequence: Synthetic oligonucleotide
gggucacaugacuugcuuu

SEQ ID NO: 1733697 - RNA, 19 nt, Artificial Sequence
  Description of Artificial Sequence: Synthetic oligonucleotide
ccccugccgcuguauuucc

SEQ ID NO: 1733698 - RNA, 19 nt, Artificial Sequence
  Description of Artificial Sequence: Synthetic oligonucleotide
gcacggguuuaugagcucu

SEQ ID NO: 1733699 - RNA, 19 nt, Artificial Sequence
  Description of Artificial Sequence: Synthetic oligonucleotide
acucgccaucacagcgucu

SEQ ID NO: 1733700 - RNA, 19 nt, Artificial Sequence
  Description of Artificial Sequence: Synthetic oligonucleotide
gcugggauaccugauccuu

SEQ ID NO: 1733701 - RNA, 19 nt, Artificial Sequence
  Description of Artificial Sequence: Synthetic oligonucleotide
ggggucacaugacuugcuu

SEQ ID NO: 1733702 - RNA, 19 nt, Artificial Sequence
  Description of Artificial Sequence: Synthetic oligonucleotide
cgagacacuauugcaggaa

SEQ ID NO: 1733703 - RNA, 19 nt, Artificial Sequence
  Description of Artificial Sequence: Synthetic oligonucleotide
cacggguuuaugagcucuu

SEQ ID NO: 1733704 - RNA, 19 nt, Artificial Sequence
  Description of Artificial Sequence: Synthetic oligonucleotide
ggcugccgaacucgccauc

SEQ ID NO: 1733705 - RNA, 19 nt, Artificial Sequence
  Description of Artificial Sequence: Synthetic oligonucleotide
cagccacuaagguccggau

SEQ ID NO: 1733706 - RNA, 19 nt, Artificial Sequence
  Description of Artificial Sequence: Synthetic oligonucleotide
cgccgacccucacuagagg

SEQ ID NO: 1733707 - RNA, 19 nt, Artificial Sequence
  Description of Artificial Sequence: Synthetic oligonucleotide
caguggaagucgggagaaa

SEQ ID NO: 1733708 - RNA, 19 nt, Artificial Sequence
  Description of Artificial Sequence: Synthetic oligonucleotide
ggcuucgccgacccucacu

SEQ ID NO: 1733709 - RNA, 19 nt, Artificial Sequence
  Description of Artificial Sequence: Synthetic oligonucleotide
ccuuagcuaggacgcuuaa

SEQ ID NO: 1733710 - RNA, 19 nt, Artificial Sequence
  Description of Artificial Sequence: Synthetic oligonucleotide
cccuaucauagcucuacuu

SEQ ID NO: 1733711 - RNA, 19 nt, Artificial Sequence
  Description of Artificial Sequence: Synthetic oligonucleotide
cguggagacggcaguggaa

SEQ ID NO: 1733712 - RNA, 19 nt, Artificial Sequence
  Description of Artificial Sequence: Synthetic oligonucleotide
cuuaagccguucggccccu

SEQ ID NO: 1733713 - RNA, 19 nt, Artificial Sequence
  Description of Artificial Sequence: Synthetic oligonucleotide
cuaggacgcuuaagccguu

SEQ ID NO: 1733714 - RNA, 19 nt, Artificial Sequence
  Description of Artificial Sequence: Synthetic oligonucleotide
gguucacugcugccucauu

SEQ ID NO: 1733715 - RNA, 19 nt, Artificial Sequence
  Description of Artificial Sequence: Synthetic oligonucleotide
gcacccuaucauagcucua

SEQ ID NO: 1733716 - RNA, 19 nt, Artificial Sequence
  Description of Artificial Sequence: Synthetic oligonucleotide
gcgucucacagcguaccuu

SEQ ID NO: 1733717 - RNA, 19 nt, Artificial Sequence
  Description of Artificial Sequence: Synthetic oligonucleotide
ggcaugcuaccgagacacu

SEQ ID NO: 1733718 - RNA, 19 nt, Artificial Sequence
  Description of Artificial Sequence: Synthetic oligonucleotide
ccacuaagguccggauuuu

SEQ ID NO: 1733719 - RNA, 19 nt, Artificial Sequence
  Description of Artificial Sequence: Synthetic oligonucleotide
ccguucggccccugccgcu

SEQ ID NO: 1733720 - RNA, 19 nt, Artificial Sequence
  Description of Artificial Sequence: Synthetic oligonucleotide
cggcugccgaacucgccau

SEQ ID NO: 1733721 - RNA, 19 nt, Artificial Sequence
  Description of Artificial Sequence: Synthetic oligonucleotide
cggccccugccgcuguauu

SEQ ID NO: 1733722 - RNA, 19 nt, Artificial Sequence
  Description of Artificial Sequence: Synthetic oligonucleotide
uaugccauguuguagggcg

SEQ ID NO: 1733723 - RNA, 19 nt, Artificial Sequence
  Description of Artificial Sequence: Synthetic oligonucleotide
guaggaugcaugcugagcg

SEQ ID NO: 1733724 - RNA, 19 nt, Artificial Sequence
  Description of Artificial Sequence: Synthetic oligonucleotide
aagcaaggcggcuaugagc

SEQ ID NO: 1733725 - RNA, 19 nt, Artificial Sequence
  Description of Artificial Sequence: Synthetic oligonucleotide
ucugugugcaucuucaaug

SEQ ID NO: 1733726 - RNA, 19 nt, Artificial Sequence
  Description of Artificial Sequence: Synthetic oligonucleotide
aauuguucauucuccaaga

SEQ ID NO: 1733727 - RNA, 19 nt, Artificial Sequence
  Description of Artificial Sequence: Synthetic oligonucleotide
aaguacucggcccacuccg

SEQ ID NO: 1733728 - RNA, 19 nt, Artificial Sequence
  Description of Artificial Sequence: Synthetic oligonucleotide
ugguaugccauguuguagg

SEQ ID NO: 1733729 - RNA, 19 nt, Artificial Sequence
  Description of Artificial Sequence: Synthetic oligonucleotide
gauaguguccucccgcugg

SEQ ID NO: 1733730 - RNA, 19 nt, Artificial Sequence
  Description of Artificial Sequence: Synthetic oligonucleotide
aaaagccucccucucagca

SEQ ID NO: 1733731 - RNA, 19 nt, Artificial Sequence
  Description of Artificial Sequence: Synthetic oligonucleotide
uuggucaggcugaugauag

SEQ ID NO: 1733732 - RNA, 19 nt, Artificial Sequence
  Description of Artificial Sequence: Synthetic oligonucleotide
ucagcuucccggcaguagg

SEQ ID NO: 1733733 - RNA, 19 nt, Artificial Sequence
  Description of Artificial Sequence: Synthetic oligonucleotide
augcugagcggauagcgcc

SEQ ID NO: 1733734 - RNA, 19 nt, Artificial Sequence
  Description of Artificial Sequence: Synthetic oligonucleotide
gaugauaguguccucccgc

SEQ ID NO: 1733735 - RNA, 19 nt, Artificial Sequence
  Description of Artificial Sequence: Synthetic oligonucleotide
uugaagcugcccuugggcg

SEQ ID NO: 1733736 - RNA, 19 nt, Artificial Sequence
  Description of Artificial Sequence: Synthetic oligonucleotide
uaaccguuagcucugccug

SEQ ID NO: 1733737 - RNA, 19 nt, Artificial Sequence
  Description of Artificial Sequence: Synthetic oligonucleotide
uuggaggccaccuugcuca

SEQ ID NO: 1733738 - RNA, 19 nt, Artificial Sequence
  Description of Artificial Sequence: Synthetic oligonucleotide
uucaguguuuccaggaaga

SEQ ID NO: 1733739 - RNA, 19 nt, Artificial Sequence
  Description of Artificial Sequence: Synthetic oligonucleotide
gcuggauuggcacagagag

SEQ ID NO: 1733740 - RNA, 19 nt, Artificial Sequence
  Description of Artificial Sequence: Synthetic oligonucleotide
agcaccuugacucggcuuc

SEQ ID NO: 1733741 - RNA, 19 nt, Artificial Sequence
  Description of Artificial Sequence: Synthetic oligonucleotide
uuuccaggaagaauuguuc

SEQ ID NO: 1733742 - RNA, 19 nt, Artificial Sequence
  Description of Artificial Sequence: Synthetic oligonucleotide
aaccguuagcucugccugc

SEQ ID NO: 1733743 - RNA, 19 nt, Artificial Sequence
  Description of Artificial Sequence: Synthetic oligonucleotide
ugaaguugggcagugcugc

SEQ ID NO: 1733744 - RNA, 19 nt, Artificial Sequence
  Description of Artificial Sequence: Synthetic oligonucleotide
uguuccaccuccuguacgc

SEQ ID NO: 1733745 - RNA, 19 nt, Artificial Sequence
  Description of Artificial Sequence: Synthetic oligonucleotide
uucaugacugacuucugcu

SEQ ID NO: 1733746 - RNA, 19 nt, Artificial Sequence
  Description of Artificial Sequence: Synthetic oligonucleotide
agucuggcuacacugagga

SEQ ID NO: 1733747 - RNA, 19 nt, Artificial Sequence
  Description of Artificial Sequence: Synthetic oligonucleotide
cuacacugaggacuggugg

SEQ ID NO: 1733748 - RNA, 19 nt, Artificial Sequence
  Description of Artificial Sequence: Synthetic oligonucleotide
aagaaggugugugggcacc

SEQ ID NO: 1733749 - RNA, 19 nt, Artificial Sequence
  Description of Artificial Sequence: Synthetic oligonucleotide
ugaugauaguguccucccg

SEQ ID NO: 1733750 - RNA, 19 nt, Artificial Sequence
  Description of Artificial Sequence: Synthetic oligonucleotide
agagugguaugccauguug

SEQ ID NO: 1733751 - RNA, 19 nt, Artificial Sequence
  Description of Artificial Sequence: Synthetic oligonucleotide
guaggaugccucuagcacc

SEQ ID NO: 1733752 - RNA, 19 nt, Artificial Sequence
  Description of Artificial Sequence: Synthetic oligonucleotide
aguaggaugcaugcugagc

SEQ ID NO: 1733753 - RNA, 19 nt, Artificial Sequence
  Description of Artificial Sequence: Synthetic oligonucleotide
caugacugacuucugcucc

SEQ ID NO: 1733754 - RNA, 19 nt, Artificial Sequence
  Description of Artificial Sequence: Synthetic oligonucleotide
gugagcgagaauucuaggc

SEQ ID NO: 1733755 - RNA, 19 nt, Artificial Sequence
  Description of Artificial Sequence: Synthetic oligonucleotide
aguguuuccaggaagaauu

SEQ ID NO: 1733756 - RNA, 19 nt, Artificial Sequence
  Description of Artificial Sequence: Synthetic oligonucleotide
cuucccggcaguaggaugc

SEQ ID NO: 1733757 - RNA, 19 nt, Artificial Sequence
  Description of Artificial Sequence: Synthetic oligonucleotide
aaugagcgccaggucagcc

SEQ ID NO: 1733758 - RNA, 19 nt, Artificial Sequence
  Description of Artificial Sequence: Synthetic oligonucleotide
agaugcuccuugugcauac

SEQ ID NO: 1733759 - RNA, 19 nt, Artificial Sequence
  Description of Artificial Sequence: Synthetic oligonucleotide
uccaacuuccgcaccuggg

SEQ ID NO: 1733760 - RNA, 19 nt, Artificial Sequence
  Description of Artificial Sequence: Synthetic oligonucleotide
ucucucuccaaaagccucc

SEQ ID NO: 1733761 - RNA, 19 nt, Artificial Sequence
  Description of Artificial Sequence: Synthetic oligonucleotide
cagaugcuugcugagaagg

SEQ ID NO: 1733762 - RNA, 19 nt, Artificial Sequence
  Description of Artificial Sequence: Synthetic oligonucleotide
acuuguucaugacugacuu

SEQ ID NO: 1733763 - RNA, 19 nt, Artificial Sequence
  Description of Artificial Sequence: Synthetic oligonucleotide
ucuccaaaagccucccucu

SEQ ID NO: 1733764 - RNA, 19 nt, Artificial Sequence
  Description of Artificial Sequence: Synthetic oligonucleotide
agaagucgugguccugugc

SEQ ID NO: 1733765 - RNA, 19 nt, Artificial Sequence
  Description of Artificial Sequence: Synthetic oligonucleotide
uuguagggcgcuuucuuca

SEQ ID NO: 1733766 - RNA, 19 nt, Artificial Sequence
  Description of Artificial Sequence: Synthetic oligonucleotide
agugagcgagaauucuagg

SEQ ID NO: 1733767 - RNA, 19 nt, Artificial Sequence
  Description of Artificial Sequence: Synthetic oligonucleotide
cugaugauaguguccuccc

SEQ ID NO: 1733768 - RNA, 19 nt, Artificial Sequence
  Description of Artificial Sequence: Synthetic oligonucleotide
cagugagcgagaauucuag

SEQ ID NO: 1733769 - RNA, 19 nt, Artificial Sequence
  Description of Artificial Sequence: Synthetic oligonucleotide
agaauucuaggcccagaug

SEQ ID NO: 1733770 - RNA, 19 nt, Artificial Sequence
  Description of Artificial Sequence: Synthetic oligonucleotide
ggcucugguacuuucaggc

SEQ ID NO: 1733771 - RNA, 19 nt, Artificial Sequence
  Description of Artificial Sequence: Synthetic oligonucleotide
gcucauauguuccaccucc

SEQ ID NO: 1733772 - RNA, 19 nt, Artificial Sequence
  Description of Artificial Sequence: Synthetic oligonucleotide
caggagucuggcuacacug

SEQ ID NO: 1733773 - RNA, 19 nt, Artificial Sequence
  Description of Artificial Sequence: Synthetic oligonucleotide
cuugugcauacgcugcucc

SEQ ID NO: 1733774 - RNA, 19 nt, Artificial Sequence
  Description of Artificial Sequence: Synthetic oligonucleotide
gguauccugagccuggcag

SEQ ID NO: 1733775 - RNA, 19 nt, Artificial Sequence
  Description of Artificial Sequence: Synthetic oligonucleotide
uggaaggcacuuccugccg

SEQ ID NO: 1733776 - RNA, 19 nt, Artificial Sequence
  Description of Artificial Sequence: Synthetic oligonucleotide
auauguuccaccuccugua

SEQ ID NO: 1733777 - RNA, 19 nt, Artificial Sequence
  Description of Artificial Sequence: Synthetic oligonucleotide
agcaaggcggcuaugagcu

SEQ ID NO: 1733778 - RNA, 19 nt, Artificial Sequence
  Description of Artificial Sequence: Synthetic oligonucleotide
ucggacugcaucugcuggg

SEQ ID NO: 1733779 - RNA, 19 nt, Artificial Sequence
  Description of Artificial Sequence: Synthetic oligonucleotide
uguacgcgggccuggaggc

SEQ ID NO: 1733780 - RNA, 19 nt, Artificial Sequence
  Description of Artificial Sequence: Synthetic oligonucleotide
uggacggcauccaggcugg

SEQ ID NO: 1733781 - RNA, 19 nt, Artificial Sequence
  Description of Artificial Sequence: Synthetic oligonucleotide
ucaagcaaggcggcuauga

SEQ ID NO: 1733782 - RNA, 19 nt, Artificial Sequence
  Description of Artificial Sequence: Synthetic oligonucleotide
acacuuguucaugacugac

SEQ ID NO: 1733783 - RNA, 19 nt, Artificial Sequence
  Description of Artificial Sequence: Synthetic oligonucleotide
ucuagcaccuugacucggc

SEQ ID NO: 1733784 - RNA, 19 nt, Artificial Sequence
  Description of Artificial Sequence: Synthetic oligonucleotide
uugacucggcuucugugug

SEQ ID NO: 1733785 - RNA, 19 nt, Artificial Sequence
  Description of Artificial Sequence: Synthetic oligonucleotide
caccuugcucauauguucc

SEQ ID NO: 1733786 - RNA, 19 nt, Artificial Sequence
  Description of Artificial Sequence: Synthetic oligonucleotide
uggcaagaagguguguggg

SEQ ID NO: 1733787 - RNA, 19 nt, Artificial Sequence
  Description of Artificial Sequence: Synthetic oligonucleotide
ugguaggaugccucuagca

SEQ ID NO: 1733788 - RNA, 19 nt, Artificial Sequence
  Description of Artificial Sequence: Synthetic oligonucleotide
gaaguacucggcccacucc

SEQ ID NO: 1733789 - RNA, 19 nt, Artificial Sequence
  Description of Artificial Sequence: Synthetic oligonucleotide
cuggacggcauccaggcug

SEQ ID NO: 1733790 - RNA, 19 nt, Artificial Sequence
  Description of Artificial Sequence: Synthetic oligonucleotide
ucggccugaaguugggcag

SEQ ID NO: 1733791 - RNA, 19 nt, Artificial Sequence
  Description of Artificial Sequence: Synthetic oligonucleotide
uggcccggagcucacaggc

SEQ ID NO: 1733792 - RNA, 19 nt, Artificial Sequence
  Description of Artificial Sequence: Synthetic oligonucleotide
gauagcgccuccuucucuc

SEQ ID NO: 1733793 - RNA, 19 nt, Artificial Sequence
  Description of Artificial Sequence: Synthetic oligonucleotide
acucggcccacuccgcugc

SEQ ID NO: 1733794 - RNA, 19 nt, Artificial Sequence
  Description of Artificial Sequence: Synthetic oligonucleotide
cuguacgcgggccuggagg

SEQ ID NO: 1733795 - RNA, 19 nt, Artificial Sequence
  Description of Artificial Sequence: Synthetic oligonucleotide
gagcucacaggcccuaacc

SEQ ID NO: 1733796 - RNA, 19 nt, Artificial Sequence
  Description of Artificial Sequence: Synthetic oligonucleotide
augcaugcugagcggauag

SEQ ID NO: 1733797 - RNA, 19 nt, Artificial Sequence
  Description of Artificial Sequence: Synthetic oligonucleotide
ugaaguacucggcccacuc

SEQ ID NO: 1733798 - RNA, 19 nt, Artificial Sequence
  Description of Artificial Sequence: Synthetic oligonucleotide
ucaggcugaugauaguguc

SEQ ID NO: 1733799 - RNA, 19 nt, Artificial Sequence
  Description of Artificial Sequence: Synthetic oligonucleotide
caugcugagcggauagcgc

SEQ ID NO: 1733800 - RNA, 19 nt, Artificial Sequence
  Description of Artificial Sequence: Synthetic oligonucleotide
uguagggcgcuuucuucag

SEQ ID NO: 1733801 - RNA, 19 nt, Artificial Sequence
  Description of Artificial Sequence: Synthetic oligonucleotide
aagaagucgugguccugug

SEQ ID NO: 1733802 - RNA, 19 nt, Artificial Sequence
  Description of Artificial Sequence: Synthetic oligonucleotide
agaauuguucauucuccaa

SEQ ID NO: 1733803 - RNA, 19 nt, Artificial Sequence
  Description of Artificial Sequence: Synthetic oligonucleotide
gugugcaucuucaaugagc

SEQ ID NO: 1733804 - RNA, 19 nt, Artificial Sequence
  Description of Artificial Sequence: Synthetic oligonucleotide
uagggcgcuuucuucagug

SEQ ID NO: 1733805 - RNA, 19 nt, Artificial Sequence
  Description of Artificial Sequence: Synthetic oligonucleotide
ugggcaccggagcagcagg

SEQ ID NO: 1733806 - RNA, 19 nt, Artificial Sequence
  Description of Artificial Sequence: Synthetic oligonucleotide
augauaguguccucccgcu

SEQ ID NO: 1733807 - RNA, 19 nt, Artificial Sequence
  Description of Artificial Sequence: Synthetic oligonucleotide
agucgugguccugugcugc

SEQ ID NO: 1733808 - RNA, 19 nt, Artificial Sequence
  Description of Artificial Sequence: Synthetic oligonucleotide
acggcauccaggcugggca

SEQ ID NO: 1733809 - RNA, 19 nt, Artificial Sequence
  Description of Artificial Sequence: Synthetic oligonucleotide
uguuguagggcgcuuucuu

SEQ ID NO: 1733810 - RNA, 19 nt, Artificial Sequence
  Description of Artificial Sequence: Synthetic oligonucleotide
cagucgaagcuccuggcgc

SEQ ID NO: 1733811 - RNA, 19 nt, Artificial Sequence
  Description of Artificial Sequence: Synthetic oligonucleotide
gguaggaugccucuagcac

SEQ ID NO: 1733812 - RNA, 19 nt, Artificial Sequence
  Description of Artificial Sequence: Synthetic oligonucleotide
ggagucugcaugcagcgcc

SEQ ID NO: 1733813 - RNA, 19 nt, Artificial Sequence
  Description of Artificial Sequence: Synthetic oligonucleotide
cucggacugcaucugcugg

SEQ ID NO: 1733814 - RNA, 19 nt, Artificial Sequence
  Description of Artificial Sequence: Synthetic oligonucleotide
agcggauagcgccuccuuc

SEQ ID NO: 1733815 - RNA, 19 nt, Artificial Sequence
  Description of Artificial Sequence: Synthetic oligonucleotide
guauccugagccuggcagc

SEQ ID NO: 1733816 - RNA, 19 nt, Artificial Sequence
  Description of Artificial Sequence: Synthetic oligonucleotide
cuuccugccgcacacgguc

SEQ ID NO: 1733817 - RNA, 19 nt, Artificial Sequence
  Description of Artificial Sequence: Synthetic oligonucleotide
uuucaggcagagugguaug

SEQ ID NO: 1733818 - RNA, 19 nt, Artificial Sequence
  Description of Artificial Sequence: Synthetic oligonucleotide
aguguccucccgcugggag

SEQ ID NO: 1733819 - RNA, 19 nt, Artificial Sequence
  Description of Artificial Sequence: Synthetic oligonucleotide
uguucaugacugacuucug

SEQ ID NO: 1733820 - RNA, 19 nt, Artificial Sequence
  Description of Artificial Sequence: Synthetic oligonucleotide
gaagucgugguccugugcu

SEQ ID NO: 1733821 - RNA, 19 nt, Artificial Sequence
  Description of Artificial Sequence: Synthetic oligonucleotide
cugcucacccuccucauac

SEQ ID NO: 1733822 - RNA, 19 nt, Artificial Sequence
  Description of Artificial Sequence: Synthetic oligonucleotide
cugaaguugggcagugcug

SEQ ID NO: 1733823 - RNA, 19 nt, Artificial Sequence
  Description of Artificial Sequence: Synthetic oligonucleotide
uccaagaagucgugguccu

SEQ ID NO: 1733824 - RNA, 19 nt, Artificial Sequence
  Description of Artificial Sequence: Synthetic oligonucleotide
ugauaguguccucccgcug

SEQ ID NO: 1733825 - RNA, 19 nt, Artificial Sequence
  Description of Artificial Sequence: Synthetic oligonucleotide
aagucgugguccugugcug

SEQ ID NO: 1733826 - RNA, 19 nt, Artificial Sequence
  Description of Artificial Sequence: Synthetic oligonucleotide
uucccacacuuguucauga

SEQ ID NO: 1733827 - RNA, 19 nt, Artificial Sequence
  Description of Artificial Sequence: Synthetic oligonucleotide
uacuuucaggcagaguggu

SEQ ID NO: 1733828 - RNA, 19 nt, Artificial Sequence
  Description of Artificial Sequence: Synthetic oligonucleotide
uuacucagcuucugcugug

SEQ ID NO: 1733829 - RNA, 19 nt, Artificial Sequence
  Description of Artificial Sequence: Synthetic oligonucleotide
cauacuucuuggaggccac

SEQ ID NO: 1733830 - RNA, 19 nt, Artificial Sequence
  Description of Artificial Sequence: Synthetic oligonucleotide
uucaggcagagugguaugc

SEQ ID NO: 1733831 - RNA, 19 nt, Artificial Sequence
  Description of Artificial Sequence: Synthetic oligonucleotide
ugaacuguggagggcugcc

SEQ ID NO: 1733832 - RNA, 19 nt, Artificial Sequence
  Description of Artificial Sequence: Synthetic oligonucleotide
uucugguauccugagccug

SEQ ID NO: 1733833 - RNA, 19 nt, Artificial Sequence
  Description of Artificial Sequence: Synthetic oligonucleotide
cugcagucucugcugagcc

SEQ ID NO: 1733834 - RNA, 19 nt, Artificial Sequence
  Description of Artificial Sequence: Synthetic oligonucleotide
gguaugccauguuguaggg

SEQ ID NO: 1733835 - RNA, 19 nt, Artificial Sequence
  Description of Artificial Sequence: Synthetic oligonucleotide
acaggcccuaaccguuagc

SEQ ID NO: 1733836 - RNA, 19 nt, Artificial Sequence
  Description of Artificial Sequence: Synthetic oligonucleotide
cauucuccaagaagucgug

SEQ ID NO: 1733837 - RNA, 19 nt, Artificial Sequence
  Description of Artificial Sequence: Synthetic oligonucleotide
aaggugugugggcaccgga

SEQ ID NO: 1733838 - RNA, 19 nt, Artificial Sequence
  Description of Artificial Sequence: Synthetic oligonucleotide
caagcaaggcggcuaugag

SEQ ID NO: 1733839 - RNA, 19 nt, Artificial Sequence
  Description of Artificial Sequence: Synthetic oligonucleotide
cacuuccugccgcacacgg

SEQ ID NO: 1733840 - RNA, 19 nt, Artificial Sequence
  Description of Artificial Sequence: Synthetic oligonucleotide
uguuuccaggaagaauugu

SEQ ID NO: 1733841 - RNA, 19 nt, Artificial Sequence
  Description of Artificial Sequence: Synthetic oligonucleotide
cugugugcaucuucaauga

SEQ ID NO: 1733842 - RNA, 19 nt, Artificial Sequence
  Description of Artificial Sequence: Synthetic oligonucleotide
gucgcagccauuccugcug

SEQ ID NO: 1733843 - RNA, 19 nt, Artificial Sequence
  Description of Artificial Sequence: Synthetic oligonucleotide
augacugacuucugcuccu

SEQ ID NO: 1733844 - RNA, 19 nt, Artificial Sequence
  Description of Artificial Sequence: Synthetic oligonucleotide
uccagucgaagcuccuggc

SEQ ID NO: 1733845 - RNA, 19 nt, Artificial Sequence
  Description of Artificial Sequence: Synthetic oligonucleotide
uauccugagccuggcagca

SEQ ID NO: 1733846 - RNA, 19 nt, Artificial Sequence
  Description of Artificial Sequence: Synthetic oligonucleotide
agcuccaacuuccgcaccu

SEQ ID NO: 1733847 - RNA, 19 nt, Artificial Sequence
  Description of Artificial Sequence: Synthetic oligonucleotide
ugcuggguccucuccagcu

SEQ ID NO: 1733848 - RNA, 19 nt, Artificial Sequence
  Description of Artificial Sequence: Synthetic oligonucleotide
ucugcaugcagcgcccucu

SEQ ID NO: 1733849 - RNA, 19 nt, Artificial Sequence
  Description of Artificial Sequence: Synthetic oligonucleotide
gcugaugauaguguccucc

SEQ ID NO: 1733850 - RNA, 19 nt, Artificial Sequence
  Description of Artificial Sequence: Synthetic oligonucleotide
gugguaugccauguuguag

SEQ ID NO: 1733851 - RNA, 19 nt, Artificial Sequence
  Description of Artificial Sequence: Synthetic oligonucleotide
acccuccucauacuucuug

SEQ ID NO: 1733852 - RNA, 19 nt, Artificial Sequence
  Description of Artificial Sequence: Synthetic oligonucleotide
caagaaggugugugggcac

SEQ ID NO: 1733853 - RNA, 19 nt, Artificial Sequence
  Description of Artificial Sequence: Synthetic oligonucleotide
uuuguggagccuguccuuc

SEQ ID NO: 1733854 - RNA, 19 nt, Artificial Sequence
  Description of Artificial Sequence: Synthetic oligonucleotide
ugcucauauguuccaccuc

SEQ ID NO: 1733855 - RNA, 19 nt, Artificial Sequence
  Description of Artificial Sequence: Synthetic oligonucleotide
gugcauacgcugcuccugc

SEQ ID NO: 1733856 - RNA, 19 nt, Artificial Sequence
  Description of Artificial Sequence: Synthetic oligonucleotide
acagacucugggaguaggg

SEQ ID NO: 1733857 - RNA, 19 nt, Artificial Sequence
  Description of Artificial Sequence: Synthetic oligonucleotide
cuuguucaugacugacuuc

SEQ ID NO: 1733858 - RNA, 19 nt, Artificial Sequence
  Description of Artificial Sequence: Synthetic oligonucleotide
aggcccuaaccguuagcuc

SEQ ID NO: 1733859 - RNA, 19 nt, Artificial Sequence
  Description of Artificial Sequence: Synthetic oligonucleotide
uugugcauacgcugcuccu

SEQ ID NO: 1733860 - RNA, 19 nt, Artificial Sequence
  Description of Artificial Sequence: Synthetic oligonucleotide
gaugccucuagcaccuuga

SEQ ID NO: 1733861 - RNA, 19 nt, Artificial Sequence
  Description of Artificial Sequence: Synthetic oligonucleotide
gagaauucuaggcccagau

SEQ ID NO: 1733862 - RNA, 19 nt, Artificial Sequence
  Description of Artificial Sequence: Synthetic oligonucleotide
gacagcuuggucuggcucu

SEQ ID NO: 1733863 - RNA, 19 nt, Artificial Sequence
  Description of Artificial Sequence: Synthetic oligonucleotide
cuuggcccggagcucacag

SEQ ID NO: 1733864 - RNA, 19 nt, Artificial Sequence
  Description of Artificial Sequence: Synthetic oligonucleotide
caccggagcagcaggaguc

SEQ ID NO: 1733865 - RNA, 19 nt, Artificial Sequence
  Description of Artificial Sequence: Synthetic oligonucleotide
ugacucggcuucugugugc

SEQ ID NO: 1733866 - RNA, 19 nt, Artificial Sequence
  Description of Artificial Sequence: Synthetic oligonucleotide
uuggcccggagcucacagg

SEQ ID NO: 1733867 - RNA, 19 nt, Artificial Sequence
  Description of Artificial Sequence: Synthetic oligonucleotide
cugguaggaugccucuagc

SEQ ID NO: 1733868 - RNA, 19 nt, Artificial Sequence
  Description of Artificial Sequence: Synthetic oligonucleotide
agaaggugugugggcaccg

SEQ ID NO: 1733869 - RNA, 19 nt, Artificial Sequence
  Description of Artificial Sequence: Synthetic oligonucleotide
ugggaguaggggcuggauu

SEQ ID NO: 1733870 - RNA, 19 nt, Artificial Sequence
  Description of Artificial Sequence: Synthetic oligonucleotide
gugugaaguacucggccca

SEQ ID NO: 1733871 - RNA, 19 nt, Artificial Sequence
  Description of Artificial Sequence: Synthetic oligonucleotide
gcugguaggaugccucuag

SEQ ID NO: 1733872 - RNA, 19 nt, Artificial Sequence
  Description of Artificial Sequence: Synthetic oligonucleotide
gcaugcugagcggauagcg

SEQ ID NO: 1733873 - RNA, 19 nt, Artificial Sequence
  Description of Artificial Sequence: Synthetic oligonucleotide
aguacucggcccacuccgc

SEQ ID NO: 1733874 - RNA, 19 nt, Artificial Sequence
  Description of Artificial Sequence: Synthetic oligonucleotide
ucaguguuuccaggaagaa

SEQ ID NO: 1733875 - RNA, 19 nt, Artificial Sequence
  Description of Artificial Sequence: Synthetic oligonucleotide
gaaggugugugggcaccgg

SEQ ID NO: 1733876 - RNA, 19 nt, Artificial Sequence
  Description of Artificial Sequence: Synthetic oligonucleotide
ggagggcugcccgagaagg

SEQ ID NO: 1733877 - RNA, 19 nt, Artificial Sequence
  Description of Artificial Sequence: Synthetic oligonucleotide
ucccgcugcugguaggaug

SEQ ID NO: 1733878 - RNA, 19 nt, Artificial Sequence
  Description of Artificial Sequence: Synthetic oligonucleotide
ugucgcagccauuccugcu

SEQ ID NO: 1733879 - RNA, 19 nt, Artificial Sequence
  Description of Artificial Sequence: Synthetic oligonucleotide
uguggagccuguccuucuc

SEQ ID NO: 1733880 - RNA, 19 nt, Artificial Sequence
  Description of Artificial Sequence: Synthetic oligonucleotide
cauauguuccaccuccugu

SEQ ID NO: 1733881 - RNA, 19 nt, Artificial Sequence
  Description of Artificial Sequence: Synthetic oligonucleotide
cuucccacacuuguucaug

SEQ ID NO: 1733882 - RNA, 19 nt, Artificial Sequence
  Description of Artificial Sequence: Synthetic oligonucleotide
cuaaccguuagcucugccu

SEQ ID NO: 1733883 - RNA, 19 nt, Artificial Sequence
  Description of Artificial Sequence: Synthetic oligonucleotide
ggucaggcugaugauagug

SEQ ID NO: 1733884 - RNA, 19 nt, Artificial Sequence
  Description of Artificial Sequence: Synthetic oligonucleotide
ggcaagaaggugugugggc

SEQ ID NO: 1733885 - RNA, 19 nt, Artificial Sequence
  Description of Artificial Sequence: Synthetic oligonucleotide
ugugaaguacucggcccac

SEQ ID NO: 1733886 - RNA, 19 nt, Artificial Sequence
  Description of Artificial Sequence: Synthetic oligonucleotide
cuugacucggcuucugugu

SEQ ID NO: 1733887 - RNA, 19 nt, Artificial Sequence
  Description of Artificial Sequence: Synthetic oligonucleotide
uacucggcccacuccgcug

SEQ ID NO: 1733888 - RNA, 19 nt, Artificial Sequence
  Description of Artificial Sequence: Synthetic oligonucleotide
cuuacucagcuucugcugu

SEQ ID NO: 1733889 - RNA, 19 nt, Artificial Sequence
  Description of Artificial Sequence: Synthetic oligonucleotide
gguccugugcugcugugug

SEQ ID NO: 1733890 - RNA, 19 nt, Artificial Sequence
  Description of Artificial Sequence: Synthetic oligonucleotide
cgcucucucuccaaaagcc

SEQ ID NO: 1733891 - RNA, 19 nt, Artificial Sequence
  Description of Artificial Sequence: Synthetic oligonucleotide
agccaacuucuccuccuug

SEQ ID NO: 1733892 - RNA, 19 nt, Artificial Sequence
  Description of Artificial Sequence: Synthetic oligonucleotide
ucccacacuuguucaugac

SEQ ID NO: 1733893 - RNA, 19 nt, Artificial Sequence
  Description of Artificial Sequence: Synthetic oligonucleotide
ggcgcucucucuccaaaag

SEQ ID NO: 1733894 - RNA, 19 nt, Artificial Sequence
  Description of Artificial Sequence: Synthetic oligonucleotide
agcaggagucuggcuacac

SEQ ID NO: 1733895 - RNA, 19 nt, Artificial Sequence
  Description of Artificial Sequence: Synthetic oligonucleotide
agacucugcaccacagacu

SEQ ID NO: 1733896 - RNA, 19 nt, Artificial Sequence
  Description of Artificial Sequence: Synthetic oligonucleotide
uuguggagccuguccuucu

SEQ ID NO: 1733897 - RNA, 19 nt, Artificial Sequence
  Description of Artificial Sequence: Synthetic oligonucleotide
gggcccugaacuguggagg

SEQ ID NO: 1733898 - RNA, 19 nt, Artificial Sequence
  Description of Artificial Sequence: Synthetic oligonucleotide
gcccgagaaggcuggaagg

SEQ ID NO: 1733899 - RNA, 19 nt, Artificial Sequence
  Description of Artificial Sequence: Synthetic oligonucleotide
cacuccgcugccaggcgcc

SEQ ID NO: 1733900 - RNA, 19 nt, Artificial Sequence
  Description of Artificial Sequence: Synthetic oligonucleotide
ugguauccugagccuggca

SEQ ID NO: 1733901 - RNA, 19 nt, Artificial Sequence
  Description of Artificial Sequence: Synthetic oligonucleotide
cucuagcaccuugacucgg

SEQ ID NO: 1733902 - RNA, 19 nt, Artificial Sequence
  Description of Artificial Sequence: Synthetic oligonucleotide
uccucaagcaaggcggcua

SEQ ID NO: 1733903 - RNA, 19 nt, Artificial Sequence
  Description of Artificial Sequence: Synthetic oligonucleotide
accuugacucggcuucugu

SEQ ID NO: 1733904 - RNA, 19 nt, Artificial Sequence
  Description of Artificial Sequence: Synthetic oligonucleotide
ggcggcuaugagcucagcc

SEQ ID NO: 1733905 - RNA, 19 nt, Artificial Sequence
  Description of Artificial Sequence: Synthetic oligonucleotide
gagucugcaugcagcgccc

SEQ ID NO: 1733906 - RNA, 19 nt, Artificial Sequence
  Description of Artificial Sequence: Synthetic oligonucleotide
ccggcaguaggaugcaugc

SEQ ID NO: 1733907 - RNA, 19 nt, Artificial Sequence
  Description of Artificial Sequence: Synthetic oligonucleotide
uguggagggcugcccgaga

SEQ ID NO: 1733908 - RNA, 19 nt, Artificial Sequence
  Description of Artificial Sequence: Synthetic oligonucleotide
guaugccauguuguagggc

SEQ ID NO: 1733909 - RNA, 19 nt, Artificial Sequence
  Description of Artificial Sequence: Synthetic oligonucleotide
ugcaugcugagcggauagc

SEQ ID NO: 1733910 - RNA, 19 nt, Artificial Sequence
  Description of Artificial Sequence: Synthetic oligonucleotide
cugcucagcuucccggcag

SEQ ID NO: 1733911 - RNA, 19 nt, Artificial Sequence
  Description of Artificial Sequence: Synthetic oligonucleotide
ggcuggaaggcacuuccug

SEQ ID NO: 1733912 - RNA, 19 nt, Artificial Sequence
  Description of Artificial Sequence: Synthetic oligonucleotide
guuccuuacucagcuucug

SEQ ID NO: 1733913 - RNA, 19 nt, Artificial Sequence
  Description of Artificial Sequence: Synthetic oligonucleotide
agcugcagucucugcugag

SEQ ID NO: 1733914 - RNA, 19 nt, Artificial Sequence
  Description of Artificial Sequence: Synthetic oligonucleotide
ucacaggcccuaaccguua

SEQ ID NO: 1733915 - RNA, 19 nt, Artificial Sequence
  Description of Artificial Sequence: Synthetic oligonucleotide
aaggcggcuaugagcucag

SEQ ID NO: 1733916 - RNA, 19 nt, Artificial Sequence
  Description of Artificial Sequence: Synthetic oligonucleotide
agcuuggcaagaaggugug

SEQ ID NO: 1733917 - RNA, 19 nt, Artificial Sequence
  Description of Artificial Sequence: Synthetic oligonucleotide
cugccgcugaacugccugc

SEQ ID NO: 1733918 - RNA, 19 nt, Artificial Sequence
  Description of Artificial Sequence: Synthetic oligonucleotide
cccgcugcugguaggaugc

SEQ ID NO: 1733919 - RNA, 19 nt, Artificial Sequence
  Description of Artificial Sequence: Synthetic oligonucleotide
gaggccaccuugcucauau

SEQ ID NO: 1733920 - RNA, 19 nt, Artificial Sequence
  Description of Artificial Sequence: Synthetic oligonucleotide
aggaugcaugcugagcgga

SEQ ID NO: 1733921 - RNA, 19 nt, Artificial Sequence
  Description of Artificial Sequence: Synthetic oligonucleotide
cuaugagcucagcccuggc

SEQ ID NO: 1733922 - RNA, 19 nt, Artificial Sequence
  Description of Artificial Sequence: Synthetic oligonucleotide
ggaaggcacuuccugccgc

SEQ ID NO: 1733923 - RNA, 19 nt, Artificial Sequence
  Description of Artificial Sequence: Synthetic oligonucleotide
ugugggcaccggagcagca

SEQ ID NO: 1733924 - RNA, 19 nt, Artificial Sequence
  Description of Artificial Sequence: Synthetic oligonucleotide
ugccauguuguagggcgcu

SEQ ID NO: 1733925 - RNA, 19 nt, Artificial Sequence
  Description of Artificial Sequence: Synthetic oligonucleotide
ccagucgaagcuccuggcg

SEQ ID NO: 1733926 - RNA, 19 nt, Artificial Sequence
  Description of Artificial Sequence: Synthetic oligonucleotide
ugagcggauagcgccuccu

SEQ ID NO: 1733927 - RNA, 19 nt, Artificial Sequence
  Description of Artificial Sequence: Synthetic oligonucleotide
uccucccgcugcugguagg

SEQ ID NO: 1733928 - RNA, 19 nt, Artificial Sequence
  Description of Artificial Sequence: Synthetic oligonucleotide
uccugccgcacacggucca

SEQ ID NO: 1733929 - RNA, 19 nt, Artificial Sequence
  Description of Artificial Sequence: Synthetic oligonucleotide
gcuaugagcucagcccugg

SEQ ID NO: 1733930 - RNA, 19 nt, Artificial Sequence
  Description of Artificial Sequence: Synthetic oligonucleotide
ugcauacgcugcuccugcu

SEQ ID NO: 1733931 - RNA, 19 nt, Artificial Sequence
  Description of Artificial Sequence: Synthetic oligonucleotide
uacgcgggccuggaggcgc

SEQ ID NO: 1733932 - RNA, 19 nt, Artificial Sequence
  Description of Artificial Sequence: Synthetic oligonucleotide
gcaagaaggugugugggca

SEQ ID NO: 1733933 - RNA, 19 nt, Artificial Sequence
  Description of Artificial Sequence: Synthetic oligonucleotide
ggcccuaaccguuagcucu

SEQ ID NO: 1733934 - RNA, 19 nt, Artificial Sequence
  Description of Artificial Sequence: Synthetic oligonucleotide
cacaggcccuaaccguuag

SEQ ID NO: 1733935 - RNA, 19 nt, Artificial Sequence
  Description of Artificial Sequence: Synthetic oligonucleotide
aggcucagaugcuccuugu

SEQ ID NO: 1733936 - RNA, 19 nt, Artificial Sequence
  Description of Artificial Sequence: Synthetic oligonucleotide
gacggcauccaggcugggc

SEQ ID NO: 1733937 - RNA, 19 nt, Artificial Sequence
  Description of Artificial Sequence: Synthetic oligonucleotide
gacucugggaguaggggcu

SEQ ID NO: 1733938 - RNA, 19 nt, Artificial Sequence
  Description of Artificial Sequence: Synthetic oligonucleotide
caaggcggcuaugagcuca

SEQ ID NO: 1733939 - RNA, 19 nt, Artificial Sequence
  Description of Artificial Sequence: Synthetic oligonucleotide
gcgcaggcuggcuuugugg

SEQ ID NO: 1733940 - RNA, 19 nt, Artificial Sequence
  Description of Artificial Sequence: Synthetic oligonucleotide
ucggcccguuccuuacuca

SEQ ID NO: 1733941 - RNA, 19 nt, Artificial Sequence
  Description of Artificial Sequence: Synthetic oligonucleotide
agggcgcuuucuucagugu

SEQ ID NO: 1733942 - RNA, 19 nt, Artificial Sequence
  Description of Artificial Sequence: Synthetic oligonucleotide
ccuugacucggcuucugug

SEQ ID NO: 1733943 - RNA, 19 nt, Artificial Sequence
  Description of Artificial Sequence: Synthetic oligonucleotide
gcgcucucucuccaaaagc

SEQ ID NO: 1733944 - RNA, 19 nt, Artificial Sequence
  Description of Artificial Sequence: Synthetic oligonucleotide
cugguacuuucaggcagag

SEQ ID NO: 1733945 - RNA, 19 nt, Artificial Sequence
  Description of Artificial Sequence: Synthetic oligonucleotide
uggaggcgcaggcuggcuu

SEQ ID NO: 1733946 - RNA, 19 nt, Artificial Sequence
  Description of Artificial Sequence: Synthetic oligonucleotide
accguuagcucugccugcu

SEQ ID NO: 1733947 - RNA, 19 nt, Artificial Sequence
  Description of Artificial Sequence: Synthetic oligonucleotide
aggcacuuccugccgcaca

SEQ ID NO: 1733948 - RNA, 19 nt, Artificial Sequence
  Description of Artificial Sequence: Synthetic oligonucleotide
ccuugaagcugcccuuggg

SEQ ID NO: 1733949 - RNA, 19 nt, Artificial Sequence
  Description of Artificial Sequence: Synthetic oligonucleotide
uggcgcucucucuccaaaa

SEQ ID NO: 1733950 - RNA, 19 nt, Artificial Sequence
  Description of Artificial Sequence: Synthetic oligonucleotide
ggaugccucuagcaccuug

SEQ ID NO: 1733951 - RNA, 19 nt, Artificial Sequence
  Description of Artificial Sequence: Synthetic oligonucleotide
cucggcccguuccuuacuc

SEQ ID NO: 1733952 - RNA, 19 nt, Artificial Sequence
  Description of Artificial Sequence: Synthetic oligonucleotide
cuuggucaggcugaugaua

SEQ ID NO: 1733953 - RNA, 19 nt, Artificial Sequence
  Description of Artificial Sequence: Synthetic oligonucleotide
cccgcugggagucugcaug

SEQ ID NO: 1733954 - RNA, 19 nt, Artificial Sequence
  Description of Artificial Sequence: Synthetic oligonucleotide
caaugagcgccaggucagc

SEQ ID NO: 1733955 - RNA, 19 nt, Artificial Sequence
  Description of Artificial Sequence: Synthetic oligonucleotide
gagggcugcccgagaaggc

SEQ ID NO: 1733956 - RNA, 19 nt, Artificial Sequence
  Description of Artificial Sequence: Synthetic oligonucleotide
gcuacacugaggacuggug

SEQ ID NO: 1733957 - RNA, 19 nt, Artificial Sequence
  Description of Artificial Sequence: Synthetic oligonucleotide
cugcugcucggacugcauc

SEQ ID NO: 1733958 - RNA, 19 nt, Artificial Sequence
  Description of Artificial Sequence: Synthetic oligonucleotide
ccagaugcuugcugagaag

SEQ ID NO: 1733959 - RNA, 19 nt, Artificial Sequence
  Description of Artificial Sequence: Synthetic oligonucleotide
uagcaccuugacucggcuu

SEQ ID NO: 1733960 - RNA, 19 nt, Artificial Sequence
  Description of Artificial Sequence: Synthetic oligonucleotide
ugccgcugaacugccugca

SEQ ID NO: 1733961 - RNA, 19 nt, Artificial Sequence
  Description of Artificial Sequence: Synthetic oligonucleotide
gggcuggauuggcacagag

SEQ ID NO: 1733962 - RNA, 19 nt, Artificial Sequence
  Description of Artificial Sequence: Synthetic oligonucleotide
ugguacuuucaggcagagu

SEQ ID NO: 1733963 - RNA, 19 nt, Artificial Sequence
  Description of Artificial Sequence: Synthetic oligonucleotide
cagcucagacagcuugguc

SEQ ID NO: 1733964 - RNA, 19 nt, Artificial Sequence
  Description of Artificial Sequence: Synthetic oligonucleotide
cugcugucgcagccauucc

SEQ ID NO: 1733965 - RNA, 19 nt, Artificial Sequence
  Description of Artificial Sequence: Synthetic oligonucleotide
cccuugggcggccaggagc

SEQ ID NO: 1733966 - RNA, 19 nt, Artificial Sequence
  Description of Artificial Sequence: Synthetic oligonucleotide
gcugaacugccugcagccg

SEQ ID NO: 1733967 - RNA, 19 nt, Artificial Sequence
  Description of Artificial Sequence: Synthetic oligonucleotide
gugggcaccggagcagcag

SEQ ID NO: 1733968 - RNA, 19 nt, Artificial Sequence
  Description of Artificial Sequence: Synthetic oligonucleotide
cuguggagggcugcccgag

SEQ ID NO: 1733969 - RNA, 19 nt, Artificial Sequence
  Description of Artificial Sequence: Synthetic oligonucleotide
cucagcccuggccugcuca

SEQ ID NO: 1733970 - RNA, 19 nt, Artificial Sequence
  Description of Artificial Sequence: Synthetic oligonucleotide
aggcagagugguaugccau

SEQ ID NO: 1733971 - RNA, 19 nt, Artificial Sequence
  Description of Artificial Sequence: Synthetic oligonucleotide
guggagggcugcccgagaa

SEQ ID NO: 1733972 - RNA, 19 nt, Artificial Sequence
  Description of Artificial Sequence: Synthetic oligonucleotide
cagccucgcgcucggcccg

SEQ ID NO: 1733973 - RNA, 19 nt, Artificial Sequence
  Description of Artificial Sequence: Synthetic oligonucleotide
cccgagaaggcuggaaggc

SEQ ID NO: 1733974 - RNA, 19 nt, Artificial Sequence
  Description of Artificial Sequence: Synthetic oligonucleotide
ugcugccuugaagcugccc

SEQ ID NO: 1733975 - RNA, 19 nt, Artificial Sequence
  Description of Artificial Sequence: Synthetic oligonucleotide
gucaggcugaugauagugu

SEQ ID NO: 1733976 - RNA, 19 nt, Artificial Sequence
  Description of Artificial Sequence: Synthetic oligonucleotide
uggugccgcugcugcaaac

SEQ ID NO: 1733977 - RNA, 19 nt, Artificial Sequence
  Description of Artificial Sequence: Synthetic oligonucleotide
agaaggcuggaaggcacuu

SEQ ID NO: 1733978 - RNA, 19 nt, Artificial Sequence
  Description of Artificial Sequence: Synthetic oligonucleotide
uggcuacacugaggacugg

SEQ ID NO: 1733979 - RNA, 19 nt, Artificial Sequence
  Description of Artificial Sequence: Synthetic oligonucleotide
cagcuccaacuuccgcacc

SEQ ID NO: 1733980 - RNA, 19 nt, Artificial Sequence
  Description of Artificial Sequence: Synthetic oligonucleotide
cccggcaguaggaugcaug

SEQ ID NO: 1733981 - RNA, 19 nt, Artificial Sequence
  Description of Artificial Sequence: Synthetic oligonucleotide
cuccuguacgcgggccugg

SEQ ID NO: 1733982 - RNA, 19 nt, Artificial Sequence
  Description of Artificial Sequence: Synthetic oligonucleotide
caggcccuaaccguuagcu

SEQ ID NO: 1733983 - RNA, 19 nt, Artificial Sequence
  Description of Artificial Sequence: Synthetic oligonucleotide
cagcuucccggcaguagga

SEQ ID NO: 1733984 - RNA, 19 nt, Artificial Sequence
  Description of Artificial Sequence: Synthetic oligonucleotide
gagcgccaggucagccugg

SEQ ID NO: 1733985 - RNA, 19 nt, Artificial Sequence
  Description of Artificial Sequence: Synthetic oligonucleotide
cugcccuugggcggccagg

SEQ ID NO: 1733986 - RNA, 19 nt, Artificial Sequence
  Description of Artificial Sequence: Synthetic oligonucleotide
ggacugcaucugcugggcc

SEQ ID NO: 1733987 - RNA, 19 nt, Artificial Sequence
  Description of Artificial Sequence: Synthetic oligonucleotide
gcagcucggccugaaguug

SEQ ID NO: 1733988 - RNA, 19 nt, Artificial Sequence
  Description of Artificial Sequence: Synthetic oligonucleotide
ugcugguaggaugccucua

SEQ ID NO: 1733989 - RNA, 19 nt, Artificial Sequence
  Description of Artificial Sequence: Synthetic oligonucleotide
cucacaggcccuaaccguu

SEQ ID NO: 1733990 - RNA, 19 nt, Artificial Sequence
  Description of Artificial Sequence: Synthetic oligonucleotide
cagcagcucggccugaagu

SEQ ID NO: 1733991 - RNA, 19 nt, Artificial Sequence
  Description of Artificial Sequence: Synthetic oligonucleotide
guacgcgggccuggaggcg

SEQ ID NO: 1733992 - RNA, 19 nt, Artificial Sequence
  Description of Artificial Sequence: Synthetic oligonucleotide
gguccucuccagcuccaac

SEQ ID NO: 1733993 - RNA, 19 nt, Artificial Sequence
  Description of Artificial Sequence: Synthetic oligonucleotide
agcaggggccuggacggca

SEQ ID NO: 1733994 - RNA, 19 nt, Artificial Sequence
  Description of Artificial Sequence: Synthetic oligonucleotide
cucaagcaaggcggcuaug

SEQ ID NO: 1733995 - RNA, 19 nt, Artificial Sequence
  Description of Artificial Sequence: Synthetic oligonucleotide
uaguguccucccgcuggga

SEQ ID NO: 1733996 - RNA, 19 nt, Artificial Sequence
  Description of Artificial Sequence: Synthetic oligonucleotide
gaggcgcaggcuggcuuug

SEQ ID NO: 1733997 - RNA, 19 nt, Artificial Sequence
  Description of Artificial Sequence: Synthetic oligonucleotide
cacacgguccagcugcagu

SEQ ID NO: 1733998 - RNA, 19 nt, Artificial Sequence
  Description of Artificial Sequence: Synthetic oligonucleotide
cugccgcacacgguccagc

SEQ ID NO: 1733999 - RNA, 19 nt, Artificial Sequence
  Description of Artificial Sequence: Synthetic oligonucleotide
ccgcugggagucugcaugc

SEQ ID NO: 1734000 - RNA, 19 nt, Artificial Sequence
  Description of Artificial Sequence: Synthetic oligonucleotide
cugggcccugaacugugga

SEQ ID NO: 1734001 - RNA, 19 nt, Artificial Sequence
  Description of Artificial Sequence: Synthetic oligonucleotide
gcggauagcgccuccuucu

SEQ ID NO: 1734002 - RNA, 19 nt, Artificial Sequence
  Description of Artificial Sequence: Synthetic oligonucleotide
ccuaaccguuagcucugcc

SEQ ID NO: 1734003 - RNA, 19 nt, Artificial Sequence
  Description of Artificial Sequence: Synthetic oligonucleotide
ucccgcugggagucugcau

SEQ ID NO: 1734004 - RNA, 19 nt, Artificial Sequence
  Description of Artificial Sequence: Synthetic oligonucleotide
gcucacaggcccuaaccgu

SEQ ID NO: 1734005 - RNA, 19 nt, Artificial Sequence
  Description of Artificial Sequence: Synthetic oligonucleotide
aggcggcuaugagcucagc

SEQ ID NO: 1734006 - RNA, 19 nt, Artificial Sequence
  Description of Artificial Sequence: Synthetic oligonucleotide
gcgagaauucuaggcccag

SEQ ID NO: 1734007 - RNA, 19 nt, Artificial Sequence
  Description of Artificial Sequence: Synthetic oligonucleotide
gccgcugaacugccugcag

SEQ ID NO: 1734008 - RNA, 19 nt, Artificial Sequence
  Description of Artificial Sequence: Synthetic oligonucleotide
ggcuggauuggcacagaga

SEQ ID NO: 1734009 - RNA, 19 nt, Artificial Sequence
  Description of Artificial Sequence: Synthetic oligonucleotide
cuggcgcucucucuccaaa

SEQ ID NO: 1734010 - RNA, 19 nt, Artificial Sequence
  Description of Artificial Sequence: Synthetic oligonucleotide
cuuuguggagccuguccuu

SEQ ID NO: 1734011 - RNA, 19 nt, Artificial Sequence
  Description of Artificial Sequence: Synthetic oligonucleotide
cuagcaccuugacucggcu

SEQ ID NO: 1734012 - RNA, 19 nt, Artificial Sequence
  Description of Artificial Sequence: Synthetic oligonucleotide
guacucggcccacuccgcu

SEQ ID NO: 1734013 - RNA, 19 nt, Artificial Sequence
  Description of Artificial Sequence: Synthetic oligonucleotide
agcgccaggucagccuggu

SEQ ID NO: 1734014 - RNA, 19 nt, Artificial Sequence
  Description of Artificial Sequence: Synthetic oligonucleotide
gcccuaaccguuagcucug

SEQ ID NO: 1734015 - RNA, 19 nt, Artificial Sequence
  Description of Artificial Sequence: Synthetic oligonucleotide
caccacagacucugggagu

SEQ ID NO: 1734016 - RNA, 19 nt, Artificial Sequence
  Description of Artificial Sequence: Synthetic oligonucleotide
gggagucugcaugcagcgc

SEQ ID NO: 1734017 - RNA, 19 nt, Artificial Sequence
  Description of Artificial Sequence: Synthetic oligonucleotide
cucggcccacuccgcugcc

SEQ ID NO: 1734018 - RNA, 19 nt, Artificial Sequence
  Description of Artificial Sequence: Synthetic oligonucleotide
ccacuccgcugccaggcgc

SEQ ID NO: 1734019 - RNA, 19 nt, Artificial Sequence
  Description of Artificial Sequence: Synthetic oligonucleotide
guagggcgcuuucuucagu

SEQ ID NO: 1734020 - RNA, 19 nt, Artificial Sequence
  Description of Artificial Sequence: Synthetic oligonucleotide
caguguuuccaggaagaau

SEQ ID NO: 1734021 - RNA, 19 nt, Artificial Sequence
  Description of Artificial Sequence: Synthetic oligonucleotide
cgcccucucagccucgcgc

SEQ ID NO: 1734022 - RNA, 19 nt, Artificial Sequence
  Description of Artificial Sequence: Synthetic oligonucleotide
acccugugcuggguccucu

SEQ ID NO: 1734023 - RNA, 19 nt, Artificial Sequence
  Description of Artificial Sequence: Synthetic oligonucleotide
cggcccguuccuuacucag

SEQ ID NO: 1734024 - RNA, 19 nt, Artificial Sequence
  Description of Artificial Sequence: Synthetic oligonucleotide
ggcgcucuucccacacuug

SEQ ID NO: 1734025 - RNA, 19 nt, Artificial Sequence
  Description of Artificial Sequence: Synthetic oligonucleotide
gcaggagucuggcuacacu

SEQ ID NO: 1734026 - RNA, 19 nt, Artificial Sequence
  Description of Artificial Sequence: Synthetic oligonucleotide
gcuugcugagaaggcucug

SEQ ID NO: 1734027 - RNA, 19 nt, Artificial Sequence
  Description of Artificial Sequence: Synthetic oligonucleotide
gcugcccuugggcggccag

SEQ ID NO: 1734028 - RNA, 19 nt, Artificial Sequence
  Description of Artificial Sequence: Synthetic oligonucleotide
gucgugguccugugcugcu

SEQ ID NO: 1734029 - RNA, 19 nt, Artificial Sequence
  Description of Artificial Sequence: Synthetic oligonucleotide
gcgcucuucccacacuugu

SEQ ID NO: 1734030 - RNA, 19 nt, Artificial Sequence
  Description of Artificial Sequence: Synthetic oligonucleotide
ggauagcgccuccuucucu

SEQ ID NO: 1734031 - RNA, 19 nt, Artificial Sequence
  Description of Artificial Sequence: Synthetic oligonucleotide
gucagcagugagcgagaau

SEQ ID NO: 1734032 - RNA, 19 nt, Artificial Sequence
  Description of Artificial Sequence: Synthetic oligonucleotide
ccuugugcauacgcugcuc

SEQ ID NO: 1734033 - RNA, 19 nt, Artificial Sequence
  Description of Artificial Sequence: Synthetic oligonucleotide
cccacuccgcugccaggcg

SEQ ID NO: 1734034 - RNA, 19 nt, Artificial Sequence
  Description of Artificial Sequence: Synthetic oligonucleotide
ccuguacgcgggccuggag

SEQ ID NO: 1734035 - RNA, 19 nt, Artificial Sequence
  Description of Artificial Sequence: Synthetic oligonucleotide
gccggcgcucuucccacac

SEQ ID NO: 1734036 - RNA, 19 nt, Artificial Sequence
  Description of Artificial Sequence: Synthetic oligonucleotide
ggcuacacugaggacuggu

SEQ ID NO: 1734037 - RNA, 19 nt, Artificial Sequence
  Description of Artificial Sequence: Synthetic oligonucleotide
ucccggcaguaggaugcau

SEQ ID NO: 1734038 - RNA, 19 nt, Artificial Sequence
  Description of Artificial Sequence: Synthetic oligonucleotide
ccaccuccuguacgcgggc

SEQ ID NO: 1734039 - RNA, 19 nt, Artificial Sequence
  Description of Artificial Sequence: Synthetic oligonucleotide
gcaccggagcagcaggagu

SEQ ID NO: 1734040 - RNA, 19 nt, Artificial Sequence
  Description of Artificial Sequence: Synthetic oligonucleotide
gcccugaacuguggagggc

SEQ ID NO: 1734041 - RNA, 19 nt, Artificial Sequence
  Description of Artificial Sequence: Synthetic oligonucleotide
cucccgcugggagucugca

SEQ ID NO: 1734042 - RNA, 19 nt, Artificial Sequence
  Description of Artificial Sequence: Synthetic oligonucleotide
ccgagaaggcuggaaggca

SEQ ID NO: 1734043 - RNA, 19 nt, Artificial Sequence
  Description of Artificial Sequence: Synthetic oligonucleotide
caggggccuggacggcauc

SEQ ID NO: 1734044 - RNA, 19 nt, Artificial Sequence
  Description of Artificial Sequence: Synthetic oligonucleotide
ccuccuguacgcgggccug

SEQ ID NO: 1734045 - RNA, 19 nt, Artificial Sequence
  Description of Artificial Sequence: Synthetic oligonucleotide
ggcccggagcucacaggcc

SEQ ID NO: 1734046 - RNA, 19 nt, Artificial Sequence
  Description of Artificial Sequence: Synthetic oligonucleotide
cacccugugcuggguccuc

SEQ ID NO: 1734047 - RNA, 19 nt, Artificial Sequence
  Description of Artificial Sequence: Synthetic oligonucleotide
gcaaggcggcuaugagcuc

SEQ ID NO: 1734048 - RNA, 19 nt, Artificial Sequence
  Description of Artificial Sequence: Synthetic oligonucleotide
aggcgcaggcuggcuuugu

SEQ ID NO: 1734049 - RNA, 19 nt, Artificial Sequence
  Description of Artificial Sequence: Synthetic oligonucleotide
gcgcccucucagccucgcg

SEQ ID NO: 1734050 - RNA, 19 nt, Artificial Sequence
  Description of Artificial Sequence: Synthetic oligonucleotide
ggcgcuuucuucaguguuu

SEQ ID NO: 1734051 - RNA, 19 nt, Artificial Sequence
  Description of Artificial Sequence: Synthetic oligonucleotide
cccuaaccguuagcucugc

SEQ ID NO: 1734052 - RNA, 19 nt, Artificial Sequence
  Description of Artificial Sequence: Synthetic oligonucleotide
ggaggcgcaggcuggcuuu

SEQ ID NO: 1734053 - RNA, 19 nt, Artificial Sequence
  Description of Artificial Sequence: Synthetic oligonucleotide
cccugaacuguggagggcu

SEQ ID NO: 1734054 - RNA, 19 nt, Artificial Sequence
  Description of Artificial Sequence: Synthetic oligonucleotide
cgcucggcccguuccuuac

SEQ ID NO: 1734055 - RNA, 19 nt, Artificial Sequence
  Description of Artificial Sequence: Synthetic oligonucleotide
cgccuccuucucucugagg

SEQ ID NO: 1734056 - RNA, 19 nt, Artificial Sequence
  Description of Artificial Sequence: Synthetic oligonucleotide
cguuccuuacucagcuucu

SEQ ID NO: 1734057 - RNA, 19 nt, Artificial Sequence
  Description of Artificial Sequence: Synthetic oligonucleotide
ccuggugccgcugcugcaa

SEQ ID NO: 1734058 - RNA, 19 nt, Artificial Sequence
  Description of Artificial Sequence: Synthetic oligonucleotide
ggaugcaugcugagcggau

SEQ ID NO: 1734059 - RNA, 19 nt, Artificial Sequence
  Description of Artificial Sequence: Synthetic oligonucleotide
cuccucaagcaaggcggcu

SEQ ID NO: 1734060 - RNA, 19 nt, Artificial Sequence
  Description of Artificial Sequence: Synthetic oligonucleotide
cggcuaugagcucagcccu

SEQ ID NO: 1734061 - RNA, 19 nt, Artificial Sequence
  Description of Artificial Sequence: Synthetic oligonucleotide
agcugcccuugggcggcca

SEQ ID NO: 1734062 - RNA, 19 nt, Artificial Sequence
  Description of Artificial Sequence: Synthetic oligonucleotide
ccguuagcucugccugcuc

SEQ ID NO: 1734063 - RNA, 19 nt, Artificial Sequence
  Description of Artificial Sequence: Synthetic oligonucleotide
cgagaauucuaggcccaga

SEQ ID NO: 1734064 - RNA, 19 nt, Artificial Sequence
  Description of Artificial Sequence: Synthetic oligonucleotide
ccucaagcaaggcggcuau

SEQ ID NO: 1734065 - RNA, 19 nt, Artificial Sequence
  Description of Artificial Sequence: Synthetic oligonucleotide
ccggagcagcaggagucug

SEQ ID NO: 1734066 - RNA, 19 nt, Artificial Sequence
  Description of Artificial Sequence: Synthetic oligonucleotide
gcgccaggucagccuggug

SEQ ID NO: 1734067 - RNA, 19 nt, Artificial Sequence
  Description of Artificial Sequence: Synthetic oligonucleotide
ggcauccaggcugggcacu

SEQ ID NO: 1734068 - RNA, 19 nt, Artificial Sequence
  Description of Artificial Sequence: Synthetic oligonucleotide
ccugcucacccuccucaua

SEQ ID NO: 1734069 - RNA, 19 nt, Artificial Sequence
  Description of Artificial Sequence: Synthetic oligonucleotide
gcaccuugacucggcuucu

SEQ ID NO: 1734070 - RNA, 19 nt, Artificial Sequence
  Description of Artificial Sequence: Synthetic oligonucleotide
gcuuggcaagaaggugugu

SEQ ID NO: 1734071 - RNA, 19 nt, Artificial Sequence
  Description of Artificial Sequence: Synthetic oligonucleotide
gcgcucggcccguuccuua

SEQ ID NO: 1734072 - RNA, 19 nt, Artificial Sequence
  Description of Artificial Sequence: Synthetic oligonucleotide
ccgcugcugguaggaugcc

SEQ ID NO: 1734073 - RNA, 19 nt, Artificial Sequence
  Description of Artificial Sequence: Synthetic oligonucleotide
cuggaggcgcaggcuggcu

SEQ ID NO: 1734074 - RNA, 19 nt, Artificial Sequence
  Description of Artificial Sequence: Synthetic oligonucleotide
gcucggcccguuccuuacu

SEQ ID NO: 1734075 - RNA, 19 nt, Artificial Sequence
  Description of Artificial Sequence: Synthetic oligonucleotide
ggguccucuccagcuccaa

SEQ ID NO: 1734076 - RNA, 19 nt, Artificial Sequence
  Description of Artificial Sequence: Synthetic oligonucleotide
cacccuccucauacuucuu

SEQ ID NO: 1734077 - RNA, 19 nt, Artificial Sequence
  Description of Artificial Sequence: Synthetic oligonucleotide
ccauguuguagggcgcuuu

SEQ ID NO: 1734078 - RNA, 19 nt, Artificial Sequence
  Description of Artificial Sequence: Synthetic oligonucleotide
cucccgcugcugguaggau

SEQ ID NO: 1734079 - RNA, 19 nt, Artificial Sequence
  Description of Artificial Sequence: Synthetic oligonucleotide
gcaggggccuggacggcau

SEQ ID NO: 1734080 - RNA, 19 nt, Artificial Sequence
  Description of Artificial Sequence: Synthetic oligonucleotide
guccucccgcugggagucu

SEQ ID NO: 1734081 - RNA, 19 nt, Artificial Sequence
  Description of Artificial Sequence: Synthetic oligonucleotide
ccggcgcucuucccacacu

SEQ ID NO: 1734082 - RNA, 19 nt, Artificial Sequence
  Description of Artificial Sequence: Synthetic oligonucleotide
cggcaguaggaugcaugcu

SEQ ID NO: 1734083 - RNA, 19 nt, Artificial Sequence
  Description of Artificial Sequence: Synthetic oligonucleotide
cggagcucacaggcccuaa

SEQ ID NO: 1734084 - RNA, 19 nt, Artificial Sequence
  Description of Artificial Sequence: Synthetic oligonucleotide
gccucgcgcucggcccguu

SEQ ID NO: 1734085 - RNA, 19 nt, Artificial Sequence
  Description of Artificial Sequence: Synthetic oligonucleotide
acgguaauaaaauaugggc

SEQ ID NO: 1734086 - RNA, 19 nt, Artificial Sequence
  Description of Artificial Sequence: Synthetic oligonucleotide
uaaaauaugggccugucca

SEQ ID NO: 1734087 - RNA, 19 nt, Artificial Sequence
  Description of Artificial Sequence: Synthetic oligonucleotide
auaagcauuucuugcaugc

SEQ ID NO: 1734088 - RNA, 19 nt, Artificial Sequence
  Description of Artificial Sequence: Synthetic oligonucleotide
auugcagguucucucaucc

SEQ ID NO: 1734089 - RNA, 19 nt, Artificial Sequence
  Description of Artificial Sequence: Synthetic oligonucleotide
aaaggguuggcagaaauag

SEQ ID NO: 1734090 - RNA, 19 nt, Artificial Sequence
  Description of Artificial Sequence: Synthetic oligonucleotide
ugucguaagguccaaagug

SEQ ID NO: 1734091 - RNA, 19 nt, Artificial Sequence
  Description of Artificial Sequence: Synthetic oligonucleotide
aaguccaucgauuauccug

SEQ ID NO: 1734092 - RNA, 19 nt, Artificial Sequence
  Description of Artificial Sequence: Synthetic oligonucleotide
uguguagaagccauuucgg

SEQ ID NO: 1734093 - RNA, 19 nt, Artificial Sequence
  Description of Artificial Sequence: Synthetic oligonucleotide
auaaaauaugggccugucc

SEQ ID NO: 1734094 - RNA, 19 nt, Artificial Sequence
  Description of Artificial Sequence: Synthetic oligonucleotide
uccuucuagagccaucugg

SEQ ID NO: 1734095 - RNA, 19 nt, Artificial Sequence
  Description of Artificial Sequence: Synthetic oligonucleotide
ucuguucuggcuaaugggc

SEQ ID NO: 1734096 - RNA, 19 nt, Artificial Sequence
  Description of Artificial Sequence: Synthetic oligonucleotide
ucaauagccagaugggaag

SEQ ID NO: 1734097 - RNA, 19 nt, Artificial Sequence
  Description of Artificial Sequence: Synthetic oligonucleotide
cuuguaggcacuugcaggg

SEQ ID NO: 1734098 - RNA, 19 nt, Artificial Sequence
  Description of Artificial Sequence: Synthetic oligonucleotide
uccacgguaauaaaauaug

SEQ ID NO: 1734099 - RNA, 19 nt, Artificial Sequence
  Description of Artificial Sequence: Synthetic oligonucleotide
cuugcuacugguugcaggg

SEQ ID NO: 1734100 - RNA, 19 nt, Artificial Sequence
  Description of Artificial Sequence: Synthetic oligonucleotide
uucuagagccaucuggucc

SEQ ID NO: 1734101 - RNA, 19 nt, Artificial Sequence
  Description of Artificial Sequence: Synthetic oligonucleotide
cacgguaauaaaauauggg

SEQ ID NO: 1734102 - RNA, 19 nt, Artificial Sequence
  Description of Artificial Sequence: Synthetic oligonucleotide
ucaaguccaucgauuaucc

SEQ ID NO: 1734103 - RNA, 19 nt, Artificial Sequence
  Description of Artificial Sequence: Synthetic oligonucleotide
ucccuaacuuuucacagcc

SEQ ID NO: 1734104 - RNA, 19 nt, Artificial Sequence
  Description of Artificial Sequence: Synthetic oligonucleotide
gaagucaaugcccugucug

SEQ ID NO: 1734105 - RNA, 19 nt, Artificial Sequence
  Description of Artificial Sequence: Synthetic oligonucleotide
aggaagggaccauugcugc

SEQ ID NO: 1734106 - RNA, 19 nt, Artificial Sequence
  Description of Artificial Sequence: Synthetic oligonucleotide
ucgauuauccugucacugg

SEQ ID NO: 1734107 - RNA, 19 nt, Artificial Sequence
  Description of Artificial Sequence: Synthetic oligonucleotide
guguauaagcauuucuugc

SEQ ID NO: 1734108 - RNA, 19 nt, Artificial Sequence
  Description of Artificial Sequence: Synthetic oligonucleotide
uuucuugcaugcccguugg

SEQ ID NO: 1734109 - RNA, 19 nt, Artificial Sequence
  Description of Artificial Sequence: Synthetic oligonucleotide
cuaacuuuucacagccugg

SEQ ID NO: 1734110 - RNA, 19 nt, Artificial Sequence
  Description of Artificial Sequence: Synthetic oligonucleotide
aauaugggccuguccauca

SEQ ID NO: 1734111 - RNA, 19 nt, Artificial Sequence
  Description of Artificial Sequence: Synthetic oligonucleotide
ucuagagccaucuggucca

SEQ ID NO: 1734112 - RNA, 19 nt, Artificial Sequence
  Description of Artificial Sequence: Synthetic oligonucleotide
guugucguaagguccaaag

SEQ ID NO: 1734113 - RNA, 19 nt, Artificial Sequence
  Description of Artificial Sequence: Synthetic oligonucleotide
cuagaaaguggacuucagg

SEQ ID NO: 1734114 - RNA, 19 nt, Artificial Sequence
  Description of Artificial Sequence: Synthetic oligonucleotide
aagugggcuuuguacuggc

SEQ ID NO: 1734115 - RNA, 19 nt, Artificial Sequence
  Description of Artificial Sequence: Synthetic oligonucleotide
ucugaguuagggaugccac

SEQ ID NO: 1734116 - RNA, 19 nt, Artificial Sequence
  Description of Artificial Sequence: Synthetic oligonucleotide
guaugugcagacuuggaac

SEQ ID NO: 1734117 - RNA, 19 nt, Artificial Sequence
  Description of Artificial Sequence: Synthetic oligonucleotide
cuucccuaacuuuucacag

SEQ ID NO: 1734118 - RNA, 19 nt, Artificial Sequence
  Description of Artificial Sequence: Synthetic oligonucleotide
uuccacgguaauaaaauau

SEQ ID NO: 1734119 - RNA, 19 nt, Artificial Sequence
  Description of Artificial Sequence: Synthetic oligonucleotide
uguuuccacgguaauaaaa

SEQ ID NO: 1734120 - RNA, 19 nt, Artificial Sequence
  Description of Artificial Sequence: Synthetic oligonucleotide
ggaggugucaaacacuucc

SEQ ID NO: 1734121 - RNA, 19 nt, Artificial Sequence
  Description of Artificial Sequence: Synthetic oligonucleotide
ugaaagaucagggguagcu

SEQ ID NO: 1734122 - RNA, 19 nt, Artificial Sequence
  Description of Artificial Sequence: Synthetic oligonucleotide
uuauccugucacugggugg

SEQ ID NO: 1734123 - RNA, 19 nt, Artificial Sequence
  Description of Artificial Sequence: Synthetic oligonucleotide
uggacaaccugggugaucc

SEQ ID NO: 1734124 - RNA, 19 nt, Artificial Sequence
  Description of Artificial Sequence: Synthetic oligonucleotide
ugucugaacucuucccagg

SEQ ID NO: 1734125 - RNA, 19 nt, Artificial Sequence
  Description of Artificial Sequence: Synthetic oligonucleotide
uggguugugacuccugaga

SEQ ID NO: 1734126 - RNA, 19 nt, Artificial Sequence
  Description of Artificial Sequence: Synthetic oligonucleotide
ugccauuugcccacuaucu

SEQ ID NO: 1734127 - RNA, 19 nt, Artificial Sequence
  Description of Artificial Sequence: Synthetic oligonucleotide
ggauggugagcacaaaagg

SEQ ID NO: 1734128 - RNA, 19 nt, Artificial Sequence
  Description of Artificial Sequence: Synthetic oligonucleotide
ucaucccaccuucaaaugu

SEQ ID NO: 1734129 - RNA, 19 nt, Artificial Sequence
  Description of Artificial Sequence: Synthetic oligonucleotide
aguaugugcagacuuggaa

SEQ ID NO: 1734130 - RNA, 19 nt, Artificial Sequence
  Description of Artificial Sequence: Synthetic oligonucleotide
aaaccacucaucaaaucca

SEQ ID NO: 1734131 - RNA, 19 nt, Artificial Sequence
  Description of Artificial Sequence: Synthetic oligonucleotide
gguguauaagcauuucuug

SEQ ID NO: 1734132 - RNA, 19 nt, Artificial Sequence
  Description of Artificial Sequence: Synthetic oligonucleotide
cauaguggggaguagguca

SEQ ID NO: 1734133 - RNA, 19 nt, Artificial Sequence
  Description of Artificial Sequence: Synthetic oligonucleotide
caucacguggcccuggagc

SEQ ID NO: 1734134 - RNA, 19 nt, Artificial Sequence
  Description of Artificial Sequence: Synthetic oligonucleotide
agcaaugugccccggccac

SEQ ID NO: 1734135 - RNA, 19 nt, Artificial Sequence
  Description of Artificial Sequence: Synthetic oligonucleotide
cuagaugccauuugcccac

SEQ ID NO: 1734136 - RNA, 19 nt, Artificial Sequence
  Description of Artificial Sequence: Synthetic oligonucleotide
agugacugccaucaaugug

SEQ ID NO: 1734137 - RNA, 19 nt, Artificial Sequence
  Description of Artificial Sequence: Synthetic oligonucleotide
agagugacugccaucaaug

SEQ ID NO: 1734138 - RNA, 19 nt, Artificial Sequence
  Description of Artificial Sequence: Synthetic oligonucleotide
ucaggguuaggucuccagu

SEQ ID NO: 1734139 - RNA, 19 nt, Artificial Sequence
  Description of Artificial Sequence: Synthetic oligonucleotide
ugacuccugagacauucug

SEQ ID NO: 1734140 - RNA, 19 nt, Artificial Sequence
  Description of Artificial Sequence: Synthetic oligonucleotide
uugucguaagguccaaagu

SEQ ID NO: 1734141 - RNA, 19 nt, Artificial Sequence
  Description of Artificial Sequence: Synthetic oligonucleotide
ucagggguagcuccgugug

SEQ ID NO: 1734142 - RNA, 19 nt, Artificial Sequence
  Description of Artificial Sequence: Synthetic oligonucleotide
agccauuucggaugggcag

SEQ ID NO: 1734143 - RNA, 19 nt, Artificial Sequence
  Description of Artificial Sequence: Synthetic oligonucleotide
gaccaaggacuucuggugc

SEQ ID NO: 1734144 - RNA, 19 nt, Artificial Sequence
  Description of Artificial Sequence: Synthetic oligonucleotide
gguaauaaaauaugggccu

SEQ ID NO: 1734145 - RNA, 19 nt, Artificial Sequence
  Description of Artificial Sequence: Synthetic oligonucleotide
uguacuggccaagagugac

SEQ ID NO: 1734146 - RNA, 19 nt, Artificial Sequence
  Description of Artificial Sequence: Synthetic oligonucleotide
agcauuucuugcaugcccg

SEQ ID NO: 1734147 - RNA, 19 nt, Artificial Sequence
  Description of Artificial Sequence: Synthetic oligonucleotide
gugguaaagagguccauga

SEQ ID NO: 1734148 - RNA, 19 nt, Artificial Sequence
  Description of Artificial Sequence: Synthetic oligonucleotide
ggaaccuugcuacugguug

SEQ ID NO: 1734149 - RNA, 19 nt, Artificial Sequence
  Description of Artificial Sequence: Synthetic oligonucleotide
aagggaccauugcugccac

SEQ ID NO: 1734150 - RNA, 19 nt, Artificial Sequence
  Description of Artificial Sequence: Synthetic oligonucleotide
gaagccauuucggaugggc

SEQ ID NO: 1734151 - RNA, 19 nt, Artificial Sequence
  Description of Artificial Sequence: Synthetic oligonucleotide
ccaucaauguguuuccacg

SEQ ID NO: 1734152 - RNA, 19 nt, Artificial Sequence
  Description of Artificial Sequence: Synthetic oligonucleotide
ucguaagguccaaagugac

SEQ ID NO: 1734153 - RNA, 19 nt, Artificial Sequence
  Description of Artificial Sequence: Synthetic oligonucleotide
cuccguguguucuuccugg

SEQ ID NO: 1734154 - RNA, 19 nt, Artificial Sequence
  Description of Artificial Sequence: Synthetic oligonucleotide
aucgauuauccugucacug

SEQ ID NO: 1734155 - RNA, 19 nt, Artificial Sequence
  Description of Artificial Sequence: Synthetic oligonucleotide
ucugugaccuagaugccau

SEQ ID NO: 1734156 - RNA, 19 nt, Artificial Sequence
  Description of Artificial Sequence: Synthetic oligonucleotide
uaaccagugguggugggcc

SEQ ID NO: 1734157 - RNA, 19 nt, Artificial Sequence
  Description of Artificial Sequence: Synthetic oligonucleotide
cugcuucccacacaggaag

SEQ ID NO: 1734158 - RNA, 19 nt, Artificial Sequence
  Description of Artificial Sequence: Synthetic oligonucleotide
cgguaauaaaauaugggcc

SEQ ID NO: 1734159 - RNA, 19 nt, Artificial Sequence
  Description of Artificial Sequence: Synthetic oligonucleotide
uggagauucuguucuggcu

SEQ ID NO: 1734160 - RNA, 19 nt, Artificial Sequence
  Description of Artificial Sequence: Synthetic oligonucleotide
gagggcugcaccauuauca

SEQ ID NO: 1734161 - RNA, 19 nt, Artificial Sequence
  Description of Artificial Sequence: Synthetic oligonucleotide
uucugaccggggcagaagu

SEQ ID NO: 1734162 - RNA, 19 nt, Artificial Sequence
  Description of Artificial Sequence: Synthetic oligonucleotide
gaacacuucucuggaacag

SEQ ID NO: 1734163 - RNA, 19 nt, Artificial Sequence
  Description of Artificial Sequence: Synthetic oligonucleotide
aucaauguguuuccacggu

SEQ ID NO: 1734164 - RNA, 19 nt, Artificial Sequence
  Description of Artificial Sequence: Synthetic oligonucleotide
ucaauguguuuccacggua

SEQ ID NO: 1734165 - RNA, 19 nt, Artificial Sequence
  Description of Artificial Sequence: Synthetic oligonucleotide
ugcaggggccaucuaacca

SEQ ID NO: 1734166 - RNA, 19 nt, Artificial Sequence
  Description of Artificial Sequence: Synthetic oligonucleotide
gacauucugaccggggcag

SEQ ID NO: 1734167 - RNA, 19 nt, Artificial Sequence
  Description of Artificial Sequence: Synthetic oligonucleotide
uggacuucaggguuagguc

SEQ ID NO: 1734168 - RNA, 19 nt, Artificial Sequence
  Description of Artificial Sequence: Synthetic oligonucleotide
aaucucuccccugggucac

SEQ ID NO: 1734169 - RNA, 19 nt, Artificial Sequence
  Description of Artificial Sequence: Synthetic oligonucleotide
uugcaugcccguuggaugu

SEQ ID NO: 1734170 - RNA, 19 nt, Artificial Sequence
  Description of Artificial Sequence: Synthetic oligonucleotide
agguccaugaugcuuccca

SEQ ID NO: 1734171 - RNA, 19 nt, Artificial Sequence
  Description of Artificial Sequence: Synthetic oligonucleotide
ugaacucuucccaggaguu

SEQ ID NO: 1734172 - RNA, 19 nt, Artificial Sequence
  Description of Artificial Sequence: Synthetic oligonucleotide
gaaucucuccccuggguca

SEQ ID NO: 1734173 - RNA, 19 nt, Artificial Sequence
  Description of Artificial Sequence: Synthetic oligonucleotide
ccacgguaauaaaauaugg

SEQ ID NO: 1734174 - RNA, 19 nt, Artificial Sequence
  Description of Artificial Sequence: Synthetic oligonucleotide
aguccaucgauuauccugu

SEQ ID NO: 1734175 - RNA, 19 nt, Artificial Sequence
  Description of Artificial Sequence: Synthetic oligonucleotide
cugaguuagggaugccacc

SEQ ID NO: 1734176 - RNA, 19 nt, Artificial Sequence
  Description of Artificial Sequence: Synthetic oligonucleotide
uuuccacgguaauaaaaua

SEQ ID NO: 1734177 - RNA, 19 nt, Artificial Sequence
  Description of Artificial Sequence: Synthetic oligonucleotide
ggauccaaaccacucauca

SEQ ID NO: 1734178 - RNA, 19 nt, Artificial Sequence
  Description of Artificial Sequence: Synthetic oligonucleotide
auuucggaugggcagccgu

SEQ ID NO: 1734179 - RNA, 19 nt, Artificial Sequence
  Description of Artificial Sequence: Synthetic oligonucleotide
ccuuguugucguaaggucc

SEQ ID NO: 1734180 - RNA, 19 nt, Artificial Sequence
  Description of Artificial Sequence: Synthetic oligonucleotide
uccaucgauuauccuguca

SEQ ID NO: 1734181 - RNA, 19 nt, Artificial Sequence
  Description of Artificial Sequence: Synthetic oligonucleotide
auguuucaagggauggaac

SEQ ID NO: 1734182 - RNA, 19 nt, Artificial Sequence
  Description of Artificial Sequence: Synthetic oligonucleotide
aacacuucucuggaacaga

SEQ ID NO: 1734183 - RNA, 19 nt, Artificial Sequence
  Description of Artificial Sequence: Synthetic oligonucleotide
agccaucugguccaaauuu

SEQ ID NO: 1734184 - RNA, 19 nt, Artificial Sequence
  Description of Artificial Sequence: Synthetic oligonucleotide
agagccaucugguccaaau

SEQ ID NO: 1734185 - RNA, 19 nt, Artificial Sequence
  Description of Artificial Sequence: Synthetic oligonucleotide
gaggugucaaacacuuccc

SEQ ID NO: 1734186 - RNA, 19 nt, Artificial Sequence
  Description of Artificial Sequence: Synthetic oligonucleotide
ccaucgauuauccugucac

SEQ ID NO: 1734187 - RNA, 19 nt, Artificial Sequence
  Description of Artificial Sequence: Synthetic oligonucleotide
aggaggugcucugaguuag

SEQ ID NO: 1734188 - RNA, 19 nt, Artificial Sequence
  Description of Artificial Sequence: Synthetic oligonucleotide
accuucaaauguagucugc

SEQ ID NO: 1734189 - RNA, 19 nt, Artificial Sequence
  Description of Artificial Sequence: Synthetic oligonucleotide
gaggugcucugaguuaggg

SEQ ID NO: 1734190 - RNA, 19 nt, Artificial Sequence
  Description of Artificial Sequence: Synthetic oligonucleotide
gucacgucccaggugaaag

SEQ ID NO: 1734191 - RNA, 19 nt, Artificial Sequence
  Description of Artificial Sequence: Synthetic oligonucleotide
ggaccaaggacuucuggug

SEQ ID NO: 1734192 - RNA, 19 nt, Artificial Sequence
  Description of Artificial Sequence: Synthetic oligonucleotide
aggucaaguccaucgauua

SEQ ID NO: 1734193 - RNA, 19 nt, Artificial Sequence
  Description of Artificial Sequence: Synthetic oligonucleotide
aggugucaaacacuucccu

SEQ ID NO: 1734194 - RNA, 19 nt, Artificial Sequence
  Description of Artificial Sequence: Synthetic oligonucleotide
gaccuagaugccauuugcc

SEQ ID NO: 1734195 - RNA, 19 nt, Artificial Sequence
  Description of Artificial Sequence: Synthetic oligonucleotide
gaaagaucagggguagcuc

SEQ ID NO: 1734196 - RNA, 19 nt, Artificial Sequence
  Description of Artificial Sequence: Synthetic oligonucleotide
aagggcagcugaucucugu

SEQ ID NO: 1734197 - RNA, 19 nt, Artificial Sequence
  Description of Artificial Sequence: Synthetic oligonucleotide
ccuaacuuuucacagccug

SEQ ID NO: 1734198 - RNA, 19 nt, Artificial Sequence
  Description of Artificial Sequence: Synthetic oligonucleotide
aaaugagggcugcaccauu

SEQ ID NO: 1734199 - RNA, 19 nt, Artificial Sequence
  Description of Artificial Sequence: Synthetic oligonucleotide
uccguguguucuuccuggg

SEQ ID NO: 1734200 - RNA, 19 nt, Artificial Sequence
  Description of Artificial Sequence: Synthetic oligonucleotide
gucguaagguccaaaguga

SEQ ID NO: 1734201 - RNA, 19 nt, Artificial Sequence
  Description of Artificial Sequence: Synthetic oligonucleotide
caucuaaccagugguggug

SEQ ID NO: 1734202 - RNA, 19 nt, Artificial Sequence
  Description of Artificial Sequence: Synthetic oligonucleotide
uuucggaugggcagccguc

SEQ ID NO: 1734203 - RNA, 19 nt, Artificial Sequence
  Description of Artificial Sequence: Synthetic oligonucleotide
gagguguauaagcauuucu

SEQ ID NO: 1734204 - RNA, 19 nt, Artificial Sequence
  Description of Artificial Sequence: Synthetic oligonucleotide
gguuacacacauugagcug

SEQ ID NO: 1734205 - RNA, 19 nt, Artificial Sequence
  Description of Artificial Sequence: Synthetic oligonucleotide
cuuuguacuggccaagagu

SEQ ID NO: 1734206 - RNA, 19 nt, Artificial Sequence
  Description of Artificial Sequence: Synthetic oligonucleotide
cauguuucaagggauggaa

SEQ ID NO: 1734207 - RNA, 19 nt, Artificial Sequence
  Description of Artificial Sequence: Synthetic oligonucleotide
auagccagaugggaagaug

SEQ ID NO: 1734208 - RNA, 19 nt, Artificial Sequence
  Description of Artificial Sequence: Synthetic oligonucleotide
ugcccguuggauguguaga

SEQ ID NO: 1734209 - RNA, 19 nt, Artificial Sequence
  Description of Artificial Sequence: Synthetic oligonucleotide
cugcaccauuaucaguggg

SEQ ID NO: 1734210 - RNA, 19 nt, Artificial Sequence
  Description of Artificial Sequence: Synthetic oligonucleotide
ccauuugcccacuaucuug

SEQ ID NO: 1734211 - RNA, 19 nt, Artificial Sequence
  Description of Artificial Sequence: Synthetic oligonucleotide
ggugaaagaucagggguag

SEQ ID NO: 1734212 - RNA, 19 nt, Artificial Sequence
  Description of Artificial Sequence: Synthetic oligonucleotide
aaugagggcugcaccauua

SEQ ID NO: 1734213 - RNA, 19 nt, Artificial Sequence
  Description of Artificial Sequence: Synthetic oligonucleotide
gguccaaguccagaagugg

SEQ ID NO: 1734214 - RNA, 19 nt, Artificial Sequence
  Description of Artificial Sequence: Synthetic oligonucleotide
aaggguuggcagaaauaga

SEQ ID NO: 1734215 - RNA, 19 nt, Artificial Sequence
  Description of Artificial Sequence: Synthetic oligonucleotide
uucucucaucccaccuuca

SEQ ID NO: 1734216 - RNA, 19 nt, Artificial Sequence
  Description of Artificial Sequence: Synthetic oligonucleotide
aguuagggaugccacccau

SEQ ID NO: 1734217 - RNA, 19 nt, Artificial Sequence
  Description of Artificial Sequence: Synthetic oligonucleotide
ccguuggauguguagaagc

SEQ ID NO: 1734218 - RNA, 19 nt, Artificial Sequence
  Description of Artificial Sequence: Synthetic oligonucleotide
cuaaccagugguggugggc

SEQ ID NO: 1734219 - RNA, 19 nt, Artificial Sequence
  Description of Artificial Sequence: Synthetic oligonucleotide
ggggccaucuaaccagugg

SEQ ID NO: 1734220 - RNA, 19 nt, Artificial Sequence
  Description of Artificial Sequence: Synthetic oligonucleotide
gccaucuaaccaguggugg

SEQ ID NO: 1734221 - RNA, 19 nt, Artificial Sequence
  Description of Artificial Sequence: Synthetic oligonucleotide
caagggauggaacuggggu

SEQ ID NO: 1734222 - RNA, 19 nt, Artificial Sequence
  Description of Artificial Sequence: Synthetic oligonucleotide
guuuccacgguaauaaaau

SEQ ID NO: 1734223 - RNA, 19 nt, Artificial Sequence
  Description of Artificial Sequence: Synthetic oligonucleotide
gagcacaaaaggguuggca

SEQ ID NO: 1734224 - RNA, 19 nt, Artificial Sequence
  Description of Artificial Sequence: Synthetic oligonucleotide
uggagcauaguggggagua

SEQ ID NO: 1734225 - RNA, 19 nt, Artificial Sequence
  Description of Artificial Sequence: Synthetic oligonucleotide
augcccguuggauguguag

SEQ ID NO: 1734226 - RNA, 19 nt, Artificial Sequence
  Description of Artificial Sequence: Synthetic oligonucleotide
uugcagguucucucauccc

SEQ ID NO: 1734227 - RNA, 19 nt, Artificial Sequence
  Description of Artificial Sequence: Synthetic oligonucleotide
uggccaagagugacugcca

SEQ ID NO: 1734228 - RNA, 19 nt, Artificial Sequence
  Description of Artificial Sequence: Synthetic oligonucleotide
guuaggucuccaguaugug

SEQ ID NO: 1734229 - RNA, 19 nt, Artificial Sequence
  Description of Artificial Sequence: Synthetic oligonucleotide
uucggaugggcagccgucc

SEQ ID NO: 1734230 - RNA, 19 nt, Artificial Sequence
  Description of Artificial Sequence: Synthetic oligonucleotide
ugugaccuagaugccauuu

SEQ ID NO: 1734231 - RNA, 19 nt, Artificial Sequence
  Description of Artificial Sequence: Synthetic oligonucleotide
uuguugguguagccugccu

SEQ ID NO: 1734232 - RNA, 19 nt, Artificial Sequence
  Description of Artificial Sequence: Synthetic oligonucleotide
ggugcucugaguuagggau

SEQ ID NO: 1734233 - RNA, 19 nt, Artificial Sequence
  Description of Artificial Sequence: Synthetic oligonucleotide
aggugcucugaguuaggga

SEQ ID NO: 1734234 - RNA, 19 nt, Artificial Sequence
  Description of Artificial Sequence: Synthetic oligonucleotide
cacccaugaucuccugagg

SEQ ID NO: 1734235 - RNA, 19 nt, Artificial Sequence
  Description of Artificial Sequence: Synthetic oligonucleotide
ggguugugacuccugagac

SEQ ID NO: 1734236 - RNA, 19 nt, Artificial Sequence
  Description of Artificial Sequence: Synthetic oligonucleotide
ucugaccggggcagaaguc

SEQ ID NO: 1734237 - RNA, 19 nt, Artificial Sequence
  Description of Artificial Sequence: Synthetic oligonucleotide
cugagacauucugaccggg

SEQ ID NO: 1734238 - RNA, 19 nt, Artificial Sequence
  Description of Artificial Sequence: Synthetic oligonucleotide
guugugacuccugagacau

SEQ ID NO: 1734239 - RNA, 19 nt, Artificial Sequence
  Description of Artificial Sequence: Synthetic oligonucleotide
agcauaguggggaguaggu

SEQ ID NO: 1734240 - RNA, 19 nt, Artificial Sequence
  Description of Artificial Sequence: Synthetic oligonucleotide
ccacccaugaucuccugag

SEQ ID NO: 1734241 - RNA, 19 nt, Artificial Sequence
  Description of Artificial Sequence: Synthetic oligonucleotide
ggugguaaagagguccaug

SEQ ID NO: 1734242 - RNA, 19 nt, Artificial Sequence
  Description of Artificial Sequence: Synthetic oligonucleotide
uccugguauucagcacugg

SEQ ID NO: 1734243 - RNA, 19 nt, Artificial Sequence
  Description of Artificial Sequence: Synthetic oligonucleotide
cguuggauguguagaagcc

SEQ ID NO: 1734244 - RNA, 19 nt, Artificial Sequence
  Description of Artificial Sequence: Synthetic oligonucleotide
cauuugcccacuaucuugu

SEQ ID NO: 1734245 - RNA, 19 nt, Artificial Sequence
  Description of Artificial Sequence: Synthetic oligonucleotide
aggugaaagaucaggggua

SEQ ID NO: 1734246 - RNA, 19 nt, Artificial Sequence
  Description of Artificial Sequence: Synthetic oligonucleotide
ucagugggcuugaccuugu

SEQ ID NO: 1734247 - RNA, 19 nt, Artificial Sequence
  Description of Artificial Sequence: Synthetic oligonucleotide
ccaguaugugcagacuugg

SEQ ID NO: 1734248 - RNA, 19 nt, Artificial Sequence
  Description of Artificial Sequence: Synthetic oligonucleotide
cuaaugggcccaggaacac

SEQ ID NO: 1734249 - RNA, 19 nt, Artificial Sequence
  Description of Artificial Sequence: Synthetic oligonucleotide
gaguuagggaugccaccca

SEQ ID NO: 1734250 - RNA, 19 nt, Artificial Sequence
  Description of Artificial Sequence: Synthetic oligonucleotide
agcuccguguguucuuccu

SEQ ID NO: 1734251 - RNA, 19 nt, Artificial Sequence
  Description of Artificial Sequence: Synthetic oligonucleotide
agggaccauugcugccacc

SEQ ID NO: 1734252 - RNA, 19 nt, Artificial Sequence
  Description of Artificial Sequence: Synthetic oligonucleotide
cagccguccugugagcagg

SEQ ID NO: 1734253 - RNA, 19 nt, Artificial Sequence
  Description of Artificial Sequence: Synthetic oligonucleotide
caggguuaggucuccagua

SEQ ID NO: 1734254 - RNA, 19 nt, Artificial Sequence
  Description of Artificial Sequence: Synthetic oligonucleotide
ggguuaggucuccaguaug

SEQ ID NO: 1734255 - RNA, 19 nt, Artificial Sequence
  Description of Artificial Sequence: Synthetic oligonucleotide
gggcuugaccuuguugucg

SEQ ID NO: 1734256 - RNA, 19 nt, Artificial Sequence
  Description of Artificial Sequence: Synthetic oligonucleotide
cucugaguuagggaugcca

SEQ ID NO: 1734257 - RNA, 19 nt, Artificial Sequence
  Description of Artificial Sequence: Synthetic oligonucleotide
gccaucaauguguuuccac

SEQ ID NO: 1734258 - RNA, 19 nt, Artificial Sequence
  Description of Artificial Sequence: Synthetic oligonucleotide
ccuagaugccauuugccca

SEQ ID NO: 1734259 - RNA, 19 nt, Artificial Sequence
  Description of Artificial Sequence: Synthetic oligonucleotide
ggugauccugcugaggaca

SEQ ID NO: 1734260 - RNA, 19 nt, Artificial Sequence
  Description of Artificial Sequence: Synthetic oligonucleotide
guaggcacuugcagggcug

SEQ ID NO: 1734261 - RNA, 19 nt, Artificial Sequence
  Description of Artificial Sequence: Synthetic oligonucleotide
gaacagacucaggaggugu

SEQ ID NO: 1734262 - RNA, 19 nt, Artificial Sequence
  Description of Artificial Sequence: Synthetic oligonucleotide
cauugagcuggggcugucc

SEQ ID NO: 1734263 - RNA, 19 nt, Artificial Sequence
  Description of Artificial Sequence: Synthetic oligonucleotide
augugccccggccaccaug

SEQ ID NO: 1734264 - RNA, 19 nt, Artificial Sequence
  Description of Artificial Sequence: Synthetic oligonucleotide
guggacuucaggguuaggu

SEQ ID NO: 1734265 - RNA, 19 nt, Artificial Sequence
  Description of Artificial Sequence: Synthetic oligonucleotide
ugugcagacuuggaaccuu

SEQ ID NO: 1734266 - RNA, 19 nt, Artificial Sequence
  Description of Artificial Sequence: Synthetic oligonucleotide
agucaaugcccugucugaa

SEQ ID NO: 1734267 - RNA, 19 nt, Artificial Sequence
  Description of Artificial Sequence: Synthetic oligonucleotide
gcuaaugggcccaggaaca

SEQ ID NO: 1734268 - RNA, 19 nt, Artificial Sequence
  Description of Artificial Sequence: Synthetic oligonucleotide
uccuggguauggguuguga

SEQ ID NO: 1734269 - RNA, 19 nt, Artificial Sequence
  Description of Artificial Sequence: Synthetic oligonucleotide
gguugcaggggccaucuaa

SEQ ID NO: 1734270 - RNA, 19 nt, Artificial Sequence
  Description of Artificial Sequence: Synthetic oligonucleotide
gucugugaccuagaugcca

SEQ ID NO: 1734271 - RNA, 19 nt, Artificial Sequence
  Description of Artificial Sequence: Synthetic oligonucleotide
uagcuccguguguucuucc

SEQ ID NO: 1734272 - RNA, 19 nt, Artificial Sequence
  Description of Artificial Sequence: Synthetic oligonucleotide
gugcccaauucaugacagc

SEQ ID NO: 1734273 - RNA, 19 nt, Artificial Sequence
  Description of Artificial Sequence: Synthetic oligonucleotide
caaaaggguuggcagaaau

SEQ ID NO: 1734274 - RNA, 19 nt, Artificial Sequence
  Description of Artificial Sequence: Synthetic oligonucleotide
ugccaucaauguguuucca

SEQ ID NO: 1734275 - RNA, 19 nt, Artificial Sequence
  Description of Artificial Sequence: Synthetic oligonucleotide
gugcagacuuggaaccuug

SEQ ID NO: 1734276 - RNA, 19 nt, Artificial Sequence
  Description of Artificial Sequence: Synthetic oligonucleotide
caguaugugcagacuugga

SEQ ID NO: 1734277 - RNA, 19 nt, Artificial Sequence
  Description of Artificial Sequence: Synthetic oligonucleotide
gcuagaaaguggacuucag

SEQ ID NO: 1734278 - RNA, 19 nt, Artificial Sequence
  Description of Artificial Sequence: Synthetic oligonucleotide
caauucaugacagccuggu

SEQ ID NO: 1734279 - RNA, 19 nt, Artificial Sequence
  Description of Artificial Sequence: Synthetic oligonucleotide
gcgauugcagguucucuca

SEQ ID NO: 1734280 - RNA, 19 nt, Artificial Sequence
  Description of Artificial Sequence: Synthetic oligonucleotide
augcgauugcagguucucu

SEQ ID NO: 1734281 - RNA, 19 nt, Artificial Sequence
  Description of Artificial Sequence: Synthetic oligonucleotide
cauuucggaugggcagccg

SEQ ID NO: 1734282 - RNA, 19 nt, Artificial Sequence
  Description of Artificial Sequence: Synthetic oligonucleotide
gauuauccugucacugggu

SEQ ID NO: 1734283 - RNA, 19 nt, Artificial Sequence
  Description of Artificial Sequence: Synthetic oligonucleotide
guaggucaaguccaucgau

SEQ ID NO: 1734284 - RNA, 19 nt, Artificial Sequence
  Description of Artificial Sequence: Synthetic oligonucleotide
agggguagcuccguguguu

SEQ ID NO: 1734285 - RNA, 19 nt, Artificial Sequence
  Description of Artificial Sequence: Synthetic oligonucleotide
cauccuucuagagccaucu

SEQ ID NO: 1734286 - RNA, 19 nt, Artificial Sequence
  Description of Artificial Sequence: Synthetic oligonucleotide
agaagccauuucggauggg

SEQ ID NO: 1734287 - RNA, 19 nt, Artificial Sequence
  Description of Artificial Sequence: Synthetic oligonucleotide
caagggcagcugaucucug

SEQ ID NO: 1734288 - RNA, 19 nt, Artificial Sequence
  Description of Artificial Sequence: Synthetic oligonucleotide
ggaacagacucaggaggug

SEQ ID NO: 1734289 - RNA, 19 nt, Artificial Sequence
  Description of Artificial Sequence: Synthetic oligonucleotide
gccauuucggaugggcagc

SEQ ID NO: 1734290 - RNA, 19 nt, Artificial Sequence
  Description of Artificial Sequence: Synthetic oligonucleotide
agaucagggguagcuccgu

SEQ ID NO: 1734291 - RNA, 19 nt, Artificial Sequence
  Description of Artificial Sequence: Synthetic oligonucleotide
gcuacugguugcaggggcc

SEQ ID NO: 1734292 - RNA, 19 nt, Artificial Sequence
  Description of Artificial Sequence: Synthetic oligonucleotide
caucgauuauccugucacu

SEQ ID NO: 1734293 - RNA, 19 nt, Artificial Sequence
  Description of Artificial Sequence: Synthetic oligonucleotide
ggccuguccaucacguggc

SEQ ID NO: 1734294 - RNA, 19 nt, Artificial Sequence
  Description of Artificial Sequence: Synthetic oligonucleotide
ugcaugcccguuggaugug

SEQ ID NO: 1734295 - RNA, 19 nt, Artificial Sequence
  Description of Artificial Sequence: Synthetic oligonucleotide
ggguauggguugugacucc

SEQ ID NO: 1734296 - RNA, 19 nt, Artificial Sequence
  Description of Artificial Sequence: Synthetic oligonucleotide
ggccaucuaaccaguggug

SEQ ID NO: 1734297 - RNA, 19 nt, Artificial Sequence
  Description of Artificial Sequence: Synthetic oligonucleotide
caugaucuccugaggugua

SEQ ID NO: 1734298 - RNA, 19 nt, Artificial Sequence
  Description of Artificial Sequence: Synthetic oligonucleotide
cugagguguauaagcauuu

SEQ ID NO: 1734299 - RNA, 19 nt, Artificial Sequence
  Description of Artificial Sequence: Synthetic oligonucleotide
ggagcauaguggggaguag

SEQ ID NO: 1734300 - RNA, 19 nt, Artificial Sequence
  Description of Artificial Sequence: Synthetic oligonucleotide
cuacugguugcaggggcca

SEQ ID NO: 1734301 - RNA, 19 nt, Artificial Sequence
  Description of Artificial Sequence: Synthetic oligonucleotide
gcagccguccugugagcag

SEQ ID NO: 1734302 - RNA, 19 nt, Artificial Sequence
  Description of Artificial Sequence: Synthetic oligonucleotide
ggcuguccagggaccaagg

SEQ ID NO: 1734303 - RNA, 19 nt, Artificial Sequence
  Description of Artificial Sequence: Synthetic oligonucleotide
uccugucacugggugguuu

SEQ ID NO: 1734304 - RNA, 19 nt, Artificial Sequence
  Description of Artificial Sequence: Synthetic oligonucleotide
acauucugaccggggcaga

SEQ ID NO: 1734305 - RNA, 19 nt, Artificial Sequence
  Description of Artificial Sequence: Synthetic oligonucleotide
ggcuugaccuuguugucgu

SEQ ID NO: 1734306 - RNA, 19 nt, Artificial Sequence
  Description of Artificial Sequence: Synthetic oligonucleotide
gggcuguccagggaccaag

SEQ ID NO: 1734307 - RNA, 19 nt, Artificial Sequence
  Description of Artificial Sequence: Synthetic oligonucleotide
ggaggugcucugaguuagg

SEQ ID NO: 1734308 - RNA, 19 nt, Artificial Sequence
  Description of Artificial Sequence: Synthetic oligonucleotide
guccaucgauuauccuguc

SEQ ID NO: 1734309 - RNA, 19 nt, Artificial Sequence
  Description of Artificial Sequence: Synthetic oligonucleotide
gcauaguggggaguagguc

SEQ ID NO: 1734310 - RNA, 19 nt, Artificial Sequence
  Description of Artificial Sequence: Synthetic oligonucleotide
ccggccaccaugcgauugc

SEQ ID NO: 1734311 - RNA, 19 nt, Artificial Sequence
  Description of Artificial Sequence: Synthetic oligonucleotide
cuggacaaccugggugauc

SEQ ID NO: 1734312 - RNA, 19 nt, Artificial Sequence
  Description of Artificial Sequence: Synthetic oligonucleotide
ccugugagcagggcugccc

SEQ ID NO: 1734313 - RNA, 19 nt, Artificial Sequence
  Description of Artificial Sequence: Synthetic oligonucleotide
cccucagucccaagucuug

SEQ ID NO: 1734314 - RNA, 19 nt, Artificial Sequence
  Description of Artificial Sequence: Synthetic oligonucleotide
gggaccauugcugccaccu

SEQ ID NO: 1734315 - RNA, 19 nt, Artificial Sequence
  Description of Artificial Sequence: Synthetic oligonucleotide
ggguuggcagaaauagaaa

SEQ ID NO: 1734316 - RNA, 19 nt, Artificial Sequence
  Description of Artificial Sequence: Synthetic oligonucleotide
cccguuggauguguagaag

SEQ ID NO: 1734317 - RNA, 19 nt, Artificial Sequence
  Description of Artificial Sequence: Synthetic oligonucleotide
caaguccaucgauuauccu

SEQ ID NO: 1734318 - RNA, 19 nt, Artificial Sequence
  Description of Artificial Sequence: Synthetic oligonucleotide
gcccguuggauguguagaa

SEQ ID NO: 1734319 - RNA, 19 nt, Artificial Sequence
  Description of Artificial Sequence: Synthetic oligonucleotide
guacuggccaagagugacu

SEQ ID NO: 1734320 - RNA, 19 nt, Artificial Sequence
  Description of Artificial Sequence: Synthetic oligonucleotide
aggggccaucuaaccagug

SEQ ID NO: 1734321 - RNA, 19 nt, Artificial Sequence
  Description of Artificial Sequence: Synthetic oligonucleotide
cguguguucuuccugggua

SEQ ID NO: 1734322 - RNA, 19 nt, Artificial Sequence
  Description of Artificial Sequence: Synthetic oligonucleotide
ugguugcaggggccaucua

SEQ ID NO: 1734323 - RNA, 19 nt, Artificial Sequence
  Description of Artificial Sequence: Synthetic oligonucleotide
gcccacuaucuuguuggug

SEQ ID NO: 1734324 - RNA, 19 nt, Artificial Sequence
  Description of Artificial Sequence: Synthetic oligonucleotide
ggucaaguccaucgauuau

SEQ ID NO: 1734325 - RNA, 19 nt, Artificial Sequence
  Description of Artificial Sequence: Synthetic oligonucleotide
gcaaugugccccggccacc

SEQ ID NO: 1734326 - RNA, 19 nt, Artificial Sequence
  Description of Artificial Sequence: Synthetic oligonucleotide
cugguugcaggggccaucu

SEQ ID NO: 1734327 - RNA, 19 nt, Artificial Sequence
  Description of Artificial Sequence: Synthetic oligonucleotide
caugcccguuggaugugua

SEQ ID NO: 1734328 - RNA, 19 nt, Artificial Sequence
  Description of Artificial Sequence: Synthetic oligonucleotide
gggguagcuccguguguuc

SEQ ID NO: 1734329 - RNA, 19 nt, Artificial Sequence
  Description of Artificial Sequence: Synthetic oligonucleotide
ccuucaaauguagucugcu

SEQ ID NO: 1734330 - RNA, 19 nt, Artificial Sequence
  Description of Artificial Sequence: Synthetic oligonucleotide
ccaucuaaccagugguggu

SEQ ID NO: 1734331 - RNA, 19 nt, Artificial Sequence
  Description of Artificial Sequence: Synthetic oligonucleotide
gguauggguugugacuccu

SEQ ID NO: 1734332 - RNA, 19 nt, Artificial Sequence
  Description of Artificial Sequence: Synthetic oligonucleotide
ccaugaucuccugaggugu

SEQ ID NO: 1734333 - RNA, 19 nt, Artificial Sequence
  Description of Artificial Sequence: Synthetic oligonucleotide
gcauccuucuagagccauc

SEQ ID NO: 1734334 - RNA, 19 nt, Artificial Sequence
  Description of Artificial Sequence: Synthetic oligonucleotide
cacauugagcuggggcugu

SEQ ID NO: 1734335 - RNA, 19 nt, Artificial Sequence
  Description of Artificial Sequence: Synthetic oligonucleotide
cauuucuugcaugcccguu

SEQ ID NO: 1734336 - RNA, 19 nt, Artificial Sequence
  Description of Artificial Sequence: Synthetic oligonucleotide
ggccaagagugacugccau

SEQ ID NO: 1734337 - RNA, 19 nt, Artificial Sequence
  Description of Artificial Sequence: Synthetic oligonucleotide
caccauuaucagugggcuu

SEQ ID NO: 1734338 - RNA, 19 nt, Artificial Sequence
  Description of Artificial Sequence: Synthetic oligonucleotide
augcccugucugaacucuu

SEQ ID NO: 1734339 - RNA, 19 nt, Artificial Sequence
  Description of Artificial Sequence: Synthetic oligonucleotide
ggguagcuccguguguucu

SEQ ID NO: 1734340 - RNA, 19 nt, Artificial Sequence
  Description of Artificial Sequence: Synthetic oligonucleotide
cccggccaccaugcgauug

SEQ ID NO: 1734341 - RNA, 19 nt, Artificial Sequence
  Description of Artificial Sequence: Synthetic oligonucleotide
guccagggaccaaggacuu

SEQ ID NO: 1734342 - RNA, 19 nt, Artificial Sequence
  Description of Artificial Sequence: Synthetic oligonucleotide
gaccggggcagaagucaau

SEQ ID NO: 1734343 - RNA, 19 nt, Artificial Sequence
  Description of Artificial Sequence: Synthetic oligonucleotide
ccguccugugagcagggcu

SEQ ID NO: 1734344 - RNA, 19 nt, Artificial Sequence
  Description of Artificial Sequence: Synthetic oligonucleotide
ggauggaacuggggucugu

SEQ ID NO: 1734345 - RNA, 19 nt, Artificial Sequence
  Description of Artificial Sequence: Synthetic oligonucleotide
gccccggccaccaugcgau

SEQ ID NO: 1734346 - RNA, 19 nt, Artificial Sequence
  Description of Artificial Sequence: Synthetic oligonucleotide
gggugguuucaggccugca

SEQ ID NO: 1734347 - RNA, 19 nt, Artificial Sequence
  Description of Artificial Sequence: Synthetic oligonucleotide
cccuaacuuuucacagccu

SEQ ID NO: 1734348 - RNA, 19 nt, Artificial Sequence
  Description of Artificial Sequence: Synthetic oligonucleotide
ccucagucccaagucuugu

SEQ ID NO: 1734349 - RNA, 19 nt, Artificial Sequence
  Description of Artificial Sequence: Synthetic oligonucleotide
ccguguguucuuccugggu

SEQ ID NO: 1734350 - RNA, 19 nt, Artificial Sequence
  Description of Artificial Sequence: Synthetic oligonucleotide
gcaugcccguuggaugugu

SEQ ID NO: 1734351 - RNA, 19 nt, Artificial Sequence
  Description of Artificial Sequence: Synthetic oligonucleotide
gcuggacaaccugggugau

SEQ ID NO: 1734352 - RNA, 19 nt, Artificial Sequence
  Description of Artificial Sequence: Synthetic oligonucleotide
cgauugcagguucucucau

SEQ ID NO: 1734353 - RNA, 19 nt, Artificial Sequence
  Description of Artificial Sequence: Synthetic oligonucleotide
cggccaccaugcgauugca

SEQ ID NO: 1734354 - RNA, 19 nt, Artificial Sequence
  Description of Artificial Sequence: Synthetic oligonucleotide
ccccggccaccaugcgauu

SEQ ID NO: 1734355 - RNA, 19 nt, Artificial Sequence
  Description of Artificial Sequence: Synthetic oligonucleotide
auacagaaaacacagggcc

SEQ ID NO: 1734356 - RNA, 19 nt, Artificial Sequence
  Description of Artificial Sequence: Synthetic oligonucleotide
uuaacaaugacacuggcac

SEQ ID NO: 1734357 - RNA, 19 nt, Artificial Sequence
  Description of Artificial Sequence: Synthetic oligonucleotide
aagaggacuauccaagggg

SEQ ID NO: 1734358 - RNA, 19 nt, Artificial Sequence
  Description of Artificial Sequence: Synthetic oligonucleotide
ucaaccaggaacucuaagg

SEQ ID NO: 1734359 - RNA, 19 nt, Artificial Sequence
  Description of Artificial Sequence: Synthetic oligonucleotide
uucucuugcacacuuaacc

SEQ ID NO: 1734360 - RNA, 19 nt, Artificial Sequence
  Description of Artificial Sequence: Synthetic oligonucleotide
aauaagaggacuauccaag

SEQ ID NO: 1734361 - RNA, 19 nt, Artificial Sequence
  Description of Artificial Sequence: Synthetic oligonucleotide
uucauuaggaagaacacuc

SEQ ID NO: 1734362 - RNA, 19 nt, Artificial Sequence
  Description of Artificial Sequence: Synthetic oligonucleotide
aaaaguaugcuggaguaag

SEQ ID NO: 1734363 - RNA, 19 nt, Artificial Sequence
  Description of Artificial Sequence: Synthetic oligonucleotide
ucacauaccuccuagggcc

SEQ ID NO: 1734364 - RNA, 19 nt, Artificial Sequence
  Description of Artificial Sequence: Synthetic oligonucleotide
uuaaagagugacuuggacu

SEQ ID NO: 1734365 - RNA, 19 nt, Artificial Sequence
  Description of Artificial Sequence: Synthetic oligonucleotide
aaggccuguacacagcgcg

SEQ ID NO: 1734366 - RNA, 19 nt, Artificial Sequence
  Description of Artificial Sequence: Synthetic oligonucleotide
cuucuggucaccuaggagc

SEQ ID NO: 1734367 - RNA, 19 nt, Artificial Sequence
  Description of Artificial Sequence: Synthetic oligonucleotide
uuagugauguuucgggagg

SEQ ID NO: 1734368 - RNA, 19 nt, Artificial Sequence
  Description of Artificial Sequence: Synthetic oligonucleotide
aguucggccguuuauuccc

SEQ ID NO: 1734369 - RNA, 19 nt, Artificial Sequence
  Description of Artificial Sequence: Synthetic oligonucleotide
aggaacgcaaguaagagac

SEQ ID NO: 1734370 - RNA, 19 nt, Artificial Sequence
  Description of Artificial Sequence: Synthetic oligonucleotide
aaaggaacgcaaguaagag

SEQ ID NO: 1734371 - RNA, 19 nt, Artificial Sequence
  Description of Artificial Sequence: Synthetic oligonucleotide
aauacucacaagugguucu

SEQ ID NO: 1734372 - RNA, 19 nt, Artificial Sequence
  Description of Artificial Sequence: Synthetic oligonucleotide
ucuugcacacuuaaccuag

SEQ ID NO: 1734373 - RNA, 19 nt, Artificial Sequence
  Description of Artificial Sequence: Synthetic oligonucleotide
guuaccucauaccagaaac

SEQ ID NO: 1734374 - RNA, 19 nt, Artificial Sequence
  Description of Artificial Sequence: Synthetic oligonucleotide
uuuaaagagugacuuggac

SEQ ID NO: 1734375 - RNA, 19 nt, Artificial Sequence
  Description of Artificial Sequence: Synthetic oligonucleotide
aacaaauaagaggacuauc

SEQ ID NO: 1734376 - RNA, 19 nt, Artificial Sequence
  Description of Artificial Sequence: Synthetic oligonucleotide
uaggcaggcacacaaaaga

SEQ ID NO: 1734377 - RNA, 19 nt, Artificial Sequence
  Description of Artificial Sequence: Synthetic oligonucleotide
aacaaugacacuggcacug

SEQ ID NO: 1734378 - RNA, 19 nt, Artificial Sequence
  Description of Artificial Sequence: Synthetic oligonucleotide
augaacucuguucauuagg

SEQ ID NO: 1734379 - RNA, 19 nt, Artificial Sequence
  Description of Artificial Sequence: Synthetic oligonucleotide
aaaucacaucuauggcacc

SEQ ID NO: 1734380 - RNA, 19 nt, Artificial Sequence
  Description of Artificial Sequence: Synthetic oligonucleotide
agaacacuccaauacucac

SEQ ID NO: 1734381 - RNA, 19 nt, Artificial Sequence
  Description of Artificial Sequence: Synthetic oligonucleotide
aaaagaacaucaugacaga

SEQ ID NO: 1734382 - RNA, 19 nt, Artificial Sequence
  Description of Artificial Sequence: Synthetic oligonucleotide
uguuccguaaaugagucug

SEQ ID NO: 1734383 - RNA, 19 nt, Artificial Sequence
  Description of Artificial Sequence: Synthetic oligonucleotide
auaagaggacuauccaagg

SEQ ID NO: 1734384 - RNA, 19 nt, Artificial Sequence
  Description of Artificial Sequence: Synthetic oligonucleotide
acaaagaauucucaaggca

SEQ ID NO: 1734385 - RNA, 19 nt, Artificial Sequence
  Description of Artificial Sequence: Synthetic oligonucleotide
uguucaucggaguauccag

SEQ ID NO: 1734386 - RNA, 19 nt, Artificial Sequence
  Description of Artificial Sequence: Synthetic oligonucleotide
aaucgcguccaccuucugg

SEQ ID NO: 1734387 - RNA, 19 nt, Artificial Sequence
  Description of Artificial Sequence: Synthetic oligonucleotide
auggacggcacccuuggcc

SEQ ID NO: 1734388 - RNA, 19 nt, Artificial Sequence
  Description of Artificial Sequence: Synthetic oligonucleotide
acuuaaccuaggcaggcac

SEQ ID NO: 1734389 - RNA, 19 nt, Artificial Sequence
  Description of Artificial Sequence: Synthetic oligonucleotide
uugcuuacaucacaaagaa

SEQ ID NO: 1734390 - RNA, 19 nt, Artificial Sequence
  Description of Artificial Sequence: Synthetic oligonucleotide
ucuaaggguguccaagagc

SEQ ID NO: 1734391 - RNA, 19 nt, Artificial Sequence
  Description of Artificial Sequence: Synthetic oligonucleotide
gaauucucaaggcaguuca

SEQ ID NO: 1734392 - RNA, 19 nt, Artificial Sequence
  Description of Artificial Sequence: Synthetic oligonucleotide
guuagugauguuucgggag

SEQ ID NO: 1734393 - RNA, 19 nt, Artificial Sequence
  Description of Artificial Sequence: Synthetic oligonucleotide
uccaaggcagcuuuggccc

SEQ ID NO: 1734394 - RNA, 19 nt, Artificial Sequence
  Description of Artificial Sequence: Synthetic oligonucleotide
augccaacaaauaagagga

SEQ ID NO: 1734395 - RNA, 19 nt, Artificial Sequence
  Description of Artificial Sequence: Synthetic oligonucleotide
agucauggaagguuucaac

SEQ ID NO: 1734396 - RNA, 19 nt, Artificial Sequence
  Description of Artificial Sequence: Synthetic oligonucleotide
uucaucggaguauccaggg

SEQ ID NO: 1734397 - RNA, 19 nt, Artificial Sequence
  Description of Artificial Sequence: Synthetic oligonucleotide
aaaguaugcuggaguaagc

SEQ ID NO: 1734398 - RNA, 19 nt, Artificial Sequence
  Description of Artificial Sequence: Synthetic oligonucleotide
aguaugcuggaguaagcuc

SEQ ID NO: 1734399 - RNA, 19 nt, Artificial Sequence
  Description of Artificial Sequence: Synthetic oligonucleotide
agugacuuggacuuggcau

SEQ ID NO: 1734400 - RNA, 19 nt, Artificial Sequence
  Description of Artificial Sequence: Synthetic oligonucleotide
acgcaaguaagagacaaac

SEQ ID NO: 1734401 - RNA, 19 nt, Artificial Sequence
  Description of Artificial Sequence: Synthetic oligonucleotide
uuuuaaagagugacuugga

SEQ ID NO: 1734402 - RNA, 19 nt, Artificial Sequence
  Description of Artificial Sequence: Synthetic oligonucleotide
acaagugguucucuugcac

SEQ ID NO: 1734403 - RNA, 19 nt, Artificial Sequence
  Description of Artificial Sequence: Synthetic oligonucleotide
aucaugacagaguccauug

SEQ ID NO: 1734404 - RNA, 19 nt, Artificial Sequence
  Description of Artificial Sequence: Synthetic oligonucleotide
ucaggcauugauuuccugu

SEQ ID NO: 1734405 - RNA, 19 nt, Artificial Sequence
  Description of Artificial Sequence: Synthetic oligonucleotide
cacaaagaauucucaaggc

SEQ ID NO: 1734406 - RNA, 19 nt, Artificial Sequence
  Description of Artificial Sequence: Synthetic oligonucleotide
ugagucugucauuuuaaca

SEQ ID NO: 1734407 - RNA, 19 nt, Artificial Sequence
  Description of Artificial Sequence: Synthetic oligonucleotide
uccuucaggugcuuugugg

SEQ ID NO: 1734408 - RNA, 19 nt, Artificial Sequence
  Description of Artificial Sequence: Synthetic oligonucleotide
augagucugucauuuuaac

SEQ ID NO: 1734409 - RNA, 19 nt, Artificial Sequence
  Description of Artificial Sequence: Synthetic oligonucleotide
ucucuugcacacuuaaccu

SEQ ID NO: 1734410 - RNA, 19 nt, Artificial Sequence
  Description of Artificial Sequence: Synthetic oligonucleotide
cacacaaaagaacaucaug

SEQ ID NO: 1734411 - RNA, 19 nt, Artificial Sequence
  Description of Artificial Sequence: Synthetic oligonucleotide
cuuacaucacaaagaauuc

SEQ ID NO: 1734412 - RNA, 19 nt, Artificial Sequence
  Description of Artificial Sequence: Synthetic oligonucleotide
ugauggacggcacccuugg

SEQ ID NO: 1734413 - RNA, 19 nt, Artificial Sequence
  Description of Artificial Sequence: Synthetic oligonucleotide
acaucuauggcaccaacau

SEQ ID NO: 1734414 - RNA, 19 nt, Artificial Sequence
  Description of Artificial Sequence: Synthetic oligonucleotide
ucauaccagaaacaggaau

SEQ ID NO: 1734415 - RNA, 19 nt, Artificial Sequence
  Description of Artificial Sequence: Synthetic oligonucleotide
cuccaauacucacaagugg

SEQ ID NO: 1734416 - RNA, 19 nt, Artificial Sequence
  Description of Artificial Sequence: Synthetic oligonucleotide
ugcacacuuaaccuaggca

SEQ ID NO: 1734417 - RNA, 19 nt, Artificial Sequence
  Description of Artificial Sequence: Synthetic oligonucleotide
ucaccuaggagcuugccaa

SEQ ID NO: 1734418 - RNA, 19 nt, Artificial Sequence
  Description of Artificial Sequence: Synthetic oligonucleotide
uucaauuucaggccacaaa

SEQ ID NO: 1734419 - RNA, 19 nt, Artificial Sequence
  Description of Artificial Sequence: Synthetic oligonucleotide
uaccucauaccagaaacag

SEQ ID NO: 1734420 - RNA, 19 nt, Artificial Sequence
  Description of Artificial Sequence: Synthetic oligonucleotide
gacagugcuaccuacaggu

SEQ ID NO: 1734421 - RNA, 19 nt, Artificial Sequence
  Description of Artificial Sequence: Synthetic oligonucleotide
aagaacaucaugacagagu

SEQ ID NO: 1734422 - RNA, 19 nt, Artificial Sequence
  Description of Artificial Sequence: Synthetic oligonucleotide
guaagagacaaacaggacu

SEQ ID NO: 1734423 - RNA, 19 nt, Artificial Sequence
  Description of Artificial Sequence: Synthetic oligonucleotide
ugaagucugccucaggcau

SEQ ID NO: 1734424 - RNA, 19 nt, Artificial Sequence
  Description of Artificial Sequence: Synthetic oligonucleotide
uagccgaucaucccaggag

SEQ ID NO: 1734425 - RNA, 19 nt, Artificial Sequence
  Description of Artificial Sequence: Synthetic oligonucleotide
cuggcaacccaccaguugc

SEQ ID NO: 1734426 - RNA, 19 nt, Artificial Sequence
  Description of Artificial Sequence: Synthetic oligonucleotide
gacugguuaccucauacca

SEQ ID NO: 1734427 - RNA, 19 nt, Artificial Sequence
  Description of Artificial Sequence: Synthetic oligonucleotide
uuaccucauaccagaaaca

SEQ ID NO: 1734428 - RNA, 19 nt, Artificial Sequence
  Description of Artificial Sequence: Synthetic oligonucleotide
cacacuuaaccuaggcagg

SEQ ID NO: 1734429 - RNA, 19 nt, Artificial Sequence
  Description of Artificial Sequence: Synthetic oligonucleotide
caugacagaguccauugug

SEQ ID NO: 1734430 - RNA, 19 nt, Artificial Sequence
  Description of Artificial Sequence: Synthetic oligonucleotide
aaagaauucucaaggcagu

SEQ ID NO: 1734431 - RNA, 19 nt, Artificial Sequence
  Description of Artificial Sequence: Synthetic oligonucleotide
gugcuuuguggcuaagugg

SEQ ID NO: 1734432 - RNA, 19 nt, Artificial Sequence
  Description of Artificial Sequence: Synthetic oligonucleotide
aaguaugcuggaguaagcu

SEQ ID NO: 1734433 - RNA, 19 nt, Artificial Sequence
  Description of Artificial Sequence: Synthetic oligonucleotide
ugauuuccuguucaucgga

SEQ ID NO: 1734434 - RNA, 19 nt, Artificial Sequence
  Description of Artificial Sequence: Synthetic oligonucleotide
uuacaucacaaagaauucu

SEQ ID NO: 1734435 - RNA, 19 nt, Artificial Sequence
  Description of Artificial Sequence: Synthetic oligonucleotide
cauggaagguuucaaccag

SEQ ID NO: 1734436 - RNA, 19 nt, Artificial Sequence
  Description of Artificial Sequence: Synthetic oligonucleotide
guuaccaccuggauuaggc

SEQ ID NO: 1734437 - RNA, 19 nt, Artificial Sequence
  Description of Artificial Sequence: Synthetic oligonucleotide
agcaaaggaacgcaaguaa

SEQ ID NO: 1734438 - RNA, 19 nt, Artificial Sequence
  Description of Artificial Sequence: Synthetic oligonucleotide
aaccuaggcaggcacacaa

SEQ ID NO: 1734439 - RNA, 19 nt, Artificial Sequence
  Description of Artificial Sequence: Synthetic oligonucleotide
gugguuaccaccuggauua

SEQ ID NO: 1734440 - RNA, 19 nt, Artificial Sequence
  Description of Artificial Sequence: Synthetic oligonucleotide
acacuuaaccuaggcaggc

SEQ ID NO: 1734441 - RNA, 19 nt, Artificial Sequence
  Description of Artificial Sequence: Synthetic oligonucleotide
gaugaggcuuaaaaguaug

SEQ ID NO: 1734442 - RNA, 19 nt, Artificial Sequence
  Description of Artificial Sequence: Synthetic oligonucleotide
ucaaggcaguucaauuuca

SEQ ID NO: 1734443 - RNA, 19 nt, Artificial Sequence
  Description of Artificial Sequence: Synthetic oligonucleotide
cacacagagaaucgcgucc

SEQ ID NO: 1734444 - RNA, 19 nt, Artificial Sequence
  Description of Artificial Sequence: Synthetic oligonucleotide
augaggcuuaaaaguaugc

SEQ ID NO: 1734445 - RNA, 19 nt, Artificial Sequence
  Description of Artificial Sequence: Synthetic oligonucleotide
uuggccaugccguagccga

SEQ ID NO: 1734446 - RNA, 19 nt, Artificial Sequence
  Description of Artificial Sequence: Synthetic oligonucleotide
aagcaauccaggaugcucu

SEQ ID NO: 1734447 - RNA, 19 nt, Artificial Sequence
  Description of Artificial Sequence: Synthetic oligonucleotide
ucucaaggcaguucaauuu

SEQ ID NO: 1734448 - RNA, 19 nt, Artificial Sequence
  Description of Artificial Sequence: Synthetic oligonucleotide
aguaagagacaaacaggac

SEQ ID NO: 1734449 - RNA, 19 nt, Artificial Sequence
  Description of Artificial Sequence: Synthetic oligonucleotide
cauaccagaaacaggaaua

SEQ ID NO: 1734450 - RNA, 19 nt, Artificial Sequence
  Description of Artificial Sequence: Synthetic oligonucleotide
ucuugacaggcuucccgcg

SEQ ID NO: 1734451 - RNA, 19 nt, Artificial Sequence
  Description of Artificial Sequence: Synthetic oligonucleotide
aggaugcucugaugcaggc

SEQ ID NO: 1734452 - RNA, 19 nt, Artificial Sequence
  Description of Artificial Sequence: Synthetic oligonucleotide
cuuggacuuggcauugccc

SEQ ID NO: 1734453 - RNA, 19 nt, Artificial Sequence
  Description of Artificial Sequence: Synthetic oligonucleotide
cucuugacaggcuucccgc

SEQ ID NO: 1734454 - RNA, 19 nt, Artificial Sequence
  Description of Artificial Sequence: Synthetic oligonucleotide
cuaaggguguccaagagcu

SEQ ID NO: 1734455 - RNA, 19 nt, Artificial Sequence
  Description of Artificial Sequence: Synthetic oligonucleotide
uuaggcuuccugaguucgg

SEQ ID NO: 1734456 - RNA, 19 nt, Artificial Sequence
  Description of Artificial Sequence: Synthetic oligonucleotide
auggguuagugauguuucg

SEQ ID NO: 1734457 - RNA, 19 nt, Artificial Sequence
  Description of Artificial Sequence: Synthetic oligonucleotide
aucgcguccaccuucuggu

SEQ ID NO: 1734458 - RNA, 19 nt, Artificial Sequence
  Description of Artificial Sequence: Synthetic oligonucleotide
uggcagagcugauggacgg

SEQ ID NO: 1734459 - RNA, 19 nt, Artificial Sequence
  Description of Artificial Sequence: Synthetic oligonucleotide
acucuguucauuaggaaga

SEQ ID NO: 1734460 - RNA, 19 nt, Artificial Sequence
  Description of Artificial Sequence: Synthetic oligonucleotide
uugcacacuuaaccuaggc

SEQ ID NO: 1734461 - RNA, 19 nt, Artificial Sequence
  Description of Artificial Sequence: Synthetic oligonucleotide
cucaaggcaguucaauuuc

SEQ ID NO: 1734462 - RNA, 19 nt, Artificial Sequence
  Description of Artificial Sequence: Synthetic oligonucleotide
caaaggaacgcaaguaaga

SEQ ID NO: 1734463 - RNA, 19 nt, Artificial Sequence
  Description of Artificial Sequence: Synthetic oligonucleotide
accaggaacucuaagggug

SEQ ID NO: 1734464 - RNA, 19 nt, Artificial Sequence
  Description of Artificial Sequence: Synthetic oligonucleotide
caugaacucuguucauuag

SEQ ID NO: 1734465 - RNA, 19 nt, Artificial Sequence
  Description of Artificial Sequence: Synthetic oligonucleotide
acaugaacucuguucauua

SEQ ID NO: 1734466 - RNA, 19 nt, Artificial Sequence
  Description of Artificial Sequence: Synthetic oligonucleotide
uuaaccuaggcaggcacac

SEQ ID NO: 1734467 - RNA, 19 nt, Artificial Sequence
  Description of Artificial Sequence: Synthetic oligonucleotide
ugcucacauaccuccuagg

SEQ ID NO: 1734468 - RNA, 19 nt, Artificial Sequence
  Description of Artificial Sequence: Synthetic oligonucleotide
uggauuaggcuuccugagu

SEQ ID NO: 1734469 - RNA, 19 nt, Artificial Sequence
  Description of Artificial Sequence: Synthetic oligonucleotide
aggcacacaaaagaacauc

SEQ ID NO: 1734470 - RNA, 19 nt, Artificial Sequence
  Description of Artificial Sequence: Synthetic oligonucleotide
agugguuaccaccuggauu

SEQ ID NO: 1734471 - RNA, 19 nt, Artificial Sequence
  Description of Artificial Sequence: Synthetic oligonucleotide
caaagugccccaaaugcca

SEQ ID NO: 1734472 - RNA, 19 nt, Artificial Sequence
  Description of Artificial Sequence: Synthetic oligonucleotide
caacccaccaguugcgggc

SEQ ID NO: 1734473 - RNA, 19 nt, Artificial Sequence
  Description of Artificial Sequence: Synthetic oligonucleotide
cagaacagcaaaggaacgc

SEQ ID NO: 1734474 - RNA, 19 nt, Artificial Sequence
  Description of Artificial Sequence: Synthetic oligonucleotide
cuucccgcgguacggaacg

SEQ ID NO: 1734475 - RNA, 19 nt, Artificial Sequence
  Description of Artificial Sequence: Synthetic oligonucleotide
uggacggcacccuuggcca

SEQ ID NO: 1734476 - RNA, 19 nt, Artificial Sequence
  Description of Artificial Sequence: Synthetic oligonucleotide
cucacaagugguucucuug

SEQ ID NO: 1734477 - RNA, 19 nt, Artificial Sequence
  Description of Artificial Sequence: Synthetic oligonucleotide
agugcuaccuacaggucuc

SEQ ID NO: 1734478 - RNA, 19 nt, Artificial Sequence
  Description of Artificial Sequence: Synthetic oligonucleotide
aucgaugcuggcaacccac

SEQ ID NO: 1734479 - RNA, 19 nt, Artificial Sequence
  Description of Artificial Sequence: Synthetic oligonucleotide
uucucaaggcaguucaauu

SEQ ID NO: 1734480 - RNA, 19 nt, Artificial Sequence
  Description of Artificial Sequence: Synthetic oligonucleotide
caaggcaguucaauuucag

SEQ ID NO: 1734481 - RNA, 19 nt, Artificial Sequence
  Description of Artificial Sequence: Synthetic oligonucleotide
uaacaaugacacuggcacu

SEQ ID NO: 1734482 - RNA, 19 nt, Artificial Sequence
  Description of Artificial Sequence: Synthetic oligonucleotide
aguaagcucugucuucccu

SEQ ID NO: 1734483 - RNA, 19 nt, Artificial Sequence
  Description of Artificial Sequence: Synthetic oligonucleotide
guucaucggaguauccagg

SEQ ID NO: 1734484 - RNA, 19 nt, Artificial Sequence
  Description of Artificial Sequence: Synthetic oligonucleotide
ggaaggccuguacacagcg

SEQ ID NO: 1734485 - RNA, 19 nt, Artificial Sequence
  Description of Artificial Sequence: Synthetic oligonucleotide
ucaugacagaguccauugu

SEQ ID NO: 1734486 - RNA, 19 nt, Artificial Sequence
  Description of Artificial Sequence: Synthetic oligonucleotide
ucugccucaggcauugauu

SEQ ID NO: 1734487 - RNA, 19 nt, Artificial Sequence
  Description of Artificial Sequence: Synthetic oligonucleotide
auuuccuguucaucggagu

SEQ ID NO: 1734488 - RNA, 19 nt, Artificial Sequence
  Description of Artificial Sequence: Synthetic oligonucleotide
ugugaccacacauggguua

SEQ ID NO: 1734489 - RNA, 19 nt, Artificial Sequence
  Description of Artificial Sequence: Synthetic oligonucleotide
caggaugcucugaugcagg

SEQ ID NO: 1734490 - RNA, 19 nt, Artificial Sequence
  Description of Artificial Sequence: Synthetic oligonucleotide
agcacugacagugcuaccu

SEQ ID NO: 1734491 - RNA, 19 nt, Artificial Sequence
  Description of Artificial Sequence: Synthetic oligonucleotide
gagaaucgcguccaccuuc

SEQ ID NO: 1734492 - RNA, 19 nt, Artificial Sequence
  Description of Artificial Sequence: Synthetic oligonucleotide
uaaccgggagcacagcaau

SEQ ID NO: 1734493 - RNA, 19 nt, Artificial Sequence
  Description of Artificial Sequence: Synthetic oligonucleotide
aaacaggcuggacuucaaa

SEQ ID NO: 1734494 - RNA, 19 nt, Artificial Sequence
  Description of Artificial Sequence: Synthetic oligonucleotide
gaacgcaaguaagagacaa

SEQ ID NO: 1734495 - RNA, 19 nt, Artificial Sequence
  Description of Artificial Sequence: Synthetic oligonucleotide
acacauggguuagugaugu

SEQ ID NO: 1734496 - RNA, 19 nt, Artificial Sequence
  Description of Artificial Sequence: Synthetic oligonucleotide
acagaguccauuguguuuu

SEQ ID NO: 1734497 - RNA, 19 nt, Artificial Sequence
  Description of Artificial Sequence: Synthetic oligonucleotide
acugguuaccucauaccag

SEQ ID NO: 1734498 - RNA, 19 nt, Artificial Sequence
  Description of Artificial Sequence: Synthetic oligonucleotide
aggcuuccugaguucggcc

SEQ ID NO: 1734499 - RNA, 19 nt, Artificial Sequence
  Description of Artificial Sequence: Synthetic oligonucleotide
caauacucacaagugguuc

SEQ ID NO: 1734500 - RNA, 19 nt, Artificial Sequence
  Description of Artificial Sequence: Synthetic oligonucleotide
auacucacaagugguucuc

SEQ ID NO: 1734501 - RNA, 19 nt, Artificial Sequence
  Description of Artificial Sequence: Synthetic oligonucleotide
agccgaucaucccaggagu

SEQ ID NO: 1734502 - RNA, 19 nt, Artificial Sequence
  Description of Artificial Sequence: Synthetic oligonucleotide
cuugcacacuuaaccuagg

SEQ ID NO: 1734503 - RNA, 19 nt, Artificial Sequence
  Description of Artificial Sequence: Synthetic oligonucleotide
cucuaaggguguccaagag

SEQ ID NO: 1734504 - RNA, 19 nt, Artificial Sequence
  Description of Artificial Sequence: Synthetic oligonucleotide
uuaccaccuggauuaggcu

SEQ ID NO: 1734505 - RNA, 19 nt, Artificial Sequence
  Description of Artificial Sequence: Synthetic oligonucleotide
augcuggcaacccaccagu

SEQ ID NO: 1734506 - RNA, 19 nt, Artificial Sequence
  Description of Artificial Sequence: Synthetic oligonucleotide
uguacacagcgcgagccca

SEQ ID NO: 1734507 - RNA, 19 nt, Artificial Sequence
  Description of Artificial Sequence: Synthetic oligonucleotide
agccacacagagaaucgcg

SEQ ID NO: 1734508 - RNA, 19 nt, Artificial Sequence
  Description of Artificial Sequence: Synthetic oligonucleotide
augacagaguccauugugu

SEQ ID NO: 1734509 - RNA, 19 nt, Artificial Sequence
  Description of Artificial Sequence: Synthetic oligonucleotide
ucaucggaguauccagggu

SEQ ID NO: 1734510 - RNA, 19 nt, Artificial Sequence
  Description of Artificial Sequence: Synthetic oligonucleotide
accuggucagccuguuccg

SEQ ID NO: 1734511 - RNA, 19 nt, Artificial Sequence
  Description of Artificial Sequence: Synthetic oligonucleotide
caggagucccauccaaggc

SEQ ID NO: 1734512 - RNA, 19 nt, Artificial Sequence
  Description of Artificial Sequence: Synthetic oligonucleotide
uugacaggcuucccgcggu

SEQ ID NO: 1734513 - RNA, 19 nt, Artificial Sequence
  Description of Artificial Sequence: Synthetic oligonucleotide
accucauaccagaaacagg

SEQ ID NO: 1734514 - RNA, 19 nt, Artificial Sequence
  Description of Artificial Sequence: Synthetic oligonucleotide
acaaugacacuggcacugg

SEQ ID NO: 1734515 - RNA, 19 nt, Artificial Sequence
  Description of Artificial Sequence: Synthetic oligonucleotide
cuuuccugcaaggcucugg

SEQ ID NO: 1734516 - RNA, 19 nt, Artificial Sequence
  Description of Artificial Sequence: Synthetic oligonucleotide
cauccaaggcagcuuuggc

SEQ ID NO: 1734517 - RNA, 19 nt, Artificial Sequence
  Description of Artificial Sequence: Synthetic oligonucleotide
ugacagaguccauuguguu

SEQ ID NO: 1734518 - RNA, 19 nt, Artificial Sequence
  Description of Artificial Sequence: Synthetic oligonucleotide
uaccaccuggauuaggcuu

SEQ ID NO: 1734519 - RNA, 19 nt, Artificial Sequence
  Description of Artificial Sequence: Synthetic oligonucleotide
guuucaaccaggaacucua

SEQ ID NO: 1734520 - RNA, 19 nt, Artificial Sequence
  Description of Artificial Sequence: Synthetic oligonucleotide
cugcucacauaccuccuag

SEQ ID NO: 1734521 - RNA, 19 nt, Artificial Sequence
  Description of Artificial Sequence: Synthetic oligonucleotide
uuucaaccaggaacucuaa

SEQ ID NO: 1734522 - RNA, 19 nt, Artificial Sequence
  Description of Artificial Sequence: Synthetic oligonucleotide
ucgaugcuggcaacccacc

SEQ ID NO: 1734523 - RNA, 19 nt, Artificial Sequence
  Description of Artificial Sequence: Synthetic oligonucleotide
uggcuaaguggcuggagau

SEQ ID NO: 1734524 - RNA, 19 nt, Artificial Sequence
  Description of Artificial Sequence: Synthetic oligonucleotide
ugccaacaaauaagaggac

SEQ ID NO: 1734525 - RNA, 19 nt, Artificial Sequence
  Description of Artificial Sequence: Synthetic oligonucleotide
gcaaaggaacgcaaguaag

SEQ ID NO: 1734526 - RNA, 19 nt, Artificial Sequence
  Description of Artificial Sequence: Synthetic oligonucleotide
ugcuuacaucacaaagaau

SEQ ID NO: 1734527 - RNA, 19 nt, Artificial Sequence
  Description of Artificial Sequence: Synthetic oligonucleotide
uauucccagugauccaguc

SEQ ID NO: 1734528 - RNA, 19 nt, Artificial Sequence
  Description of Artificial Sequence: Synthetic oligonucleotide
ggaguaagcucugucuucc

SEQ ID NO: 1734529 - RNA, 19 nt, Artificial Sequence
  Description of Artificial Sequence: Synthetic oligonucleotide
guggcuaaguggcuggaga

SEQ ID NO: 1734530 - RNA, 19 nt, Artificial Sequence
  Description of Artificial Sequence: Synthetic oligonucleotide
gaccacacauggguuagug

SEQ ID NO: 1734531 - RNA, 19 nt, Artificial Sequence
  Description of Artificial Sequence: Synthetic oligonucleotide
guaugcuggaguaagcucu

SEQ ID NO: 1734532 - RNA, 19 nt, Artificial Sequence
  Description of Artificial Sequence: Synthetic oligonucleotide
cuuaaccuaggcaggcaca

SEQ ID NO: 1734533 - RNA, 19 nt, Artificial Sequence
  Description of Artificial Sequence: Synthetic oligonucleotide
caugccguagccgaucauc

SEQ ID NO: 1734534 - RNA, 19 nt, Artificial Sequence
  Description of Artificial Sequence: Synthetic oligonucleotide
ggucaagaggccuccuucc

SEQ ID NO: 1734535 - RNA, 19 nt, Artificial Sequence
  Description of Artificial Sequence: Synthetic oligonucleotide
agagugacuuggacuuggc

SEQ ID NO: 1734536 - RNA, 19 nt, Artificial Sequence
  Description of Artificial Sequence: Synthetic oligonucleotide
aguugcgggcucggaaggc

SEQ ID NO: 1734537 - RNA, 19 nt, Artificial Sequence
  Description of Artificial Sequence: Synthetic oligonucleotide
uguggcuaaguggcuggag

SEQ ID NO: 1734538 - RNA, 19 nt, Artificial Sequence
  Description of Artificial Sequence: Synthetic oligonucleotide
cugauggacggcacccuug

SEQ ID NO: 1734539 - RNA, 19 nt, Artificial Sequence
  Description of Artificial Sequence: Synthetic oligonucleotide
ggcacacaaaagaacauca

SEQ ID NO: 1734540 - RNA, 19 nt, Artificial Sequence
  Description of Artificial Sequence: Synthetic oligonucleotide
ggagcuugccaacuucagc

SEQ ID NO: 1734541 - RNA, 19 nt, Artificial Sequence
  Description of Artificial Sequence: Synthetic oligonucleotide
gugaccacacauggguuag

SEQ ID NO: 1734542 - RNA, 19 nt, Artificial Sequence
  Description of Artificial Sequence: Synthetic oligonucleotide
uuucgggagggcucuccca

SEQ ID NO: 1734543 - RNA, 19 nt, Artificial Sequence
  Description of Artificial Sequence: Synthetic oligonucleotide
ugauccagucauggaaggu

SEQ ID NO: 1734544 - RNA, 19 nt, Artificial Sequence
  Description of Artificial Sequence: Synthetic oligonucleotide
uccuguucaucggaguauc

SEQ ID NO: 1734545 - RNA, 19 nt, Artificial Sequence
  Description of Artificial Sequence: Synthetic oligonucleotide
caucggaguauccagggua

SEQ ID NO: 1734546 - RNA, 19 nt, Artificial Sequence
  Description of Artificial Sequence: Synthetic oligonucleotide
agaugaggcuuaaaaguau

SEQ ID NO: 1734547 - RNA, 19 nt, Artificial Sequence
  Description of Artificial Sequence: Synthetic oligonucleotide
agccuguuccguaaaugag

SEQ ID NO: 1734548 - RNA, 19 nt, Artificial Sequence
  Description of Artificial Sequence: Synthetic oligonucleotide
ccagaacagcaaaggaacg

SEQ ID NO: 1734549 - RNA, 19 nt, Artificial Sequence
  Description of Artificial Sequence: Synthetic oligonucleotide
gguuagugauguuucggga

SEQ ID NO: 1734550 - RNA, 19 nt, Artificial Sequence
  Description of Artificial Sequence: Synthetic oligonucleotide
caguugcgggcucggaagg

SEQ ID NO: 1734551 - RNA, 19 nt, Artificial Sequence
  Description of Artificial Sequence: Synthetic oligonucleotide
uccagucauggaagguuuc

SEQ ID NO: 1734552 - RNA, 19 nt, Artificial Sequence
  Description of Artificial Sequence: Synthetic oligonucleotide
uguuucgggagggcucucc

SEQ ID NO: 1734553 - RNA, 19 nt, Artificial Sequence
  Description of Artificial Sequence: Synthetic oligonucleotide
cagagaaucgcguccaccu

SEQ ID NO: 1734554 - RNA, 19 nt, Artificial Sequence
  Description of Artificial Sequence: Synthetic oligonucleotide
ccuguuccguaaaugaguc

SEQ ID NO: 1734555 - RNA, 19 nt, Artificial Sequence
  Description of Artificial Sequence: Synthetic oligonucleotide
uggucagccuguuccguaa

SEQ ID NO: 1734556 - RNA, 19 nt, Artificial Sequence
  Description of Artificial Sequence: Synthetic oligonucleotide
aggguaaccgggagcacag

SEQ ID NO: 1734557 - RNA, 19 nt, Artificial Sequence
  Description of Artificial Sequence: Synthetic oligonucleotide
ggcacccuuggccaugccg

SEQ ID NO: 1734558 - RNA, 19 nt, Artificial Sequence
  Description of Artificial Sequence: Synthetic oligonucleotide
ugguuaccucauaccagaa

SEQ ID NO: 1734559 - RNA, 19 nt, Artificial Sequence
  Description of Artificial Sequence: Synthetic oligonucleotide
aaagugccccaaaugccaa

SEQ ID NO: 1734560 - RNA, 19 nt, Artificial Sequence
  Description of Artificial Sequence: Synthetic oligonucleotide
cuuggccaugccguagccg

SEQ ID NO: 1734561 - RNA, 19 nt, Artificial Sequence
  Description of Artificial Sequence: Synthetic oligonucleotide
ggaagaacacuccaauacu

SEQ ID NO: 1734562 - RNA, 19 nt, Artificial Sequence
  Description of Artificial Sequence: Synthetic oligonucleotide
uuccuguucaucggaguau

SEQ ID NO: 1734563 - RNA, 19 nt, Artificial Sequence
  Description of Artificial Sequence: Synthetic oligonucleotide
uuccguaaaugagucuguc

SEQ ID NO: 1734564 - RNA, 19 nt, Artificial Sequence
  Description of Artificial Sequence: Synthetic oligonucleotide
agacaugaacucuguucau

SEQ ID NO: 1734565 - RNA, 19 nt, Artificial Sequence
  Description of Artificial Sequence: Synthetic oligonucleotide
accaguugcgggcucggaa

SEQ ID NO: 1734566 - RNA, 19 nt, Artificial Sequence
  Description of Artificial Sequence: Synthetic oligonucleotide
aacgcaaguaagagacaaa

SEQ ID NO: 1734567 - RNA, 19 nt, Artificial Sequence
  Description of Artificial Sequence: Synthetic oligonucleotide
guagccgaucaucccagga

SEQ ID NO: 1734568 - RNA, 19 nt, Artificial Sequence
  Description of Artificial Sequence: Synthetic oligonucleotide
acucacaagugguucucuu

SEQ ID NO: 1734569 - RNA, 19 nt, Artificial Sequence
  Description of Artificial Sequence: Synthetic oligonucleotide
gguaaccgggagcacagca

SEQ ID NO: 1734570 - RNA, 19 nt, Artificial Sequence
  Description of Artificial Sequence: Synthetic oligonucleotide
guccaagagcugaagucug

SEQ ID NO: 1734571 - RNA, 19 nt, Artificial Sequence
  Description of Artificial Sequence: Synthetic oligonucleotide
uggucaccuaggagcuugc

SEQ ID NO: 1734572 - RNA, 19 nt, Artificial Sequence
  Description of Artificial Sequence: Synthetic oligonucleotide
gccaacuucagcagugacc

SEQ ID NO: 1734573 - RNA, 19 nt, Artificial Sequence
  Description of Artificial Sequence: Synthetic oligonucleotide
ccaacaaauaagaggacua

SEQ ID NO: 1734574 - RNA, 19 nt, Artificial Sequence
  Description of Artificial Sequence: Synthetic oligonucleotide
cucuugcacacuuaaccua

SEQ ID NO: 1734575 - RNA, 19 nt, Artificial Sequence
  Description of Artificial Sequence: Synthetic oligonucleotide
acagugcuaccuacagguc

SEQ ID NO: 1734576 - RNA, 19 nt, Artificial Sequence
  Description of Artificial Sequence: Synthetic oligonucleotide
agaaucgcguccaccuucu

SEQ ID NO: 1734577 - RNA, 19 nt, Artificial Sequence
  Description of Artificial Sequence: Synthetic oligonucleotide
uacucacaagugguucucu

SEQ ID NO: 1734578 - RNA, 19 nt, Artificial Sequence
  Description of Artificial Sequence: Synthetic oligonucleotide
gauggacggcacccuuggc

SEQ ID NO: 1734579 - RNA, 19 nt, Artificial Sequence
  Description of Artificial Sequence: Synthetic oligonucleotide
agagaaucgcguccaccuu

SEQ ID NO: 1734580 - RNA, 19 nt, Artificial Sequence
  Description of Artificial Sequence: Synthetic oligonucleotide
uucggccguuuauucccag

SEQ ID NO: 1734581 - RNA, 19 nt, Artificial Sequence
  Description of Artificial Sequence: Synthetic oligonucleotide
caggcuucccgcgguacgg

SEQ ID NO: 1734582 - RNA, 19 nt, Artificial Sequence
  Description of Artificial Sequence: Synthetic oligonucleotide
ggagucccauccaaggcag

SEQ ID NO: 1734583 - RNA, 19 nt, Artificial Sequence
  Description of Artificial Sequence: Synthetic oligonucleotide
ccuggauuaggcuuccuga

SEQ ID NO: 1734584 - RNA, 19 nt, Artificial Sequence
  Description of Artificial Sequence: Synthetic oligonucleotide
gauguuucgggagggcucu

SEQ ID NO: 1734585 - RNA, 19 nt, Artificial Sequence
  Description of Artificial Sequence: Synthetic oligonucleotide
gaacagcaaaggaacgcaa

SEQ ID NO: 1734586 - RNA, 19 nt, Artificial Sequence
  Description of Artificial Sequence: Synthetic oligonucleotide
cccgaagccgccauccugc

SEQ ID NO: 1734587 - RNA, 19 nt, Artificial Sequence
  Description of Artificial Sequence: Synthetic oligonucleotide
ggucuccaaagcaauccag

SEQ ID NO: 1734588 - RNA, 19 nt, Artificial Sequence
  Description of Artificial Sequence: Synthetic oligonucleotide
guugcgggcucggaaggcc

SEQ ID NO: 1734589 - RNA, 19 nt, Artificial Sequence
  Description of Artificial Sequence: Synthetic oligonucleotide
ucggccguuuauucccagu

SEQ ID NO: 1734590 - RNA, 19 nt, Artificial Sequence
  Description of Artificial Sequence: Synthetic oligonucleotide
uaccuacaggucucucuuc

SEQ ID NO: 1734591 - RNA, 19 nt, Artificial Sequence
  Description of Artificial Sequence: Synthetic oligonucleotide
gauccagucauggaagguu

SEQ ID NO: 1734592 - RNA, 19 nt, Artificial Sequence
  Description of Artificial Sequence: Synthetic oligonucleotide
cacaagugguucucuugca

SEQ ID NO: 1734593 - RNA, 19 nt, Artificial Sequence
  Description of Artificial Sequence: Synthetic oligonucleotide
cucaggcauugauuuccug

SEQ ID NO: 1734594 - RNA, 19 nt, Artificial Sequence
  Description of Artificial Sequence: Synthetic oligonucleotide
aaccgggagcacagcaaug

SEQ ID NO: 1734595 - RNA, 19 nt, Artificial Sequence
  Description of Artificial Sequence: Synthetic oligonucleotide
aucggaguauccaggguaa

SEQ ID NO: 1734596 - RNA, 19 nt, Artificial Sequence
  Description of Artificial Sequence: Synthetic oligonucleotide
gccgccguacaccagcacc

SEQ ID NO: 1734597 - RNA, 19 nt, Artificial Sequence
  Description of Artificial Sequence: Synthetic oligonucleotide
cagagcugauggacggcac

SEQ ID NO: 1734598 - RNA, 19 nt, Artificial Sequence
  Description of Artificial Sequence: Synthetic oligonucleotide
gaugcaggcugcucacaua

SEQ ID NO: 1734599 - RNA, 19 nt, Artificial Sequence
  Description of Artificial Sequence: Synthetic oligonucleotide
gggucaagaggccuccuuc

SEQ ID NO: 1734600 - RNA, 19 nt, Artificial Sequence
  Description of Artificial Sequence: Synthetic oligonucleotide
caccuaggagcuugccaac

SEQ ID NO: 1734601 - RNA, 19 nt, Artificial Sequence
  Description of Artificial Sequence: Synthetic oligonucleotide
agugguucucuugcacacu

SEQ ID NO: 1734602 - RNA, 19 nt, Artificial Sequence
  Description of Artificial Sequence: Synthetic oligonucleotide
ugccucaggcauugauuuc

SEQ ID NO: 1734603 - RNA, 19 nt, Artificial Sequence
  Description of Artificial Sequence: Synthetic oligonucleotide
gacagaguccauuguguuu

SEQ ID NO: 1734604 - RNA, 19 nt, Artificial Sequence
  Description of Artificial Sequence: Synthetic oligonucleotide
gcuggcaacccaccaguug

SEQ ID NO: 1734605 - RNA, 19 nt, Artificial Sequence
  Description of Artificial Sequence: Synthetic oligonucleotide
ugcgggcucggaaggccug

SEQ ID NO: 1734606 - RNA, 19 nt, Artificial Sequence
  Description of Artificial Sequence: Synthetic oligonucleotide
gcuggaguaagcucugucu

SEQ ID NO: 1734607 - RNA, 19 nt, Artificial Sequence
  Description of Artificial Sequence: Synthetic oligonucleotide
agccccagguggcaugcca

SEQ ID NO: 1734608 - RNA, 19 nt, Artificial Sequence
  Description of Artificial Sequence: Synthetic oligonucleotide
uccugaguucggccguuua

SEQ ID NO: 1734609 - RNA, 19 nt, Artificial Sequence
  Description of Artificial Sequence: Synthetic oligonucleotide
ccuucuggucaccuaggag

SEQ ID NO: 1734610 - RNA, 19 nt, Artificial Sequence
  Description of Artificial Sequence: Synthetic oligonucleotide
accuaggagcuugccaacu

SEQ ID NO: 1734611 - RNA, 19 nt, Artificial Sequence
  Description of Artificial Sequence: Synthetic oligonucleotide
ugucuucccuucagugguu

SEQ ID NO: 1734612 - RNA, 19 nt, Artificial Sequence
  Description of Artificial Sequence: Synthetic oligonucleotide
gagcccagcgcgccccugc

SEQ ID NO: 1734613 - RNA, 19 nt, Artificial Sequence
  Description of Artificial Sequence: Synthetic oligonucleotide
ugguuaccaccuggauuag

SEQ ID NO: 1734614 - RNA, 19 nt, Artificial Sequence
  Description of Artificial Sequence: Synthetic oligonucleotide
uaccuccuagggcccucag

SEQ ID NO: 1734615 - RNA, 19 nt, Artificial Sequence
  Description of Artificial Sequence: Synthetic oligonucleotide
gacuuggacuuggcauugc

SEQ ID NO: 1734616 - RNA, 19 nt, Artificial Sequence
  Description of Artificial Sequence: Synthetic oligonucleotide
guaaccgggagcacagcaa

SEQ ID NO: 1734617 - RNA, 19 nt, Artificial Sequence
  Description of Artificial Sequence: Synthetic oligonucleotide
gguuaccucauaccagaaa

SEQ ID NO: 1734618 - RNA, 19 nt, Artificial Sequence
  Description of Artificial Sequence: Synthetic oligonucleotide
agcuuuggccccagccagg

SEQ ID NO: 1734619 - RNA, 19 nt, Artificial Sequence
  Description of Artificial Sequence: Synthetic oligonucleotide
gagacaaacaggacugguu

SEQ ID NO: 1734620 - RNA, 19 nt, Artificial Sequence
  Description of Artificial Sequence: Synthetic oligonucleotide
guacacagcgcgagcccag

SEQ ID NO: 1734621 - RNA, 19 nt, Artificial Sequence
  Description of Artificial Sequence: Synthetic oligonucleotide
uggcacuggccucuucauu

SEQ ID NO: 1734622 - RNA, 19 nt, Artificial Sequence
  Description of Artificial Sequence: Synthetic oligonucleotide
guaagcucugucuucccuu

SEQ ID NO: 1734623 - RNA, 19 nt, Artificial Sequence
  Description of Artificial Sequence: Synthetic oligonucleotide
aggugcuuuguggcuaagu

SEQ ID NO: 1734624 - RNA, 19 nt, Artificial Sequence
  Description of Artificial Sequence: Synthetic oligonucleotide
cacaucaggucacaguuuu

SEQ ID NO: 1734625 - RNA, 19 nt, Artificial Sequence
  Description of Artificial Sequence: Synthetic oligonucleotide
cacagagaaucgcguccac

SEQ ID NO: 1734626 - RNA, 19 nt, Artificial Sequence
  Description of Artificial Sequence: Synthetic oligonucleotide
ccgccguacaccagcaccc

SEQ ID NO: 1734627 - RNA, 19 nt, Artificial Sequence
  Description of Artificial Sequence: Synthetic oligonucleotide
gaucaucccaggaguccca

SEQ ID NO: 1734628 - RNA, 19 nt, Artificial Sequence
  Description of Artificial Sequence: Synthetic oligonucleotide
gaaucgcguccaccuucug

SEQ ID NO: 1734629 - RNA, 19 nt, Artificial Sequence
  Description of Artificial Sequence: Synthetic oligonucleotide
ccaacuucagcagugaccu

SEQ ID NO: 1734630 - RNA, 19 nt, Artificial Sequence
  Description of Artificial Sequence: Synthetic oligonucleotide
ggauuaggcuuccugaguu

SEQ ID NO: 1734631 - RNA, 19 nt, Artificial Sequence
  Description of Artificial Sequence: Synthetic oligonucleotide
caggguaaccgggagcaca

SEQ ID NO: 1734632 - RNA, 19 nt, Artificial Sequence
  Description of Artificial Sequence: Synthetic oligonucleotide
cuauggcaccaacauggaa

SEQ ID NO: 1734633 - RNA, 19 nt, Artificial Sequence
  Description of Artificial Sequence: Synthetic oligonucleotide
caucgaugcuggcaaccca

SEQ ID NO: 1734634 - RNA, 19 nt, Artificial Sequence
  Description of Artificial Sequence: Synthetic oligonucleotide
agugaccuggucagccugu

SEQ ID NO: 1734635 - RNA, 19 nt, Artificial Sequence
  Description of Artificial Sequence: Synthetic oligonucleotide
ucggaguauccaggguaac

SEQ ID NO: 1734636 - RNA, 19 nt, Artificial Sequence
  Description of Artificial Sequence: Synthetic oligonucleotide
ggcuaaguggcuggagaug

SEQ ID NO: 1734637 - RNA, 19 nt, Artificial Sequence
  Description of Artificial Sequence: Synthetic oligonucleotide
ccuguucaucggaguaucc

SEQ ID NO: 1734638 - RNA, 19 nt, Artificial Sequence
  Description of Artificial Sequence: Synthetic oligonucleotide
cuaccuacaggucucucuu

SEQ ID NO: 1734639 - RNA, 19 nt, Artificial Sequence
  Description of Artificial Sequence: Synthetic oligonucleotide
ccguuuauucccagugauc

SEQ ID NO: 1734640 - RNA, 19 nt, Artificial Sequence
  Description of Artificial Sequence: Synthetic oligonucleotide
cucggaaggccuguacaca

SEQ ID NO: 1734641 - RNA, 19 nt, Artificial Sequence
  Description of Artificial Sequence: Synthetic oligonucleotide
uagggcccucagcacugac

SEQ ID NO: 1734642 - RNA, 19 nt, Artificial Sequence
  Description of Artificial Sequence: Synthetic oligonucleotide
ggccuguacacagcgcgag

SEQ ID NO: 1734643 - RNA, 19 nt, Artificial Sequence
  Description of Artificial Sequence: Synthetic oligonucleotide
gccacuguucuuuccugca

SEQ ID NO: 1734644 - RNA, 19 nt, Artificial Sequence
  Description of Artificial Sequence: Synthetic oligonucleotide
gucaagaggccuccuuccu

SEQ ID NO: 1734645 - RNA, 19 nt, Artificial Sequence
  Description of Artificial Sequence: Synthetic oligonucleotide
acccuuggccaugccguag

SEQ ID NO: 1734646 - RNA, 19 nt, Artificial Sequence
  Description of Artificial Sequence: Synthetic oligonucleotide
ggaagguuucaaccaggaa

SEQ ID NO: 1734647 - RNA, 19 nt, Artificial Sequence
  Description of Artificial Sequence: Synthetic oligonucleotide
caacuucagcagugaccug

SEQ ID NO: 1734648 - RNA, 19 nt, Artificial Sequence
  Description of Artificial Sequence: Synthetic oligonucleotide
ggcaacccaccaguugcgg

SEQ ID NO: 1734649 - RNA, 19 nt, Artificial Sequence
  Description of Artificial Sequence: Synthetic oligonucleotide
agcugauggacggcacccu

SEQ ID NO: 1734650 - RNA, 19 nt, Artificial Sequence
  Description of Artificial Sequence: Synthetic oligonucleotide
ggccguuuauucccaguga

SEQ ID NO: 1734651 - RNA, 19 nt, Artificial Sequence
  Description of Artificial Sequence: Synthetic oligonucleotide
ccugcucuugacaggcuuc

SEQ ID NO: 1734652 - RNA, 19 nt, Artificial Sequence
  Description of Artificial Sequence: Synthetic oligonucleotide
agguggcaugccacuguuc

SEQ ID NO: 1734653 - RNA, 19 nt, Artificial Sequence
  Description of Artificial Sequence: Synthetic oligonucleotide
ggccaaaugugaccacaca

SEQ ID NO: 1734654 - RNA, 19 nt, Artificial Sequence
  Description of Artificial Sequence: Synthetic oligonucleotide
ccguagccgaucaucccag

SEQ ID NO: 1734655 - RNA, 19 nt, Artificial Sequence
  Description of Artificial Sequence: Synthetic oligonucleotide
ccgaucaucccaggagucc

SEQ ID NO: 1734656 - RNA, 19 nt, Artificial Sequence
  Description of Artificial Sequence: Synthetic oligonucleotide
cacuuaaccuaggcaggca

SEQ ID NO: 1734657 - RNA, 19 nt, Artificial Sequence
  Description of Artificial Sequence: Synthetic oligonucleotide
ucgcguccaccuucugguc

SEQ ID NO: 1734658 - RNA, 19 nt, Artificial Sequence
  Description of Artificial Sequence: Synthetic oligonucleotide
acaggacugguuaccucau

SEQ ID NO: 1734659 - RNA, 19 nt, Artificial Sequence
  Description of Artificial Sequence: Synthetic oligonucleotide
cgaucaucccaggaguccc

SEQ ID NO: 1734660 - RNA, 19 nt, Artificial Sequence
  Description of Artificial Sequence: Synthetic oligonucleotide
ccuaggcaggcacacaaaa

SEQ ID NO: 1734661 - RNA, 19 nt, Artificial Sequence
  Description of Artificial Sequence: Synthetic oligonucleotide
uggccaugccguagccgau

SEQ ID NO: 1734662 - RNA, 19 nt, Artificial Sequence
  Description of Artificial Sequence: Synthetic oligonucleotide
auaccuccuagggcccuca

SEQ ID NO: 1734663 - RNA, 19 nt, Artificial Sequence
  Description of Artificial Sequence: Synthetic oligonucleotide
gguuucaaccaggaacucu

SEQ ID NO: 1734664 - RNA, 19 nt, Artificial Sequence
  Description of Artificial Sequence: Synthetic oligonucleotide
ugcuaccuacaggucucuc

SEQ ID NO: 1734665 - RNA, 19 nt, Artificial Sequence
  Description of Artificial Sequence: Synthetic oligonucleotide
cauaccuccuagggcccuc

SEQ ID NO: 1734666 - RNA, 19 nt, Artificial Sequence
  Description of Artificial Sequence: Synthetic oligonucleotide
caggcacacaaaagaacau

SEQ ID NO: 1734667 - RNA, 19 nt, Artificial Sequence
  Description of Artificial Sequence: Synthetic oligonucleotide
cuggucagccuguuccgua

SEQ ID NO: 1734668 - RNA, 19 nt, Artificial Sequence
  Description of Artificial Sequence: Synthetic oligonucleotide
gccuguacacagcgcgagc

SEQ ID NO: 1734669 - RNA, 19 nt, Artificial Sequence
  Description of Artificial Sequence: Synthetic oligonucleotide
cgcaaguaagagacaaaca

SEQ ID NO: 1734670 - RNA, 19 nt, Artificial Sequence
  Description of Artificial Sequence: Synthetic oligonucleotide
ccuacaggucucucuucuc

SEQ ID NO: 1734671 - RNA, 19 nt, Artificial Sequence
  Description of Artificial Sequence: Synthetic oligonucleotide
cggaguauccaggguaacc

SEQ ID NO: 1734672 - RNA, 19 nt, Artificial Sequence
  Description of Artificial Sequence: Synthetic oligonucleotide
aggccuguacacagcgcga

SEQ ID NO: 1734673 - RNA, 19 nt, Artificial Sequence
  Description of Artificial Sequence: Synthetic oligonucleotide
aggguguccaagagcugaa

SEQ ID NO: 1734674 - RNA, 19 nt, Artificial Sequence
  Description of Artificial Sequence: Synthetic oligonucleotide
guucggccguuuauuccca

SEQ ID NO: 1734675 - RNA, 19 nt, Artificial Sequence
  Description of Artificial Sequence: Synthetic oligonucleotide
gccuguuccguaaaugagu

SEQ ID NO: 1734676 - RNA, 19 nt, Artificial Sequence
  Description of Artificial Sequence: Synthetic oligonucleotide
aagccgccauccugcucuu

SEQ ID NO: 1734677 - RNA, 19 nt, Artificial Sequence
  Description of Artificial Sequence: Synthetic oligonucleotide
ggaacgcaaguaagagaca

SEQ ID NO: 1734678 - RNA, 19 nt, Artificial Sequence
  Description of Artificial Sequence: Synthetic oligonucleotide
ccccaaaugccaacaaaua

SEQ ID NO: 1734679 - RNA, 19 nt, Artificial Sequence
  Description of Artificial Sequence: Synthetic oligonucleotide
accuaggcaggcacacaaa

SEQ ID NO: 1734680 - RNA, 19 nt, Artificial Sequence
  Description of Artificial Sequence: Synthetic oligonucleotide
cuguuccguaaaugagucu

SEQ ID NO: 1734681 - RNA, 19 nt, Artificial Sequence
  Description of Artificial Sequence: Synthetic oligonucleotide
ggucaccuaggagcuugcc

SEQ ID NO: 1734682 - RNA, 19 nt, Artificial Sequence
  Description of Artificial Sequence: Synthetic oligonucleotide
cugaguucggccguuuauu

SEQ ID NO: 1734683 - RNA, 19 nt, Artificial Sequence
  Description of Artificial Sequence: Synthetic oligonucleotide
ccagucauggaagguuuca

SEQ ID NO: 1734684 - RNA, 19 nt, Artificial Sequence
  Description of Artificial Sequence: Synthetic oligonucleotide
gcacugacagugcuaccua

SEQ ID NO: 1734685 - RNA, 19 nt, Artificial Sequence
  Description of Artificial Sequence: Synthetic oligonucleotide
aggcuucccgcgguacgga

SEQ ID NO: 1734686 - RNA, 19 nt, Artificial Sequence
  Description of Artificial Sequence: Synthetic oligonucleotide
cggaaggccuguacacagc

SEQ ID NO: 1734687 - RNA, 19 nt, Artificial Sequence
  Description of Artificial Sequence: Synthetic oligonucleotide
caaagcaauccaggaugcu

SEQ ID NO: 1734688 - RNA, 19 nt, Artificial Sequence
  Description of Artificial Sequence: Synthetic oligonucleotide
uuccugaguucggccguuu

SEQ ID NO: 1734689 - RNA, 19 nt, Artificial Sequence
  Description of Artificial Sequence: Synthetic oligonucleotide
cccaccaguugcgggcucg

SEQ ID NO: 1734690 - RNA, 19 nt, Artificial Sequence
  Description of Artificial Sequence: Synthetic oligonucleotide
gggcucggaaggccuguac

SEQ ID NO: 1734691 - RNA, 19 nt, Artificial Sequence
  Description of Artificial Sequence: Synthetic oligonucleotide
ggcggcagccccagguggc

SEQ ID NO: 1734692 - RNA, 19 nt, Artificial Sequence
  Description of Artificial Sequence: Synthetic oligonucleotide
ccccgaagccgccauccug

SEQ ID NO: 1734693 - RNA, 19 nt, Artificial Sequence
  Description of Artificial Sequence: Synthetic oligonucleotide
caggugcuuuguggcuaag

SEQ ID NO: 1734694 - RNA, 19 nt, Artificial Sequence
  Description of Artificial Sequence: Synthetic oligonucleotide
gccgaucaucccaggaguc

SEQ ID NO: 1734695 - RNA, 19 nt, Artificial Sequence
  Description of Artificial Sequence: Synthetic oligonucleotide
gcuucccgcgguacggaac

SEQ ID NO: 1734696 - RNA, 19 nt, Artificial Sequence
  Description of Artificial Sequence: Synthetic oligonucleotide
ggucagccuguuccguaaa

SEQ ID NO: 1734697 - RNA, 19 nt, Artificial Sequence
  Description of Artificial Sequence: Synthetic oligonucleotide
ccaauacucacaagugguu

SEQ ID NO: 1734698 - RNA, 19 nt, Artificial Sequence
  Description of Artificial Sequence: Synthetic oligonucleotide
gccacacagagaaucgcgu

SEQ ID NO: 1734699 - RNA, 19 nt, Artificial Sequence
  Description of Artificial Sequence: Synthetic oligonucleotide
ccaccuggauuaggcuucc

SEQ ID NO: 1734700 - RNA, 19 nt, Artificial Sequence
  Description of Artificial Sequence: Synthetic oligonucleotide
gggagggcucucccaggca

SEQ ID NO: 1734701 - RNA, 19 nt, Artificial Sequence
  Description of Artificial Sequence: Synthetic oligonucleotide
ggccaugccguagccgauc

SEQ ID NO: 1734702 - RNA, 19 nt, Artificial Sequence
  Description of Artificial Sequence: Synthetic oligonucleotide
ggguaaccgggagcacagc

SEQ ID NO: 1734703 - RNA, 19 nt, Artificial Sequence
  Description of Artificial Sequence: Synthetic oligonucleotide
ccaccaguugcgggcucgg

SEQ ID NO: 1734704 - RNA, 19 nt, Artificial Sequence
  Description of Artificial Sequence: Synthetic oligonucleotide
cacugagaugaggcuuaaa

SEQ ID NO: 1734705 - RNA, 19 nt, Artificial Sequence
  Description of Artificial Sequence: Synthetic oligonucleotide
agucugccucaggcauuga

SEQ ID NO: 1734706 - RNA, 19 nt, Artificial Sequence
  Description of Artificial Sequence: Synthetic oligonucleotide
cagguggcaugccacuguu

SEQ ID NO: 1734707 - RNA, 19 nt, Artificial Sequence
  Description of Artificial Sequence: Synthetic oligonucleotide
ggcuucccgcgguacggaa

SEQ ID NO: 1734708 - RNA, 19 nt, Artificial Sequence
  Description of Artificial Sequence: Synthetic oligonucleotide
gcugauggacggcacccuu

SEQ ID NO: 1734709 - RNA, 19 nt, Artificial Sequence
  Description of Artificial Sequence: Synthetic oligonucleotide
caccaguugcgggcucgga

SEQ ID NO: 1734710 - RNA, 19 nt, Artificial Sequence
  Description of Artificial Sequence: Synthetic oligonucleotide
cgccguacaccagcacccg

SEQ ID NO: 1734711 - RNA, 19 nt, Artificial Sequence
  Description of Artificial Sequence: Synthetic oligonucleotide
ccucaggcauugauuuccu

SEQ ID NO: 1734712 - RNA, 19 nt, Artificial Sequence
  Description of Artificial Sequence: Synthetic oligonucleotide
gcucucccaggcacugaga

SEQ ID NO: 1734713 - RNA, 19 nt, Artificial Sequence
  Description of Artificial Sequence: Synthetic oligonucleotide
ccaggguaaccgggagcac

SEQ ID NO: 1734714 - RNA, 19 nt, Artificial Sequence
  Description of Artificial Sequence: Synthetic oligonucleotide
gcacugagaugaggcuuaa

SEQ ID NO: 1734715 - RNA, 19 nt, Artificial Sequence
  Description of Artificial Sequence: Synthetic oligonucleotide
ccuaggagcuugccaacuu

SEQ ID NO: 1734716 - RNA, 19 nt, Artificial Sequence
  Description of Artificial Sequence: Synthetic oligonucleotide
ggccccagccagggucaag

SEQ ID NO: 1734717 - RNA, 19 nt, Artificial Sequence
  Description of Artificial Sequence: Synthetic oligonucleotide
ccacaucaggucacaguuu

SEQ ID NO: 1734718 - RNA, 19 nt, Artificial Sequence
  Description of Artificial Sequence: Synthetic oligonucleotide
ggacggcacccuuggccau

SEQ ID NO: 1734719 - RNA, 19 nt, Artificial Sequence
  Description of Artificial Sequence: Synthetic oligonucleotide
cagggucaagaggccuccu

SEQ ID NO: 1734720 - RNA, 19 nt, Artificial Sequence
  Description of Artificial Sequence: Synthetic oligonucleotide
cgcgccccugccgccguac

SEQ ID NO: 1734721 - RNA, 19 nt, Artificial Sequence
  Description of Artificial Sequence: Synthetic oligonucleotide
gcgcgccccugccgccgua

SEQ ID NO: 1734722 - RNA, 19 nt, Artificial Sequence
  Description of Artificial Sequence: Synthetic oligonucleotide
cgggcucggaaggccugua

SEQ ID NO: 1734723 - RNA, 19 nt, Artificial Sequence
  Description of Artificial Sequence: Synthetic oligonucleotide
aauucuggcauccauggac

SEQ ID NO: 1734724 - RNA, 19 nt, Artificial Sequence
  Description of Artificial Sequence: Synthetic oligonucleotide
auacacauuacaucuaucc

SEQ ID NO: 1734725 - RNA, 19 nt, Artificial Sequence
  Description of Artificial Sequence: Synthetic oligonucleotide
aaguuaguuauauuuacuc

SEQ ID NO: 1734726 - RNA, 19 nt, Artificial Sequence
  Description of Artificial Sequence: Synthetic oligonucleotide
uaaaugaugaggcugggag

SEQ ID NO: 1734727 - RNA, 19 nt, Artificial Sequence
  Description of Artificial Sequence: Synthetic oligonucleotide
aaauuuacaugaugguugg

SEQ ID NO: 1734728 - RNA, 19 nt, Artificial Sequence
  Description of Artificial Sequence: Synthetic oligonucleotide
auauacuaaaugaugaggc

SEQ ID NO: 1734729 - RNA, 19 nt, Artificial Sequence
  Description of Artificial Sequence: Synthetic oligonucleotide
aaaacauuagcacagggua

SEQ ID NO: 1734730 - RNA, 19 nt, Artificial Sequence
  Description of Artificial Sequence: Synthetic oligonucleotide
aacuacagagcuugggagc

SEQ ID NO: 1734731 - RNA, 19 nt, Artificial Sequence
  Description of Artificial Sequence: Synthetic oligonucleotide
guuaguuauauuuacucag

SEQ ID NO: 1734732 - RNA, 19 nt, Artificial Sequence
  Description of Artificial Sequence: Synthetic oligonucleotide
uacuaaaugaugaggcugg

SEQ ID NO: 1734733 - RNA, 19 nt, Artificial Sequence
  Description of Artificial Sequence: Synthetic oligonucleotide
guuauauuuacucagcuga

SEQ ID NO: 1734734 - RNA, 19 nt, Artificial Sequence
  Description of Artificial Sequence: Synthetic oligonucleotide
uuuauuagaagcauauuua

SEQ ID NO: 1734735 - RNA, 19 nt, Artificial Sequence
  Description of Artificial Sequence: Synthetic oligonucleotide
ugacauacacauuacaucu

SEQ ID NO: 1734736 - RNA, 19 nt, Artificial Sequence
  Description of Artificial Sequence: Synthetic oligonucleotide
ugaauucuggcauccaugg

SEQ ID NO: 1734737 - RNA, 19 nt, Artificial Sequence
  Description of Artificial Sequence: Synthetic oligonucleotide
aaaccuucgaguccgcuuc

SEQ ID NO: 1734738 - RNA, 19 nt, Artificial Sequence
  Description of Artificial Sequence: Synthetic oligonucleotide
augacauacacauuacauc

SEQ ID NO: 1734739 - RNA, 19 nt, Artificial Sequence
  Description of Artificial Sequence: Synthetic oligonucleotide
acaucuauccuucaugaag

SEQ ID NO: 1734740 - RNA, 19 nt, Artificial Sequence
  Description of Artificial Sequence: Synthetic oligonucleotide
auuagcacaggguacgagg

SEQ ID NO: 1734741 - RNA, 19 nt, Artificial Sequence
  Description of Artificial Sequence: Synthetic oligonucleotide
uuauuagaagcauauuuac

SEQ ID NO: 1734742 - RNA, 19 nt, Artificial Sequence
  Description of Artificial Sequence: Synthetic oligonucleotide
uuaguuauauuuacucagc

SEQ ID NO: 1734743 - RNA, 19 nt, Artificial Sequence
  Description of Artificial Sequence: Synthetic oligonucleotide
uguacagugggacuccagg

SEQ ID NO: 1734744 - RNA, 19 nt, Artificial Sequence
  Description of Artificial Sequence: Synthetic oligonucleotide
caucuauccuucaugaagg

SEQ ID NO: 1734745 - RNA, 19 nt, Artificial Sequence
  Description of Artificial Sequence: Synthetic oligonucleotide
aacauuagcacaggguacg

SEQ ID NO: 1734746 - RNA, 19 nt, Artificial Sequence
  Description of Artificial Sequence: Synthetic oligonucleotide
uugcacauauacuaaauga

SEQ ID NO: 1734747 - RNA, 19 nt, Artificial Sequence
  Description of Artificial Sequence: Synthetic oligonucleotide
uguguguacaccauccacc

SEQ ID NO: 1734748 - RNA, 19 nt, Artificial Sequence
  Description of Artificial Sequence: Synthetic oligonucleotide
gaaccuguagacaaguggg

SEQ ID NO: 1734749 - RNA, 19 nt, Artificial Sequence
  Description of Artificial Sequence: Synthetic oligonucleotide
uaccuuguuauuuuauuag

SEQ ID NO: 1734750 - RNA, 19 nt, Artificial Sequence
  Description of Artificial Sequence: Synthetic oligonucleotide
uauuagaagcauauuuaca

SEQ ID NO: 1734751 - RNA, 19 nt, Artificial Sequence
  Description of Artificial Sequence: Synthetic oligonucleotide
uugcaaauuaccuuguuau

SEQ ID NO: 1734752 - RNA, 19 nt, Artificial Sequence
  Description of Artificial Sequence: Synthetic oligonucleotide
uugagagacagugagcccg

SEQ ID NO: 1734753 - RNA, 19 nt, Artificial Sequence
  Description of Artificial Sequence: Synthetic oligonucleotide
uuacaucuauccuucauga

SEQ ID NO: 1734754 - RNA, 19 nt, Artificial Sequence
  Description of Artificial Sequence: Synthetic oligonucleotide
acauauacuaaaugaugag

SEQ ID NO: 1734755 - RNA, 19 nt, Artificial Sequence
  Description of Artificial Sequence: Synthetic oligonucleotide
aaugacauacacauuacau

SEQ ID NO: 1734756 - RNA, 19 nt, Artificial Sequence
  Description of Artificial Sequence: Synthetic oligonucleotide
aaaugacauacacauuaca

SEQ ID NO: 1734757 - RNA, 19 nt, Artificial Sequence
  Description of Artificial Sequence: Synthetic oligonucleotide
aguuaguuauauuuacuca

SEQ ID NO: 1734758 - RNA, 19 nt, Artificial Sequence
  Description of Artificial Sequence: Synthetic oligonucleotide
ugcacauauacuaaaugau

SEQ ID NO: 1734759 - RNA, 19 nt, Artificial Sequence
  Description of Artificial Sequence: Synthetic oligonucleotide
uaaguuaguuauauuuacu

SEQ ID NO: 1734760 - RNA, 19 nt, Artificial Sequence
  Description of Artificial Sequence: Synthetic oligonucleotide
auugcacauauacuaaaug

SEQ ID NO: 1734761 - RNA, 19 nt, Artificial Sequence
  Description of Artificial Sequence: Synthetic oligonucleotide
gaacuacagagcuugggag

SEQ ID NO: 1734762 - RNA, 19 nt, Artificial Sequence
  Description of Artificial Sequence: Synthetic oligonucleotide
uauacuaaaugaugaggcu

SEQ ID NO: 1734763 - RNA, 19 nt, Artificial Sequence
  Description of Artificial Sequence: Synthetic oligonucleotide
acagaaaacauuagcacag

SEQ ID NO: 1734764 - RNA, 19 nt, Artificial Sequence
  Description of Artificial Sequence: Synthetic oligonucleotide
accacaaaccuucgagucc

SEQ ID NO: 1734765 - RNA, 19 nt, Artificial Sequence
  Description of Artificial Sequence: Synthetic oligonucleotide
ucggcuaccugaauucugg

SEQ ID NO: 1734766 - RNA, 19 nt, Artificial Sequence
  Description of Artificial Sequence: Synthetic oligonucleotide
uccagggcgacacuguuag

SEQ ID NO: 1734767 - RNA, 19 nt, Artificial Sequence
  Description of Artificial Sequence: Synthetic oligonucleotide
uuuaccccugaacacagga

SEQ ID NO: 1734768 - RNA, 19 nt, Artificial Sequence
  Description of Artificial Sequence: Synthetic oligonucleotide
ggaagcauucuucaggagg

SEQ ID NO: 1734769 - RNA, 19 nt, Artificial Sequence
  Description of Artificial Sequence: Synthetic oligonucleotide
uacacauuacaucuauccu

SEQ ID NO: 1734770 - RNA, 19 nt, Artificial Sequence
  Description of Artificial Sequence: Synthetic oligonucleotide
uuugcaaauuaccuuguua

SEQ ID NO: 1734771 - RNA, 19 nt, Artificial Sequence
  Description of Artificial Sequence: Synthetic oligonucleotide
aggcuugaaauguacagug

SEQ ID NO: 1734772 - RNA, 19 nt, Artificial Sequence
  Description of Artificial Sequence: Synthetic oligonucleotide
gaucccuugagagacagug

SEQ ID NO: 1734773 - RNA, 19 nt, Artificial Sequence
  Description of Artificial Sequence: Synthetic oligonucleotide
uuugcagagaccaguuuac

SEQ ID NO: 1734774 - RNA, 19 nt, Artificial Sequence
  Description of Artificial Sequence: Synthetic oligonucleotide
cuucgaguccgcuucaggg

SEQ ID NO: 1734775 - RNA, 19 nt, Artificial Sequence
  Description of Artificial Sequence: Synthetic oligonucleotide
aauauaaguuaguuauauu

SEQ ID NO: 1734776 - RNA, 19 nt, Artificial Sequence
  Description of Artificial Sequence: Synthetic oligonucleotide
uacugcgugggccuugucg

SEQ ID NO: 1734777 - RNA, 19 nt, Artificial Sequence
  Description of Artificial Sequence: Synthetic oligonucleotide
aaaugaugaggcugggaga

SEQ ID NO: 1734778 - RNA, 19 nt, Artificial Sequence
  Description of Artificial Sequence: Synthetic oligonucleotide
acagguaccuuugagucac

SEQ ID NO: 1734779 - RNA, 19 nt, Artificial Sequence
  Description of Artificial Sequence: Synthetic oligonucleotide
uguaugugcagugugugug

SEQ ID NO: 1734780 - RNA, 19 nt, Artificial Sequence
  Description of Artificial Sequence: Synthetic oligonucleotide
augaguugcaggcuggcag

SEQ ID NO: 1734781 - RNA, 19 nt, Artificial Sequence
  Description of Artificial Sequence: Synthetic oligonucleotide
caggguacgaggaauacug

SEQ ID NO: 1734782 - RNA, 19 nt, Artificial Sequence
  Description of Artificial Sequence: Synthetic oligonucleotide
acugcgugggccuugucgg

SEQ ID NO: 1734783 - RNA, 19 nt, Artificial Sequence
  Description of Artificial Sequence: Synthetic oligonucleotide
aaaugaguugcaggcuggc

SEQ ID NO: 1734784 - RNA, 19 nt, Artificial Sequence
  Description of Artificial Sequence: Synthetic oligonucleotide
uguguguguguguacacca

SEQ ID NO: 1734785 - RNA, 19 nt, Artificial Sequence
  Description of Artificial Sequence: Synthetic oligonucleotide
aagcccucuuagcauggcc

SEQ ID NO: 1734786 - RNA, 19 nt, Artificial Sequence
  Description of Artificial Sequence: Synthetic oligonucleotide
auacuaaaugaugaggcug

SEQ ID NO: 1734787 - RNA, 19 nt, Artificial Sequence
  Description of Artificial Sequence: Synthetic oligonucleotide
gacaggucggcagacaggg

SEQ ID NO: 1734788 - RNA, 19 nt, Artificial Sequence
  Description of Artificial Sequence: Synthetic oligonucleotide
uccggagggaaacagguac

SEQ ID NO: 1734789 - RNA, 19 nt, Artificial Sequence
  Description of Artificial Sequence: Synthetic oligonucleotide
ugucccuauacagaaaaca

SEQ ID NO: 1734790 - RNA, 19 nt, Artificial Sequence
  Description of Artificial Sequence: Synthetic oligonucleotide
cacauuacaucuauccuuc

SEQ ID NO: 1734791 - RNA, 19 nt, Artificial Sequence
  Description of Artificial Sequence: Synthetic oligonucleotide
uuagcacaggguacgagga

SEQ ID NO: 1734792 - RNA, 19 nt, Artificial Sequence
  Description of Artificial Sequence: Synthetic oligonucleotide
ggaaccuguagacaagugg

SEQ ID NO: 1734793 - RNA, 19 nt, Artificial Sequence
  Description of Artificial Sequence: Synthetic oligonucleotide
uuuguuugcagagaccagu

SEQ ID NO: 1734794 - RNA, 19 nt, Artificial Sequence
  Description of Artificial Sequence: Synthetic oligonucleotide
uuaccuuguuauuuuauua

SEQ ID NO: 1734795 - RNA, 19 nt, Artificial Sequence
  Description of Artificial Sequence: Synthetic oligonucleotide
uacucaguggcccaggaua

SEQ ID NO: 1734796 - RNA, 19 nt, Artificial Sequence
  Description of Artificial Sequence: Synthetic oligonucleotide
uccauguaugugcagugug

SEQ ID NO: 1734797 - RNA, 19 nt, Artificial Sequence
  Description of Artificial Sequence: Synthetic oligonucleotide
acacauuacaucuauccuu

SEQ ID NO: 1734798 - RNA, 19 nt, Artificial Sequence
  Description of Artificial Sequence: Synthetic oligonucleotide
gaaauguacagugggacuc

SEQ ID NO: 1734799 - RNA, 19 nt, Artificial Sequence
  Description of Artificial Sequence: Synthetic oligonucleotide
aggauaaggcucaggaggc

SEQ ID NO: 1734800 - RNA, 19 nt, Artificial Sequence
  Description of Artificial Sequence: Synthetic oligonucleotide
guaccuuugagucacuguc

SEQ ID NO: 1734801 - RNA, 19 nt, Artificial Sequence
  Description of Artificial Sequence: Synthetic oligonucleotide
cuauccuucaugaagggaa

SEQ ID NO: 1734802 - RNA, 19 nt, Artificial Sequence
  Description of Artificial Sequence: Synthetic oligonucleotide
uuguucagugacaggucgg

SEQ ID NO: 1734803 - RNA, 19 nt, Artificial Sequence
  Description of Artificial Sequence: Synthetic oligonucleotide
uuacaugaugguuggaaau

SEQ ID NO: 1734804 - RNA, 19 nt, Artificial Sequence
  Description of Artificial Sequence: Synthetic oligonucleotide
aggcauugcacauauacua

SEQ ID NO: 1734805 - RNA, 19 nt, Artificial Sequence
  Description of Artificial Sequence: Synthetic oligonucleotide
acagggaggagccguaguc

SEQ ID NO: 1734806 - RNA, 19 nt, Artificial Sequence
  Description of Artificial Sequence: Synthetic oligonucleotide
uuguugugcaguuuugauc

SEQ ID NO: 1734807 - RNA, 19 nt, Artificial Sequence
  Description of Artificial Sequence: Synthetic oligonucleotide
agggcgacacuguuagggc

SEQ ID NO: 1734808 - RNA, 19 nt, Artificial Sequence
  Description of Artificial Sequence: Synthetic oligonucleotide
ugugcggccaaaugaguug

SEQ ID NO: 1734809 - RNA, 19 nt, Artificial Sequence
  Description of Artificial Sequence: Synthetic oligonucleotide
ucuucggcuaccugaauuc

SEQ ID NO: 1734810 - RNA, 19 nt, Artificial Sequence
  Description of Artificial Sequence: Synthetic oligonucleotide
aaauuaccuuguuauuuua

SEQ ID NO: 1734811 - RNA, 19 nt, Artificial Sequence
  Description of Artificial Sequence: Synthetic oligonucleotide
gagacagugagcccguuuc

SEQ ID NO: 1734812 - RNA, 19 nt, Artificial Sequence
  Description of Artificial Sequence: Synthetic oligonucleotide
aauggucgggacuuccgga

SEQ ID NO: 1734813 - RNA, 19 nt, Artificial Sequence
  Description of Artificial Sequence: Synthetic oligonucleotide
auuuacaugaugguuggaa

SEQ ID NO: 1734814 - RNA, 19 nt, Artificial Sequence
  Description of Artificial Sequence: Synthetic oligonucleotide
accuuguuauuuuauuaga

SEQ ID NO: 1734815 - RNA, 19 nt, Artificial Sequence
  Description of Artificial Sequence: Synthetic oligonucleotide
uacagugggacuccaggac

SEQ ID NO: 1734816 - RNA, 19 nt, Artificial Sequence
  Description of Artificial Sequence: Synthetic oligonucleotide
cugguuugccuuuugggac

SEQ ID NO: 1734817 - RNA, 19 nt, Artificial Sequence
  Description of Artificial Sequence: Synthetic oligonucleotide
uaccccugaacacaggauc

SEQ ID NO: 1734818 - RNA, 19 nt, Artificial Sequence
  Description of Artificial Sequence: Synthetic oligonucleotide
acuaggcuagaccccacuc

SEQ ID NO: 1734819 - RNA, 19 nt, Artificial Sequence
  Description of Artificial Sequence: Synthetic oligonucleotide
uuagaagcauauuuacauu

SEQ ID NO: 1734820 - RNA, 19 nt, Artificial Sequence
  Description of Artificial Sequence: Synthetic oligonucleotide
gcagguuccauguaugugc

SEQ ID NO: 1734821 - RNA, 19 nt, Artificial Sequence
  Description of Artificial Sequence: Synthetic oligonucleotide
aucuauccuucaugaaggg

SEQ ID NO: 1734822 - RNA, 19 nt, Artificial Sequence
  Description of Artificial Sequence: Synthetic oligonucleotide
uacgaggaauacugcgugg

SEQ ID NO: 1734823 - RNA, 19 nt, Artificial Sequence
  Description of Artificial Sequence: Synthetic oligonucleotide
caaaggacaacagccuucc

SEQ ID NO: 1734824 - RNA, 19 nt, Artificial Sequence
  Description of Artificial Sequence: Synthetic oligonucleotide
ugugcagugugugugugug

SEQ ID NO: 1734825 - RNA, 19 nt, Artificial Sequence
  Description of Artificial Sequence: Synthetic oligonucleotide
acuagggcaaaggacaaca

SEQ ID NO: 1734826 - RNA, 19 nt, Artificial Sequence
  Description of Artificial Sequence: Synthetic oligonucleotide
gcaggcauugcacauauac

SEQ ID NO: 1734827 - RNA, 19 nt, Artificial Sequence
  Description of Artificial Sequence: Synthetic oligonucleotide
ugcgauuggcaugugcuag

SEQ ID NO: 1734828 - RNA, 19 nt, Artificial Sequence
  Description of Artificial Sequence: Synthetic oligonucleotide
cuaaguggcauguuccuga

SEQ ID NO: 1734829 - RNA, 19 nt, Artificial Sequence
  Description of Artificial Sequence: Synthetic oligonucleotide
uaccuuugagucacuguca

SEQ ID NO: 1734830 - RNA, 19 nt, Artificial Sequence
  Description of Artificial Sequence: Synthetic oligonucleotide
gaggaauacugcgugggcc

SEQ ID NO: 1734831 - RNA, 19 nt, Artificial Sequence
  Description of Artificial Sequence: Synthetic oligonucleotide
aggaauacugcgugggccu

SEQ ID NO: 1734832 - RNA, 19 nt, Artificial Sequence
  Description of Artificial Sequence: Synthetic oligonucleotide
uccaugcucuccgagguag

SEQ ID NO: 1734833 - RNA, 19 nt, Artificial Sequence
  Description of Artificial Sequence: Synthetic oligonucleotide
cagggcgacacuguuaggg

SEQ ID NO: 1734834 - RNA, 19 nt, Artificial Sequence
  Description of Artificial Sequence: Synthetic oligonucleotide
cuugcuggccacaggacug

SEQ ID NO: 1734835 - RNA, 19 nt, Artificial Sequence
  Description of Artificial Sequence: Synthetic oligonucleotide
uaggcuagaccccacucaa

SEQ ID NO: 1734836 - RNA, 19 nt, Artificial Sequence
  Description of Artificial Sequence: Synthetic oligonucleotide
uguacaccauccaccacaa

SEQ ID NO: 1734837 - RNA, 19 nt, Artificial Sequence
  Description of Artificial Sequence: Synthetic oligonucleotide
ucccuauacagaaaacauu

SEQ ID NO: 1734838 - RNA, 19 nt, Artificial Sequence
  Description of Artificial Sequence: Synthetic oligonucleotide
aauuaccuuguuauuuuau

SEQ ID NO: 1734839 - RNA, 19 nt, Artificial Sequence
  Description of Artificial Sequence: Synthetic oligonucleotide
gggaguuuaccccugaaca

SEQ ID NO: 1734840 - RNA, 19 nt, Artificial Sequence
  Description of Artificial Sequence: Synthetic oligonucleotide
aguccaugcucuccgaggu

SEQ ID NO: 1734841 - RNA, 19 nt, Artificial Sequence
  Description of Artificial Sequence: Synthetic oligonucleotide
uuggcaugugcuaggcagc

SEQ ID NO: 1734842 - RNA, 19 nt, Artificial Sequence
  Description of Artificial Sequence: Synthetic oligonucleotide
ugcagugugugugugugug

SEQ ID NO: 1734843 - RNA, 19 nt, Artificial Sequence
  Description of Artificial Sequence: Synthetic oligonucleotide
acgaggaauacugcguggg

SEQ ID NO: 1734844 - RNA, 19 nt, Artificial Sequence
  Description of Artificial Sequence: Synthetic oligonucleotide
aaggacgccaggcuugaaa

SEQ ID NO: 1734845 - RNA, 19 nt, Artificial Sequence
  Description of Artificial Sequence: Synthetic oligonucleotide
uggccagugacuucuuucu

SEQ ID NO: 1734846 - RNA, 19 nt, Artificial Sequence
  Description of Artificial Sequence: Synthetic oligonucleotide
uauccuucaugaagggaaa

SEQ ID NO: 1734847 - RNA, 19 nt, Artificial Sequence
  Description of Artificial Sequence: Synthetic oligonucleotide
ucuuguugugcaguuuuga

SEQ ID NO: 1734848 - RNA, 19 nt, Artificial Sequence
  Description of Artificial Sequence: Synthetic oligonucleotide
gcaguuuugaucccuugag

SEQ ID NO: 1734849 - RNA, 19 nt, Artificial Sequence
  Description of Artificial Sequence: Synthetic oligonucleotide
uugaucccuugagagacag

SEQ ID NO: 1734850 - RNA, 19 nt, Artificial Sequence
  Description of Artificial Sequence: Synthetic oligonucleotide
gacuggaguccucagccug

SEQ ID NO: 1734851 - RNA, 19 nt, Artificial Sequence
  Description of Artificial Sequence: Synthetic oligonucleotide
gacaagugggcaagggugc

SEQ ID NO: 1734852 - RNA, 19 nt, Artificial Sequence
  Description of Artificial Sequence: Synthetic oligonucleotide
uucgaguccgcuucagggu

SEQ ID NO: 1734853 - RNA, 19 nt, Artificial Sequence
  Description of Artificial Sequence: Synthetic oligonucleotide
caauggucgggacuuccgg

SEQ ID NO: 1734854 - RNA, 19 nt, Artificial Sequence
  Description of Artificial Sequence: Synthetic oligonucleotide
cugaagcccucuuagcaug

SEQ ID NO: 1734855 - RNA, 19 nt, Artificial Sequence
  Description of Artificial Sequence: Synthetic oligonucleotide
auggucgggacuuccggag

SEQ ID NO: 1734856 - RNA, 19 nt, Artificial Sequence
  Description of Artificial Sequence: Synthetic oligonucleotide
ucggcagacagggaggagc

SEQ ID NO: 1734857 - RNA, 19 nt, Artificial Sequence
  Description of Artificial Sequence: Synthetic oligonucleotide
acagugggacuccaggaca

SEQ ID NO: 1734858 - RNA, 19 nt, Artificial Sequence
  Description of Artificial Sequence: Synthetic oligonucleotide
uguagacaagugggcaagg

SEQ ID NO: 1734859 - RNA, 19 nt, Artificial Sequence
  Description of Artificial Sequence: Synthetic oligonucleotide
ugcuaggcagcagaaguug

SEQ ID NO: 1734860 - RNA, 19 nt, Artificial Sequence
  Description of Artificial Sequence: Synthetic oligonucleotide
uucggcuaccugaauucug

SEQ ID NO: 1734861 - RNA, 19 nt, Artificial Sequence
  Description of Artificial Sequence: Synthetic oligonucleotide
caugaugguuggaaaugac

SEQ ID NO: 1734862 - RNA, 19 nt, Artificial Sequence
  Description of Artificial Sequence: Synthetic oligonucleotide
auaaggcucaggaggcagc

SEQ ID NO: 1734863 - RNA, 19 nt, Artificial Sequence
  Description of Artificial Sequence: Synthetic oligonucleotide
ggguacgaggaauacugcg

SEQ ID NO: 1734864 - RNA, 19 nt, Artificial Sequence
  Description of Artificial Sequence: Synthetic oligonucleotide
ggugccagcgcucagcaug

SEQ ID NO: 1734865 - RNA, 19 nt, Artificial Sequence
  Description of Artificial Sequence: Synthetic oligonucleotide
aagggaaauauaaguuagu

SEQ ID NO: 1734866 - RNA, 19 nt, Artificial Sequence
  Description of Artificial Sequence: Synthetic oligonucleotide
ugguuugccuuuugggacu

SEQ ID NO: 1734867 - RNA, 19 nt, Artificial Sequence
  Description of Artificial Sequence: Synthetic oligonucleotide
gaguuuaccccugaacaca

SEQ ID NO: 1734868 - RNA, 19 nt, Artificial Sequence
  Description of Artificial Sequence: Synthetic oligonucleotide
cucuccgagguagacaggc

SEQ ID NO: 1734869 - RNA, 19 nt, Artificial Sequence
  Description of Artificial Sequence: Synthetic oligonucleotide
ucuauccuucaugaaggga

SEQ ID NO: 1734870 - RNA, 19 nt, Artificial Sequence
  Description of Artificial Sequence: Synthetic oligonucleotide
cauguaugugcagugugug

SEQ ID NO: 1734871 - RNA, 19 nt, Artificial Sequence
  Description of Artificial Sequence: Synthetic oligonucleotide
ugcaaauuaccuuguuauu

SEQ ID NO: 1734872 - RNA, 19 nt, Artificial Sequence
  Description of Artificial Sequence: Synthetic oligonucleotide
ggaacuacagagcuuggga

SEQ ID NO: 1734873 - RNA, 19 nt, Artificial Sequence
  Description of Artificial Sequence: Synthetic oligonucleotide
uggaggggaguuuaccccu

SEQ ID NO: 1734874 - RNA, 19 nt, Artificial Sequence
  Description of Artificial Sequence: Synthetic oligonucleotide
uggacaauggucgggacuu

SEQ ID NO: 1734875 - RNA, 19 nt, Artificial Sequence
  Description of Artificial Sequence: Synthetic oligonucleotide
uggcuacaggguuuguuca

SEQ ID NO: 1734876 - RNA, 19 nt, Artificial Sequence
  Description of Artificial Sequence: Synthetic oligonucleotide
gcacauauacuaaaugaug

SEQ ID NO: 1734877 - RNA, 19 nt, Artificial Sequence
  Description of Artificial Sequence: Synthetic oligonucleotide
uguguguguguguguacac

SEQ ID NO: 1734878 - RNA, 19 nt, Artificial Sequence
  Description of Artificial Sequence: Synthetic oligonucleotide
aguuuaccccugaacacag

SEQ ID NO: 1734879 - RNA, 19 nt, Artificial Sequence
  Description of Artificial Sequence: Synthetic oligonucleotide
cuagggcaaaggacaacag

SEQ ID NO: 1734880 - RNA, 19 nt, Artificial Sequence
  Description of Artificial Sequence: Synthetic oligonucleotide
acuguuagggcggcucugg

SEQ ID NO: 1734881 - RNA, 19 nt, Artificial Sequence
  Description of Artificial Sequence: Synthetic oligonucleotide
aaugaguugcaggcuggca

SEQ ID NO: 1734882 - RNA, 19 nt, Artificial Sequence
  Description of Artificial Sequence: Synthetic oligonucleotide
uggggaccucaucugcagg

SEQ ID NO: 1734883 - RNA, 19 nt, Artificial Sequence
  Description of Artificial Sequence: Synthetic oligonucleotide
ucgaguccgcuucaggguc

SEQ ID NO: 1734884 - RNA, 19 nt, Artificial Sequence
  Description of Artificial Sequence: Synthetic oligonucleotide
cauacacauuacaucuauc

SEQ ID NO: 1734885 - RNA, 19 nt, Artificial Sequence
  Description of Artificial Sequence: Synthetic oligonucleotide
acuaaaugaugaggcuggg

SEQ ID NO: 1734886 - RNA, 19 nt, Artificial Sequence
  Description of Artificial Sequence: Synthetic oligonucleotide
aggacgccaggcuugaaau

SEQ ID NO: 1734887 - RNA, 19 nt, Artificial Sequence
  Description of Artificial Sequence: Synthetic oligonucleotide
ggaguuuaccccugaacac

SEQ ID NO: 1734888 - RNA, 19 nt, Artificial Sequence
  Description of Artificial Sequence: Synthetic oligonucleotide
ugagagacagugagcccgu

SEQ ID NO: 1734889 - RNA, 19 nt, Artificial Sequence
  Description of Artificial Sequence: Synthetic oligonucleotide
auguaugugcagugugugu

SEQ ID NO: 1734890 - RNA, 19 nt, Artificial Sequence
  Description of Artificial Sequence: Synthetic oligonucleotide
acaacagccuucccaggga

SEQ ID NO: 1734891 - RNA, 19 nt, Artificial Sequence
  Description of Artificial Sequence: Synthetic oligonucleotide
cuguagacaagugggcaag

SEQ ID NO: 1734892 - RNA, 19 nt, Artificial Sequence
  Description of Artificial Sequence: Synthetic oligonucleotide
ugugugcggccaaaugagu

SEQ ID NO: 1734893 - RNA, 19 nt, Artificial Sequence
  Description of Artificial Sequence: Synthetic oligonucleotide
uucacaggcuccugaggcu

SEQ ID NO: 1734894 - RNA, 19 nt, Artificial Sequence
  Description of Artificial Sequence: Synthetic oligonucleotide
uacaucuauccuucaugaa

SEQ ID NO: 1734895 - RNA, 19 nt, Artificial Sequence
  Description of Artificial Sequence: Synthetic oligonucleotide
aauacugcgugggccuugu

SEQ ID NO: 1734896 - RNA, 19 nt, Artificial Sequence
  Description of Artificial Sequence: Synthetic oligonucleotide
guaguccaugcucuccgag

SEQ ID NO: 1734897 - RNA, 19 nt, Artificial Sequence
  Description of Artificial Sequence: Synthetic oligonucleotide
acuaaguggcauguuccug

SEQ ID NO: 1734898 - RNA, 19 nt, Artificial Sequence
  Description of Artificial Sequence: Synthetic oligonucleotide
acaauggucgggacuuccg

SEQ ID NO: 1734899 - RNA, 19 nt, Artificial Sequence
  Description of Artificial Sequence: Synthetic oligonucleotide
gacuuccggagggaaacag

SEQ ID NO: 1734900 - RNA, 19 nt, Artificial Sequence
  Description of Artificial Sequence: Synthetic oligonucleotide
uguguguguguguguguac

SEQ ID NO: 1734901 - RNA, 19 nt, Artificial Sequence
  Description of Artificial Sequence: Synthetic oligonucleotide
gguuuggagggguccaucc

SEQ ID NO: 1734902 - RNA, 19 nt, Artificial Sequence
  Description of Artificial Sequence: Synthetic oligonucleotide
aauuuacaugaugguugga

SEQ ID NO: 1734903 - RNA, 19 nt, Artificial Sequence
  Description of Artificial Sequence: Synthetic oligonucleotide
guacagugggacuccagga

SEQ ID NO: 1734904 - RNA, 19 nt, Artificial Sequence
  Description of Artificial Sequence: Synthetic oligonucleotide
auucuggcauccauggaca

SEQ ID NO: 1734905 - RNA, 19 nt, Artificial Sequence
  Description of Artificial Sequence: Synthetic oligonucleotide
gagacuaggcuagacccca

SEQ ID NO: 1734906 - RNA, 19 nt, Artificial Sequence
  Description of Artificial Sequence: Synthetic oligonucleotide
agugagcccguuucuuugu

SEQ ID NO: 1734907 - RNA, 19 nt, Artificial Sequence
  Description of Artificial Sequence: Synthetic oligonucleotide
ugugugugugugugugugu

SEQ ID NO: 1734908 - RNA, 19 nt, Artificial Sequence
  Description of Artificial Sequence: Synthetic oligonucleotide
uccuucaugaagggaaaua

SEQ ID NO: 1734909 - RNA, 19 nt, Artificial Sequence
  Description of Artificial Sequence: Synthetic oligonucleotide
aggguacgaggaauacugc

SEQ ID NO: 1734910 - RNA, 19 nt, Artificial Sequence
  Description of Artificial Sequence: Synthetic oligonucleotide
uguuugcagagaccaguuu

SEQ ID NO: 1734911 - RNA, 19 nt, Artificial Sequence
  Description of Artificial Sequence: Synthetic oligonucleotide
agggaaacagguaccuuug

SEQ ID NO: 1734912 - RNA, 19 nt, Artificial Sequence
  Description of Artificial Sequence: Synthetic oligonucleotide
uguguacaccauccaccac

SEQ ID NO: 1734913 - RNA, 19 nt, Artificial Sequence
  Description of Artificial Sequence: Synthetic oligonucleotide
gagggaaacagguaccuuu

SEQ ID NO: 1734914 - RNA, 19 nt, Artificial Sequence
  Description of Artificial Sequence: Synthetic oligonucleotide
cuaggcuagaccccacuca

SEQ ID NO: 1734915 - RNA, 19 nt, Artificial Sequence
  Description of Artificial Sequence: Synthetic oligonucleotide
cauccaccacaaaccuucg

SEQ ID NO: 1734916 - RNA, 19 nt, Artificial Sequence
  Description of Artificial Sequence: Synthetic oligonucleotide
cccuauacagaaaacauua

SEQ ID NO: 1734917 - RNA, 19 nt, Artificial Sequence
  Description of Artificial Sequence: Synthetic oligonucleotide
uugucggcagcaggcauug

SEQ ID NO: 1734918 - RNA, 19 nt, Artificial Sequence
  Description of Artificial Sequence: Synthetic oligonucleotide
cucagcauguucccaccug

SEQ ID NO: 1734919 - RNA, 19 nt, Artificial Sequence
  Description of Artificial Sequence: Synthetic oligonucleotide
uccccugaggguuggcuac

SEQ ID NO: 1734920 - RNA, 19 nt, Artificial Sequence
  Description of Artificial Sequence: Synthetic oligonucleotide
gugugugugugugugugug

SEQ ID NO: 1734921 - RNA, 19 nt, Artificial Sequence
  Description of Artificial Sequence: Synthetic oligonucleotide
acuggaguccucagccugg

SEQ ID NO: 1734922 - RNA, 19 nt, Artificial Sequence
  Description of Artificial Sequence: Synthetic oligonucleotide
agugugugugugugugugu

SEQ ID NO: 1734923 - RNA, 19 nt, Artificial Sequence
  Description of Artificial Sequence: Synthetic oligonucleotide
gaauucuggcauccaugga

SEQ ID NO: 1734924 - RNA, 19 nt, Artificial Sequence
  Description of Artificial Sequence: Synthetic oligonucleotide
cuugggagccccaggccac

SEQ ID NO: 1734925 - RNA, 19 nt, Artificial Sequence
  Description of Artificial Sequence: Synthetic oligonucleotide
ccacaaaccuucgaguccg

SEQ ID NO: 1734926 - RNA, 19 nt, Artificial Sequence
  Description of Artificial Sequence: Synthetic oligonucleotide
acauuacaucuauccuuca

SEQ ID NO: 1734927 - RNA, 19 nt, Artificial Sequence
  Description of Artificial Sequence: Synthetic oligonucleotide
ggagccguaguccaugcuc

SEQ ID NO: 1734928 - RNA, 19 nt, Artificial Sequence
  Description of Artificial Sequence: Synthetic oligonucleotide
ggacuugcuggccacagga

SEQ ID NO: 1734929 - RNA, 19 nt, Artificial Sequence
  Description of Artificial Sequence: Synthetic oligonucleotide
cagugugugugugugugug

SEQ ID NO: 1734930 - RNA, 19 nt, Artificial Sequence
  Description of Artificial Sequence: Synthetic oligonucleotide
cuggaacuacagagcuugg

SEQ ID NO: 1734931 - RNA, 19 nt, Artificial Sequence
  Description of Artificial Sequence: Synthetic oligonucleotide
aggcagguuccauguaugu

SEQ ID NO: 1734932 - RNA, 19 nt, Artificial Sequence
  Description of Artificial Sequence: Synthetic oligonucleotide
uugugcaguuuugaucccu

SEQ ID NO: 1734933 - RNA, 19 nt, Artificial Sequence
  Description of Artificial Sequence: Synthetic oligonucleotide
cuaccagggcucagguggc

SEQ ID NO: 1734934 - RNA, 19 nt, Artificial Sequence
  Description of Artificial Sequence: Synthetic oligonucleotide
cauuagcacaggguacgag

SEQ ID NO: 1734935 - RNA, 19 nt, Artificial Sequence
  Description of Artificial Sequence: Synthetic oligonucleotide
guguguguguguguacacc

SEQ ID NO: 1734936 - RNA, 19 nt, Artificial Sequence
  Description of Artificial Sequence: Synthetic oligonucleotide
gucggcagcaggcauugca

SEQ ID NO: 1734937 - RNA, 19 nt, Artificial Sequence
  Description of Artificial Sequence: Synthetic oligonucleotide
ucuccgagguagacaggcu

SEQ ID NO: 1734938 - RNA, 19 nt, Artificial Sequence
  Description of Artificial Sequence: Synthetic oligonucleotide
aguugcaggcuggcaguac

SEQ ID NO: 1734939 - RNA, 19 nt, Artificial Sequence
  Description of Artificial Sequence: Synthetic oligonucleotide
aaccuucgaguccgcuuca

SEQ ID NO: 1734940 - RNA, 19 nt, Artificial Sequence
  Description of Artificial Sequence: Synthetic oligonucleotide
ugggacuugcuggccacag

SEQ ID NO: 1734941 - RNA, 19 nt, Artificial Sequence
  Description of Artificial Sequence: Synthetic oligonucleotide
uugcagagaccaguuuaca

SEQ ID NO: 1734942 - RNA, 19 nt, Artificial Sequence
  Description of Artificial Sequence: Synthetic oligonucleotide
uguuagggcggcucugguu

SEQ ID NO: 1734943 - RNA, 19 nt, Artificial Sequence
  Description of Artificial Sequence: Synthetic oligonucleotide
gauuggcaugugcuaggca

SEQ ID NO: 1734944 - RNA, 19 nt, Artificial Sequence
  Description of Artificial Sequence: Synthetic oligonucleotide
gggcgacacuguuagggcg

SEQ ID NO: 1734945 - RNA, 19 nt, Artificial Sequence
  Description of Artificial Sequence: Synthetic oligonucleotide
acaggguacgaggaauacu

SEQ ID NO: 1734946 - RNA, 19 nt, Artificial Sequence
  Description of Artificial Sequence: Synthetic oligonucleotide
agggaaccuguagacaagu

SEQ ID NO: 1734947 - RNA, 19 nt, Artificial Sequence
  Description of Artificial Sequence: Synthetic oligonucleotide
uuagggcggcucugguuug

SEQ ID NO: 1734948 - RNA, 19 nt, Artificial Sequence
  Description of Artificial Sequence: Synthetic oligonucleotide
cuuccggagggaaacaggu

SEQ ID NO: 1734949 - RNA, 19 nt, Artificial Sequence
  Description of Artificial Sequence: Synthetic oligonucleotide
cauggacaauggucgggac

SEQ ID NO: 1734950 - RNA, 19 nt, Artificial Sequence
  Description of Artificial Sequence: Synthetic oligonucleotide
cuuuugggacuugcuggcc

SEQ ID NO: 1734951 - RNA, 19 nt, Artificial Sequence
  Description of Artificial Sequence: Synthetic oligonucleotide
guuagggcggcucugguuu

SEQ ID NO: 1734952 - RNA, 19 nt, Artificial Sequence
  Description of Artificial Sequence: Synthetic oligonucleotide
gacgccaggcuugaaaugu

SEQ ID NO: 1734953 - RNA, 19 nt, Artificial Sequence
  Description of Artificial Sequence: Synthetic oligonucleotide
uucuuucucuucggcuacc

SEQ ID NO: 1734954 - RNA, 19 nt, Artificial Sequence
  Description of Artificial Sequence: Synthetic oligonucleotide
agcccguuucuuuguucag

SEQ ID NO: 1734955 - RNA, 19 nt, Artificial Sequence
  Description of Artificial Sequence: Synthetic oligonucleotide
augugcagugugugugugu

SEQ ID NO: 1734956 - RNA, 19 nt, Artificial Sequence
  Description of Artificial Sequence: Synthetic oligonucleotide
auacucaguggcccaggau

SEQ ID NO: 1734957 - RNA, 19 nt, Artificial Sequence
  Description of Artificial Sequence: Synthetic oligonucleotide
agcccucuuagcauggccu

SEQ ID NO: 1734958 - RNA, 19 nt, Artificial Sequence
  Description of Artificial Sequence: Synthetic oligonucleotide
uuggcuguggaggggaguu

SEQ ID NO: 1734959 - RNA, 19 nt, Artificial Sequence
  Description of Artificial Sequence: Synthetic oligonucleotide
ggggaguuuaccccugaac

SEQ ID NO: 1734960 - RNA, 19 nt, Artificial Sequence
  Description of Artificial Sequence: Synthetic oligonucleotide
guguguguguguguguaca

SEQ ID NO: 1734961 - RNA, 19 nt, Artificial Sequence
  Description of Artificial Sequence: Synthetic oligonucleotide
augugcuaggcagcagaag

SEQ ID NO: 1734962 - RNA, 19 nt, Artificial Sequence
  Description of Artificial Sequence: Synthetic oligonucleotide
cagguuccauguaugugca

SEQ ID NO: 1734963 - RNA, 19 nt, Artificial Sequence
  Description of Artificial Sequence: Synthetic oligonucleotide
ggcgacacuguuagggcgg

SEQ ID NO: 1734964 - RNA, 19 nt, Artificial Sequence
  Description of Artificial Sequence: Synthetic oligonucleotide
agagacagugagcccguuu

SEQ ID NO: 1734965 - RNA, 19 nt, Artificial Sequence
  Description of Artificial Sequence: Synthetic oligonucleotide
gugcaguuuugaucccuug

SEQ ID NO: 1734966 - RNA, 19 nt, Artificial Sequence
  Description of Artificial Sequence: Synthetic oligonucleotide
gcaugugcuaggcagcaga

SEQ ID NO: 1734967 - RNA, 19 nt, Artificial Sequence
  Description of Artificial Sequence: Synthetic oligonucleotide
uucuggcauccauggacaa

SEQ ID NO: 1734968 - RNA, 19 nt, Artificial Sequence
  Description of Artificial Sequence: Synthetic oligonucleotide
guuuaccccugaacacagg

SEQ ID NO: 1734969 - RNA, 19 nt, Artificial Sequence
  Description of Artificial Sequence: Synthetic oligonucleotide
ggcuagaccccacucaaaa

SEQ ID NO: 1734970 - RNA, 19 nt, Artificial Sequence
  Description of Artificial Sequence: Synthetic oligonucleotide
agugggacuccaggacagg

SEQ ID NO: 1734971 - RNA, 19 nt, Artificial Sequence
  Description of Artificial Sequence: Synthetic oligonucleotide
ugaucccuugagagacagu

SEQ ID NO: 1734972 - RNA, 19 nt, Artificial Sequence
  Description of Artificial Sequence: Synthetic oligonucleotide
cuuguugugcaguuuugau

SEQ ID NO: 1734973 - RNA, 19 nt, Artificial Sequence
  Description of Artificial Sequence: Synthetic oligonucleotide
ccugugugcggccaaauga

SEQ ID NO: 1734974 - RNA, 19 nt, Artificial Sequence
  Description of Artificial Sequence: Synthetic oligonucleotide
caugugcuaggcagcagaa

SEQ ID NO: 1734975 - RNA, 19 nt, Artificial Sequence
  Description of Artificial Sequence: Synthetic oligonucleotide
agguaccuuugagucacug

SEQ ID NO: 1734976 - RNA, 19 nt, Artificial Sequence
  Description of Artificial Sequence: Synthetic oligonucleotide
ugcggccaaaugaguugca

SEQ ID NO: 1734977 - RNA, 19 nt, Artificial Sequence
  Description of Artificial Sequence: Synthetic oligonucleotide
gucccuauacagaaaacau

SEQ ID NO: 1734978 - RNA, 19 nt, Artificial Sequence
  Description of Artificial Sequence: Synthetic oligonucleotide
acauuagcacaggguacga

SEQ ID NO: 1734979 - RNA, 19 nt, Artificial Sequence
  Description of Artificial Sequence: Synthetic oligonucleotide
ggagacuaggcuagacccc

SEQ ID NO: 1734980 - RNA, 19 nt, Artificial Sequence
  Description of Artificial Sequence: Synthetic oligonucleotide
acucaguggcccaggauaa

SEQ ID NO: 1734981 - RNA, 19 nt, Artificial Sequence
  Description of Artificial Sequence: Synthetic oligonucleotide
guagacaggcugcugcagu

SEQ ID NO: 1734982 - RNA, 19 nt, Artificial Sequence
  Description of Artificial Sequence: Synthetic oligonucleotide
guaugugcagugugugugu

SEQ ID NO: 1734983 - RNA, 19 nt, Artificial Sequence
  Description of Artificial Sequence: Synthetic oligonucleotide
cucuccacccaaggucucc

SEQ ID NO: 1734984 - RNA, 19 nt, Artificial Sequence
  Description of Artificial Sequence: Synthetic oligonucleotide
auccccugaggguuggcua

SEQ ID NO: 1734985 - RNA, 19 nt, Artificial Sequence
  Description of Artificial Sequence: Synthetic oligonucleotide
acaaaccuucgaguccgcu

SEQ ID NO: 1734986 - RNA, 19 nt, Artificial Sequence
  Description of Artificial Sequence: Synthetic oligonucleotide
gaggguuggcuacaggguu

SEQ ID NO: 1734987 - RNA, 19 nt, Artificial Sequence
  Description of Artificial Sequence: Synthetic oligonucleotide
cacaaaccuucgaguccgc

SEQ ID NO: 1734988 - RNA, 19 nt, Artificial Sequence
  Description of Artificial Sequence: Synthetic oligonucleotide
ugcgugggccuugucggca

SEQ ID NO: 1734989 - RNA, 19 nt, Artificial Sequence
  Description of Artificial Sequence: Synthetic oligonucleotide
ggcuacaggguuuguucac

SEQ ID NO: 1734990 - RNA, 19 nt, Artificial Sequence
  Description of Artificial Sequence: Synthetic oligonucleotide
ggcagguuccauguaugug

SEQ ID NO: 1734991 - RNA, 19 nt, Artificial Sequence
  Description of Artificial Sequence: Synthetic oligonucleotide
agacuaggcuagaccccac

SEQ ID NO: 1734992 - RNA, 19 nt, Artificial Sequence
  Description of Artificial Sequence: Synthetic oligonucleotide
ucucuucggcuaccugaau

SEQ ID NO: 1734993 - RNA, 19 nt, Artificial Sequence
  Description of Artificial Sequence: Synthetic oligonucleotide
auguacagugggacuccag

SEQ ID NO: 1734994 - RNA, 19 nt, Artificial Sequence
  Description of Artificial Sequence: Synthetic oligonucleotide
ggugcgauuggcaugugcu

SEQ ID NO: 1734995 - RNA, 19 nt, Artificial Sequence
  Description of Artificial Sequence: Synthetic oligonucleotide
ugggcccuggugccagcgc

SEQ ID NO: 1734996 - RNA, 19 nt, Artificial Sequence
  Description of Artificial Sequence: Synthetic oligonucleotide
ggcauugcacauauacuaa

SEQ ID NO: 1734997 - RNA, 19 nt, Artificial Sequence
  Description of Artificial Sequence: Synthetic oligonucleotide
cugcgugggccuugucggc

SEQ ID NO: 1734998 - RNA, 19 nt, Artificial Sequence
  Description of Artificial Sequence: Synthetic oligonucleotide
cccuugagagacagugagc

SEQ ID NO: 1734999 - RNA, 19 nt, Artificial Sequence
  Description of Artificial Sequence: Synthetic oligonucleotide
gagggcaggaagcauucuu

SEQ ID NO: 1735000 - RNA, 19 nt, Artificial Sequence
  Description of Artificial Sequence: Synthetic oligonucleotide
aggagccguaguccaugcu

SEQ ID NO: 1735001 - RNA, 19 nt, Artificial Sequence
  Description of Artificial Sequence: Synthetic oligonucleotide
aggggaguuuaccccugaa

SEQ ID NO: 1735002 - RNA, 19 nt, Artificial Sequence
  Description of Artificial Sequence: Synthetic oligonucleotide
gguacgaggaauacugcgu

SEQ ID NO: 1735003 - RNA, 19 nt, Artificial Sequence
  Description of Artificial Sequence: Synthetic oligonucleotide
gacuaggcuagaccccacu

SEQ ID NO: 1735004 - RNA, 19 nt, Artificial Sequence
  Description of Artificial Sequence: Synthetic oligonucleotide
ccuucgaguccgcuucagg

SEQ ID NO: 1735005 - RNA, 19 nt, Artificial Sequence
  Description of Artificial Sequence: Synthetic oligonucleotide
ccugugccuucucugggcc

SEQ ID NO: 1735006 - RNA, 19 nt, Artificial Sequence
  Description of Artificial Sequence: Synthetic oligonucleotide
ggacgccaggcuugaaaug

SEQ ID NO: 1735007 - RNA, 19 nt, Artificial Sequence
  Description of Artificial Sequence: Synthetic oligonucleotide
gugugugugugugugugua

SEQ ID NO: 1735008 - RNA, 19 nt, Artificial Sequence
  Description of Artificial Sequence: Synthetic oligonucleotide
auacugcgugggccuuguc

SEQ ID NO: 1735009 - RNA, 19 nt, Artificial Sequence
  Description of Artificial Sequence: Synthetic oligonucleotide
gcccucuuagcauggccug

SEQ ID NO: 1735010 - RNA, 19 nt, Artificial Sequence
  Description of Artificial Sequence: Synthetic oligonucleotide
gggugcgauuggcaugugc

SEQ ID NO: 1735011 - RNA, 19 nt, Artificial Sequence
  Description of Artificial Sequence: Synthetic oligonucleotide
caacagccuucccagggaa

SEQ ID NO: 1735012 - RNA, 19 nt, Artificial Sequence
  Description of Artificial Sequence: Synthetic oligonucleotide
caggcuugaaauguacagu

SEQ ID NO: 1735013 - RNA, 19 nt, Artificial Sequence
  Description of Artificial Sequence: Synthetic oligonucleotide
accuucgaguccgcuucag

SEQ ID NO: 1735014 - RNA, 19 nt, Artificial Sequence
  Description of Artificial Sequence: Synthetic oligonucleotide
gugcgauuggcaugugcua

SEQ ID NO: 1735015 - RNA, 19 nt, Artificial Sequence
  Description of Artificial Sequence: Synthetic oligonucleotide
guucagugacaggucggca

SEQ ID NO: 1735016 - RNA, 19 nt, Artificial Sequence
  Description of Artificial Sequence: Synthetic oligonucleotide
gugggacuccaggacagga

SEQ ID NO: 1735017 - RNA, 19 nt, Artificial Sequence
  Description of Artificial Sequence: Synthetic oligonucleotide
gacagggaggagccguagu

SEQ ID NO: 1735018 - RNA, 19 nt, Artificial Sequence
  Description of Artificial Sequence: Synthetic oligonucleotide
guagagcuaccagggcuca

SEQ ID NO: 1735019 - RNA, 19 nt, Artificial Sequence
  Description of Artificial Sequence: Synthetic oligonucleotide
gggacuccaggacaggacu

SEQ ID NO: 1735020 - RNA, 19 nt, Artificial Sequence
  Description of Artificial Sequence: Synthetic oligonucleotide
gggaaacagguaccuuuga

SEQ ID NO: 1735021 - RNA, 19 nt, Artificial Sequence
  Description of Artificial Sequence: Synthetic oligonucleotide
gcuacaggguuuguucaca

SEQ ID NO: 1735022 - RNA, 19 nt, Artificial Sequence
  Description of Artificial Sequence: Synthetic oligonucleotide
cagugacaggucggcagac

SEQ ID NO: 1735023 - RNA, 19 nt, Artificial Sequence
  Description of Artificial Sequence: Synthetic oligonucleotide
gcggccaaaugaguugcag

SEQ ID NO: 1735024 - RNA, 19 nt, Artificial Sequence
  Description of Artificial Sequence: Synthetic oligonucleotide
cucuucggcuaccugaauu

SEQ ID NO: 1735025 - RNA, 19 nt, Artificial Sequence
  Description of Artificial Sequence: Synthetic oligonucleotide
ggguuggcuacaggguuug

SEQ ID NO: 1735026 - RNA, 19 nt, Artificial Sequence
  Description of Artificial Sequence: Synthetic oligonucleotide
gggaccucaucugcagggc

SEQ ID NO: 1735027 - RNA, 19 nt, Artificial Sequence
  Description of Artificial Sequence: Synthetic oligonucleotide
gcuggcaguacagccugug

SEQ ID NO: 1735028 - RNA, 19 nt, Artificial Sequence
  Description of Artificial Sequence: Synthetic oligonucleotide
aggucuccagggcgacacu

SEQ ID NO: 1735029 - RNA, 19 nt, Artificial Sequence
  Description of Artificial Sequence: Synthetic oligonucleotide
cuugucggcagcaggcauu

SEQ ID NO: 1735030 - RNA, 19 nt, Artificial Sequence
  Description of Artificial Sequence: Synthetic oligonucleotide
gccccaggccaccauuggc

SEQ ID NO: 1735031 - RNA, 19 nt, Artificial Sequence
  Description of Artificial Sequence: Synthetic oligonucleotide
guccauccccugaggguug

SEQ ID NO: 1735032 - RNA, 19 nt, Artificial Sequence
  Description of Artificial Sequence: Synthetic oligonucleotide
accauccaccacaaaccuu

SEQ ID NO: 1735033 - RNA, 19 nt, Artificial Sequence
  Description of Artificial Sequence: Synthetic oligonucleotide
gacagugagcccguuucuu

SEQ ID NO: 1735034 - RNA, 19 nt, Artificial Sequence
  Description of Artificial Sequence: Synthetic oligonucleotide
agugggcaagggugcgauu

SEQ ID NO: 1735035 - RNA, 19 nt, Artificial Sequence
  Description of Artificial Sequence: Synthetic oligonucleotide
auguuccugagggcaggaa

SEQ ID NO: 1735036 - RNA, 19 nt, Artificial Sequence
  Description of Artificial Sequence: Synthetic oligonucleotide
ccauggacaauggucggga

SEQ ID NO: 1735037 - RNA, 19 nt, Artificial Sequence
  Description of Artificial Sequence: Synthetic oligonucleotide
agguggcacuaaguggcau

SEQ ID NO: 1735038 - RNA, 19 nt, Artificial Sequence
  Description of Artificial Sequence: Synthetic oligonucleotide
ccauguaugugcagugugu

SEQ ID NO: 1735039 - RNA, 19 nt, Artificial Sequence
  Description of Artificial Sequence: Synthetic oligonucleotide
gcaggcagguuccauguau

SEQ ID NO: 1735040 - RNA, 19 nt, Artificial Sequence
  Description of Artificial Sequence: Synthetic oligonucleotide
caagugggcaagggugcga

SEQ ID NO: 1735041 - RNA, 19 nt, Artificial Sequence
  Description of Artificial Sequence: Synthetic oligonucleotide
gaguugcaggcuggcagua

SEQ ID NO: 1735042 - RNA, 19 nt, Artificial Sequence
  Description of Artificial Sequence: Synthetic oligonucleotide
cccucuuagcauggccugg

SEQ ID NO: 1735043 - RNA, 19 nt, Artificial Sequence
  Description of Artificial Sequence: Synthetic oligonucleotide
ccgcuucagggucuuguug

SEQ ID NO: 1735044 - RNA, 19 nt, Artificial Sequence
  Description of Artificial Sequence: Synthetic oligonucleotide
ggaggggaguuuaccccug

SEQ ID NO: 1735045 - RNA, 19 nt, Artificial Sequence
  Description of Artificial Sequence: Synthetic oligonucleotide
gccagcgcucagcauguuc

SEQ ID NO: 1735046 - RNA, 19 nt, Artificial Sequence
  Description of Artificial Sequence: Synthetic oligonucleotide
ggacuagggcaaaggacaa

SEQ ID NO: 1735047 - RNA, 19 nt, Artificial Sequence
  Description of Artificial Sequence: Synthetic oligonucleotide
ugucggcagcaggcauugc

SEQ ID NO: 1735048 - RNA, 19 nt, Artificial Sequence
  Description of Artificial Sequence: Synthetic oligonucleotide
cuucggcuaccugaauucu

SEQ ID NO: 1735049 - RNA, 19 nt, Artificial Sequence
  Description of Artificial Sequence: Synthetic oligonucleotide
gugugcggccaaaugaguu

SEQ ID NO: 1735050 - RNA, 19 nt, Artificial Sequence
  Description of Artificial Sequence: Synthetic oligonucleotide
ggguccauccccugagggu

SEQ ID NO: 1735051 - RNA, 19 nt, Artificial Sequence
  Description of Artificial Sequence: Synthetic oligonucleotide
aggcuagaccccacucaaa

SEQ ID NO: 1735052 - RNA, 19 nt, Artificial Sequence
  Description of Artificial Sequence: Synthetic oligonucleotide
guccaugcucuccgaggua

SEQ ID NO: 1735053 - RNA, 19 nt, Artificial Sequence
  Description of Artificial Sequence: Synthetic oligonucleotide
gucgggacuuccggaggga

SEQ ID NO: 1735054 - RNA, 19 nt, Artificial Sequence
  Description of Artificial Sequence: Synthetic oligonucleotide
gguccauccccugaggguu

SEQ ID NO: 1735055 - RNA, 19 nt, Artificial Sequence
  Description of Artificial Sequence: Synthetic oligonucleotide
uggcuguggaggggaguuu

SEQ ID NO: 1735056 - RNA, 19 nt, Artificial Sequence
  Description of Artificial Sequence: Synthetic oligonucleotide
gcugcagucugaagcccuc

SEQ ID NO: 1735057 - RNA, 19 nt, Artificial Sequence
  Description of Artificial Sequence: Synthetic oligonucleotide
gugcagugugugugugugu

SEQ ID NO: 1735058 - RNA, 19 nt, Artificial Sequence
  Description of Artificial Sequence: Synthetic oligonucleotide
gccaaaugaguugcaggcu

SEQ ID NO: 1735059 - RNA, 19 nt, Artificial Sequence
  Description of Artificial Sequence: Synthetic oligonucleotide
gcgacacuguuagggcggc

SEQ ID NO: 1735060 - RNA, 19 nt, Artificial Sequence
  Description of Artificial Sequence: Synthetic oligonucleotide
ccagggcgacacuguuagg

SEQ ID NO: 1735061 - RNA, 19 nt, Artificial Sequence
  Description of Artificial Sequence: Synthetic oligonucleotide
ggauccugugugcggccaa

SEQ ID NO: 1735062 - RNA, 19 nt, Artificial Sequence
  Description of Artificial Sequence: Synthetic oligonucleotide
cggcuaccugaauucuggc

SEQ ID NO: 1735063 - RNA, 19 nt, Artificial Sequence
  Description of Artificial Sequence: Synthetic oligonucleotide
guguguguguguacaccau

SEQ ID NO: 1735064 - RNA, 19 nt, Artificial Sequence
  Description of Artificial Sequence: Synthetic oligonucleotide
aguccgcuucagggucuug

SEQ ID NO: 1735065 - RNA, 19 nt, Artificial Sequence
  Description of Artificial Sequence: Synthetic oligonucleotide
ggacuuccggagggaaaca

SEQ ID NO: 1735066 - RNA, 19 nt, Artificial Sequence
  Description of Artificial Sequence: Synthetic oligonucleotide
ccucuuagcauggccugga

SEQ ID NO: 1735067 - RNA, 19 nt, Artificial Sequence
  Description of Artificial Sequence: Synthetic oligonucleotide
gcagugugugugugugugu

SEQ ID NO: 1735068 - RNA, 19 nt, Artificial Sequence
  Description of Artificial Sequence: Synthetic oligonucleotide
gugagcccguuucuuuguu

SEQ ID NO: 1735069 - RNA, 19 nt, Artificial Sequence
  Description of Artificial Sequence: Synthetic oligonucleotide
ggcggcucugguuugccuu

SEQ ID NO: 1735070 - RNA, 19 nt, Artificial Sequence
  Description of Artificial Sequence: Synthetic oligonucleotide
gcucagcauguucccaccu

SEQ ID NO: 1735071 - RNA, 19 nt, Artificial Sequence
  Description of Artificial Sequence: Synthetic oligonucleotide
ggacaauggucgggacuuc

SEQ ID NO: 1735072 - RNA, 19 nt, Artificial Sequence
  Description of Artificial Sequence: Synthetic oligonucleotide
gugccuucucugggcccug

SEQ ID NO: 1735073 - RNA, 19 nt, Artificial Sequence
  Description of Artificial Sequence: Synthetic oligonucleotide
cccugaggguuggcuacag

SEQ ID NO: 1735074 - RNA, 19 nt, Artificial Sequence
  Description of Artificial Sequence: Synthetic oligonucleotide
agggugcgauuggcaugug

SEQ ID NO: 1735075 - RNA, 19 nt, Artificial Sequence
  Description of Artificial Sequence: Synthetic oligonucleotide
ccaaggacgccaggcuuga

SEQ ID NO: 1735076 - RNA, 19 nt, Artificial Sequence
  Description of Artificial Sequence: Synthetic oligonucleotide
cugcagucugaagcccucu

SEQ ID NO: 1735077 - RNA, 19 nt, Artificial Sequence
  Description of Artificial Sequence: Synthetic oligonucleotide
cagguaccuuugagucacu

SEQ ID NO: 1735078 - RNA, 19 nt, Artificial Sequence
  Description of Artificial Sequence: Synthetic oligonucleotide
ggagggaaacagguaccuu

SEQ ID NO: 1735079 - RNA, 19 nt, Artificial Sequence
  Description of Artificial Sequence: Synthetic oligonucleotide
gaguccgcuucagggucuu

SEQ ID NO: 1735080 - RNA, 19 nt, Artificial Sequence
  Description of Artificial Sequence: Synthetic oligonucleotide
caaggacgccaggcuugaa

SEQ ID NO: 1735081 - RNA, 19 nt, Artificial Sequence
  Description of Artificial Sequence: Synthetic oligonucleotide
cccuggugccagcgcucag

SEQ ID NO: 1735082 - RNA, 19 nt, Artificial Sequence
  Description of Artificial Sequence: Synthetic oligonucleotide
gguuugccuuuugggacuu

SEQ ID NO: 1735083 - RNA, 19 nt, Artificial Sequence
  Description of Artificial Sequence: Synthetic oligonucleotide
ccuuugagucacugucauu

SEQ ID NO: 1735084 - RNA, 19 nt, Artificial Sequence
  Description of Artificial Sequence: Synthetic oligonucleotide
gguuggcuacaggguuugu

SEQ ID NO: 1735085 - RNA, 19 nt, Artificial Sequence
  Description of Artificial Sequence: Synthetic oligonucleotide
ccccugaggguuggcuaca

SEQ ID NO: 1735086 - RNA, 19 nt, Artificial Sequence
  Description of Artificial Sequence: Synthetic oligonucleotide
cgaguccgcuucagggucu

SEQ ID NO: 1735087 - RNA, 19 nt, Artificial Sequence
  Description of Artificial Sequence: Synthetic oligonucleotide
aauaucuuaacauuggugu

SEQ ID NO: 1735088 - RNA, 19 nt, Artificial Sequence
  Description of Artificial Sequence: Synthetic oligonucleotide
ugaaaauaucuuaacauug

SEQ ID NO: 1735089 - RNA, 19 nt, Artificial Sequence
  Description of Artificial Sequence: Synthetic oligonucleotide
aaagcuaaggcaaagaaca

SEQ ID NO: 1735090 - RNA, 19 nt, Artificial Sequence
  Description of Artificial Sequence: Synthetic oligonucleotide
aaagggugugcccaggugc

SEQ ID NO: 1735091 - RNA, 19 nt, Artificial Sequence
  Description of Artificial Sequence: Synthetic oligonucleotide
uuugaagauacguacagga

SEQ ID NO: 1735092 - RNA, 19 nt, Artificial Sequence
  Description of Artificial Sequence: Synthetic oligonucleotide
uugguaauaggccaccagg

SEQ ID NO: 1735093 - RNA, 19 nt, Artificial Sequence
  Description of Artificial Sequence: Synthetic oligonucleotide
gaagauacguacaggaucg

SEQ ID NO: 1735094 - RNA, 19 nt, Artificial Sequence
  Description of Artificial Sequence: Synthetic oligonucleotide
aacauucuuagagugaauc

SEQ ID NO: 1735095 - RNA, 19 nt, Artificial Sequence
  Description of Artificial Sequence: Synthetic oligonucleotide
gagguugagagccagaagc

SEQ ID NO: 1735096 - RNA, 19 nt, Artificial Sequence
  Description of Artificial Sequence: Synthetic oligonucleotide
acauucuuagagugaaucc

SEQ ID NO: 1735097 - RNA, 19 nt, Artificial Sequence
  Description of Artificial Sequence: Synthetic oligonucleotide
aaacucaucccuucugcac

SEQ ID NO: 1735098 - RNA, 19 nt, Artificial Sequence
  Description of Artificial Sequence: Synthetic oligonucleotide
aaacagagggucuucagcu

SEQ ID NO: 1735099 - RNA, 19 nt, Artificial Sequence
  Description of Artificial Sequence: Synthetic oligonucleotide
ugaagauacguacaggauc

SEQ ID NO: 1735100 - RNA, 19 nt, Artificial Sequence
  Description of Artificial Sequence: Synthetic oligonucleotide
guaacagagcuucuggugg

SEQ ID NO: 1735101 - RNA, 19 nt, Artificial Sequence
  Description of Artificial Sequence: Synthetic oligonucleotide
ugguaauaggccaccaggg

SEQ ID NO: 1735102 - RNA, 19 nt, Artificial Sequence
  Description of Artificial Sequence: Synthetic oligonucleotide
uuccauuugguaauaggcc

SEQ ID NO: 1735103 - RNA, 19 nt, Artificial Sequence
  Description of Artificial Sequence: Synthetic oligonucleotide
aacauugguguguuugcuc

SEQ ID NO: 1735104 - RNA, 19 nt, Artificial Sequence
  Description of Artificial Sequence: Synthetic oligonucleotide
uauaguucccagacugugg

SEQ ID NO: 1735105 - RNA, 19 nt, Artificial Sequence
  Description of Artificial Sequence: Synthetic oligonucleotide
uuccucuaccccaauauag

SEQ ID NO: 1735106 - RNA, 19 nt, Artificial Sequence
  Description of Artificial Sequence: Synthetic oligonucleotide
aaaacauucuuagagugaa

SEQ ID NO: 1735107 - RNA, 19 nt, Artificial Sequence
  Description of Artificial Sequence: Synthetic oligonucleotide
  modified_base (2)..(2): a, c, u, g, unknown or other
unagggcggaguaacagag

SEQ ID NO: 1735108 - RNA, 19 nt, Artificial Sequence
  Description of Artificial Sequence: Synthetic oligonucleotide
uaugcguauggguaugggg

SEQ ID NO: 1735109 - RNA, 19 nt, Artificial Sequence
  Description of Artificial Sequence: Synthetic oligonucleotide
acaugagcaacacucacug

SEQ ID NO: 1735110 - RNA, 19 nt, Artificial Sequence
  Description of Artificial Sequence: Synthetic oligonucleotide
ucauagugugcauagggca

SEQ ID NO: 1735111 - RNA, 19 nt, Artificial Sequence
  Description of Artificial Sequence: Synthetic oligonucleotide
uuauccucuuauaaugucu

SEQ ID NO: 1735112 - RNA, 19 nt, Artificial Sequence
  Description of Artificial Sequence: Synthetic oligonucleotide
aaggacauggcuugcugag

SEQ ID NO: 1735113 - RNA, 19 nt, Artificial Sequence
  Description of Artificial Sequence: Synthetic oligonucleotide
uucgaauucuuuauccucu

SEQ ID NO: 1735114 - RNA, 19 nt, Artificial Sequence
  Description of Artificial Sequence: Synthetic oligonucleotide
uauccucuuauaaugucug

SEQ ID NO: 1735115 - RNA, 19 nt, Artificial Sequence
  Description of Artificial Sequence: Synthetic oligonucleotide
uuaacauugguguguuugc

SEQ ID NO: 1735116 - RNA, 19 nt, Artificial Sequence
  Description of Artificial Sequence: Synthetic oligonucleotide
ucugugguguccaagggga

SEQ ID NO: 1735117 - RNA, 19 nt, Artificial Sequence
  Description of Artificial Sequence: Synthetic oligonucleotide
agagaugaucgccgcaucc

SEQ ID NO: 1735118 - RNA, 19 nt, Artificial Sequence
  Description of Artificial Sequence: Synthetic oligonucleotide
aacgacgcuuagcaggaac

SEQ ID NO: 1735119 - RNA, 19 nt, Artificial Sequence
  Description of Artificial Sequence: Synthetic oligonucleotide
ugcaaaacauucuuagagu

SEQ ID NO: 1735120 - RNA, 19 nt, Artificial Sequence
  Description of Artificial Sequence: Synthetic oligonucleotide
  modified_base (13)..(13): a, c, u, g, unknown or other
auggccaggauunagggcg

SEQ ID NO: 1735121 - RNA, 19 nt, Artificial Sequence
  Description of Artificial Sequence: Synthetic oligonucleotide
uuuugcaaacgccaggguc

SEQ ID NO: 1735122 - RNA, 19 nt, Artificial Sequence
  Description of Artificial Sequence: Synthetic oligonucleotide
cuuaacauugguguguuug

SEQ ID NO: 1735123 - RNA, 19 nt, Artificial Sequence
  Description of Artificial Sequence: Synthetic oligonucleotide
cauucuuagagugaauccc

SEQ ID NO: 1735124 - RNA, 19 nt, Artificial Sequence
  Description of Artificial Sequence: Synthetic oligonucleotide
aguucccagacuguggucc

SEQ ID NO: 1735125 - RNA, 19 nt, Artificial Sequence
  Description of Artificial Sequence: Synthetic oligonucleotide
ggaacuugaggacagagug

SEQ ID NO: 1735126 - RNA, 19 nt, Artificial Sequence
  Description of Artificial Sequence: Synthetic oligonucleotide
aguaacagagcuucuggug

SEQ ID NO: 1735127 - RNA, 19 nt, Artificial Sequence
  Description of Artificial Sequence: Synthetic oligonucleotide
auucuuagagugaaucccc

SEQ ID NO: 1735128 - RNA, 19 nt, Artificial Sequence
  Description of Artificial Sequence: Synthetic oligonucleotide
uuagagugaauccccugag

SEQ ID NO: 1735129 - RNA, 19 nt, Artificial Sequence
  Description of Artificial Sequence: Synthetic oligonucleotide
auaucuuaacauuggugug

SEQ ID NO: 1735130 - RNA, 19 nt, Artificial Sequence
  Description of Artificial Sequence: Synthetic oligonucleotide
auacguacaggaucgucuc

SEQ ID NO: 1735131 - RNA, 19 nt, Artificial Sequence
  Description of Artificial Sequence: Synthetic oligonucleotide
ucauguuugaagauacgua

SEQ ID NO: 1735132 - RNA, 19 nt, Artificial Sequence
  Description of Artificial Sequence: Synthetic oligonucleotide
uccccaauccugcacuugg

SEQ ID NO: 1735133 - RNA, 19 nt, Artificial Sequence
  Description of Artificial Sequence: Synthetic oligonucleotide
ugugugguagaagauggag

SEQ ID NO: 1735134 - RNA, 19 nt, Artificial Sequence
  Description of Artificial Sequence: Synthetic oligonucleotide
cucauagugugcauagggc

SEQ ID NO: 1735135 - RNA, 19 nt, Artificial Sequence
  Description of Artificial Sequence: Synthetic oligonucleotide
aggggccuggcucagauuc

SEQ ID NO: 1735136 - RNA, 19 nt, Artificial Sequence
  Description of Artificial Sequence: Synthetic oligonucleotide
agugccaucaugucugugu

SEQ ID NO: 1735137 - RNA, 19 nt, Artificial Sequence
  Description of Artificial Sequence: Synthetic oligonucleotide
ucaacgacgcuuagcagga

SEQ ID NO: 1735138 - RNA, 19 nt, Artificial Sequence
  Description of Artificial Sequence: Synthetic oligonucleotide
guaaggguugcacaugagc

SEQ ID NO: 1735139 - RNA, 19 nt, Artificial Sequence
  Description of Artificial Sequence: Synthetic oligonucleotide
guagcagcggaugacaucc

SEQ ID NO: 1735140 - RNA, 19 nt, Artificial Sequence
  Description of Artificial Sequence: Synthetic oligonucleotide
augucaauaagugccauca

SEQ ID NO: 1735141 - RNA, 19 nt, Artificial Sequence
  Description of Artificial Sequence: Synthetic oligonucleotide
  modified_base (4)..(4): a, c, u, g, unknown or other
auunagggcggaguaacag

SEQ ID NO: 1735142 - RNA, 19 nt, Artificial Sequence
  Description of Artificial Sequence: Synthetic oligonucleotide
ugcacuuggccccuuacac

SEQ ID NO: 1735143 - RNA, 19 nt, Artificial Sequence
  Description of Artificial Sequence: Synthetic oligonucleotide
ugacagguccgcaauuugc

SEQ ID NO: 1735144 - RNA, 19 nt, Artificial Sequence
  Description of Artificial Sequence: Synthetic oligonucleotide
acgagcguagagaugaucg

SEQ ID NO: 1735145 - RNA, 19 nt, Artificial Sequence
  Description of Artificial Sequence: Synthetic oligonucleotide
auuuccucuaccccaauau

SEQ ID NO: 1735146 - RNA, 19 nt, Artificial Sequence
  Description of Artificial Sequence: Synthetic oligonucleotide
uuuauccucuuauaauguc

SEQ ID NO: 1735147 - RNA, 19 nt, Artificial Sequence
  Description of Artificial Sequence: Synthetic oligonucleotide
gacacgagcguagagauga

SEQ ID NO: 1735148 - RNA, 19 nt, Artificial Sequence
  Description of Artificial Sequence: Synthetic oligonucleotide
acauugguguguuugcuca

SEQ ID NO: 1735149 - RNA, 19 nt, Artificial Sequence
  Description of Artificial Sequence: Synthetic oligonucleotide
auucuuucgaauucuuuau

SEQ ID NO: 1735150 - RNA, 19 nt, Artificial Sequence
  Description of Artificial Sequence: Synthetic oligonucleotide
  modified_base (3)..(3): a, c, u, g, unknown or other
uunagggcggaguaacaga

SEQ ID NO: 1735151 - RNA, 19 nt, Artificial Sequence
  Description of Artificial Sequence: Synthetic oligonucleotide
uguguuugcucaaggcagc

SEQ ID NO: 1735152 - RNA, 19 nt, Artificial Sequence
  Description of Artificial Sequence: Synthetic oligonucleotide
  modified_base (19)..(19): a, c, u, g, unknown or other
aagaccauggccaggauun

SEQ ID NO: 1735153 - RNA, 19 nt, Artificial Sequence
  Description of Artificial Sequence: Synthetic oligonucleotide
gcaaaacauucuuagagug

SEQ ID NO: 1735154 - RNA, 19 nt, Artificial Sequence
  Description of Artificial Sequence: Synthetic oligonucleotide
aagugacuagcuggggacc

SEQ ID NO: 1735155 - RNA, 19 nt, Artificial Sequence
  Description of Artificial Sequence: Synthetic oligonucleotide
caauccugcacuuggcccc

SEQ ID NO: 1735156 - RNA, 19 nt, Artificial Sequence
  Description of Artificial Sequence: Synthetic oligonucleotide
cauagugugcauagggcac

SEQ ID NO: 1735157 - RNA, 19 nt, Artificial Sequence
  Description of Artificial Sequence: Synthetic oligonucleotide
agcaacacucacugcaaag

SEQ ID NO: 1735158 - RNA, 19 nt, Artificial Sequence
  Description of Artificial Sequence: Synthetic oligonucleotide
ucgguguuccauuugguaa

SEQ ID NO: 1735159 - RNA, 19 nt, Artificial Sequence
  Description of Artificial Sequence: Synthetic oligonucleotide
agaagugacuagcugggga

SEQ ID NO: 1735160 - RNA, 19 nt, Artificial Sequence
  Description of Artificial Sequence: Synthetic oligonucleotide
ggaguaacagagcuucugg

SEQ ID NO: 1735161 - RNA, 19 nt, Artificial Sequence
  Description of Artificial Sequence: Synthetic oligonucleotide
uccgcaauuugccgcacag

SEQ ID NO: 1735162 - RNA, 19 nt, Artificial Sequence
  Description of Artificial Sequence: Synthetic oligonucleotide
agagugaauccccugaguu

SEQ ID NO: 1735163 - RNA, 19 nt, Artificial Sequence
  Description of Artificial Sequence: Synthetic oligonucleotide
uuacacugacucuucuuca

SEQ ID NO: 1735164 - RNA, 19 nt, Artificial Sequence
  Description of Artificial Sequence: Synthetic oligonucleotide
ucacccuaaggacauggcu

SEQ ID NO: 1735165 - RNA, 19 nt, Artificial Sequence
  Description of Artificial Sequence: Synthetic oligonucleotide
acauggcuugcugaggccc

SEQ ID NO: 1735166 - RNA, 19 nt, Artificial Sequence
  Description of Artificial Sequence: Synthetic oligonucleotide
ugcacaugagcaacacuca

SEQ ID NO: 1735167 - RNA, 19 nt, Artificial Sequence
  Description of Artificial Sequence: Synthetic oligonucleotide
agccuaucagcaaacagag

SEQ ID NO: 1735168 - RNA, 19 nt, Artificial Sequence
  Description of Artificial Sequence: Synthetic oligonucleotide
aauauaguucccagacugu

SEQ ID NO: 1735169 - RNA, 19 nt, Artificial Sequence
  Description of Artificial Sequence: Synthetic oligonucleotide
aaggguugcacaugagcaa

SEQ ID NO: 1735170 - RNA, 19 nt, Artificial Sequence
  Description of Artificial Sequence: Synthetic oligonucleotide
auauaguucccagacugug

SEQ ID NO: 1735171 - RNA, 19 nt, Artificial Sequence
  Description of Artificial Sequence: Synthetic oligonucleotide
ucuuagagugaauccccug

SEQ ID NO: 1735172 - RNA, 19 nt, Artificial Sequence
  Description of Artificial Sequence: Synthetic oligonucleotide
cuuagagugaauccccuga

SEQ ID NO: 1735173 - RNA, 19 nt, Artificial Sequence
  Description of Artificial Sequence: Synthetic oligonucleotide
ggggaggccauccucaacg

SEQ ID NO: 1735174 - RNA, 19 nt, Artificial Sequence
  Description of Artificial Sequence: Synthetic oligonucleotide
acagguccgcaauuugccg

SEQ ID NO: 1735175 - RNA, 19 nt, Artificial Sequence
  Description of Artificial Sequence: Synthetic oligonucleotide
gaugcugcaguccaguccu

SEQ ID NO: 1735176 - RNA, 19 nt, Artificial Sequence
  Description of Artificial Sequence: Synthetic oligonucleotide
agggcggaguaacagagcu

SEQ ID NO: 1735177 - RNA, 19 nt, Artificial Sequence
  Description of Artificial Sequence: Synthetic oligonucleotide
aacgccagggucugcguca

SEQ ID NO: 1735178 - RNA, 19 nt, Artificial Sequence
  Description of Artificial Sequence: Synthetic oligonucleotide
uucuuagagugaauccccu

SEQ ID NO: 1735179 - RNA, 19 nt, Artificial Sequence
  Description of Artificial Sequence: Synthetic oligonucleotide
acccuaaggacauggcuug

SEQ ID NO: 1735180 - RNA, 19 nt, Artificial Sequence
  Description of Artificial Sequence: Synthetic oligonucleotide
ccucuuauaaugucugugc

SEQ ID NO: 1735181 - RNA, 19 nt, Artificial Sequence
  Description of Artificial Sequence: Synthetic oligonucleotide
gugcucauagugugcauag

SEQ ID NO: 1735182 - RNA, 19 nt, Artificial Sequence
  Description of Artificial Sequence: Synthetic oligonucleotide
gacgcuuagcaggaacugg

SEQ ID NO: 1735183 - RNA, 19 nt, Artificial Sequence
  Description of Artificial Sequence: Synthetic oligonucleotide
auuugccgcacagugaugu

SEQ ID NO: 1735184 - RNA, 19 nt, Artificial Sequence
  Description of Artificial Sequence: Synthetic oligonucleotide
gacagguccgcaauuugcc

SEQ ID NO: 1735185 - RNA, 19 nt, Artificial Sequence
  Description of Artificial Sequence: Synthetic oligonucleotide
cugcacauggcgccgaagc

SEQ ID NO: 1735186 - RNA, 19 nt, Artificial Sequence
  Description of Artificial Sequence: Synthetic oligonucleotide
uccucuguucagaagcaaa

SEQ ID NO: 1735187 - RNA, 19 nt, Artificial Sequence
  Description of Artificial Sequence: Synthetic oligonucleotide
cucuaccccaauauaguuc

SEQ ID NO: 1735188 - RNA, 19 nt, Artificial Sequence
  Description of Artificial Sequence: Synthetic oligonucleotide
ugucggucugcaugucucg

SEQ ID NO: 1735189 - RNA, 19 nt, Artificial Sequence
  Description of Artificial Sequence: Synthetic oligonucleotide
agcguagagaugaucgccg

SEQ ID NO: 1735190 - RNA, 19 nt, Artificial Sequence
  Description of Artificial Sequence: Synthetic oligonucleotide
accccaauauaguucccag

SEQ ID NO: 1735191 - RNA, 19 nt, Artificial Sequence
  Description of Artificial Sequence: Synthetic oligonucleotide
gaucgccgcauccaggcug

SEQ ID NO: 1735192 - RNA, 19 nt, Artificial Sequence
  Description of Artificial Sequence: Synthetic oligonucleotide
ucagguggagguugagagc

SEQ ID NO: 1735193 - RNA, 19 nt, Artificial Sequence
  Description of Artificial Sequence: Synthetic oligonucleotide
cccaauauaguucccagac

SEQ ID NO: 1735194 - RNA, 19 nt, Artificial Sequence
  Description of Artificial Sequence: Synthetic oligonucleotide
aggacacgagcguagagau

SEQ ID NO: 1735195 - RNA, 19 nt, Artificial Sequence
  Description of Artificial Sequence: Synthetic oligonucleotide
uccccucacccuaaggaca

SEQ ID NO: 1735196 - RNA, 19 nt, Artificial Sequence
  Description of Artificial Sequence: Synthetic oligonucleotide
ugcaaagcuaaggcaaaga

SEQ ID NO: 1735197 - RNA, 19 nt, Artificial Sequence
  Description of Artificial Sequence: Synthetic oligonucleotide
uuuccucuaccccaauaua

SEQ ID NO: 1735198 - RNA, 19 nt, Artificial Sequence
  Description of Artificial Sequence: Synthetic oligonucleotide
uuugcucaaggcagccaug

SEQ ID NO: 1735199 - RNA, 19 nt, Artificial Sequence
  Description of Artificial Sequence: Synthetic oligonucleotide
cuuagcaggaacugggcaa

SEQ ID NO: 1735200 - RNA, 19 nt, Artificial Sequence
  Description of Artificial Sequence: Synthetic oligonucleotide
gauacguacaggaucgucu

SEQ ID NO: 1735201 - RNA, 19 nt, Artificial Sequence
  Description of Artificial Sequence: Synthetic oligonucleotide
aagcuaaggcaaagaacag

SEQ ID NO: 1735202 - RNA, 19 nt, Artificial Sequence
  Description of Artificial Sequence: Synthetic oligonucleotide
gagcguagagaugaucgcc

SEQ ID NO: 1735203 - RNA, 19 nt, Artificial Sequence
  Description of Artificial Sequence: Synthetic oligonucleotide
aggccauccucaacgacgc

SEQ ID NO: 1735204 - RNA, 19 nt, Artificial Sequence
  Description of Artificial Sequence: Synthetic oligonucleotide
gguaauaggccaccagggc

SEQ ID NO: 1735205 - RNA, 19 nt, Artificial Sequence
  Description of Artificial Sequence: Synthetic oligonucleotide
gaugaucgccgcauccagg

SEQ ID NO: 1735206 - RNA, 19 nt, Artificial Sequence
  Description of Artificial Sequence: Synthetic oligonucleotide
agauacguacaggaucguc

SEQ ID NO: 1735207 - RNA, 19 nt, Artificial Sequence
  Description of Artificial Sequence: Synthetic oligonucleotide
uggccccuuacacugacuc

SEQ ID NO: 1735208 - RNA, 19 nt, Artificial Sequence
  Description of Artificial Sequence: Synthetic oligonucleotide
acgcuuagcaggaacuggg

SEQ ID NO: 1735209 - RNA, 19 nt, Artificial Sequence
  Description of Artificial Sequence: Synthetic oligonucleotide
gcggaugacauccucgucc

SEQ ID NO: 1735210 - RNA, 19 nt, Artificial Sequence
  Description of Artificial Sequence: Synthetic oligonucleotide
ugcgucagucaggauaugc

SEQ ID NO: 1735211 - RNA, 19 nt, Artificial Sequence
  Description of Artificial Sequence: Synthetic oligonucleotide
cagguccgcaauuugccgc

SEQ ID NO: 1735212 - RNA, 19 nt, Artificial Sequence
  Description of Artificial Sequence: Synthetic oligonucleotide
acucaaacucaucccuucu

SEQ ID NO: 1735213 - RNA, 19 nt, Artificial Sequence
  Description of Artificial Sequence: Synthetic oligonucleotide
gucugugugguagaagaug

SEQ ID NO: 1735214 - RNA, 19 nt, Artificial Sequence
  Description of Artificial Sequence: Synthetic oligonucleotide
cuugcacauuuccucuacc

SEQ ID NO: 1735215 - RNA, 19 nt, Artificial Sequence
  Description of Artificial Sequence: Synthetic oligonucleotide
ggagagguacuccaugcgc

SEQ ID NO: 1735216 - RNA, 19 nt, Artificial Sequence
  Description of Artificial Sequence: Synthetic oligonucleotide
uaacauugguguguuugcu

SEQ ID NO: 1735217 - RNA, 19 nt, Artificial Sequence
  Description of Artificial Sequence: Synthetic oligonucleotide
cugaaaauaucuuaacauu

SEQ ID NO: 1735218 - RNA, 19 nt, Artificial Sequence
  Description of Artificial Sequence: Synthetic oligonucleotide
uacuccaugcgcagcuugu

SEQ ID NO: 1735219 - RNA, 19 nt, Artificial Sequence
  Description of Artificial Sequence: Synthetic oligonucleotide
augucucggggccagcuca

SEQ ID NO: 1735220 - RNA, 19 nt, Artificial Sequence
  Description of Artificial Sequence: Synthetic oligonucleotide
uggguaugcguauggguau

SEQ ID NO: 1735221 - RNA, 19 nt, Artificial Sequence
  Description of Artificial Sequence: Synthetic oligonucleotide
gucugcgucagucaggaua

SEQ ID NO: 1735222 - RNA, 19 nt, Artificial Sequence
  Description of Artificial Sequence: Synthetic oligonucleotide
uggugguccugugugucgg

SEQ ID NO: 1735223 - RNA, 19 nt, Artificial Sequence
  Description of Artificial Sequence: Synthetic oligonucleotide
gaggcagccuaucagcaaa

SEQ ID NO: 1735224 - RNA, 19 nt, Artificial Sequence
  Description of Artificial Sequence: Synthetic oligonucleotide
ugucaauaagugccaucau

SEQ ID NO: 1735225 - RNA, 19 nt, Artificial Sequence
  Description of Artificial Sequence: Synthetic oligonucleotide
gagagguacuccaugcgca

SEQ ID NO: 1735226 - RNA, 19 nt, Artificial Sequence
  Description of Artificial Sequence: Synthetic oligonucleotide
gaucgucuccucuguucag

SEQ ID NO: 1735227 - RNA, 19 nt, Artificial Sequence
  Description of Artificial Sequence: Synthetic oligonucleotide
uucaugcagagguccggca

SEQ ID NO: 1735228 - RNA, 19 nt, Artificial Sequence
  Description of Artificial Sequence: Synthetic oligonucleotide
caugagcaacacucacugc

SEQ ID NO: 1735229 - RNA, 19 nt, Artificial Sequence
  Description of Artificial Sequence: Synthetic oligonucleotide
cuggguaugcguaugggua

SEQ ID NO: 1735230 - RNA, 19 nt, Artificial Sequence
  Description of Artificial Sequence: Synthetic oligonucleotide
augcugaagaggcagccua

SEQ ID NO: 1735231 - RNA, 19 nt, Artificial Sequence
  Description of Artificial Sequence: Synthetic oligonucleotide
gcucaaggcagccaugaug

SEQ ID NO: 1735232 - RNA, 19 nt, Artificial Sequence
  Description of Artificial Sequence: Synthetic oligonucleotide
cucacccuaaggacauggc

SEQ ID NO: 1735233 - RNA, 19 nt, Artificial Sequence
  Description of Artificial Sequence: Synthetic oligonucleotide
gcaacacucacugcaaagc

SEQ ID NO: 1735234 - RNA, 19 nt, Artificial Sequence
  Description of Artificial Sequence: Synthetic oligonucleotide
acagaggacacgagcguag

SEQ ID NO: 1735235 - RNA, 19 nt, Artificial Sequence
  Description of Artificial Sequence: Synthetic oligonucleotide
auagugugcauagggcacu

SEQ ID NO: 1735236 - RNA, 19 nt, Artificial Sequence
  Description of Artificial Sequence: Synthetic oligonucleotide
  modified_base (6)..(6): a, c, u, g, unknown or other
ggauunagggcggaguaac

SEQ ID NO: 1735237 - RNA, 19 nt, Artificial Sequence
  Description of Artificial Sequence: Synthetic oligonucleotide
caaacucaucccuucugca

SEQ ID NO: 1735238 - RNA, 19 nt, Artificial Sequence
  Description of Artificial Sequence: Synthetic oligonucleotide
cagagggucuucagcuugc

SEQ ID NO: 1735239 - RNA, 19 nt, Artificial Sequence
  Description of Artificial Sequence: Synthetic oligonucleotide
guaugcguauggguauggg

SEQ ID NO: 1735240 - RNA, 19 nt, Artificial Sequence
  Description of Artificial Sequence: Synthetic oligonucleotide
gugacagguccgcaauuug

SEQ ID NO: 1735241 - RNA, 19 nt, Artificial Sequence
  Description of Artificial Sequence: Synthetic oligonucleotide
cuggggaccucucccagac

SEQ ID NO: 1735242 - RNA, 19 nt, Artificial Sequence
  Description of Artificial Sequence: Synthetic oligonucleotide
uagagaugaucgccgcauc

SEQ ID NO: 1735243 - RNA, 19 nt, Artificial Sequence
  Description of Artificial Sequence: Synthetic oligonucleotide
gcaaagcuaaggcaaagaa

SEQ ID NO: 1735244 - RNA, 19 nt, Artificial Sequence
  Description of Artificial Sequence: Synthetic oligonucleotide
caggauaugcagcaguucu

SEQ ID NO: 1735245 - RNA, 19 nt, Artificial Sequence
  Description of Artificial Sequence: Synthetic oligonucleotide
gggagagguacuccaugcg

SEQ ID NO: 1735246 - RNA, 19 nt, Artificial Sequence
  Description of Artificial Sequence: Synthetic oligonucleotide
aucgccgcauccaggcugc

SEQ ID NO: 1735247 - RNA, 19 nt, Artificial Sequence
  Description of Artificial Sequence: Synthetic oligonucleotide
aauaggccaccagggccag

SEQ ID NO: 1735248 - RNA, 19 nt, Artificial Sequence
  Description of Artificial Sequence: Synthetic oligonucleotide
caaagggugugcccaggug

SEQ ID NO: 1735249 - RNA, 19 nt, Artificial Sequence
  Description of Artificial Sequence: Synthetic oligonucleotide
ggcgccgaagcacuugagg

SEQ ID NO: 1735250 - RNA, 19 nt, Artificial Sequence
  Description of Artificial Sequence: Synthetic oligonucleotide
  modified_base (5)..(5): a, c, u, g, unknown or other
gauunagggcggaguaaca

SEQ ID NO: 1735251 - RNA, 19 nt, Artificial Sequence
  Description of Artificial Sequence: Synthetic oligonucleotide
ugcauagggcacugccucu

SEQ ID NO: 1735252 - RNA, 19 nt, Artificial Sequence
  Description of Artificial Sequence: Synthetic oligonucleotide
agguccgcaauuugccgca

SEQ ID NO: 1735253 - RNA, 19 nt, Artificial Sequence
  Description of Artificial Sequence: Synthetic oligonucleotide
cagcucaacaggcagcaca

SEQ ID NO: 1735254 - RNA, 19 nt, Artificial Sequence
  Description of Artificial Sequence: Synthetic oligonucleotide
cagcuugucuccaggugac

SEQ ID NO: 1735255 - RNA, 19 nt, Artificial Sequence
  Description of Artificial Sequence: Synthetic oligonucleotide
guacuccaugcgcagcuug

SEQ ID NO: 1735256 - RNA, 19 nt, Artificial Sequence
  Description of Artificial Sequence: Synthetic oligonucleotide
ugcugaagaggcagccuau

SEQ ID NO: 1735257 - RNA, 19 nt, Artificial Sequence
  Description of Artificial Sequence: Synthetic oligonucleotide
uguuugcucaaggcagcca

SEQ ID NO: 1735258 - RNA, 19 nt, Artificial Sequence
  Description of Artificial Sequence: Synthetic oligonucleotide
  modified_base (7)..(7): a, c, u, g, unknown or other
aggauunagggcggaguaa

SEQ ID NO: 1735259 - RNA, 19 nt, Artificial Sequence
  Description of Artificial Sequence: Synthetic oligonucleotide
ucuucagguaaggggccug

SEQ ID NO: 1735260 - RNA, 19 nt, Artificial Sequence
  Description of Artificial Sequence: Synthetic oligonucleotide
ugguccugugugucggucu

SEQ ID NO: 1735261 - RNA, 19 nt, Artificial Sequence
  Description of Artificial Sequence: Synthetic oligonucleotide
uucuggugguccugugugu

SEQ ID NO: 1735262 - RNA, 19 nt, Artificial Sequence
  Description of Artificial Sequence: Synthetic oligonucleotide
uccaaggggaggccauccu

SEQ ID NO: 1735263 - RNA, 19 nt, Artificial Sequence
  Description of Artificial Sequence: Synthetic oligonucleotide
cauagggcacugccucucc

SEQ ID NO: 1735264 - RNA, 19 nt, Artificial Sequence
  Description of Artificial Sequence: Synthetic oligonucleotide
gaggcccaagacucagccc

SEQ ID NO: 1735265 - RNA, 19 nt, Artificial Sequence
  Description of Artificial Sequence: Synthetic oligonucleotide
ggcucauguuugaagauac

SEQ ID NO: 1735266 - RNA, 19 nt, Artificial Sequence
  Description of Artificial Sequence: Synthetic oligonucleotide
  modified_base (17)..(17): a, c, u, g, unknown or other
gaccauggccaggauunag

SEQ ID NO: 1735267 - RNA, 19 nt, Artificial Sequence
  Description of Artificial Sequence: Synthetic oligonucleotide
ggcggaguaacagagcuuc

SEQ ID NO: 1735268 - RNA, 19 nt, Artificial Sequence
  Description of Artificial Sequence: Synthetic oligonucleotide
gcaaacagagggucuucag

SEQ ID NO: 1735269 - RNA, 19 nt, Artificial Sequence
  Description of Artificial Sequence: Synthetic oligonucleotide
cucuggguaugcguauggg

SEQ ID NO: 1735270 - RNA, 19 nt, Artificial Sequence
  Description of Artificial Sequence: Synthetic oligonucleotide
cagggagagguacuccaug

SEQ ID NO: 1735271 - RNA, 19 nt, Artificial Sequence
  Description of Artificial Sequence: Synthetic oligonucleotide
cucauguuugaagauacgu

SEQ ID NO: 1735272 - RNA, 19 nt, Artificial Sequence
  Description of Artificial Sequence: Synthetic oligonucleotide
agugacuagcuggggaccu

SEQ ID NO: 1735273 - RNA, 19 nt, Artificial Sequence
  Description of Artificial Sequence: Synthetic oligonucleotide
gcaaacgccagggucugcg

SEQ ID NO: 1735274 - RNA, 19 nt, Artificial Sequence
  Description of Artificial Sequence: Synthetic oligonucleotide
cgcaauuugccgcacagug

SEQ ID NO: 1735275 - RNA, 19 nt, Artificial Sequence
  Description of Artificial Sequence: Synthetic oligonucleotide
ggaucgucuccucuguuca

SEQ ID NO: 1735276 - RNA, 19 nt, Artificial Sequence
  Description of Artificial Sequence: Synthetic oligonucleotide
aauuugccgcacagugaug

SEQ ID NO: 1735277 - RNA, 19 nt, Artificial Sequence
  Description of Artificial Sequence: Synthetic oligonucleotide
cugcaaagcuaaggcaaag

SEQ ID NO: 1735278 - RNA, 19 nt, Artificial Sequence
  Description of Artificial Sequence: Synthetic oligonucleotide
aaacauucuuagagugaau

SEQ ID NO: 1735279 - RNA, 19 nt, Artificial Sequence
  Description of Artificial Sequence: Synthetic oligonucleotide
gcagagguccggcagcugc

SEQ ID NO: 1735280 - RNA, 19 nt, Artificial Sequence
  Description of Artificial Sequence: Synthetic oligonucleotide
aagauacguacaggaucgu

SEQ ID NO: 1735281 - RNA, 19 nt, Artificial Sequence
  Description of Artificial Sequence: Synthetic oligonucleotide
ccauuugguaauaggccac

SEQ ID NO: 1735282 - RNA, 19 nt, Artificial Sequence
  Description of Artificial Sequence: Synthetic oligonucleotide
cagccaugaugacauucug

SEQ ID NO: 1735283 - RNA, 19 nt, Artificial Sequence
  Description of Artificial Sequence: Synthetic oligonucleotide
gguucaugcagagguccgg

SEQ ID NO: 1735284 - RNA, 19 nt, Artificial Sequence
  Description of Artificial Sequence: Synthetic oligonucleotide
ugaucgccgcauccaggcu

SEQ ID NO: 1735285 - RNA, 19 nt, Artificial Sequence
  Description of Artificial Sequence: Synthetic oligonucleotide
acugcaaagcuaaggcaaa

SEQ ID NO: 1735286 - RNA, 19 nt, Artificial Sequence
  Description of Artificial Sequence: Synthetic oligonucleotide
aucgucuccucuguucaga

SEQ ID NO: 1735287 - RNA, 19 nt, Artificial Sequence
  Description of Artificial Sequence: Synthetic oligonucleotide
cugugguguccaaggggag

SEQ ID NO: 1735288 - RNA, 19 nt, Artificial Sequence
  Description of Artificial Sequence: Synthetic oligonucleotide
gucggucugcaugucucgg

SEQ ID NO: 1735289 - RNA, 19 nt, Artificial Sequence
  Description of Artificial Sequence: Synthetic oligonucleotide
gccgcagugacgcucggug

SEQ ID NO: 1735290 - RNA, 19 nt, Artificial Sequence
  Description of Artificial Sequence: Synthetic oligonucleotide
gcaugcaucagggagaggu

SEQ ID NO: 1735291 - RNA, 19 nt, Artificial Sequence
  Description of Artificial Sequence: Synthetic oligonucleotide
gguaugcguauggguaugg

SEQ ID NO: 1735292 - RNA, 19 nt, Artificial Sequence
  Description of Artificial Sequence: Synthetic oligonucleotide
gcuugucuccaggugacag

SEQ ID NO: 1735293 - RNA, 19 nt, Artificial Sequence
  Description of Artificial Sequence: Synthetic oligonucleotide
agacagcaugcaucaggga

SEQ ID NO: 1735294 - RNA, 19 nt, Artificial Sequence
  Description of Artificial Sequence: Synthetic oligonucleotide
cacaugagcaacacucacu

SEQ ID NO: 1735295 - RNA, 19 nt, Artificial Sequence
  Description of Artificial Sequence: Synthetic oligonucleotide
ugaauccccugaguucccu

SEQ ID NO: 1735296 - RNA, 19 nt, Artificial Sequence
  Description of Artificial Sequence: Synthetic oligonucleotide
guguuugcucaaggcagcc

SEQ ID NO: 1735297 - RNA, 19 nt, Artificial Sequence
  Description of Artificial Sequence: Synthetic oligonucleotide
cuugaggacagaguguggu

SEQ ID NO: 1735298 - RNA, 19 nt, Artificial Sequence
  Description of Artificial Sequence: Synthetic oligonucleotide
  modified_base (8)..(8): a, c, u, g, unknown or other
caggauunagggcggagua

SEQ ID NO: 1735299 - RNA, 19 nt, Artificial Sequence
  Description of Artificial Sequence: Synthetic oligonucleotide
aggcagccuaucagcaaac

SEQ ID NO: 1735300 - RNA, 19 nt, Artificial Sequence
  Description of Artificial Sequence: Synthetic oligonucleotide
gcacaugagcaacacucac

SEQ ID NO: 1735301 - RNA, 19 nt, Artificial Sequence
  Description of Artificial Sequence: Synthetic oligonucleotide
cucgguguuccauuuggua

SEQ ID NO: 1735302 - RNA, 19 nt, Artificial Sequence
  Description of Artificial Sequence: Synthetic oligonucleotide
agacucagcccaggcagug

SEQ ID NO: 1735303 - RNA, 19 nt, Artificial Sequence
  Description of Artificial Sequence: Synthetic oligonucleotide
ugcucaaggcagccaugau

SEQ ID NO: 1735304 - RNA, 19 nt, Artificial Sequence
  Description of Artificial Sequence: Synthetic oligonucleotide
caacacucacugcaaagcu

SEQ ID NO: 1735305 - RNA, 19 nt, Artificial Sequence
  Description of Artificial Sequence: Synthetic oligonucleotide
gguagggaugcugcagucc

SEQ ID NO: 1735306 - RNA, 19 nt, Artificial Sequence
  Description of Artificial Sequence: Synthetic oligonucleotide
agagguccggcagcugcuc

SEQ ID NO: 1735307 - RNA, 19 nt, Artificial Sequence
  Description of Artificial Sequence: Synthetic oligonucleotide
ugucucggggccagcucaa

SEQ ID NO: 1735308 - RNA, 19 nt, Artificial Sequence
  Description of Artificial Sequence: Synthetic oligonucleotide
ucuuaacauugguguguuu

SEQ ID NO: 1735309 - RNA, 19 nt, Artificial Sequence
  Description of Artificial Sequence: Synthetic oligonucleotide
caugucucggggccagcuc

SEQ ID NO: 1735310 - RNA, 19 nt, Artificial Sequence
  Description of Artificial Sequence: Synthetic oligonucleotide
guagagaugaucgccgcau

SEQ ID NO: 1735311 - RNA, 19 nt, Artificial Sequence
  Description of Artificial Sequence: Synthetic oligonucleotide
gguagcagcggaugacauc

SEQ ID NO: 1735312 - RNA, 19 nt, Artificial Sequence
  Description of Artificial Sequence: Synthetic oligonucleotide
agcuugcacauuuccucua

SEQ ID NO: 1735313 - RNA, 19 nt, Artificial Sequence
  Description of Artificial Sequence: Synthetic oligonucleotide
cauccucaacgacgcuuag

SEQ ID NO: 1735314 - RNA, 19 nt, Artificial Sequence
  Description of Artificial Sequence: Synthetic oligonucleotide
uggcgccgaagcacuugag

SEQ ID NO: 1735315 - RNA, 19 nt, Artificial Sequence
  Description of Artificial Sequence: Synthetic oligonucleotide
agggucugcgucagucagg

SEQ ID NO: 1735316 - RNA, 19 nt, Artificial Sequence
  Description of Artificial Sequence: Synthetic oligonucleotide
gacugugguccccaauccu

SEQ ID NO: 1735317 - RNA, 19 nt, Artificial Sequence
  Description of Artificial Sequence: Synthetic oligonucleotide
ccucacccuaaggacaugg

SEQ ID NO: 1735318 - RNA, 19 nt, Artificial Sequence
  Description of Artificial Sequence: Synthetic oligonucleotide
gcucauguuugaagauacg

SEQ ID NO: 1735319 - RNA, 19 nt, Artificial Sequence
  Description of Artificial Sequence: Synthetic oligonucleotide
guccaaggggaggccaucc

SEQ ID NO: 1735320 - RNA, 19 nt, Artificial Sequence
  Description of Artificial Sequence: Synthetic oligonucleotide
uuggccccuuacacugacu

SEQ ID NO: 1735321 - RNA, 19 nt, Artificial Sequence
  Description of Artificial Sequence: Synthetic oligonucleotide
cacccuaaggacauggcuu

SEQ ID NO: 1735322 - RNA, 19 nt, Artificial Sequence
  Description of Artificial Sequence: Synthetic oligonucleotide
agugacgcucgguguucca

SEQ ID NO: 1735323 - RNA, 19 nt, Artificial Sequence
  Description of Artificial Sequence: Synthetic oligonucleotide
gccgcauccaggcugcaca

SEQ ID NO: 1735324 - RNA, 19 nt, Artificial Sequence
  Description of Artificial Sequence: Synthetic oligonucleotide
cagguagcagcggaugaca

SEQ ID NO: 1735325 - RNA, 19 nt, Artificial Sequence
  Description of Artificial Sequence: Synthetic oligonucleotide
gcguagagaugaucgccgc

SEQ ID NO: 1735326 - RNA, 19 nt, Artificial Sequence
  Description of Artificial Sequence: Synthetic oligonucleotide
uagcagcggaugacauccu

SEQ ID NO: 1735327 - RNA, 19 nt, Artificial Sequence
  Description of Artificial Sequence: Synthetic oligonucleotide
acgcucgguguuccauuug

SEQ ID NO: 1735328 - RNA, 19 nt, Artificial Sequence
  Description of Artificial Sequence: Synthetic oligonucleotide
gguaaggguugcacaugag

SEQ ID NO: 1735329 - RNA, 19 nt, Artificial Sequence
  Description of Artificial Sequence: Synthetic oligonucleotide
cugccucucccauggagaa

SEQ ID NO: 1735330 - RNA, 19 nt, Artificial Sequence
  Description of Artificial Sequence: Synthetic oligonucleotide
uggggaccucucccagaca

SEQ ID NO: 1735331 - RNA, 19 nt, Artificial Sequence
  Description of Artificial Sequence: Synthetic oligonucleotide
gccucucccauggagaaga

SEQ ID NO: 1735332 - RNA, 19 nt, Artificial Sequence
  Description of Artificial Sequence: Synthetic oligonucleotide
gaguucccugcacccugac

SEQ ID NO: 1735333 - RNA, 19 nt, Artificial Sequence
  Description of Artificial Sequence: Synthetic oligonucleotide
cagugacgcucgguguucc

SEQ ID NO: 1735334 - RNA, 19 nt, Artificial Sequence
  Description of Artificial Sequence: Synthetic oligonucleotide
cauugguguguuugcucaa

SEQ ID NO: 1735335 - RNA, 19 nt, Artificial Sequence
  Description of Artificial Sequence: Synthetic oligonucleotide
cgagcguagagaugaucgc

SEQ ID NO: 1735336 - RNA, 19 nt, Artificial Sequence
  Description of Artificial Sequence: Synthetic oligonucleotide
cacgagcguagagaugauc

SEQ ID NO: 1735337 - RNA, 19 nt, Artificial Sequence
  Description of Artificial Sequence: Synthetic oligonucleotide
  modified_base (10)..(10): a, c, u, g, unknown or other
gccaggauunagggcggag

SEQ ID NO: 1735338 - RNA, 19 nt, Artificial Sequence
  Description of Artificial Sequence: Synthetic oligonucleotide
cagcuugcacauuuccucu

SEQ ID NO: 1735339 - RNA, 19 nt, Artificial Sequence
  Description of Artificial Sequence: Synthetic oligonucleotide
cgcacagugaugucaauaa

SEQ ID NO: 1735340 - RNA, 19 nt, Artificial Sequence
  Description of Artificial Sequence: Synthetic oligonucleotide
uggcuugcugaggcccaag

SEQ ID NO: 1735341 - RNA, 19 nt, Artificial Sequence
  Description of Artificial Sequence: Synthetic oligonucleotide
gcgucagucaggauaugca

SEQ ID NO: 1735342 - RNA, 19 nt, Artificial Sequence
  Description of Artificial Sequence: Synthetic oligonucleotide
gggucugcgucagucagga

SEQ ID NO: 1735343 - RNA, 19 nt, Artificial Sequence
  Description of Artificial Sequence: Synthetic oligonucleotide
gugaauccccugaguuccc

SEQ ID NO: 1735344 - RNA, 19 nt, Artificial Sequence
  Description of Artificial Sequence: Synthetic oligonucleotide
ggcaugcugaagaggcagc

SEQ ID NO: 1735345 - RNA, 19 nt, Artificial Sequence
  Description of Artificial Sequence: Synthetic oligonucleotide
ggcaaagggugugcccagg

SEQ ID NO: 1735346 - RNA, 19 nt, Artificial Sequence
  Description of Artificial Sequence: Synthetic oligonucleotide
uccugcacuuggccccuua

SEQ ID NO: 1735347 - RNA, 19 nt, Artificial Sequence
  Description of Artificial Sequence: Synthetic oligonucleotide
ccucaacgacgcuuagcag

SEQ ID NO: 1735348 - RNA, 19 nt, Artificial Sequence
  Description of Artificial Sequence: Synthetic oligonucleotide
caggacucuggguaugcgu

SEQ ID NO: 1735349 - RNA, 19 nt, Artificial Sequence
  Description of Artificial Sequence: Synthetic oligonucleotide
agguagcagcggaugacau

SEQ ID NO: 1735350 - RNA, 19 nt, Artificial Sequence
  Description of Artificial Sequence: Synthetic oligonucleotide
guccccaauccugcacuug

SEQ ID NO: 1735351 - RNA, 19 nt, Artificial Sequence
  Description of Artificial Sequence: Synthetic oligonucleotide
ugcaaacgccagggucugc

SEQ ID NO: 1735352 - RNA, 19 nt, Artificial Sequence
  Description of Artificial Sequence: Synthetic oligonucleotide
gccuaucagcaaacagagg

SEQ ID NO: 1735353 - RNA, 19 nt, Artificial Sequence
  Description of Artificial Sequence: Synthetic oligonucleotide
ggguaugcguauggguaug

SEQ ID NO: 1735354 - RNA, 19 nt, Artificial Sequence
  Description of Artificial Sequence: Synthetic oligonucleotide
ggugcucauagugugcaua

SEQ ID NO: 1735355 - RNA, 19 nt, Artificial Sequence
  Description of Artificial Sequence: Synthetic oligonucleotide
ccaaggggaggccauccuc

SEQ ID NO: 1735356 - RNA, 19 nt, Artificial Sequence
  Description of Artificial Sequence: Synthetic oligonucleotide
ccccugaguucccugcacc

SEQ ID NO: 1735357 - RNA, 19 nt, Artificial Sequence
  Description of Artificial Sequence: Synthetic oligonucleotide
guggcucauguuugaagau

SEQ ID NO: 1735358 - RNA, 19 nt, Artificial Sequence
  Description of Artificial Sequence: Synthetic oligonucleotide
gccaucaugucuguguggu

SEQ ID NO: 1735359 - RNA, 19 nt, Artificial Sequence
  Description of Artificial Sequence: Synthetic oligonucleotide
cacagaggacacgagcgua

SEQ ID NO: 1735360 - RNA, 19 nt, Artificial Sequence
  Description of Artificial Sequence: Synthetic oligonucleotide
acgccagggucugcgucag

SEQ ID NO: 1735361 - RNA, 19 nt, Artificial Sequence
  Description of Artificial Sequence: Synthetic oligonucleotide
guccgcaauuugccgcaca

SEQ ID NO: 1735362 - RNA, 19 nt, Artificial Sequence
  Description of Artificial Sequence: Synthetic oligonucleotide
ggguagggaugcugcaguc

SEQ ID NO: 1735363 - RNA, 19 nt, Artificial Sequence
  Description of Artificial Sequence: Synthetic oligonucleotide
agcuugucuccaggugaca

SEQ ID NO: 1735364 - RNA, 19 nt, Artificial Sequence
  Description of Artificial Sequence: Synthetic oligonucleotide
ccagguagcagcggaugac

SEQ ID NO: 1735365 - RNA, 19 nt, Artificial Sequence
  Description of Artificial Sequence: Synthetic oligonucleotide
  modified_base (18)..(18): a, c, u, g, unknown or other
agaccauggccaggauuna

SEQ ID NO: 1735366 - RNA, 19 nt, Artificial Sequence
  Description of Artificial Sequence: Synthetic oligonucleotide
gacgcucgguguuccauuu

SEQ ID NO: 1735367 - RNA, 19 nt, Artificial Sequence
  Description of Artificial Sequence: Synthetic oligonucleotide
agcaugcaucagggagagg

SEQ ID NO: 1735368 - RNA, 19 nt, Artificial Sequence
  Description of Artificial Sequence: Synthetic oligonucleotide
gggaugcugcaguccaguc

SEQ ID NO: 1735369 - RNA, 19 nt, Artificial Sequence
  Description of Artificial Sequence: Synthetic oligonucleotide
ggcuguggcucauguuuga

SEQ ID NO: 1735370 - RNA, 19 nt, Artificial Sequence
  Description of Artificial Sequence: Synthetic oligonucleotide
acuuggccccuuacacuga

SEQ ID NO: 1735371 - RNA, 19 nt, Artificial Sequence
  Description of Artificial Sequence: Synthetic oligonucleotide
ccauccucaacgacgcuua

SEQ ID NO: 1735372 - RNA, 19 nt, Artificial Sequence
  Description of Artificial Sequence: Synthetic oligonucleotide
gggaggccauccucaacga

SEQ ID NO: 1735373 - RNA, 19 nt, Artificial Sequence
  Description of Artificial Sequence: Synthetic oligonucleotide
gcugaagaggcagccuauc

SEQ ID NO: 1735374 - RNA, 19 nt, Artificial Sequence
  Description of Artificial Sequence: Synthetic oligonucleotide
gugguccugugugucgguc

SEQ ID NO: 1735375 - RNA, 19 nt, Artificial Sequence
  Description of Artificial Sequence: Synthetic oligonucleotide
cggaguaacagagcuucug

SEQ ID NO: 1735376 - RNA, 19 nt, Artificial Sequence
  Description of Artificial Sequence: Synthetic oligonucleotide
ccccaauauaguucccaga

SEQ ID NO: 1735377 - RNA, 19 nt, Artificial Sequence
  Description of Artificial Sequence: Synthetic oligonucleotide
ggaacugggcaaagggugu

SEQ ID NO: 1735378 - RNA, 19 nt, Artificial Sequence
  Description of Artificial Sequence: Synthetic oligonucleotide
gugacuagcuggggaccuc

SEQ ID NO: 1735379 - RNA, 19 nt, Artificial Sequence
  Description of Artificial Sequence: Synthetic oligonucleotide
ggacacgagcguagagaug

SEQ ID NO: 1735380 - RNA, 19 nt, Artificial Sequence
  Description of Artificial Sequence: Synthetic oligonucleotide
gcauagggcacugccucuc

SEQ ID NO: 1735381 - RNA, 19 nt, Artificial Sequence
  Description of Artificial Sequence: Synthetic oligonucleotide
caugcugaagaggcagccu

SEQ ID NO: 1735382 - RNA, 19 nt, Artificial Sequence
  Description of Artificial Sequence: Synthetic oligonucleotide
ccccuuacacugacucuuc

SEQ ID NO: 1735383 - RNA, 19 nt, Artificial Sequence
  Description of Artificial Sequence: Synthetic oligonucleotide
gggaccucucccagacagc

SEQ ID NO: 1735384 - RNA, 19 nt, Artificial Sequence
  Description of Artificial Sequence: Synthetic oligonucleotide
ggcagccuaucagcaaaca

SEQ ID NO: 1735385 - RNA, 19 nt, Artificial Sequence
  Description of Artificial Sequence: Synthetic oligonucleotide
auggcuugcugaggcccaa

SEQ ID NO: 1735386 - RNA, 19 nt, Artificial Sequence
  Description of Artificial Sequence: Synthetic oligonucleotide
ggguugcacaugagcaaca

SEQ ID NO: 1735387 - RNA, 19 nt, Artificial Sequence
  Description of Artificial Sequence: Synthetic oligonucleotide
ggcccaagacucagcccag

SEQ ID NO: 1735388 - RNA, 19 nt, Artificial Sequence
  Description of Artificial Sequence: Synthetic oligonucleotide
gguguuccauuugguaaua

SEQ ID NO: 1735389 - RNA, 19 nt, Artificial Sequence
  Description of Artificial Sequence: Synthetic oligonucleotide
gcuggggaccucucccaga

SEQ ID NO: 1735390 - RNA, 19 nt, Artificial Sequence
  Description of Artificial Sequence: Synthetic oligonucleotide
caaacgccagggucugcgu

SEQ ID NO: 1735391 - RNA, 19 nt, Artificial Sequence
  Description of Artificial Sequence: Synthetic oligonucleotide
agccgcagugacgcucggu

SEQ ID NO: 1735392 - RNA, 19 nt, Artificial Sequence
  Description of Artificial Sequence: Synthetic oligonucleotide
ggugacagguccgcaauuu

SEQ ID NO: 1735393 - RNA, 19 nt, Artificial Sequence
  Description of Artificial Sequence: Synthetic oligonucleotide
cagccgcagugacgcucgg

SEQ ID NO: 1735394 - RNA, 19 nt, Artificial Sequence
  Description of Artificial Sequence: Synthetic oligonucleotide
aggcugcacauggcgccga

SEQ ID NO: 1735395 - RNA, 19 nt, Artificial Sequence
  Description of Artificial Sequence: Synthetic oligonucleotide
cgacgcuuagcaggaacug

SEQ ID NO: 1735396 - RNA, 19 nt, Artificial Sequence
  Description of Artificial Sequence: Synthetic oligonucleotide
cccuaaggacauggcuugc

SEQ ID NO: 1735397 - RNA, 19 nt, Artificial Sequence
  Description of Artificial Sequence: Synthetic oligonucleotide
gucucggggccagcucaac

SEQ ID NO: 1735398 - RNA, 19 nt, Artificial Sequence
  Description of Artificial Sequence: Synthetic oligonucleotide
cguagagaugaucgccgca

SEQ ID NO: 1735399 - RNA, 19 nt, Artificial Sequence
  Description of Artificial Sequence: Synthetic oligonucleotide
acacgagcguagagaugau

SEQ ID NO: 1735400 - RNA, 19 nt, Artificial Sequence
  Description of Artificial Sequence: Synthetic oligonucleotide
cugcgucagucaggauaug

SEQ ID NO: 1735401 - RNA, 19 nt, Artificial Sequence
  Description of Artificial Sequence: Synthetic oligonucleotide
ggacucuggguaugcguau

SEQ ID NO: 1735402 - RNA, 19 nt, Artificial Sequence
  Description of Artificial Sequence: Synthetic oligonucleotide
gugugucggucugcauguc

SEQ ID NO: 1735403 - RNA, 19 nt, Artificial Sequence
  Description of Artificial Sequence: Synthetic oligonucleotide
  modified_base (9)..(9): a, c, u, g, unknown or other
ccaggauunagggcggagu

SEQ ID NO: 1735404 - RNA, 19 nt, Artificial Sequence
  Description of Artificial Sequence: Synthetic oligonucleotide
gugacgcucgguguuccau

SEQ ID NO: 1735405 - RNA, 19 nt, Artificial Sequence
  Description of Artificial Sequence: Synthetic oligonucleotide
cucagcccaggcagugggu

SEQ ID NO: 1735406 - RNA, 19 nt, Artificial Sequence
  Description of Artificial Sequence: Synthetic oligonucleotide
ggccccuuacacugacucu

SEQ ID NO: 1735407 - RNA, 19 nt, Artificial Sequence
  Description of Artificial Sequence: Synthetic oligonucleotide
gccccuuacacugacucuu

SEQ ID NO: 1735408 - RNA, 19 nt, Artificial Sequence
  Description of Artificial Sequence: Synthetic oligonucleotide
cuguggcagggcugccaaa

SEQ ID NO: 1735409 - RNA, 19 nt, Artificial Sequence
  Description of Artificial Sequence: Synthetic oligonucleotide
guguccaaggggaggccau

SEQ ID NO: 1735410 - RNA, 19 nt, Artificial Sequence
  Description of Artificial Sequence: Synthetic oligonucleotide
ccuuacacugacucuucuu

SEQ ID NO: 1735411 - RNA, 19 nt, Artificial Sequence
  Description of Artificial Sequence: Synthetic oligonucleotide
ggagcuccccucacccuaa

SEQ ID NO: 1735412 - RNA, 19 nt, Artificial Sequence
  Description of Artificial Sequence: Synthetic oligonucleotide
gccauccucaacgacgcuu

SEQ ID NO: 1735413 - RNA, 19 nt, Artificial Sequence
  Description of Artificial Sequence: Synthetic oligonucleotide
gguccgcaauuugccgcac

SEQ ID NO: 1735414 - RNA, 19 nt, Artificial Sequence
  Description of Artificial Sequence: Synthetic oligonucleotide
cgguguuccauuugguaau

SEQ ID NO: 1735415 - RNA, 19 nt, Artificial Sequence
  Description of Artificial Sequence: Synthetic oligonucleotide
ccuaaggacauggcuugcu

SEQ ID NO: 1735416 - RNA, 19 nt, Artificial Sequence
  Description of Artificial Sequence: Synthetic oligonucleotide
ggcaaagaacagagcuggu

SEQ ID NO: 1735417 - RNA, 19 nt, Artificial Sequence
  Description of Artificial Sequence: Synthetic oligonucleotide
ccgcacagugaugucaaua

SEQ ID NO: 1735418 - RNA, 19 nt, Artificial Sequence
  Description of Artificial Sequence: Synthetic oligonucleotide
ucgccgcauccaggcugca

SEQ ID NO: 1735419 - RNA, 19 nt, Artificial Sequence
  Description of Artificial Sequence: Synthetic oligonucleotide
gcaugucucggggccagcu

SEQ ID NO: 1735420 - RNA, 19 nt, Artificial Sequence
  Description of Artificial Sequence: Synthetic oligonucleotide
caacgacgcuuagcaggaa

SEQ ID NO: 1735421 - RNA, 19 nt, Artificial Sequence
  Description of Artificial Sequence: Synthetic oligonucleotide
  modified_base (11)..(11): a, c, u, g, unknown or other
ggccaggauunagggcgga

SEQ ID NO: 1735422 - RNA, 19 nt, Artificial Sequence
  Description of Artificial Sequence: Synthetic oligonucleotide
gcucgguguuccauuuggu

SEQ ID NO: 1735423 - RNA, 19 nt, Artificial Sequence
  Description of Artificial Sequence: Synthetic oligonucleotide
ccccucacccuaaggacau

SEQ ID NO: 1735424 - RNA, 19 nt, Artificial Sequence
  Description of Artificial Sequence: Synthetic oligonucleotide
cccuuacacugacucuucu

SEQ ID NO: 1735425 - RNA, 19 nt, Artificial Sequence
  Description of Artificial Sequence: Synthetic oligonucleotide
ccugaguucccugcacccu

SEQ ID NO: 1735426 - RNA, 19 nt, Artificial Sequence
  Description of Artificial Sequence: Synthetic oligonucleotide
cgcauccaggcugcacaug

SEQ ID NO: 1735427 - RNA, 19 nt, Artificial Sequence
  Description of Artificial Sequence: Synthetic oligonucleotide
gcggaguaacagagcuucu

SEQ ID NO: 1735428 - RNA, 19 nt, Artificial Sequence
  Description of Artificial Sequence: Synthetic oligonucleotide
ccgcagugacgcucggugu

SEQ ID NO: 1735429 - RNA, 19 nt, Artificial Sequence
  Description of Artificial Sequence: Synthetic oligonucleotide
cccucacccuaaggacaug

SEQ ID NO: 1735430 - RNA, 19 nt, Artificial Sequence
  Description of Artificial Sequence: Synthetic oligonucleotide
auccugcacuuggccccuu

SEQ ID NO: 1735431 - RNA, 19 nt, Artificial Sequence
  Description of Artificial Sequence: Synthetic oligonucleotide
gggcggaguaacagagcuu

SEQ ID NO: 1735432 - RNA, 19 nt, Artificial Sequence
  Description of Artificial Sequence: Synthetic oligonucleotide
ccgcauccaggcugcacau

SEQ ID NO: 1735433 - RNA, 19 nt, Artificial Sequence
  Description of Artificial Sequence: Synthetic oligonucleotide
ccgcaauuugccgcacagu

SEQ ID NO: 1735434 - RNA, 19 nt, Artificial Sequence
  Description of Artificial Sequence: Synthetic oligonucleotide
cgccgcauccaggcugcac

SEQ ID NO: 1735435 - RNA, 19 nt, Artificial Sequence
  Description of Artificial Sequence: Synthetic oligonucleotide
gccgcacagugaugucaau

SEQ ID NO: 1735436 - RNA, 19 nt, Artificial Sequence
  Description of Artificial Sequence: Synthetic oligonucleotide
ggucugcgucagucaggau

SEQ ID NO: 1735437 - RNA, 19 nt, Artificial Sequence
  Description of Artificial Sequence: Synthetic oligonucleotide
  modified_base (1)..(1): a, c, u, g, unknown or other
nagggcggaguaacagagc

SEQ ID NO: 1735438 - RNA, 19 nt, Artificial Sequence
  Description of Artificial Sequence: Synthetic oligonucleotide
auuaaaauaucacuuaagg

SEQ ID NO: 1735439 - RNA, 19 nt, Artificial Sequence
  Description of Artificial Sequence: Synthetic oligonucleotide
aacaauuguccauaguucc

SEQ ID NO: 1735440 - RNA, 19 nt, Artificial Sequence
  Description of Artificial Sequence: Synthetic oligonucleotide
uuaaaguugauuaaaauau

SEQ ID NO: 1735441 - RNA, 19 nt, Artificial Sequence
  Description of Artificial Sequence: Synthetic oligonucleotide
uauagauaaauccaauucc

SEQ ID NO: 1735442 - RNA, 19 nt, Artificial Sequence
  Description of Artificial Sequence: Synthetic oligonucleotide
auauagauaaauccaauuc

SEQ ID NO: 1735443 - RNA, 19 nt, Artificial Sequence
  Description of Artificial Sequence: Synthetic oligonucleotide
acaagaguaccacaaaugc

SEQ ID NO: 1735444 - RNA, 19 nt, Artificial Sequence
  Description of Artificial Sequence: Synthetic oligonucleotide
uuuguauucaugcuggaug

SEQ ID NO: 1735445 - RNA, 19 nt, Artificial Sequence
  Description of Artificial Sequence: Synthetic oligonucleotide
aauaagagcucauaauacu

SEQ ID NO: 1735446 - RNA, 19 nt, Artificial Sequence
  Description of Artificial Sequence: Synthetic oligonucleotide
uauaagagaaaucugcauc

SEQ ID NO: 1735447 - RNA, 19 nt, Artificial Sequence
  Description of Artificial Sequence: Synthetic oligonucleotide
aaucggauugacuaauaag

SEQ ID NO: 1735448 - RNA, 19 nt, Artificial Sequence
  Description of Artificial Sequence: Synthetic oligonucleotide
gguggaacgaaccaaaucg

SEQ ID NO: 1735449 - RNA, 19 nt, Artificial Sequence
  Description of Artificial Sequence: Synthetic oligonucleotide
uccguagucaccaacaaca

SEQ ID NO: 1735450 - RNA, 19 nt, Artificial Sequence
  Description of Artificial Sequence: Synthetic oligonucleotide
agaaaucugcaucaccugc

SEQ ID NO: 1735451 - RNA, 19 nt, Artificial Sequence
  Description of Artificial Sequence: Synthetic oligonucleotide
uucaggaccaccaacauau

SEQ ID NO: 1735452 - RNA, 19 nt, Artificial Sequence
  Description of Artificial Sequence: Synthetic oligonucleotide
agagucuacagucaaguuc

SEQ ID NO: 1735453 - RNA, 19 nt, Artificial Sequence
  Description of Artificial Sequence: Synthetic oligonucleotide
ugacauuccagcaccauag

SEQ ID NO: 1735454 - RNA, 19 nt, Artificial Sequence
  Description of Artificial Sequence: Synthetic oligonucleotide
uaauaagagcucauaauac

SEQ ID NO: 1735455 - RNA, 19 nt, Artificial Sequence
  Description of Artificial Sequence: Synthetic oligonucleotide
aaccaaaucggauugacua

SEQ ID NO: 1735456 - RNA, 19 nt, Artificial Sequence
  Description of Artificial Sequence: Synthetic oligonucleotide
caaaagcuaccuuauauag

SEQ ID NO: 1735457 - RNA, 19 nt, Artificial Sequence
  Description of Artificial Sequence: Synthetic oligonucleotide
gagacuuccaguccaaucc

SEQ ID NO: 1735458 - RNA, 19 nt, Artificial Sequence
  Description of Artificial Sequence: Synthetic oligonucleotide
agagucuucaaaucgccac

SEQ ID NO: 1735459 - RNA, 19 nt, Artificial Sequence
  Description of Artificial Sequence: Synthetic oligonucleotide
caaaucgccacuuccaugc

SEQ ID NO: 1735460 - RNA, 19 nt, Artificial Sequence
  Description of Artificial Sequence: Synthetic oligonucleotide
ugaacuucuaaaccauucc

SEQ ID NO: 1735461 - RNA, 19 nt, Artificial Sequence
  Description of Artificial Sequence: Synthetic oligonucleotide
uccaugaacuucuaaacca

SEQ ID NO: 1735462 - RNA, 19 nt, Artificial Sequence
  Description of Artificial Sequence: Synthetic oligonucleotide
aaaguugauuaaaauauca

SEQ ID NO: 1735463 - RNA, 19 nt, Artificial Sequence
  Description of Artificial Sequence: Synthetic oligonucleotide
aauucguuucaacugugug

SEQ ID NO: 1735464 - RNA, 19 nt, Artificial Sequence
  Description of Artificial Sequence: Synthetic oligonucleotide
aacgaaccaaaucggauug

SEQ ID NO: 1735465 - RNA, 19 nt, Artificial Sequence
  Description of Artificial Sequence: Synthetic oligonucleotide
ucugcaguaacacuggaau

SEQ ID NO: 1735466 - RNA, 19 nt, Artificial Sequence
  Description of Artificial Sequence: Synthetic oligonucleotide
agugugaaaucucugucuc

SEQ ID NO: 1735467 - RNA, 19 nt, Artificial Sequence
  Description of Artificial Sequence: Synthetic oligonucleotide
uuagugaauguaauugcca

SEQ ID NO: 1735468 - RNA, 19 nt, Artificial Sequence
  Description of Artificial Sequence: Synthetic oligonucleotide
ucaccaauuucuuugagau

SEQ ID NO: 1735469 - RNA, 19 nt, Artificial Sequence
  Description of Artificial Sequence: Synthetic oligonucleotide
agguaaaucaaaugcccgg

SEQ ID NO: 1735470 - RNA, 19 nt, Artificial Sequence
  Description of Artificial Sequence: Synthetic oligonucleotide
accaacauaucucagcaug

SEQ ID NO: 1735471 - RNA, 19 nt, Artificial Sequence
  Description of Artificial Sequence: Synthetic oligonucleotide
caugcguuuugucauaagg

SEQ ID NO: 1735472 - RNA, 19 nt, Artificial Sequence
  Description of Artificial Sequence: Synthetic oligonucleotide
ugcguuuugucauaagggc

SEQ ID NO: 1735473 - RNA, 19 nt, Artificial Sequence
  Description of Artificial Sequence: Synthetic oligonucleotide
uguggugccucccuguagg

SEQ ID NO: 1735474 - RNA, 19 nt, Artificial Sequence
  Description of Artificial Sequence: Synthetic oligonucleotide
ucuacagucaaguuccuuc

SEQ ID NO: 1735475 - RNA, 19 nt, Artificial Sequence
  Description of Artificial Sequence: Synthetic oligonucleotide
auaugguuacaacaaagga

SEQ ID NO: 1735476 - RNA, 19 nt, Artificial Sequence
  Description of Artificial Sequence: Synthetic oligonucleotide
aagaguaccacaaaugcau

SEQ ID NO: 1735477 - RNA, 19 nt, Artificial Sequence
  Description of Artificial Sequence: Synthetic oligonucleotide
uguuccuuagccacacggg

SEQ ID NO: 1735478 - RNA, 19 nt, Artificial Sequence
  Description of Artificial Sequence: Synthetic oligonucleotide
agagucuagcuucagcggg

SEQ ID NO: 1735479 - RNA, 19 nt, Artificial Sequence
  Description of Artificial Sequence: Synthetic oligonucleotide
ucauaauacuuuggcaugg

SEQ ID NO: 1735480 - RNA, 19 nt, Artificial Sequence
  Description of Artificial Sequence: Synthetic oligonucleotide
acuaauaagagcucauaau

SEQ ID NO: 1735481 - RNA, 19 nt, Artificial Sequence
  Description of Artificial Sequence: Synthetic oligonucleotide
aguugcuuuuccaaugugc

SEQ ID NO: 1735482 - RNA, 19 nt, Artificial Sequence
  Description of Artificial Sequence: Synthetic oligonucleotide
uuauauagauaaauccaau

SEQ ID NO: 1735483 - RNA, 19 nt, Artificial Sequence
  Description of Artificial Sequence: Synthetic oligonucleotide
aucggauugacuaauaaga

SEQ ID NO: 1735484 - RNA, 19 nt, Artificial Sequence
  Description of Artificial Sequence: Synthetic oligonucleotide
ccauauaagagaaaucugc

SEQ ID NO: 1735485 - RNA, 19 nt, Artificial Sequence
  Description of Artificial Sequence: Synthetic oligonucleotide
uguguugccaucuucgcaa

SEQ ID NO: 1735486 - RNA, 19 nt, Artificial Sequence
  Description of Artificial Sequence: Synthetic oligonucleotide
agagcaaacacaagaguac

SEQ ID NO: 1735487 - RNA, 19 nt, Artificial Sequence
  Description of Artificial Sequence: Synthetic oligonucleotide
uuuggcaugggucauccuc

SEQ ID NO: 1735488 - RNA, 19 nt, Artificial Sequence
  Description of Artificial Sequence: Synthetic oligonucleotide
cucaaaacaucucuuuuac

SEQ ID NO: 1735489 - RNA, 19 nt, Artificial Sequence
  Description of Artificial Sequence: Synthetic oligonucleotide
auucguuucaacugugugu

SEQ ID NO: 1735490 - RNA, 19 nt, Artificial Sequence
  Description of Artificial Sequence: Synthetic oligonucleotide
guuuguguugccaucuucg

SEQ ID NO: 1735491 - RNA, 19 nt, Artificial Sequence
  Description of Artificial Sequence: Synthetic oligonucleotide
aaucaaaugcccggagcac

SEQ ID NO: 1735492 - RNA, 19 nt, Artificial Sequence
  Description of Artificial Sequence: Synthetic oligonucleotide
ucucuaacaguguuugucu

SEQ ID NO: 1735493 - RNA, 19 nt, Artificial Sequence
  Description of Artificial Sequence: Synthetic oligonucleotide
aaaucggauugacuaauaa

SEQ ID NO: 1735494 - RNA, 19 nt, Artificial Sequence
  Description of Artificial Sequence: Synthetic oligonucleotide
augcagagcaaacacaaga

SEQ ID NO: 1735495 - RNA, 19 nt, Artificial Sequence
  Description of Artificial Sequence: Synthetic oligonucleotide
ugcauuauauggauccacu

SEQ ID NO: 1735496 - RNA, 19 nt, Artificial Sequence
  Description of Artificial Sequence: Synthetic oligonucleotide
aacuguguguaccagcgaa

SEQ ID NO: 1735497 - RNA, 19 nt, Artificial Sequence
  Description of Artificial Sequence: Synthetic oligonucleotide
uaucacuuaaggcaucauc

SEQ ID NO: 1735498 - RNA, 19 nt, Artificial Sequence
  Description of Artificial Sequence: Synthetic oligonucleotide
gucaccaacaacacaaugc

SEQ ID NO: 1735499 - RNA, 19 nt, Artificial Sequence
  Description of Artificial Sequence: Synthetic oligonucleotide
acuuaaaguugauuaaaau

SEQ ID NO: 1735500 - RNA, 19 nt, Artificial Sequence
  Description of Artificial Sequence: Synthetic oligonucleotide
cagguaaaucaaaugcccg

SEQ ID NO: 1735501 - RNA, 19 nt, Artificial Sequence
  Description of Artificial Sequence: Synthetic oligonucleotide
agagacuuccaguccaauc

SEQ ID NO: 1735502 - RNA, 19 nt, Artificial Sequence
  Description of Artificial Sequence: Synthetic oligonucleotide
cauauaagagaaaucugca

SEQ ID NO: 1735503 - RNA, 19 nt, Artificial Sequence
  Description of Artificial Sequence: Synthetic oligonucleotide
aaaccauucccagagacuu

SEQ ID NO: 1735504 - RNA, 19 nt, Artificial Sequence
  Description of Artificial Sequence: Synthetic oligonucleotide
ucuuuuacacgcaugcguu

SEQ ID NO: 1735505 - RNA, 19 nt, Artificial Sequence
  Description of Artificial Sequence: Synthetic oligonucleotide
uccucauagguccaugaac

SEQ ID NO: 1735506 - RNA, 19 nt, Artificial Sequence
  Description of Artificial Sequence: Synthetic oligonucleotide
ugcuucugaaucaugccac

SEQ ID NO: 1735507 - RNA, 19 nt, Artificial Sequence
  Description of Artificial Sequence: Synthetic oligonucleotide
auauaagagaaaucugcau

SEQ ID NO: 1735508 - RNA, 19 nt, Artificial Sequence
  Description of Artificial Sequence: Synthetic oligonucleotide
cauaucucagcaugggaac

SEQ ID NO: 1735509 - RNA, 19 nt, Artificial Sequence
  Description of Artificial Sequence: Synthetic oligonucleotide
uaccacaaaugcauuauau

SEQ ID NO: 1735510 - RNA, 19 nt, Artificial Sequence
  Description of Artificial Sequence: Synthetic oligonucleotide
uuguccauaguuccguagu

SEQ ID NO: 1735511 - RNA, 19 nt, Artificial Sequence
  Description of Artificial Sequence: Synthetic oligonucleotide
gacuaauaagagcucauaa

SEQ ID NO: 1735512 - RNA, 19 nt, Artificial Sequence
  Description of Artificial Sequence: Synthetic oligonucleotide
uguuacaaaguuagugaau

SEQ ID NO: 1735513 - RNA, 19 nt, Artificial Sequence
  Description of Artificial Sequence: Synthetic oligonucleotide
cuaucucuaacaguguuug

SEQ ID NO: 1735514 - RNA, 19 nt, Artificial Sequence
  Description of Artificial Sequence: Synthetic oligonucleotide
augcguuuugucauaaggg

SEQ ID NO: 1735515 - RNA, 19 nt, Artificial Sequence
  Description of Artificial Sequence: Synthetic oligonucleotide
uuuguguugccaucuucgc

SEQ ID NO: 1735516 - RNA, 19 nt, Artificial Sequence
  Description of Artificial Sequence: Synthetic oligonucleotide
uuugucauaagggccuugc

SEQ ID NO: 1735517 - RNA, 19 nt, Artificial Sequence
  Description of Artificial Sequence: Synthetic oligonucleotide
ucacuuaaggcaucaucca

SEQ ID NO: 1735518 - RNA, 19 nt, Artificial Sequence
  Description of Artificial Sequence: Synthetic oligonucleotide
aaaagcuaccuuauauaga

SEQ ID NO: 1735519 - RNA, 19 nt, Artificial Sequence
  Description of Artificial Sequence: Synthetic oligonucleotide
ugugaaaucucugucucaa

SEQ ID NO: 1735520 - RNA, 19 nt, Artificial Sequence
  Description of Artificial Sequence: Synthetic oligonucleotide
uccauaguuccguagucac

SEQ ID NO: 1735521 - RNA, 19 nt, Artificial Sequence
  Description of Artificial Sequence: Synthetic oligonucleotide
acagccguggcagacgagc

SEQ ID NO: 1735522 - RNA, 19 nt, Artificial Sequence
  Description of Artificial Sequence: Synthetic oligonucleotide
gcaugggucauccucauag

SEQ ID NO: 1735523 - RNA, 19 nt, Artificial Sequence
  Description of Artificial Sequence: Synthetic oligonucleotide
auauggauccacuccaaaa

SEQ ID NO: 1735524 - RNA, 19 nt, Artificial Sequence
  Description of Artificial Sequence: Synthetic oligonucleotide
gaacaauuguccauaguuc

SEQ ID NO: 1735525 - RNA, 19 nt, Artificial Sequence
  Description of Artificial Sequence: Synthetic oligonucleotide
agguccaugaacuucuaaa

SEQ ID NO: 1735526 - RNA, 19 nt, Artificial Sequence
  Description of Artificial Sequence: Synthetic oligonucleotide
cucaauggagccagcuugg

SEQ ID NO: 1735527 - RNA, 19 nt, Artificial Sequence
  Description of Artificial Sequence: Synthetic oligonucleotide
uggaacgaaccaaaucgga

SEQ ID NO: 1735528 - RNA, 19 nt, Artificial Sequence
  Description of Artificial Sequence: Synthetic oligonucleotide
uucguuucaacugugugua

SEQ ID NO: 1735529 - RNA, 19 nt, Artificial Sequence
  Description of Artificial Sequence: Synthetic oligonucleotide
ugaauguaauugccagagc

SEQ ID NO: 1735530 - RNA, 19 nt, Artificial Sequence
  Description of Artificial Sequence: Synthetic oligonucleotide
acuuaaggcaucauccaag

SEQ ID NO: 1735531 - RNA, 19 nt, Artificial Sequence
  Description of Artificial Sequence: Synthetic oligonucleotide
uacaaaguuagugaaugua

SEQ ID NO: 1735532 - RNA, 19 nt, Artificial Sequence
  Description of Artificial Sequence: Synthetic oligonucleotide
ucuaucucuaacaguguuu

SEQ ID NO: 1735533 - RNA, 19 nt, Artificial Sequence
  Description of Artificial Sequence: Synthetic oligonucleotide
uuacaaaguuagugaaugu

SEQ ID NO: 1735534 - RNA, 19 nt, Artificial Sequence
  Description of Artificial Sequence: Synthetic oligonucleotide
gagaaaucugcaucaccug

SEQ ID NO: 1735535 - RNA, 19 nt, Artificial Sequence
  Description of Artificial Sequence: Synthetic oligonucleotide
guuccuuagccacacgggc

SEQ ID NO: 1735536 - RNA, 19 nt, Artificial Sequence
  Description of Artificial Sequence: Synthetic oligonucleotide
uccuuagccacacgggcug

SEQ ID NO: 1735537 - RNA, 19 nt, Artificial Sequence
  Description of Artificial Sequence: Synthetic oligonucleotide
aaaauucguuucaacugug

SEQ ID NO: 1735538 - RNA, 19 nt, Artificial Sequence
  Description of Artificial Sequence: Synthetic oligonucleotide
acuaucuguuuguguugcc

SEQ ID NO: 1735539 - RNA, 19 nt, Artificial Sequence
  Description of Artificial Sequence: Synthetic oligonucleotide
agugaauguaauugccaga

SEQ ID NO: 1735540 - RNA, 19 nt, Artificial Sequence
  Description of Artificial Sequence: Synthetic oligonucleotide
ucaaaucgccacuuccaug

SEQ ID NO: 1735541 - RNA, 19 nt, Artificial Sequence
  Description of Artificial Sequence: Synthetic oligonucleotide
cuucucaacacacacacua

SEQ ID NO: 1735542 - RNA, 19 nt, Artificial Sequence
  Description of Artificial Sequence: Synthetic oligonucleotide
uaccagcgaacaauugucc

SEQ ID NO: 1735543 - RNA, 19 nt, Artificial Sequence
  Description of Artificial Sequence: Synthetic oligonucleotide
gaaucaugccacuuaaagu

SEQ ID NO: 1735544 - RNA, 19 nt, Artificial Sequence
  Description of Artificial Sequence: Synthetic oligonucleotide
augcauuauauggauccac

SEQ ID NO: 1735545 - RNA, 19 nt, Artificial Sequence
  Description of Artificial Sequence: Synthetic oligonucleotide
ucucuuuuacacgcaugcg

SEQ ID NO: 1735546 - RNA, 19 nt, Artificial Sequence
  Description of Artificial Sequence: Synthetic oligonucleotide
uuuacacgcaugcguuuug

SEQ ID NO: 1735547 - RNA, 19 nt, Artificial Sequence
  Description of Artificial Sequence: Synthetic oligonucleotide
ccuuauauagauaaaucca

SEQ ID NO: 1735548 - RNA, 19 nt, Artificial Sequence
  Description of Artificial Sequence: Synthetic oligonucleotide
acaauuguccauaguuccg

SEQ ID NO: 1735549 - RNA, 19 nt, Artificial Sequence
  Description of Artificial Sequence: Synthetic oligonucleotide
uauauggauccacuccaaa

SEQ ID NO: 1735550 - RNA, 19 nt, Artificial Sequence
  Description of Artificial Sequence: Synthetic oligonucleotide
gggucauccucauaggucc

SEQ ID NO: 1735551 - RNA, 19 nt, Artificial Sequence
  Description of Artificial Sequence: Synthetic oligonucleotide
acacgcaugcguuuuguca

SEQ ID NO: 1735552 - RNA, 19 nt, Artificial Sequence
  Description of Artificial Sequence: Synthetic oligonucleotide
uuguguugccaucuucgca

SEQ ID NO: 1735553 - RNA, 19 nt, Artificial Sequence
  Description of Artificial Sequence: Synthetic oligonucleotide
uugacuaauaagagcucau

SEQ ID NO: 1735554 - RNA, 19 nt, Artificial Sequence
  Description of Artificial Sequence: Synthetic oligonucleotide
cuuuguugguggaacgaac

SEQ ID NO: 1735555 - RNA, 19 nt, Artificial Sequence
  Description of Artificial Sequence: Synthetic oligonucleotide
ugcccggagcacuucaggg

SEQ ID NO: 1735556 - RNA, 19 nt, Artificial Sequence
  Description of Artificial Sequence: Synthetic oligonucleotide
ugggucauccucauagguc

SEQ ID NO: 1735557 - RNA, 19 nt, Artificial Sequence
  Description of Artificial Sequence: Synthetic oligonucleotide
cagagucuagcuucagcgg

SEQ ID NO: 1735558 - RNA, 19 nt, Artificial Sequence
  Description of Artificial Sequence: Synthetic oligonucleotide
aguacagauaugguuacaa

SEQ ID NO: 1735559 - RNA, 19 nt, Artificial Sequence
  Description of Artificial Sequence: Synthetic oligonucleotide
gugucagguaaaucaaaug

SEQ ID NO: 1735560 - RNA, 19 nt, Artificial Sequence
  Description of Artificial Sequence: Synthetic oligonucleotide
uaagggccuugcucaaugg

SEQ ID NO: 1735561 - RNA, 19 nt, Artificial Sequence
  Description of Artificial Sequence: Synthetic oligonucleotide
uuauauggauccacuccaa

SEQ ID NO: 1735562 - RNA, 19 nt, Artificial Sequence
  Description of Artificial Sequence: Synthetic oligonucleotide
auaaaaugugcaguacaga

SEQ ID NO: 1735563 - RNA, 19 nt, Artificial Sequence
  Description of Artificial Sequence: Synthetic oligonucleotide
ucuucgcaaugccagccug

SEQ ID NO: 1735564 - RNA, 19 nt, Artificial Sequence
  Description of Artificial Sequence: Synthetic oligonucleotide
cauaguuccguagucacca

SEQ ID NO: 1735565 - RNA, 19 nt, Artificial Sequence
  Description of Artificial Sequence: Synthetic oligonucleotide
caacauaucucagcauggg

SEQ ID NO: 1735566 - RNA, 19 nt, Artificial Sequence
  Description of Artificial Sequence: Synthetic oligonucleotide
aaaaugugcaguacagaua

SEQ ID NO: 1735567 - RNA, 19 nt, Artificial Sequence
  Description of Artificial Sequence: Synthetic oligonucleotide
caggaucagucccacauac

SEQ ID NO: 1735568 - RNA, 19 nt, Artificial Sequence
  Description of Artificial Sequence: Synthetic oligonucleotide
uuccuuagccacacgggcu

SEQ ID NO: 1735569 - RNA, 19 nt, Artificial Sequence
  Description of Artificial Sequence: Synthetic oligonucleotide
caaugccauaaucaccagc

SEQ ID NO: 1735570 - RNA, 19 nt, Artificial Sequence
  Description of Artificial Sequence: Synthetic oligonucleotide
cagagcaaacacaagagua

SEQ ID NO: 1735571 - RNA, 19 nt, Artificial Sequence
  Description of Artificial Sequence: Synthetic oligonucleotide
aaauucguuucaacugugu

SEQ ID NO: 1735572 - RNA, 19 nt, Artificial Sequence
  Description of Artificial Sequence: Synthetic oligonucleotide
ugguggaacgaaccaaauc

SEQ ID NO: 1735573 - RNA, 19 nt, Artificial Sequence
  Description of Artificial Sequence: Synthetic oligonucleotide
uguccauaguuccguaguc

SEQ ID NO: 1735574 - RNA, 19 nt, Artificial Sequence
  Description of Artificial Sequence: Synthetic oligonucleotide
cugagcaaaagcuaccuua

SEQ ID NO: 1735575 - RNA, 19 nt, Artificial Sequence
  Description of Artificial Sequence: Synthetic oligonucleotide
uuccguagucaccaacaac

SEQ ID NO: 1735576 - RNA, 19 nt, Artificial Sequence
  Description of Artificial Sequence: Synthetic oligonucleotide
uaucucagcaugggaacug

SEQ ID NO: 1735577 - RNA, 19 nt, Artificial Sequence
  Description of Artificial Sequence: Synthetic oligonucleotide
auaagagcucauaauacuu

SEQ ID NO: 1735578 - RNA, 19 nt, Artificial Sequence
  Description of Artificial Sequence: Synthetic oligonucleotide
ccaacauaucucagcaugg

SEQ ID NO: 1735579 - RNA, 19 nt, Artificial Sequence
  Description of Artificial Sequence: Synthetic oligonucleotide
agcgaacaauuguccauag

SEQ ID NO: 1735580 - RNA, 19 nt, Artificial Sequence
  Description of Artificial Sequence: Synthetic oligonucleotide
accaaaucggauugacuaa

SEQ ID NO: 1735581 - RNA, 19 nt, Artificial Sequence
  Description of Artificial Sequence: Synthetic oligonucleotide
agagacagccguggcagac

SEQ ID NO: 1735582 - RNA, 19 nt, Artificial Sequence
  Description of Artificial Sequence: Synthetic oligonucleotide
accagcgaacaauugucca

SEQ ID NO: 1735583 - RNA, 19 nt, Artificial Sequence
  Description of Artificial Sequence: Synthetic oligonucleotide
uguugguggaacgaaccaa

SEQ ID NO: 1735584 - RNA, 19 nt, Artificial Sequence
  Description of Artificial Sequence: Synthetic oligonucleotide
aguuccguagucaccaaca

SEQ ID NO: 1735585 - RNA, 19 nt, Artificial Sequence
  Description of Artificial Sequence: Synthetic oligonucleotide
agcuuggcccauauaagag

SEQ ID NO: 1735586 - RNA, 19 nt, Artificial Sequence
  Description of Artificial Sequence: Synthetic oligonucleotide
ugguucuguuacaaaguua

SEQ ID NO: 1735587 - RNA, 19 nt, Artificial Sequence
  Description of Artificial Sequence: Synthetic oligonucleotide
cuuggcccauauaagagaa

SEQ ID NO: 1735588 - RNA, 19 nt, Artificial Sequence
  Description of Artificial Sequence: Synthetic oligonucleotide
augggaacugacauuccag

SEQ ID NO: 1735589 - RNA, 19 nt, Artificial Sequence
  Description of Artificial Sequence: Synthetic oligonucleotide
guaccagcgaacaauuguc

SEQ ID NO: 1735590 - RNA, 19 nt, Artificial Sequence
  Description of Artificial Sequence: Synthetic oligonucleotide
uguguguaccagcgaacaa

SEQ ID NO: 1735591 - RNA, 19 nt, Artificial Sequence
  Description of Artificial Sequence: Synthetic oligonucleotide
gauuuguauucaugcugga

SEQ ID NO: 1735592 - RNA, 19 nt, Artificial Sequence
  Description of Artificial Sequence: Synthetic oligonucleotide
ucaaaugcccggagcacuu

SEQ ID NO: 1735593 - RNA, 19 nt, Artificial Sequence
  Description of Artificial Sequence: Synthetic oligonucleotide
ugacuaauaagagcucaua

SEQ ID NO: 1735594 - RNA, 19 nt, Artificial Sequence
  Description of Artificial Sequence: Synthetic oligonucleotide
acacacuaucuguuugugu

SEQ ID NO: 1735595 - RNA, 19 nt, Artificial Sequence
  Description of Artificial Sequence: Synthetic oligonucleotide
uaguuccguagucaccaac

SEQ ID NO: 1735596 - RNA, 19 nt, Artificial Sequence
  Description of Artificial Sequence: Synthetic oligonucleotide
guccaauccaucuucucaa

SEQ ID NO: 1735597 - RNA, 19 nt, Artificial Sequence
  Description of Artificial Sequence: Synthetic oligonucleotide
caucuucgcaaugccagcc

SEQ ID NO: 1735598 - RNA, 19 nt, Artificial Sequence
  Description of Artificial Sequence: Synthetic oligonucleotide
uuggccagagacagccgug

SEQ ID NO: 1735599 - RNA, 19 nt, Artificial Sequence
  Description of Artificial Sequence: Synthetic oligonucleotide
aucaaaugcccggagcacu

SEQ ID NO: 1735600 - RNA, 19 nt, Artificial Sequence
  Description of Artificial Sequence: Synthetic oligonucleotide
aaaucgccacuuccaugcu

SEQ ID NO: 1735601 - RNA, 19 nt, Artificial Sequence
  Description of Artificial Sequence: Synthetic oligonucleotide
caccaacaacacaaugcag

SEQ ID NO: 1735602 - RNA, 19 nt, Artificial Sequence
  Description of Artificial Sequence: Synthetic oligonucleotide
gaacgaaccaaaucggauu

SEQ ID NO: 1735603 - RNA, 19 nt, Artificial Sequence
  Description of Artificial Sequence: Synthetic oligonucleotide
gccaaugccauaaucacca

SEQ ID NO: 1735604 - RNA, 19 nt, Artificial Sequence
  Description of Artificial Sequence: Synthetic oligonucleotide
cugcaguaacacuggaauc

SEQ ID NO: 1735605 - RNA, 19 nt, Artificial Sequence
  Description of Artificial Sequence: Synthetic oligonucleotide
uggcagacgagcuguguuc

SEQ ID NO: 1735606 - RNA, 19 nt, Artificial Sequence
  Description of Artificial Sequence: Synthetic oligonucleotide
uccacuccaaaagagucuu

SEQ ID NO: 1735607 - RNA, 19 nt, Artificial Sequence
  Description of Artificial Sequence: Synthetic oligonucleotide
agggccuugcucaauggag

SEQ ID NO: 1735608 - RNA, 19 nt, Artificial Sequence
  Description of Artificial Sequence: Synthetic oligonucleotide
cucagcaugggaacugaca

SEQ ID NO: 1735609 - RNA, 19 nt, Artificial Sequence
  Description of Artificial Sequence: Synthetic oligonucleotide
gacgagcuguguucuguug

SEQ ID NO: 1735610 - RNA, 19 nt, Artificial Sequence
  Description of Artificial Sequence: Synthetic oligonucleotide
caugggaacugacauucca

SEQ ID NO: 1735611 - RNA, 19 nt, Artificial Sequence
  Description of Artificial Sequence: Synthetic oligonucleotide
gagacagccguggcagacg

SEQ ID NO: 1735612 - RNA, 19 nt, Artificial Sequence
  Description of Artificial Sequence: Synthetic oligonucleotide
aaccauucccagagacuuc

SEQ ID NO: 1735613 - RNA, 19 nt, Artificial Sequence
  Description of Artificial Sequence: Synthetic oligonucleotide
accauagcagaagcucagg

SEQ ID NO: 1735614 - RNA, 19 nt, Artificial Sequence
  Description of Artificial Sequence: Synthetic oligonucleotide
agcaccggaaucugcagua

SEQ ID NO: 1735615 - RNA, 19 nt, Artificial Sequence
  Description of Artificial Sequence: Synthetic oligonucleotide
aaugcccggagcacuucag

SEQ ID NO: 1735616 - RNA, 19 nt, Artificial Sequence
  Description of Artificial Sequence: Synthetic oligonucleotide
cucuuuuacacgcaugcgu

SEQ ID NO: 1735617 - RNA, 19 nt, Artificial Sequence
  Description of Artificial Sequence: Synthetic oligonucleotide
cagcuuggcccauauaaga

SEQ ID NO: 1735618 - RNA, 19 nt, Artificial Sequence
  Description of Artificial Sequence: Synthetic oligonucleotide
aucuucgcaaugccagccu

SEQ ID NO: 1735619 - RNA, 19 nt, Artificial Sequence
  Description of Artificial Sequence: Synthetic oligonucleotide
cacacuaucuguuuguguu

SEQ ID NO: 1735620 - RNA, 19 nt, Artificial Sequence
  Description of Artificial Sequence: Synthetic oligonucleotide
agacagccguggcagacga

SEQ ID NO: 1735621 - RNA, 19 nt, Artificial Sequence
  Description of Artificial Sequence: Synthetic oligonucleotide
uuacacgcaugcguuuugu

SEQ ID NO: 1735622 - RNA, 19 nt, Artificial Sequence
  Description of Artificial Sequence: Synthetic oligonucleotide
ucauccucauagguccaug

SEQ ID NO: 1735623 - RNA, 19 nt, Artificial Sequence
  Description of Artificial Sequence: Synthetic oligonucleotide
auccucauagguccaugaa

SEQ ID NO: 1735624 - RNA, 19 nt, Artificial Sequence
  Description of Artificial Sequence: Synthetic oligonucleotide
gcauuauauggauccacuc

SEQ ID NO: 1735625 - RNA, 19 nt, Artificial Sequence
  Description of Artificial Sequence: Synthetic oligonucleotide
cuaucuguuuguguugcca

SEQ ID NO: 1735626 - RNA, 19 nt, Artificial Sequence
  Description of Artificial Sequence: Synthetic oligonucleotide
guugguggaacgaaccaaa

SEQ ID NO: 1735627 - RNA, 19 nt, Artificial Sequence
  Description of Artificial Sequence: Synthetic oligonucleotide
gcuguguucuguuggggug

SEQ ID NO: 1735628 - RNA, 19 nt, Artificial Sequence
  Description of Artificial Sequence: Synthetic oligonucleotide
cacacacuaucuguuugug

SEQ ID NO: 1735629 - RNA, 19 nt, Artificial Sequence
  Description of Artificial Sequence: Synthetic oligonucleotide
caauuccaucccaaacuga

SEQ ID NO: 1735630 - RNA, 19 nt, Artificial Sequence
  Description of Artificial Sequence: Synthetic oligonucleotide
auccacuccaaaagagucu

SEQ ID NO: 1735631 - RNA, 19 nt, Artificial Sequence
  Description of Artificial Sequence: Synthetic oligonucleotide
acacgggcugcugacagga

SEQ ID NO: 1735632 - RNA, 19 nt, Artificial Sequence
  Description of Artificial Sequence: Synthetic oligonucleotide
ucagcgggaccuucuuuau

SEQ ID NO: 1735633 - RNA, 19 nt, Artificial Sequence
  Description of Artificial Sequence: Synthetic oligonucleotide
ugugccucugugucaggua

SEQ ID NO: 1735634 - RNA, 19 nt, Artificial Sequence
  Description of Artificial Sequence: Synthetic oligonucleotide
uuccaugcuucugaaucau

SEQ ID NO: 1735635 - RNA, 19 nt, Artificial Sequence
  Description of Artificial Sequence: Synthetic oligonucleotide
cuguguuccuuagccacac

SEQ ID NO: 1735636 - RNA, 19 nt, Artificial Sequence
  Description of Artificial Sequence: Synthetic oligonucleotide
cuacagucaaguuccuucu

SEQ ID NO: 1735637 - RNA, 19 nt, Artificial Sequence
  Description of Artificial Sequence: Synthetic oligonucleotide
uuggcccauauaagagaaa

SEQ ID NO: 1735638 - RNA, 19 nt, Artificial Sequence
  Description of Artificial Sequence: Synthetic oligonucleotide
cugguucaagugcccgggg

SEQ ID NO: 1735639 - RNA, 19 nt, Artificial Sequence
  Description of Artificial Sequence: Synthetic oligonucleotide
cagugugaaaucucugucu

SEQ ID NO: 1735640 - RNA, 19 nt, Artificial Sequence
  Description of Artificial Sequence: Synthetic oligonucleotide
cuugcucaauggagccagc

SEQ ID NO: 1735641 - RNA, 19 nt, Artificial Sequence
  Description of Artificial Sequence: Synthetic oligonucleotide
gagcacuucagggcucuug

SEQ ID NO: 1735642 - RNA, 19 nt, Artificial Sequence
  Description of Artificial Sequence: Synthetic oligonucleotide
uucgcaaugccagccugau

SEQ ID NO: 1735643 - RNA, 19 nt, Artificial Sequence
  Description of Artificial Sequence: Synthetic oligonucleotide
cuguguguaccagcgaaca

SEQ ID NO: 1735644 - RNA, 19 nt, Artificial Sequence
  Description of Artificial Sequence: Synthetic oligonucleotide
caccggaaucugcaguaac

SEQ ID NO: 1735645 - RNA, 19 nt, Artificial Sequence
  Description of Artificial Sequence: Synthetic oligonucleotide
cacacgggcugcugacagg

SEQ ID NO: 1735646 - RNA, 19 nt, Artificial Sequence
  Description of Artificial Sequence: Synthetic oligonucleotide
ucgcaaugccagccugaug

SEQ ID NO: 1735647 - RNA, 19 nt, Artificial Sequence
  Description of Artificial Sequence: Synthetic oligonucleotide
guuccguagucaccaacaa

SEQ ID NO: 1735648 - RNA, 19 nt, Artificial Sequence
  Description of Artificial Sequence: Synthetic oligonucleotide
ucguuucaacuguguguac

SEQ ID NO: 1735649 - RNA, 19 nt, Artificial Sequence
  Description of Artificial Sequence: Synthetic oligonucleotide
gagucuagcuucagcggga

SEQ ID NO: 1735650 - RNA, 19 nt, Artificial Sequence
  Description of Artificial Sequence: Synthetic oligonucleotide
guguggugccucccuguag

SEQ ID NO: 1735651 - RNA, 19 nt, Artificial Sequence
  Description of Artificial Sequence: Synthetic oligonucleotide
ccaccaacauaucucagca

SEQ ID NO: 1735652 - RNA, 19 nt, Artificial Sequence
  Description of Artificial Sequence: Synthetic oligonucleotide
cuucgcaaugccagccuga

SEQ ID NO: 1735653 - RNA, 19 nt, Artificial Sequence
  Description of Artificial Sequence: Synthetic oligonucleotide
ccauaguuccguagucacc

SEQ ID NO: 1735654 - RNA, 19 nt, Artificial Sequence
  Description of Artificial Sequence: Synthetic oligonucleotide
cugacauuccagcaccaua

SEQ ID NO: 1735655 - RNA, 19 nt, Artificial Sequence
  Description of Artificial Sequence: Synthetic oligonucleotide
aucucagcaugggaacuga

SEQ ID NO: 1735656 - RNA, 19 nt, Artificial Sequence
  Description of Artificial Sequence: Synthetic oligonucleotide
ccucauagguccaugaacu

SEQ ID NO: 1735657 - RNA, 19 nt, Artificial Sequence
  Description of Artificial Sequence: Synthetic oligonucleotide
ccuugcucaauggagccag

SEQ ID NO: 1735658 - RNA, 19 nt, Artificial Sequence
  Description of Artificial Sequence: Synthetic oligonucleotide
uguguucuguuggggugcu

SEQ ID NO: 1735659 - RNA, 19 nt, Artificial Sequence
  Description of Artificial Sequence: Synthetic oligonucleotide
cugugucagguaaaucaaa

SEQ ID NO: 1735660 - RNA, 19 nt, Artificial Sequence
  Description of Artificial Sequence: Synthetic oligonucleotide
agccguggcagacgagcug

SEQ ID NO: 1735661 - RNA, 19 nt, Artificial Sequence
  Description of Artificial Sequence: Synthetic oligonucleotide
ugccucugugucagguaaa

SEQ ID NO: 1735662 - RNA, 19 nt, Artificial Sequence
  Description of Artificial Sequence: Synthetic oligonucleotide
caaaucggauugacuaaua

SEQ ID NO: 1735663 - RNA, 19 nt, Artificial Sequence
  Description of Artificial Sequence: Synthetic oligonucleotide
auaguuccguagucaccaa

SEQ ID NO: 1735664 - RNA, 19 nt, Artificial Sequence
  Description of Artificial Sequence: Synthetic oligonucleotide
gaaccaaaucggauugacu

SEQ ID NO: 1735665 - RNA, 19 nt, Artificial Sequence
  Description of Artificial Sequence: Synthetic oligonucleotide
cguuucaacuguguguacc

SEQ ID NO: 1735666 - RNA, 19 nt, Artificial Sequence
  Description of Artificial Sequence: Synthetic oligonucleotide
caagugcccggggagguuc

SEQ ID NO: 1735667 - RNA, 19 nt, Artificial Sequence
  Description of Artificial Sequence: Synthetic oligonucleotide
guguguaccagcgaacaau

SEQ ID NO: 1735668 - RNA, 19 nt, Artificial Sequence
  Description of Artificial Sequence: Synthetic oligonucleotide
aggacaccuguguuccuua

SEQ ID NO: 1735669 - RNA, 19 nt, Artificial Sequence
  Description of Artificial Sequence: Synthetic oligonucleotide
ccaucuucgcaaugccagc

SEQ ID NO: 1735670 - RNA, 19 nt, Artificial Sequence
  Description of Artificial Sequence: Synthetic oligonucleotide
cacgcaugcguuuugucau

SEQ ID NO: 1735671 - RNA, 19 nt, Artificial Sequence
  Description of Artificial Sequence: Synthetic oligonucleotide
guguaccagcgaacaauug

SEQ ID NO: 1735672 - RNA, 19 nt, Artificial Sequence
  Description of Artificial Sequence: Synthetic oligonucleotide
gugaaaucucugucucaaa

SEQ ID NO: 1735673 - RNA, 19 nt, Artificial Sequence
  Description of Artificial Sequence: Synthetic oligonucleotide
caauuguccauaguuccgu

SEQ ID NO: 1735674 - RNA, 19 nt, Artificial Sequence
  Description of Artificial Sequence: Synthetic oligonucleotide
acgaaccaaaucggauuga

SEQ ID NO: 1735675 - RNA, 19 nt, Artificial Sequence
  Description of Artificial Sequence: Synthetic oligonucleotide
agaguaccacaaaugcauu

SEQ ID NO: 1735676 - RNA, 19 nt, Artificial Sequence
  Description of Artificial Sequence: Synthetic oligonucleotide
cuccugacuuccacuccuc

SEQ ID NO: 1735677 - RNA, 19 nt, Artificial Sequence
  Description of Artificial Sequence: Synthetic oligonucleotide
auacuuuggcaugggucau

SEQ ID NO: 1735678 - RNA, 19 nt, Artificial Sequence
  Description of Artificial Sequence: Synthetic oligonucleotide
caccuguguuccuuagcca

SEQ ID NO: 1735679 - RNA, 19 nt, Artificial Sequence
  Description of Artificial Sequence: Synthetic oligonucleotide
gcccggagcacuucagggc

SEQ ID NO: 1735680 - RNA, 19 nt, Artificial Sequence
  Description of Artificial Sequence: Synthetic oligonucleotide
ccggaaucugcaguaacac

SEQ ID NO: 1735681 - RNA, 19 nt, Artificial Sequence
  Description of Artificial Sequence: Synthetic oligonucleotide
ggaugauuuauggcuggga

SEQ ID NO: 1735682 - RNA, 19 nt, Artificial Sequence
  Description of Artificial Sequence: Synthetic oligonucleotide
ccguagucaccaacaacac

SEQ ID NO: 1735683 - RNA, 19 nt, Artificial Sequence
  Description of Artificial Sequence: Synthetic oligonucleotide
augccacuuaaaguugauu

SEQ ID NO: 1735684 - RNA, 19 nt, Artificial Sequence
  Description of Artificial Sequence: Synthetic oligonucleotide
gcaugcguuuugucauaag

SEQ ID NO: 1735685 - RNA, 19 nt, Artificial Sequence
  Description of Artificial Sequence: Synthetic oligonucleotide
cgaacaauuguccauaguu

SEQ ID NO: 1735686 - RNA, 19 nt, Artificial Sequence
  Description of Artificial Sequence: Synthetic oligonucleotide
ucgccacuuccaugcuucu

SEQ ID NO: 1735687 - RNA, 19 nt, Artificial Sequence
  Description of Artificial Sequence: Synthetic oligonucleotide
cagcgaacaauuguccaua

SEQ ID NO: 1735688 - RNA, 19 nt, Artificial Sequence
  Description of Artificial Sequence: Synthetic oligonucleotide
cacugaggaacuucucuau

SEQ ID NO: 1735689 - RNA, 19 nt, Artificial Sequence
  Description of Artificial Sequence: Synthetic oligonucleotide
acgcaugcguuuugucaua

SEQ ID NO: 1735690 - RNA, 19 nt, Artificial Sequence
  Description of Artificial Sequence: Synthetic oligonucleotide
ugcccggggagguucucuu

SEQ ID NO: 1735691 - RNA, 19 nt, Artificial Sequence
  Description of Artificial Sequence: Synthetic oligonucleotide
cgaaccaaaucggauugac

SEQ ID NO: 1735692 - RNA, 19 nt, Artificial Sequence
  Description of Artificial Sequence: Synthetic oligonucleotide
ggaacgaaccaaaucggau

SEQ ID NO: 1735693 - RNA, 19 nt, Artificial Sequence
  Description of Artificial Sequence: Synthetic oligonucleotide
aagugcccggggagguucu

SEQ ID NO: 1735694 - RNA, 19 nt, Artificial Sequence
  Description of Artificial Sequence: Synthetic oligonucleotide
gcucuuguugccaguguga

SEQ ID NO: 1735695 - RNA, 19 nt, Artificial Sequence
  Description of Artificial Sequence: Synthetic oligonucleotide
gacagccguggcagacgag

SEQ ID NO: 1735696 - RNA, 19 nt, Artificial Sequence
  Description of Artificial Sequence: Synthetic oligonucleotide
agucuacagucaaguuccu

SEQ ID NO: 1735697 - RNA, 19 nt, Artificial Sequence
  Description of Artificial Sequence: Synthetic oligonucleotide
ucaagugcccggggagguu

SEQ ID NO: 1735698 - RNA, 19 nt, Artificial Sequence
  Description of Artificial Sequence: Synthetic oligonucleotide
caguacagauaugguuaca

SEQ ID NO: 1735699 - RNA, 19 nt, Artificial Sequence
  Description of Artificial Sequence: Synthetic oligonucleotide
guggcagacgagcuguguu

SEQ ID NO: 1735700 - RNA, 19 nt, Artificial Sequence
  Description of Artificial Sequence: Synthetic oligonucleotide
ccaucccaaacugaagaga

SEQ ID NO: 1735701 - RNA, 19 nt, Artificial Sequence
  Description of Artificial Sequence: Synthetic oligonucleotide
agugcccggggagguucuc

SEQ ID NO: 1735702 - RNA, 19 nt, Artificial Sequence
  Description of Artificial Sequence: Synthetic oligonucleotide
ccgcagucccugcagcuug

SEQ ID NO: 1735703 - RNA, 19 nt, Artificial Sequence
  Description of Artificial Sequence: Synthetic oligonucleotide
cccggggagguucucuuuc

SEQ ID NO: 1735704 - RNA, 19 nt, Artificial Sequence
  Description of Artificial Sequence: Synthetic oligonucleotide
cagcaccggaaucugcagu

SEQ ID NO: 1735705 - RNA, 19 nt, Artificial Sequence
  Description of Artificial Sequence: Synthetic oligonucleotide
ccuuuguugguggaacgaa

SEQ ID NO: 1735706 - RNA, 19 nt, Artificial Sequence
  Description of Artificial Sequence: Synthetic oligonucleotide
caccaauuucuuugagauu

SEQ ID NO: 1735707 - RNA, 19 nt, Artificial Sequence
  Description of Artificial Sequence: Synthetic oligonucleotide
caccaacauaucucagcau

SEQ ID NO: 1735708 - RNA, 19 nt, Artificial Sequence
  Description of Artificial Sequence: Synthetic oligonucleotide
ccagcgaacaauuguccau

SEQ ID NO: 1735709 - RNA, 19 nt, Artificial Sequence
  Description of Artificial Sequence: Synthetic oligonucleotide
gcgaacaauuguccauagu

SEQ ID NO: 1735710 - RNA, 19 nt, Artificial Sequence
  Description of Artificial Sequence: Synthetic oligonucleotide
ggcagacgagcuguguucu

SEQ ID NO: 1735711 - RNA, 19 nt, Artificial Sequence
  Description of Artificial Sequence: Synthetic oligonucleotide
cagcaugggaacugacauu

SEQ ID NO: 1735712 - RNA, 19 nt, Artificial Sequence
  Description of Artificial Sequence: Synthetic oligonucleotide
ccaaaucggauugacuaau

SEQ ID NO: 1735713 - RNA, 19 nt, Artificial Sequence
  Description of Artificial Sequence: Synthetic oligonucleotide
gggaguucaccaauuucuu

SEQ ID NO: 1735714 - RNA, 19 nt, Artificial Sequence
  Description of Artificial Sequence: Synthetic oligonucleotide
cccggagcacuucagggcu

SEQ ID NO: 1735715 - RNA, 19 nt, Artificial Sequence
  Description of Artificial Sequence: Synthetic oligonucleotide
ccggggagguucucuuuca

SEQ ID NO: 1735716 - RNA, 19 nt, Artificial Sequence
  Description of Artificial Sequence: Synthetic oligonucleotide
ggcaugggucauccucaua

SEQ ID NO: 1735717 - RNA, 19 nt, Artificial Sequence
  Description of Artificial Sequence: Synthetic oligonucleotide
ccaaggcuccugacuucca

SEQ ID NO: 1735718 - RNA, 19 nt, Artificial Sequence
  Description of Artificial Sequence: Synthetic oligonucleotide
gcaccggaaucugcaguaa

SEQ ID NO: 1735719 - RNA, 19 nt, Artificial Sequence
  Description of Artificial Sequence: Synthetic oligonucleotide
gccucugugucagguaaau

SEQ ID NO: 1735720 - RNA, 19 nt, Artificial Sequence
  Description of Artificial Sequence: Synthetic oligonucleotide
gugcccggggagguucucu

SEQ ID NO: 1735721 - RNA, 19 nt, Artificial Sequence
  Description of Artificial Sequence: Synthetic oligonucleotide
cacgggcugcugacaggau

SEQ ID NO: 1735722 - RNA, 19 nt, Artificial Sequence
  Description of Artificial Sequence: Synthetic oligonucleotide
cgcaugcguuuugucauaa

SEQ ID NO: 1735723 - RNA, 19 nt, Artificial Sequence
  Description of Artificial Sequence: Synthetic oligonucleotide
cguggcagacgagcugugu

SEQ ID NO: 1735724 - RNA, 19 nt, Artificial Sequence
  Description of Artificial Sequence: Synthetic oligonucleotide
aaaguauaaacauauuuac

SEQ ID NO: 1735725 - RNA, 19 nt, Artificial Sequence
  Description of Artificial Sequence: Synthetic oligonucleotide
aaucauaaacauuacacac

SEQ ID NO: 1735726 - RNA, 19 nt, Artificial Sequence
  Description of Artificial Sequence: Synthetic oligonucleotide
aaaaucauaaacauuacac

SEQ ID NO: 1735727 - RNA, 19 nt, Artificial Sequence
  Description of Artificial Sequence: Synthetic oligonucleotide
uuaugauggaaauauaugg

SEQ ID NO: 1735728 - RNA, 19 nt, Artificial Sequence
  Description of Artificial Sequence: Synthetic oligonucleotide
aauccuuucuucucaagcg

SEQ ID NO: 1735729 - RNA, 19 nt, Artificial Sequence
  Description of Artificial Sequence: Synthetic oligonucleotide
agagcuauagcacagaaca

SEQ ID NO: 1735730 - RNA, 19 nt, Artificial Sequence
  Description of Artificial Sequence: Synthetic oligonucleotide
uuuggcuaaauuuugcagg

SEQ ID NO: 1735731 - RNA, 19 nt, Artificial Sequence
  Description of Artificial Sequence: Synthetic oligonucleotide
aaccacuuuaguuaugaac

SEQ ID NO: 1735732 - RNA, 19 nt, Artificial Sequence
  Description of Artificial Sequence: Synthetic oligonucleotide
uuuugacuaaaguagauga

SEQ ID NO: 1735733 - RNA, 19 nt, Artificial Sequence
  Description of Artificial Sequence: Synthetic oligonucleotide
gaaguaaaggaaucgacag

SEQ ID NO: 1735734 - RNA, 19 nt, Artificial Sequence
  Description of Artificial Sequence: Synthetic oligonucleotide
aucucuacauggcagaagc

SEQ ID NO: 1735735 - RNA, 19 nt, Artificial Sequence
  Description of Artificial Sequence: Synthetic oligonucleotide
aaaccuauggcaagaaccc

SEQ ID NO: 1735736 - RNA, 19 nt, Artificial Sequence
  Description of Artificial Sequence: Synthetic oligonucleotide
aaaaccuuugcuuuccucu

SEQ ID NO: 1735737 - RNA, 19 nt, Artificial Sequence
  Description of Artificial Sequence: Synthetic oligonucleotide
uguucauugucuuuaguag

SEQ ID NO: 1735738 - RNA, 19 nt, Artificial Sequence
  Description of Artificial Sequence: Synthetic oligonucleotide
ucucacaauauauucauca

SEQ ID NO: 1735739 - RNA, 19 nt, Artificial Sequence
  Description of Artificial Sequence: Synthetic oligonucleotide
ucaguggucguuaacuugg

SEQ ID NO: 1735740 - RNA, 19 nt, Artificial Sequence
  Description of Artificial Sequence: Synthetic oligonucleotide
cucuguuagaacuagcagg

SEQ ID NO: 1735741 - RNA, 19 nt, Artificial Sequence
  Description of Artificial Sequence: Synthetic oligonucleotide
ugacuaaaguagaugaaag

SEQ ID NO: 1735742 - RNA, 19 nt, Artificial Sequence
  Description of Artificial Sequence: Synthetic oligonucleotide
ucuguuagaacuagcagga

SEQ ID NO: 1735743 - RNA, 19 nt, Artificial Sequence
  Description of Artificial Sequence: Synthetic oligonucleotide
aaguaaaggaaucgacagg

SEQ ID NO: 1735744 - RNA, 19 nt, Artificial Sequence
  Description of Artificial Sequence: Synthetic oligonucleotide
uguuagaacuagcaggacc

SEQ ID NO: 1735745 - RNA, 19 nt, Artificial Sequence
  Description of Artificial Sequence: Synthetic oligonucleotide
ucuucgagcuuccaaaacc

SEQ ID NO: 1735746 - RNA, 19 nt, Artificial Sequence
  Description of Artificial Sequence: Synthetic oligonucleotide
auauucaucaauggauucc

SEQ ID NO: 1735747 - RNA, 19 nt, Artificial Sequence
  Description of Artificial Sequence: Synthetic oligonucleotide
aggaaaacaaguuggaagu

SEQ ID NO: 1735748 - RNA, 19 nt, Artificial Sequence
  Description of Artificial Sequence: Synthetic oligonucleotide
uugaaugggguaauaacug

SEQ ID NO: 1735749 - RNA, 19 nt, Artificial Sequence
  Description of Artificial Sequence: Synthetic oligonucleotide
uuaaugauucucauccuga

SEQ ID NO: 1735750 - RNA, 19 nt, Artificial Sequence
  Description of Artificial Sequence: Synthetic oligonucleotide
acuagcaggaccuugacau

SEQ ID NO: 1735751 - RNA, 19 nt, Artificial Sequence
  Description of Artificial Sequence: Synthetic oligonucleotide
ugggcuuuagucauaacca

SEQ ID NO: 1735752 - RNA, 19 nt, Artificial Sequence
  Description of Artificial Sequence: Synthetic oligonucleotide
ucuuacuagagccuggagu

SEQ ID NO: 1735753 - RNA, 19 nt, Artificial Sequence
  Description of Artificial Sequence: Synthetic oligonucleotide
aaucgacaggauuacuggg

SEQ ID NO: 1735754 - RNA, 19 nt, Artificial Sequence
  Description of Artificial Sequence: Synthetic oligonucleotide
guucguaacaacuugucug

SEQ ID NO: 1735755 - RNA, 19 nt, Artificial Sequence
  Description of Artificial Sequence: Synthetic oligonucleotide
auuaagugaguuguguucg

SEQ ID NO: 1735756 - RNA, 19 nt, Artificial Sequence
  Description of Artificial Sequence: Synthetic oligonucleotide
aguuaugaacuuuaagaug

SEQ ID NO: 1735757 - RNA, 19 nt, Artificial Sequence
  Description of Artificial Sequence: Synthetic oligonucleotide
cuuacuagagccuggaguc

SEQ ID NO: 1735758 - RNA, 19 nt, Artificial Sequence
  Description of Artificial Sequence: Synthetic oligonucleotide
aauaccgguuucuuacuag

SEQ ID NO: 1735759 - RNA, 19 nt, Artificial Sequence
  Description of Artificial Sequence: Synthetic oligonucleotide
uaguuaugaacuuuaagau

SEQ ID NO: 1735760 - RNA, 19 nt, Artificial Sequence
  Description of Artificial Sequence: Synthetic oligonucleotide
aagugaguuguguucguuc

SEQ ID NO: 1735761 - RNA, 19 nt, Artificial Sequence
  Description of Artificial Sequence: Synthetic oligonucleotide
uuuagucauaaccagguuu

SEQ ID NO: 1735762 - RNA, 19 nt, Artificial Sequence
  Description of Artificial Sequence: Synthetic oligonucleotide
aguucauuaagugaguugu

SEQ ID NO: 1735763 - RNA, 19 nt, Artificial Sequence
  Description of Artificial Sequence: Synthetic oligonucleotide
ucauaaccagguuucuucg

SEQ ID NO: 1735764 - RNA, 19 nt, Artificial Sequence
  Description of Artificial Sequence: Synthetic oligonucleotide
aaaccuuugcuuuccucuc

SEQ ID NO: 1735765 - RNA, 19 nt, Artificial Sequence
  Description of Artificial Sequence: Synthetic oligonucleotide
uucguaacaacuugucugc

SEQ ID NO: 1735766 - RNA, 19 nt, Artificial Sequence
  Description of Artificial Sequence: Synthetic oligonucleotide
agcacuuauguucauuguc

SEQ ID NO: 1735767 - RNA, 19 nt, Artificial Sequence
  Description of Artificial Sequence: Synthetic oligonucleotide
ugagcacuuauguucauug

SEQ ID NO: 1735768 - RNA, 19 nt, Artificial Sequence
  Description of Artificial Sequence: Synthetic oligonucleotide
ucauuuuaguugcucagga

SEQ ID NO: 1735769 - RNA, 19 nt, Artificial Sequence
  Description of Artificial Sequence: Synthetic oligonucleotide
acaaccaggcgacucaaac

SEQ ID NO: 1735770 - RNA, 19 nt, Artificial Sequence
  Description of Artificial Sequence: Synthetic oligonucleotide
cuuucagagaacuauucuc

SEQ ID NO: 1735771 - RNA, 19 nt, Artificial Sequence
  Description of Artificial Sequence: Synthetic oligonucleotide
ucaucaauggauuccauuu

SEQ ID NO: 1735772 - RNA, 19 nt, Artificial Sequence
  Description of Artificial Sequence: Synthetic oligonucleotide
auucauuuuaguugcucag

SEQ ID NO: 1735773 - RNA, 19 nt, Artificial Sequence
  Description of Artificial Sequence: Synthetic oligonucleotide
agaacccaaacacaggucu

SEQ ID NO: 1735774 - RNA, 19 nt, Artificial Sequence
  Description of Artificial Sequence: Synthetic oligonucleotide
cuuacacccucuuucagag

SEQ ID NO: 1735775 - RNA, 19 nt, Artificial Sequence
  Description of Artificial Sequence: Synthetic oligonucleotide
accgguuucuuacuagagc

SEQ ID NO: 1735776 - RNA, 19 nt, Artificial Sequence
  Description of Artificial Sequence: Synthetic oligonucleotide
uuucucacaauauauucau

SEQ ID NO: 1735777 - RNA, 19 nt, Artificial Sequence
  Description of Artificial Sequence: Synthetic oligonucleotide
acauguggagacuuucugg

SEQ ID NO: 1735778 - RNA, 19 nt, Artificial Sequence
  Description of Artificial Sequence: Synthetic oligonucleotide
uuggguguccugaacacag

SEQ ID NO: 1735779 - RNA, 19 nt, Artificial Sequence
  Description of Artificial Sequence: Synthetic oligonucleotide
ugauuuagauucucuuucc

SEQ ID NO: 1735780 - RNA, 19 nt, Artificial Sequence
  Description of Artificial Sequence: Synthetic oligonucleotide
cauguggagacuuucuggc

SEQ ID NO: 1735781 - RNA, 19 nt, Artificial Sequence
  Description of Artificial Sequence: Synthetic oligonucleotide
ugaacuuuaagaugagaau

SEQ ID NO: 1735782 - RNA, 19 nt, Artificial Sequence
  Description of Artificial Sequence: Synthetic oligonucleotide
gauuacugggcuuuaguca

SEQ ID NO: 1735783 - RNA, 19 nt, Artificial Sequence
  Description of Artificial Sequence: Synthetic oligonucleotide
ugggguaauaacugcaagc

SEQ ID NO: 1735784 - RNA, 19 nt, Artificial Sequence
  Description of Artificial Sequence: Synthetic oligonucleotide
uucauuuuaguugcucagg

SEQ ID NO: 1735785 - RNA, 19 nt, Artificial Sequence
  Description of Artificial Sequence: Synthetic oligonucleotide
auuaugauggaaauauaug

SEQ ID NO: 1735786 - RNA, 19 nt, Artificial Sequence
  Description of Artificial Sequence: Synthetic oligonucleotide
ucagaaucucuacauggca

SEQ ID NO: 1735787 - RNA, 19 nt, Artificial Sequence
  Description of Artificial Sequence: Synthetic oligonucleotide
cuuaaugauucucauccug

SEQ ID NO: 1735788 - RNA, 19 nt, Artificial Sequence
  Description of Artificial Sequence: Synthetic oligonucleotide
cccuuaaugauucucaucc

SEQ ID NO: 1735789 - RNA, 19 nt, Artificial Sequence
  Description of Artificial Sequence: Synthetic oligonucleotide
agcguuaguucauuaagug

SEQ ID NO: 1735790 - RNA, 19 nt, Artificial Sequence
  Description of Artificial Sequence: Synthetic oligonucleotide
aaggaaucgacaggauuac

SEQ ID NO: 1735791 - RNA, 19 nt, Artificial Sequence
  Description of Artificial Sequence: Synthetic oligonucleotide
ugaaugggguaauaacugc

SEQ ID NO: 1735792 - RNA, 19 nt, Artificial Sequence
  Description of Artificial Sequence: Synthetic oligonucleotide
gauggaaauauaugguaga

SEQ ID NO: 1735793 - RNA, 19 nt, Artificial Sequence
  Description of Artificial Sequence: Synthetic oligonucleotide
cauuaagugaguuguguuc

SEQ ID NO: 1735794 - RNA, 19 nt, Artificial Sequence
  Description of Artificial Sequence: Synthetic oligonucleotide
gcuaacucugcuuacaccc

SEQ ID NO: 1735795 - RNA, 19 nt, Artificial Sequence
  Description of Artificial Sequence: Synthetic oligonucleotide
agcacucccagguaggguc

SEQ ID NO: 1735796 - RNA, 19 nt, Artificial Sequence
  Description of Artificial Sequence: Synthetic oligonucleotide
guuggaaguaaaggaaucg

SEQ ID NO: 1735797 - RNA, 19 nt, Artificial Sequence
  Description of Artificial Sequence: Synthetic oligonucleotide
aggcgacucaaacagcagc

SEQ ID NO: 1735798 - RNA, 19 nt, Artificial Sequence
  Description of Artificial Sequence: Synthetic oligonucleotide
ggcuaaauuuugcaggucg

SEQ ID NO: 1735799 - RNA, 19 nt, Artificial Sequence
  Description of Artificial Sequence: Synthetic oligonucleotide
auuacugggcuuuagucau

SEQ ID NO: 1735800 - RNA, 19 nt, Artificial Sequence
  Description of Artificial Sequence: Synthetic oligonucleotide
uuguaaguuuuccugugga

SEQ ID NO: 1735801 - RNA, 19 nt, Artificial Sequence
  Description of Artificial Sequence: Synthetic oligonucleotide
uauucaucaauggauucca

SEQ ID NO: 1735802 - RNA, 19 nt, Artificial Sequence
  Description of Artificial Sequence: Synthetic oligonucleotide
aaccagguuucuucgagcu

SEQ ID NO: 1735803 - RNA, 19 nt, Artificial Sequence
  Description of Artificial Sequence: Synthetic oligonucleotide
uuugacuaaaguagaugaa

SEQ ID NO: 1735804 - RNA, 19 nt, Artificial Sequence
  Description of Artificial Sequence: Synthetic oligonucleotide
uugacuaaaguagaugaaa

SEQ ID NO: 1735805 - RNA, 19 nt, Artificial Sequence
  Description of Artificial Sequence: Synthetic oligonucleotide
uugucaacuugaauggggu

SEQ ID NO: 1735806 - RNA, 19 nt, Artificial Sequence
  Description of Artificial Sequence: Synthetic oligonucleotide
uuguacaggacaucaggug

SEQ ID NO: 1735807 - RNA, 19 nt, Artificial Sequence
  Description of Artificial Sequence: Synthetic oligonucleotide
uggucguuaacuugggugu

SEQ ID NO: 1735808 - RNA, 19 nt, Artificial Sequence
  Description of Artificial Sequence: Synthetic oligonucleotide
aaacaaguuggaaguaaag

SEQ ID NO: 1735809 - RNA, 19 nt, Artificial Sequence
  Description of Artificial Sequence: Synthetic oligonucleotide
uguaauucaggggacgaga

SEQ ID NO: 1735810 - RNA, 19 nt, Artificial Sequence
  Description of Artificial Sequence: Synthetic oligonucleotide
ucgcguucuacaaucccgg

SEQ ID NO: 1735811 - RNA, 19 nt, Artificial Sequence
  Description of Artificial Sequence: Synthetic oligonucleotide
cagaaucucuacauggcag

SEQ ID NO: 1735812 - RNA, 19 nt, Artificial Sequence
  Description of Artificial Sequence: Synthetic oligonucleotide
uaguucauuaagugaguug

SEQ ID NO: 1735813 - RNA, 19 nt, Artificial Sequence
  Description of Artificial Sequence: Synthetic oligonucleotide
aguuguguucguucaagug

SEQ ID NO: 1735814 - RNA, 19 nt, Artificial Sequence
  Description of Artificial Sequence: Synthetic oligonucleotide
agauacuccacaaauuaug

SEQ ID NO: 1735815 - RNA, 19 nt, Artificial Sequence
  Description of Artificial Sequence: Synthetic oligonucleotide
uaaaggaaucgacaggauu

SEQ ID NO: 1735816 - RNA, 19 nt, Artificial Sequence
  Description of Artificial Sequence: Synthetic oligonucleotide
guggucguuaacuugggug

SEQ ID NO: 1735817 - RNA, 19 nt, Artificial Sequence
  Description of Artificial Sequence: Synthetic oligonucleotide
uguguggcuuguaauucag

SEQ ID NO: 1735818 - RNA, 19 nt, Artificial Sequence
  Description of Artificial Sequence: Synthetic oligonucleotide
agaugaggcuguuuguaag

SEQ ID NO: 1735819 - RNA, 19 nt, Artificial Sequence
  Description of Artificial Sequence: Synthetic oligonucleotide
augcuaacucugcuuacac

SEQ ID NO: 1735820 - RNA, 19 nt, Artificial Sequence
  Description of Artificial Sequence: Synthetic oligonucleotide
ugaagccccuuaaugauuc

SEQ ID NO: 1735821 - RNA, 19 nt, Artificial Sequence
  Description of Artificial Sequence: Synthetic oligonucleotide
ucuacaaucccggcgacac

SEQ ID NO: 1735822 - RNA, 19 nt, Artificial Sequence
  Description of Artificial Sequence: Synthetic oligonucleotide
uucauuaagugaguugugu

SEQ ID NO: 1735823 - RNA, 19 nt, Artificial Sequence
  Description of Artificial Sequence: Synthetic oligonucleotide
gaacuggggucacuaaucc

SEQ ID NO: 1735824 - RNA, 19 nt, Artificial Sequence
  Description of Artificial Sequence: Synthetic oligonucleotide
aucgacaggauuacugggc

SEQ ID NO: 1735825 - RNA, 19 nt, Artificial Sequence
  Description of Artificial Sequence: Synthetic oligonucleotide
uucucauccugauuuagau

SEQ ID NO: 1735826 - RNA, 19 nt, Artificial Sequence
  Description of Artificial Sequence: Synthetic oligonucleotide
cacagguugucucuguuag

SEQ ID NO: 1735827 - RNA, 19 nt, Artificial Sequence
  Description of Artificial Sequence: Synthetic oligonucleotide
ucaagguucguaacaacuu

SEQ ID NO: 1735828 - RNA, 19 nt, Artificial Sequence
  Description of Artificial Sequence: Synthetic oligonucleotide
aaaacaaguuggaaguaaa

SEQ ID NO: 1735829 - RNA, 19 nt, Artificial Sequence
  Description of Artificial Sequence: Synthetic oligonucleotide
uacaaucccggcgacaccc

SEQ ID NO: 1735830 - RNA, 19 nt, Artificial Sequence
  Description of Artificial Sequence: Synthetic oligonucleotide
uggaugcuaacucugcuua

SEQ ID NO: 1735831 - RNA, 19 nt, Artificial Sequence
  Description of Artificial Sequence: Synthetic oligonucleotide
aggucgcuguacuugaaag

SEQ ID NO: 1735832 - RNA, 19 nt, Artificial Sequence
  Description of Artificial Sequence: Synthetic oligonucleotide
ugaguuguguucguucaag

SEQ ID NO: 1735833 - RNA, 19 nt, Artificial Sequence
  Description of Artificial Sequence: Synthetic oligonucleotide
acuauucucuuuagauugc

SEQ ID NO: 1735834 - RNA, 19 nt, Artificial Sequence
  Description of Artificial Sequence: Synthetic oligonucleotide
caggacaucaggugaaaac

SEQ ID NO: 1735835 - RNA, 19 nt, Artificial Sequence
  Description of Artificial Sequence: Synthetic oligonucleotide
ugagaucaaauaccgguuu

SEQ ID NO: 1735836 - RNA, 19 nt, Artificial Sequence
  Description of Artificial Sequence: Synthetic oligonucleotide
aucauaaacauuacacaca

SEQ ID NO: 1735837 - RNA, 19 nt, Artificial Sequence
  Description of Artificial Sequence: Synthetic oligonucleotide
aguuggaaguaaaggaauc

SEQ ID NO: 1735838 - RNA, 19 nt, Artificial Sequence
  Description of Artificial Sequence: Synthetic oligonucleotide
cuucucaagcguuaguuca

SEQ ID NO: 1735839 - RNA, 19 nt, Artificial Sequence
  Description of Artificial Sequence: Synthetic oligonucleotide
cuugaaugggguaauaacu

SEQ ID NO: 1735840 - RNA, 19 nt, Artificial Sequence
  Description of Artificial Sequence: Synthetic oligonucleotide
uggucagugagcacuuaug

SEQ ID NO: 1735841 - RNA, 19 nt, Artificial Sequence
  Description of Artificial Sequence: Synthetic oligonucleotide
agaagcaacuuguccagga

SEQ ID NO: 1735842 - RNA, 19 nt, Artificial Sequence
  Description of Artificial Sequence: Synthetic oligonucleotide
caagguucguaacaacuug

SEQ ID NO: 1735843 - RNA, 19 nt, Artificial Sequence
  Description of Artificial Sequence: Synthetic oligonucleotide
cauucauuuuaguugcuca

SEQ ID NO: 1735844 - RNA, 19 nt, Artificial Sequence
  Description of Artificial Sequence: Synthetic oligonucleotide
ucgacaggauuacugggcu

SEQ ID NO: 1735845 - RNA, 19 nt, Artificial Sequence
  Description of Artificial Sequence: Synthetic oligonucleotide
aacuagcaggaccuugaca

SEQ ID NO: 1735846 - RNA, 19 nt, Artificial Sequence
  Description of Artificial Sequence: Synthetic oligonucleotide
aaauaccgguuucuuacua

SEQ ID NO: 1735847 - RNA, 19 nt, Artificial Sequence
  Description of Artificial Sequence: Synthetic oligonucleotide
gauucucauccugauuuag

SEQ ID NO: 1735848 - RNA, 19 nt, Artificial Sequence
  Description of Artificial Sequence: Synthetic oligonucleotide
aagcguuaguucauuaagu

SEQ ID NO: 1735849 - RNA, 19 nt, Artificial Sequence
  Description of Artificial Sequence: Synthetic oligonucleotide
gucaucgcguucuacaauc

SEQ ID NO: 1735850 - RNA, 19 nt, Artificial Sequence
  Description of Artificial Sequence: Synthetic oligonucleotide
guuguguucguucaagugu

SEQ ID NO: 1735851 - RNA, 19 nt, Artificial Sequence
  Description of Artificial Sequence: Synthetic oligonucleotide
agaacagauacuccacaaa

SEQ ID NO: 1735852 - RNA, 19 nt, Artificial Sequence
  Description of Artificial Sequence: Synthetic oligonucleotide
cagguagggucacaugugg

SEQ ID NO: 1735853 - RNA, 19 nt, Artificial Sequence
  Description of Artificial Sequence: Synthetic oligonucleotide
uguugcuccaguugucaac

SEQ ID NO: 1735854 - RNA, 19 nt, Artificial Sequence
  Description of Artificial Sequence: Synthetic oligonucleotide
aucgcguucuacaaucccg

SEQ ID NO: 1735855 - RNA, 19 nt, Artificial Sequence
  Description of Artificial Sequence: Synthetic oligonucleotide
gggguaauaacugcaagcc

SEQ ID NO: 1735856 - RNA, 19 nt, Artificial Sequence
  Description of Artificial Sequence: Synthetic oligonucleotide
uugcucauguuucuuccgu

SEQ ID NO: 1735857 - RNA, 19 nt, Artificial Sequence
  Description of Artificial Sequence: Synthetic oligonucleotide
gaguuuuggucagugagca

SEQ ID NO: 1735858 - RNA, 19 nt, Artificial Sequence
  Description of Artificial Sequence: Synthetic oligonucleotide
ucacuaauccuuucuucuc

SEQ ID NO: 1735859 - RNA, 19 nt, Artificial Sequence
  Description of Artificial Sequence: Synthetic oligonucleotide
uucaucaauggauuccauu

SEQ ID NO: 1735860 - RNA, 19 nt, Artificial Sequence
  Description of Artificial Sequence: Synthetic oligonucleotide
uuaguugcucaggaguaca

SEQ ID NO: 1735861 - RNA, 19 nt, Artificial Sequence
  Description of Artificial Sequence: Synthetic oligonucleotide
uucuucgagcuuccaaaac

SEQ ID NO: 1735862 - RNA, 19 nt, Artificial Sequence
  Description of Artificial Sequence: Synthetic oligonucleotide
aaugggguaauaacugcaa

SEQ ID NO: 1735863 - RNA, 19 nt, Artificial Sequence
  Description of Artificial Sequence: Synthetic oligonucleotide
uucuuacuagagccuggag

SEQ ID NO: 1735864 - RNA, 19 nt, Artificial Sequence
  Description of Artificial Sequence: Synthetic oligonucleotide
uuucuucgagcuuccaaaa

SEQ ID NO: 1735865 - RNA, 19 nt, Artificial Sequence
  Description of Artificial Sequence: Synthetic oligonucleotide
aggguacagagagucuucc

SEQ ID NO: 1735866 - RNA, 19 nt, Artificial Sequence
  Description of Artificial Sequence: Synthetic oligonucleotide
cacaacucagaaucucuac

SEQ ID NO: 1735867 - RNA, 19 nt, Artificial Sequence
  Description of Artificial Sequence: Synthetic oligonucleotide
aacugcaagcccucucagu

SEQ ID NO: 1735868 - RNA, 19 nt, Artificial Sequence
  Description of Artificial Sequence: Synthetic oligonucleotide
ugcuuacacccucuuucag

SEQ ID NO: 1735869 - RNA, 19 nt, Artificial Sequence
  Description of Artificial Sequence: Synthetic oligonucleotide
ugcaagcccucucaguggu

SEQ ID NO: 1735870 - RNA, 19 nt, Artificial Sequence
  Description of Artificial Sequence: Synthetic oligonucleotide
aagguucguaacaacuugu

SEQ ID NO: 1735871 - RNA, 19 nt, Artificial Sequence
  Description of Artificial Sequence: Synthetic oligonucleotide
aacccaaacacaggucucu

SEQ ID NO: 1735872 - RNA, 19 nt, Artificial Sequence
  Description of Artificial Sequence: Synthetic oligonucleotide
uuguaauucaggggacgag

SEQ ID NO: 1735873 - RNA, 19 nt, Artificial Sequence
  Description of Artificial Sequence: Synthetic oligonucleotide
cucaguggucguuaacuug

SEQ ID NO: 1735874 - RNA, 19 nt, Artificial Sequence
  Description of Artificial Sequence: Synthetic oligonucleotide
agaucaaauaccgguuucu

SEQ ID NO: 1735875 - RNA, 19 nt, Artificial Sequence
  Description of Artificial Sequence: Synthetic oligonucleotide
ugucucuguuagaacuagc

SEQ ID NO: 1735876 - RNA, 19 nt, Artificial Sequence
  Description of Artificial Sequence: Synthetic oligonucleotide
uuuaguugcucaggaguac

SEQ ID NO: 1735877 - RNA, 19 nt, Artificial Sequence
  Description of Artificial Sequence: Synthetic oligonucleotide
ucagagaacuauucucuuu

SEQ ID NO: 1735878 - RNA, 19 nt, Artificial Sequence
  Description of Artificial Sequence: Synthetic oligonucleotide
ggaaucgacaggauuacug

SEQ ID NO: 1735879 - RNA, 19 nt, Artificial Sequence
  Description of Artificial Sequence: Synthetic oligonucleotide
ucgagcuuccaaaaccuuu

SEQ ID NO: 1735880 - RNA, 19 nt, Artificial Sequence
  Description of Artificial Sequence: Synthetic oligonucleotide
cacauguggagacuuucug

SEQ ID NO: 1735881 - RNA, 19 nt, Artificial Sequence
  Description of Artificial Sequence: Synthetic oligonucleotide
cuuuaguagcagcugagaa

SEQ ID NO: 1735882 - RNA, 19 nt, Artificial Sequence
  Description of Artificial Sequence: Synthetic oligonucleotide
uuaagugaguuguguucgu

SEQ ID NO: 1735883 - RNA, 19 nt, Artificial Sequence
  Description of Artificial Sequence: Synthetic oligonucleotide
gagacaagcuugccuugag

SEQ ID NO: 1735884 - RNA, 19 nt, Artificial Sequence
  Description of Artificial Sequence: Synthetic oligonucleotide
guacaggguacagagaguc

SEQ ID NO: 1735885 - RNA, 19 nt, Artificial Sequence
  Description of Artificial Sequence: Synthetic oligonucleotide
gaugcuaacucugcuuaca

SEQ ID NO: 1735886 - RNA, 19 nt, Artificial Sequence
  Description of Artificial Sequence: Synthetic oligonucleotide
gacaagcuugccuugagau

SEQ ID NO: 1735887 - RNA, 19 nt, Artificial Sequence
  Description of Artificial Sequence: Synthetic oligonucleotide
caagcccucucaguggucg

SEQ ID NO: 1735888 - RNA, 19 nt, Artificial Sequence
  Description of Artificial Sequence: Synthetic oligonucleotide
uucucaagcguuaguucau

SEQ ID NO: 1735889 - RNA, 19 nt, Artificial Sequence
  Description of Artificial Sequence: Synthetic oligonucleotide
ucucuacauggcagaagca

SEQ ID NO: 1735890 - RNA, 19 nt, Artificial Sequence
  Description of Artificial Sequence: Synthetic oligonucleotide
ggauuacugggcuuuaguc

SEQ ID NO: 1735891 - RNA, 19 nt, Artificial Sequence
  Description of Artificial Sequence: Synthetic oligonucleotide
gccuugagaucaaauaccg

SEQ ID NO: 1735892 - RNA, 19 nt, Artificial Sequence
  Description of Artificial Sequence: Synthetic oligonucleotide
uuggucagugagcacuuau

SEQ ID NO: 1735893 - RNA, 19 nt, Artificial Sequence
  Description of Artificial Sequence: Synthetic oligonucleotide
acaaauuaugauggaaaua

SEQ ID NO: 1735894 - RNA, 19 nt, Artificial Sequence
  Description of Artificial Sequence: Synthetic oligonucleotide
aaaccacuuuaguuaugaa

SEQ ID NO: 1735895 - RNA, 19 nt, Artificial Sequence
  Description of Artificial Sequence: Synthetic oligonucleotide
aaauuaugauggaaauaua

SEQ ID NO: 1735896 - RNA, 19 nt, Artificial Sequence
  Description of Artificial Sequence: Synthetic oligonucleotide
ccuggugcggagaugaggc

SEQ ID NO: 1735897 - RNA, 19 nt, Artificial Sequence
  Description of Artificial Sequence: Synthetic oligonucleotide
ggaaguaaaggaaucgaca

SEQ ID NO: 1735898 - RNA, 19 nt, Artificial Sequence
  Description of Artificial Sequence: Synthetic oligonucleotide
cagagcuauagcacagaac

SEQ ID NO: 1735899 - RNA, 19 nt, Artificial Sequence
  Description of Artificial Sequence: Synthetic oligonucleotide
caacuugucugcccucagg

SEQ ID NO: 1735900 - RNA, 19 nt, Artificial Sequence
  Description of Artificial Sequence: Synthetic oligonucleotide
gaacuauucucuuuagauu

SEQ ID NO: 1735901 - RNA, 19 nt, Artificial Sequence
  Description of Artificial Sequence: Synthetic oligonucleotide
ucguucaaguguuucuuuu

SEQ ID NO: 1735902 - RNA, 19 nt, Artificial Sequence
  Description of Artificial Sequence: Synthetic oligonucleotide
agguucguaacaacuuguc

SEQ ID NO: 1735903 - RNA, 19 nt, Artificial Sequence
  Description of Artificial Sequence: Synthetic oligonucleotide
cuccuuucguucuugcuca

SEQ ID NO: 1735904 - RNA, 19 nt, Artificial Sequence
  Description of Artificial Sequence: Synthetic oligonucleotide
ucaacuugaaugggguaau

SEQ ID NO: 1735905 - RNA, 19 nt, Artificial Sequence
  Description of Artificial Sequence: Synthetic oligonucleotide
gagaugaggcuguuuguaa

SEQ ID NO: 1735906 - RNA, 19 nt, Artificial Sequence
  Description of Artificial Sequence: Synthetic oligonucleotide
caucgcguucuacaauccc

SEQ ID NO: 1735907 - RNA, 19 nt, Artificial Sequence
  Description of Artificial Sequence: Synthetic oligonucleotide
gacgagacaagcuugccuu

SEQ ID NO: 1735908 - RNA, 19 nt, Artificial Sequence
  Description of Artificial Sequence: Synthetic oligonucleotide
cagguuagcccggaggccc

SEQ ID NO: 1735909 - RNA, 19 nt, Artificial Sequence
  Description of Artificial Sequence: Synthetic oligonucleotide
gucaacuugaaugggguaa

SEQ ID NO: 1735910 - RNA, 19 nt, Artificial Sequence
  Description of Artificial Sequence: Synthetic oligonucleotide
ucucaguggucguuaacuu

SEQ ID NO: 1735911 - RNA, 19 nt, Artificial Sequence
  Description of Artificial Sequence: Synthetic oligonucleotide
ucgcuguacuugaaagagu

SEQ ID NO: 1735912 - RNA, 19 nt, Artificial Sequence
  Description of Artificial Sequence: Synthetic oligonucleotide
ugagaaccugacauucauu

SEQ ID NO: 1735913 - RNA, 19 nt, Artificial Sequence
  Description of Artificial Sequence: Synthetic oligonucleotide
uggugcggagaugaggcug

SEQ ID NO: 1735914 - RNA, 19 nt, Artificial Sequence
  Description of Artificial Sequence: Synthetic oligonucleotide
gcguucuacaaucccggcg

SEQ ID NO: 1735915 - RNA, 19 nt, Artificial Sequence
  Description of Artificial Sequence: Synthetic oligonucleotide
uccguuguucuucccuggu

SEQ ID NO: 1735916 - RNA, 19 nt, Artificial Sequence
  Description of Artificial Sequence: Synthetic oligonucleotide
guaauaacugcaagcccuc

SEQ ID NO: 1735917 - RNA, 19 nt, Artificial Sequence
  Description of Artificial Sequence: Synthetic oligonucleotide
ugggcuuucaagguucgua

SEQ ID NO: 1735918 - RNA, 19 nt, Artificial Sequence
  Description of Artificial Sequence: Synthetic oligonucleotide
ugucaacuugaauggggua

SEQ ID NO: 1735919 - RNA, 19 nt, Artificial Sequence
  Description of Artificial Sequence: Synthetic oligonucleotide
agaaccugacauucauuuu

SEQ ID NO: 1735920 - RNA, 19 nt, Artificial Sequence
  Description of Artificial Sequence: Synthetic oligonucleotide
auucucauccugauuuaga

SEQ ID NO: 1735921 - RNA, 19 nt, Artificial Sequence
  Description of Artificial Sequence: Synthetic oligonucleotide
caagguuucaguuuuccuu

SEQ ID NO: 1735922 - RNA, 19 nt, Artificial Sequence
  Description of Artificial Sequence: Synthetic oligonucleotide
cuuucguucuugcucaugu

SEQ ID NO: 1735923 - RNA, 19 nt, Artificial Sequence
  Description of Artificial Sequence: Synthetic oligonucleotide
aucccggcgacacccaaga

SEQ ID NO: 1735924 - RNA, 19 nt, Artificial Sequence
  Description of Artificial Sequence: Synthetic oligonucleotide
ucagguuagcccggaggcc

SEQ ID NO: 1735925 - RNA, 19 nt, Artificial Sequence
  Description of Artificial Sequence: Synthetic oligonucleotide
ggugaaaaccacuuuaguu

SEQ ID NO: 1735926 - RNA, 19 nt, Artificial Sequence
  Description of Artificial Sequence: Synthetic oligonucleotide
cuagcaggaccuugacaug

SEQ ID NO: 1735927 - RNA, 19 nt, Artificial Sequence
  Description of Artificial Sequence: Synthetic oligonucleotide
gcuuucaagguucguaaca

SEQ ID NO: 1735928 - RNA, 19 nt, Artificial Sequence
  Description of Artificial Sequence: Synthetic oligonucleotide
caaccaggcgacucaaaca

SEQ ID NO: 1735929 - RNA, 19 nt, Artificial Sequence
  Description of Artificial Sequence: Synthetic oligonucleotide
uggguguccugaacacagc

SEQ ID NO: 1735930 - RNA, 19 nt, Artificial Sequence
  Description of Artificial Sequence: Synthetic oligonucleotide
uuugcaggucgcuguacuu

SEQ ID NO: 1735931 - RNA, 19 nt, Artificial Sequence
  Description of Artificial Sequence: Synthetic oligonucleotide
acgagacaagcuugccuug

SEQ ID NO: 1735932 - RNA, 19 nt, Artificial Sequence
  Description of Artificial Sequence: Synthetic oligonucleotide
caguggucguuaacuuggg

SEQ ID NO: 1735933 - RNA, 19 nt, Artificial Sequence
  Description of Artificial Sequence: Synthetic oligonucleotide
aaucccggcgacacccaag

SEQ ID NO: 1735934 - RNA, 19 nt, Artificial Sequence
  Description of Artificial Sequence: Synthetic oligonucleotide
uuacuagagccuggagucu

SEQ ID NO: 1735935 - RNA, 19 nt, Artificial Sequence
  Description of Artificial Sequence: Synthetic oligonucleotide
aguggucguuaacuugggu

SEQ ID NO: 1735936 - RNA, 19 nt, Artificial Sequence
  Description of Artificial Sequence: Synthetic oligonucleotide
gcuaaauuuugcaggucgc

SEQ ID NO: 1735937 - RNA, 19 nt, Artificial Sequence
  Description of Artificial Sequence: Synthetic oligonucleotide
ucguuaacuuggguguccu

SEQ ID NO: 1735938 - RNA, 19 nt, Artificial Sequence
  Description of Artificial Sequence: Synthetic oligonucleotide
agccccuuaaugauucuca

SEQ ID NO: 1735939 - RNA, 19 nt, Artificial Sequence
  Description of Artificial Sequence: Synthetic oligonucleotide
cauaaccagguuucuucga

SEQ ID NO: 1735940 - RNA, 19 nt, Artificial Sequence
  Description of Artificial Sequence: Synthetic oligonucleotide
uccagagcuauagcacaga

SEQ ID NO: 1735941 - RNA, 19 nt, Artificial Sequence
  Description of Artificial Sequence: Synthetic oligonucleotide
gcguuaguucauuaaguga

SEQ ID NO: 1735942 - RNA, 19 nt, Artificial Sequence
  Description of Artificial Sequence: Synthetic oligonucleotide
gcuuacacccucuuucaga

SEQ ID NO: 1735943 - RNA, 19 nt, Artificial Sequence
  Description of Artificial Sequence: Synthetic oligonucleotide
gucguuaacuugggugucc

SEQ ID NO: 1735944 - RNA, 19 nt, Artificial Sequence
  Description of Artificial Sequence: Synthetic oligonucleotide
uucuacaaucccggcgaca

SEQ ID NO: 1735945 - RNA, 19 nt, Artificial Sequence
  Description of Artificial Sequence: Synthetic oligonucleotide
gucacauguggagacuuuc

SEQ ID NO: 1735946 - RNA, 19 nt, Artificial Sequence
  Description of Artificial Sequence: Synthetic oligonucleotide
caggcgacucaaacagcag

SEQ ID NO: 1735947 - RNA, 19 nt, Artificial Sequence
  Description of Artificial Sequence: Synthetic oligonucleotide
caugaagccccuuaaugau

SEQ ID NO: 1735948 - RNA, 19 nt, Artificial Sequence
  Description of Artificial Sequence: Synthetic oligonucleotide
acauuacacacaacucaga

SEQ ID NO: 1735949 - RNA, 19 nt, Artificial Sequence
  Description of Artificial Sequence: Synthetic oligonucleotide
gaaaggacacagguugucu

SEQ ID NO: 1735950 - RNA, 19 nt, Artificial Sequence
  Description of Artificial Sequence: Synthetic oligonucleotide
uuacacccucuuucagaga

SEQ ID NO: 1735951 - RNA, 19 nt, Artificial Sequence
  Description of Artificial Sequence: Synthetic oligonucleotide
gaacccaaacacaggucuc

SEQ ID NO: 1735952 - RNA, 19 nt, Artificial Sequence
  Description of Artificial Sequence: Synthetic oligonucleotide
accaggcgacucaaacagc

SEQ ID NO: 1735953 - RNA, 19 nt, Artificial Sequence
  Description of Artificial Sequence: Synthetic oligonucleotide
ccucagguuagcccggagg

SEQ ID NO: 1735954 - RNA, 19 nt, Artificial Sequence
  Description of Artificial Sequence: Synthetic oligonucleotide
caacucagaaucucuacau

SEQ ID NO: 1735955 - RNA, 19 nt, Artificial Sequence
  Description of Artificial Sequence: Synthetic oligonucleotide
cagaagcaacuuguccagg

SEQ ID NO: 1735956 - RNA, 19 nt, Artificial Sequence
  Description of Artificial Sequence: Synthetic oligonucleotide
cuacaaucccggcgacacc

SEQ ID NO: 1735957 - RNA, 19 nt, Artificial Sequence
  Description of Artificial Sequence: Synthetic oligonucleotide
uaagugaguuguguucguu

SEQ ID NO: 1735958 - RNA, 19 nt, Artificial Sequence
  Description of Artificial Sequence: Synthetic oligonucleotide
ucccagguagggucacaug

SEQ ID NO: 1735959 - RNA, 19 nt, Artificial Sequence
  Description of Artificial Sequence: Synthetic oligonucleotide
cguaacaacuugucugccc

SEQ ID NO: 1735960 - RNA, 19 nt, Artificial Sequence
  Description of Artificial Sequence: Synthetic oligonucleotide
ggucgcuguacuugaaaga

SEQ ID NO: 1735961 - RNA, 19 nt, Artificial Sequence
  Description of Artificial Sequence: Synthetic oligonucleotide
uguguucguucaaguguuu

SEQ ID NO: 1735962 - RNA, 19 nt, Artificial Sequence
  Description of Artificial Sequence: Synthetic oligonucleotide
ggucagugagcacuuaugu

SEQ ID NO: 1735963 - RNA, 19 nt, Artificial Sequence
  Description of Artificial Sequence: Synthetic oligonucleotide
cuguguugcuccaguuguc

SEQ ID NO: 1735964 - RNA, 19 nt, Artificial Sequence
  Description of Artificial Sequence: Synthetic oligonucleotide
aggcuguuuguaaguuuuc

SEQ ID NO: 1735965 - RNA, 19 nt, Artificial Sequence
  Description of Artificial Sequence: Synthetic oligonucleotide
gcuuuagucauaaccaggu

SEQ ID NO: 1735966 - RNA, 19 nt, Artificial Sequence
  Description of Artificial Sequence: Synthetic oligonucleotide
cucucaguggucguuaacu

SEQ ID NO: 1735967 - RNA, 19 nt, Artificial Sequence
  Description of Artificial Sequence: Synthetic oligonucleotide
gaggcuguuuguaaguuuu

SEQ ID NO: 1735968 - RNA, 19 nt, Artificial Sequence
  Description of Artificial Sequence: Synthetic oligonucleotide
gagcacuuauguucauugu

SEQ ID NO: 1735969 - RNA, 19 nt, Artificial Sequence
  Description of Artificial Sequence: Synthetic oligonucleotide
cuaaauuuugcaggucgcu

SEQ ID NO: 1735970 - RNA, 19 nt, Artificial Sequence
  Description of Artificial Sequence: Synthetic oligonucleotide
gggcuuucaagguucguaa

SEQ ID NO: 1735971 - RNA, 19 nt, Artificial Sequence
  Description of Artificial Sequence: Synthetic oligonucleotide
cuuuccuuguuucugcauu

SEQ ID NO: 1735972 - RNA, 19 nt, Artificial Sequence
  Description of Artificial Sequence: Synthetic oligonucleotide
caucaggugaaaaccacuu

SEQ ID NO: 1735973 - RNA, 19 nt, Artificial Sequence
  Description of Artificial Sequence: Synthetic oligonucleotide
ucucaagcguuaguucauu

SEQ ID NO: 1735974 - RNA, 19 nt, Artificial Sequence
  Description of Artificial Sequence: Synthetic oligonucleotide
ggcuuucaagguucguaac

SEQ ID NO: 1735975 - RNA, 19 nt, Artificial Sequence
  Description of Artificial Sequence: Synthetic oligonucleotide
ggaugcuaacucugcuuac

SEQ ID NO: 1735976 - RNA, 19 nt, Artificial Sequence
  Description of Artificial Sequence: Synthetic oligonucleotide
gacaggauuacugggcuuu

SEQ ID NO: 1735977 - RNA, 19 nt, Artificial Sequence
  Description of Artificial Sequence: Synthetic oligonucleotide
gguucguaacaacuugucu

SEQ ID NO: 1735978 - RNA, 19 nt, Artificial Sequence
  Description of Artificial Sequence: Synthetic oligonucleotide
cguucuacaaucccggcga

SEQ ID NO: 1735979 - RNA, 19 nt, Artificial Sequence
  Description of Artificial Sequence: Synthetic oligonucleotide
uggggucacuaauccuuuc

SEQ ID NO: 1735980 - RNA, 19 nt, Artificial Sequence
  Description of Artificial Sequence: Synthetic oligonucleotide
ccagguagggucacaugug

SEQ ID NO: 1735981 - RNA, 19 nt, Artificial Sequence
  Description of Artificial Sequence: Synthetic oligonucleotide
uggcuaaauuuugcagguc

SEQ ID NO: 1735982 - RNA, 19 nt, Artificial Sequence
  Description of Artificial Sequence: Synthetic oligonucleotide
ccaggcgacucaaacagca

SEQ ID NO: 1735983 - RNA, 19 nt, Artificial Sequence
  Description of Artificial Sequence: Synthetic oligonucleotide
caaauaccgguuucuuacu

SEQ ID NO: 1735984 - RNA, 19 nt, Artificial Sequence
  Description of Artificial Sequence: Synthetic oligonucleotide
gcuggaguuuuggucagug

SEQ ID NO: 1735985 - RNA, 19 nt, Artificial Sequence
  Description of Artificial Sequence: Synthetic oligonucleotide
ucccuggugcggagaugag

SEQ ID NO: 1735986 - RNA, 19 nt, Artificial Sequence
  Description of Artificial Sequence: Synthetic oligonucleotide
cagauacuccacaaauuau

SEQ ID NO: 1735987 - RNA, 19 nt, Artificial Sequence
  Description of Artificial Sequence: Synthetic oligonucleotide
cucauguuucuuccguugu

SEQ ID NO: 1735988 - RNA, 19 nt, Artificial Sequence
  Description of Artificial Sequence: Synthetic oligonucleotide
aggaaucgacaggauuacu

SEQ ID NO: 1735989 - RNA, 19 nt, Artificial Sequence
  Description of Artificial Sequence: Synthetic oligonucleotide
ccggcgacacccaagaaaa

SEQ ID NO: 1735990 - RNA, 19 nt, Artificial Sequence
  Description of Artificial Sequence: Synthetic oligonucleotide
aacaaccaggcgacucaaa

SEQ ID NO: 1735991 - RNA, 19 nt, Artificial Sequence
  Description of Artificial Sequence: Synthetic oligonucleotide
cucaagcguuaguucauua

SEQ ID NO: 1735992 - RNA, 19 nt, Artificial Sequence
  Description of Artificial Sequence: Synthetic oligonucleotide
ggggacgagacaagcuugc

SEQ ID NO: 1735993 - RNA, 19 nt, Artificial Sequence
  Description of Artificial Sequence: Synthetic oligonucleotide
acuagagccuggagucugu

SEQ ID NO: 1735994 - RNA, 19 nt, Artificial Sequence
  Description of Artificial Sequence: Synthetic oligonucleotide
gacggucaucgcguucuac

SEQ ID NO: 1735995 - RNA, 19 nt, Artificial Sequence
  Description of Artificial Sequence: Synthetic oligonucleotide
uggagacuuucuggcugga

SEQ ID NO: 1735996 - RNA, 19 nt, Artificial Sequence
  Description of Artificial Sequence: Synthetic oligonucleotide
ccccuuaaugauucucauc

SEQ ID NO: 1735997 - RNA, 19 nt, Artificial Sequence
  Description of Artificial Sequence: Synthetic oligonucleotide
caggucgcuguacuugaaa

SEQ ID NO: 1735998 - RNA, 19 nt, Artificial Sequence
  Description of Artificial Sequence: Synthetic oligonucleotide
ggacgagacaagcuugccu

SEQ ID NO: 1735999 - RNA, 19 nt, Artificial Sequence
  Description of Artificial Sequence: Synthetic oligonucleotide
cacuuauguucauugucuu

SEQ ID NO: 1736000 - RNA, 19 nt, Artificial Sequence
  Description of Artificial Sequence: Synthetic oligonucleotide
ggggucacuaauccuuucu

SEQ ID NO: 1736001 - RNA, 19 nt, Artificial Sequence
  Description of Artificial Sequence: Synthetic oligonucleotide
cccaaacacaggucucuuc

SEQ ID NO: 1736002 - RNA, 19 nt, Artificial Sequence
  Description of Artificial Sequence: Synthetic oligonucleotide
cuuuagucauaaccagguu

SEQ ID NO: 1736003 - RNA, 19 nt, Artificial Sequence
  Description of Artificial Sequence: Synthetic oligonucleotide
ccugauuuagauucucuuu

SEQ ID NO: 1736004 - RNA, 19 nt, Artificial Sequence
  Description of Artificial Sequence: Synthetic oligonucleotide
guaaaggaaucgacaggau

SEQ ID NO: 1736005 - RNA, 19 nt, Artificial Sequence
  Description of Artificial Sequence: Synthetic oligonucleotide
acaaucccggcgacaccca

SEQ ID NO: 1736006 - RNA, 19 nt, Artificial Sequence
  Description of Artificial Sequence: Synthetic oligonucleotide
cccuggugcggagaugagg

SEQ ID NO: 1736007 - RNA, 19 nt, Artificial Sequence
  Description of Artificial Sequence: Synthetic oligonucleotide
ucccggcgacacccaagaa

SEQ ID NO: 1736008 - RNA, 19 nt, Artificial Sequence
  Description of Artificial Sequence: Synthetic oligonucleotide
ggucguuaacuuggguguc

SEQ ID NO: 1736009 - RNA, 19 nt, Artificial Sequence
  Description of Artificial Sequence: Synthetic oligonucleotide
guuagcccggaggcccagc

SEQ ID NO: 1736010 - RNA, 19 nt, Artificial Sequence
  Description of Artificial Sequence: Synthetic oligonucleotide
acccaaacacaggucucuu

SEQ ID NO: 1736011 - RNA, 19 nt, Artificial Sequence
  Description of Artificial Sequence: Synthetic oligonucleotide
ugcggagaugaggcuguuu

SEQ ID NO: 1736012 - RNA, 19 nt, Artificial Sequence
  Description of Artificial Sequence: Synthetic oligonucleotide
ccagagcuauagcacagaa

SEQ ID NO: 1736013 - RNA, 19 nt, Artificial Sequence
  Description of Artificial Sequence: Synthetic oligonucleotide
gggacggucaucgcguucu

SEQ ID NO: 1736014 - RNA, 19 nt, Artificial Sequence
  Description of Artificial Sequence: Synthetic oligonucleotide
agguuagcccggaggccca

SEQ ID NO: 1736015 - RNA, 19 nt, Artificial Sequence
  Description of Artificial Sequence: Synthetic oligonucleotide
gacuuucuggcuggaguuu

SEQ ID NO: 1736016 - RNA, 19 nt, Artificial Sequence
  Description of Artificial Sequence: Synthetic oligonucleotide
cccggcgacacccaagaaa

SEQ ID NO: 1736017 - RNA, 19 nt, Artificial Sequence
  Description of Artificial Sequence: Synthetic oligonucleotide
acucccagguagggucaca

SEQ ID NO: 1736018 - RNA, 19 nt, Artificial Sequence
  Description of Artificial Sequence: Synthetic oligonucleotide
ccucucaguggucguuaac

SEQ ID NO: 1736019 - RNA, 19 nt, Artificial Sequence
  Description of Artificial Sequence: Synthetic oligonucleotide
caacuugaaugggguaaua

SEQ ID NO: 1736020 - RNA, 19 nt, Artificial Sequence
  Description of Artificial Sequence: Synthetic oligonucleotide
caaucccggcgacacccaa

SEQ ID NO: 1736021 - RNA, 19 nt, Artificial Sequence
  Description of Artificial Sequence: Synthetic oligonucleotide
cgcguucuacaaucccggc

SEQ ID NO: 1736022 - RNA, 19 nt, Artificial Sequence
  Description of Artificial Sequence: Synthetic oligonucleotide
agcccucucaguggucguu

SEQ ID NO: 1736023 - RNA, 19 nt, Artificial Sequence
  Description of Artificial Sequence: Synthetic oligonucleotide
ggucaucgcguucuacaau

SEQ ID NO: 1736024 - RNA, 19 nt, Artificial Sequence
  Description of Artificial Sequence: Synthetic oligonucleotide
gugagcacuuauguucauu

SEQ ID NO: 1736025 - RNA, 19 nt, Artificial Sequence
  Description of Artificial Sequence: Synthetic oligonucleotide
gguuagcccggaggcccag

SEQ ID NO: 1736026 - RNA, 19 nt, Artificial Sequence
  Description of Artificial Sequence: Synthetic oligonucleotide
ggggacggucaucgcguuc

SEQ ID NO: 1736027 - RNA, 19 nt, Artificial Sequence
  Description of Artificial Sequence: Synthetic oligonucleotide
ccacuuuaguuaugaacuu

SEQ ID NO: 1736028 - RNA, 19 nt, Artificial Sequence
  Description of Artificial Sequence: Synthetic oligonucleotide
ccccaagguuucaguuuuc

SEQ ID NO: 1736029 - RNA, 19 nt, Artificial Sequence
  Description of Artificial Sequence: Synthetic oligonucleotide
cggucaucgcguucuacaa

SEQ ID NO: 1736030 - RNA, 19 nt, Artificial Sequence
  Description of Artificial Sequence: Synthetic oligonucleotide
cugcauucaggugggcuuu

SEQ ID NO: 1736031 - RNA, 19 nt, Artificial Sequence
  Description of Artificial Sequence: Synthetic oligonucleotide
ccggaggcccagccguuug

SEQ ID NO: 1736032 - RNA, 19 nt, Artificial Sequence
  Description of Artificial Sequence: Synthetic oligonucleotide
cccucagguuagcccggag

SEQ ID NO: 1736033 - RNA, 19 nt, Artificial Sequence
  Description of Artificial Sequence: Synthetic oligonucleotide
gcuugccuugagaucaaau

SEQ ID NO: 1736034 - RNA, 19 nt, Artificial Sequence
  Description of Artificial Sequence: Synthetic oligonucleotide
cgagacaagcuugccuuga

SEQ ID NO: 1736035 - RNA, 19 nt, Artificial Sequence
  Description of Artificial Sequence: Synthetic oligonucleotide
gcaagcccucucagugguc

SEQ ID NO: 1736036 - RNA, 19 nt, Artificial Sequence
  Description of Artificial Sequence: Synthetic oligonucleotide
ggucacauguggagacuuu

SEQ ID NO: 1736037 - RNA, 19 nt, Artificial Sequence
  Description of Artificial Sequence: Synthetic oligonucleotide
cccucucaguggucguuaa

SEQ ID NO: 1736038 - RNA, 19 nt, Artificial Sequence
  Description of Artificial Sequence: Synthetic oligonucleotide
ggacggucaucgcguucua

SEQ ID NO: 1736039 - RNA, 19 nt, Artificial Sequence
  Description of Artificial Sequence: Synthetic oligonucleotide
ccagccguuuggcuaaauu

SEQ ID NO: 1736040 - RNA, 19 nt, Artificial Sequence
  Description of Artificial Sequence: Synthetic oligonucleotide
gcccucucaguggucguua

SEQ ID NO: 1736041 - RNA, 19 nt, Artificial Sequence
  Description of Artificial Sequence: Synthetic oligonucleotide
gcccagccguuuggcuaaa

SEQ ID NO: 1736042 - RNA, 19 nt, Artificial Sequence
  Description of Artificial Sequence: Synthetic oligonucleotide
cccagccguuuggcuaaau

SEQ ID NO: 1736043 - RNA, 19 nt, Artificial Sequence
  Description of Artificial Sequence: Synthetic oligonucleotide
aaucauagccaauaugccc

SEQ ID NO: 1736044 - RNA, 19 nt, Artificial Sequence
  Description of Artificial Sequence: Synthetic oligonucleotide
aguuauagaaauguaaagc

SEQ ID NO: 1736045 - RNA, 19 nt, Artificial Sequence
  Description of Artificial Sequence: Synthetic oligonucleotide
uuuauaagggaacagauuu

SEQ ID NO: 1736046 - RNA, 19 nt, Artificial Sequence
  Description of Artificial Sequence: Synthetic oligonucleotide
aaccuuauaccuucuaaac

SEQ ID NO: 1736047 - RNA, 19 nt, Artificial Sequence
  Description of Artificial Sequence: Synthetic oligonucleotide
gaacauauuggacuggccg

SEQ ID NO: 1736048 - RNA, 19 nt, Artificial Sequence
  Description of Artificial Sequence: Synthetic oligonucleotide
cagauuugcaacauaacgg

SEQ ID NO: 1736049 - RNA, 19 nt, Artificial Sequence
  Description of Artificial Sequence: Synthetic oligonucleotide
ugcuuaauuggauuuaaag

SEQ ID NO: 1736050 - RNA, 19 nt, Artificial Sequence
  Description of Artificial Sequence: Synthetic oligonucleotide
uguaaagcugugaaaagug

SEQ ID NO: 1736051 - RNA, 19 nt, Artificial Sequence
  Description of Artificial Sequence: Synthetic oligonucleotide
uuaauaaugucaauugcaa

SEQ ID NO: 1736052 - RNA, 19 nt, Artificial Sequence
  Description of Artificial Sequence: Synthetic oligonucleotide
gauggaaccauuuauccac

SEQ ID NO: 1736053 - RNA, 19 nt, Artificial Sequence
  Description of Artificial Sequence: Synthetic oligonucleotide
uuauagaaauguaaagcug

SEQ ID NO: 1736054 - RNA, 19 nt, Artificial Sequence
  Description of Artificial Sequence: Synthetic oligonucleotide
aauguaaagcugugaaaag

SEQ ID NO: 1736055 - RNA, 19 nt, Artificial Sequence
  Description of Artificial Sequence: Synthetic oligonucleotide
uaaccuucugaacauauug

SEQ ID NO: 1736056 - RNA, 19 nt, Artificial Sequence
  Description of Artificial Sequence: Synthetic oligonucleotide
accuuauaccuucuaaacc

SEQ ID NO: 1736057 - RNA, 19 nt, Artificial Sequence
  Description of Artificial Sequence: Synthetic oligonucleotide
augucugagggauagcacc

SEQ ID NO: 1736058 - RNA, 19 nt, Artificial Sequence
  Description of Artificial Sequence: Synthetic oligonucleotide
ucagugguaaguuauagaa

SEQ ID NO: 1736059 - RNA, 19 nt, Artificial Sequence
  Description of Artificial Sequence: Synthetic oligonucleotide
gcuuaauuggauuuaaagg

SEQ ID NO: 1736060 - RNA, 19 nt, Artificial Sequence
  Description of Artificial Sequence: Synthetic oligonucleotide
cauaaauugggauaucaug

SEQ ID NO: 1736061 - RNA, 19 nt, Artificial Sequence
  Description of Artificial Sequence: Synthetic oligonucleotide
ugggauaucaugaaaugga

SEQ ID NO: 1736062 - RNA, 19 nt, Artificial Sequence
  Description of Artificial Sequence: Synthetic oligonucleotide
agugguaaguuauagaaau

SEQ ID NO: 1736063 - RNA, 19 nt, Artificial Sequence
  Description of Artificial Sequence: Synthetic oligonucleotide
uucuaaaccagucaacagu

SEQ ID NO: 1736064 - RNA, 19 nt, Artificial Sequence
  Description of Artificial Sequence: Synthetic oligonucleotide
uauacauccaguauguguu

SEQ ID NO: 1736065 - RNA, 19 nt, Artificial Sequence
  Description of Artificial Sequence: Synthetic oligonucleotide
aaugucauuauaauuggcu

SEQ ID NO: 1736066 - RNA, 19 nt, Artificial Sequence
  Description of Artificial Sequence: Synthetic oligonucleotide
uuaauuggauuuaaagggu

SEQ ID NO: 1736067 - RNA, 19 nt, Artificial Sequence
  Description of Artificial Sequence: Synthetic oligonucleotide
aaccucaaccaccaugugg

SEQ ID NO: 1736068 - RNA, 19 nt, Artificial Sequence
  Description of Artificial Sequence: Synthetic oligonucleotide
ucaauugcaaaauccuugc

SEQ ID NO: 1736069 - RNA, 19 nt, Artificial Sequence
  Description of Artificial Sequence: Synthetic oligonucleotide
ggaucauccacguuaaugg

SEQ ID NO: 1736070 - RNA, 19 nt, Artificial Sequence
  Description of Artificial Sequence: Synthetic oligonucleotide
caccauguggaauacaucc

SEQ ID NO: 1736071 - RNA, 19 nt, Artificial Sequence
  Description of Artificial Sequence: Synthetic oligonucleotide
guaaaagcugucuugguug

SEQ ID NO: 1736072 - RNA, 19 nt, Artificial Sequence
  Description of Artificial Sequence: Synthetic oligonucleotide
auuugcaacauaacggagc

SEQ ID NO: 1736073 - RNA, 19 nt, Artificial Sequence
  Description of Artificial Sequence: Synthetic oligonucleotide
aaaauccuugccuuuaaau

SEQ ID NO: 1736074 - RNA, 19 nt, Artificial Sequence
  Description of Artificial Sequence: Synthetic oligonucleotide
uuugcaacauaacggagcu

SEQ ID NO: 1736075 - RNA, 19 nt, Artificial Sequence
  Description of Artificial Sequence: Synthetic oligonucleotide
agauuugcaacauaacgga

SEQ ID NO: 1736076 - RNA, 19 nt, Artificial Sequence
  Description of Artificial Sequence: Synthetic oligonucleotide
augucaagugucuggaugg

SEQ ID NO: 1736077 - RNA, 19 nt, Artificial Sequence
  Description of Artificial Sequence: Synthetic oligonucleotide
uaaacauauacauccagua

SEQ ID NO: 1736078 - RNA, 19 nt, Artificial Sequence
  Description of Artificial Sequence: Synthetic oligonucleotide
agaggagaaaguccgcgcc

SEQ ID NO: 1736079 - RNA, 19 nt, Artificial Sequence
  Description of Artificial Sequence: Synthetic oligonucleotide
auaaauugggauaucauga

SEQ ID NO: 1736080 - RNA, 19 nt, Artificial Sequence
  Description of Artificial Sequence: Synthetic oligonucleotide
aacauauuggacuggccga

SEQ ID NO: 1736081 - RNA, 19 nt, Artificial Sequence
  Description of Artificial Sequence: Synthetic oligonucleotide
uucuuagucacuaaugcuu

SEQ ID NO: 1736082 - RNA, 19 nt, Artificial Sequence
  Description of Artificial Sequence: Synthetic oligonucleotide
gacgagaggagaaaguccg

SEQ ID NO: 1736083 - RNA, 19 nt, Artificial Sequence
  Description of Artificial Sequence: Synthetic oligonucleotide
auuugaccagcguggaacc

SEQ ID NO: 1736084 - RNA, 19 nt, Artificial Sequence
  Description of Artificial Sequence: Synthetic oligonucleotide
aacauaacggagcuuuccu

SEQ ID NO: 1736085 - RNA, 19 nt, Artificial Sequence
  Description of Artificial Sequence: Synthetic oligonucleotide
acaucuaugcacaaaugac

SEQ ID NO: 1736086 - RNA, 19 nt, Artificial Sequence
  Description of Artificial Sequence: Synthetic oligonucleotide
ucuaaaccagucaacagua

SEQ ID NO: 1736087 - RNA, 19 nt, Artificial Sequence
  Description of Artificial Sequence: Synthetic oligonucleotide
gaauacauccuuuucugca

SEQ ID NO: 1736088 - RNA, 19 nt, Artificial Sequence
  Description of Artificial Sequence: Synthetic oligonucleotide
uugggauaucaugaaaugg

SEQ ID NO: 1736089 - RNA, 19 nt, Artificial Sequence
  Description of Artificial Sequence: Synthetic oligonucleotide
uauaccuucuaaaccaguc

SEQ ID NO: 1736090 - RNA, 19 nt, Artificial Sequence
  Description of Artificial Sequence: Synthetic oligonucleotide
ugguaaguuauagaaaugu

SEQ ID NO: 1736091 - RNA, 19 nt, Artificial Sequence
  Description of Artificial Sequence: Synthetic oligonucleotide
ucacgucuugcuuaauugg

SEQ ID NO: 1736092 - RNA, 19 nt, Artificial Sequence
  Description of Artificial Sequence: Synthetic oligonucleotide
guagugagcaggcagauuc

SEQ ID NO: 1736093 - RNA, 19 nt, Artificial Sequence
  Description of Artificial Sequence: Synthetic oligonucleotide
aaccacgcagccccgacac

SEQ ID NO: 1736094 - RNA, 19 nt, Artificial Sequence
  Description of Artificial Sequence: Synthetic oligonucleotide
cuaugcacaaaugacuucc

SEQ ID NO: 1736095 - RNA, 19 nt, Artificial Sequence
  Description of Artificial Sequence: Synthetic oligonucleotide
ucgccuucaucaaucauag

SEQ ID NO: 1736096 - RNA, 19 nt, Artificial Sequence
  Description of Artificial Sequence: Synthetic oligonucleotide
auugggauaucaugaaaug

SEQ ID NO: 1736097 - RNA, 19 nt, Artificial Sequence
  Description of Artificial Sequence: Synthetic oligonucleotide
uucacgucuugcuuaauug

SEQ ID NO: 1736098 - RNA, 19 nt, Artificial Sequence
  Description of Artificial Sequence: Synthetic oligonucleotide
uaagggaacagauuugcaa

SEQ ID NO: 1736099 - RNA, 19 nt, Artificial Sequence
  Description of Artificial Sequence: Synthetic oligonucleotide
uauaauuggcugcgucugg

SEQ ID NO: 1736100 - RNA, 19 nt, Artificial Sequence
  Description of Artificial Sequence: Synthetic oligonucleotide
ugcacaaaugacuuccgug

SEQ ID NO: 1736101 - RNA, 19 nt, Artificial Sequence
  Description of Artificial Sequence: Synthetic oligonucleotide
aagccacucaucguguccc

SEQ ID NO: 1736102 - RNA, 19 nt, Artificial Sequence
  Description of Artificial Sequence: Synthetic oligonucleotide
gaagacgcgguacucgagg

SEQ ID NO: 1736103 - RNA, 19 nt, Artificial Sequence
  Description of Artificial Sequence: Synthetic oligonucleotide
agccaauaugcccagaacu

SEQ ID NO: 1736104 - RNA, 19 nt, Artificial Sequence
  Description of Artificial Sequence: Synthetic oligonucleotide
uuucuuagucacuaaugcu

SEQ ID NO: 1736105 - RNA, 19 nt, Artificial Sequence
  Description of Artificial Sequence: Synthetic oligonucleotide
uuauaauuggcugcgucug

SEQ ID NO: 1736106 - RNA, 19 nt, Artificial Sequence
  Description of Artificial Sequence: Synthetic oligonucleotide
acaguagcuucuaaguagc

SEQ ID NO: 1736107 - RNA, 19 nt, Artificial Sequence
  Description of Artificial Sequence: Synthetic oligonucleotide
uguauccuuuauaagggaa

SEQ ID NO: 1736108 - RNA, 19 nt, Artificial Sequence
  Description of Artificial Sequence: Synthetic oligonucleotide
ucaaccaccauguggaaua

SEQ ID NO: 1736109 - RNA, 19 nt, Artificial Sequence
  Description of Artificial Sequence: Synthetic oligonucleotide
uaugcacaaaugacuuccg

SEQ ID NO: 1736110 - RNA, 19 nt, Artificial Sequence
  Description of Artificial Sequence: Synthetic oligonucleotide
caaucauagccaauaugcc

SEQ ID NO: 1736111 - RNA, 19 nt, Artificial Sequence
  Description of Artificial Sequence: Synthetic oligonucleotide
agauucacaggguggcggc

SEQ ID NO: 1736112 - RNA, 19 nt, Artificial Sequence
  Description of Artificial Sequence: Synthetic oligonucleotide
uaauuggauuuaaaggguc

SEQ ID NO: 1736113 - RNA, 19 nt, Artificial Sequence
  Description of Artificial Sequence: Synthetic oligonucleotide
aucuaaugcuuccagguga

SEQ ID NO: 1736114 - RNA, 19 nt, Artificial Sequence
  Description of Artificial Sequence: Synthetic oligonucleotide
uaaucaugagugcuguuaa

SEQ ID NO: 1736115 - RNA, 19 nt, Artificial Sequence
  Description of Artificial Sequence: Synthetic oligonucleotide
agggauagcaccguaguuc

SEQ ID NO: 1736116 - RNA, 19 nt, Artificial Sequence
  Description of Artificial Sequence: Synthetic oligonucleotide
uuuccagucgguuucgccu

SEQ ID NO: 1736117 - RNA, 19 nt, Artificial Sequence
  Description of Artificial Sequence: Synthetic oligonucleotide
uaaauugggauaucaugaa

SEQ ID NO: 1736118 - RNA, 19 nt, Artificial Sequence
  Description of Artificial Sequence: Synthetic oligonucleotide
ucugcauaaauugggauau

SEQ ID NO: 1736119 - RNA, 19 nt, Artificial Sequence
  Description of Artificial Sequence: Synthetic oligonucleotide
aaauugggauaucaugaaa

SEQ ID NO: 1736120 - RNA, 19 nt, Artificial Sequence
  Description of Artificial Sequence: Synthetic oligonucleotide
auugcaaaauccuugccuu

SEQ ID NO: 1736121 - RNA, 19 nt, Artificial Sequence
  Description of Artificial Sequence: Synthetic oligonucleotide
ugauggaaccauuuaucca

SEQ ID NO: 1736122 - RNA, 19 nt, Artificial Sequence
  Description of Artificial Sequence: Synthetic oligonucleotide
aaugacuuccgugucacaa

SEQ ID NO: 1736123 - RNA, 19 nt, Artificial Sequence
  Description of Artificial Sequence: Synthetic oligonucleotide
ucaugagugcuguuaauaa

SEQ ID NO: 1736124 - RNA, 19 nt, Artificial Sequence
  Description of Artificial Sequence: Synthetic oligonucleotide
ugucacaauggcuuugaga

SEQ ID NO: 1736125 - RNA, 19 nt, Artificial Sequence
  Description of Artificial Sequence: Synthetic oligonucleotide
uucacccugauuauuucac

SEQ ID NO: 1736126 - RNA, 19 nt, Artificial Sequence
  Description of Artificial Sequence: Synthetic oligonucleotide
uccuuuauaagggaacaga

SEQ ID NO: 1736127 - RNA, 19 nt, Artificial Sequence
  Description of Artificial Sequence: Synthetic oligonucleotide
uaccuucuaaaccagucaa

SEQ ID NO: 1736128 - RNA, 19 nt, Artificial Sequence
  Description of Artificial Sequence: Synthetic oligonucleotide
cauugucgccacaacagcc

SEQ ID NO: 1736129 - RNA, 19 nt, Artificial Sequence
  Description of Artificial Sequence: Synthetic oligonucleotide
cuucuaaaccagucaacag

SEQ ID NO: 1736130 - RNA, 19 nt, Artificial Sequence
  Description of Artificial Sequence: Synthetic oligonucleotide
cauuugaccagcguggaac

SEQ ID NO: 1736131 - RNA, 19 nt, Artificial Sequence
  Description of Artificial Sequence: Synthetic oligonucleotide
gauagcaccguaguuccag

SEQ ID NO: 1736132 - RNA, 19 nt, Artificial Sequence
  Description of Artificial Sequence: Synthetic oligonucleotide
ugcaacauaacggagcuuu

SEQ ID NO: 1736133 - RNA, 19 nt, Artificial Sequence
  Description of Artificial Sequence: Synthetic oligonucleotide
ugagggauagcaccguagu

SEQ ID NO: 1736134 - RNA, 19 nt, Artificial Sequence
  Description of Artificial Sequence: Synthetic oligonucleotide
guaaguuauagaaauguaa

SEQ ID NO: 1736135 - RNA, 19 nt, Artificial Sequence
  Description of Artificial Sequence: Synthetic oligonucleotide
aggaucacauuugaagggg

SEQ ID NO: 1736136 - RNA, 19 nt, Artificial Sequence
  Description of Artificial Sequence: Synthetic oligonucleotide
ugacuuccgugucacaaug

SEQ ID NO: 1736137 - RNA, 19 nt, Artificial Sequence
  Description of Artificial Sequence: Synthetic oligonucleotide
uccacguuaauggcgauga

SEQ ID NO: 1736138 - RNA, 19 nt, Artificial Sequence
  Description of Artificial Sequence: Synthetic oligonucleotide
uuccgugucacaauggcuu

SEQ ID NO: 1736139 - RNA, 19 nt, Artificial Sequence
  Description of Artificial Sequence: Synthetic oligonucleotide
gguacucgaggguaaaggg

SEQ ID NO: 1736140 - RNA, 19 nt, Artificial Sequence
  Description of Artificial Sequence: Synthetic oligonucleotide
uugcaucuaaugcuuccag

SEQ ID NO: 1736141 - RNA, 19 nt, Artificial Sequence
  Description of Artificial Sequence: Synthetic oligonucleotide
agcugugaaaagugacuac

SEQ ID NO: 1736142 - RNA, 19 nt, Artificial Sequence
  Description of Artificial Sequence: Synthetic oligonucleotide
auaccuucuaaaccaguca

SEQ ID NO: 1736143 - RNA, 19 nt, Artificial Sequence
  Description of Artificial Sequence: Synthetic oligonucleotide
cacagucacacaaccacgc

SEQ ID NO: 1736144 - RNA, 19 nt, Artificial Sequence
  Description of Artificial Sequence: Synthetic oligonucleotide
ucacuaaugcuuuccaaua

SEQ ID NO: 1736145 - RNA, 19 nt, Artificial Sequence
  Description of Artificial Sequence: Synthetic oligonucleotide
ucuuagucacuaaugcuuu

SEQ ID NO: 1736146 - RNA, 19 nt, Artificial Sequence
  Description of Artificial Sequence: Synthetic oligonucleotide
uggugauggaaccauuuau

SEQ ID NO: 1736147 - RNA, 19 nt, Artificial Sequence
  Description of Artificial Sequence: Synthetic oligonucleotide
acaucugucgguagugagc

SEQ ID NO: 1736148 - RNA, 19 nt, Artificial Sequence
  Description of Artificial Sequence: Synthetic oligonucleotide
ucuaaugcuuccaggugaa

SEQ ID NO: 1736149 - RNA, 19 nt, Artificial Sequence
  Description of Artificial Sequence: Synthetic oligonucleotide
acaaaugacuuccguguca

SEQ ID NO: 1736150 - RNA, 19 nt, Artificial Sequence
  Description of Artificial Sequence: Synthetic oligonucleotide
aaaguccgcgccugcgcac

SEQ ID NO: 1736151 - RNA, 19 nt, Artificial Sequence
  Description of Artificial Sequence: Synthetic oligonucleotide
cauuauaauuggcugcguc

SEQ ID NO: 1736152 - RNA, 19 nt, Artificial Sequence
  Description of Artificial Sequence: Synthetic oligonucleotide
cacaucuaugcacaaauga

SEQ ID NO: 1736153 - RNA, 19 nt, Artificial Sequence
  Description of Artificial Sequence: Synthetic oligonucleotide
uauuggacuggccgagcag

SEQ ID NO: 1736154 - RNA, 19 nt, Artificial Sequence
  Description of Artificial Sequence: Synthetic oligonucleotide
ugaaggggcucuccgacac

SEQ ID NO: 1736155 - RNA, 19 nt, Artificial Sequence
  Description of Artificial Sequence: Synthetic oligonucleotide
aguagccagguuucagccg

SEQ ID NO: 1736156 - RNA, 19 nt, Artificial Sequence
  Description of Artificial Sequence: Synthetic oligonucleotide
auacauccaguauguguuc

SEQ ID NO: 1736157 - RNA, 19 nt, Artificial Sequence
  Description of Artificial Sequence: Synthetic oligonucleotide
gauuugcaacauaacggag

SEQ ID NO: 1736158 - RNA, 19 nt, Artificial Sequence
  Description of Artificial Sequence: Synthetic oligonucleotide
uagucacuaaugcuuucca

SEQ ID NO: 1736159 - RNA, 19 nt, Artificial Sequence
  Description of Artificial Sequence: Synthetic oligonucleotide
uuauaccuucuaaaccagu

SEQ ID NO: 1736160 - RNA, 19 nt, Artificial Sequence
  Description of Artificial Sequence: Synthetic oligonucleotide
uuugcaucuaaugcuucca

SEQ ID NO: 1736161 - RNA, 19 nt, Artificial Sequence
  Description of Artificial Sequence: Synthetic oligonucleotide
guuaauggcgaugacuuuc

SEQ ID NO: 1736162 - RNA, 19 nt, Artificial Sequence
  Description of Artificial Sequence: Synthetic oligonucleotide
aucauccacguuaauggcg

SEQ ID NO: 1736163 - RNA, 19 nt, Artificial Sequence
  Description of Artificial Sequence: Synthetic oligonucleotide
auggcuuugagagcuaaug

SEQ ID NO: 1736164 - RNA, 19 nt, Artificial Sequence
  Description of Artificial Sequence: Synthetic oligonucleotide
gacacggagcaaccggacg

SEQ ID NO: 1736165 - RNA, 19 nt, Artificial Sequence
  Description of Artificial Sequence: Synthetic oligonucleotide
gucgguagugagcaggcag

SEQ ID NO: 1736166 - RNA, 19 nt, Artificial Sequence
  Description of Artificial Sequence: Synthetic oligonucleotide
gagaggagaaaguccgcgc

SEQ ID NO: 1736167 - RNA, 19 nt, Artificial Sequence
  Description of Artificial Sequence: Synthetic oligonucleotide
auaaucaugagugcuguua

SEQ ID NO: 1736168 - RNA, 19 nt, Artificial Sequence
  Description of Artificial Sequence: Synthetic oligonucleotide
uagaaauguaaagcuguga

SEQ ID NO: 1736169 - RNA, 19 nt, Artificial Sequence
  Description of Artificial Sequence: Synthetic oligonucleotide
accucaaccaccaugugga

SEQ ID NO: 1736170 - RNA, 19 nt, Artificial Sequence
  Description of Artificial Sequence: Synthetic oligonucleotide
cugaacauauuggacuggc

SEQ ID NO: 1736171 - RNA, 19 nt, Artificial Sequence
  Description of Artificial Sequence: Synthetic oligonucleotide
aaucaugagugcuguuaau

SEQ ID NO: 1736172 - RNA, 19 nt, Artificial Sequence
  Description of Artificial Sequence: Synthetic oligonucleotide
cuucagugguaaguuauag

SEQ ID NO: 1736173 - RNA, 19 nt, Artificial Sequence
  Description of Artificial Sequence: Synthetic oligonucleotide
auagaaauguaaagcugug

SEQ ID NO: 1736174 - RNA, 19 nt, Artificial Sequence
  Description of Artificial Sequence: Synthetic oligonucleotide
caucuaaugcuuccaggug

SEQ ID NO: 1736175 - RNA, 19 nt, Artificial Sequence
  Description of Artificial Sequence: Synthetic oligonucleotide
ucacccugauuauuucacc

SEQ ID NO: 1736176 - RNA, 19 nt, Artificial Sequence
  Description of Artificial Sequence: Synthetic oligonucleotide
ucuaugcacaaaugacuuc

SEQ ID NO: 1736177 - RNA, 19 nt, Artificial Sequence
  Description of Artificial Sequence: Synthetic oligonucleotide
caguauguguucagcuugc

SEQ ID NO: 1736178 - RNA, 19 nt, Artificial Sequence
  Description of Artificial Sequence: Synthetic oligonucleotide
caacauaacggagcuuucc

SEQ ID NO: 1736179 - RNA, 19 nt, Artificial Sequence
  Description of Artificial Sequence: Synthetic oligonucleotide
ucccaugucugagggauag

SEQ ID NO: 1736180 - RNA, 19 nt, Artificial Sequence
  Description of Artificial Sequence: Synthetic oligonucleotide
aauaaucaugagugcuguu

SEQ ID NO: 1736181 - RNA, 19 nt, Artificial Sequence
  Description of Artificial Sequence: Synthetic oligonucleotide
auguauccuuuauaaggga

SEQ ID NO: 1736182 - RNA, 19 nt, Artificial Sequence
  Description of Artificial Sequence: Synthetic oligonucleotide
uugucgccacaacagccag

SEQ ID NO: 1736183 - RNA, 19 nt, Artificial Sequence
  Description of Artificial Sequence: Synthetic oligonucleotide
agcaccguaguuccagaug

SEQ ID NO: 1736184 - RNA, 19 nt, Artificial Sequence
  Description of Artificial Sequence: Synthetic oligonucleotide
gggauagcaccguaguucc

SEQ ID NO: 1736185 - RNA, 19 nt, Artificial Sequence
  Description of Artificial Sequence: Synthetic oligonucleotide
acaaccacgcagccccgac

SEQ ID NO: 1736186 - RNA, 19 nt, Artificial Sequence
  Description of Artificial Sequence: Synthetic oligonucleotide
accagcguggaaccucaac

SEQ ID NO: 1736187 - RNA, 19 nt, Artificial Sequence
  Description of Artificial Sequence: Synthetic oligonucleotide
uagccaauaugcccagaac

SEQ ID NO: 1736188 - RNA, 19 nt, Artificial Sequence
  Description of Artificial Sequence: Synthetic oligonucleotide
caugucugagggauagcac

SEQ ID NO: 1736189 - RNA, 19 nt, Artificial Sequence
  Description of Artificial Sequence: Synthetic oligonucleotide
ggauuuaaaggguccuuug

SEQ ID NO: 1736190 - RNA, 19 nt, Artificial Sequence
  Description of Artificial Sequence: Synthetic oligonucleotide
uucaccucuugcacacacc

SEQ ID NO: 1736191 - RNA, 19 nt, Artificial Sequence
  Description of Artificial Sequence: Synthetic oligonucleotide
ugaccagcguggaaccuca

SEQ ID NO: 1736192 - RNA, 19 nt, Artificial Sequence
  Description of Artificial Sequence: Synthetic oligonucleotide
uuauccacaucugucggua

SEQ ID NO: 1736193 - RNA, 19 nt, Artificial Sequence
  Description of Artificial Sequence: Synthetic oligonucleotide
agucgguuucgccuucauc

SEQ ID NO: 1736194 - RNA, 19 nt, Artificial Sequence
  Description of Artificial Sequence: Synthetic oligonucleotide
uggauuccugggcaucuca

SEQ ID NO: 1736195 - RNA, 19 nt, Artificial Sequence
  Description of Artificial Sequence: Synthetic oligonucleotide
cuaaguagccagguuucag

SEQ ID NO: 1736196 - RNA, 19 nt, Artificial Sequence
  Description of Artificial Sequence: Synthetic oligonucleotide
gcgaugacuuuccagucgg

SEQ ID NO: 1736197 - RNA, 19 nt, Artificial Sequence
  Description of Artificial Sequence: Synthetic oligonucleotide
caggcagauucacagggug

SEQ ID NO: 1736198 - RNA, 19 nt, Artificial Sequence
  Description of Artificial Sequence: Synthetic oligonucleotide
guacucgaggguaaagggc

SEQ ID NO: 1736199 - RNA, 19 nt, Artificial Sequence
  Description of Artificial Sequence: Synthetic oligonucleotide
aaagggcgcggcgcgcucc

SEQ ID NO: 1736200 - RNA, 19 nt, Artificial Sequence
  Description of Artificial Sequence: Synthetic oligonucleotide
uugagaugucaagugucug

SEQ ID NO: 1736201 - RNA, 19 nt, Artificial Sequence
  Description of Artificial Sequence: Synthetic oligonucleotide
ucuaaguagccagguuuca

SEQ ID NO: 1736202 - RNA, 19 nt, Artificial Sequence
  Description of Artificial Sequence: Synthetic oligonucleotide
gaaaguccgcgccugcgca

SEQ ID NO: 1736203 - RNA, 19 nt, Artificial Sequence
  Description of Artificial Sequence: Synthetic oligonucleotide
aucaugagugcuguuaaua

SEQ ID NO: 1736204 - RNA, 19 nt, Artificial Sequence
  Description of Artificial Sequence: Synthetic oligonucleotide
agucacuaaugcuuuccaa

SEQ ID NO: 1736205 - RNA, 19 nt, Artificial Sequence
  Description of Artificial Sequence: Synthetic oligonucleotide
guaaagcugugaaaaguga

SEQ ID NO: 1736206 - RNA, 19 nt, Artificial Sequence
  Description of Artificial Sequence: Synthetic oligonucleotide
ggagcaaccggacgagagg

SEQ ID NO: 1736207 - RNA, 19 nt, Artificial Sequence
  Description of Artificial Sequence: Synthetic oligonucleotide
gggauaucaugaaauggag

SEQ ID NO: 1736208 - RNA, 19 nt, Artificial Sequence
  Description of Artificial Sequence: Synthetic oligonucleotide
uccgacacugugguguuca

SEQ ID NO: 1736209 - RNA, 19 nt, Artificial Sequence
  Description of Artificial Sequence: Synthetic oligonucleotide
ggcgaugacuuuccagucg

SEQ ID NO: 1736210 - RNA, 19 nt, Artificial Sequence
  Description of Artificial Sequence: Synthetic oligonucleotide
augugguaaaagcugucuu

SEQ ID NO: 1736211 - RNA, 19 nt, Artificial Sequence
  Description of Artificial Sequence: Synthetic oligonucleotide
caguguguuugucacugug

SEQ ID NO: 1736212 - RNA, 19 nt, Artificial Sequence
  Description of Artificial Sequence: Synthetic oligonucleotide
auaauuggcugcgucugga

SEQ ID NO: 1736213 - RNA, 19 nt, Artificial Sequence
  Description of Artificial Sequence: Synthetic oligonucleotide
acucaucgugucccagacg

SEQ ID NO: 1736214 - RNA, 19 nt, Artificial Sequence
  Description of Artificial Sequence: Synthetic oligonucleotide
cuuagucacuaaugcuuuc

SEQ ID NO: 1736215 - RNA, 19 nt, Artificial Sequence
  Description of Artificial Sequence: Synthetic oligonucleotide
gacuuccgugucacaaugg

SEQ ID NO: 1736216 - RNA, 19 nt, Artificial Sequence
  Description of Artificial Sequence: Synthetic oligonucleotide
ccagauguauccuuuauaa

SEQ ID NO: 1736217 - RNA, 19 nt, Artificial Sequence
  Description of Artificial Sequence: Synthetic oligonucleotide
auugucgccacaacagcca

SEQ ID NO: 1736218 - RNA, 19 nt, Artificial Sequence
  Description of Artificial Sequence: Synthetic oligonucleotide
gucccagacgcacagccac

SEQ ID NO: 1736219 - RNA, 19 nt, Artificial Sequence
  Description of Artificial Sequence: Synthetic oligonucleotide
caucaggaaccuuauaccu

SEQ ID NO: 1736220 - RNA, 19 nt, Artificial Sequence
  Description of Artificial Sequence: Synthetic oligonucleotide
uugaaggggcucuccgaca

SEQ ID NO: 1736221 - RNA, 19 nt, Artificial Sequence
  Description of Artificial Sequence: Synthetic oligonucleotide
augcacaaaugacuuccgu

SEQ ID NO: 1736222 - RNA, 19 nt, Artificial Sequence
  Description of Artificial Sequence: Synthetic oligonucleotide
agccccgacacggagcaac

SEQ ID NO: 1736223 - RNA, 19 nt, Artificial Sequence
  Description of Artificial Sequence: Synthetic oligonucleotide
cacucaucgugucccagac

SEQ ID NO: 1736224 - RNA, 19 nt, Artificial Sequence
  Description of Artificial Sequence: Synthetic oligonucleotide
accaccauguggaauacau

SEQ ID NO: 1736225 - RNA, 19 nt, Artificial Sequence
  Description of Artificial Sequence: Synthetic oligonucleotide
auaacggagcuuuccuuuu

SEQ ID NO: 1736226 - RNA, 19 nt, Artificial Sequence
  Description of Artificial Sequence: Synthetic oligonucleotide
ugucaagugucuggauggc

SEQ ID NO: 1736227 - RNA, 19 nt, Artificial Sequence
  Description of Artificial Sequence: Synthetic oligonucleotide
caucugucgguagugagca

SEQ ID NO: 1736228 - RNA, 19 nt, Artificial Sequence
  Description of Artificial Sequence: Synthetic oligonucleotide
ucgaggguaaagggcgcgg

SEQ ID NO: 1736229 - RNA, 19 nt, Artificial Sequence
  Description of Artificial Sequence: Synthetic oligonucleotide
cuucuaaguagccagguuu

SEQ ID NO: 1736230 - RNA, 19 nt, Artificial Sequence
  Description of Artificial Sequence: Synthetic oligonucleotide
caguagcuucuaaguagcc

SEQ ID NO: 1736231 - RNA, 19 nt, Artificial Sequence
  Description of Artificial Sequence: Synthetic oligonucleotide
ucgguuucgccuucaucaa

SEQ ID NO: 1736232 - RNA, 19 nt, Artificial Sequence
  Description of Artificial Sequence: Synthetic oligonucleotide
gagcaaccggacgagagga

SEQ ID NO: 1736233 - RNA, 19 nt, Artificial Sequence
  Description of Artificial Sequence: Synthetic oligonucleotide
uaauuggcugcgucuggau

SEQ ID NO: 1736234 - RNA, 19 nt, Artificial Sequence
  Description of Artificial Sequence: Synthetic oligonucleotide
ugaagccacucaucguguc

SEQ ID NO: 1736235 - RNA, 19 nt, Artificial Sequence
  Description of Artificial Sequence: Synthetic oligonucleotide
auagcaccguaguuccaga

SEQ ID NO: 1736236 - RNA, 19 nt, Artificial Sequence
  Description of Artificial Sequence: Synthetic oligonucleotide
acuuuccagucgguuucgc

SEQ ID NO: 1736237 - RNA, 19 nt, Artificial Sequence
  Description of Artificial Sequence: Synthetic oligonucleotide
cacaauggcuuugagagcu

SEQ ID NO: 1736238 - RNA, 19 nt, Artificial Sequence
  Description of Artificial Sequence: Synthetic oligonucleotide
aacuuucacccugauuauu

SEQ ID NO: 1736239 - RNA, 19 nt, Artificial Sequence
  Description of Artificial Sequence: Synthetic oligonucleotide
gcugugaaaagugacuaca

SEQ ID NO: 1736240 - RNA, 19 nt, Artificial Sequence
  Description of Artificial Sequence: Synthetic oligonucleotide
guggcggcaaagcauccac

SEQ ID NO: 1736241 - RNA, 19 nt, Artificial Sequence
  Description of Artificial Sequence: Synthetic oligonucleotide
uugaccagcguggaaccuc

SEQ ID NO: 1736242 - RNA, 19 nt, Artificial Sequence
  Description of Artificial Sequence: Synthetic oligonucleotide
auaagggaacagauuugca

SEQ ID NO: 1736243 - RNA, 19 nt, Artificial Sequence
  Description of Artificial Sequence: Synthetic oligonucleotide
acucgaggguaaagggcgc

SEQ ID NO: 1736244 - RNA, 19 nt, Artificial Sequence
  Description of Artificial Sequence: Synthetic oligonucleotide
guagccagguuucagccgu

SEQ ID NO: 1736245 - RNA, 19 nt, Artificial Sequence
  Description of Artificial Sequence: Synthetic oligonucleotide
acgagaggagaaaguccgc

SEQ ID NO: 1736246 - RNA, 19 nt, Artificial Sequence
  Description of Artificial Sequence: Synthetic oligonucleotide
accggacgagaggagaaag

SEQ ID NO: 1736247 - RNA, 19 nt, Artificial Sequence
  Description of Artificial Sequence: Synthetic oligonucleotide
cacuaaugcuuuccaauaa

SEQ ID NO: 1736248 - RNA, 19 nt, Artificial Sequence
  Description of Artificial Sequence: Synthetic oligonucleotide
agcuucuaaguagccaggu

SEQ ID NO: 1736249 - RNA, 19 nt, Artificial Sequence
  Description of Artificial Sequence: Synthetic oligonucleotide
cagugguaaguuauagaaa

SEQ ID NO: 1736250 - RNA, 19 nt, Artificial Sequence
  Description of Artificial Sequence: Synthetic oligonucleotide
uggcgaugacuuuccaguc

SEQ ID NO: 1736251 - RNA, 19 nt, Artificial Sequence
  Description of Artificial Sequence: Synthetic oligonucleotide
cauauuggacuggccgagc

SEQ ID NO: 1736252 - RNA, 19 nt, Artificial Sequence
  Description of Artificial Sequence: Synthetic oligonucleotide
gcaucuaaugcuuccaggu

SEQ ID NO: 1736253 - RNA, 19 nt, Artificial Sequence
  Description of Artificial Sequence: Synthetic oligonucleotide
uggcggcaaagcauccaca

SEQ ID NO: 1736254 - RNA, 19 nt, Artificial Sequence
  Description of Artificial Sequence: Synthetic oligonucleotide
ggguaaagggcgcggcgcg

SEQ ID NO: 1736255 - RNA, 19 nt, Artificial Sequence
  Description of Artificial Sequence: Synthetic oligonucleotide
uuccagucgguuucgccuu

SEQ ID NO: 1736256 - RNA, 19 nt, Artificial Sequence
  Description of Artificial Sequence: Synthetic oligonucleotide
uggaaccauuuauccacau

SEQ ID NO: 1736257 - RNA, 19 nt, Artificial Sequence
  Description of Artificial Sequence: Synthetic oligonucleotide
agaugucaagugucuggau

SEQ ID NO: 1736258 - RNA, 19 nt, Artificial Sequence
  Description of Artificial Sequence: Synthetic oligonucleotide
cucgaggguaaagggcgcg

SEQ ID NO: 1736259 - RNA, 19 nt, Artificial Sequence
  Description of Artificial Sequence: Synthetic oligonucleotide
ggauaucaugaaauggaga

SEQ ID NO: 1736260 - RNA, 19 nt, Artificial Sequence
  Description of Artificial Sequence: Synthetic oligonucleotide
uuugaccagcguggaaccu

SEQ ID NO: 1736261 - RNA, 19 nt, Artificial Sequence
  Description of Artificial Sequence: Synthetic oligonucleotide
guugagaugucaagugucu

SEQ ID NO: 1736262 - RNA, 19 nt, Artificial Sequence
  Description of Artificial Sequence: Synthetic oligonucleotide
ggaaccucaaccaccaugu

SEQ ID NO: 1736263 - RNA, 19 nt, Artificial Sequence
  Description of Artificial Sequence: Synthetic oligonucleotide
agucaacaguagcuucuaa

SEQ ID NO: 1736264 - RNA, 19 nt, Artificial Sequence
  Description of Artificial Sequence: Synthetic oligonucleotide
cagccguuccacaucagaa

SEQ ID NO: 1736265 - RNA, 19 nt, Artificial Sequence
  Description of Artificial Sequence: Synthetic oligonucleotide
auccacguuaauggcgaug

SEQ ID NO: 1736266 - RNA, 19 nt, Artificial Sequence
  Description of Artificial Sequence: Synthetic oligonucleotide
cauaacggagcuuuccuuu

SEQ ID NO: 1736267 - RNA, 19 nt, Artificial Sequence
  Description of Artificial Sequence: Synthetic oligonucleotide
uucacaggguggcggcaaa

SEQ ID NO: 1736268 - RNA, 19 nt, Artificial Sequence
  Description of Artificial Sequence: Synthetic oligonucleotide
uagcaccguaguuccagau

SEQ ID NO: 1736269 - RNA, 19 nt, Artificial Sequence
  Description of Artificial Sequence: Synthetic oligonucleotide
gaacuuucacccugauuau

SEQ ID NO: 1736270 - RNA, 19 nt, Artificial Sequence
  Description of Artificial Sequence: Synthetic oligonucleotide
aguauguguucagcuugca

SEQ ID NO: 1736271 - RNA, 19 nt, Artificial Sequence
  Description of Artificial Sequence: Synthetic oligonucleotide
gguaaguuauagaaaugua

SEQ ID NO: 1736272 - RNA, 19 nt, Artificial Sequence
  Description of Artificial Sequence: Synthetic oligonucleotide
ggaucacauuugaaggggc

SEQ ID NO: 1736273 - RNA, 19 nt, Artificial Sequence
  Description of Artificial Sequence: Synthetic oligonucleotide
uccgugucacaauggcuuu

SEQ ID NO: 1736274 - RNA, 19 nt, Artificial Sequence
  Description of Artificial Sequence: Synthetic oligonucleotide
agacgcgguacucgagggu

SEQ ID NO: 1736275 - RNA, 19 nt, Artificial Sequence
  Description of Artificial Sequence: Synthetic oligonucleotide
gaggagaaaguccgcgccu

SEQ ID NO: 1736276 - RNA, 19 nt, Artificial Sequence
  Description of Artificial Sequence: Synthetic oligonucleotide
aggaaccuuauaccuucua

SEQ ID NO: 1736277 - RNA, 19 nt, Artificial Sequence
  Description of Artificial Sequence: Synthetic oligonucleotide
aaccggacgagaggagaaa

SEQ ID NO: 1736278 - RNA, 19 nt, Artificial Sequence
  Description of Artificial Sequence: Synthetic oligonucleotide
caugagugcuguuaauaau

SEQ ID NO: 1736279 - RNA, 19 nt, Artificial Sequence
  Description of Artificial Sequence: Synthetic oligonucleotide
agacgcacagccaccgcug

SEQ ID NO: 1736280 - RNA, 19 nt, Artificial Sequence
  Description of Artificial Sequence: Synthetic oligonucleotide
auggaaccauuuauccaca

SEQ ID NO: 1736281 - RNA, 19 nt, Artificial Sequence
  Description of Artificial Sequence: Synthetic oligonucleotide
gacgcgguacucgagggua

SEQ ID NO: 1736282 - RNA, 19 nt, Artificial Sequence
  Description of Artificial Sequence: Synthetic oligonucleotide
ggcugcgucuggaucaucc

SEQ ID NO: 1736283 - RNA, 19 nt, Artificial Sequence
  Description of Artificial Sequence: Synthetic oligonucleotide
ucuccgacacugugguguu

SEQ ID NO: 1736284 - RNA, 19 nt, Artificial Sequence
  Description of Artificial Sequence: Synthetic oligonucleotide
gcaccguaguuccagaugu

SEQ ID NO: 1736285 - RNA, 19 nt, Artificial Sequence
  Description of Artificial Sequence: Synthetic oligonucleotide
ggauuccugggcaucucag

SEQ ID NO: 1736286 - RNA, 19 nt, Artificial Sequence
  Description of Artificial Sequence: Synthetic oligonucleotide
aucugucgguagugagcag

SEQ ID NO: 1736287 - RNA, 19 nt, Artificial Sequence
  Description of Artificial Sequence: Synthetic oligonucleotide
cacggagcaaccggacgag

SEQ ID NO: 1736288 - RNA, 19 nt, Artificial Sequence
  Description of Artificial Sequence: Synthetic oligonucleotide
cuaauacaguaaacauaua

SEQ ID NO: 1736289 - RNA, 19 nt, Artificial Sequence
  Description of Artificial Sequence: Synthetic oligonucleotide
cuacuucagugguaaguua

SEQ ID NO: 1736290 - RNA, 19 nt, Artificial Sequence
  Description of Artificial Sequence: Synthetic oligonucleotide
caaccggacgagaggagaa

SEQ ID NO: 1736291 - RNA, 19 nt, Artificial Sequence
  Description of Artificial Sequence: Synthetic oligonucleotide
ugucgguagugagcaggca

SEQ ID NO: 1736292 - RNA, 19 nt, Artificial Sequence
  Description of Artificial Sequence: Synthetic oligonucleotide
gauucacaggguggcggca

SEQ ID NO: 1736293 - RNA, 19 nt, Artificial Sequence
  Description of Artificial Sequence: Synthetic oligonucleotide
cuugcacaucuaugcacaa

SEQ ID NO: 1736294 - RNA, 19 nt, Artificial Sequence
  Description of Artificial Sequence: Synthetic oligonucleotide
ggcggcaaagcauccacaa

SEQ ID NO: 1736295 - RNA, 19 nt, Artificial Sequence
  Description of Artificial Sequence: Synthetic oligonucleotide
uaaagggcgcggcgcgcuc

SEQ ID NO: 1736296 - RNA, 19 nt, Artificial Sequence
  Description of Artificial Sequence: Synthetic oligonucleotide
ggagaaaguccgcgccugc

SEQ ID NO: 1736297 - RNA, 19 nt, Artificial Sequence
  Description of Artificial Sequence: Synthetic oligonucleotide
gucuugguugagaugucaa

SEQ ID NO: 1736298 - RNA, 19 nt, Artificial Sequence
  Description of Artificial Sequence: Synthetic oligonucleotide
aggguccuuuguagcaauc

SEQ ID NO: 1736299 - RNA, 19 nt, Artificial Sequence
  Description of Artificial Sequence: Synthetic oligonucleotide
uccagucgguuucgccuuc

SEQ ID NO: 1736300 - RNA, 19 nt, Artificial Sequence
  Description of Artificial Sequence: Synthetic oligonucleotide
ccuuuauaagggaacagau

SEQ ID NO: 1736301 - RNA, 19 nt, Artificial Sequence
  Description of Artificial Sequence: Synthetic oligonucleotide
uucccaugucugagggaua

SEQ ID NO: 1736302 - RNA, 19 nt, Artificial Sequence
  Description of Artificial Sequence: Synthetic oligonucleotide
agcaaccggacgagaggag

SEQ ID NO: 1736303 - RNA, 19 nt, Artificial Sequence
  Description of Artificial Sequence: Synthetic oligonucleotide
ccacgcagccccgacacgg

SEQ ID NO: 1736304 - RNA, 19 nt, Artificial Sequence
  Description of Artificial Sequence: Synthetic oligonucleotide
cgguacucgaggguaaagg

SEQ ID NO: 1736305 - RNA, 19 nt, Artificial Sequence
  Description of Artificial Sequence: Synthetic oligonucleotide
ggggcucuccgacacugug

SEQ ID NO: 1736306 - RNA, 19 nt, Artificial Sequence
  Description of Artificial Sequence: Synthetic oligonucleotide
cuaaccuucugaacauauu

SEQ ID NO: 1736307 - RNA, 19 nt, Artificial Sequence
  Description of Artificial Sequence: Synthetic oligonucleotide
cugcauaaauugggauauc

SEQ ID NO: 1736308 - RNA, 19 nt, Artificial Sequence
  Description of Artificial Sequence: Synthetic oligonucleotide
cugaagccacucaucgugu

SEQ ID NO: 1736309 - RNA, 19 nt, Artificial Sequence
  Description of Artificial Sequence: Synthetic oligonucleotide
uuuucacgucuugcuuaau

SEQ ID NO: 1736310 - RNA, 19 nt, Artificial Sequence
  Description of Artificial Sequence: Synthetic oligonucleotide
cuuggauuccugggcaucu

SEQ ID NO: 1736311 - RNA, 19 nt, Artificial Sequence
  Description of Artificial Sequence: Synthetic oligonucleotide
ggaagacgcgguacucgag

SEQ ID NO: 1736312 - RNA, 19 nt, Artificial Sequence
  Description of Artificial Sequence: Synthetic oligonucleotide
ucgccacaacagccagugu

SEQ ID NO: 1736313 - RNA, 19 nt, Artificial Sequence
  Description of Artificial Sequence: Synthetic oligonucleotide
acacaaccacgcagccccg

SEQ ID NO: 1736314 - RNA, 19 nt, Artificial Sequence
  Description of Artificial Sequence: Synthetic oligonucleotide
caaccacgcagccccgaca

SEQ ID NO: 1736315 - RNA, 19 nt, Artificial Sequence
  Description of Artificial Sequence: Synthetic oligonucleotide
gcaaccggacgagaggaga

SEQ ID NO: 1736316 - RNA, 19 nt, Artificial Sequence
  Description of Artificial Sequence: Synthetic oligonucleotide
gguaaagggcgcggcgcgc

SEQ ID NO: 1736317 - RNA, 19 nt, Artificial Sequence
  Description of Artificial Sequence: Synthetic oligonucleotide
ggcauuugaccagcgugga

SEQ ID NO: 1736318 - RNA, 19 nt, Artificial Sequence
  Description of Artificial Sequence: Synthetic oligonucleotide
cggacgagaggagaaaguc

SEQ ID NO: 1736319 - RNA, 19 nt, Artificial Sequence
  Description of Artificial Sequence: Synthetic oligonucleotide
caggguggcggcaaagcau

SEQ ID NO: 1736320 - RNA, 19 nt, Artificial Sequence
  Description of Artificial Sequence: Synthetic oligonucleotide
gcaaacucauuuucugguu

SEQ ID NO: 1736321 - RNA, 19 nt, Artificial Sequence
  Description of Artificial Sequence: Synthetic oligonucleotide
gcaacauaacggagcuuuc

SEQ ID NO: 1736322 - RNA, 19 nt, Artificial Sequence
  Description of Artificial Sequence: Synthetic oligonucleotide
acggagcaaccggacgaga

SEQ ID NO: 1736323 - RNA, 19 nt, Artificial Sequence
  Description of Artificial Sequence: Synthetic oligonucleotide
cagucaacaguagcuucua

SEQ ID NO: 1736324 - RNA, 19 nt, Artificial Sequence
  Description of Artificial Sequence: Synthetic oligonucleotide
gccaauaugcccagaacuu

SEQ ID NO: 1736325 - RNA, 19 nt, Artificial Sequence
  Description of Artificial Sequence: Synthetic oligonucleotide
guaaagggcgcggcgcgcu

SEQ ID NO: 1736326 - RNA, 19 nt, Artificial Sequence
  Description of Artificial Sequence: Synthetic oligonucleotide
gaaggggcucuccgacacu

SEQ ID NO: 1736327 - RNA, 19 nt, Artificial Sequence
  Description of Artificial Sequence: Synthetic oligonucleotide
cacgcagccccgacacgga

SEQ ID NO: 1736328 - RNA, 19 nt, Artificial Sequence
  Description of Artificial Sequence: Synthetic oligonucleotide
ccacucaucgugucccaga

SEQ ID NO: 1736329 - RNA, 19 nt, Artificial Sequence
  Description of Artificial Sequence: Synthetic oligonucleotide
gcauuugaccagcguggaa

SEQ ID NO: 1736330 - RNA, 19 nt, Artificial Sequence
  Description of Artificial Sequence: Synthetic oligonucleotide
ggguccuuuguagcaaucu

SEQ ID NO: 1736331 - RNA, 19 nt, Artificial Sequence
  Description of Artificial Sequence: Synthetic oligonucleotide
gguggcggcaaagcaucca

SEQ ID NO: 1736332 - RNA, 19 nt, Artificial Sequence
  Description of Artificial Sequence: Synthetic oligonucleotide
caccguaguuccagaugua

SEQ ID NO: 1736333 - RNA, 19 nt, Artificial Sequence
  Description of Artificial Sequence: Synthetic oligonucleotide
gccacucaucgugucccag

SEQ ID NO: 1736334 - RNA, 19 nt, Artificial Sequence
  Description of Artificial Sequence: Synthetic oligonucleotide
cucaaccaccauguggaau

SEQ ID NO: 1736335 - RNA, 19 nt, Artificial Sequence
  Description of Artificial Sequence: Synthetic oligonucleotide
cgaggguaaagggcgcggc

SEQ ID NO: 1736336 - RNA, 19 nt, Artificial Sequence
  Description of Artificial Sequence: Synthetic oligonucleotide
ccacguuaauggcgaugac

SEQ ID NO: 1736337 - RNA, 19 nt, Artificial Sequence
  Description of Artificial Sequence: Synthetic oligonucleotide
cacaaccacgcagccccga

SEQ ID NO: 1736338 - RNA, 19 nt, Artificial Sequence
  Description of Artificial Sequence: Synthetic oligonucleotide
acgcgguacucgaggguaa

SEQ ID NO: 1736339 - RNA, 19 nt, Artificial Sequence
  Description of Artificial Sequence: Synthetic oligonucleotide
aggggcucuccgacacugu

SEQ ID NO: 1736340 - RNA, 19 nt, Artificial Sequence
  Description of Artificial Sequence: Synthetic oligonucleotide
cuccgacacugugguguuc

SEQ ID NO: 1736341 - RNA, 19 nt, Artificial Sequence
  Description of Artificial Sequence: Synthetic oligonucleotide
ccgugucacaauggcuuug

SEQ ID NO: 1736342 - RNA, 19 nt, Artificial Sequence
  Description of Artificial Sequence: Synthetic oligonucleotide
gccccgacacggagcaacc

SEQ ID NO: 1736343 - RNA, 19 nt, Artificial Sequence
  Description of Artificial Sequence: Synthetic oligonucleotide
ggauagcaccguaguucca

SEQ ID NO: 1736344 - RNA, 19 nt, Artificial Sequence
  Description of Artificial Sequence: Synthetic oligonucleotide
cccaugucugagggauagc

SEQ ID NO: 1736345 - RNA, 19 nt, Artificial Sequence
  Description of Artificial Sequence: Synthetic oligonucleotide
ggcuaaccuucugaacaua

SEQ ID NO: 1736346 - RNA, 19 nt, Artificial Sequence
  Description of Artificial Sequence: Synthetic oligonucleotide
ccacaucugucgguaguga

SEQ ID NO: 1736347 - RNA, 19 nt, Artificial Sequence
  Description of Artificial Sequence: Synthetic oligonucleotide
gcgcuccucgcugcugaag

SEQ ID NO: 1736348 - RNA, 19 nt, Artificial Sequence
  Description of Artificial Sequence: Synthetic oligonucleotide
ccugauuauuucaccucuu

SEQ ID NO: 1736349 - RNA, 19 nt, Artificial Sequence
  Description of Artificial Sequence: Synthetic oligonucleotide
gcggcaaagcauccacaau

SEQ ID NO: 1736350 - RNA, 19 nt, Artificial Sequence
  Description of Artificial Sequence: Synthetic oligonucleotide
uggcugcgucuggaucauc

SEQ ID NO: 1736351 - RNA, 19 nt, Artificial Sequence
  Description of Artificial Sequence: Synthetic oligonucleotide
ccggacgagaggagaaagu

SEQ ID NO: 1736352 - RNA, 19 nt, Artificial Sequence
  Description of Artificial Sequence: Synthetic oligonucleotide
gaccagcguggaaccucaa

SEQ ID NO: 1736353 - RNA, 19 nt, Artificial Sequence
  Description of Artificial Sequence: Synthetic oligonucleotide
agggcgcggcgcgcuccuc

SEQ ID NO: 1736354 - RNA, 19 nt, Artificial Sequence
  Description of Artificial Sequence: Synthetic oligonucleotide
gguagugagcaggcagauu

SEQ ID NO: 1736355 - RNA, 19 nt, Artificial Sequence
  Description of Artificial Sequence: Synthetic oligonucleotide
cagucgguuucgccuucau

SEQ ID NO: 1736356 - RNA, 19 nt, Artificial Sequence
  Description of Artificial Sequence: Synthetic oligonucleotide
gguguucaugcagcugauu

SEQ ID NO: 1736357 - RNA, 19 nt, Artificial Sequence
  Description of Artificial Sequence: Synthetic oligonucleotide
ccagucgguuucgccuuca

SEQ ID NO: 1736358 - RNA, 19 nt, Artificial Sequence
  Description of Artificial Sequence: Synthetic oligonucleotide
cgucuggaucauccacguu

SEQ ID NO: 1736359 - RNA, 19 nt, Artificial Sequence
  Description of Artificial Sequence: Synthetic oligonucleotide
uauuuaauaguuaugagcc

SEQ ID NO: 1736360 - RNA, 19 nt, Artificial Sequence
  Description of Artificial Sequence: Synthetic oligonucleotide
uauauaaagacauuuuggg

SEQ ID NO: 1736361 - RNA, 19 nt, Artificial Sequence
  Description of Artificial Sequence: Synthetic oligonucleotide
ugcauuauaacaauaaggc

SEQ ID NO: 1736362 - RNA, 19 nt, Artificial Sequence
  Description of Artificial Sequence: Synthetic oligonucleotide
aaaaugguuauagucaugc

SEQ ID NO: 1736363 - RNA, 19 nt, Artificial Sequence
  Description of Artificial Sequence: Synthetic oligonucleotide
uuuauuuagaccuuaggag

SEQ ID NO: 1736364 - RNA, 19 nt, Artificial Sequence
  Description of Artificial Sequence: Synthetic oligonucleotide
uaucaaaugaauuauauaa

SEQ ID NO: 1736365 - RNA, 19 nt, Artificial Sequence
  Description of Artificial Sequence: Synthetic oligonucleotide
aauuauaauacaaaggucu

SEQ ID NO: 1736366 - RNA, 19 nt, Artificial Sequence
  Description of Artificial Sequence: Synthetic oligonucleotide
uuauuuagaccuuaggagg

SEQ ID NO: 1736367 - RNA, 19 nt, Artificial Sequence
  Description of Artificial Sequence: Synthetic oligonucleotide
ugaaaaggugguaagaggg

SEQ ID NO: 1736368 - RNA, 19 nt, Artificial Sequence
  Description of Artificial Sequence: Synthetic oligonucleotide
uuuacuuaugucuaaauac

SEQ ID NO: 1736369 - RNA, 19 nt, Artificial Sequence
  Description of Artificial Sequence: Synthetic oligonucleotide
aauacacaggacuaaauga

SEQ ID NO: 1736370 - RNA, 19 nt, Artificial Sequence
  Description of Artificial Sequence: Synthetic oligonucleotide
uuugugaucuccuauaaca

SEQ ID NO: 1736371 - RNA, 19 nt, Artificial Sequence
  Description of Artificial Sequence: Synthetic oligonucleotide
aauacaaaggucugugcuc

SEQ ID NO: 1736372 - RNA, 19 nt, Artificial Sequence
  Description of Artificial Sequence: Synthetic oligonucleotide
uuuauuucucauuuuauac

SEQ ID NO: 1736373 - RNA, 19 nt, Artificial Sequence
  Description of Artificial Sequence: Synthetic oligonucleotide
guauuuaauaguuaugagc

SEQ ID NO: 1736374 - RNA, 19 nt, Artificial Sequence
  Description of Artificial Sequence: Synthetic oligonucleotide
guugcuagauccaagaucg

SEQ ID NO: 1736375 - RNA, 19 nt, Artificial Sequence
  Description of Artificial Sequence: Synthetic oligonucleotide
uaauaugaaaggaagcuga

SEQ ID NO: 1736376 - RNA, 19 nt, Artificial Sequence
  Description of Artificial Sequence: Synthetic oligonucleotide
uauaacaagacgaccagug

SEQ ID NO: 1736377 - RNA, 19 nt, Artificial Sequence
  Description of Artificial Sequence: Synthetic oligonucleotide
uuuaucaaaacuuuacuau

SEQ ID NO: 1736378 - RNA, 19 nt, Artificial Sequence
  Description of Artificial Sequence: Synthetic oligonucleotide
aaguauuuaauaguuauga

SEQ ID NO: 1736379 - RNA, 19 nt, Artificial Sequence
  Description of Artificial Sequence: Synthetic oligonucleotide
uucacaaccuucuaaauga

SEQ ID NO: 1736380 - RNA, 19 nt, Artificial Sequence
  Description of Artificial Sequence: Synthetic oligonucleotide
aacaauaaggcuuacuuuu

SEQ ID NO: 1736381 - RNA, 19 nt, Artificial Sequence
  Description of Artificial Sequence: Synthetic oligonucleotide
aauaguuaugagccgcugg

SEQ ID NO: 1736382 - RNA, 19 nt, Artificial Sequence
  Description of Artificial Sequence: Synthetic oligonucleotide
ugaaagagcuaccacaagc

SEQ ID NO: 1736383 - RNA, 19 nt, Artificial Sequence
  Description of Artificial Sequence: Synthetic oligonucleotide
ugucuaaauacacaggacu

SEQ ID NO: 1736384 - RNA, 19 nt, Artificial Sequence
  Description of Artificial Sequence: Synthetic oligonucleotide
uauaaagacauuuuggguu

SEQ ID NO: 1736385 - RNA, 19 nt, Artificial Sequence
  Description of Artificial Sequence: Synthetic oligonucleotide
augaacuuuggucacauag

SEQ ID NO: 1736386 - RNA, 19 nt, Artificial Sequence
  Description of Artificial Sequence: Synthetic oligonucleotide
uuacuuaugucuaaauaca

SEQ ID NO: 1736387 - RNA, 19 nt, Artificial Sequence
  Description of Artificial Sequence: Synthetic oligonucleotide
aaauuauaauacaaagguc

SEQ ID NO: 1736388 - RNA, 19 nt, Artificial Sequence
  Description of Artificial Sequence: Synthetic oligonucleotide
cuaaaugaugaugugacgg

SEQ ID NO: 1736389 - RNA, 19 nt, Artificial Sequence
  Description of Artificial Sequence: Synthetic oligonucleotide
auaaagacauuuuggguuc

SEQ ID NO: 1736390 - RNA, 19 nt, Artificial Sequence
  Description of Artificial Sequence: Synthetic oligonucleotide
ugugcauuauaacaauaag

SEQ ID NO: 1736391 - RNA, 19 nt, Artificial Sequence
  Description of Artificial Sequence: Synthetic oligonucleotide
gacgaugcuaauaugaaag

SEQ ID NO: 1736392 - RNA, 19 nt, Artificial Sequence
  Description of Artificial Sequence: Synthetic oligonucleotide
gauaguuuacuguccaugc

SEQ ID NO: 1736393 - RNA, 19 nt, Artificial Sequence
  Description of Artificial Sequence: Synthetic oligonucleotide
uaauacaaaggucugugcu

SEQ ID NO: 1736394 - RNA, 19 nt, Artificial Sequence
  Description of Artificial Sequence: Synthetic oligonucleotide
uuuaauaguuaugagccgc

SEQ ID NO: 1736395 - RNA, 19 nt, Artificial Sequence
  Description of Artificial Sequence: Synthetic oligonucleotide
uaucaaaacuuuacuauac

SEQ ID NO: 1736396 - RNA, 19 nt, Artificial Sequence
  Description of Artificial Sequence: Synthetic oligonucleotide
aguugcuagauccaagauc

SEQ ID NO: 1736397 - RNA, 19 nt, Artificial Sequence
  Description of Artificial Sequence: Synthetic oligonucleotide
uugacaaacaucaucuuau

SEQ ID NO: 1736398 - RNA, 19 nt, Artificial Sequence
  Description of Artificial Sequence: Synthetic oligonucleotide
aauccaguuuuacuuaugu

SEQ ID NO: 1736399 - RNA, 19 nt, Artificial Sequence
  Description of Artificial Sequence: Synthetic oligonucleotide
cauuugaaagcaaacacuc

SEQ ID NO: 1736400 - RNA, 19 nt, Artificial Sequence
  Description of Artificial Sequence: Synthetic oligonucleotide
guaguuauuuaaaagggcc

SEQ ID NO: 1736401 - RNA, 19 nt, Artificial Sequence
  Description of Artificial Sequence: Synthetic oligonucleotide
aguauuuaauaguuaugag

SEQ ID NO: 1736402 - RNA, 19 nt, Artificial Sequence
  Description of Artificial Sequence: Synthetic oligonucleotide
aaguugaaagagcuaccac

SEQ ID NO: 1736403 - RNA, 19 nt, Artificial Sequence
  Description of Artificial Sequence: Synthetic oligonucleotide
uaacaagacgaccagugug

SEQ ID NO: 1736404 - RNA, 19 nt, Artificial Sequence
  Description of Artificial Sequence: Synthetic oligonucleotide
gugcauuauaacaauaagg

SEQ ID NO: 1736405 - RNA, 19 nt, Artificial Sequence
  Description of Artificial Sequence: Synthetic oligonucleotide
aggaacaaaccuaaaacac

SEQ ID NO: 1736406 - RNA, 19 nt, Artificial Sequence
  Description of Artificial Sequence: Synthetic oligonucleotide
auuuaauaguuaugagccg

SEQ ID NO: 1736407 - RNA, 19 nt, Artificial Sequence
  Description of Artificial Sequence: Synthetic oligonucleotide
uauuuagaccuuaggagga

SEQ ID NO: 1736408 - RNA, 19 nt, Artificial Sequence
  Description of Artificial Sequence: Synthetic oligonucleotide
auauaaagacauuuugggu

SEQ ID NO: 1736409 - RNA, 19 nt, Artificial Sequence
  Description of Artificial Sequence: Synthetic oligonucleotide
aaaauaggaacaaaccuaa

SEQ ID NO: 1736410 - RNA, 19 nt, Artificial Sequence
  Description of Artificial Sequence: Synthetic oligonucleotide
ucuaaaugaugaugugacg

SEQ ID NO: 1736411 - RNA, 19 nt, Artificial Sequence
  Description of Artificial Sequence: Synthetic oligonucleotide
aagcaaaguaagugucccc

SEQ ID NO: 1736412 - RNA, 19 nt, Artificial Sequence
  Description of Artificial Sequence: Synthetic oligonucleotide
augguuauagucaugcccg

SEQ ID NO: 1736413 - RNA, 19 nt, Artificial Sequence
  Description of Artificial Sequence: Synthetic oligonucleotide
acccauaagucucaagaac

SEQ ID NO: 1736414 - RNA, 19 nt, Artificial Sequence
  Description of Artificial Sequence: Synthetic oligonucleotide
augaaaggaagcugaguac

SEQ ID NO: 1736415 - RNA, 19 nt, Artificial Sequence
  Description of Artificial Sequence: Synthetic oligonucleotide
ugcuaauaugaaaggaagc

SEQ ID NO: 1736416 - RNA, 19 nt, Artificial Sequence
  Description of Artificial Sequence: Synthetic oligonucleotide
acuaaaugagcaaaucuuc

SEQ ID NO: 1736417 - RNA, 19 nt, Artificial Sequence
  Description of Artificial Sequence: Synthetic oligonucleotide
agauccaagaucgucgucg

SEQ ID NO: 1736418 - RNA, 19 nt, Artificial Sequence
  Description of Artificial Sequence: Synthetic oligonucleotide
cuggacuugacaaacauca

SEQ ID NO: 1736419 - RNA, 19 nt, Artificial Sequence
  Description of Artificial Sequence: Synthetic oligonucleotide
ggaaaaguguaauccaugg

SEQ ID NO: 1736420 - RNA, 19 nt, Artificial Sequence
  Description of Artificial Sequence: Synthetic oligonucleotide
aucaucuuauaauugcucu

SEQ ID NO: 1736421 - RNA, 19 nt, Artificial Sequence
  Description of Artificial Sequence: Synthetic oligonucleotide
augaugaugugacggcugc

SEQ ID NO: 1736422 - RNA, 19 nt, Artificial Sequence
  Description of Artificial Sequence: Synthetic oligonucleotide
ugagauguugauuugugau

SEQ ID NO: 1736423 - RNA, 19 nt, Artificial Sequence
  Description of Artificial Sequence: Synthetic oligonucleotide
ucuauaagcaguccuccac

SEQ ID NO: 1736424 - RNA, 19 nt, Artificial Sequence
  Description of Artificial Sequence: Synthetic oligonucleotide
ucuuauaauugcucuuugc

SEQ ID NO: 1736425 - RNA, 19 nt, Artificial Sequence
  Description of Artificial Sequence: Synthetic oligonucleotide
uuauaauugcucuuugcau

SEQ ID NO: 1736426 - RNA, 19 nt, Artificial Sequence
  Description of Artificial Sequence: Synthetic oligonucleotide
ugugaucuccuauaacaag

SEQ ID NO: 1736427 - RNA, 19 nt, Artificial Sequence
  Description of Artificial Sequence: Synthetic oligonucleotide
agacuaaguauuuaauagu

SEQ ID NO: 1736428 - RNA, 19 nt, Artificial Sequence
  Description of Artificial Sequence: Synthetic oligonucleotide
ugaacuuuggucacauagu

SEQ ID NO: 1736429 - RNA, 19 nt, Artificial Sequence
  Description of Artificial Sequence: Synthetic oligonucleotide
uaguuauuuaaaagggccu

SEQ ID NO: 1736430 - RNA, 19 nt, Artificial Sequence
  Description of Artificial Sequence: Synthetic oligonucleotide
cauuuuauacaacucugac

SEQ ID NO: 1736431 - RNA, 19 nt, Artificial Sequence
  Description of Artificial Sequence: Synthetic oligonucleotide
uccaagaucgucgucgggg

SEQ ID NO: 1736432 - RNA, 19 nt, Artificial Sequence
  Description of Artificial Sequence: Synthetic oligonucleotide
aguagcauggaguucuucu

SEQ ID NO: 1736433 - RNA, 19 nt, Artificial Sequence
  Description of Artificial Sequence: Synthetic oligonucleotide
gaaaaguguaauccauggc

SEQ ID NO: 1736434 - RNA, 19 nt, Artificial Sequence
  Description of Artificial Sequence: Synthetic oligonucleotide
acaacucugacucuuuaca

SEQ ID NO: 1736435 - RNA, 19 nt, Artificial Sequence
  Description of Artificial Sequence: Synthetic oligonucleotide
aauaaggcuuacuuuuaau

SEQ ID NO: 1736436 - RNA, 19 nt, Artificial Sequence
  Description of Artificial Sequence: Synthetic oligonucleotide
ucaaucgcgacaccagcag

SEQ ID NO: 1736437 - RNA, 19 nt, Artificial Sequence
  Description of Artificial Sequence: Synthetic oligonucleotide
aauaugaaaggaagcugag

SEQ ID NO: 1736438 - RNA, 19 nt, Artificial Sequence
  Description of Artificial Sequence: Synthetic oligonucleotide
acaaccuucuaaaugauga

SEQ ID NO: 1736439 - RNA, 19 nt, Artificial Sequence
  Description of Artificial Sequence: Synthetic oligonucleotide
aacgcuucaccccgugugg

SEQ ID NO: 1736440 - RNA, 19 nt, Artificial Sequence
  Description of Artificial Sequence: Synthetic oligonucleotide
auaguuaugagccgcugga

SEQ ID NO: 1736441 - RNA, 19 nt, Artificial Sequence
  Description of Artificial Sequence: Synthetic oligonucleotide
uacacaggacuaaaugagc

SEQ ID NO: 1736442 - RNA, 19 nt, Artificial Sequence
  Description of Artificial Sequence: Synthetic oligonucleotide
uaguuuacuguccaugcuc

SEQ ID NO: 1736443 - RNA, 19 nt, Artificial Sequence
  Description of Artificial Sequence: Synthetic oligonucleotide
ucauuaauuuucuugucuu

SEQ ID NO: 1736444 - RNA, 19 nt, Artificial Sequence
  Description of Artificial Sequence: Synthetic oligonucleotide
acgaugcuaauaugaaagg

SEQ ID NO: 1736445 - RNA, 19 nt, Artificial Sequence
  Description of Artificial Sequence: Synthetic oligonucleotide
aaacuuuacuauacaauga

SEQ ID NO: 1736446 - RNA, 19 nt, Artificial Sequence
  Description of Artificial Sequence: Synthetic oligonucleotide
ugauaguuuacuguccaug

SEQ ID NO: 1736447 - RNA, 19 nt, Artificial Sequence
  Description of Artificial Sequence: Synthetic oligonucleotide
aucaaauuauauaaagaca

SEQ ID NO: 1736448 - RNA, 19 nt, Artificial Sequence
  Description of Artificial Sequence: Synthetic oligonucleotide
ucugcaggggugaaaaggu

SEQ ID NO: 1736449 - RNA, 19 nt, Artificial Sequence
  Description of Artificial Sequence: Synthetic oligonucleotide
auaaggcuuacuuuuaaua

SEQ ID NO: 1736450 - RNA, 19 nt, Artificial Sequence
  Description of Artificial Sequence: Synthetic oligonucleotide
aguguccugugcuugcucg

SEQ ID NO: 1736451 - RNA, 19 nt, Artificial Sequence
  Description of Artificial Sequence: Synthetic oligonucleotide
aacuuuggucacauaguac

SEQ ID NO: 1736452 - RNA, 19 nt, Artificial Sequence
  Description of Artificial Sequence: Synthetic oligonucleotide
aaccuucuaaaugaugaug

SEQ ID NO: 1736453 - RNA, 19 nt, Artificial Sequence
  Description of Artificial Sequence: Synthetic oligonucleotide
aaacacucuuuguaguuau

SEQ ID NO: 1736454 - RNA, 19 nt, Artificial Sequence
  Description of Artificial Sequence: Synthetic oligonucleotide
gaugcuaauaugaaaggaa

SEQ ID NO: 1736455 - RNA, 19 nt, Artificial Sequence
  Description of Artificial Sequence: Synthetic oligonucleotide
aucuccuauaacaagacga

SEQ ID NO: 1736456 - RNA, 19 nt, Artificial Sequence
  Description of Artificial Sequence: Synthetic oligonucleotide
agucaucuggacucucggc

SEQ ID NO: 1736457 - RNA, 19 nt, Artificial Sequence
  Description of Artificial Sequence: Synthetic oligonucleotide
cauugccuaagucugcugc

SEQ ID NO: 1736458 - RNA, 19 nt, Artificial Sequence
  Description of Artificial Sequence: Synthetic oligonucleotide
agauguugauuugugaucu

SEQ ID NO: 1736459 - RNA, 19 nt, Artificial Sequence
  Description of Artificial Sequence: Synthetic oligonucleotide
aacaagacgaccagugugu

SEQ ID NO: 1736460 - RNA, 19 nt, Artificial Sequence
  Description of Artificial Sequence: Synthetic oligonucleotide
aaaggucugugcucuauaa

SEQ ID NO: 1736461 - RNA, 19 nt, Artificial Sequence
  Description of Artificial Sequence: Synthetic oligonucleotide
uaaauacacaggacuaaau

SEQ ID NO: 1736462 - RNA, 19 nt, Artificial Sequence
  Description of Artificial Sequence: Synthetic oligonucleotide
ugaacacacucgcaguucu

SEQ ID NO: 1736463 - RNA, 19 nt, Artificial Sequence
  Description of Artificial Sequence: Synthetic oligonucleotide
uguaauccauggcauuuga

SEQ ID NO: 1736464 - RNA, 19 nt, Artificial Sequence
  Description of Artificial Sequence: Synthetic oligonucleotide
uucggaagugagauguuga

SEQ ID NO: 1736465 - RNA, 19 nt, Artificial Sequence
  Description of Artificial Sequence: Synthetic oligonucleotide
augaugugacggcugcacc

SEQ ID NO: 1736466 - RNA, 19 nt, Artificial Sequence
  Description of Artificial Sequence: Synthetic oligonucleotide
uauagucaugcccggaaaa

SEQ ID NO: 1736467 - RNA, 19 nt, Artificial Sequence
  Description of Artificial Sequence: Synthetic oligonucleotide
ucgucacaguaucaaauga

SEQ ID NO: 1736468 - RNA, 19 nt, Artificial Sequence
  Description of Artificial Sequence: Synthetic oligonucleotide
augcuaauaugaaaggaag

SEQ ID NO: 1736469 - RNA, 19 nt, Artificial Sequence
  Description of Artificial Sequence: Synthetic oligonucleotide
ucccgggcagcacucaucg

SEQ ID NO: 1736470 - RNA, 19 nt, Artificial Sequence
  Description of Artificial Sequence: Synthetic oligonucleotide
uuuacuguccaugcucugc

SEQ ID NO: 1736471 - RNA, 19 nt, Artificial Sequence
  Description of Artificial Sequence: Synthetic oligonucleotide
aagucucaagaacuuuugu

SEQ ID NO: 1736472 - RNA, 19 nt, Artificial Sequence
  Description of Artificial Sequence: Synthetic oligonucleotide
aaaugaugaugugacggcu

SEQ ID NO: 1736473 - RNA, 19 nt, Artificial Sequence
  Description of Artificial Sequence: Synthetic oligonucleotide
gccgguaucggccugauag

SEQ ID NO: 1736474 - RNA, 19 nt, Artificial Sequence
  Description of Artificial Sequence: Synthetic oligonucleotide
uugugaucuccuauaacaa

SEQ ID NO: 1736475 - RNA, 19 nt, Artificial Sequence
  Description of Artificial Sequence: Synthetic oligonucleotide
aguuaugagccgcuggacu

SEQ ID NO: 1736476 - RNA, 19 nt, Artificial Sequence
  Description of Artificial Sequence: Synthetic oligonucleotide
aucugcaggggugaaaagg

SEQ ID NO: 1736477 - RNA, 19 nt, Artificial Sequence
  Description of Artificial Sequence: Synthetic oligonucleotide
aaagagcuaccacaagcaa

SEQ ID NO: 1736478 - RNA, 19 nt, Artificial Sequence
  Description of Artificial Sequence: Synthetic oligonucleotide
cuaccacaagcaaaguaag

SEQ ID NO: 1736479 - RNA, 19 nt, Artificial Sequence
  Description of Artificial Sequence: Synthetic oligonucleotide
gucaucaucaucaucaucu

SEQ ID NO: 1736480 - RNA, 19 nt, Artificial Sequence
  Description of Artificial Sequence: Synthetic oligonucleotide
caucaggaugcucaguagc

SEQ ID NO: 1736481 - RNA, 19 nt, Artificial Sequence
  Description of Artificial Sequence: Synthetic oligonucleotide
gaacgcuucaccccgugug

SEQ ID NO: 1736482 - RNA, 19 nt, Artificial Sequence
  Description of Artificial Sequence: Synthetic oligonucleotide
ggcauuugaaagcaaacac

SEQ ID NO: 1736483 - RNA, 19 nt, Artificial Sequence
  Description of Artificial Sequence: Synthetic oligonucleotide
ugcucuauaagcaguccuc

SEQ ID NO: 1736484 - RNA, 19 nt, Artificial Sequence
  Description of Artificial Sequence: Synthetic oligonucleotide
auuauaacaauaaggcuua

SEQ ID NO: 1736485 - RNA, 19 nt, Artificial Sequence
  Description of Artificial Sequence: Synthetic oligonucleotide
aaugaugaugugacggcug

SEQ ID NO: 1736486 - RNA, 19 nt, Artificial Sequence
  Description of Artificial Sequence: Synthetic oligonucleotide
uaagucugcugcuucccag

SEQ ID NO: 1736487 - RNA, 19 nt, Artificial Sequence
  Description of Artificial Sequence: Synthetic oligonucleotide
uccucaaucgcgacaccag

SEQ ID NO: 1736488 - RNA, 19 nt, Artificial Sequence
  Description of Artificial Sequence: Synthetic oligonucleotide
gaguacaguauuuauuucu

SEQ ID NO: 1736489 - RNA, 19 nt, Artificial Sequence
  Description of Artificial Sequence: Synthetic oligonucleotide
aaagacauuuuggguucac

SEQ ID NO: 1736490 - RNA, 19 nt, Artificial Sequence
  Description of Artificial Sequence: Synthetic oligonucleotide
uugaaagagcuaccacaag

SEQ ID NO: 1736491 - RNA, 19 nt, Artificial Sequence
  Description of Artificial Sequence: Synthetic oligonucleotide
auaacaagacgaccagugu

SEQ ID NO: 1736492 - RNA, 19 nt, Artificial Sequence
  Description of Artificial Sequence: Synthetic oligonucleotide
cucgucacaguaucaaaug

SEQ ID NO: 1736493 - RNA, 19 nt, Artificial Sequence
  Description of Artificial Sequence: Synthetic oligonucleotide
ugucugagucaucuggacu

SEQ ID NO: 1736494 - RNA, 19 nt, Artificial Sequence
  Description of Artificial Sequence: Synthetic oligonucleotide
gaaaaggugguaagagggc

SEQ ID NO: 1736495 - RNA, 19 nt, Artificial Sequence
  Description of Artificial Sequence: Synthetic oligonucleotide
uauaacaauaaggcuuacu

SEQ ID NO: 1736496 - RNA, 19 nt, Artificial Sequence
  Description of Artificial Sequence: Synthetic oligonucleotide
ugaugugacggcugcaccu

SEQ ID NO: 1736497 - RNA, 19 nt, Artificial Sequence
  Description of Artificial Sequence: Synthetic oligonucleotide
cauaaugcaucugcagggg

SEQ ID NO: 1736498 - RNA, 19 nt, Artificial Sequence
  Description of Artificial Sequence: Synthetic oligonucleotide
aaaaugaacuuuggucaca

SEQ ID NO: 1736499 - RNA, 19 nt, Artificial Sequence
  Description of Artificial Sequence: Synthetic oligonucleotide
aggacuaaaugagcaaauc

SEQ ID NO: 1736500 - RNA, 19 nt, Artificial Sequence
  Description of Artificial Sequence: Synthetic oligonucleotide
uuauagucaugcccggaaa

SEQ ID NO: 1736501 - RNA, 19 nt, Artificial Sequence
  Description of Artificial Sequence: Synthetic oligonucleotide
acacaaaguugaaagagcu

SEQ ID NO: 1736502 - RNA, 19 nt, Artificial Sequence
  Description of Artificial Sequence: Synthetic oligonucleotide
aaugcaucugcagggguga

SEQ ID NO: 1736503 - RNA, 19 nt, Artificial Sequence
  Description of Artificial Sequence: Synthetic oligonucleotide
aaaacuggccaaauuuuau

SEQ ID NO: 1736504 - RNA, 19 nt, Artificial Sequence
  Description of Artificial Sequence: Synthetic oligonucleotide
cucaucguggcugggaucc

SEQ ID NO: 1736505 - RNA, 19 nt, Artificial Sequence
  Description of Artificial Sequence: Synthetic oligonucleotide
ccauaaugcaucugcaggg

SEQ ID NO: 1736506 - RNA, 19 nt, Artificial Sequence
  Description of Artificial Sequence: Synthetic oligonucleotide
ggugaaaaggugguaagag

SEQ ID NO: 1736507 - RNA, 19 nt, Artificial Sequence
  Description of Artificial Sequence: Synthetic oligonucleotide
auaguuuacuguccaugcu

SEQ ID NO: 1736508 - RNA, 19 nt, Artificial Sequence
  Description of Artificial Sequence: Synthetic oligonucleotide
agucaucaucaucaucauc

SEQ ID NO: 1736509 - RNA, 19 nt, Artificial Sequence
  Description of Artificial Sequence: Synthetic oligonucleotide
auagucaugcccggaaaag

SEQ ID NO: 1736510 - RNA, 19 nt, Artificial Sequence
  Description of Artificial Sequence: Synthetic oligonucleotide
uacaacucugacucuuuac

SEQ ID NO: 1736511 - RNA, 19 nt, Artificial Sequence
  Description of Artificial Sequence: Synthetic oligonucleotide
gaacuuuggucacauagua

SEQ ID NO: 1736512 - RNA, 19 nt, Artificial Sequence
  Description of Artificial Sequence: Synthetic oligonucleotide
uucuccucaaucgcgacac

SEQ ID NO: 1736513 - RNA, 19 nt, Artificial Sequence
  Description of Artificial Sequence: Synthetic oligonucleotide
agugccgccgguaucggcc

SEQ ID NO: 1736514 - RNA, 19 nt, Artificial Sequence
  Description of Artificial Sequence: Synthetic oligonucleotide
uccugcacccauaagucuc

SEQ ID NO: 1736515 - RNA, 19 nt, Artificial Sequence
  Description of Artificial Sequence: Synthetic oligonucleotide
ucucucuucauugccuaag

SEQ ID NO: 1736516 - RNA, 19 nt, Artificial Sequence
  Description of Artificial Sequence: Synthetic oligonucleotide
ugguuauagucaugcccgg

SEQ ID NO: 1736517 - RNA, 19 nt, Artificial Sequence
  Description of Artificial Sequence: Synthetic oligonucleotide
auacaaaggucugugcucu

SEQ ID NO: 1736518 - RNA, 19 nt, Artificial Sequence
  Description of Artificial Sequence: Synthetic oligonucleotide
gaugaugugacggcugcac

SEQ ID NO: 1736519 - RNA, 19 nt, Artificial Sequence
  Description of Artificial Sequence: Synthetic oligonucleotide
aguucuccucaaucgcgac

SEQ ID NO: 1736520 - RNA, 19 nt, Artificial Sequence
  Description of Artificial Sequence: Synthetic oligonucleotide
ucaucuuauaauugcucuu

SEQ ID NO: 1736521 - RNA, 19 nt, Artificial Sequence
  Description of Artificial Sequence: Synthetic oligonucleotide
ugaguacaguauuuauuuc

SEQ ID NO: 1736522 - RNA, 19 nt, Artificial Sequence
  Description of Artificial Sequence: Synthetic oligonucleotide
aaucgcgacaccagcagcu

SEQ ID NO: 1736523 - RNA, 19 nt, Artificial Sequence
  Description of Artificial Sequence: Synthetic oligonucleotide
cccauaaugcaucugcagg

SEQ ID NO: 1736524 - RNA, 19 nt, Artificial Sequence
  Description of Artificial Sequence: Synthetic oligonucleotide
uaugggaaacugcuuucuc

SEQ ID NO: 1736525 - RNA, 19 nt, Artificial Sequence
  Description of Artificial Sequence: Synthetic oligonucleotide
uaccacaagcaaaguaagu

SEQ ID NO: 1736526 - RNA, 19 nt, Artificial Sequence
  Description of Artificial Sequence: Synthetic oligonucleotide
cuuuccugcacccauaagu

SEQ ID NO: 1736527 - RNA, 19 nt, Artificial Sequence
  Description of Artificial Sequence: Synthetic oligonucleotide
cugugcauuauaacaauaa

SEQ ID NO: 1736528 - RNA, 19 nt, Artificial Sequence
  Description of Artificial Sequence: Synthetic oligonucleotide
cuucauugccuaagucugc

SEQ ID NO: 1736529 - RNA, 19 nt, Artificial Sequence
  Description of Artificial Sequence: Synthetic oligonucleotide
guuauagucaugcccggaa

SEQ ID NO: 1736530 - RNA, 19 nt, Artificial Sequence
  Description of Artificial Sequence: Synthetic oligonucleotide
aaguguaauccauggcauu

SEQ ID NO: 1736531 - RNA, 19 nt, Artificial Sequence
  Description of Artificial Sequence: Synthetic oligonucleotide
gugguaagagggcugacga

SEQ ID NO: 1736532 - RNA, 19 nt, Artificial Sequence
  Description of Artificial Sequence: Synthetic oligonucleotide
aguuauuuaaaagggccuu

SEQ ID NO: 1736533 - RNA, 19 nt, Artificial Sequence
  Description of Artificial Sequence: Synthetic oligonucleotide
gugaucuccuauaacaaga

SEQ ID NO: 1736534 - RNA, 19 nt, Artificial Sequence
  Description of Artificial Sequence: Synthetic oligonucleotide
gacggcugcaccucugccc

SEQ ID NO: 1736535 - RNA, 19 nt, Artificial Sequence
  Description of Artificial Sequence: Synthetic oligonucleotide
ucggccugauaguuuacug

SEQ ID NO: 1736536 - RNA, 19 nt, Artificial Sequence
  Description of Artificial Sequence: Synthetic oligonucleotide
aaauccaguuuuacuuaug

SEQ ID NO: 1736537 - RNA, 19 nt, Artificial Sequence
  Description of Artificial Sequence: Synthetic oligonucleotide
guugaaagagcuaccacaa

SEQ ID NO: 1736538 - RNA, 19 nt, Artificial Sequence
  Description of Artificial Sequence: Synthetic oligonucleotide
auaaugcaucugcaggggu

SEQ ID NO: 1736539 - RNA, 19 nt, Artificial Sequence
  Description of Artificial Sequence: Synthetic oligonucleotide
ucaucaucaucaucaucuc

SEQ ID NO: 1736540 - RNA, 19 nt, Artificial Sequence
  Description of Artificial Sequence: Synthetic oligonucleotide
ggucacauaguacuuaaaa

SEQ ID NO: 1736541 - RNA, 19 nt, Artificial Sequence
  Description of Artificial Sequence: Synthetic oligonucleotide
uucuuuccugcacccauaa

SEQ ID NO: 1736542 - RNA, 19 nt, Artificial Sequence
  Description of Artificial Sequence: Synthetic oligonucleotide
gguaagagggcugacgaug

SEQ ID NO: 1736543 - RNA, 19 nt, Artificial Sequence
  Description of Artificial Sequence: Synthetic oligonucleotide
gaucccgaaggggacaggc

SEQ ID NO: 1736544 - RNA, 19 nt, Artificial Sequence
  Description of Artificial Sequence: Synthetic oligonucleotide
acacaggacuaaaugagca

SEQ ID NO: 1736545 - RNA, 19 nt, Artificial Sequence
  Description of Artificial Sequence: Synthetic oligonucleotide
cauggcauuugaaagcaaa

SEQ ID NO: 1736546 - RNA, 19 nt, Artificial Sequence
  Description of Artificial Sequence: Synthetic oligonucleotide
guaagagggcugacgaugc

SEQ ID NO: 1736547 - RNA, 19 nt, Artificial Sequence
  Description of Artificial Sequence: Synthetic oligonucleotide
ugacaaacaucaucuuaua

SEQ ID NO: 1736548 - RNA, 19 nt, Artificial Sequence
  Description of Artificial Sequence: Synthetic oligonucleotide
auaagcaguccuccacugu

SEQ ID NO: 1736549 - RNA, 19 nt, Artificial Sequence
  Description of Artificial Sequence: Synthetic oligonucleotide
ucuuuccugcacccauaag

SEQ ID NO: 1736550 - RNA, 19 nt, Artificial Sequence
  Description of Artificial Sequence: Synthetic oligonucleotide
auaugaaaggaagcugagu

SEQ ID NO: 1736551 - RNA, 19 nt, Artificial Sequence
  Description of Artificial Sequence: Synthetic oligonucleotide
gcugcuucccaguugcuag

SEQ ID NO: 1736552 - RNA, 19 nt, Artificial Sequence
  Description of Artificial Sequence: Synthetic oligonucleotide
cucgcaguucuccucaauc

SEQ ID NO: 1736553 - RNA, 19 nt, Artificial Sequence
  Description of Artificial Sequence: Synthetic oligonucleotide
aguguaauccauggcauuu

SEQ ID NO: 1736554 - RNA, 19 nt, Artificial Sequence
  Description of Artificial Sequence: Synthetic oligonucleotide
ugugcucuauaagcagucc

SEQ ID NO: 1736555 - RNA, 19 nt, Artificial Sequence
  Description of Artificial Sequence: Synthetic oligonucleotide
ggcugaacgcuucaccccg

SEQ ID NO: 1736556 - RNA, 19 nt, Artificial Sequence
  Description of Artificial Sequence: Synthetic oligonucleotide
ggacuugacaaacaucauc

SEQ ID NO: 1736557 - RNA, 19 nt, Artificial Sequence
  Description of Artificial Sequence: Synthetic oligonucleotide
agcugaguacaguauuuau

SEQ ID NO: 1736558 - RNA, 19 nt, Artificial Sequence
  Description of Artificial Sequence: Synthetic oligonucleotide
ucggaagugagauguugau

SEQ ID NO: 1736559 - RNA, 19 nt, Artificial Sequence
  Description of Artificial Sequence: Synthetic oligonucleotide
ugcuagauccaagaucguc

SEQ ID NO: 1736560 - RNA, 19 nt, Artificial Sequence
  Description of Artificial Sequence: Synthetic oligonucleotide
acacucgcaguucuccuca

SEQ ID NO: 1736561 - RNA, 19 nt, Artificial Sequence
  Description of Artificial Sequence: Synthetic oligonucleotide
uuaugagccgcuggacuug

SEQ ID NO: 1736562 - RNA, 19 nt, Artificial Sequence
  Description of Artificial Sequence: Synthetic oligonucleotide
ucaugcccggaaaagugua

SEQ ID NO: 1736563 - RNA, 19 nt, Artificial Sequence
  Description of Artificial Sequence: Synthetic oligonucleotide
cuccuauaacaagacgacc

SEQ ID NO: 1736564 - RNA, 19 nt, Artificial Sequence
  Description of Artificial Sequence: Synthetic oligonucleotide
agcuaccacaagcaaagua

SEQ ID NO: 1736565 - RNA, 19 nt, Artificial Sequence
  Description of Artificial Sequence: Synthetic oligonucleotide
cugugcucuauaagcaguc

SEQ ID NO: 1736566 - RNA, 19 nt, Artificial Sequence
  Description of Artificial Sequence: Synthetic oligonucleotide
ucacaaccuucuaaaugau

SEQ ID NO: 1736567 - RNA, 19 nt, Artificial Sequence
  Description of Artificial Sequence: Synthetic oligonucleotide
acucucggcauccggcgag

SEQ ID NO: 1736568 - RNA, 19 nt, Artificial Sequence
  Description of Artificial Sequence: Synthetic oligonucleotide
cauccggcgagucaucauc

SEQ ID NO: 1736569 - RNA, 19 nt, Artificial Sequence
  Description of Artificial Sequence: Synthetic oligonucleotide
ccuauaacaagacgaccag

SEQ ID NO: 1736570 - RNA, 19 nt, Artificial Sequence
  Description of Artificial Sequence: Synthetic oligonucleotide
guucggaagugagauguug

SEQ ID NO: 1736571 - RNA, 19 nt, Artificial Sequence
  Description of Artificial Sequence: Synthetic oligonucleotide
acucaucguggcugggauc

SEQ ID NO: 1736572 - RNA, 19 nt, Artificial Sequence
  Description of Artificial Sequence: Synthetic oligonucleotide
uccacagugccgccgguau

SEQ ID NO: 1736573 - RNA, 19 nt, Artificial Sequence
  Description of Artificial Sequence: Synthetic oligonucleotide
uuccugcacccauaagucu

SEQ ID NO: 1736574 - RNA, 19 nt, Artificial Sequence
  Description of Artificial Sequence: Synthetic oligonucleotide
uuuagaccuuaggaggaaa

SEQ ID NO: 1736575 - RNA, 19 nt, Artificial Sequence
  Description of Artificial Sequence: Synthetic oligonucleotide
gcuaauaugaaaggaagcu

SEQ ID NO: 1736576 - RNA, 19 nt, Artificial Sequence
  Description of Artificial Sequence: Synthetic oligonucleotide
ggccaaauuuuaucaaaac

SEQ ID NO: 1736577 - RNA, 19 nt, Artificial Sequence
  Description of Artificial Sequence: Synthetic oligonucleotide
ugguacugagacuccaguu

SEQ ID NO: 1736578 - RNA, 19 nt, Artificial Sequence
  Description of Artificial Sequence: Synthetic oligonucleotide
guaucggccugauaguuua

SEQ ID NO: 1736579 - RNA, 19 nt, Artificial Sequence
  Description of Artificial Sequence: Synthetic oligonucleotide
caaucgcgacaccagcagc

SEQ ID NO: 1736580 - RNA, 19 nt, Artificial Sequence
  Description of Artificial Sequence: Synthetic oligonucleotide
gauguugauuugugaucuc

SEQ ID NO: 1736581 - RNA, 19 nt, Artificial Sequence
  Description of Artificial Sequence: Synthetic oligonucleotide
ugcacccauaagucucaag

SEQ ID NO: 1736582 - RNA, 19 nt, Artificial Sequence
  Description of Artificial Sequence: Synthetic oligonucleotide
cuggccaaauuuuaucaaa

SEQ ID NO: 1736583 - RNA, 19 nt, Artificial Sequence
  Description of Artificial Sequence: Synthetic oligonucleotide
ugaacgcuucaccccgugu

SEQ ID NO: 1736584 - RNA, 19 nt, Artificial Sequence
  Description of Artificial Sequence: Synthetic oligonucleotide
aaugaacuuuggucacaua

SEQ ID NO: 1736585 - RNA, 19 nt, Artificial Sequence
  Description of Artificial Sequence: Synthetic oligonucleotide
aagcugaguacaguauuua

SEQ ID NO: 1736586 - RNA, 19 nt, Artificial Sequence
  Description of Artificial Sequence: Synthetic oligonucleotide
ggacuaaaugagcaaaucu

SEQ ID NO: 1736587 - RNA, 19 nt, Artificial Sequence
  Description of Artificial Sequence: Synthetic oligonucleotide
cucaaucgcgacaccagca

SEQ ID NO: 1736588 - RNA, 19 nt, Artificial Sequence
  Description of Artificial Sequence: Synthetic oligonucleotide
gagccgcuggacuugacaa

SEQ ID NO: 1736589 - RNA, 19 nt, Artificial Sequence
  Description of Artificial Sequence: Synthetic oligonucleotide
ugccuaagucugcugcuuc

SEQ ID NO: 1736590 - RNA, 19 nt, Artificial Sequence
  Description of Artificial Sequence: Synthetic oligonucleotide
ugcucgucacaguaucaaa

SEQ ID NO: 1736591 - RNA, 19 nt, Artificial Sequence
  Description of Artificial Sequence: Synthetic oligonucleotide
ggggugaaaaggugguaag

SEQ ID NO: 1736592 - RNA, 19 nt, Artificial Sequence
  Description of Artificial Sequence: Synthetic oligonucleotide
uugcucgucacaguaucaa

SEQ ID NO: 1736593 - RNA, 19 nt, Artificial Sequence
  Description of Artificial Sequence: Synthetic oligonucleotide
uaguuaugagccgcuggac

SEQ ID NO: 1736594 - RNA, 19 nt, Artificial Sequence
  Description of Artificial Sequence: Synthetic oligonucleotide
ggacucucggcauccggcg

SEQ ID NO: 1736595 - RNA, 19 nt, Artificial Sequence
  Description of Artificial Sequence: Synthetic oligonucleotide
ugacggcugcaccucugcc

SEQ ID NO: 1736596 - RNA, 19 nt, Artificial Sequence
  Description of Artificial Sequence: Synthetic oligonucleotide
gcaguucuccucaaucgcg

SEQ ID NO: 1736597 - RNA, 19 nt, Artificial Sequence
  Description of Artificial Sequence: Synthetic oligonucleotide
uaagagggcugacgaugcu

SEQ ID NO: 1736598 - RNA, 19 nt, Artificial Sequence
  Description of Artificial Sequence: Synthetic oligonucleotide
cucaguagcauggaguucu

SEQ ID NO: 1736599 - RNA, 19 nt, Artificial Sequence
  Description of Artificial Sequence: Synthetic oligonucleotide
acugucugagucaucugga

SEQ ID NO: 1736600 - RNA, 19 nt, Artificial Sequence
  Description of Artificial Sequence: Synthetic oligonucleotide
ugcccggaaaaguguaauc

SEQ ID NO: 1736601 - RNA, 19 nt, Artificial Sequence
  Description of Artificial Sequence: Synthetic oligonucleotide
uuauaacaauaaggcuuac

SEQ ID NO: 1736602 - RNA, 19 nt, Artificial Sequence
  Description of Artificial Sequence: Synthetic oligonucleotide
acacacucgcaguucuccu

SEQ ID NO: 1736603 - RNA, 19 nt, Artificial Sequence
  Description of Artificial Sequence: Synthetic oligonucleotide
gcccggaaaaguguaaucc

SEQ ID NO: 1736604 - RNA, 19 nt, Artificial Sequence
  Description of Artificial Sequence: Synthetic oligonucleotide
uggucacauaguacuuaaa

SEQ ID NO: 1736605 - RNA, 19 nt, Artificial Sequence
  Description of Artificial Sequence: Synthetic oligonucleotide
cuggacucucggcauccgg

SEQ ID NO: 1736606 - RNA, 19 nt, Artificial Sequence
  Description of Artificial Sequence: Synthetic oligonucleotide
ucggcauccggcgagucau

SEQ ID NO: 1736607 - RNA, 19 nt, Artificial Sequence
  Description of Artificial Sequence: Synthetic oligonucleotide
aagagggcugacgaugcua

SEQ ID NO: 1736608 - RNA, 19 nt, Artificial Sequence
  Description of Artificial Sequence: Synthetic oligonucleotide
cucuauaagcaguccucca

SEQ ID NO: 1736609 - RNA, 19 nt, Artificial Sequence
  Description of Artificial Sequence: Synthetic oligonucleotide
cuauaagcaguccuccacu

SEQ ID NO: 1736610 - RNA, 19 nt, Artificial Sequence
  Description of Artificial Sequence: Synthetic oligonucleotide
uaccucacugaagccaagu

SEQ ID NO: 1736611 - RNA, 19 nt, Artificial Sequence
  Description of Artificial Sequence: Synthetic oligonucleotide
cacucuuuguaguuauuua

SEQ ID NO: 1736612 - RNA, 19 nt, Artificial Sequence
  Description of Artificial Sequence: Synthetic oligonucleotide
cuguucggaagugagaugu

SEQ ID NO: 1736613 - RNA, 19 nt, Artificial Sequence
  Description of Artificial Sequence: Synthetic oligonucleotide
auuuagaccuuaggaggaa

SEQ ID NO: 1736614 - RNA, 19 nt, Artificial Sequence
  Description of Artificial Sequence: Synthetic oligonucleotide
ugguaagagggcugacgau

SEQ ID NO: 1736615 - RNA, 19 nt, Artificial Sequence
  Description of Artificial Sequence: Synthetic oligonucleotide
caagacgaccaguguguuc

SEQ ID NO: 1736616 - RNA, 19 nt, Artificial Sequence
  Description of Artificial Sequence: Synthetic oligonucleotide
ucuggacucucggcauccg

SEQ ID NO: 1736617 - RNA, 19 nt, Artificial Sequence
  Description of Artificial Sequence: Synthetic oligonucleotide
caucugcaggggugaaaag

SEQ ID NO: 1736618 - RNA, 19 nt, Artificial Sequence
  Description of Artificial Sequence: Synthetic oligonucleotide
caguucuccucaaucgcga

SEQ ID NO: 1736619 - RNA, 19 nt, Artificial Sequence
  Description of Artificial Sequence: Synthetic oligonucleotide
guucuccucaaucgcgaca

SEQ ID NO: 1736620 - RNA, 19 nt, Artificial Sequence
  Description of Artificial Sequence: Synthetic oligonucleotide
cacaggacuaaaugagcaa

SEQ ID NO: 1736621 - RNA, 19 nt, Artificial Sequence
  Description of Artificial Sequence: Synthetic oligonucleotide
gugacggcugcaccucugc

SEQ ID NO: 1736622 - RNA, 19 nt, Artificial Sequence
  Description of Artificial Sequence: Synthetic oligonucleotide
cuugcucgucacaguauca

SEQ ID NO: 1736623 - RNA, 19 nt, Artificial Sequence
  Description of Artificial Sequence: Synthetic oligonucleotide
uaugagccgcuggacuuga

SEQ ID NO: 1736624 - RNA, 19 nt, Artificial Sequence
  Description of Artificial Sequence: Synthetic oligonucleotide
guuaugagccgcuggacuu

SEQ ID NO: 1736625 - RNA, 19 nt, Artificial Sequence
  Description of Artificial Sequence: Synthetic oligonucleotide
ugaugaugugacggcugca

SEQ ID NO: 1736626 - RNA, 19 nt, Artificial Sequence
  Description of Artificial Sequence: Synthetic oligonucleotide
cuagauccaagaucgucgu

SEQ ID NO: 1736627 - RNA, 19 nt, Artificial Sequence
  Description of Artificial Sequence: Synthetic oligonucleotide
aucgcgacaccagcagcuc

SEQ ID NO: 1736628 - RNA, 19 nt, Artificial Sequence
  Description of Artificial Sequence: Synthetic oligonucleotide
uguucggaagugagauguu

SEQ ID NO: 1736629 - RNA, 19 nt, Artificial Sequence
  Description of Artificial Sequence: Synthetic oligonucleotide
uaucggccugauaguuuac

SEQ ID NO: 1736630 - RNA, 19 nt, Artificial Sequence
  Description of Artificial Sequence: Synthetic oligonucleotide
agagggcugacgaugcuaa

SEQ ID NO: 1736631 - RNA, 19 nt, Artificial Sequence
  Description of Artificial Sequence: Synthetic oligonucleotide
uugcuagauccaagaucgu

SEQ ID NO: 1736632 - RNA, 19 nt, Artificial Sequence
  Description of Artificial Sequence: Synthetic oligonucleotide
aucggccugauaguuuacu

SEQ ID NO: 1736633 - RNA, 19 nt, Artificial Sequence
  Description of Artificial Sequence: Synthetic oligonucleotide
acugugcauuauaacaaua

SEQ ID NO: 1736634 - RNA, 19 nt, Artificial Sequence
  Description of Artificial Sequence: Synthetic oligonucleotide
caucguggcugggaucccg

SEQ ID NO: 1736635 - RNA, 19 nt, Artificial Sequence
  Description of Artificial Sequence: Synthetic oligonucleotide
caguuuuacuuaugucuaa

SEQ ID NO: 1736636 - RNA, 19 nt, Artificial Sequence
  Description of Artificial Sequence: Synthetic oligonucleotide
cuaccucacugaagccaag

SEQ ID NO: 1736637 - RNA, 19 nt, Artificial Sequence
  Description of Artificial Sequence: Synthetic oligonucleotide
ucccaguugcuagauccaa

SEQ ID NO: 1736638 - RNA, 19 nt, Artificial Sequence
  Description of Artificial Sequence: Synthetic oligonucleotide
ccaguuuuacuuaugucua

SEQ ID NO: 1736639 - RNA, 19 nt, Artificial Sequence
  Description of Artificial Sequence: Synthetic oligonucleotide
gagacucccgggcagcacu

SEQ ID NO: 1736640 - RNA, 19 nt, Artificial Sequence
  Description of Artificial Sequence: Synthetic oligonucleotide
gcauuugaaagcaaacacu

SEQ ID NO: 1736641 - RNA, 19 nt, Artificial Sequence
  Description of Artificial Sequence: Synthetic oligonucleotide
caucuggacucucggcauc

SEQ ID NO: 1736642 - RNA, 19 nt, Artificial Sequence
  Description of Artificial Sequence: Synthetic oligonucleotide
gccuaagucugcugcuucc

SEQ ID NO: 1736643 - RNA, 19 nt, Artificial Sequence
  Description of Artificial Sequence: Synthetic oligonucleotide
gugcucuauaagcaguccu

SEQ ID NO: 1736644 - RNA, 19 nt, Artificial Sequence
  Description of Artificial Sequence: Synthetic oligonucleotide
cccauaagucucaagaacu

SEQ ID NO: 1736645 - RNA, 19 nt, Artificial Sequence
  Description of Artificial Sequence: Synthetic oligonucleotide
caaacacucuuuguaguua

SEQ ID NO: 1736646 - RNA, 19 nt, Artificial Sequence
  Description of Artificial Sequence: Synthetic oligonucleotide
ugggaucccgaaggggaca

SEQ ID NO: 1736647 - RNA, 19 nt, Artificial Sequence
  Description of Artificial Sequence: Synthetic oligonucleotide
gaagcugaguacaguauuu

SEQ ID NO: 1736648 - RNA, 19 nt, Artificial Sequence
  Description of Artificial Sequence: Synthetic oligonucleotide
ccucaaucgcgacaccagc

SEQ ID NO: 1736649 - RNA, 19 nt, Artificial Sequence
  Description of Artificial Sequence: Synthetic oligonucleotide
uuccccuguucggaaguga

SEQ ID NO: 1736650 - RNA, 19 nt, Artificial Sequence
  Description of Artificial Sequence: Synthetic oligonucleotide
cggaaaaguguaauccaug

SEQ ID NO: 1736651 - RNA, 19 nt, Artificial Sequence
  Description of Artificial Sequence: Synthetic oligonucleotide
agggcugacgaugcuaaua

SEQ ID NO: 1736652 - RNA, 19 nt, Artificial Sequence
  Description of Artificial Sequence: Synthetic oligonucleotide
cuccucaaucgcgacacca

SEQ ID NO: 1736653 - RNA, 19 nt, Artificial Sequence
  Description of Artificial Sequence: Synthetic oligonucleotide
caucuuauaauugcucuuu

SEQ ID NO: 1736654 - RNA, 19 nt, Artificial Sequence
  Description of Artificial Sequence: Synthetic oligonucleotide
uucaccccgugugggugag

SEQ ID NO: 1736655 - RNA, 19 nt, Artificial Sequence
  Description of Artificial Sequence: Synthetic oligonucleotide
augcccggaaaaguguaau

SEQ ID NO: 1736656 - RNA, 19 nt, Artificial Sequence
  Description of Artificial Sequence: Synthetic oligonucleotide
ccgggcagcacucaucgug

SEQ ID NO: 1736657 - RNA, 19 nt, Artificial Sequence
  Description of Artificial Sequence: Synthetic oligonucleotide
uugccuaagucugcugcuu

SEQ ID NO: 1736658 - RNA, 19 nt, Artificial Sequence
  Description of Artificial Sequence: Synthetic oligonucleotide
gacucucggcauccggcga

SEQ ID NO: 1736659 - RNA, 19 nt, Artificial Sequence
  Description of Artificial Sequence: Synthetic oligonucleotide
caccccgugugggugagac

SEQ ID NO: 1736660 - RNA, 19 nt, Artificial Sequence
  Description of Artificial Sequence: Synthetic oligonucleotide
uacaaaggucugugcucua

SEQ ID NO: 1736661 - RNA, 19 nt, Artificial Sequence
  Description of Artificial Sequence: Synthetic oligonucleotide
caccaguguccugugcuug

SEQ ID NO: 1736662 - RNA, 19 nt, Artificial Sequence
  Description of Artificial Sequence: Synthetic oligonucleotide
agccgcuggacuugacaaa

SEQ ID NO: 1736663 - RNA, 19 nt, Artificial Sequence
  Description of Artificial Sequence: Synthetic oligonucleotide
auccggcgagucaucauca

SEQ ID NO: 1736664 - RNA, 19 nt, Artificial Sequence
  Description of Artificial Sequence: Synthetic oligonucleotide
cggcgagucaucaucauca

SEQ ID NO: 1736665 - RNA, 19 nt, Artificial Sequence
  Description of Artificial Sequence: Synthetic oligonucleotide
cgcaguucuccucaaucgc

SEQ ID NO: 1736666 - RNA, 19 nt, Artificial Sequence
  Description of Artificial Sequence: Synthetic oligonucleotide
caaaggucugugcucuaua

SEQ ID NO: 1736667 - RNA, 19 nt, Artificial Sequence
  Description of Artificial Sequence: Synthetic oligonucleotide
acucgcaguucuccucaau

SEQ ID NO: 1736668 - RNA, 19 nt, Artificial Sequence
  Description of Artificial Sequence: Synthetic oligonucleotide
ugagacucccgggcagcac

SEQ ID NO: 1736669 - RNA, 19 nt, Artificial Sequence
  Description of Artificial Sequence: Synthetic oligonucleotide
caugcccggaaaaguguaa

SEQ ID NO: 1736670 - RNA, 19 nt, Artificial Sequence
  Description of Artificial Sequence: Synthetic oligonucleotide
cccggaaaaguguaaucca

SEQ ID NO: 1736671 - RNA, 19 nt, Artificial Sequence
  Description of Artificial Sequence: Synthetic oligonucleotide
caggacuaaaugagcaaau

SEQ ID NO: 1736672 - RNA, 19 nt, Artificial Sequence
  Description of Artificial Sequence: Synthetic oligonucleotide
cuauaacaagacgaccagu

SEQ ID NO: 1736673 - RNA, 19 nt, Artificial Sequence
  Description of Artificial Sequence: Synthetic oligonucleotide
cuucaccccguguggguga

SEQ ID NO: 1736674 - RNA, 19 nt, Artificial Sequence
  Description of Artificial Sequence: Synthetic oligonucleotide
uccggcgagucaucaucau

SEQ ID NO: 1736675 - RNA, 19 nt, Artificial Sequence
  Description of Artificial Sequence: Synthetic oligonucleotide
gggugaaaaggugguaaga

SEQ ID NO: 1736676 - RNA, 19 nt, Artificial Sequence
  Description of Artificial Sequence: Synthetic oligonucleotide
cacugugcauuauaacaau

SEQ ID NO: 1736677 - RNA, 19 nt, Artificial Sequence
  Description of Artificial Sequence: Synthetic oligonucleotide
agcacucaucguggcuggg

SEQ ID NO: 1736678 - RNA, 19 nt, Artificial Sequence
  Description of Artificial Sequence: Synthetic oligonucleotide
ccacaagcaaaguaagugu

SEQ ID NO: 1736679 - RNA, 19 nt, Artificial Sequence
  Description of Artificial Sequence: Synthetic oligonucleotide
gccgcuggacuugacaaac

SEQ ID NO: 1736680 - RNA, 19 nt, Artificial Sequence
  Description of Artificial Sequence: Synthetic oligonucleotide
uaauugcucuuugcaucuu

SEQ ID NO: 1736681 - RNA, 19 nt, Artificial Sequence
  Description of Artificial Sequence: Synthetic oligonucleotide
acaagacgaccaguguguu

SEQ ID NO: 1736682 - RNA, 19 nt, Artificial Sequence
  Description of Artificial Sequence: Synthetic oligonucleotide
ggugagacucccgggcagc

SEQ ID NO: 1736683 - RNA, 19 nt, Artificial Sequence
  Description of Artificial Sequence: Synthetic oligonucleotide
ccccgugugggugagacuc

SEQ ID NO: 1736684 - RNA, 19 nt, Artificial Sequence
  Description of Artificial Sequence: Synthetic oligonucleotide
gguuauagucaugcccgga

SEQ ID NO: 1736685 - RNA, 19 nt, Artificial Sequence
  Description of Artificial Sequence: Synthetic oligonucleotide
cagugccgccgguaucggc

SEQ ID NO: 1736686 - RNA, 19 nt, Artificial Sequence
  Description of Artificial Sequence: Synthetic oligonucleotide
gcuggacuugacaaacauc

SEQ ID NO: 1736687 - RNA, 19 nt, Artificial Sequence
  Description of Artificial Sequence: Synthetic oligonucleotide
gggaucccgaaggggacag

SEQ ID NO: 1736688 - RNA, 19 nt, Artificial Sequence
  Description of Artificial Sequence: Synthetic oligonucleotide
ccuguucggaagugagaug

SEQ ID NO: 1736689 - RNA, 19 nt, Artificial Sequence
  Description of Artificial Sequence: Synthetic oligonucleotide
aucccgaaggggacaggcu

SEQ ID NO: 1736690 - RNA, 19 nt, Artificial Sequence
  Description of Artificial Sequence: Synthetic oligonucleotide
caguagcauggaguucuuc

SEQ ID NO: 1736691 - RNA, 19 nt, Artificial Sequence
  Description of Artificial Sequence: Synthetic oligonucleotide
cugauaguuuacuguccau

SEQ ID NO: 1736692 - RNA, 19 nt, Artificial Sequence
  Description of Artificial Sequence: Synthetic oligonucleotide
aucguggcugggaucccga

SEQ ID NO: 1736693 - RNA, 19 nt, Artificial Sequence
  Description of Artificial Sequence: Synthetic oligonucleotide
cgaugcuaauaugaaagga

SEQ ID NO: 1736694 - RNA, 19 nt, Artificial Sequence
  Description of Artificial Sequence: Synthetic oligonucleotide
gcugaguacaguauuuauu

SEQ ID NO: 1736695 - RNA, 19 nt, Artificial Sequence
  Description of Artificial Sequence: Synthetic oligonucleotide
gcugaacacacucgcaguu

SEQ ID NO: 1736696 - RNA, 19 nt, Artificial Sequence
  Description of Artificial Sequence: Synthetic oligonucleotide
accccgugugggugagacu

SEQ ID NO: 1736697 - RNA, 19 nt, Artificial Sequence
  Description of Artificial Sequence: Synthetic oligonucleotide
cacucaucguggcugggau

SEQ ID NO: 1736698 - RNA, 19 nt, Artificial Sequence
  Description of Artificial Sequence: Synthetic oligonucleotide
ugccgccgguaucggccug

SEQ ID NO: 1736699 - RNA, 19 nt, Artificial Sequence
  Description of Artificial Sequence: Synthetic oligonucleotide
agacgaccaguguguucuu

SEQ ID NO: 1736700 - RNA, 19 nt, Artificial Sequence
  Description of Artificial Sequence: Synthetic oligonucleotide
gcucgucacaguaucaaau

SEQ ID NO: 1736701 - RNA, 19 nt, Artificial Sequence
  Description of Artificial Sequence: Synthetic oligonucleotide
ccggcgagucaucaucauc

SEQ ID NO: 1736702 - RNA, 19 nt, Artificial Sequence
  Description of Artificial Sequence: Synthetic oligonucleotide
cccgugugggugagacucc

SEQ ID NO: 1736703 - RNA, 19 nt, Artificial Sequence
  Description of Artificial Sequence: Synthetic oligonucleotide
gacucccgggcagcacuca

SEQ ID NO: 1736704 - RNA, 19 nt, Artificial Sequence
  Description of Artificial Sequence: Synthetic oligonucleotide
ccggaaaaguguaauccau

SEQ ID NO: 1736705 - RNA, 19 nt, Artificial Sequence
  Description of Artificial Sequence: Synthetic oligonucleotide
ggaucccgaaggggacagg

SEQ ID NO: 1736706 - RNA, 19 nt, Artificial Sequence
  Description of Artificial Sequence: Synthetic oligonucleotide
ggcauccggcgagucauca

SEQ ID NO: 1736707 - RNA, 19 nt, Artificial Sequence
  Description of Artificial Sequence: Synthetic oligonucleotide
gcaggggugaaaagguggu

SEQ ID NO: 1736708 - RNA, 19 nt, Artificial Sequence
  Description of Artificial Sequence: Synthetic oligonucleotide
cccgaaggggacaggcuga

SEQ ID NO: 1736709 - RNA, 19 nt, Artificial Sequence
  Description of Artificial Sequence: Synthetic oligonucleotide
ccgugugggugagacuccc

SEQ ID NO: 1736710 - RNA, 19 nt, Artificial Sequence
  Description of Artificial Sequence: Synthetic oligonucleotide
augcaucugcaggggugaa

SEQ ID NO: 1736711 - RNA, 19 nt, Artificial Sequence
  Description of Artificial Sequence: Synthetic oligonucleotide
cacucgcaguucuccucaa

SEQ ID NO: 1736712 - RNA, 19 nt, Artificial Sequence
  Description of Artificial Sequence: Synthetic oligonucleotide
gagggcugacgaugcuaau

SEQ ID NO: 1736713 - RNA, 19 nt, Artificial Sequence
  Description of Artificial Sequence: Synthetic oligonucleotide
caggggugaaaagguggua

SEQ ID NO: 1736714 - RNA, 19 nt, Artificial Sequence
  Description of Artificial Sequence: Synthetic oligonucleotide
cccuguucggaagugagau

SEQ ID NO: 1736715 - RNA, 19 nt, Artificial Sequence
  Description of Artificial Sequence: Synthetic oligonucleotide
ucaccccgugugggugaga

SEQ ID NO: 1736716 - RNA, 19 nt, Artificial Sequence
  Description of Artificial Sequence: Synthetic oligonucleotide
ggcgagucaucaucaucau

SEQ ID NO: 1736717 - RNA, 19 nt, Artificial Sequence
  Description of Artificial Sequence: Synthetic oligonucleotide
gguaucggccugauaguuu

SEQ ID NO: 1736718 - RNA, 19 nt, Artificial Sequence
  Description of Artificial Sequence: Synthetic oligonucleotide
guccacagugccgccggua

SEQ ID NO: 1736719 - RNA, 19 nt, Artificial Sequence
  Description of Artificial Sequence: Synthetic oligonucleotide
gacgaccaguguguucuuu

SEQ ID NO: 1736720 - RNA, 19 nt, Artificial Sequence
  Description of Artificial Sequence: Synthetic oligonucleotide
ccgcuggacuugacaaaca

SEQ ID NO: 1736721 - RNA, 19 nt, Artificial Sequence
  Description of Artificial Sequence: Synthetic oligonucleotide
cugcacccauaagucucaa

SEQ ID NO: 1736722 - RNA, 19 nt, Artificial Sequence
  Description of Artificial Sequence: Synthetic oligonucleotide
ccgguaucggccugauagu

SEQ ID NO: 1736723 - RNA, 19 nt, Artificial Sequence
  Description of Artificial Sequence: Synthetic oligonucleotide
gcauccggcgagucaucau

SEQ ID NO: 1736724 - RNA, 19 nt, Artificial Sequence
  Description of Artificial Sequence: Synthetic oligonucleotide
cgcuggacuugacaaacau

SEQ ID NO: 1736725 - RNA, 19 nt, Artificial Sequence
  Description of Artificial Sequence: Synthetic oligonucleotide
gccgccgguaucggccuga

SEQ ID NO: 1736726 - RNA, 19 nt, Artificial Sequence
  Description of Artificial Sequence: Synthetic oligonucleotide
cgaaggggacaggcugaac

SEQ ID NO: 1736727 - RNA, 19 nt, Artificial Sequence
  Description of Artificial Sequence: Synthetic oligonucleotide
ccgaaggggacaggcugaa

SEQ ID NO: 1736728 - RNA, 19 nt, Artificial Sequence
  Description of Artificial Sequence: Synthetic oligonucleotide
gcugaacgcuucaccccgu

SEQ ID NO: 1736729 - RNA, 19 nt, Artificial Sequence
  Description of Artificial Sequence: Synthetic oligonucleotide
guccuccacugugcauuau

SEQ ID NO: 1736730 - RNA, 19 nt, Artificial Sequence
  Description of Artificial Sequence: Synthetic oligonucleotide
cggcauccggcgagucauc

SEQ ID NO: 1736731 - RNA, 19 nt, Artificial Sequence
  Description of Artificial Sequence: Synthetic oligonucleotide
cgguaucggccugauaguu

SEQ ID NO: 1736732 - RNA, 19 nt, Artificial Sequence
  Description of Artificial Sequence: Synthetic oligonucleotide
cccgggcagcacucaucgu

SEQ ID NO: 1736733 - RNA, 19 nt, Artificial Sequence
  Description of Artificial Sequence: Synthetic oligonucleotide
cgccgguaucggccugaua

SEQ ID NO: 1736734 - RNA, 19 nt, Artificial Sequence
  Description of Artificial Sequence: Synthetic oligonucleotide
ccgccgguaucggccugau

SEQ ID NO: 1736735 - RNA, 19 nt, Artificial Sequence
  Description of Artificial Sequence: Synthetic oligonucleotide
  modified_base (6)..(6): a, c, u, g, unknown or other
aaacanaaagguuuuaagg

SEQ ID NO: 1736736 - RNA, 19 nt, Artificial Sequence
  Description of Artificial Sequence: Synthetic oligonucleotide
  modified_base (5)..(5): a, c, u, g, unknown or other
aacanaaagguuuuaagga

SEQ ID NO: 1736737 - RNA, 19 nt, Artificial Sequence
  Description of Artificial Sequence: Synthetic oligonucleotide
uguaucauaucccagaaug

SEQ ID NO: 1736738 - RNA, 19 nt, Artificial Sequence
  Description of Artificial Sequence: Synthetic oligonucleotide
aauguagucaucuuucaga

SEQ ID NO: 1736739 - RNA, 19 nt, Artificial Sequence
  Description of Artificial Sequence: Synthetic oligonucleotide
ucaucauauaccuuucugg

SEQ ID NO: 1736740 - RNA, 19 nt, Artificial Sequence
  Description of Artificial Sequence: Synthetic oligonucleotide
uuuacauuggagaaguaga

SEQ ID NO: 1736741 - RNA, 19 nt, Artificial Sequence
  Description of Artificial Sequence: Synthetic oligonucleotide
uugucguuaaauaucuugg

SEQ ID NO: 1736742 - RNA, 19 nt, Artificial Sequence
  Description of Artificial Sequence: Synthetic oligonucleotide
auuguuauuucuaaggcac

SEQ ID NO: 1736743 - RNA, 19 nt, Artificial Sequence
  Description of Artificial Sequence: Synthetic oligonucleotide
  modified_base (18)..(18): a, c, u, g, unknown or other
aaaggaguguguaagagng

SEQ ID NO: 1736744 - RNA, 19 nt, Artificial Sequence
  Description of Artificial Sequence: Synthetic oligonucleotide
ucuucaaagaccugggucc

SEQ ID NO: 1736745 - RNA, 19 nt, Artificial Sequence
  Description of Artificial Sequence: Synthetic oligonucleotide
uuauagucuucaaagaccu

SEQ ID NO: 1736746 - RNA, 19 nt, Artificial Sequence
  Description of Artificial Sequence: Synthetic oligonucleotide
uuugucguuaaauaucuug

SEQ ID NO: 1736747 - RNA, 19 nt, Artificial Sequence
  Description of Artificial Sequence: Synthetic oligonucleotide
cuugaguagacucauagug

SEQ ID NO: 1736748 - RNA, 19 nt, Artificial Sequence
  Description of Artificial Sequence: Synthetic oligonucleotide
aaagcauaauccucaaucu

SEQ ID NO: 1736749 - RNA, 19 nt, Artificial Sequence
  Description of Artificial Sequence: Synthetic oligonucleotide
  modified_base (15)..(15): a, c, u, g, unknown or other
gaggucagcaaacanaaag

SEQ ID NO: 1736750 - RNA, 19 nt, Artificial Sequence
  Description of Artificial Sequence: Synthetic oligonucleotide
uugaguagacucauagugg

SEQ ID NO: 1736751 - RNA, 19 nt, Artificial Sequence
  Description of Artificial Sequence: Synthetic oligonucleotide
ucuaguauuucuucaaugu

SEQ ID NO: 1736752 - RNA, 19 nt, Artificial Sequence
  Description of Artificial Sequence: Synthetic oligonucleotide
  modified_base (7)..(7): a, c, u, g, unknown or other
caaacanaaagguuuuaag

SEQ ID NO: 1736753 - RNA, 19 nt, Artificial Sequence
  Description of Artificial Sequence: Synthetic oligonucleotide
aacucucucauggagcucc

SEQ ID NO: 1736754 - RNA, 19 nt, Artificial Sequence
  Description of Artificial Sequence: Synthetic oligonucleotide
aacagacccaaguagucuc

SEQ ID NO: 1736755 - RNA, 19 nt, Artificial Sequence
  Description of Artificial Sequence: Synthetic oligonucleotide
caaagcauaauccucaauc

SEQ ID NO: 1736756 - RNA, 19 nt, Artificial Sequence
  Description of Artificial Sequence: Synthetic oligonucleotide
gagcaaugaagucugagag

SEQ ID NO: 1736757 - RNA, 19 nt, Artificial Sequence
  Description of Artificial Sequence: Synthetic oligonucleotide
aaugaagucugagaggcag

SEQ ID NO: 1736758 - RNA, 19 nt, Artificial Sequence
  Description of Artificial Sequence: Synthetic oligonucleotide
ucguuaaauaucuugggga

SEQ ID NO: 1736759 - RNA, 19 nt, Artificial Sequence
  Description of Artificial Sequence: Synthetic oligonucleotide
uuacauuggagaaguagag

SEQ ID NO: 1736760 - RNA, 19 nt, Artificial Sequence
  Description of Artificial Sequence: Synthetic oligonucleotide
uaucauaucccagaauggg

SEQ ID NO: 1736761 - RNA, 19 nt, Artificial Sequence
  Description of Artificial Sequence: Synthetic oligonucleotide
uguuuugucguuaaauauc

SEQ ID NO: 1736762 - RNA, 19 nt, Artificial Sequence
  Description of Artificial Sequence: Synthetic oligonucleotide
ucggcgaacucucucaugg

SEQ ID NO: 1736763 - RNA, 19 nt, Artificial Sequence
  Description of Artificial Sequence: Synthetic oligonucleotide
ucauaucccagaauggggc

SEQ ID NO: 1736764 - RNA, 19 nt, Artificial Sequence
  Description of Artificial Sequence: Synthetic oligonucleotide
uggauuguaccccuugagg

SEQ ID NO: 1736765 - RNA, 19 nt, Artificial Sequence
  Description of Artificial Sequence: Synthetic oligonucleotide
aauguagucuaccagcuuu

SEQ ID NO: 1736766 - RNA, 19 nt, Artificial Sequence
  Description of Artificial Sequence: Synthetic oligonucleotide
uccuugaguagacucauag

SEQ ID NO: 1736767 - RNA, 19 nt, Artificial Sequence
  Description of Artificial Sequence: Synthetic oligonucleotide
aaagguuuccagucaaugu

SEQ ID NO: 1736768 - RNA, 19 nt, Artificial Sequence
  Description of Artificial Sequence: Synthetic oligonucleotide
gaagccucgauuuggauac

SEQ ID NO: 1736769 - RNA, 19 nt, Artificial Sequence
  Description of Artificial Sequence: Synthetic oligonucleotide
caucauauaccuuucuggc

SEQ ID NO: 1736770 - RNA, 19 nt, Artificial Sequence
  Description of Artificial Sequence: Synthetic oligonucleotide
aucgccaucauccucguag

SEQ ID NO: 1736771 - RNA, 19 nt, Artificial Sequence
  Description of Artificial Sequence: Synthetic oligonucleotide
aguauauucaacauauucu

SEQ ID NO: 1736772 - RNA, 19 nt, Artificial Sequence
  Description of Artificial Sequence: Synthetic oligonucleotide
aacagcugagaacacacca

SEQ ID NO: 1736773 - RNA, 19 nt, Artificial Sequence
  Description of Artificial Sequence: Synthetic oligonucleotide
ugugacacccaacagcuca

SEQ ID NO: 1736774 - RNA, 19 nt, Artificial Sequence
  Description of Artificial Sequence: Synthetic oligonucleotide
uauuucuaaggcacucugg

SEQ ID NO: 1736775 - RNA, 19 nt, Artificial Sequence
  Description of Artificial Sequence: Synthetic oligonucleotide
acagcaaaauauuuggacu

SEQ ID NO: 1736776 - RNA, 19 nt, Artificial Sequence
  Description of Artificial Sequence: Synthetic oligonucleotide
cuuacucaguucuucaacc

SEQ ID NO: 1736777 - RNA, 19 nt, Artificial Sequence
  Description of Artificial Sequence: Synthetic oligonucleotide
aaagcaggcaacagcaaac

SEQ ID NO: 1736778 - RNA, 19 nt, Artificial Sequence
  Description of Artificial Sequence: Synthetic oligonucleotide
ugucguuaaauaucuuggg

SEQ ID NO: 1736779 - RNA, 19 nt, Artificial Sequence
  Description of Artificial Sequence: Synthetic oligonucleotide
aaagaaagguuuccaguca

SEQ ID NO: 1736780 - RNA, 19 nt, Artificial Sequence
  Description of Artificial Sequence: Synthetic oligonucleotide
auauaaguggauaucaucu

SEQ ID NO: 1736781 - RNA, 19 nt, Artificial Sequence
  Description of Artificial Sequence: Synthetic oligonucleotide
cucaguauggucaggcugg

SEQ ID NO: 1736782 - RNA, 19 nt, Artificial Sequence
  Description of Artificial Sequence: Synthetic oligonucleotide
auacuugccacggagcugc

SEQ ID NO: 1736783 - RNA, 19 nt, Artificial Sequence
  Description of Artificial Sequence: Synthetic oligonucleotide
agcaaacagacccaaguag

SEQ ID NO: 1736784 - RNA, 19 nt, Artificial Sequence
  Description of Artificial Sequence: Synthetic oligonucleotide
gucguuaaauaucuugggg

SEQ ID NO: 1736785 - RNA, 19 nt, Artificial Sequence
  Description of Artificial Sequence: Synthetic oligonucleotide
  modified_base (4)..(4): a, c, u, g, unknown or other
acanaaagguuuuaaggaa

SEQ ID NO: 1736786 - RNA, 19 nt, Artificial Sequence
  Description of Artificial Sequence: Synthetic oligonucleotide
ugcaguggagcaaugaagu

SEQ ID NO: 1736787 - RNA, 19 nt, Artificial Sequence
  Description of Artificial Sequence: Synthetic oligonucleotide
ucgauuuggauacuugcca

SEQ ID NO: 1736788 - RNA, 19 nt, Artificial Sequence
  Description of Artificial Sequence: Synthetic oligonucleotide
aagcauaauccucaaucug

SEQ ID NO: 1736789 - RNA, 19 nt, Artificial Sequence
  Description of Artificial Sequence: Synthetic oligonucleotide
  modified_base (17)..(17): a, c, u, g, unknown or other
uugaggucagcaaacanaa

SEQ ID NO: 1736790 - RNA, 19 nt, Artificial Sequence
  Description of Artificial Sequence: Synthetic oligonucleotide
gauuuggauacuugccacg

SEQ ID NO: 1736791 - RNA, 19 nt, Artificial Sequence
  Description of Artificial Sequence: Synthetic oligonucleotide
aguauggucaggcuggcug

SEQ ID NO: 1736792 - RNA, 19 nt, Artificial Sequence
  Description of Artificial Sequence: Synthetic oligonucleotide
ucuaaggcacucuggauug

SEQ ID NO: 1736793 - RNA, 19 nt, Artificial Sequence
  Description of Artificial Sequence: Synthetic oligonucleotide
caguauauucaacauauuc

SEQ ID NO: 1736794 - RNA, 19 nt, Artificial Sequence
  Description of Artificial Sequence: Synthetic oligonucleotide
uugacuuaucaguauauuc

SEQ ID NO: 1736795 - RNA, 19 nt, Artificial Sequence
  Description of Artificial Sequence: Synthetic oligonucleotide
ucaucuaacagcugagaac

SEQ ID NO: 1736796 - RNA, 19 nt, Artificial Sequence
  Description of Artificial Sequence: Synthetic oligonucleotide
aguggauaucaucuuggac

SEQ ID NO: 1736797 - RNA, 19 nt, Artificial Sequence
  Description of Artificial Sequence: Synthetic oligonucleotide
uucuaguauuucuucaaug

SEQ ID NO: 1736798 - RNA, 19 nt, Artificial Sequence
  Description of Artificial Sequence: Synthetic oligonucleotide
uuucuggcuugacuuaggg

SEQ ID NO: 1736799 - RNA, 19 nt, Artificial Sequence
  Description of Artificial Sequence: Synthetic oligonucleotide
ugaguagacucauaguggu

SEQ ID NO: 1736800 - RNA, 19 nt, Artificial Sequence
  Description of Artificial Sequence: Synthetic oligonucleotide
ugcauauaaguggauauca

SEQ ID NO: 1736801 - RNA, 19 nt, Artificial Sequence
  Description of Artificial Sequence: Synthetic oligonucleotide
aaugcaguggagcaaugaa

SEQ ID NO: 1736802 - RNA, 19 nt, Artificial Sequence
  Description of Artificial Sequence: Synthetic oligonucleotide
cauauaaguggauaucauc

SEQ ID NO: 1736803 - RNA, 19 nt, Artificial Sequence
  Description of Artificial Sequence: Synthetic oligonucleotide
ucugcauauaaguggauau

SEQ ID NO: 1736804 - RNA, 19 nt, Artificial Sequence
  Description of Artificial Sequence: Synthetic oligonucleotide
agauuuucaucuaacagcu

SEQ ID NO: 1736805 - RNA, 19 nt, Artificial Sequence
  Description of Artificial Sequence: Synthetic oligonucleotide
uggacuuuacauuggagaa

SEQ ID NO: 1736806 - RNA, 19 nt, Artificial Sequence
  Description of Artificial Sequence: Synthetic oligonucleotide
uuuggacuuuacauuggag

SEQ ID NO: 1736807 - RNA, 19 nt, Artificial Sequence
  Description of Artificial Sequence: Synthetic oligonucleotide
guaaccaggagcuggccgg

SEQ ID NO: 1736808 - RNA, 19 nt, Artificial Sequence
  Description of Artificial Sequence: Synthetic oligonucleotide
aauguuggccagucuccac

SEQ ID NO: 1736809 - RNA, 19 nt, Artificial Sequence
  Description of Artificial Sequence: Synthetic oligonucleotide
cucacuacuacaguaggcc

SEQ ID NO: 1736810 - RNA, 19 nt, Artificial Sequence
  Description of Artificial Sequence: Synthetic oligonucleotide
uggauaucaucuuggacac

SEQ ID NO: 1736811 - RNA, 19 nt, Artificial Sequence
  Description of Artificial Sequence: Synthetic oligonucleotide
uccucugcauauaagugga

SEQ ID NO: 1736812 - RNA, 19 nt, Artificial Sequence
  Description of Artificial Sequence: Synthetic oligonucleotide
acacccaacagcucacuac

SEQ ID NO: 1736813 - RNA, 19 nt, Artificial Sequence
  Description of Artificial Sequence: Synthetic oligonucleotide
aaguagagacccgauacug

SEQ ID NO: 1736814 - RNA, 19 nt, Artificial Sequence
  Description of Artificial Sequence: Synthetic oligonucleotide
uucuaaggcacucuggauu

SEQ ID NO: 1736815 - RNA, 19 nt, Artificial Sequence
  Description of Artificial Sequence: Synthetic oligonucleotide
uugacuuagggguaaguau

SEQ ID NO: 1736816 - RNA, 19 nt, Artificial Sequence
  Description of Artificial Sequence: Synthetic oligonucleotide
agugguaggggucuguacu

SEQ ID NO: 1736817 - RNA, 19 nt, Artificial Sequence
  Description of Artificial Sequence: Synthetic oligonucleotide
uacucaguucuucaacccc

SEQ ID NO: 1736818 - RNA, 19 nt, Artificial Sequence
  Description of Artificial Sequence: Synthetic oligonucleotide
uuacucaguucuucaaccc

SEQ ID NO: 1736819 - RNA, 19 nt, Artificial Sequence
  Description of Artificial Sequence: Synthetic oligonucleotide
guuuucgcaagucugugac

SEQ ID NO: 1736820 - RNA, 19 nt, Artificial Sequence
  Description of Artificial Sequence: Synthetic oligonucleotide
aagaaagguuuccagucaa

SEQ ID NO: 1736821 - RNA, 19 nt, Artificial Sequence
  Description of Artificial Sequence: Synthetic oligonucleotide
gucuaauaucuucauauuc

SEQ ID NO: 1736822 - RNA, 19 nt, Artificial Sequence
  Description of Artificial Sequence: Synthetic oligonucleotide
ugacuuagggguaaguauu

SEQ ID NO: 1736823 - RNA, 19 nt, Artificial Sequence
  Description of Artificial Sequence: Synthetic oligonucleotide
aauggggccaagccaucuc

SEQ ID NO: 1736824 - RNA, 19 nt, Artificial Sequence
  Description of Artificial Sequence: Synthetic oligonucleotide
ucuaccagcuuuugcaggu

SEQ ID NO: 1736825 - RNA, 19 nt, Artificial Sequence
  Description of Artificial Sequence: Synthetic oligonucleotide
uugccaaggauucugucaa

SEQ ID NO: 1736826 - RNA, 19 nt, Artificial Sequence
  Description of Artificial Sequence: Synthetic oligonucleotide
cauuggagaaguagagacc

SEQ ID NO: 1736827 - RNA, 19 nt, Artificial Sequence
  Description of Artificial Sequence: Synthetic oligonucleotide
uuuucuggcuugacuuagg

SEQ ID NO: 1736828 - RNA, 19 nt, Artificial Sequence
  Description of Artificial Sequence: Synthetic oligonucleotide
auccucguaggccuuacuc

SEQ ID NO: 1736829 - RNA, 19 nt, Artificial Sequence
  Description of Artificial Sequence: Synthetic oligonucleotide
  modified_base (2)..(2): a, c, u, g, unknown or other
anaaagguuuuaaggaaaa

SEQ ID NO: 1736830 - RNA, 19 nt, Artificial Sequence
  Description of Artificial Sequence: Synthetic oligonucleotide
caaucugauccuuggaaac

SEQ ID NO: 1736831 - RNA, 19 nt, Artificial Sequence
  Description of Artificial Sequence: Synthetic oligonucleotide
agugguccugucuaauauc

SEQ ID NO: 1736832 - RNA, 19 nt, Artificial Sequence
  Description of Artificial Sequence: Synthetic oligonucleotide
uggccagaauccaaccacg

SEQ ID NO: 1736833 - RNA, 19 nt, Artificial Sequence
  Description of Artificial Sequence: Synthetic oligonucleotide
aguagagacccgauacugc

SEQ ID NO: 1736834 - RNA, 19 nt, Artificial Sequence
  Description of Artificial Sequence: Synthetic oligonucleotide
aaguggauaucaucuugga

SEQ ID NO: 1736835 - RNA, 19 nt, Artificial Sequence
  Description of Artificial Sequence: Synthetic oligonucleotide
agucucggacaccagaaug

SEQ ID NO: 1736836 - RNA, 19 nt, Artificial Sequence
  Description of Artificial Sequence: Synthetic oligonucleotide
auguagucaucuuucagau

SEQ ID NO: 1736837 - RNA, 19 nt, Artificial Sequence
  Description of Artificial Sequence: Synthetic oligonucleotide
agggguaaguauuuucucu

SEQ ID NO: 1736838 - RNA, 19 nt, Artificial Sequence
  Description of Artificial Sequence: Synthetic oligonucleotide
aagucagucuguaucauau

SEQ ID NO: 1736839 - RNA, 19 nt, Artificial Sequence
  Description of Artificial Sequence: Synthetic oligonucleotide
accuuucuggcuucuuuac

SEQ ID NO: 1736840 - RNA, 19 nt, Artificial Sequence
  Description of Artificial Sequence: Synthetic oligonucleotide
agaaaaggaguguguaaga

SEQ ID NO: 1736841 - RNA, 19 nt, Artificial Sequence
  Description of Artificial Sequence: Synthetic oligonucleotide
ucacuacuacaguaggccc

SEQ ID NO: 1736842 - RNA, 19 nt, Artificial Sequence
  Description of Artificial Sequence: Synthetic oligonucleotide
cauagaagguggcuauggg

SEQ ID NO: 1736843 - RNA, 19 nt, Artificial Sequence
  Description of Artificial Sequence: Synthetic oligonucleotide
cuuagggguaaguauuuuc

SEQ ID NO: 1736844 - RNA, 19 nt, Artificial Sequence
  Description of Artificial Sequence: Synthetic oligonucleotide
aucauaucccagaaugggg

SEQ ID NO: 1736845 - RNA, 19 nt, Artificial Sequence
  Description of Artificial Sequence: Synthetic oligonucleotide
aucauauaccuuucuggcu

SEQ ID NO: 1736846 - RNA, 19 nt, Artificial Sequence
  Description of Artificial Sequence: Synthetic oligonucleotide
ugggguaaccaggagcugg

SEQ ID NO: 1736847 - RNA, 19 nt, Artificial Sequence
  Description of Artificial Sequence: Synthetic oligonucleotide
uggcuaugggcuccgaagc

SEQ ID NO: 1736848 - RNA, 19 nt, Artificial Sequence
  Description of Artificial Sequence: Synthetic oligonucleotide
agcauaauccucaaucuga

SEQ ID NO: 1736849 - RNA, 19 nt, Artificial Sequence
  Description of Artificial Sequence: Synthetic oligonucleotide
  modified_base (18)..(18): a, c, u, g, unknown or other
cuugaggucagcaaacana

SEQ ID NO: 1736850 - RNA, 19 nt, Artificial Sequence
  Description of Artificial Sequence: Synthetic oligonucleotide
acaguaggcccacaguucu

SEQ ID NO: 1736851 - RNA, 19 nt, Artificial Sequence
  Description of Artificial Sequence: Synthetic oligonucleotide
ucuaacagcugagaacaca

SEQ ID NO: 1736852 - RNA, 19 nt, Artificial Sequence
  Description of Artificial Sequence: Synthetic oligonucleotide
guauggucaggcuggcugg

SEQ ID NO: 1736853 - RNA, 19 nt, Artificial Sequence
  Description of Artificial Sequence: Synthetic oligonucleotide
uggugagcuucucaguaug

SEQ ID NO: 1736854 - RNA, 19 nt, Artificial Sequence
  Description of Artificial Sequence: Synthetic oligonucleotide
caaggauucugucaaccug

SEQ ID NO: 1736855 - RNA, 19 nt, Artificial Sequence
  Description of Artificial Sequence: Synthetic oligonucleotide
  modified_base (3)..(3): a, c, u, g, unknown or other
canaaagguuuuaaggaaa

SEQ ID NO: 1736856 - RNA, 19 nt, Artificial Sequence
  Description of Artificial Sequence: Synthetic oligonucleotide
uccucguaggccuuacuca

SEQ ID NO: 1736857 - RNA, 19 nt, Artificial Sequence
  Description of Artificial Sequence: Synthetic oligonucleotide
gcuuuugcagguuauaguc

SEQ ID NO: 1736858 - RNA, 19 nt, Artificial Sequence
  Description of Artificial Sequence: Synthetic oligonucleotide
guggcuaugggcuccgaag

SEQ ID NO: 1736859 - RNA, 19 nt, Artificial Sequence
  Description of Artificial Sequence: Synthetic oligonucleotide
uguacuggaagaguccuuc

SEQ ID NO: 1736860 - RNA, 19 nt, Artificial Sequence
  Description of Artificial Sequence: Synthetic oligonucleotide
uuggaugcauccaggacau

SEQ ID NO: 1736861 - RNA, 19 nt, Artificial Sequence
  Description of Artificial Sequence: Synthetic oligonucleotide
aggcccacaguucucggcg

SEQ ID NO: 1736862 - RNA, 19 nt, Artificial Sequence
  Description of Artificial Sequence: Synthetic oligonucleotide
uguuauuucuaaggcacuc

SEQ ID NO: 1736863 - RNA, 19 nt, Artificial Sequence
  Description of Artificial Sequence: Synthetic oligonucleotide
guuaaauaucuuggggaag

SEQ ID NO: 1736864 - RNA, 19 nt, Artificial Sequence
  Description of Artificial Sequence: Synthetic oligonucleotide
ucauaccggaguuuucgca

SEQ ID NO: 1736865 - RNA, 19 nt, Artificial Sequence
  Description of Artificial Sequence: Synthetic oligonucleotide
uacuguuuugucguuaaau

SEQ ID NO: 1736866 - RNA, 19 nt, Artificial Sequence
  Description of Artificial Sequence: Synthetic oligonucleotide
agcuuuugcagguuauagu

SEQ ID NO: 1736867 - RNA, 19 nt, Artificial Sequence
  Description of Artificial Sequence: Synthetic oligonucleotide
cuugccacggagcugccag

SEQ ID NO: 1736868 - RNA, 19 nt, Artificial Sequence
  Description of Artificial Sequence: Synthetic oligonucleotide
gucuguaucauaucccaga

SEQ ID NO: 1736869 - RNA, 19 nt, Artificial Sequence
  Description of Artificial Sequence: Synthetic oligonucleotide
uuccagucaauguagucua

SEQ ID NO: 1736870 - RNA, 19 nt, Artificial Sequence
  Description of Artificial Sequence: Synthetic oligonucleotide
cauaucccagaauggggcc

SEQ ID NO: 1736871 - RNA, 19 nt, Artificial Sequence
  Description of Artificial Sequence: Synthetic oligonucleotide
  modified_base (16)..(16): a, c, u, g, unknown or other
aggaguguguaagagngaa

SEQ ID NO: 1736872 - RNA, 19 nt, Artificial Sequence
  Description of Artificial Sequence: Synthetic oligonucleotide
cuucucaguauggucaggc

SEQ ID NO: 1736873 - RNA, 19 nt, Artificial Sequence
  Description of Artificial Sequence: Synthetic oligonucleotide
gacccaaguagucucggac

SEQ ID NO: 1736874 - RNA, 19 nt, Artificial Sequence
  Description of Artificial Sequence: Synthetic oligonucleotide
uagugguccugucuaauau

SEQ ID NO: 1736875 - RNA, 19 nt, Artificial Sequence
  Description of Artificial Sequence: Synthetic oligonucleotide
cugucuaauaucuucauau

SEQ ID NO: 1736876 - RNA, 19 nt, Artificial Sequence
  Description of Artificial Sequence: Synthetic oligonucleotide
aguaggcccacaguucucg

SEQ ID NO: 1736877 - RNA, 19 nt, Artificial Sequence
  Description of Artificial Sequence: Synthetic oligonucleotide
aaccugaugccuguggccu

SEQ ID NO: 1736878 - RNA, 19 nt, Artificial Sequence
  Description of Artificial Sequence: Synthetic oligonucleotide
uacauuggagaaguagaga

SEQ ID NO: 1736879 - RNA, 19 nt, Artificial Sequence
  Description of Artificial Sequence: Synthetic oligonucleotide
ucuguacuggaagaguccu

SEQ ID NO: 1736880 - RNA, 19 nt, Artificial Sequence
  Description of Artificial Sequence: Synthetic oligonucleotide
ggaugcauccaggacaugg

SEQ ID NO: 1736881 - RNA, 19 nt, Artificial Sequence
  Description of Artificial Sequence: Synthetic oligonucleotide
ugucuaauaucuucauauu

SEQ ID NO: 1736882 - RNA, 19 nt, Artificial Sequence
  Description of Artificial Sequence: Synthetic oligonucleotide
ucgccaucauccucguagg

SEQ ID NO: 1736883 - RNA, 19 nt, Artificial Sequence
  Description of Artificial Sequence: Synthetic oligonucleotide
uucucggcgaacucucuca

SEQ ID NO: 1736884 - RNA, 19 nt, Artificial Sequence
  Description of Artificial Sequence: Synthetic oligonucleotide
cuggccagaauccaaccac

SEQ ID NO: 1736885 - RNA, 19 nt, Artificial Sequence
  Description of Artificial Sequence: Synthetic oligonucleotide
aaggcacucuggauuguac

SEQ ID NO: 1736886 - RNA, 19 nt, Artificial Sequence
  Description of Artificial Sequence: Synthetic oligonucleotide
gucaaccugaugccugugg

SEQ ID NO: 1736887 - RNA, 19 nt, Artificial Sequence
  Description of Artificial Sequence: Synthetic oligonucleotide
acagcucacuacuacagua

SEQ ID NO: 1736888 - RNA, 19 nt, Artificial Sequence
  Description of Artificial Sequence: Synthetic oligonucleotide
gugagguucagacagccaa

SEQ ID NO: 1736889 - RNA, 19 nt, Artificial Sequence
  Description of Artificial Sequence: Synthetic oligonucleotide
uuucucuccuugaguagac

SEQ ID NO: 1736890 - RNA, 19 nt, Artificial Sequence
  Description of Artificial Sequence: Synthetic oligonucleotide
agucaucgccaucauccuc

SEQ ID NO: 1736891 - RNA, 19 nt, Artificial Sequence
  Description of Artificial Sequence: Synthetic oligonucleotide
uggagaaguagagacccga

SEQ ID NO: 1736892 - RNA, 19 nt, Artificial Sequence
  Description of Artificial Sequence: Synthetic oligonucleotide
aguuuucgcaagucuguga

SEQ ID NO: 1736893 - RNA, 19 nt, Artificial Sequence
  Description of Artificial Sequence: Synthetic oligonucleotide
uggagcaaugaagucugag

SEQ ID NO: 1736894 - RNA, 19 nt, Artificial Sequence
  Description of Artificial Sequence: Synthetic oligonucleotide
auguuggccagucuccaca

SEQ ID NO: 1736895 - RNA, 19 nt, Artificial Sequence
  Description of Artificial Sequence: Synthetic oligonucleotide
auaucuuggggaagccucg

SEQ ID NO: 1736896 - RNA, 19 nt, Artificial Sequence
  Description of Artificial Sequence: Synthetic oligonucleotide
auaccggaguuuucgcaag

SEQ ID NO: 1736897 - RNA, 19 nt, Artificial Sequence
  Description of Artificial Sequence: Synthetic oligonucleotide
auuguaccccuugagguca

SEQ ID NO: 1736898 - RNA, 19 nt, Artificial Sequence
  Description of Artificial Sequence: Synthetic oligonucleotide
acccaaguagucucggaca

SEQ ID NO: 1736899 - RNA, 19 nt, Artificial Sequence
  Description of Artificial Sequence: Synthetic oligonucleotide
aucaauguggaaaccauuu

SEQ ID NO: 1736900 - RNA, 19 nt, Artificial Sequence
  Description of Artificial Sequence: Synthetic oligonucleotide
gacuuuacauuggagaagu

SEQ ID NO: 1736901 - RNA, 19 nt, Artificial Sequence
  Description of Artificial Sequence: Synthetic oligonucleotide
uuccccacagcaaaauauu

SEQ ID NO: 1736902 - RNA, 19 nt, Artificial Sequence
  Description of Artificial Sequence: Synthetic oligonucleotide
gguaaccaggagcuggccg

SEQ ID NO: 1736903 - RNA, 19 nt, Artificial Sequence
  Description of Artificial Sequence: Synthetic oligonucleotide
uuucuaaggcacucuggau

SEQ ID NO: 1736904 - RNA, 19 nt, Artificial Sequence
  Description of Artificial Sequence: Synthetic oligonucleotide
uuuucgcaagucugugaca

SEQ ID NO: 1736905 - RNA, 19 nt, Artificial Sequence
  Description of Artificial Sequence: Synthetic oligonucleotide
uugcagguuauagucuuca

SEQ ID NO: 1736906 - RNA, 19 nt, Artificial Sequence
  Description of Artificial Sequence: Synthetic oligonucleotide
gucucggacaccagaaugc

SEQ ID NO: 1736907 - RNA, 19 nt, Artificial Sequence
  Description of Artificial Sequence: Synthetic oligonucleotide
cucauaccggaguuuucgc

SEQ ID NO: 1736908 - RNA, 19 nt, Artificial Sequence
  Description of Artificial Sequence: Synthetic oligonucleotide
cagucuguaucauauccca

SEQ ID NO: 1736909 - RNA, 19 nt, Artificial Sequence
  Description of Artificial Sequence: Synthetic oligonucleotide
  modified_base (16)..(16): a, c, u, g, unknown or other
ugaggucagcaaacanaaa

SEQ ID NO: 1736910 - RNA, 19 nt, Artificial Sequence
  Description of Artificial Sequence: Synthetic oligonucleotide
uggccggaugcccucauac

SEQ ID NO: 1736911 - RNA, 19 nt, Artificial Sequence
  Description of Artificial Sequence: Synthetic oligonucleotide
uagagacccgauacugcug

SEQ ID NO: 1736912 - RNA, 19 nt, Artificial Sequence
  Description of Artificial Sequence: Synthetic oligonucleotide
guuuugucguuaaauaucu

SEQ ID NO: 1736913 - RNA, 19 nt, Artificial Sequence
  Description of Artificial Sequence: Synthetic oligonucleotide
agcaggcaacagcaaacag

SEQ ID NO: 1736914 - RNA, 19 nt, Artificial Sequence
  Description of Artificial Sequence: Synthetic oligonucleotide
ucuuggggaagccucgauu

SEQ ID NO: 1736915 - RNA, 19 nt, Artificial Sequence
  Description of Artificial Sequence: Synthetic oligonucleotide
ugagguucagacagccaau

SEQ ID NO: 1736916 - RNA, 19 nt, Artificial Sequence
  Description of Artificial Sequence: Synthetic oligonucleotide
aaucaauguggaaaccauu

SEQ ID NO: 1736917 - RNA, 19 nt, Artificial Sequence
  Description of Artificial Sequence: Synthetic oligonucleotide
guauuucuucaauguaguc

SEQ ID NO: 1736918 - RNA, 19 nt, Artificial Sequence
  Description of Artificial Sequence: Synthetic oligonucleotide
aacacaccaccacacucuu

SEQ ID NO: 1736919 - RNA, 19 nt, Artificial Sequence
  Description of Artificial Sequence: Synthetic oligonucleotide
cuucaaccccaaagcaggc

SEQ ID NO: 1736920 - RNA, 19 nt, Artificial Sequence
  Description of Artificial Sequence: Synthetic oligonucleotide
cacauccucugcauauaag

SEQ ID NO: 1736921 - RNA, 19 nt, Artificial Sequence
  Description of Artificial Sequence: Synthetic oligonucleotide
gccggaugcccucauaccg

SEQ ID NO: 1736922 - RNA, 19 nt, Artificial Sequence
  Description of Artificial Sequence: Synthetic oligonucleotide
aacauauucugagcaucau

SEQ ID NO: 1736923 - RNA, 19 nt, Artificial Sequence
  Description of Artificial Sequence: Synthetic oligonucleotide
gguccugucuaauaucuuc

SEQ ID NO: 1736924 - RNA, 19 nt, Artificial Sequence
  Description of Artificial Sequence: Synthetic oligonucleotide
caccagaaugcaguggagc

SEQ ID NO: 1736925 - RNA, 19 nt, Artificial Sequence
  Description of Artificial Sequence: Synthetic oligonucleotide
ggcacucuggauuguaccc

SEQ ID NO: 1736926 - RNA, 19 nt, Artificial Sequence
  Description of Artificial Sequence: Synthetic oligonucleotide
gaguuuucgcaagucugug

SEQ ID NO: 1736927 - RNA, 19 nt, Artificial Sequence
  Description of Artificial Sequence: Synthetic oligonucleotide
ccucgauuuggauacuugc

SEQ ID NO: 1736928 - RNA, 19 nt, Artificial Sequence
  Description of Artificial Sequence: Synthetic oligonucleotide
ucguaggccuuacucaguu

SEQ ID NO: 1736929 - RNA, 19 nt, Artificial Sequence
  Description of Artificial Sequence: Synthetic oligonucleotide
guaggccuuacucaguucu

SEQ ID NO: 1736930 - RNA, 19 nt, Artificial Sequence
  Description of Artificial Sequence: Synthetic oligonucleotide
acaguucucggcgaacucu

SEQ ID NO: 1736931 - RNA, 19 nt, Artificial Sequence
  Description of Artificial Sequence: Synthetic oligonucleotide
caaguagucucggacacca

SEQ ID NO: 1736932 - RNA, 19 nt, Artificial Sequence
  Description of Artificial Sequence: Synthetic oligonucleotide
ggucccaauaaaugugggc

SEQ ID NO: 1736933 - RNA, 19 nt, Artificial Sequence
  Description of Artificial Sequence: Synthetic oligonucleotide
auagugguccugucuaaua

SEQ ID NO: 1736934 - RNA, 19 nt, Artificial Sequence
  Description of Artificial Sequence: Synthetic oligonucleotide
cauaccggaguuuucgcaa

SEQ ID NO: 1736935 - RNA, 19 nt, Artificial Sequence
  Description of Artificial Sequence: Synthetic oligonucleotide
gucccaauaaaugugggcu

SEQ ID NO: 1736936 - RNA, 19 nt, Artificial Sequence
  Description of Artificial Sequence: Synthetic oligonucleotide
ucauggagcuccucugcaa

SEQ ID NO: 1736937 - RNA, 19 nt, Artificial Sequence
  Description of Artificial Sequence: Synthetic oligonucleotide
cuaugggcuccgaagccug

SEQ ID NO: 1736938 - RNA, 19 nt, Artificial Sequence
  Description of Artificial Sequence: Synthetic oligonucleotide
ucauagugguccugucuaa

SEQ ID NO: 1736939 - RNA, 19 nt, Artificial Sequence
  Description of Artificial Sequence: Synthetic oligonucleotide
cugccagacaucaaagaaa

SEQ ID NO: 1736940 - RNA, 19 nt, Artificial Sequence
  Description of Artificial Sequence: Synthetic oligonucleotide
uggccuggaguuucuuuug

SEQ ID NO: 1736941 - RNA, 19 nt, Artificial Sequence
  Description of Artificial Sequence: Synthetic oligonucleotide
gcaggugccauugccaagg

SEQ ID NO: 1736942 - RNA, 19 nt, Artificial Sequence
  Description of Artificial Sequence: Synthetic oligonucleotide
ggcgaacucucucauggag

SEQ ID NO: 1736943 - RNA, 19 nt, Artificial Sequence
  Description of Artificial Sequence: Synthetic oligonucleotide
cacuacuacaguaggccca

SEQ ID NO: 1736944 - RNA, 19 nt, Artificial Sequence
  Description of Artificial Sequence: Synthetic oligonucleotide
gggguaaguauuuucucuc

SEQ ID NO: 1736945 - RNA, 19 nt, Artificial Sequence
  Description of Artificial Sequence: Synthetic oligonucleotide
cucauagugguccugucua

SEQ ID NO: 1736946 - RNA, 19 nt, Artificial Sequence
  Description of Artificial Sequence: Synthetic oligonucleotide
uccugucuaauaucuucau

SEQ ID NO: 1736947 - RNA, 19 nt, Artificial Sequence
  Description of Artificial Sequence: Synthetic oligonucleotide
aggccuuacucaguucuuc

SEQ ID NO: 1736948 - RNA, 19 nt, Artificial Sequence
  Description of Artificial Sequence: Synthetic oligonucleotide
acagacccaaguagucucg

SEQ ID NO: 1736949 - RNA, 19 nt, Artificial Sequence
  Description of Artificial Sequence: Synthetic oligonucleotide
uccccacagcaaaauauuu

SEQ ID NO: 1736950 - RNA, 19 nt, Artificial Sequence
  Description of Artificial Sequence: Synthetic oligonucleotide
cugcauauaaguggauauc

SEQ ID NO: 1736951 - RNA, 19 nt, Artificial Sequence
  Description of Artificial Sequence: Synthetic oligonucleotide
cuuggaaacuuuccccaca

SEQ ID NO: 1736952 - RNA, 19 nt, Artificial Sequence
  Description of Artificial Sequence: Synthetic oligonucleotide
ucuccuugaguagacucau

SEQ ID NO: 1736953 - RNA, 19 nt, Artificial Sequence
  Description of Artificial Sequence: Synthetic oligonucleotide
gucuguacuggaagagucc

SEQ ID NO: 1736954 - RNA, 19 nt, Artificial Sequence
  Description of Artificial Sequence: Synthetic oligonucleotide
uaggcccacaguucucggc

SEQ ID NO: 1736955 - RNA, 19 nt, Artificial Sequence
  Description of Artificial Sequence: Synthetic oligonucleotide
aaugugggcuucacugggu

SEQ ID NO: 1736956 - RNA, 19 nt, Artificial Sequence
  Description of Artificial Sequence: Synthetic oligonucleotide
agaccugggucccaauaaa

SEQ ID NO: 1736957 - RNA, 19 nt, Artificial Sequence
  Description of Artificial Sequence: Synthetic oligonucleotide
uuuugucguuaaauaucuu

SEQ ID NO: 1736958 - RNA, 19 nt, Artificial Sequence
  Description of Artificial Sequence: Synthetic oligonucleotide
cauggugagcuucucagua

SEQ ID NO: 1736959 - RNA, 19 nt, Artificial Sequence
  Description of Artificial Sequence: Synthetic oligonucleotide
ccucauaccggaguuuucg

SEQ ID NO: 1736960 - RNA, 19 nt, Artificial Sequence
  Description of Artificial Sequence: Synthetic oligonucleotide
ugggugagguucagacagc

SEQ ID NO: 1736961 - RNA, 19 nt, Artificial Sequence
  Description of Artificial Sequence: Synthetic oligonucleotide
ggacuuuacauuggagaag

SEQ ID NO: 1736962 - RNA, 19 nt, Artificial Sequence
  Description of Artificial Sequence: Synthetic oligonucleotide
caauaaaugugggcuucac

SEQ ID NO: 1736963 - RNA, 19 nt, Artificial Sequence
  Description of Artificial Sequence: Synthetic oligonucleotide
uguuggccagucuccacau

SEQ ID NO: 1736964 - RNA, 19 nt, Artificial Sequence
  Description of Artificial Sequence: Synthetic oligonucleotide
caguucucggcgaacucuc

SEQ ID NO: 1736965 - RNA, 19 nt, Artificial Sequence
  Description of Artificial Sequence: Synthetic oligonucleotide
aagguggcuaugggcuccg

SEQ ID NO: 1736966 - RNA, 19 nt, Artificial Sequence
  Description of Artificial Sequence: Synthetic oligonucleotide
agucuguaucauaucccag

SEQ ID NO: 1736967 - RNA, 19 nt, Artificial Sequence
  Description of Artificial Sequence: Synthetic oligonucleotide
ccagucuccacauggugag

SEQ ID NO: 1736968 - RNA, 19 nt, Artificial Sequence
  Description of Artificial Sequence: Synthetic oligonucleotide
ggcugggguaaccaggagc

SEQ ID NO: 1736969 - RNA, 19 nt, Artificial Sequence
  Description of Artificial Sequence: Synthetic oligonucleotide
gaacacaccaccacacucu

SEQ ID NO: 1736970 - RNA, 19 nt, Artificial Sequence
  Description of Artificial Sequence: Synthetic oligonucleotide
gaugcccucauaccggagu

SEQ ID NO: 1736971 - RNA, 19 nt, Artificial Sequence
  Description of Artificial Sequence: Synthetic oligonucleotide
gaauccaaccacgccccug

SEQ ID NO: 1736972 - RNA, 19 nt, Artificial Sequence
  Description of Artificial Sequence: Synthetic oligonucleotide
uuggacacucugugcuggc

SEQ ID NO: 1736973 - RNA, 19 nt, Artificial Sequence
  Description of Artificial Sequence: Synthetic oligonucleotide
gagguucagacagccaauc

SEQ ID NO: 1736974 - RNA, 19 nt, Artificial Sequence
  Description of Artificial Sequence: Synthetic oligonucleotide
uaccccuugaggucagcaa

SEQ ID NO: 1736975 - RNA, 19 nt, Artificial Sequence
  Description of Artificial Sequence: Synthetic oligonucleotide
acccgauacugcugaagca

SEQ ID NO: 1736976 - RNA, 19 nt, Artificial Sequence
  Description of Artificial Sequence: Synthetic oligonucleotide
cucggacaccagaaugcag

SEQ ID NO: 1736977 - RNA, 19 nt, Artificial Sequence
  Description of Artificial Sequence: Synthetic oligonucleotide
uguagucaucuuucagauu

SEQ ID NO: 1736978 - RNA, 19 nt, Artificial Sequence
  Description of Artificial Sequence: Synthetic oligonucleotide
ggagcugccagacaucaaa

SEQ ID NO: 1736979 - RNA, 19 nt, Artificial Sequence
  Description of Artificial Sequence: Synthetic oligonucleotide
ugcagguuauagucuucaa

SEQ ID NO: 1736980 - RNA, 19 nt, Artificial Sequence
  Description of Artificial Sequence: Synthetic oligonucleotide
accggaguuuucgcaaguc

SEQ ID NO: 1736981 - RNA, 19 nt, Artificial Sequence
  Description of Artificial Sequence: Synthetic oligonucleotide
acagccaaucaauguggaa

SEQ ID NO: 1736982 - RNA, 19 nt, Artificial Sequence
  Description of Artificial Sequence: Synthetic oligonucleotide
cucuuggaugcauccagga

SEQ ID NO: 1736983 - RNA, 19 nt, Artificial Sequence
  Description of Artificial Sequence: Synthetic oligonucleotide
cuugacuuagggguaagua

SEQ ID NO: 1736984 - RNA, 19 nt, Artificial Sequence
  Description of Artificial Sequence: Synthetic oligonucleotide
uaccggaguuuucgcaagu

SEQ ID NO: 1736985 - RNA, 19 nt, Artificial Sequence
  Description of Artificial Sequence: Synthetic oligonucleotide
guaggcccacaguucucgg

SEQ ID NO: 1736986 - RNA, 19 nt, Artificial Sequence
  Description of Artificial Sequence: Synthetic oligonucleotide
ccauagaagguggcuaugg

SEQ ID NO: 1736987 - RNA, 19 nt, Artificial Sequence
  Description of Artificial Sequence: Synthetic oligonucleotide
ucaguauggucaggcuggc

SEQ ID NO: 1736988 - RNA, 19 nt, Artificial Sequence
  Description of Artificial Sequence: Synthetic oligonucleotide
  modified_base (8)..(8): a, c, u, g, unknown or other
gcaaacanaaagguuuuaa

SEQ ID NO: 1736989 - RNA, 19 nt, Artificial Sequence
  Description of Artificial Sequence: Synthetic oligonucleotide
ucucggcgaacucucucau

SEQ ID NO: 1736990 - RNA, 19 nt, Artificial Sequence
  Description of Artificial Sequence: Synthetic oligonucleotide
uagacucauagugguccug

SEQ ID NO: 1736991 - RNA, 19 nt, Artificial Sequence
  Description of Artificial Sequence: Synthetic oligonucleotide
guagucucggacaccagaa

SEQ ID NO: 1736992 - RNA, 19 nt, Artificial Sequence
  Description of Artificial Sequence: Synthetic oligonucleotide
caaucaauguggaaaccau

SEQ ID NO: 1736993 - RNA, 19 nt, Artificial Sequence
  Description of Artificial Sequence: Synthetic oligonucleotide
uucacugggugagguucag

SEQ ID NO: 1736994 - RNA, 19 nt, Artificial Sequence
  Description of Artificial Sequence: Synthetic oligonucleotide
ggugagcuucucaguaugg

SEQ ID NO: 1736995 - RNA, 19 nt, Artificial Sequence
  Description of Artificial Sequence: Synthetic oligonucleotide
acggagcugccagacauca

SEQ ID NO: 1736996 - RNA, 19 nt, Artificial Sequence
  Description of Artificial Sequence: Synthetic oligonucleotide
aucugauccuuggaaacuu

SEQ ID NO: 1736997 - RNA, 19 nt, Artificial Sequence
  Description of Artificial Sequence: Synthetic oligonucleotide
cuggaguuucuuuugacuu

SEQ ID NO: 1736998 - RNA, 19 nt, Artificial Sequence
  Description of Artificial Sequence: Synthetic oligonucleotide
ccgauacugcugaagcagg

SEQ ID NO: 1736999 - RNA, 19 nt, Artificial Sequence
  Description of Artificial Sequence: Synthetic oligonucleotide
gcagguuauagucuucaaa

SEQ ID NO: 1737000 - RNA, 19 nt, Artificial Sequence
  Description of Artificial Sequence: Synthetic oligonucleotide
ggucuguacuggaagaguc

SEQ ID NO: 1737001 - RNA, 19 nt, Artificial Sequence
  Description of Artificial Sequence: Synthetic oligonucleotide
ugggcuucacugggugagg

SEQ ID NO: 1737002 - RNA, 19 nt, Artificial Sequence
  Description of Artificial Sequence: Synthetic oligonucleotide
gcugaagcaggugccauug

SEQ ID NO: 1737003 - RNA, 19 nt, Artificial Sequence
  Description of Artificial Sequence: Synthetic oligonucleotide
cagugguaggggucuguac

SEQ ID NO: 1737004 - RNA, 19 nt, Artificial Sequence
  Description of Artificial Sequence: Synthetic oligonucleotide
cccgauacugcugaagcag

SEQ ID NO: 1737005 - RNA, 19 nt, Artificial Sequence
  Description of Artificial Sequence: Synthetic oligonucleotide
cagacccaaguagucucgg

SEQ ID NO: 1737006 - RNA, 19 nt, Artificial Sequence
  Description of Artificial Sequence: Synthetic oligonucleotide
ccagacaucaaagaaaggu

SEQ ID NO: 1737007 - RNA, 19 nt, Artificial Sequence
  Description of Artificial Sequence: Synthetic oligonucleotide
cuacaguaggcccacaguu

SEQ ID NO: 1737008 - RNA, 19 nt, Artificial Sequence
  Description of Artificial Sequence: Synthetic oligonucleotide
cuucacugggugagguuca

SEQ ID NO: 1737009 - RNA, 19 nt, Artificial Sequence
  Description of Artificial Sequence: Synthetic oligonucleotide
gccaaggauucugucaacc

SEQ ID NO: 1737010 - RNA, 19 nt, Artificial Sequence
  Description of Artificial Sequence: Synthetic oligonucleotide
uaaggcacucuggauugua

SEQ ID NO: 1737011 - RNA, 19 nt, Artificial Sequence
  Description of Artificial Sequence: Synthetic oligonucleotide
ccuuucuggcuucuuuacc

SEQ ID NO: 1737012 - RNA, 19 nt, Artificial Sequence
  Description of Artificial Sequence: Synthetic oligonucleotide
aaguagucucggacaccag

SEQ ID NO: 1737013 - RNA, 19 nt, Artificial Sequence
  Description of Artificial Sequence: Synthetic oligonucleotide
ggcuaugggcuccgaagcc

SEQ ID NO: 1737014 - RNA, 19 nt, Artificial Sequence
  Description of Artificial Sequence: Synthetic oligonucleotide
auaucaucuuggacacucu

SEQ ID NO: 1737015 - RNA, 19 nt, Artificial Sequence
  Description of Artificial Sequence: Synthetic oligonucleotide
cagcaaacagacccaagua

SEQ ID NO: 1737016 - RNA, 19 nt, Artificial Sequence
  Description of Artificial Sequence: Synthetic oligonucleotide
cgauuuggauacuugccac

SEQ ID NO: 1737017 - RNA, 19 nt, Artificial Sequence
  Description of Artificial Sequence: Synthetic oligonucleotide
ggauacuugccacggagcu

SEQ ID NO: 1737018 - RNA, 19 nt, Artificial Sequence
  Description of Artificial Sequence: Synthetic oligonucleotide
agaauccaaccacgccccu

SEQ ID NO: 1737019 - RNA, 19 nt, Artificial Sequence
  Description of Artificial Sequence: Synthetic oligonucleotide
gcuucacugggugagguuc

SEQ ID NO: 1737020 - RNA, 19 nt, Artificial Sequence
  Description of Artificial Sequence: Synthetic oligonucleotide
augcccucauaccggaguu

SEQ ID NO: 1737021 - RNA, 19 nt, Artificial Sequence
  Description of Artificial Sequence: Synthetic oligonucleotide
gugguccugucuaauaucu

SEQ ID NO: 1737022 - RNA, 19 nt, Artificial Sequence
  Description of Artificial Sequence: Synthetic oligonucleotide
ccaaucaauguggaaacca

SEQ ID NO: 1737023 - RNA, 19 nt, Artificial Sequence
  Description of Artificial Sequence: Synthetic oligonucleotide
ccggaugcccucauaccgg

SEQ ID NO: 1737024 - RNA, 19 nt, Artificial Sequence
  Description of Artificial Sequence: Synthetic oligonucleotide
ugguccugucuaauaucuu

SEQ ID NO: 1737025 - RNA, 19 nt, Artificial Sequence
  Description of Artificial Sequence: Synthetic oligonucleotide
cguuaaauaucuuggggaa

SEQ ID NO: 1737026 - RNA, 19 nt, Artificial Sequence
  Description of Artificial Sequence: Synthetic oligonucleotide
agcccauagaagguggcua

SEQ ID NO: 1737027 - RNA, 19 nt, Artificial Sequence
  Description of Artificial Sequence: Synthetic oligonucleotide
accugaugccuguggccug

SEQ ID NO: 1737028 - RNA, 19 nt, Artificial Sequence
  Description of Artificial Sequence: Synthetic oligonucleotide
acaccagaaugcaguggag

SEQ ID NO: 1737029 - RNA, 19 nt, Artificial Sequence
  Description of Artificial Sequence: Synthetic oligonucleotide
ugucaaccugaugccugug

SEQ ID NO: 1737030 - RNA, 19 nt, Artificial Sequence
  Description of Artificial Sequence: Synthetic oligonucleotide
  modified_base (13)..(13): a, c, u, g, unknown or other
ggucagcaaacanaaaggu

SEQ ID NO: 1737031 - RNA, 19 nt, Artificial Sequence
  Description of Artificial Sequence: Synthetic oligonucleotide
cucggcgaacucucucaug

SEQ ID NO: 1737032 - RNA, 19 nt, Artificial Sequence
  Description of Artificial Sequence: Synthetic oligonucleotide
  modified_base (9)..(9): a, c, u, g, unknown or other
agcaaacanaaagguuuua

SEQ ID NO: 1737033 - RNA, 19 nt, Artificial Sequence
  Description of Artificial Sequence: Synthetic oligonucleotide
  modified_base (10)..(10): a, c, u, g, unknown or other
cagcaaacanaaagguuuu

SEQ ID NO: 1737034 - RNA, 19 nt, Artificial Sequence
  Description of Artificial Sequence: Synthetic oligonucleotide
ugccacggagcugccagac

SEQ ID NO: 1737035 - RNA, 19 nt, Artificial Sequence
  Description of Artificial Sequence: Synthetic oligonucleotide
gggugagguucagacagcc

SEQ ID NO: 1737036 - RNA, 19 nt, Artificial Sequence
  Description of Artificial Sequence: Synthetic oligonucleotide
caauguuggccagucucca

SEQ ID NO: 1737037 - RNA, 19 nt, Artificial Sequence
  Description of Artificial Sequence: Synthetic oligonucleotide
ggccaagccaucucuccac

SEQ ID NO: 1737038 - RNA, 19 nt, Artificial Sequence
  Description of Artificial Sequence: Synthetic oligonucleotide
gcaaacagacccaaguagu

SEQ ID NO: 1737039 - RNA, 19 nt, Artificial Sequence
  Description of Artificial Sequence: Synthetic oligonucleotide
gggucccaauaaauguggg

SEQ ID NO: 1737040 - RNA, 19 nt, Artificial Sequence
  Description of Artificial Sequence: Synthetic oligonucleotide
uugccacggagcugccaga

SEQ ID NO: 1737041 - RNA, 19 nt, Artificial Sequence
  Description of Artificial Sequence: Synthetic oligonucleotide
ggccuuacucaguucuuca

SEQ ID NO: 1737042 - RNA, 19 nt, Artificial Sequence
  Description of Artificial Sequence: Synthetic oligonucleotide
uccgaagccuggggcacca

SEQ ID NO: 1737043 - RNA, 19 nt, Artificial Sequence
  Description of Artificial Sequence: Synthetic oligonucleotide
  modified_base (12)..(12): a, c, u, g, unknown or other
gucagcaaacanaaagguu

SEQ ID NO: 1737044 - RNA, 19 nt, Artificial Sequence
  Description of Artificial Sequence: Synthetic oligonucleotide
ugccauugccaaggauucu

SEQ ID NO: 1737045 - RNA, 19 nt, Artificial Sequence
  Description of Artificial Sequence: Synthetic oligonucleotide
cacggagcugccagacauc

SEQ ID NO: 1737046 - RNA, 19 nt, Artificial Sequence
  Description of Artificial Sequence: Synthetic oligonucleotide
gcaguggagcaaugaaguc

SEQ ID NO: 1737047 - RNA, 19 nt, Artificial Sequence
  Description of Artificial Sequence: Synthetic oligonucleotide
ucacugggugagguucaga

SEQ ID NO: 1737048 - RNA, 19 nt, Artificial Sequence
  Description of Artificial Sequence: Synthetic oligonucleotide
caguaggcccacaguucuc

SEQ ID NO: 1737049 - RNA, 19 nt, Artificial Sequence
  Description of Artificial Sequence: Synthetic oligonucleotide
gguaggggucuguacugga

SEQ ID NO: 1737050 - RNA, 19 nt, Artificial Sequence
  Description of Artificial Sequence: Synthetic oligonucleotide
uaccuacuguuuugucguu

SEQ ID NO: 1737051 - RNA, 19 nt, Artificial Sequence
  Description of Artificial Sequence: Synthetic oligonucleotide
cccaauaaaugugggcuuc

SEQ ID NO: 1737052 - RNA, 19 nt, Artificial Sequence
  Description of Artificial Sequence: Synthetic oligonucleotide
guaccccuugaggucagca

SEQ ID NO: 1737053 - RNA, 19 nt, Artificial Sequence
  Description of Artificial Sequence: Synthetic oligonucleotide
gccaaucaauguggaaacc

SEQ ID NO: 1737054 - RNA, 19 nt, Artificial Sequence
  Description of Artificial Sequence: Synthetic oligonucleotide
accuacuguuuugucguua

SEQ ID NO: 1737055 - RNA, 19 nt, Artificial Sequence
  Description of Artificial Sequence: Synthetic oligonucleotide
ggcuccgaagccuggggca

SEQ ID NO: 1737056 - RNA, 19 nt, Artificial Sequence
  Description of Artificial Sequence: Synthetic oligonucleotide
uguaccccuugaggucagc

SEQ ID NO: 1737057 - RNA, 19 nt, Artificial Sequence
  Description of Artificial Sequence: Synthetic oligonucleotide
caaccacgccccuggccug

SEQ ID NO: 1737058 - RNA, 19 nt, Artificial Sequence
  Description of Artificial Sequence: Synthetic oligonucleotide
acgccccuggccuggaguu

SEQ ID NO: 1737059 - RNA, 19 nt, Artificial Sequence
  Description of Artificial Sequence: Synthetic oligonucleotide
gaacucucucauggagcuc

SEQ ID NO: 1737060 - RNA, 19 nt, Artificial Sequence
  Description of Artificial Sequence: Synthetic oligonucleotide
gacuuagggguaaguauuu

SEQ ID NO: 1737061 - RNA, 19 nt, Artificial Sequence
  Description of Artificial Sequence: Synthetic oligonucleotide
guacuggaagaguccuucu

SEQ ID NO: 1737062 - RNA, 19 nt, Artificial Sequence
  Description of Artificial Sequence: Synthetic oligonucleotide
gaauggggccaagccaucu

SEQ ID NO: 1737063 - RNA, 19 nt, Artificial Sequence
  Description of Artificial Sequence: Synthetic oligonucleotide
ccacagcaaaauauuugga

SEQ ID NO: 1737064 - RNA, 19 nt, Artificial Sequence
  Description of Artificial Sequence: Synthetic oligonucleotide
aguucucggcgaacucucu

SEQ ID NO: 1737065 - RNA, 19 nt, Artificial Sequence
  Description of Artificial Sequence: Synthetic oligonucleotide
gccucgauuuggauacuug

SEQ ID NO: 1737066 - RNA, 19 nt, Artificial Sequence
  Description of Artificial Sequence: Synthetic oligonucleotide
cagaaugcaguggagcaau

SEQ ID NO: 1737067 - RNA, 19 nt, Artificial Sequence
  Description of Artificial Sequence: Synthetic oligonucleotide
aagccucgauuuggauacu

SEQ ID NO: 1737068 - RNA, 19 nt, Artificial Sequence
  Description of Artificial Sequence: Synthetic oligonucleotide
gggccaagccaucucucca

SEQ ID NO: 1737069 - RNA, 19 nt, Artificial Sequence
  Description of Artificial Sequence: Synthetic oligonucleotide
cugcugccgcagcccauag

SEQ ID NO: 1737070 - RNA, 19 nt, Artificial Sequence
  Description of Artificial Sequence: Synthetic oligonucleotide
gccuuacucaguucuucaa

SEQ ID NO: 1737071 - RNA, 19 nt, Artificial Sequence
  Description of Artificial Sequence: Synthetic oligonucleotide
gaccugggucccaauaaau

SEQ ID NO: 1737072 - RNA, 19 nt, Artificial Sequence
  Description of Artificial Sequence: Synthetic oligonucleotide
ccaaguagucucggacacc

SEQ ID NO: 1737073 - RNA, 19 nt, Artificial Sequence
  Description of Artificial Sequence: Synthetic oligonucleotide
agccucgauuuggauacuu

SEQ ID NO: 1737074 - RNA, 19 nt, Artificial Sequence
  Description of Artificial Sequence: Synthetic oligonucleotide
cugggguaaccaggagcug

SEQ ID NO: 1737075 - RNA, 19 nt, Artificial Sequence
  Description of Artificial Sequence: Synthetic oligonucleotide
uggaugcauccaggacaug

SEQ ID NO: 1737076 - RNA, 19 nt, Artificial Sequence
  Description of Artificial Sequence: Synthetic oligonucleotide
gugccuucaccaugaugcu

SEQ ID NO: 1737077 - RNA, 19 nt, Artificial Sequence
  Description of Artificial Sequence: Synthetic oligonucleotide
ugcccucauaccggaguuu

SEQ ID NO: 1737078 - RNA, 19 nt, Artificial Sequence
  Description of Artificial Sequence: Synthetic oligonucleotide
cacucugugcuggccagaa

SEQ ID NO: 1737079 - RNA, 19 nt, Artificial Sequence
  Description of Artificial Sequence: Synthetic oligonucleotide
ccaaccacgccccuggccu

SEQ ID NO: 1737080 - RNA, 19 nt, Artificial Sequence
  Description of Artificial Sequence: Synthetic oligonucleotide
gcagcccauagaagguggc

SEQ ID NO: 1737081 - RNA, 19 nt, Artificial Sequence
  Description of Artificial Sequence: Synthetic oligonucleotide
cggacaccagaaugcagug

SEQ ID NO: 1737082 - RNA, 19 nt, Artificial Sequence
  Description of Artificial Sequence: Synthetic oligonucleotide
gcauaauccucaaucugau

SEQ ID NO: 1737083 - RNA, 19 nt, Artificial Sequence
  Description of Artificial Sequence: Synthetic oligonucleotide
ccaaggauucugucaaccu

SEQ ID NO: 1737084 - RNA, 19 nt, Artificial Sequence
  Description of Artificial Sequence: Synthetic oligonucleotide
  modified_base (19)..(19): a, c, u, g, unknown or other
ccuugaggucagcaaacan

SEQ ID NO: 1737085 - RNA, 19 nt, Artificial Sequence
  Description of Artificial Sequence: Synthetic oligonucleotide
cauagugguccugucuaau

SEQ ID NO: 1737086 - RNA, 19 nt, Artificial Sequence
  Description of Artificial Sequence: Synthetic oligonucleotide
ccaauaaaugugggcuuca

SEQ ID NO: 1737087 - RNA, 19 nt, Artificial Sequence
  Description of Artificial Sequence: Synthetic oligonucleotide
ggugagguucagacagcca

SEQ ID NO: 1737088 - RNA, 19 nt, Artificial Sequence
  Description of Artificial Sequence: Synthetic oligonucleotide
cucguaggccuuacucagu

SEQ ID NO: 1737089 - RNA, 19 nt, Artificial Sequence
  Description of Artificial Sequence: Synthetic oligonucleotide
ccuugaguagacucauagu

SEQ ID NO: 1737090 - RNA, 19 nt, Artificial Sequence
  Description of Artificial Sequence: Synthetic oligonucleotide
cgaacucucucauggagcu

SEQ ID NO: 1737091 - RNA, 19 nt, Artificial Sequence
  Description of Artificial Sequence: Synthetic oligonucleotide
ggguaaccaggagcuggcc

SEQ ID NO: 1737092 - RNA, 19 nt, Artificial Sequence
  Description of Artificial Sequence: Synthetic oligonucleotide
ggaugcccucauaccggag

SEQ ID NO: 1737093 - RNA, 19 nt, Artificial Sequence
  Description of Artificial Sequence: Synthetic oligonucleotide
gcuaugggcuccgaagccu

SEQ ID NO: 1737094 - RNA, 19 nt, Artificial Sequence
  Description of Artificial Sequence: Synthetic oligonucleotide
cccauagaagguggcuaug

SEQ ID NO: 1737095 - RNA, 19 nt, Artificial Sequence
  Description of Artificial Sequence: Synthetic oligonucleotide
cccucauaccggaguuuuc

SEQ ID NO: 1737096 - RNA, 19 nt, Artificial Sequence
  Description of Artificial Sequence: Synthetic oligonucleotide
ggagaaguagagacccgau

SEQ ID NO: 1737097 - RNA, 19 nt, Artificial Sequence
  Description of Artificial Sequence: Synthetic oligonucleotide
ccagaaugcaguggagcaa

SEQ ID NO: 1737098 - RNA, 19 nt, Artificial Sequence
  Description of Artificial Sequence: Synthetic oligonucleotide
cuguacuggaagaguccuu

SEQ ID NO: 1737099 - RNA, 19 nt, Artificial Sequence
  Description of Artificial Sequence: Synthetic oligonucleotide
ccgcagcccauagaaggug

SEQ ID NO: 1737100 - RNA, 19 nt, Artificial Sequence
  Description of Artificial Sequence: Synthetic oligonucleotide
ccacggagcugccagacau

SEQ ID NO: 1737101 - RNA, 19 nt, Artificial Sequence
  Description of Artificial Sequence: Synthetic oligonucleotide
ccggaguuuucgcaagucu

SEQ ID NO: 1737102 - RNA, 19 nt, Artificial Sequence
  Description of Artificial Sequence: Synthetic oligonucleotide
cacgccccuggccuggagu

SEQ ID NO: 1737103 - RNA, 19 nt, Artificial Sequence
  Description of Artificial Sequence: Synthetic oligonucleotide
cccacaguucucggcgaac

SEQ ID NO: 1737104 - RNA, 19 nt, Artificial Sequence
  Description of Artificial Sequence: Synthetic oligonucleotide
cgccaucauccucguaggc

SEQ ID NO: 1737105 - RNA, 19 nt, Artificial Sequence
  Description of Artificial Sequence: Synthetic oligonucleotide
cuacuacaguaggcccaca

SEQ ID NO: 1737106 - RNA, 19 nt, Artificial Sequence
  Description of Artificial Sequence: Synthetic oligonucleotide
cuaaggcacucuggauugu

SEQ ID NO: 1737107 - RNA, 19 nt, Artificial Sequence
  Description of Artificial Sequence: Synthetic oligonucleotide
gccacggagcugccagaca

SEQ ID NO: 1737108 - RNA, 19 nt, Artificial Sequence
  Description of Artificial Sequence: Synthetic oligonucleotide
cauccucguaggccuuacu

SEQ ID NO: 1737109 - RNA, 19 nt, Artificial Sequence
  Description of Artificial Sequence: Synthetic oligonucleotide
gcuugacuuagggguaagu

SEQ ID NO: 1737110 - RNA, 19 nt, Artificial Sequence
  Description of Artificial Sequence: Synthetic oligonucleotide
caucauccucguaggccuu

SEQ ID NO: 1737111 - RNA, 19 nt, Artificial Sequence
  Description of Artificial Sequence: Synthetic oligonucleotide
cgaagccuggggcaccaca

SEQ ID NO: 1737112 - RNA, 19 nt, Artificial Sequence
  Description of Artificial Sequence: Synthetic oligonucleotide
cuggccggaugcccucaua

SEQ ID NO: 1737113 - RNA, 19 nt, Artificial Sequence
  Description of Artificial Sequence: Synthetic oligonucleotide
agguggcuaugggcuccga

SEQ ID NO: 1737114 - RNA, 19 nt, Artificial Sequence
  Description of Artificial Sequence: Synthetic oligonucleotide
gccgcagcccauagaaggu

SEQ ID NO: 1737115 - RNA, 19 nt, Artificial Sequence
  Description of Artificial Sequence: Synthetic oligonucleotide
ccacaguucucggcgaacu

SEQ ID NO: 1737116 - RNA, 19 nt, Artificial Sequence
  Description of Artificial Sequence: Synthetic oligonucleotide
accacgccccuggccugga

SEQ ID NO: 1737117 - RNA, 19 nt, Artificial Sequence
  Description of Artificial Sequence: Synthetic oligonucleotide
ggauaucaucuuggacacu

SEQ ID NO: 1737118 - RNA, 19 nt, Artificial Sequence
  Description of Artificial Sequence: Synthetic oligonucleotide
caucgccaucauccucgua

SEQ ID NO: 1737119 - RNA, 19 nt, Artificial Sequence
  Description of Artificial Sequence: Synthetic oligonucleotide
cuaccagcuuuugcagguu

SEQ ID NO: 1737120 - RNA, 19 nt, Artificial Sequence
  Description of Artificial Sequence: Synthetic oligonucleotide
caguauggucaggcuggcu

SEQ ID NO: 1737121 - RNA, 19 nt, Artificial Sequence
  Description of Artificial Sequence: Synthetic oligonucleotide
ggcagugguaggggucugu

SEQ ID NO: 1737122 - RNA, 19 nt, Artificial Sequence
  Description of Artificial Sequence: Synthetic oligonucleotide
cggcgaacucucucaugga

SEQ ID NO: 1737123 - RNA, 19 nt, Artificial Sequence
  Description of Artificial Sequence: Synthetic oligonucleotide
ccacgccccuggccuggag

SEQ ID NO: 1737124 - RNA, 19 nt, Artificial Sequence
  Description of Artificial Sequence: Synthetic oligonucleotide
cugaugccuguggccugcu

SEQ ID NO: 1737125 - RNA, 19 nt, Artificial Sequence
  Description of Artificial Sequence: Synthetic oligonucleotide
ccgaagccuggggcaccac

SEQ ID NO: 1737126 - RNA, 19 nt, Artificial Sequence
  Description of Artificial Sequence: Synthetic oligonucleotide
cccuggccuggaguuucuu

SEQ ID NO: 1737127 - RNA, 19 nt, Artificial Sequence
  Description of Artificial Sequence: Synthetic oligonucleotide
aaauaaacuuuccaggccg

SEQ ID NO: 1737128 - RNA, 19 nt, Artificial Sequence
  Description of Artificial Sequence: Synthetic oligonucleotide
uuaccaaugaagcagaugc

SEQ ID NO: 1737129 - RNA, 19 nt, Artificial Sequence
  Description of Artificial Sequence: Synthetic oligonucleotide
acaaacaccaugcucaucc

SEQ ID NO: 1737130 - RNA, 19 nt, Artificial Sequence
  Description of Artificial Sequence: Synthetic oligonucleotide
aaacuuuccaggccgaggc

SEQ ID NO: 1737131 - RNA, 19 nt, Artificial Sequence
  Description of Artificial Sequence: Synthetic oligonucleotide
gauuucugacuucaaaucg

SEQ ID NO: 1737132 - RNA, 19 nt, Artificial Sequence
  Description of Artificial Sequence: Synthetic oligonucleotide
aagaaugaaaugcucgaag

SEQ ID NO: 1737133 - RNA, 19 nt, Artificial Sequence
  Description of Artificial Sequence: Synthetic oligonucleotide
acuuuauuauccucgauag

SEQ ID NO: 1737134 - RNA, 19 nt, Artificial Sequence
  Description of Artificial Sequence: Synthetic oligonucleotide
ucuuuuaccaaugaagcag

SEQ ID NO: 1737135 - RNA, 19 nt, Artificial Sequence
  Description of Artificial Sequence: Synthetic oligonucleotide
uuuauuauccucgauagaa

SEQ ID NO: 1737136 - RNA, 19 nt, Artificial Sequence
  Description of Artificial Sequence: Synthetic oligonucleotide
aaucuuuuguuaauucccc

SEQ ID NO: 1737137 - RNA, 19 nt, Artificial Sequence
  Description of Artificial Sequence: Synthetic oligonucleotide
aaucgauuucugaacagcc

SEQ ID NO: 1737138 - RNA, 19 nt, Artificial Sequence
  Description of Artificial Sequence: Synthetic oligonucleotide
acuagugccaucugguggc

SEQ ID NO: 1737139 - RNA, 19 nt, Artificial Sequence
  Description of Artificial Sequence: Synthetic oligonucleotide
ugugcuucugcucaaagac

SEQ ID NO: 1737140 - RNA, 19 nt, Artificial Sequence
  Description of Artificial Sequence: Synthetic oligonucleotide
gauuuuagcucucuguccc

SEQ ID NO: 1737141 - RNA, 19 nt, Artificial Sequence
  Description of Artificial Sequence: Synthetic oligonucleotide
cuuuauagcugucagcugc

SEQ ID NO: 1737142 - RNA, 19 nt, Artificial Sequence
  Description of Artificial Sequence: Synthetic oligonucleotide
aauacuccuucacauagga

SEQ ID NO: 1737143 - RNA, 19 nt, Artificial Sequence
  Description of Artificial Sequence: Synthetic oligonucleotide
ucaaaucgauuucugaaca

SEQ ID NO: 1737144 - RNA, 19 nt, Artificial Sequence
  Description of Artificial Sequence: Synthetic oligonucleotide
uccucgauagaaauaaacu

SEQ ID NO: 1737145 - RNA, 19 nt, Artificial Sequence
  Description of Artificial Sequence: Synthetic oligonucleotide
acggcguaaugauaaaagc

SEQ ID NO: 1737146 - RNA, 19 nt, Artificial Sequence
  Description of Artificial Sequence: Synthetic oligonucleotide
ugaagaaugaaaugcucga

SEQ ID NO: 1737147 - RNA, 19 nt, Artificial Sequence
  Description of Artificial Sequence: Synthetic oligonucleotide
uauacaggaaccaaccuuu

SEQ ID NO: 1737148 - RNA, 19 nt, Artificial Sequence
  Description of Artificial Sequence: Synthetic oligonucleotide
uaggauaccugauggaaag

SEQ ID NO: 1737149 - RNA, 19 nt, Artificial Sequence
  Description of Artificial Sequence: Synthetic oligonucleotide
cacauaggauaccugaugg

SEQ ID NO: 1737150 - RNA, 19 nt, Artificial Sequence
  Description of Artificial Sequence: Synthetic oligonucleotide
ucauaaacaccccugucac

SEQ ID NO: 1737151 - RNA, 19 nt, Artificial Sequence
  Description of Artificial Sequence: Synthetic oligonucleotide
uucaaaucgauuucugaac

SEQ ID NO: 1737152 - RNA, 19 nt, Artificial Sequence
  Description of Artificial Sequence: Synthetic oligonucleotide
ugaacagcccaucuggucu

SEQ ID NO: 1737153 - RNA, 19 nt, Artificial Sequence
  Description of Artificial Sequence: Synthetic oligonucleotide
agcaauccaguguacacgg

SEQ ID NO: 1737154 - RNA, 19 nt, Artificial Sequence
  Description of Artificial Sequence: Synthetic oligonucleotide
aguuuuacgggauuucuga

SEQ ID NO: 1737155 - RNA, 19 nt, Artificial Sequence
  Description of Artificial Sequence: Synthetic oligonucleotide
agaaugaaaugcucgaagu

SEQ ID NO: 1737156 - RNA, 19 nt, Artificial Sequence
  Description of Artificial Sequence: Synthetic oligonucleotide
cuuggagaaguuuuacggg

SEQ ID NO: 1737157 - RNA, 19 nt, Artificial Sequence
  Description of Artificial Sequence: Synthetic oligonucleotide
aacacaucguuccaauacu

SEQ ID NO: 1737158 - RNA, 19 nt, Artificial Sequence
  Description of Artificial Sequence: Synthetic oligonucleotide
uacuccuucacauaggaua

SEQ ID NO: 1737159 - RNA, 19 nt, Artificial Sequence
  Description of Artificial Sequence: Synthetic oligonucleotide
agcagcacaaacaccaugc

SEQ ID NO: 1737160 - RNA, 19 nt, Artificial Sequence
  Description of Artificial Sequence: Synthetic oligonucleotide
uuauccucgauagaaauaa

SEQ ID NO: 1737161 - RNA, 19 nt, Artificial Sequence
  Description of Artificial Sequence: Synthetic oligonucleotide
ugaccaagguggcaggugg

SEQ ID NO: 1737162 - RNA, 19 nt, Artificial Sequence
  Description of Artificial Sequence: Synthetic oligonucleotide
ucgauuucugaacagccca

SEQ ID NO: 1737163 - RNA, 19 nt, Artificial Sequence
  Description of Artificial Sequence: Synthetic oligonucleotide
guaaugauaaaagcaacug

SEQ ID NO: 1737164 - RNA, 19 nt, Artificial Sequence
  Description of Artificial Sequence: Synthetic oligonucleotide
acaggaaccaaccuuuaug

SEQ ID NO: 1737165 - RNA, 19 nt, Artificial Sequence
  Description of Artificial Sequence: Synthetic oligonucleotide
ucccaaaguauacaggaac

SEQ ID NO: 1737166 - RNA, 19 nt, Artificial Sequence
  Description of Artificial Sequence: Synthetic oligonucleotide
cuaaccguaggauuuuccc

SEQ ID NO: 1737167 - RNA, 19 nt, Artificial Sequence
  Description of Artificial Sequence: Synthetic oligonucleotide
ugauuuuagcucucugucc

SEQ ID NO: 1737168 - RNA, 19 nt, Artificial Sequence
  Description of Artificial Sequence: Synthetic oligonucleotide
gcuuggagaaguuuuacgg

SEQ ID NO: 1737169 - RNA, 19 nt, Artificial Sequence
  Description of Artificial Sequence: Synthetic oligonucleotide
ucacauaggauaccugaug

SEQ ID NO: 1737170 - RNA, 19 nt, Artificial Sequence
  Description of Artificial Sequence: Synthetic oligonucleotide
aguguguaggcagacggcc

SEQ ID NO: 1737171 - RNA, 19 nt, Artificial Sequence
  Description of Artificial Sequence: Synthetic oligonucleotide
ugucuaagagcugacaaac

SEQ ID NO: 1737172 - RNA, 19 nt, Artificial Sequence
  Description of Artificial Sequence: Synthetic oligonucleotide
uuuacgggauuucugacuu

SEQ ID NO: 1737173 - RNA, 19 nt, Artificial Sequence
  Description of Artificial Sequence: Synthetic oligonucleotide
gagcugacaaacuuuauaa

SEQ ID NO: 1737174 - RNA, 19 nt, Artificial Sequence
  Description of Artificial Sequence: Synthetic oligonucleotide
agcgccgacaucugcauac

SEQ ID NO: 1737175 - RNA, 19 nt, Artificial Sequence
  Description of Artificial Sequence: Synthetic oligonucleotide
cacacaggggacuagugcc

SEQ ID NO: 1737176 - RNA, 19 nt, Artificial Sequence
  Description of Artificial Sequence: Synthetic oligonucleotide
aaaugcucgaaguuucuuu

SEQ ID NO: 1737177 - RNA, 19 nt, Artificial Sequence
  Description of Artificial Sequence: Synthetic oligonucleotide
uucuuuuaccaaugaagca

SEQ ID NO: 1737178 - RNA, 19 nt, Artificial Sequence
  Description of Artificial Sequence: Synthetic oligonucleotide
aaugcucgaaguuucuuuu

SEQ ID NO: 1737179 - RNA, 19 nt, Artificial Sequence
  Description of Artificial Sequence: Synthetic oligonucleotide
aggcagacggcccuaaccg

SEQ ID NO: 1737180 - RNA, 19 nt, Artificial Sequence
  Description of Artificial Sequence: Synthetic oligonucleotide
uuuuacgggauuucugacu

SEQ ID NO: 1737181 - RNA, 19 nt, Artificial Sequence
  Description of Artificial Sequence: Synthetic oligonucleotide
aaacaccccugucaccugg

SEQ ID NO: 1737182 - RNA, 19 nt, Artificial Sequence
  Description of Artificial Sequence: Synthetic oligonucleotide
ugcuccaagauuguccacg

SEQ ID NO: 1737183 - RNA, 19 nt, Artificial Sequence
  Description of Artificial Sequence: Synthetic oligonucleotide
gaagaugguucuucucagg

SEQ ID NO: 1737184 - RNA, 19 nt, Artificial Sequence
  Description of Artificial Sequence: Synthetic oligonucleotide
auaaacaccccugucaccu

SEQ ID NO: 1737185 - RNA, 19 nt, Artificial Sequence
  Description of Artificial Sequence: Synthetic oligonucleotide
ucaccugguagccucuccg

SEQ ID NO: 1737186 - RNA, 19 nt, Artificial Sequence
  Description of Artificial Sequence: Synthetic oligonucleotide
aacggcaucugcuccaaga

SEQ ID NO: 1737187 - RNA, 19 nt, Artificial Sequence
  Description of Artificial Sequence: Synthetic oligonucleotide
acaugauggagucuauucu

SEQ ID NO: 1737188 - RNA, 19 nt, Artificial Sequence
  Description of Artificial Sequence: Synthetic oligonucleotide
cacggcguaaugauaaaag

SEQ ID NO: 1737189 - RNA, 19 nt, Artificial Sequence
  Description of Artificial Sequence: Synthetic oligonucleotide
uguccacgccgccagauag

SEQ ID NO: 1737190 - RNA, 19 nt, Artificial Sequence
  Description of Artificial Sequence: Synthetic oligonucleotide
ucucuuagugugcuucugc

SEQ ID NO: 1737191 - RNA, 19 nt, Artificial Sequence
  Description of Artificial Sequence: Synthetic oligonucleotide
agaacuuuauuauccucga

SEQ ID NO: 1737192 - RNA, 19 nt, Artificial Sequence
  Description of Artificial Sequence: Synthetic oligonucleotide
acacgguugguccugagca

SEQ ID NO: 1737193 - RNA, 19 nt, Artificial Sequence
  Description of Artificial Sequence: Synthetic oligonucleotide
uugaugugcuuauugcaca

SEQ ID NO: 1737194 - RNA, 19 nt, Artificial Sequence
  Description of Artificial Sequence: Synthetic oligonucleotide
uuugucagggugucgggug

SEQ ID NO: 1737195 - RNA, 19 nt, Artificial Sequence
  Description of Artificial Sequence: Synthetic oligonucleotide
ucagcaauccaguguacac

SEQ ID NO: 1737196 - RNA, 19 nt, Artificial Sequence
  Description of Artificial Sequence: Synthetic oligonucleotide
augaaaugcucgaaguuuc

SEQ ID NO: 1737197 - RNA, 19 nt, Artificial Sequence
  Description of Artificial Sequence: Synthetic oligonucleotide
ucggaaauggcacuccauc

SEQ ID NO: 1737198 - RNA, 19 nt, Artificial Sequence
  Description of Artificial Sequence: Synthetic oligonucleotide
auccucgauagaaauaaac

SEQ ID NO: 1737199 - RNA, 19 nt, Artificial Sequence
  Description of Artificial Sequence: Synthetic oligonucleotide
uccucagcaauccagugua

SEQ ID NO: 1737200 - RNA, 19 nt, Artificial Sequence
  Description of Artificial Sequence: Synthetic oligonucleotide
ugacaaacuuuauaagcau

SEQ ID NO: 1737201 - RNA, 19 nt, Artificial Sequence
  Description of Artificial Sequence: Synthetic oligonucleotide
agcaggucccuguacagag

SEQ ID NO: 1737202 - RNA, 19 nt, Artificial Sequence
  Description of Artificial Sequence: Synthetic oligonucleotide
aucgauuucugaacagccc

SEQ ID NO: 1737203 - RNA, 19 nt, Artificial Sequence
  Description of Artificial Sequence: Synthetic oligonucleotide
acaucguuccaauacuccu

SEQ ID NO: 1737204 - RNA, 19 nt, Artificial Sequence
  Description of Artificial Sequence: Synthetic oligonucleotide
aaucggaaauggcacucca

SEQ ID NO: 1737205 - RNA, 19 nt, Artificial Sequence
  Description of Artificial Sequence: Synthetic oligonucleotide
uaccugauggaaagggaug

SEQ ID NO: 1737206 - RNA, 19 nt, Artificial Sequence
  Description of Artificial Sequence: Synthetic oligonucleotide
acugaagaaugaaaugcuc

SEQ ID NO: 1737207 - RNA, 19 nt, Artificial Sequence
  Description of Artificial Sequence: Synthetic oligonucleotide
uaggcagacggcccuaacc

SEQ ID NO: 1737208 - RNA, 19 nt, Artificial Sequence
  Description of Artificial Sequence: Synthetic oligonucleotide
uuuaccaaugaagcagaug

SEQ ID NO: 1737209 - RNA, 19 nt, Artificial Sequence
  Description of Artificial Sequence: Synthetic oligonucleotide
ugcucgaaguuucuuuuac

SEQ ID NO: 1737210 - RNA, 19 nt, Artificial Sequence
  Description of Artificial Sequence: Synthetic oligonucleotide
caaaucgauuucugaacag

SEQ ID NO: 1737211 - RNA, 19 nt, Artificial Sequence
  Description of Artificial Sequence: Synthetic oligonucleotide
cugucacccauacagugcc

SEQ ID NO: 1737212 - RNA, 19 nt, Artificial Sequence
  Description of Artificial Sequence: Synthetic oligonucleotide
agaaguuuuacgggauuuc

SEQ ID NO: 1737213 - RNA, 19 nt, Artificial Sequence
  Description of Artificial Sequence: Synthetic oligonucleotide
aguauacaggaaccaaccu

SEQ ID NO: 1737214 - RNA, 19 nt, Artificial Sequence
  Description of Artificial Sequence: Synthetic oligonucleotide
uaggauuuucccacugcca

SEQ ID NO: 1737215 - RNA, 19 nt, Artificial Sequence
  Description of Artificial Sequence: Synthetic oligonucleotide
auaguggccaguggcaacg

SEQ ID NO: 1737216 - RNA, 19 nt, Artificial Sequence
  Description of Artificial Sequence: Synthetic oligonucleotide
cucgaaguuucuuuuacca

SEQ ID NO: 1737217 - RNA, 19 nt, Artificial Sequence
  Description of Artificial Sequence: Synthetic oligonucleotide
uuucugacuucaaaucgau

SEQ ID NO: 1737218 - RNA, 19 nt, Artificial Sequence
  Description of Artificial Sequence: Synthetic oligonucleotide
ggaaaccuggcugagaaag

SEQ ID NO: 1737219 - RNA, 19 nt, Artificial Sequence
  Description of Artificial Sequence: Synthetic oligonucleotide
cacaucguuccaauacucc

SEQ ID NO: 1737220 - RNA, 19 nt, Artificial Sequence
  Description of Artificial Sequence: Synthetic oligonucleotide
caauacuccuucacauagg

SEQ ID NO: 1737221 - RNA, 19 nt, Artificial Sequence
  Description of Artificial Sequence: Synthetic oligonucleotide
aggauuuucccacugccaa

SEQ ID NO: 1737222 - RNA, 19 nt, Artificial Sequence
  Description of Artificial Sequence: Synthetic oligonucleotide
aagcagaugcccaugcucu

SEQ ID NO: 1737223 - RNA, 19 nt, Artificial Sequence
  Description of Artificial Sequence: Synthetic oligonucleotide
agccacaagcacgucaccc

SEQ ID NO: 1737224 - RNA, 19 nt, Artificial Sequence
  Description of Artificial Sequence: Synthetic oligonucleotide
agagcugacaaacuuuaua

SEQ ID NO: 1737225 - RNA, 19 nt, Artificial Sequence
  Description of Artificial Sequence: Synthetic oligonucleotide
uaccaaugaagcagaugcc

SEQ ID NO: 1737226 - RNA, 19 nt, Artificial Sequence
  Description of Artificial Sequence: Synthetic oligonucleotide
ugcacaugaugucaggguu

SEQ ID NO: 1737227 - RNA, 19 nt, Artificial Sequence
  Description of Artificial Sequence: Synthetic oligonucleotide
ccgacaucugcauacaccg

SEQ ID NO: 1737228 - RNA, 19 nt, Artificial Sequence
  Description of Artificial Sequence: Synthetic oligonucleotide
uucacauaggauaccugau

SEQ ID NO: 1737229 - RNA, 19 nt, Artificial Sequence
  Description of Artificial Sequence: Synthetic oligonucleotide
ucuuuauagcugucagcug

SEQ ID NO: 1737230 - RNA, 19 nt, Artificial Sequence
  Description of Artificial Sequence: Synthetic oligonucleotide
ugauggaaagggaugucua

SEQ ID NO: 1737231 - RNA, 19 nt, Artificial Sequence
  Description of Artificial Sequence: Synthetic oligonucleotide
uacacgguugguccugagc

SEQ ID NO: 1737232 - RNA, 19 nt, Artificial Sequence
  Description of Artificial Sequence: Synthetic oligonucleotide
gacagcaaacugucccagg

SEQ ID NO: 1737233 - RNA, 19 nt, Artificial Sequence
  Description of Artificial Sequence: Synthetic oligonucleotide
ucucugucccaaaguauac

SEQ ID NO: 1737234 - RNA, 19 nt, Artificial Sequence
  Description of Artificial Sequence: Synthetic oligonucleotide
ucgaaguuucuuuuaccaa

SEQ ID NO: 1737235 - RNA, 19 nt, Artificial Sequence
  Description of Artificial Sequence: Synthetic oligonucleotide
ggauuucugacuucaaauc

SEQ ID NO: 1737236 - RNA, 19 nt, Artificial Sequence
  Description of Artificial Sequence: Synthetic oligonucleotide
ucugguggcggaaucggaa

SEQ ID NO: 1737237 - RNA, 19 nt, Artificial Sequence
  Description of Artificial Sequence: Synthetic oligonucleotide
agugagucccaguucuuca

SEQ ID NO: 1737238 - RNA, 19 nt, Artificial Sequence
  Description of Artificial Sequence: Synthetic oligonucleotide
guuccaauacuccuucaca

SEQ ID NO: 1737239 - RNA, 19 nt, Artificial Sequence
  Description of Artificial Sequence: Synthetic oligonucleotide
auuucugacuucaaaucga

SEQ ID NO: 1737240 - RNA, 19 nt, Artificial Sequence
  Description of Artificial Sequence: Synthetic oligonucleotide
ccaauacuccuucacauag

SEQ ID NO: 1737241 - RNA, 19 nt, Artificial Sequence
  Description of Artificial Sequence: Synthetic oligonucleotide
aagcacaugauggagucua

SEQ ID NO: 1737242 - RNA, 19 nt, Artificial Sequence
  Description of Artificial Sequence: Synthetic oligonucleotide
ggauaccugauggaaaggg

SEQ ID NO: 1737243 - RNA, 19 nt, Artificial Sequence
  Description of Artificial Sequence: Synthetic oligonucleotide
aauaaacuuuccaggccga

SEQ ID NO: 1737244 - RNA, 19 nt, Artificial Sequence
  Description of Artificial Sequence: Synthetic oligonucleotide
uacgggauuucugacuuca

SEQ ID NO: 1737245 - RNA, 19 nt, Artificial Sequence
  Description of Artificial Sequence: Synthetic oligonucleotide
gauuuucccacugccaaga

SEQ ID NO: 1737246 - RNA, 19 nt, Artificial Sequence
  Description of Artificial Sequence: Synthetic oligonucleotide
caucuugucucugaccaag

SEQ ID NO: 1737247 - RNA, 19 nt, Artificial Sequence
  Description of Artificial Sequence: Synthetic oligonucleotide
cauaaacaccccugucacc

SEQ ID NO: 1737248 - RNA, 19 nt, Artificial Sequence
  Description of Artificial Sequence: Synthetic oligonucleotide
uggggagccacaagcacgu

SEQ ID NO: 1737249 - RNA, 19 nt, Artificial Sequence
  Description of Artificial Sequence: Synthetic oligonucleotide
gucuuuauagcugucagcu

SEQ ID NO: 1737250 - RNA, 19 nt, Artificial Sequence
  Description of Artificial Sequence: Synthetic oligonucleotide
ucaagccacugauuuuagc

SEQ ID NO: 1737251 - RNA, 19 nt, Artificial Sequence
  Description of Artificial Sequence: Synthetic oligonucleotide
acaccaugcucauccagug

SEQ ID NO: 1737252 - RNA, 19 nt, Artificial Sequence
  Description of Artificial Sequence: Synthetic oligonucleotide
aggcugcaaauacugaaga

SEQ ID NO: 1737253 - RNA, 19 nt, Artificial Sequence
  Description of Artificial Sequence: Synthetic oligonucleotide
gauggaaagggaugucuaa

SEQ ID NO: 1737254 - RNA, 19 nt, Artificial Sequence
  Description of Artificial Sequence: Synthetic oligonucleotide
uuguccacggcguaaugau

SEQ ID NO: 1737255 - RNA, 19 nt, Artificial Sequence
  Description of Artificial Sequence: Synthetic oligonucleotide
cacaugaugucaggguugg

SEQ ID NO: 1737256 - RNA, 19 nt, Artificial Sequence
  Description of Artificial Sequence: Synthetic oligonucleotide
cagcaauccaguguacacg

SEQ ID NO: 1737257 - RNA, 19 nt, Artificial Sequence
  Description of Artificial Sequence: Synthetic oligonucleotide
aagaaggucuggucuuuau

SEQ ID NO: 1737258 - RNA, 19 nt, Artificial Sequence
  Description of Artificial Sequence: Synthetic oligonucleotide
guuuuacgggauuucugac

SEQ ID NO: 1737259 - RNA, 19 nt, Artificial Sequence
  Description of Artificial Sequence: Synthetic oligonucleotide
ggaagaugguucuucucag

SEQ ID NO: 1737260 - RNA, 19 nt, Artificial Sequence
  Description of Artificial Sequence: Synthetic oligonucleotide
agggaugucuaagagcuga

SEQ ID NO: 1737261 - RNA, 19 nt, Artificial Sequence
  Description of Artificial Sequence: Synthetic oligonucleotide
gcucucuuucuucugaagc

SEQ ID NO: 1737262 - RNA, 19 nt, Artificial Sequence
  Description of Artificial Sequence: Synthetic oligonucleotide
uggagaaguuuuacgggau

SEQ ID NO: 1737263 - RNA, 19 nt, Artificial Sequence
  Description of Artificial Sequence: Synthetic oligonucleotide
cacccauacagugccaucc

SEQ ID NO: 1737264 - RNA, 19 nt, Artificial Sequence
  Description of Artificial Sequence: Synthetic oligonucleotide
ugguugagugucagcacac

SEQ ID NO: 1737265 - RNA, 19 nt, Artificial Sequence
  Description of Artificial Sequence: Synthetic oligonucleotide
ugaugugcuuauugcacau

SEQ ID NO: 1737266 - RNA, 19 nt, Artificial Sequence
  Description of Artificial Sequence: Synthetic oligonucleotide
auacucauucagaaaguca

SEQ ID NO: 1737267 - RNA, 19 nt, Artificial Sequence
  Description of Artificial Sequence: Synthetic oligonucleotide
gggaagaugguucuucuca

SEQ ID NO: 1737268 - RNA, 19 nt, Artificial Sequence
  Description of Artificial Sequence: Synthetic oligonucleotide
uccacgccgccagauaggg

SEQ ID NO: 1737269 - RNA, 19 nt, Artificial Sequence
  Description of Artificial Sequence: Synthetic oligonucleotide
uuuuaccaaugaagcagau

SEQ ID NO: 1737270 - RNA, 19 nt, Artificial Sequence
  Description of Artificial Sequence: Synthetic oligonucleotide
cacucuuguagaagacagc

SEQ ID NO: 1737271 - RNA, 19 nt, Artificial Sequence
  Description of Artificial Sequence: Synthetic oligonucleotide
ugaugucaggguugggagu

SEQ ID NO: 1737272 - RNA, 19 nt, Artificial Sequence
  Description of Artificial Sequence: Synthetic oligonucleotide
ugucucugaccaagguggc

SEQ ID NO: 1737273 - RNA, 19 nt, Artificial Sequence
  Description of Artificial Sequence: Synthetic oligonucleotide
gauaccugauggaaaggga

SEQ ID NO: 1737274 - RNA, 19 nt, Artificial Sequence
  Description of Artificial Sequence: Synthetic oligonucleotide
acacaucguuccaauacuc

SEQ ID NO: 1737275 - RNA, 19 nt, Artificial Sequence
  Description of Artificial Sequence: Synthetic oligonucleotide
acaagcacgucacccuuga

SEQ ID NO: 1737276 - RNA, 19 nt, Artificial Sequence
  Description of Artificial Sequence: Synthetic oligonucleotide
caucacucuuguagaagac

SEQ ID NO: 1737277 - RNA, 19 nt, Artificial Sequence
  Description of Artificial Sequence: Synthetic oligonucleotide
cuuggccuuugucagggug

SEQ ID NO: 1737278 - RNA, 19 nt, Artificial Sequence
  Description of Artificial Sequence: Synthetic oligonucleotide
agggcaaggccccguacag

SEQ ID NO: 1737279 - RNA, 19 nt, Artificial Sequence
  Description of Artificial Sequence: Synthetic oligonucleotide
uacaggaaccaaccuuuau

SEQ ID NO: 1737280 - RNA, 19 nt, Artificial Sequence
  Description of Artificial Sequence: Synthetic oligonucleotide
aguguacacgguugguccu

SEQ ID NO: 1737281 - RNA, 19 nt, Artificial Sequence
  Description of Artificial Sequence: Synthetic oligonucleotide
auuguccacggcguaauga

SEQ ID NO: 1737282 - RNA, 19 nt, Artificial Sequence
  Description of Artificial Sequence: Synthetic oligonucleotide
auaaacuuuccaggccgag

SEQ ID NO: 1737283 - RNA, 19 nt, Artificial Sequence
  Description of Artificial Sequence: Synthetic oligonucleotide
cacaguccuugucagcagc

SEQ ID NO: 1737284 - RNA, 19 nt, Artificial Sequence
  Description of Artificial Sequence: Synthetic oligonucleotide
agugccaucugguggcgga

SEQ ID NO: 1737285 - RNA, 19 nt, Artificial Sequence
  Description of Artificial Sequence: Synthetic oligonucleotide
ggucccuguacagagcugg

SEQ ID NO: 1737286 - RNA, 19 nt, Artificial Sequence
  Description of Artificial Sequence: Synthetic oligonucleotide
aagauuguccacggcguaa

SEQ ID NO: 1737287 - RNA, 19 nt, Artificial Sequence
  Description of Artificial Sequence: Synthetic oligonucleotide
ggaaccaaccuuuaugugu

SEQ ID NO: 1737288 - RNA, 19 nt, Artificial Sequence
  Description of Artificial Sequence: Synthetic oligonucleotide
cacgacgugccgcagcgcc

SEQ ID NO: 1737289 - RNA, 19 nt, Artificial Sequence
  Description of Artificial Sequence: Synthetic oligonucleotide
auaccugauggaaagggau

SEQ ID NO: 1737290 - RNA, 19 nt, Artificial Sequence
  Description of Artificial Sequence: Synthetic oligonucleotide
agcagaugcccaugcucuc

SEQ ID NO: 1737291 - RNA, 19 nt, Artificial Sequence
  Description of Artificial Sequence: Synthetic oligonucleotide
ugaacacaucguuccaaua

SEQ ID NO: 1737292 - RNA, 19 nt, Artificial Sequence
  Description of Artificial Sequence: Synthetic oligonucleotide
aacugaacuugaugugcuu

SEQ ID NO: 1737293 - RNA, 19 nt, Artificial Sequence
  Description of Artificial Sequence: Synthetic oligonucleotide
ggucuuuauagcugucagc

SEQ ID NO: 1737294 - RNA, 19 nt, Artificial Sequence
  Description of Artificial Sequence: Synthetic oligonucleotide
ggcguaaugauaaaagcaa

SEQ ID NO: 1737295 - RNA, 19 nt, Artificial Sequence
  Description of Artificial Sequence: Synthetic oligonucleotide
cucucugucccaaaguaua

SEQ ID NO: 1737296 - RNA, 19 nt, Artificial Sequence
  Description of Artificial Sequence: Synthetic oligonucleotide
uggcaacggcaucugcucc

SEQ ID NO: 1737297 - RNA, 19 nt, Artificial Sequence
  Description of Artificial Sequence: Synthetic oligonucleotide
cugaacagcccaucugguc

SEQ ID NO: 1737298 - RNA, 19 nt, Artificial Sequence
  Description of Artificial Sequence: Synthetic oligonucleotide
acgguugguccugagcagg

SEQ ID NO: 1737299 - RNA, 19 nt, Artificial Sequence
  Description of Artificial Sequence: Synthetic oligonucleotide
caucugguggcggaaucgg

SEQ ID NO: 1737300 - RNA, 19 nt, Artificial Sequence
  Description of Artificial Sequence: Synthetic oligonucleotide
caggaaccaaccuuuaugu

SEQ ID NO: 1737301 - RNA, 19 nt, Artificial Sequence
  Description of Artificial Sequence: Synthetic oligonucleotide
cugguugagugucagcaca

SEQ ID NO: 1737302 - RNA, 19 nt, Artificial Sequence
  Description of Artificial Sequence: Synthetic oligonucleotide
uauccucgauagaaauaaa

SEQ ID NO: 1737303 - RNA, 19 nt, Artificial Sequence
  Description of Artificial Sequence: Synthetic oligonucleotide
cucaagccacugauuuuag

SEQ ID NO: 1737304 - RNA, 19 nt, Artificial Sequence
  Description of Artificial Sequence: Synthetic oligonucleotide
gaaguuuuacgggauuucu

SEQ ID NO: 1737305 - RNA, 19 nt, Artificial Sequence
  Description of Artificial Sequence: Synthetic oligonucleotide
cauaguggccaguggcaac

SEQ ID NO: 1737306 - RNA, 19 nt, Artificial Sequence
  Description of Artificial Sequence: Synthetic oligonucleotide
gauuucugaacagcccauc

SEQ ID NO: 1737307 - RNA, 19 nt, Artificial Sequence
  Description of Artificial Sequence: Synthetic oligonucleotide
ccuguacagagcugggugg

SEQ ID NO: 1737308 - RNA, 19 nt, Artificial Sequence
  Description of Artificial Sequence: Synthetic oligonucleotide
ccagauagggcacacacga

SEQ ID NO: 1737309 - RNA, 19 nt, Artificial Sequence
  Description of Artificial Sequence: Synthetic oligonucleotide
gauuguccacggcguaaug

SEQ ID NO: 1737310 - RNA, 19 nt, Artificial Sequence
  Description of Artificial Sequence: Synthetic oligonucleotide
uaaacaccccugucaccug

SEQ ID NO: 1737311 - RNA, 19 nt, Artificial Sequence
  Description of Artificial Sequence: Synthetic oligonucleotide
cuuuauuauccucgauaga

SEQ ID NO: 1737312 - RNA, 19 nt, Artificial Sequence
  Description of Artificial Sequence: Synthetic oligonucleotide
ccccguacagccuucacag

SEQ ID NO: 1737313 - RNA, 19 nt, Artificial Sequence
  Description of Artificial Sequence: Synthetic oligonucleotide
auaggauaccugauggaaa

SEQ ID NO: 1737314 - RNA, 19 nt, Artificial Sequence
  Description of Artificial Sequence: Synthetic oligonucleotide
ucuauucucugcagcuauu

SEQ ID NO: 1737315 - RNA, 19 nt, Artificial Sequence
  Description of Artificial Sequence: Synthetic oligonucleotide
agggcacacacgacgugcc

SEQ ID NO: 1737316 - RNA, 19 nt, Artificial Sequence
  Description of Artificial Sequence: Synthetic oligonucleotide
aucuggucucuuagugugc

SEQ ID NO: 1737317 - RNA, 19 nt, Artificial Sequence
  Description of Artificial Sequence: Synthetic oligonucleotide
guauacaggaaccaaccuu

SEQ ID NO: 1737318 - RNA, 19 nt, Artificial Sequence
  Description of Artificial Sequence: Synthetic oligonucleotide
acggcaucugcuccaagau

SEQ ID NO: 1737319 - RNA, 19 nt, Artificial Sequence
  Description of Artificial Sequence: Synthetic oligonucleotide
gagucccaguucuucauaa

SEQ ID NO: 1737320 - RNA, 19 nt, Artificial Sequence
  Description of Artificial Sequence: Synthetic oligonucleotide
gcuccaagauuguccacgg

SEQ ID NO: 1737321 - RNA, 19 nt, Artificial Sequence
  Description of Artificial Sequence: Synthetic oligonucleotide
guggcaacggcaucugcuc

SEQ ID NO: 1737322 - RNA, 19 nt, Artificial Sequence
  Description of Artificial Sequence: Synthetic oligonucleotide
cagggagguccuugcauag

SEQ ID NO: 1737323 - RNA, 19 nt, Artificial Sequence
  Description of Artificial Sequence: Synthetic oligonucleotide
uggcggaaucggaaauggc

SEQ ID NO: 1737324 - RNA, 19 nt, Artificial Sequence
  Description of Artificial Sequence: Synthetic oligonucleotide
ucuaccuggggagccacaa

SEQ ID NO: 1737325 - RNA, 19 nt, Artificial Sequence
  Description of Artificial Sequence: Synthetic oligonucleotide
auagggcacacacgacgug

SEQ ID NO: 1737326 - RNA, 19 nt, Artificial Sequence
  Description of Artificial Sequence: Synthetic oligonucleotide
cugguagccucuccgccgc

SEQ ID NO: 1737327 - RNA, 19 nt, Artificial Sequence
  Description of Artificial Sequence: Synthetic oligonucleotide
auuauccucgauagaaaua

SEQ ID NO: 1737328 - RNA, 19 nt, Artificial Sequence
  Description of Artificial Sequence: Synthetic oligonucleotide
gccuuugucagggugucgg

SEQ ID NO: 1737329 - RNA, 19 nt, Artificial Sequence
  Description of Artificial Sequence: Synthetic oligonucleotide
cucuccgccgcaacagcag

SEQ ID NO: 1737330 - RNA, 19 nt, Artificial Sequence
  Description of Artificial Sequence: Synthetic oligonucleotide
agcagcgcagccaccgcgc

SEQ ID NO: 1737331 - RNA, 19 nt, Artificial Sequence
  Description of Artificial Sequence: Synthetic oligonucleotide
ccaaccuuuauguguuccc

SEQ ID NO: 1737332 - RNA, 19 nt, Artificial Sequence
  Description of Artificial Sequence: Synthetic oligonucleotide
cagacggcccuaaccguag

SEQ ID NO: 1737333 - RNA, 19 nt, Artificial Sequence
  Description of Artificial Sequence: Synthetic oligonucleotide
acugaacacaucguuccaa

SEQ ID NO: 1737334 - RNA, 19 nt, Artificial Sequence
  Description of Artificial Sequence: Synthetic oligonucleotide
uucugacuucaaaucgauu

SEQ ID NO: 1737335 - RNA, 19 nt, Artificial Sequence
  Description of Artificial Sequence: Synthetic oligonucleotide
gccuucacagcugucaccc

SEQ ID NO: 1737336 - RNA, 19 nt, Artificial Sequence
  Description of Artificial Sequence: Synthetic oligonucleotide
caccugguagccucuccgc

SEQ ID NO: 1737337 - RNA, 19 nt, Artificial Sequence
  Description of Artificial Sequence: Synthetic oligonucleotide
cacgguugguccugagcag

SEQ ID NO: 1737338 - RNA, 19 nt, Artificial Sequence
  Description of Artificial Sequence: Synthetic oligonucleotide
ugguggcggaaucggaaau

SEQ ID NO: 1737339 - RNA, 19 nt, Artificial Sequence
  Description of Artificial Sequence: Synthetic oligonucleotide
acccauacagugccauccu

SEQ ID NO: 1737340 - RNA, 19 nt, Artificial Sequence
  Description of Artificial Sequence: Synthetic oligonucleotide
gaaaccuggcugagaaaga

SEQ ID NO: 1737341 - RNA, 19 nt, Artificial Sequence
  Description of Artificial Sequence: Synthetic oligonucleotide
gauagggcacacacgacgu

SEQ ID NO: 1737342 - RNA, 19 nt, Artificial Sequence
  Description of Artificial Sequence: Synthetic oligonucleotide
ggcggaaucggaaauggca

SEQ ID NO: 1737343 - RNA, 19 nt, Artificial Sequence
  Description of Artificial Sequence: Synthetic oligonucleotide
cacaagcacgucacccuug

SEQ ID NO: 1737344 - RNA, 19 nt, Artificial Sequence
  Description of Artificial Sequence: Synthetic oligonucleotide
uccaggccgaggcugcaaa

SEQ ID NO: 1737345 - RNA, 19 nt, Artificial Sequence
  Description of Artificial Sequence: Synthetic oligonucleotide
uguccacggcguaaugaua

SEQ ID NO: 1737346 - RNA, 19 nt, Artificial Sequence
  Description of Artificial Sequence: Synthetic oligonucleotide
guaccagggcucucucaag

SEQ ID NO: 1737347 - RNA, 19 nt, Artificial Sequence
  Description of Artificial Sequence: Synthetic oligonucleotide
cagauagggcacacacgac

SEQ ID NO: 1737348 - RNA, 19 nt, Artificial Sequence
  Description of Artificial Sequence: Synthetic oligonucleotide
gggauuucugacuucaaau

SEQ ID NO: 1737349 - RNA, 19 nt, Artificial Sequence
  Description of Artificial Sequence: Synthetic oligonucleotide
accguaggauuuucccacu

SEQ ID NO: 1737350 - RNA, 19 nt, Artificial Sequence
  Description of Artificial Sequence: Synthetic oligonucleotide
agauuguccacggcguaau

SEQ ID NO: 1737351 - RNA, 19 nt, Artificial Sequence
  Description of Artificial Sequence: Synthetic oligonucleotide
guccacggcguaaugauaa

SEQ ID NO: 1737352 - RNA, 19 nt, Artificial Sequence
  Description of Artificial Sequence: Synthetic oligonucleotide
gaaccaaccuuuauguguu

SEQ ID NO: 1737353 - RNA, 19 nt, Artificial Sequence
  Description of Artificial Sequence: Synthetic oligonucleotide
uccgccgcaacagcagcgc

SEQ ID NO: 1737354 - RNA, 19 nt, Artificial Sequence
  Description of Artificial Sequence: Synthetic oligonucleotide
ugcccaugcucucuuucuu

SEQ ID NO: 1737355 - RNA, 19 nt, Artificial Sequence
  Description of Artificial Sequence: Synthetic oligonucleotide
cugaagcacaugauggagu

SEQ ID NO: 1737356 - RNA, 19 nt, Artificial Sequence
  Description of Artificial Sequence: Synthetic oligonucleotide
uuacgggauuucugacuuc

SEQ ID NO: 1737357 - RNA, 19 nt, Artificial Sequence
  Description of Artificial Sequence: Synthetic oligonucleotide
guguguaggcagacggccc

SEQ ID NO: 1737358 - RNA, 19 nt, Artificial Sequence
  Description of Artificial Sequence: Synthetic oligonucleotide
cucuuguagaagacagcaa

SEQ ID NO: 1737359 - RNA, 19 nt, Artificial Sequence
  Description of Artificial Sequence: Synthetic oligonucleotide
cuccaagauuguccacggc

SEQ ID NO: 1737360 - RNA, 19 nt, Artificial Sequence
  Description of Artificial Sequence: Synthetic oligonucleotide
gucaccugguagccucucc

SEQ ID NO: 1737361 - RNA, 19 nt, Artificial Sequence
  Description of Artificial Sequence: Synthetic oligonucleotide
cuaccuggggagccacaag

SEQ ID NO: 1737362 - RNA, 19 nt, Artificial Sequence
  Description of Artificial Sequence: Synthetic oligonucleotide
caacugaacuugaugugcu

SEQ ID NO: 1737363 - RNA, 19 nt, Artificial Sequence
  Description of Artificial Sequence: Synthetic oligonucleotide
ggagguccuugcauagugg

SEQ ID NO: 1737364 - RNA, 19 nt, Artificial Sequence
  Description of Artificial Sequence: Synthetic oligonucleotide
gcguaaugauaaaagcaac

SEQ ID NO: 1737365 - RNA, 19 nt, Artificial Sequence
  Description of Artificial Sequence: Synthetic oligonucleotide
uccacggcguaaugauaaa

SEQ ID NO: 1737366 - RNA, 19 nt, Artificial Sequence
  Description of Artificial Sequence: Synthetic oligonucleotide
gcggaaucggaaauggcac

SEQ ID NO: 1737367 - RNA, 19 nt, Artificial Sequence
  Description of Artificial Sequence: Synthetic oligonucleotide
augcucgaaguuucuuuua

SEQ ID NO: 1737368 - RNA, 19 nt, Artificial Sequence
  Description of Artificial Sequence: Synthetic oligonucleotide
ggaaucggaaauggcacuc

SEQ ID NO: 1737369 - RNA, 19 nt, Artificial Sequence
  Description of Artificial Sequence: Synthetic oligonucleotide
gccgacaucugcauacacc

SEQ ID NO: 1737370 - RNA, 19 nt, Artificial Sequence
  Description of Artificial Sequence: Synthetic oligonucleotide
gccgaggcugcaaauacug

SEQ ID NO: 1737371 - RNA, 19 nt, Artificial Sequence
  Description of Artificial Sequence: Synthetic oligonucleotide
uagugccaucugguggcgg

SEQ ID NO: 1737372 - RNA, 19 nt, Artificial Sequence
  Description of Artificial Sequence: Synthetic oligonucleotide
cuagugccaucugguggcg

SEQ ID NO: 1737373 - RNA, 19 nt, Artificial Sequence
  Description of Artificial Sequence: Synthetic oligonucleotide
ucccuguacagagcugggu

SEQ ID NO: 1737374 - RNA, 19 nt, Artificial Sequence
  Description of Artificial Sequence: Synthetic oligonucleotide
agucuauucucugcagcua

SEQ ID NO: 1737375 - RNA, 19 nt, Artificial Sequence
  Description of Artificial Sequence: Synthetic oligonucleotide
uguacagagcugggugguc

SEQ ID NO: 1737376 - RNA, 19 nt, Artificial Sequence
  Description of Artificial Sequence: Synthetic oligonucleotide
guggucuaccuggggagcc

SEQ ID NO: 1737377 - RNA, 19 nt, Artificial Sequence
  Description of Artificial Sequence: Synthetic oligonucleotide
cuugcccuucuggagugug

SEQ ID NO: 1737378 - RNA, 19 nt, Artificial Sequence
  Description of Artificial Sequence: Synthetic oligonucleotide
gagaaguuuuacgggauuu

SEQ ID NO: 1737379 - RNA, 19 nt, Artificial Sequence
  Description of Artificial Sequence: Synthetic oligonucleotide
ugcccuucuggagugugua

SEQ ID NO: 1737380 - RNA, 19 nt, Artificial Sequence
  Description of Artificial Sequence: Synthetic oligonucleotide
gccagauagggcacacacg

SEQ ID NO: 1737381 - RNA, 19 nt, Artificial Sequence
  Description of Artificial Sequence: Synthetic oligonucleotide
gucgggugcaggccugggc

SEQ ID NO: 1737382 - RNA, 19 nt, Artificial Sequence
  Description of Artificial Sequence: Synthetic oligonucleotide
acacaggggacuagugcca

SEQ ID NO: 1737383 - RNA, 19 nt, Artificial Sequence
  Description of Artificial Sequence: Synthetic oligonucleotide
guagccucuccgccgcaac

SEQ ID NO: 1737384 - RNA, 19 nt, Artificial Sequence
  Description of Artificial Sequence: Synthetic oligonucleotide
gcacaugaugucaggguug

SEQ ID NO: 1737385 - RNA, 19 nt, Artificial Sequence
  Description of Artificial Sequence: Synthetic oligonucleotide
aacagcccaucuggucucu

SEQ ID NO: 1737386 - RNA, 19 nt, Artificial Sequence
  Description of Artificial Sequence: Synthetic oligonucleotide
gguggcggaaucggaaaug

SEQ ID NO: 1737387 - RNA, 19 nt, Artificial Sequence
  Description of Artificial Sequence: Synthetic oligonucleotide
ugucagggugucgggugca

SEQ ID NO: 1737388 - RNA, 19 nt, Artificial Sequence
  Description of Artificial Sequence: Synthetic oligonucleotide
cggcguaaugauaaaagca

SEQ ID NO: 1737389 - RNA, 19 nt, Artificial Sequence
  Description of Artificial Sequence: Synthetic oligonucleotide
cguaggauuuucccacugc

SEQ ID NO: 1737390 - RNA, 19 nt, Artificial Sequence
  Description of Artificial Sequence: Synthetic oligonucleotide
ugucgggugcaggccuggg

SEQ ID NO: 1737391 - RNA, 19 nt, Artificial Sequence
  Description of Artificial Sequence: Synthetic oligonucleotide
cguuccaauacuccuucac

SEQ ID NO: 1737392 - RNA, 19 nt, Artificial Sequence
  Description of Artificial Sequence: Synthetic oligonucleotide
cauccagugagucccaguu

SEQ ID NO: 1737393 - RNA, 19 nt, Artificial Sequence
  Description of Artificial Sequence: Synthetic oligonucleotide
aaggccccguacagccuuc

SEQ ID NO: 1737394 - RNA, 19 nt, Artificial Sequence
  Description of Artificial Sequence: Synthetic oligonucleotide
cugguggcggaaucggaaa

SEQ ID NO: 1737395 - RNA, 19 nt, Artificial Sequence
  Description of Artificial Sequence: Synthetic oligonucleotide
aggggacuagugccaucug

SEQ ID NO: 1737396 - RNA, 19 nt, Artificial Sequence
  Description of Artificial Sequence: Synthetic oligonucleotide
guacacgguugguccugag

SEQ ID NO: 1737397 - RNA, 19 nt, Artificial Sequence
  Description of Artificial Sequence: Synthetic oligonucleotide
cugaacacaucguuccaau

SEQ ID NO: 1737398 - RNA, 19 nt, Artificial Sequence
  Description of Artificial Sequence: Synthetic oligonucleotide
acggcccuaaccguaggau

SEQ ID NO: 1737399 - RNA, 19 nt, Artificial Sequence
  Description of Artificial Sequence: Synthetic oligonucleotide
cuucuccaccacguaccag

SEQ ID NO: 1737400 - RNA, 19 nt, Artificial Sequence
  Description of Artificial Sequence: Synthetic oligonucleotide
ggcaacggcaucugcucca

SEQ ID NO: 1737401 - RNA, 19 nt, Artificial Sequence
  Description of Artificial Sequence: Synthetic oligonucleotide
ggcacacacgacgugccgc

SEQ ID NO: 1737402 - RNA, 19 nt, Artificial Sequence
  Description of Artificial Sequence: Synthetic oligonucleotide
aucggaaauggcacuccau

SEQ ID NO: 1737403 - RNA, 19 nt, Artificial Sequence
  Description of Artificial Sequence: Synthetic oligonucleotide
guaggcagacggcccuaac

SEQ ID NO: 1737404 - RNA, 19 nt, Artificial Sequence
  Description of Artificial Sequence: Synthetic oligonucleotide
acacgacgugccgcagcgc

SEQ ID NO: 1737405 - RNA, 19 nt, Artificial Sequence
  Description of Artificial Sequence: Synthetic oligonucleotide
ccuugcauaguggccagug

SEQ ID NO: 1737406 - RNA, 19 nt, Artificial Sequence
  Description of Artificial Sequence: Synthetic oligonucleotide
uggagaccucaggagccac

SEQ ID NO: 1737407 - RNA, 19 nt, Artificial Sequence
  Description of Artificial Sequence: Synthetic oligonucleotide
caacagcagcgcagccacc

SEQ ID NO: 1737408 - RNA, 19 nt, Artificial Sequence
  Description of Artificial Sequence: Synthetic oligonucleotide
cgccagauagggcacacac

SEQ ID NO: 1737409 - RNA, 19 nt, Artificial Sequence
  Description of Artificial Sequence: Synthetic oligonucleotide
caauccaguguacacgguu

SEQ ID NO: 1737410 - RNA, 19 nt, Artificial Sequence
  Description of Artificial Sequence: Synthetic oligonucleotide
gucccaaaguauacaggaa

SEQ ID NO: 1737411 - RNA, 19 nt, Artificial Sequence
  Description of Artificial Sequence: Synthetic oligonucleotide
auacuccuucacauaggau

SEQ ID NO: 1737412 - RNA, 19 nt, Artificial Sequence
  Description of Artificial Sequence: Synthetic oligonucleotide
caucguuccaauacuccuu

SEQ ID NO: 1737413 - RNA, 19 nt, Artificial Sequence
  Description of Artificial Sequence: Synthetic oligonucleotide
caagauuguccacggcgua

SEQ ID NO: 1737414 - RNA, 19 nt, Artificial Sequence
  Description of Artificial Sequence: Synthetic oligonucleotide
acgacgugccgcagcgccg

SEQ ID NO: 1737415 - RNA, 19 nt, Artificial Sequence
  Description of Artificial Sequence: Synthetic oligonucleotide
gaaaugcucgaaguuucuu

SEQ ID NO: 1737416 - RNA, 19 nt, Artificial Sequence
  Description of Artificial Sequence: Synthetic oligonucleotide
gggcacacacgacgugccg

SEQ ID NO: 1737417 - RNA, 19 nt, Artificial Sequence
  Description of Artificial Sequence: Synthetic oligonucleotide
gguggucuaccuggggagc

SEQ ID NO: 1737418 - RNA, 19 nt, Artificial Sequence
  Description of Artificial Sequence: Synthetic oligonucleotide
ccaguguacacgguugguc

SEQ ID NO: 1737419 - RNA, 19 nt, Artificial Sequence
  Description of Artificial Sequence: Synthetic oligonucleotide
ccuggggagccacaagcac

SEQ ID NO: 1737420 - RNA, 19 nt, Artificial Sequence
  Description of Artificial Sequence: Synthetic oligonucleotide
guacagagcuggguggucu

SEQ ID NO: 1737421 - RNA, 19 nt, Artificial Sequence
  Description of Artificial Sequence: Synthetic oligonucleotide
accacguaccagggcucuc

SEQ ID NO: 1737422 - RNA, 19 nt, Artificial Sequence
  Description of Artificial Sequence: Synthetic oligonucleotide
gccgcaacagcagcgcagc

SEQ ID NO: 1737423 - RNA, 19 nt, Artificial Sequence
  Description of Artificial Sequence: Synthetic oligonucleotide
accaagguggcaggugguu

SEQ ID NO: 1737424 - RNA, 19 nt, Artificial Sequence
  Description of Artificial Sequence: Synthetic oligonucleotide
ggcucucucaagccacuga

SEQ ID NO: 1737425 - RNA, 19 nt, Artificial Sequence
  Description of Artificial Sequence: Synthetic oligonucleotide
gucuaagagcugacaaacu

SEQ ID NO: 1737426 - RNA, 19 nt, Artificial Sequence
  Description of Artificial Sequence: Synthetic oligonucleotide
auacaggaaccaaccuuua

SEQ ID NO: 1737427 - RNA, 19 nt, Artificial Sequence
  Description of Artificial Sequence: Synthetic oligonucleotide
uucccacugccaagacauu

SEQ ID NO: 1737428 - RNA, 19 nt, Artificial Sequence
  Description of Artificial Sequence: Synthetic oligonucleotide
gugagucccaguucuucau

SEQ ID NO: 1737429 - RNA, 19 nt, Artificial Sequence
  Description of Artificial Sequence: Synthetic oligonucleotide
ugccaucugguggcggaau

SEQ ID NO: 1737430 - RNA, 19 nt, Artificial Sequence
  Description of Artificial Sequence: Synthetic oligonucleotide
acgccgccagauagggcac

SEQ ID NO: 1737431 - RNA, 19 nt, Artificial Sequence
  Description of Artificial Sequence: Synthetic oligonucleotide
gccccguacagccuucaca

SEQ ID NO: 1737432 - RNA, 19 nt, Artificial Sequence
  Description of Artificial Sequence: Synthetic oligonucleotide
ccaagauuguccacggcgu

SEQ ID NO: 1737433 - RNA, 19 nt, Artificial Sequence
  Description of Artificial Sequence: Synthetic oligonucleotide
cggaaauggcacuccauca

SEQ ID NO: 1737434 - RNA, 19 nt, Artificial Sequence
  Description of Artificial Sequence: Synthetic oligonucleotide
uccuugcauaguggccagu

SEQ ID NO: 1737435 - RNA, 19 nt, Artificial Sequence
  Description of Artificial Sequence: Synthetic oligonucleotide
gggacuagugccaucuggu

SEQ ID NO: 1737436 - RNA, 19 nt, Artificial Sequence
  Description of Artificial Sequence: Synthetic oligonucleotide
caggugguuccucagcaau

SEQ ID NO: 1737437 - RNA, 19 nt, Artificial Sequence
  Description of Artificial Sequence: Synthetic oligonucleotide
gggaugucuaagagcugac

SEQ ID NO: 1737438 - RNA, 19 nt, Artificial Sequence
  Description of Artificial Sequence: Synthetic oligonucleotide
cacacacgacgugccgcag

SEQ ID NO: 1737439 - RNA, 19 nt, Artificial Sequence
  Description of Artificial Sequence: Synthetic oligonucleotide
ggucucuuagugugcuucu

SEQ ID NO: 1737440 - RNA, 19 nt, Artificial Sequence
  Description of Artificial Sequence: Synthetic oligonucleotide
agggcucucucaagccacu

SEQ ID NO: 1737441 - RNA, 19 nt, Artificial Sequence
  Description of Artificial Sequence: Synthetic oligonucleotide
gccaucugguggcggaauc

SEQ ID NO: 1737442 - RNA, 19 nt, Artificial Sequence
  Description of Artificial Sequence: Synthetic oligonucleotide
gguccugagcaggucccug

SEQ ID NO: 1737443 - RNA, 19 nt, Artificial Sequence
  Description of Artificial Sequence: Synthetic oligonucleotide
aggucccuguacagagcug

SEQ ID NO: 1737444 - RNA, 19 nt, Artificial Sequence
  Description of Artificial Sequence: Synthetic oligonucleotide
cagcugucacccauacagu

SEQ ID NO: 1737445 - RNA, 19 nt, Artificial Sequence
  Description of Artificial Sequence: Synthetic oligonucleotide
gccucuccgccgcaacagc

SEQ ID NO: 1737446 - RNA, 19 nt, Artificial Sequence
  Description of Artificial Sequence: Synthetic oligonucleotide
ggagaaguuuuacgggauu

SEQ ID NO: 1737447 - RNA, 19 nt, Artificial Sequence
  Description of Artificial Sequence: Synthetic oligonucleotide
ccaagguggcaggugguuc

SEQ ID NO: 1737448 - RNA, 19 nt, Artificial Sequence
  Description of Artificial Sequence: Synthetic oligonucleotide
cguaccagggcucucucaa

SEQ ID NO: 1737449 - RNA, 19 nt, Artificial Sequence
  Description of Artificial Sequence: Synthetic oligonucleotide
cagcgcagccaccgcgcug

SEQ ID NO: 1737450 - RNA, 19 nt, Artificial Sequence
  Description of Artificial Sequence: Synthetic oligonucleotide
gguugggaguccuuccuuu

SEQ ID NO: 1737451 - RNA, 19 nt, Artificial Sequence
  Description of Artificial Sequence: Synthetic oligonucleotide
gcaggucccuguacagagc

SEQ ID NO: 1737452 - RNA, 19 nt, Artificial Sequence
  Description of Artificial Sequence: Synthetic oligonucleotide
ccugauggaaagggauguc

SEQ ID NO: 1737453 - RNA, 19 nt, Artificial Sequence
  Description of Artificial Sequence: Synthetic oligonucleotide
gucccagggcaaggccccg

SEQ ID NO: 1737454 - RNA, 19 nt, Artificial Sequence
  Description of Artificial Sequence: Synthetic oligonucleotide
ccaucuggucucuuagugu

SEQ ID NO: 1737455 - RNA, 19 nt, Artificial Sequence
  Description of Artificial Sequence: Synthetic oligonucleotide
acgggauuucugacuucaa

SEQ ID NO: 1737456 - RNA, 19 nt, Artificial Sequence
  Description of Artificial Sequence: Synthetic oligonucleotide
gaccaagguggcagguggu

SEQ ID NO: 1737457 - RNA, 19 nt, Artificial Sequence
  Description of Artificial Sequence: Synthetic oligonucleotide
ccaccacguaccagggcuc

SEQ ID NO: 1737458 - RNA, 19 nt, Artificial Sequence
  Description of Artificial Sequence: Synthetic oligonucleotide
cgccgcaacagcagcgcag

SEQ ID NO: 1737459 - RNA, 19 nt, Artificial Sequence
  Description of Artificial Sequence: Synthetic oligonucleotide
ggccugggcugucacugga

SEQ ID NO: 1737460 - RNA, 19 nt, Artificial Sequence
  Description of Artificial Sequence: Synthetic oligonucleotide
cuguccacgccgccagaua

SEQ ID NO: 1737461 - RNA, 19 nt, Artificial Sequence
  Description of Artificial Sequence: Synthetic oligonucleotide
gacgugccgcagcgccgac

SEQ ID NO: 1737462 - RNA, 19 nt, Artificial Sequence
  Description of Artificial Sequence: Synthetic oligonucleotide
ccaguggcaacggcaucug

SEQ ID NO: 1737463 - RNA, 19 nt, Artificial Sequence
  Description of Artificial Sequence: Synthetic oligonucleotide
gcagacggcccuaaccgua

SEQ ID NO: 1737464 - RNA, 19 nt, Artificial Sequence
  Description of Artificial Sequence: Synthetic oligonucleotide
ggcccuaaccguaggauuu

SEQ ID NO: 1737465 - RNA, 19 nt, Artificial Sequence
  Description of Artificial Sequence: Synthetic oligonucleotide
gagccacucugguucuguu

SEQ ID NO: 1737466 - RNA, 19 nt, Artificial Sequence
  Description of Artificial Sequence: Synthetic oligonucleotide
acgugccgcagcgccgaca

SEQ ID NO: 1737467 - RNA, 19 nt, Artificial Sequence
  Description of Artificial Sequence: Synthetic oligonucleotide
gggcucucucaagccacug

SEQ ID NO: 1737468 - RNA, 19 nt, Artificial Sequence
  Description of Artificial Sequence: Synthetic oligonucleotide
ccgaggcugcaaauacuga

SEQ ID NO: 1737469 - RNA, 19 nt, Artificial Sequence
  Description of Artificial Sequence: Synthetic oligonucleotide
ggcagacggcccuaaccgu

SEQ ID NO: 1737470 - RNA, 19 nt, Artificial Sequence
  Description of Artificial Sequence: Synthetic oligonucleotide
cagcacacaggggacuagu

SEQ ID NO: 1737471 - RNA, 19 nt, Artificial Sequence
  Description of Artificial Sequence: Synthetic oligonucleotide
cacccuugaugccauccuu

SEQ ID NO: 1737472 - RNA, 19 nt, Artificial Sequence
  Description of Artificial Sequence: Synthetic oligonucleotide
aggccccguacagccuuca

SEQ ID NO: 1737473 - RNA, 19 nt, Artificial Sequence
  Description of Artificial Sequence: Synthetic oligonucleotide
cagaugcccaugcucucuu

SEQ ID NO: 1737474 - RNA, 19 nt, Artificial Sequence
  Description of Artificial Sequence: Synthetic oligonucleotide
ggccccguacagccuucac

SEQ ID NO: 1737475 - RNA, 19 nt, Artificial Sequence
  Description of Artificial Sequence: Synthetic oligonucleotide
guguaggcagacggcccua

SEQ ID NO: 1737476 - RNA, 19 nt, Artificial Sequence
  Description of Artificial Sequence: Synthetic oligonucleotide
gcaacggcaucugcuccaa

SEQ ID NO: 1737477 - RNA, 19 nt, Artificial Sequence
  Description of Artificial Sequence: Synthetic oligonucleotide
ccacggcguaaugauaaaa

SEQ ID NO: 1737478 - RNA, 19 nt, Artificial Sequence
  Description of Artificial Sequence: Synthetic oligonucleotide
gccgccagauagggcacac

SEQ ID NO: 1737479 - RNA, 19 nt, Artificial Sequence
  Description of Artificial Sequence: Synthetic oligonucleotide
ccgcagcgccgacaucugc

SEQ ID NO: 1737480 - RNA, 19 nt, Artificial Sequence
  Description of Artificial Sequence: Synthetic oligonucleotide
gcagcgccgacaucugcau

SEQ ID NO: 1737481 - RNA, 19 nt, Artificial Sequence
  Description of Artificial Sequence: Synthetic oligonucleotide
cacaggggacuagugccau

SEQ ID NO: 1737482 - RNA, 19 nt, Artificial Sequence
  Description of Artificial Sequence: Synthetic oligonucleotide
cgccgacaucugcauacac

SEQ ID NO: 1737483 - RNA, 19 nt, Artificial Sequence
  Description of Artificial Sequence: Synthetic oligonucleotide
cagcgccgacaucugcaua

SEQ ID NO: 1737484 - RNA, 19 nt, Artificial Sequence
  Description of Artificial Sequence: Synthetic oligonucleotide
gccgcagcgccgacaucug

SEQ ID NO: 1737485 - RNA, 19 nt, Artificial Sequence
  Description of Artificial Sequence: Synthetic oligonucleotide
cuggucucuuagugugcuu

SEQ ID NO: 1737486 - RNA, 19 nt, Artificial Sequence
  Description of Artificial Sequence: Synthetic oligonucleotide
ggccgaggcugcaaauacu

SEQ ID NO: 1737487 - RNA, 19 nt, Artificial Sequence
  Description of Artificial Sequence: Synthetic oligonucleotide
gcgccgacaucugcauaca

SEQ ID NO: 1737488 - RNA, 19 nt, Artificial Sequence
  Description of Artificial Sequence: Synthetic oligonucleotide
cgauuucugaacagcccau

SEQ ID NO: 1737489 - RNA, 19 nt, Artificial Sequence
  Description of Artificial Sequence: Synthetic oligonucleotide
caagcacgucacccuugau

SEQ ID NO: 1737490 - RNA, 19 nt, Artificial Sequence
  Description of Artificial Sequence: Synthetic oligonucleotide
gugccgcagcgccgacauc

SEQ ID NO: 1737491 - RNA, 19 nt, Artificial Sequence
  Description of Artificial Sequence: Synthetic oligonucleotide
ccaccgcgcuguccacgcc

SEQ ID NO: 1737492 - RNA, 19 nt, Artificial Sequence
  Description of Artificial Sequence: Synthetic oligonucleotide
gcaauccaguguacacggu

SEQ ID NO: 1737493 - RNA, 19 nt, Artificial Sequence
  Description of Artificial Sequence: Synthetic oligonucleotide
gcuguccacgccgccagau

SEQ ID NO: 1737494 - RNA, 19 nt, Artificial Sequence
  Description of Artificial Sequence: Synthetic oligonucleotide
ccacaagcacgucacccuu

SEQ ID NO: 1737495 - RNA, 19 nt, Artificial Sequence
  Description of Artificial Sequence: Synthetic oligonucleotide
ggggagccacaagcacguc

SEQ ID NO: 1737496 - RNA, 19 nt, Artificial Sequence
  Description of Artificial Sequence: Synthetic oligonucleotide
ccgccgcaacagcagcgca

SEQ ID NO: 1737497 - RNA, 19 nt, Artificial Sequence
  Description of Artificial Sequence: Synthetic oligonucleotide
cgugccgcagcgccgacau

SEQ ID NO: 1737498 - RNA, 19 nt, Artificial Sequence
  Description of Artificial Sequence: Synthetic oligonucleotide
cgacgugccgcagcgccga

SEQ ID NO: 1737499 - RNA, 19 nt, Artificial Sequence
  Description of Artificial Sequence: Synthetic oligonucleotide
ccaggccgaggcugcaaau

SEQ ID NO: 1737500 - RNA, 19 nt, Artificial Sequence
  Description of Artificial Sequence: Synthetic oligonucleotide
ccgccagauagggcacaca

SEQ ID NO: 1737501 - RNA, 19 nt, Artificial Sequence
  Description of Artificial Sequence: Synthetic oligonucleotide
cggcccuaaccguaggauu

SEQ ID NO: 1737502 - RNA, 19 nt, Artificial Sequence
  Description of Artificial Sequence: Synthetic oligonucleotide
ccacucugguucuguucuu

SEQ ID NO: 1737503 - RNA, 19 nt, Artificial Sequence
  Description of Artificial Sequence: Synthetic oligonucleotide
uguaggagcaccauggugg

SEQ ID NO: 1737504 - RNA, 19 nt, Artificial Sequence
  Description of Artificial Sequence: Synthetic oligonucleotide
acaggaauggcuuuucucc

SEQ ID NO: 1737505 - RNA, 19 nt, Artificial Sequence
  Description of Artificial Sequence: Synthetic oligonucleotide
agaucuuuacuguagauag

SEQ ID NO: 1737506 - RNA, 19 nt, Artificial Sequence
  Description of Artificial Sequence: Synthetic oligonucleotide
aaaugcauguuucuugagg

SEQ ID NO: 1737507 - RNA, 19 nt, Artificial Sequence
  Description of Artificial Sequence: Synthetic oligonucleotide
uguagauaggcauucauug

SEQ ID NO: 1737508 - RNA, 19 nt, Artificial Sequence
  Description of Artificial Sequence: Synthetic oligonucleotide
aaugcauguuucuugaggu

SEQ ID NO: 1737509 - RNA, 19 nt, Artificial Sequence
  Description of Artificial Sequence: Synthetic oligonucleotide
uuuuggcucacuuuguagg

SEQ ID NO: 1737510 - RNA, 19 nt, Artificial Sequence
  Description of Artificial Sequence: Synthetic oligonucleotide
aucuuuacuguagauaggc

SEQ ID NO: 1737511 - RNA, 19 nt, Artificial Sequence
  Description of Artificial Sequence: Synthetic oligonucleotide
ugucacacugugaacaagg

SEQ ID NO: 1737512 - RNA, 19 nt, Artificial Sequence
  Description of Artificial Sequence: Synthetic oligonucleotide
aaggucggcgagcaaaggc

SEQ ID NO: 1737513 - RNA, 19 nt, Artificial Sequence
  Description of Artificial Sequence: Synthetic oligonucleotide
aaguuagggagcuggguuc

SEQ ID NO: 1737514 - RNA, 19 nt, Artificial Sequence
  Description of Artificial Sequence: Synthetic oligonucleotide
ucugcggguaccauaagcc

SEQ ID NO: 1737515 - RNA, 19 nt, Artificial Sequence
  Description of Artificial Sequence: Synthetic oligonucleotide
uguaugugggucucggagg

SEQ ID NO: 1737516 - RNA, 19 nt, Artificial Sequence
  Description of Artificial Sequence: Synthetic oligonucleotide
uagauaggcauucauugcu

SEQ ID NO: 1737517 - RNA, 19 nt, Artificial Sequence
  Description of Artificial Sequence: Synthetic oligonucleotide
gccauuaaagcccauaucc

SEQ ID NO: 1737518 - RNA, 19 nt, Artificial Sequence
  Description of Artificial Sequence: Synthetic oligonucleotide
aguacuggcacaguguggg

SEQ ID NO: 1737519 - RNA, 19 nt, Artificial Sequence
  Description of Artificial Sequence: Synthetic oligonucleotide
ugcauguuucuugaggugg

SEQ ID NO: 1737520 - RNA, 19 nt, Artificial Sequence
  Description of Artificial Sequence: Synthetic oligonucleotide
ugugguucugcagugaacc

SEQ ID NO: 1737521 - RNA, 19 nt, Artificial Sequence
  Description of Artificial Sequence: Synthetic oligonucleotide
ugugaacaagggaagggcc

SEQ ID NO: 1737522 - RNA, 19 nt, Artificial Sequence
  Description of Artificial Sequence: Synthetic oligonucleotide
gauaggcauucauugcugg

SEQ ID NO: 1737523 - RNA, 19 nt, Artificial Sequence
  Description of Artificial Sequence: Synthetic oligonucleotide
uguccagcaauuuuggcuc

SEQ ID NO: 1737524 - RNA, 19 nt, Artificial Sequence
  Description of Artificial Sequence: Synthetic oligonucleotide
cauguaaguucuuggcugg

SEQ ID NO: 1737525 - RNA, 19 nt, Artificial Sequence
  Description of Artificial Sequence: Synthetic oligonucleotide
aaugcucgcccacagugug

SEQ ID NO: 1737526 - RNA, 19 nt, Artificial Sequence
  Description of Artificial Sequence: Synthetic oligonucleotide
ucuaccuguaccaccucag

SEQ ID NO: 1737527 - RNA, 19 nt, Artificial Sequence
  Description of Artificial Sequence: Synthetic oligonucleotide
accauaagccuugucacac

SEQ ID NO: 1737528 - RNA, 19 nt, Artificial Sequence
  Description of Artificial Sequence: Synthetic oligonucleotide
gagcacgaaguguaugugg

SEQ ID NO: 1737529 - RNA, 19 nt, Artificial Sequence
  Description of Artificial Sequence: Synthetic oligonucleotide
aagcccauauccuuaugga

SEQ ID NO: 1737530 - RNA, 19 nt, Artificial Sequence
  Description of Artificial Sequence: Synthetic oligonucleotide
uccuuauggaucagcacca

SEQ ID NO: 1737531 - RNA, 19 nt, Artificial Sequence
  Description of Artificial Sequence: Synthetic oligonucleotide
gguaccauaagccuuguca

SEQ ID NO: 1737532 - RNA, 19 nt, Artificial Sequence
  Description of Artificial Sequence: Synthetic oligonucleotide
uauggcuugucugucaugu

SEQ ID NO: 1737533 - RNA, 19 nt, Artificial Sequence
  Description of Artificial Sequence: Synthetic oligonucleotide
uggaggaaaccccaugcug

SEQ ID NO: 1737534 - RNA, 19 nt, Artificial Sequence
  Description of Artificial Sequence: Synthetic oligonucleotide
guagauaggcauucauugc

SEQ ID NO: 1737535 - RNA, 19 nt, Artificial Sequence
  Description of Artificial Sequence: Synthetic oligonucleotide
accagguuuggucuagggg

SEQ ID NO: 1737536 - RNA, 19 nt, Artificial Sequence
  Description of Artificial Sequence: Synthetic oligonucleotide
uugguagccaguguguaag

SEQ ID NO: 1737537 - RNA, 19 nt, Artificial Sequence
  Description of Artificial Sequence: Synthetic oligonucleotide
uccucagguaccacaaagc

SEQ ID NO: 1737538 - RNA, 19 nt, Artificial Sequence
  Description of Artificial Sequence: Synthetic oligonucleotide
guaugugggucucggaggg

SEQ ID NO: 1737539 - RNA, 19 nt, Artificial Sequence
  Description of Artificial Sequence: Synthetic oligonucleotide
ugcagagcaguacaggcaa

SEQ ID NO: 1737540 - RNA, 19 nt, Artificial Sequence
  Description of Artificial Sequence: Synthetic oligonucleotide
guaccauaagccuugucac

SEQ ID NO: 1737541 - RNA, 19 nt, Artificial Sequence
  Description of Artificial Sequence: Synthetic oligonucleotide
guguaugugggucucggag

SEQ ID NO: 1737542 - RNA, 19 nt, Artificial Sequence
  Description of Artificial Sequence: Synthetic oligonucleotide
agcccagccauuaaagccc

SEQ ID NO: 1737543 - RNA, 19 nt, Artificial Sequence
  Description of Artificial Sequence: Synthetic oligonucleotide
aauuuuggcucacuuugua

SEQ ID NO: 1737544 - RNA, 19 nt, Artificial Sequence
  Description of Artificial Sequence: Synthetic oligonucleotide
ugcucuuugaggucucugc

SEQ ID NO: 1737545 - RNA, 19 nt, Artificial Sequence
  Description of Artificial Sequence: Synthetic oligonucleotide
uucuugagguggcauagcu

SEQ ID NO: 1737546 - RNA, 19 nt, Artificial Sequence
  Description of Artificial Sequence: Synthetic oligonucleotide
gaaggugucaggugccugc

SEQ ID NO: 1737547 - RNA, 19 nt, Artificial Sequence
  Description of Artificial Sequence: Synthetic oligonucleotide
ugugaacaaaugcauguuu

SEQ ID NO: 1737548 - RNA, 19 nt, Artificial Sequence
  Description of Artificial Sequence: Synthetic oligonucleotide
uuguaggagcaccauggug

SEQ ID NO: 1737549 - RNA, 19 nt, Artificial Sequence
  Description of Artificial Sequence: Synthetic oligonucleotide
aauggaccaccugaugcuc

SEQ ID NO: 1737550 - RNA, 19 nt, Artificial Sequence
  Description of Artificial Sequence: Synthetic oligonucleotide
gaggugacggcgcagcuug

SEQ ID NO: 1737551 - RNA, 19 nt, Artificial Sequence
  Description of Artificial Sequence: Synthetic oligonucleotide
aagccauagcccaugccac

SEQ ID NO: 1737552 - RNA, 19 nt, Artificial Sequence
  Description of Artificial Sequence: Synthetic oligonucleotide
ugugucuuccgguguagcc

SEQ ID NO: 1737553 - RNA, 19 nt, Artificial Sequence
  Description of Artificial Sequence: Synthetic oligonucleotide
cagcccagccauuaaagcc

SEQ ID NO: 1737554 - RNA, 19 nt, Artificial Sequence
  Description of Artificial Sequence: Synthetic oligonucleotide
aucgguauggcuugucugu

SEQ ID NO: 1737555 - RNA, 19 nt, Artificial Sequence
  Description of Artificial Sequence: Synthetic oligonucleotide
cacagaaagggccucuccc

SEQ ID NO: 1737556 - RNA, 19 nt, Artificial Sequence
  Description of Artificial Sequence: Synthetic oligonucleotide
ucggagguugccccgcugg

SEQ ID NO: 1737557 - RNA, 19 nt, Artificial Sequence
  Description of Artificial Sequence: Synthetic oligonucleotide
agcacgaaguguauguggg

SEQ ID NO: 1737558 - RNA, 19 nt, Artificial Sequence
  Description of Artificial Sequence: Synthetic oligonucleotide
uucccugguucucagagau

SEQ ID NO: 1737559 - RNA, 19 nt, Artificial Sequence
  Description of Artificial Sequence: Synthetic oligonucleotide
cuuauggaucagcaccagg

SEQ ID NO: 1737560 - RNA, 19 nt, Artificial Sequence
  Description of Artificial Sequence: Synthetic oligonucleotide
gauggugaccuccacaaua

SEQ ID NO: 1737561 - RNA, 19 nt, Artificial Sequence
  Description of Artificial Sequence: Synthetic oligonucleotide
aaggacgcuccccugugug

SEQ ID NO: 1737562 - RNA, 19 nt, Artificial Sequence
  Description of Artificial Sequence: Synthetic oligonucleotide
gagguugccccgcuggcgg

SEQ ID NO: 1737563 - RNA, 19 nt, Artificial Sequence
  Description of Artificial Sequence: Synthetic oligonucleotide
auggugaccuccacaauac

SEQ ID NO: 1737564 - RNA, 19 nt, Artificial Sequence
  Description of Artificial Sequence: Synthetic oligonucleotide
uuuguaggagcaccauggu

SEQ ID NO: 1737565 - RNA, 19 nt, Artificial Sequence
  Description of Artificial Sequence: Synthetic oligonucleotide
ugacggcgcagcuugguag

SEQ ID NO: 1737566 - RNA, 19 nt, Artificial Sequence
  Description of Artificial Sequence: Synthetic oligonucleotide
aaccccaugcuggugacug

SEQ ID NO: 1737567 - RNA, 19 nt, Artificial Sequence
  Description of Artificial Sequence: Synthetic oligonucleotide
gggacauguaaguucuugg

SEQ ID NO: 1737568 - RNA, 19 nt, Artificial Sequence
  Description of Artificial Sequence: Synthetic oligonucleotide
uuaaagcccauauccuuau

SEQ ID NO: 1737569 - RNA, 19 nt, Artificial Sequence
  Description of Artificial Sequence: Synthetic oligonucleotide
cucagguaccacaaagcac

SEQ ID NO: 1737570 - RNA, 19 nt, Artificial Sequence
  Description of Artificial Sequence: Synthetic oligonucleotide
gguaccacaaagcacuuuc

SEQ ID NO: 1737571 - RNA, 19 nt, Artificial Sequence
  Description of Artificial Sequence: Synthetic oligonucleotide
uauccuuauggaucagcac

SEQ ID NO: 1737572 - RNA, 19 nt, Artificial Sequence
  Description of Artificial Sequence: Synthetic oligonucleotide
ugucuuccgguguagccgc

SEQ ID NO: 1737573 - RNA, 19 nt, Artificial Sequence
  Description of Artificial Sequence: Synthetic oligonucleotide
ggaaugcucgcccacagug

SEQ ID NO: 1737574 - RNA, 19 nt, Artificial Sequence
  Description of Artificial Sequence: Synthetic oligonucleotide
acagguaggccucaccagu

SEQ ID NO: 1737575 - RNA, 19 nt, Artificial Sequence
  Description of Artificial Sequence: Synthetic oligonucleotide
cauaagccuugucacacug

SEQ ID NO: 1737576 - RNA, 19 nt, Artificial Sequence
  Description of Artificial Sequence: Synthetic oligonucleotide
aggcaaguuagggagcugg

SEQ ID NO: 1737577 - RNA, 19 nt, Artificial Sequence
  Description of Artificial Sequence: Synthetic oligonucleotide
acagacagggcaucgguau

SEQ ID NO: 1737578 - RNA, 19 nt, Artificial Sequence
  Description of Artificial Sequence: Synthetic oligonucleotide
cuggugacugagcuggugc

SEQ ID NO: 1737579 - RNA, 19 nt, Artificial Sequence
  Description of Artificial Sequence: Synthetic oligonucleotide
acagugugggcacaggaau

SEQ ID NO: 1737580 - RNA, 19 nt, Artificial Sequence
  Description of Artificial Sequence: Synthetic oligonucleotide
gauggcccagccauguggg

SEQ ID NO: 1737581 - RNA, 19 nt, Artificial Sequence
  Description of Artificial Sequence: Synthetic oligonucleotide
ggacauguaaguucuuggc

SEQ ID NO: 1737582 - RNA, 19 nt, Artificial Sequence
  Description of Artificial Sequence: Synthetic oligonucleotide
gagccgcccacauacuggg

SEQ ID NO: 1737583 - RNA, 19 nt, Artificial Sequence
  Description of Artificial Sequence: Synthetic oligonucleotide
acccgaauggaccaccuga

SEQ ID NO: 1737584 - RNA, 19 nt, Artificial Sequence
  Description of Artificial Sequence: Synthetic oligonucleotide
auauccuuauggaucagca

SEQ ID NO: 1737585 - RNA, 19 nt, Artificial Sequence
  Description of Artificial Sequence: Synthetic oligonucleotide
uguuucuugagguggcaua

SEQ ID NO: 1737586 - RNA, 19 nt, Artificial Sequence
  Description of Artificial Sequence: Synthetic oligonucleotide
acacaaagggccgggcacc

SEQ ID NO: 1737587 - RNA, 19 nt, Artificial Sequence
  Description of Artificial Sequence: Synthetic oligonucleotide
uaccauaagccuugucaca

SEQ ID NO: 1737588 - RNA, 19 nt, Artificial Sequence
  Description of Artificial Sequence: Synthetic oligonucleotide
ugccgcuugaggcuuugag

SEQ ID NO: 1737589 - RNA, 19 nt, Artificial Sequence
  Description of Artificial Sequence: Synthetic oligonucleotide
cuuguggucuuugugaaca

SEQ ID NO: 1737590 - RNA, 19 nt, Artificial Sequence
  Description of Artificial Sequence: Synthetic oligonucleotide
agaagggcuggaggaaacc

SEQ ID NO: 1737591 - RNA, 19 nt, Artificial Sequence
  Description of Artificial Sequence: Synthetic oligonucleotide
uaagcucggccacauugga

SEQ ID NO: 1737592 - RNA, 19 nt, Artificial Sequence
  Description of Artificial Sequence: Synthetic oligonucleotide
caguacaggcaaguuaggg

SEQ ID NO: 1737593 - RNA, 19 nt, Artificial Sequence
  Description of Artificial Sequence: Synthetic oligonucleotide
ggcuccgagaucuuuacug

SEQ ID NO: 1737594 - RNA, 19 nt, Artificial Sequence
  Description of Artificial Sequence: Synthetic oligonucleotide
gugucuuccgguguagccg

SEQ ID NO: 1737595 - RNA, 19 nt, Artificial Sequence
  Description of Artificial Sequence: Synthetic oligonucleotide
cugcagugaacccugggug

SEQ ID NO: 1737596 - RNA, 19 nt, Artificial Sequence
  Description of Artificial Sequence: Synthetic oligonucleotide
gguguagccgcaaggaagg

SEQ ID NO: 1737597 - RNA, 19 nt, Artificial Sequence
  Description of Artificial Sequence: Synthetic oligonucleotide
uguaaguucuuggcugggc

SEQ ID NO: 1737598 - RNA, 19 nt, Artificial Sequence
  Description of Artificial Sequence: Synthetic oligonucleotide
agucucaugugguucugca

SEQ ID NO: 1737599 - RNA, 19 nt, Artificial Sequence
  Description of Artificial Sequence: Synthetic oligonucleotide
uguccucggagguugcccc

SEQ ID NO: 1737600 - RNA, 19 nt, Artificial Sequence
  Description of Artificial Sequence: Synthetic oligonucleotide
guaaguucuuggcugggca

SEQ ID NO: 1737601 - RNA, 19 nt, Artificial Sequence
  Description of Artificial Sequence: Synthetic oligonucleotide
uguguccagcaauuuuggc

SEQ ID NO: 1737602 - RNA, 19 nt, Artificial Sequence
  Description of Artificial Sequence: Synthetic oligonucleotide
gacauguaaguucuuggcu

SEQ ID NO: 1737603 - RNA, 19 nt, Artificial Sequence
  Description of Artificial Sequence: Synthetic oligonucleotide
uauggaucagcaccagguu

SEQ ID NO: 1737604 - RNA, 19 nt, Artificial Sequence
  Description of Artificial Sequence: Synthetic oligonucleotide
ccgcuugaggcuuugaggg

SEQ ID NO: 1737605 - RNA, 19 nt, Artificial Sequence
  Description of Artificial Sequence: Synthetic oligonucleotide
gaugacgccgcagcucugg

SEQ ID NO: 1737606 - RNA, 19 nt, Artificial Sequence
  Description of Artificial Sequence: Synthetic oligonucleotide
auaaggacgcuccccugug

SEQ ID NO: 1737607 - RNA, 19 nt, Artificial Sequence
  Description of Artificial Sequence: Synthetic oligonucleotide
cauagcccaugccacagac

SEQ ID NO: 1737608 - RNA, 19 nt, Artificial Sequence
  Description of Artificial Sequence: Synthetic oligonucleotide
cucugcggguaccauaagc

SEQ ID NO: 1737609 - RNA, 19 nt, Artificial Sequence
  Description of Artificial Sequence: Synthetic oligonucleotide
uaggccucaccaguguggg

SEQ ID NO: 1737610 - RNA, 19 nt, Artificial Sequence
  Description of Artificial Sequence: Synthetic oligonucleotide
cauugauaaggacgcuccc

SEQ ID NO: 1737611 - RNA, 19 nt, Artificial Sequence
  Description of Artificial Sequence: Synthetic oligonucleotide
caucuggugugucuuccgg

SEQ ID NO: 1737612 - RNA, 19 nt, Artificial Sequence
  Description of Artificial Sequence: Synthetic oligonucleotide
acgaaguguaugugggucu

SEQ ID NO: 1737613 - RNA, 19 nt, Artificial Sequence
  Description of Artificial Sequence: Synthetic oligonucleotide
aaguacuggcacagugugg

SEQ ID NO: 1737614 - RNA, 19 nt, Artificial Sequence
  Description of Artificial Sequence: Synthetic oligonucleotide
uggugacugagcuggugcc

SEQ ID NO: 1737615 - RNA, 19 nt, Artificial Sequence
  Description of Artificial Sequence: Synthetic oligonucleotide
caucgguauggcuugucug

SEQ ID NO: 1737616 - RNA, 19 nt, Artificial Sequence
  Description of Artificial Sequence: Synthetic oligonucleotide
uuuggucuaggggugggcu

SEQ ID NO: 1737617 - RNA, 19 nt, Artificial Sequence
  Description of Artificial Sequence: Synthetic oligonucleotide
agggcaucgguauggcuug

SEQ ID NO: 1737618 - RNA, 19 nt, Artificial Sequence
  Description of Artificial Sequence: Synthetic oligonucleotide
ucuuggcugggcagguuug

SEQ ID NO: 1737619 - RNA, 19 nt, Artificial Sequence
  Description of Artificial Sequence: Synthetic oligonucleotide
ugggacuugaggugacggc

SEQ ID NO: 1737620 - RNA, 19 nt, Artificial Sequence
  Description of Artificial Sequence: Synthetic oligonucleotide
gagaucuuuacuguagaua

SEQ ID NO: 1737621 - RNA, 19 nt, Artificial Sequence
  Description of Artificial Sequence: Synthetic oligonucleotide
guagccaguguguaagcuc

SEQ ID NO: 1737622 - RNA, 19 nt, Artificial Sequence
  Description of Artificial Sequence: Synthetic oligonucleotide
ugcucgcccacaguguggg

SEQ ID NO: 1737623 - RNA, 19 nt, Artificial Sequence
  Description of Artificial Sequence: Synthetic oligonucleotide
augcauguuucuugaggug

SEQ ID NO: 1737624 - RNA, 19 nt, Artificial Sequence
  Description of Artificial Sequence: Synthetic oligonucleotide
auuaaagcccauauccuua

SEQ ID NO: 1737625 - RNA, 19 nt, Artificial Sequence
  Description of Artificial Sequence: Synthetic oligonucleotide
accagugugggaaaugaga

SEQ ID NO: 1737626 - RNA, 19 nt, Artificial Sequence
  Description of Artificial Sequence: Synthetic oligonucleotide
ucucggagggccuucccac

SEQ ID NO: 1737627 - RNA, 19 nt, Artificial Sequence
  Description of Artificial Sequence: Synthetic oligonucleotide
gucacacugugaacaaggg

SEQ ID NO: 1737628 - RNA, 19 nt, Artificial Sequence
  Description of Artificial Sequence: Synthetic oligonucleotide
agggcuuguggucuuugug

SEQ ID NO: 1737629 - RNA, 19 nt, Artificial Sequence
  Description of Artificial Sequence: Synthetic oligonucleotide
ggaaaugagaugacgccgc

SEQ ID NO: 1737630 - RNA, 19 nt, Artificial Sequence
  Description of Artificial Sequence: Synthetic oligonucleotide
gaauggaccaccugaugcu

SEQ ID NO: 1737631 - RNA, 19 nt, Artificial Sequence
  Description of Artificial Sequence: Synthetic oligonucleotide
cagcuugguagccagugug

SEQ ID NO: 1737632 - RNA, 19 nt, Artificial Sequence
  Description of Artificial Sequence: Synthetic oligonucleotide
guaggccucaccagugugg

SEQ ID NO: 1737633 - RNA, 19 nt, Artificial Sequence
  Description of Artificial Sequence: Synthetic oligonucleotide
ugagcacgaaguguaugug

SEQ ID NO: 1737634 - RNA, 19 nt, Artificial Sequence
  Description of Artificial Sequence: Synthetic oligonucleotide
aggagcaccauggugggcu

SEQ ID NO: 1737635 - RNA, 19 nt, Artificial Sequence
  Description of Artificial Sequence: Synthetic oligonucleotide
caaguguccucggagguug

SEQ ID NO: 1737636 - RNA, 19 nt, Artificial Sequence
  Description of Artificial Sequence: Synthetic oligonucleotide
gcuuugaggagcuuucuuc

SEQ ID NO: 1737637 - RNA, 19 nt, Artificial Sequence
  Description of Artificial Sequence: Synthetic oligonucleotide
gacggcgcagcuugguagc

SEQ ID NO: 1737638 - RNA, 19 nt, Artificial Sequence
  Description of Artificial Sequence: Synthetic oligonucleotide
cuaccuguaccaccucagc

SEQ ID NO: 1737639 - RNA, 19 nt, Artificial Sequence
  Description of Artificial Sequence: Synthetic oligonucleotide
gggacuugaggugacggcg

SEQ ID NO: 1737640 - RNA, 19 nt, Artificial Sequence
  Description of Artificial Sequence: Synthetic oligonucleotide
gaaaugagaugacgccgca

SEQ ID NO: 1737641 - RNA, 19 nt, Artificial Sequence
  Description of Artificial Sequence: Synthetic oligonucleotide
agauaggcauucauugcug

SEQ ID NO: 1737642 - RNA, 19 nt, Artificial Sequence
  Description of Artificial Sequence: Synthetic oligonucleotide
agcccauauccuuauggau

SEQ ID NO: 1737643 - RNA, 19 nt, Artificial Sequence
  Description of Artificial Sequence: Synthetic oligonucleotide
cacagguaggccucaccag

SEQ ID NO: 1737644 - RNA, 19 nt, Artificial Sequence
  Description of Artificial Sequence: Synthetic oligonucleotide
cagguuuggucuaggggug

SEQ ID NO: 1737645 - RNA, 19 nt, Artificial Sequence
  Description of Artificial Sequence: Synthetic oligonucleotide
gauaaggacgcuccccugu

SEQ ID NO: 1737646 - RNA, 19 nt, Artificial Sequence
  Description of Artificial Sequence: Synthetic oligonucleotide
ugcggguaccauaagccuu

SEQ ID NO: 1737647 - RNA, 19 nt, Artificial Sequence
  Description of Artificial Sequence: Synthetic oligonucleotide
agcacuuucccugguucuc

SEQ ID NO: 1737648 - RNA, 19 nt, Artificial Sequence
  Description of Artificial Sequence: Synthetic oligonucleotide
cgaauggaccaccugaugc

SEQ ID NO: 1737649 - RNA, 19 nt, Artificial Sequence
  Description of Artificial Sequence: Synthetic oligonucleotide
cuugucugucaugugggac

SEQ ID NO: 1737650 - RNA, 19 nt, Artificial Sequence
  Description of Artificial Sequence: Synthetic oligonucleotide
cacgaaguguauguggguc

SEQ ID NO: 1737651 - RNA, 19 nt, Artificial Sequence
  Description of Artificial Sequence: Synthetic oligonucleotide
uggucuaggggugggcucc

SEQ ID NO: 1737652 - RNA, 19 nt, Artificial Sequence
  Description of Artificial Sequence: Synthetic oligonucleotide
cagugugggaaaugagaug

SEQ ID NO: 1737653 - RNA, 19 nt, Artificial Sequence
  Description of Artificial Sequence: Synthetic oligonucleotide
uugucacacugugaacaag

SEQ ID NO: 1737654 - RNA, 19 nt, Artificial Sequence
  Description of Artificial Sequence: Synthetic oligonucleotide
gaaaguacuggcacagugu

SEQ ID NO: 1737655 - RNA, 19 nt, Artificial Sequence
  Description of Artificial Sequence: Synthetic oligonucleotide
gaaaccccaugcuggugac

SEQ ID NO: 1737656 - RNA, 19 nt, Artificial Sequence
  Description of Artificial Sequence: Synthetic oligonucleotide
ccaggagccgcccacauac

SEQ ID NO: 1737657 - RNA, 19 nt, Artificial Sequence
  Description of Artificial Sequence: Synthetic oligonucleotide
ugcuuugaggagcuuucuu

SEQ ID NO: 1737658 - RNA, 19 nt, Artificial Sequence
  Description of Artificial Sequence: Synthetic oligonucleotide
caccagguuuggucuaggg

SEQ ID NO: 1737659 - RNA, 19 nt, Artificial Sequence
  Description of Artificial Sequence: Synthetic oligonucleotide
acugguaucggcgccccug

SEQ ID NO: 1737660 - RNA, 19 nt, Artificial Sequence
  Description of Artificial Sequence: Synthetic oligonucleotide
ugggcuccgagaucuuuac

SEQ ID NO: 1737661 - RNA, 19 nt, Artificial Sequence
  Description of Artificial Sequence: Synthetic oligonucleotide
gagugcaggcgcucaugag

SEQ ID NO: 1737662 - RNA, 19 nt, Artificial Sequence
  Description of Artificial Sequence: Synthetic oligonucleotide
aguguaugugggucucgga

SEQ ID NO: 1737663 - RNA, 19 nt, Artificial Sequence
  Description of Artificial Sequence: Synthetic oligonucleotide
uaaggacgcuccccugugu

SEQ ID NO: 1737664 - RNA, 19 nt, Artificial Sequence
  Description of Artificial Sequence: Synthetic oligonucleotide
ugaacccuggguggccagg

SEQ ID NO: 1737665 - RNA, 19 nt, Artificial Sequence
  Description of Artificial Sequence: Synthetic oligonucleotide
cagguaggccucaccagug

SEQ ID NO: 1737666 - RNA, 19 nt, Artificial Sequence
  Description of Artificial Sequence: Synthetic oligonucleotide
aagggccucaccccucgau

SEQ ID NO: 1737667 - RNA, 19 nt, Artificial Sequence
  Description of Artificial Sequence: Synthetic oligonucleotide
aacucuugccacacucagu

SEQ ID NO: 1737668 - RNA, 19 nt, Artificial Sequence
  Description of Artificial Sequence: Synthetic oligonucleotide
gugguucugcagugaaccc

SEQ ID NO: 1737669 - RNA, 19 nt, Artificial Sequence
  Description of Artificial Sequence: Synthetic oligonucleotide
augugguucugcagugaac

SEQ ID NO: 1737670 - RNA, 19 nt, Artificial Sequence
  Description of Artificial Sequence: Synthetic oligonucleotide
aguuagggagcuggguucu

SEQ ID NO: 1737671 - RNA, 19 nt, Artificial Sequence
  Description of Artificial Sequence: Synthetic oligonucleotide
acacugguaucggcgcccc

SEQ ID NO: 1737672 - RNA, 19 nt, Artificial Sequence
  Description of Artificial Sequence: Synthetic oligonucleotide
guaacucuugccacacuca

SEQ ID NO: 1737673 - RNA, 19 nt, Artificial Sequence
  Description of Artificial Sequence: Synthetic oligonucleotide
cuugucacacugugaacaa

SEQ ID NO: 1737674 - RNA, 19 nt, Artificial Sequence
  Description of Artificial Sequence: Synthetic oligonucleotide
uguagccgcaaggaagguc

SEQ ID NO: 1737675 - RNA, 19 nt, Artificial Sequence
  Description of Artificial Sequence: Synthetic oligonucleotide
cauaggcauggggaagggg

SEQ ID NO: 1737676 - RNA, 19 nt, Artificial Sequence
  Description of Artificial Sequence: Synthetic oligonucleotide
aggucggcgagcaaaggcu

SEQ ID NO: 1737677 - RNA, 19 nt, Artificial Sequence
  Description of Artificial Sequence: Synthetic oligonucleotide
caggaauggcuuuucucca

SEQ ID NO: 1737678 - RNA, 19 nt, Artificial Sequence
  Description of Artificial Sequence: Synthetic oligonucleotide
cugguaucggcgccccugc

SEQ ID NO: 1737679 - RNA, 19 nt, Artificial Sequence
  Description of Artificial Sequence: Synthetic oligonucleotide
uacuguagauaggcauuca

SEQ ID NO: 1737680 - RNA, 19 nt, Artificial Sequence
  Description of Artificial Sequence: Synthetic oligonucleotide
gcuuugaagcuuucuucug

SEQ ID NO: 1737681 - RNA, 19 nt, Artificial Sequence
  Description of Artificial Sequence: Synthetic oligonucleotide
uuggucuaggggugggcuc

SEQ ID NO: 1737682 - RNA, 19 nt, Artificial Sequence
  Description of Artificial Sequence: Synthetic oligonucleotide
gggcuuguggucuuuguga

SEQ ID NO: 1737683 - RNA, 19 nt, Artificial Sequence
  Description of Artificial Sequence: Synthetic oligonucleotide
cugcagagcaguacaggca

SEQ ID NO: 1737684 - RNA, 19 nt, Artificial Sequence
  Description of Artificial Sequence: Synthetic oligonucleotide
ggugucaggugccugcuuc

SEQ ID NO: 1737685 - RNA, 19 nt, Artificial Sequence
  Description of Artificial Sequence: Synthetic oligonucleotide
ucggcgagcaaaggcuuug

SEQ ID NO: 1737686 - RNA, 19 nt, Artificial Sequence
  Description of Artificial Sequence: Synthetic oligonucleotide
cacacugguaucggcgccc

SEQ ID NO: 1737687 - RNA, 19 nt, Artificial Sequence
  Description of Artificial Sequence: Synthetic oligonucleotide
gggccucaccccucgaugg

SEQ ID NO: 1737688 - RNA, 19 nt, Artificial Sequence
  Description of Artificial Sequence: Synthetic oligonucleotide
agccauagcccaugccaca

SEQ ID NO: 1737689 - RNA, 19 nt, Artificial Sequence
  Description of Artificial Sequence: Synthetic oligonucleotide
gagaagggcuggaggaaac

SEQ ID NO: 1737690 - RNA, 19 nt, Artificial Sequence
  Description of Artificial Sequence: Synthetic oligonucleotide
cacuuucccugguucucag

SEQ ID NO: 1737691 - RNA, 19 nt, Artificial Sequence
  Description of Artificial Sequence: Synthetic oligonucleotide
agguuuggucuaggggugg

SEQ ID NO: 1737692 - RNA, 19 nt, Artificial Sequence
  Description of Artificial Sequence: Synthetic oligonucleotide
cugucaugugggacuugag

SEQ ID NO: 1737693 - RNA, 19 nt, Artificial Sequence
  Description of Artificial Sequence: Synthetic oligonucleotide
cuuccgguguagccgcaag

SEQ ID NO: 1737694 - RNA, 19 nt, Artificial Sequence
  Description of Artificial Sequence: Synthetic oligonucleotide
ugcacaggaagggcuugug

SEQ ID NO: 1737695 - RNA, 19 nt, Artificial Sequence
  Description of Artificial Sequence: Synthetic oligonucleotide
uuguggucuuugugaacaa

SEQ ID NO: 1737696 - RNA, 19 nt, Artificial Sequence
  Description of Artificial Sequence: Synthetic oligonucleotide
auggcuugucugucaugug

SEQ ID NO: 1737697 - RNA, 19 nt, Artificial Sequence
  Description of Artificial Sequence: Synthetic oligonucleotide
agguaggccucaccagugu

SEQ ID NO: 1737698 - RNA, 19 nt, Artificial Sequence
  Description of Artificial Sequence: Synthetic oligonucleotide
ggagccgcccacauacugg

SEQ ID NO: 1737699 - RNA, 19 nt, Artificial Sequence
  Description of Artificial Sequence: Synthetic oligonucleotide
gcacagguaggccucacca

SEQ ID NO: 1737700 - RNA, 19 nt, Artificial Sequence
  Description of Artificial Sequence: Synthetic oligonucleotide
ucgauggcccagccaugug

SEQ ID NO: 1737701 - RNA, 19 nt, Artificial Sequence
  Description of Artificial Sequence: Synthetic oligonucleotide
cuugguagccaguguguaa

SEQ ID NO: 1737702 - RNA, 19 nt, Artificial Sequence
  Description of Artificial Sequence: Synthetic oligonucleotide
accccucgauggcccagcc

SEQ ID NO: 1737703 - RNA, 19 nt, Artificial Sequence
  Description of Artificial Sequence: Synthetic oligonucleotide
cacagugugggcacaggaa

SEQ ID NO: 1737704 - RNA, 19 nt, Artificial Sequence
  Description of Artificial Sequence: Synthetic oligonucleotide
ggaaggucggcgagcaaag

SEQ ID NO: 1737705 - RNA, 19 nt, Artificial Sequence
  Description of Artificial Sequence: Synthetic oligonucleotide
ggugacugagcuggugccg

SEQ ID NO: 1737706 - RNA, 19 nt, Artificial Sequence
  Description of Artificial Sequence: Synthetic oligonucleotide
cagacagggcaucgguaug

SEQ ID NO: 1737707 - RNA, 19 nt, Artificial Sequence
  Description of Artificial Sequence: Synthetic oligonucleotide
ucaaguguccucggagguu

SEQ ID NO: 1737708 - RNA, 19 nt, Artificial Sequence
  Description of Artificial Sequence: Synthetic oligonucleotide
gccgcaaggaaggucggcg

SEQ ID NO: 1737709 - RNA, 19 nt, Artificial Sequence
  Description of Artificial Sequence: Synthetic oligonucleotide
ccccacacugguaucggcg

SEQ ID NO: 1737710 - RNA, 19 nt, Artificial Sequence
  Description of Artificial Sequence: Synthetic oligonucleotide
caggaaugccuugccacac

SEQ ID NO: 1737711 - RNA, 19 nt, Artificial Sequence
  Description of Artificial Sequence: Synthetic oligonucleotide
acuuucccugguucucaga

SEQ ID NO: 1737712 - RNA, 19 nt, Artificial Sequence
  Description of Artificial Sequence: Synthetic oligonucleotide
ggggacauguaaguucuug

SEQ ID NO: 1737713 - RNA, 19 nt, Artificial Sequence
  Description of Artificial Sequence: Synthetic oligonucleotide
agccgcaaggaaggucggc

SEQ ID NO: 1737714 - RNA, 19 nt, Artificial Sequence
  Description of Artificial Sequence: Synthetic oligonucleotide
gguaggccucaccagugug

SEQ ID NO: 1737715 - RNA, 19 nt, Artificial Sequence
  Description of Artificial Sequence: Synthetic oligonucleotide
ccagguuuggucuaggggu

SEQ ID NO: 1737716 - RNA, 19 nt, Artificial Sequence
  Description of Artificial Sequence: Synthetic oligonucleotide
ggcauagcugcaggaaugc

SEQ ID NO: 1737717 - RNA, 19 nt, Artificial Sequence
  Description of Artificial Sequence: Synthetic oligonucleotide
auaagccuugucacacugu

SEQ ID NO: 1737718 - RNA, 19 nt, Artificial Sequence
  Description of Artificial Sequence: Synthetic oligonucleotide
aguucuuggcugggcaggu

SEQ ID NO: 1737719 - RNA, 19 nt, Artificial Sequence
  Description of Artificial Sequence: Synthetic oligonucleotide
aggugccugcuucuaccug

SEQ ID NO: 1737720 - RNA, 19 nt, Artificial Sequence
  Description of Artificial Sequence: Synthetic oligonucleotide
gacgcuccccugugugcag

SEQ ID NO: 1737721 - RNA, 19 nt, Artificial Sequence
  Description of Artificial Sequence: Synthetic oligonucleotide
ggcugcagagcaguacagg

SEQ ID NO: 1737722 - RNA, 19 nt, Artificial Sequence
  Description of Artificial Sequence: Synthetic oligonucleotide
ucgguauggcuugucuguc

SEQ ID NO: 1737723 - RNA, 19 nt, Artificial Sequence
  Description of Artificial Sequence: Synthetic oligonucleotide
cgguguagccgcaaggaag

SEQ ID NO: 1737724 - RNA, 19 nt, Artificial Sequence
  Description of Artificial Sequence: Synthetic oligonucleotide
ggcaaguuagggagcuggg

SEQ ID NO: 1737725 - RNA, 19 nt, Artificial Sequence
  Description of Artificial Sequence: Synthetic oligonucleotide
guccucggagguugccccg

SEQ ID NO: 1737726 - RNA, 19 nt, Artificial Sequence
  Description of Artificial Sequence: Synthetic oligonucleotide
guacuggcacagugugggc

SEQ ID NO: 1737727 - RNA, 19 nt, Artificial Sequence
  Description of Artificial Sequence: Synthetic oligonucleotide
caaguuagggagcuggguu

SEQ ID NO: 1737728 - RNA, 19 nt, Artificial Sequence
  Description of Artificial Sequence: Synthetic oligonucleotide
cuguagauaggcauucauu

SEQ ID NO: 1737729 - RNA, 19 nt, Artificial Sequence
  Description of Artificial Sequence: Synthetic oligonucleotide
ccucagguaccacaaagca

SEQ ID NO: 1737730 - RNA, 19 nt, Artificial Sequence
  Description of Artificial Sequence: Synthetic oligonucleotide
cacaaagggccgggcaccc

SEQ ID NO: 1737731 - RNA, 19 nt, Artificial Sequence
  Description of Artificial Sequence: Synthetic oligonucleotide
uggcacagugugggcauug

SEQ ID NO: 1737732 - RNA, 19 nt, Artificial Sequence
  Description of Artificial Sequence: Synthetic oligonucleotide
gaacaagggaagggccuca

SEQ ID NO: 1737733 - RNA, 19 nt, Artificial Sequence
  Description of Artificial Sequence: Synthetic oligonucleotide
ugacugagcuggugccgcu

SEQ ID NO: 1737734 - RNA, 19 nt, Artificial Sequence
  Description of Artificial Sequence: Synthetic oligonucleotide
uggaccaccugaugcucuu

SEQ ID NO: 1737735 - RNA, 19 nt, Artificial Sequence
  Description of Artificial Sequence: Synthetic oligonucleotide
uggcggaaugcucgcccac

SEQ ID NO: 1737736 - RNA, 19 nt, Artificial Sequence
  Description of Artificial Sequence: Synthetic oligonucleotide
acggcgcagcuugguagcc

SEQ ID NO: 1737737 - RNA, 19 nt, Artificial Sequence
  Description of Artificial Sequence: Synthetic oligonucleotide
uccagcaauuuuggcucac

SEQ ID NO: 1737738 - RNA, 19 nt, Artificial Sequence
  Description of Artificial Sequence: Synthetic oligonucleotide
caaagggccgggcacccga

SEQ ID NO: 1737739 - RNA, 19 nt, Artificial Sequence
  Description of Artificial Sequence: Synthetic oligonucleotide
cacacacaaagggccgggc

SEQ ID NO: 1737740 - RNA, 19 nt, Artificial Sequence
  Description of Artificial Sequence: Synthetic oligonucleotide
augcucuuugaggucucug

SEQ ID NO: 1737741 - RNA, 19 nt, Artificial Sequence
  Description of Artificial Sequence: Synthetic oligonucleotide
aaaccccaugcuggugacu

SEQ ID NO: 1737742 - RNA, 19 nt, Artificial Sequence
  Description of Artificial Sequence: Synthetic oligonucleotide
cagccucaaguguccucgg

SEQ ID NO: 1737743 - RNA, 19 nt, Artificial Sequence
  Description of Artificial Sequence: Synthetic oligonucleotide
ggcgcucaugagcacgaag

SEQ ID NO: 1737744 - RNA, 19 nt, Artificial Sequence
  Description of Artificial Sequence: Synthetic oligonucleotide
ucggcgccccugcuuugag

SEQ ID NO: 1737745 - RNA, 19 nt, Artificial Sequence
  Description of Artificial Sequence: Synthetic oligonucleotide
gcauguuucuugagguggc

SEQ ID NO: 1737746 - RNA, 19 nt, Artificial Sequence
  Description of Artificial Sequence: Synthetic oligonucleotide
cuccccacacugguaucgg

SEQ ID NO: 1737747 - RNA, 19 nt, Artificial Sequence
  Description of Artificial Sequence: Synthetic oligonucleotide
ccgggcacccgaauggacc

SEQ ID NO: 1737748 - RNA, 19 nt, Artificial Sequence
  Description of Artificial Sequence: Synthetic oligonucleotide
gguuuggucuagggguggg

SEQ ID NO: 1737749 - RNA, 19 nt, Artificial Sequence
  Description of Artificial Sequence: Synthetic oligonucleotide
guaccaccucagcccagcc

SEQ ID NO: 1737750 - RNA, 19 nt, Artificial Sequence
  Description of Artificial Sequence: Synthetic oligonucleotide
cgauggcccagccaugugg

SEQ ID NO: 1737751 - RNA, 19 nt, Artificial Sequence
  Description of Artificial Sequence: Synthetic oligonucleotide
ggcgagcaaaggcuuugcc

SEQ ID NO: 1737752 - RNA, 19 nt, Artificial Sequence
  Description of Artificial Sequence: Synthetic oligonucleotide
ccacauuggaggcacagaa

SEQ ID NO: 1737753 - RNA, 19 nt, Artificial Sequence
  Description of Artificial Sequence: Synthetic oligonucleotide
gugugggcauugauaagga

SEQ ID NO: 1737754 - RNA, 19 nt, Artificial Sequence
  Description of Artificial Sequence: Synthetic oligonucleotide
ggcuuguggucuuugugaa

SEQ ID NO: 1737755 - RNA, 19 nt, Artificial Sequence
  Description of Artificial Sequence: Synthetic oligonucleotide
ggagguugccccgcuggcg

SEQ ID NO: 1737756 - RNA, 19 nt, Artificial Sequence
  Description of Artificial Sequence: Synthetic oligonucleotide
ggacuugaggugacggcgc

SEQ ID NO: 1737757 - RNA, 19 nt, Artificial Sequence
  Description of Artificial Sequence: Synthetic oligonucleotide
cagggcaucgguauggcuu

SEQ ID NO: 1737758 - RNA, 19 nt, Artificial Sequence
  Description of Artificial Sequence: Synthetic oligonucleotide
auucauugcuggggacaug

SEQ ID NO: 1737759 - RNA, 19 nt, Artificial Sequence
  Description of Artificial Sequence: Synthetic oligonucleotide
augcucgcccacagugugg

SEQ ID NO: 1737760 - RNA, 19 nt, Artificial Sequence
  Description of Artificial Sequence: Synthetic oligonucleotide
uccucggagguugccccgc

SEQ ID NO: 1737761 - RNA, 19 nt, Artificial Sequence
  Description of Artificial Sequence: Synthetic oligonucleotide
uaucggcgccccugcuuug

SEQ ID NO: 1737762 - RNA, 19 nt, Artificial Sequence
  Description of Artificial Sequence: Synthetic oligonucleotide
aggaaaccccaugcuggug

SEQ ID NO: 1737763 - RNA, 19 nt, Artificial Sequence
  Description of Artificial Sequence: Synthetic oligonucleotide
gcggguaccauaagccuug

SEQ ID NO: 1737764 - RNA, 19 nt, Artificial Sequence
  Description of Artificial Sequence: Synthetic oligonucleotide
ugccugcuucuaccuguac

SEQ ID NO: 1737765 - RNA, 19 nt, Artificial Sequence
  Description of Artificial Sequence: Synthetic oligonucleotide
gugugucuuccgguguagc

SEQ ID NO: 1737766 - RNA, 19 nt, Artificial Sequence
  Description of Artificial Sequence: Synthetic oligonucleotide
auagcccaugccacagaca

SEQ ID NO: 1737767 - RNA, 19 nt, Artificial Sequence
  Description of Artificial Sequence: Synthetic oligonucleotide
ugguaucggcgccccugcu

SEQ ID NO: 1737768 - RNA, 19 nt, Artificial Sequence
  Description of Artificial Sequence: Synthetic oligonucleotide
gcggaaugcucgcccacag

SEQ ID NO: 1737769 - RNA, 19 nt, Artificial Sequence
  Description of Artificial Sequence: Synthetic oligonucleotide
gaaugcucgcccacagugu

SEQ ID NO: 1737770 - RNA, 19 nt, Artificial Sequence
  Description of Artificial Sequence: Synthetic oligonucleotide
augacgccgcagcucugga

SEQ ID NO: 1737771 - RNA, 19 nt, Artificial Sequence
  Description of Artificial Sequence: Synthetic oligonucleotide
ggcacagguaggccucacc

SEQ ID NO: 1737772 - RNA, 19 nt, Artificial Sequence
  Description of Artificial Sequence: Synthetic oligonucleotide
cagugaacccuggguggcc

SEQ ID NO: 1737773 - RNA, 19 nt, Artificial Sequence
  Description of Artificial Sequence: Synthetic oligonucleotide
caggcgcucaugagcacga

SEQ ID NO: 1737774 - RNA, 19 nt, Artificial Sequence
  Description of Artificial Sequence: Synthetic oligonucleotide
gggaagccauagcccaugc

SEQ ID NO: 1737775 - RNA, 19 nt, Artificial Sequence
  Description of Artificial Sequence: Synthetic oligonucleotide
ggcaucuggcaucuggugu

SEQ ID NO: 1737776 - RNA, 19 nt, Artificial Sequence
  Description of Artificial Sequence: Synthetic oligonucleotide
cacagacagggcaucggua

SEQ ID NO: 1737777 - RNA, 19 nt, Artificial Sequence
  Description of Artificial Sequence: Synthetic oligonucleotide
ucuuccgguguagccgcaa

SEQ ID NO: 1737778 - RNA, 19 nt, Artificial Sequence
  Description of Artificial Sequence: Synthetic oligonucleotide
cacccgaauggaccaccug

SEQ ID NO: 1737779 - RNA, 19 nt, Artificial Sequence
  Description of Artificial Sequence: Synthetic oligonucleotide
aagggccgggcacccgaau

SEQ ID NO: 1737780 - RNA, 19 nt, Artificial Sequence
  Description of Artificial Sequence: Synthetic oligonucleotide
cuccgagaucuuuacugua

SEQ ID NO: 1737781 - RNA, 19 nt, Artificial Sequence
  Description of Artificial Sequence: Synthetic oligonucleotide
agcccaugccacagacagg

SEQ ID NO: 1737782 - RNA, 19 nt, Artificial Sequence
  Description of Artificial Sequence: Synthetic oligonucleotide
gugugaagucucauguggu

SEQ ID NO: 1737783 - RNA, 19 nt, Artificial Sequence
  Description of Artificial Sequence: Synthetic oligonucleotide
gaggagcuuucuucugggu

SEQ ID NO: 1737784 - RNA, 19 nt, Artificial Sequence
  Description of Artificial Sequence: Synthetic oligonucleotide
ggccucaccagugugggaa

SEQ ID NO: 1737785 - RNA, 19 nt, Artificial Sequence
  Description of Artificial Sequence: Synthetic oligonucleotide
gggcauaggcauggggaag

SEQ ID NO: 1737786 - RNA, 19 nt, Artificial Sequence
  Description of Artificial Sequence: Synthetic oligonucleotide
guaucggcgccccugcuuu

SEQ ID NO: 1737787 - RNA, 19 nt, Artificial Sequence
  Description of Artificial Sequence: Synthetic oligonucleotide
cccgucugagggcacuucc

SEQ ID NO: 1737788 - RNA, 19 nt, Artificial Sequence
  Description of Artificial Sequence: Synthetic oligonucleotide
cugcggguaccauaagccu

SEQ ID NO: 1737789 - RNA, 19 nt, Artificial Sequence
  Description of Artificial Sequence: Synthetic oligonucleotide
gcugcauguguccagcaau

SEQ ID NO: 1737790 - RNA, 19 nt, Artificial Sequence
  Description of Artificial Sequence: Synthetic oligonucleotide
guuagggagcuggguucug

SEQ ID NO: 1737791 - RNA, 19 nt, Artificial Sequence
  Description of Artificial Sequence: Synthetic oligonucleotide
gguucugggcuccgagauc

SEQ ID NO: 1737792 - RNA, 19 nt, Artificial Sequence
  Description of Artificial Sequence: Synthetic oligonucleotide
ccucaccccucgauggccc

SEQ ID NO: 1737793 - RNA, 19 nt, Artificial Sequence
  Description of Artificial Sequence: Synthetic oligonucleotide
augugggcuuugaagcuuu

SEQ ID NO: 1737794 - RNA, 19 nt, Artificial Sequence
  Description of Artificial Sequence: Synthetic oligonucleotide
cucggagggccuucccaca

SEQ ID NO: 1737795 - RNA, 19 nt, Artificial Sequence
  Description of Artificial Sequence: Synthetic oligonucleotide
gcuccgagaucuuuacugu

SEQ ID NO: 1737796 - RNA, 19 nt, Artificial Sequence
  Description of Artificial Sequence: Synthetic oligonucleotide
aaagggccgggcacccgaa

SEQ ID NO: 1737797 - RNA, 19 nt, Artificial Sequence
  Description of Artificial Sequence: Synthetic oligonucleotide
agccgcccacauacugggc

SEQ ID NO: 1737798 - RNA, 19 nt, Artificial Sequence
  Description of Artificial Sequence: Synthetic oligonucleotide
cauucauugcuggggacau

SEQ ID NO: 1737799 - RNA, 19 nt, Artificial Sequence
  Description of Artificial Sequence: Synthetic oligonucleotide
gccuugucacacugugaac

SEQ ID NO: 1737800 - RNA, 19 nt, Artificial Sequence
  Description of Artificial Sequence: Synthetic oligonucleotide
ccgaauggaccaccugaug

SEQ ID NO: 1737801 - RNA, 19 nt, Artificial Sequence
  Description of Artificial Sequence: Synthetic oligonucleotide
ggcacccgaauggaccacc

SEQ ID NO: 1737802 - RNA, 19 nt, Artificial Sequence
  Description of Artificial Sequence: Synthetic oligonucleotide
gugacggcgcagcuuggua

SEQ ID NO: 1737803 - RNA, 19 nt, Artificial Sequence
  Description of Artificial Sequence: Synthetic oligonucleotide
caccccucgauggcccagc

SEQ ID NO: 1737804 - RNA, 19 nt, Artificial Sequence
  Description of Artificial Sequence: Synthetic oligonucleotide
ccgagaucuuuacuguaga

SEQ ID NO: 1737805 - RNA, 19 nt, Artificial Sequence
  Description of Artificial Sequence: Synthetic oligonucleotide
cauacugggcaugggcaua

SEQ ID NO: 1737806 - RNA, 19 nt, Artificial Sequence
  Description of Artificial Sequence: Synthetic oligonucleotide
gcgcucaugagcacgaagu

SEQ ID NO: 1737807 - RNA, 19 nt, Artificial Sequence
  Description of Artificial Sequence: Synthetic oligonucleotide
ggccucaccccucgauggc

SEQ ID NO: 1737808 - RNA, 19 nt, Artificial Sequence
  Description of Artificial Sequence: Synthetic oligonucleotide
agguaccacaaagcacuuu

SEQ ID NO: 1737809 - RNA, 19 nt, Artificial Sequence
  Description of Artificial Sequence: Synthetic oligonucleotide
gaagggccucaccccucga

SEQ ID NO: 1737810 - RNA, 19 nt, Artificial Sequence
  Description of Artificial Sequence: Synthetic oligonucleotide
ggcacaggaauggcuuuuc

SEQ ID NO: 1737811 - RNA, 19 nt, Artificial Sequence
  Description of Artificial Sequence: Synthetic oligonucleotide
cacacuccccacacuggua

SEQ ID NO: 1737812 - RNA, 19 nt, Artificial Sequence
  Description of Artificial Sequence: Synthetic oligonucleotide
ggugggcuccucagguacc

SEQ ID NO: 1737813 - RNA, 19 nt, Artificial Sequence
  Description of Artificial Sequence: Synthetic oligonucleotide
cgucugagggcacuuccug

SEQ ID NO: 1737814 - RNA, 19 nt, Artificial Sequence
  Description of Artificial Sequence: Synthetic oligonucleotide
gcaucgguauggcuugucu

SEQ ID NO: 1737815 - RNA, 19 nt, Artificial Sequence
  Description of Artificial Sequence: Synthetic oligonucleotide
caggcaaguuagggagcug

SEQ ID NO: 1737816 - RNA, 19 nt, Artificial Sequence
  Description of Artificial Sequence: Synthetic oligonucleotide
ggacgcuccccugugugca

SEQ ID NO: 1737817 - RNA, 19 nt, Artificial Sequence
  Description of Artificial Sequence: Synthetic oligonucleotide
aggugucaggugccugcuu

SEQ ID NO: 1737818 - RNA, 19 nt, Artificial Sequence
  Description of Artificial Sequence: Synthetic oligonucleotide
ugggucucggagggccuuc

SEQ ID NO: 1737819 - RNA, 19 nt, Artificial Sequence
  Description of Artificial Sequence: Synthetic oligonucleotide
caaagcacuuucccugguu

SEQ ID NO: 1737820 - RNA, 19 nt, Artificial Sequence
  Description of Artificial Sequence: Synthetic oligonucleotide
gcucaugagcacgaagugu

SEQ ID NO: 1737821 - RNA, 19 nt, Artificial Sequence
  Description of Artificial Sequence: Synthetic oligonucleotide
ggucucggagggccuuccc

SEQ ID NO: 1737822 - RNA, 19 nt, Artificial Sequence
  Description of Artificial Sequence: Synthetic oligonucleotide
aggugacggcgcagcuugg

SEQ ID NO: 1737823 - RNA, 19 nt, Artificial Sequence
  Description of Artificial Sequence: Synthetic oligonucleotide
cucgauggcccagccaugu

SEQ ID NO: 1737824 - RNA, 19 nt, Artificial Sequence
  Description of Artificial Sequence: Synthetic oligonucleotide
gccucaccccucgauggcc

SEQ ID NO: 1737825 - RNA, 19 nt, Artificial Sequence
  Description of Artificial Sequence: Synthetic oligonucleotide
gggaaggggcaucuggcau

SEQ ID NO: 1737826 - RNA, 19 nt, Artificial Sequence
  Description of Artificial Sequence: Synthetic oligonucleotide
gagggccuucccacacaca

SEQ ID NO: 1737827 - RNA, 19 nt, Artificial Sequence
  Description of Artificial Sequence: Synthetic oligonucleotide
gcaaguuagggagcugggu

SEQ ID NO: 1737828 - RNA, 19 nt, Artificial Sequence
  Description of Artificial Sequence: Synthetic oligonucleotide
ggcggaaugcucgcccaca

SEQ ID NO: 1737829 - RNA, 19 nt, Artificial Sequence
  Description of Artificial Sequence: Synthetic oligonucleotide
ggguaccauaagccuuguc

SEQ ID NO: 1737830 - RNA, 19 nt, Artificial Sequence
  Description of Artificial Sequence: Synthetic oligonucleotide
uggugccgcuugaggcuuu

SEQ ID NO: 1737831 - RNA, 19 nt, Artificial Sequence
  Description of Artificial Sequence: Synthetic oligonucleotide
ccucagcccagccauuaaa

SEQ ID NO: 1737832 - RNA, 19 nt, Artificial Sequence
  Description of Artificial Sequence: Synthetic oligonucleotide
ccaugugggcuuugaagcu

SEQ ID NO: 1737833 - RNA, 19 nt, Artificial Sequence
  Description of Artificial Sequence: Synthetic oligonucleotide
cagcaccagguuuggucua

SEQ ID NO: 1737834 - RNA, 19 nt, Artificial Sequence
  Description of Artificial Sequence: Synthetic oligonucleotide
ggugccgcuugaggcuuug

SEQ ID NO: 1737835 - RNA, 19 nt, Artificial Sequence
  Description of Artificial Sequence: Synthetic oligonucleotide
gguaucggcgccccugcuu

SEQ ID NO: 1737836 - RNA, 19 nt, Artificial Sequence
  Description of Artificial Sequence: Synthetic oligonucleotide
ccgcaaggaaggucggcga

SEQ ID NO: 1737837 - RNA, 19 nt, Artificial Sequence
  Description of Artificial Sequence: Synthetic oligonucleotide
cugcuuugaggagcuuucu

SEQ ID NO: 1737838 - RNA, 19 nt, Artificial Sequence
  Description of Artificial Sequence: Synthetic oligonucleotide
gugcacaggaagggcuugu

SEQ ID NO: 1737839 - RNA, 19 nt, Artificial Sequence
  Description of Artificial Sequence: Synthetic oligonucleotide
ccgcuggcggaaugcucgc

SEQ ID NO: 1737840 - RNA, 19 nt, Artificial Sequence
  Description of Artificial Sequence: Synthetic oligonucleotide
gcuccucagguaccacaaa

SEQ ID NO: 1737841 - RNA, 19 nt, Artificial Sequence
  Description of Artificial Sequence: Synthetic oligonucleotide
gccucaccagugugggaaa

SEQ ID NO: 1737842 - RNA, 19 nt, Artificial Sequence
  Description of Artificial Sequence: Synthetic oligonucleotide
cagguaccacaaagcacuu

SEQ ID NO: 1737843 - RNA, 19 nt, Artificial Sequence
  Description of Artificial Sequence: Synthetic oligonucleotide
ccauagcccaugccacaga

SEQ ID NO: 1737844 - RNA, 19 nt, Artificial Sequence
  Description of Artificial Sequence: Synthetic oligonucleotide
ccauaagccuugucacacu

SEQ ID NO: 1737845 - RNA, 19 nt, Artificial Sequence
  Description of Artificial Sequence: Synthetic oligonucleotide
cgggcacccgaauggacca

SEQ ID NO: 1737846 - RNA, 19 nt, Artificial Sequence
  Description of Artificial Sequence: Synthetic oligonucleotide
gacugagcuggugccgcuu

SEQ ID NO: 1737847 - RNA, 19 nt, Artificial Sequence
  Description of Artificial Sequence: Synthetic oligonucleotide
aggcgcucaugagcacgaa

SEQ ID NO: 1737848 - RNA, 19 nt, Artificial Sequence
  Description of Artificial Sequence: Synthetic oligonucleotide
gucuuccgguguagccgca

SEQ ID NO: 1737849 - RNA, 19 nt, Artificial Sequence
  Description of Artificial Sequence: Synthetic oligonucleotide
gcucgcccacagugugggc

SEQ ID NO: 1737850 - RNA, 19 nt, Artificial Sequence
  Description of Artificial Sequence: Synthetic oligonucleotide
gucuaggggugggcuccuc

SEQ ID NO: 1737851 - RNA, 19 nt, Artificial Sequence
  Description of Artificial Sequence: Synthetic oligonucleotide
guguagccgcaaggaaggu

SEQ ID NO: 1737852 - RNA, 19 nt, Artificial Sequence
  Description of Artificial Sequence: Synthetic oligonucleotide
caggagccgcccacauacu

SEQ ID NO: 1737853 - RNA, 19 nt, Artificial Sequence
  Description of Artificial Sequence: Synthetic oligonucleotide
ggugacggcgcagcuuggu

SEQ ID NO: 1737854 - RNA, 19 nt, Artificial Sequence
  Description of Artificial Sequence: Synthetic oligonucleotide
ggccgggcacccgaaugga

SEQ ID NO: 1737855 - RNA, 19 nt, Artificial Sequence
  Description of Artificial Sequence: Synthetic oligonucleotide
cggcgccccugcuuugagg

SEQ ID NO: 1737856 - RNA, 19 nt, Artificial Sequence
  Description of Artificial Sequence: Synthetic oligonucleotide
gccgggcacccgaauggac

SEQ ID NO: 1737857 - RNA, 19 nt, Artificial Sequence
  Description of Artificial Sequence: Synthetic oligonucleotide
cgagaucuuuacuguagau

SEQ ID NO: 1737858 - RNA, 19 nt, Artificial Sequence
  Description of Artificial Sequence: Synthetic oligonucleotide
ggcccagccaugugggcuu

SEQ ID NO: 1737859 - RNA, 19 nt, Artificial Sequence
  Description of Artificial Sequence: Synthetic oligonucleotide
gcuggguucugggcuccga

SEQ ID NO: 1737860 - RNA, 19 nt, Artificial Sequence
  Description of Artificial Sequence: Synthetic oligonucleotide
gggcuccgagaucuuuacu

SEQ ID NO: 1737861 - RNA, 19 nt, Artificial Sequence
  Description of Artificial Sequence: Synthetic oligonucleotide
gugccgcuugaggcuuuga

SEQ ID NO: 1737862 - RNA, 19 nt, Artificial Sequence
  Description of Artificial Sequence: Synthetic oligonucleotide
guguaagcucggccacauu

SEQ ID NO: 1737863 - RNA, 19 nt, Artificial Sequence
  Description of Artificial Sequence: Synthetic oligonucleotide
cggcgagcaaaggcuuugc

SEQ ID NO: 1737864 - RNA, 19 nt, Artificial Sequence
  Description of Artificial Sequence: Synthetic oligonucleotide
gggcacccgaauggaccac

SEQ ID NO: 1737865 - RNA, 19 nt, Artificial Sequence
  Description of Artificial Sequence: Synthetic oligonucleotide
ccgucugagggcacuuccu

SEQ ID NO: 1737866 - RNA, 19 nt, Artificial Sequence
  Description of Artificial Sequence: Synthetic oligonucleotide
gucggcgagcaaaggcuuu

SEQ ID NO: 1737867 - RNA, 19 nt, Artificial Sequence
  Description of Artificial Sequence: Synthetic oligonucleotide
cuggugccgcuugaggcuu

SEQ ID NO: 1737868 - RNA, 19 nt, Artificial Sequence
  Description of Artificial Sequence: Synthetic oligonucleotide
gguugccccgcuggcggaa

SEQ ID NO: 1737869 - RNA, 19 nt, Artificial Sequence
  Description of Artificial Sequence: Synthetic oligonucleotide
ggucggcgagcaaaggcuu

SEQ ID NO: 1737870 - RNA, 19 nt, Artificial Sequence
  Description of Artificial Sequence: Synthetic oligonucleotide
ccugguucucagagauggu

SEQ ID NO: 1737871 - RNA, 19 nt, Artificial Sequence
  Description of Artificial Sequence: Synthetic oligonucleotide
gcacccgaauggaccaccu

SEQ ID NO: 1737872 - RNA, 19 nt, Artificial Sequence
  Description of Artificial Sequence: Synthetic oligonucleotide
cgcuggcggaaugcucgcc

SEQ ID NO: 1737873 - RNA, 19 nt, Artificial Sequence
  Description of Artificial Sequence: Synthetic oligonucleotide
ccccucgauggcccagcca

SEQ ID NO: 1737874 - RNA, 19 nt, Artificial Sequence
  Description of Artificial Sequence: Synthetic oligonucleotide
ccccgucugagggcacuuc

SEQ ID NO: 1737875 - RNA, 19 nt, Artificial Sequence
  Description of Artificial Sequence: Synthetic oligonucleotide
ggucuaggggugggcuccu

SEQ ID NO: 1737876 - RNA, 19 nt, Artificial Sequence
  Description of Artificial Sequence: Synthetic oligonucleotide
ccccgagugcaggcgcuca

SEQ ID NO: 1737877 - RNA, 19 nt, Artificial Sequence
  Description of Artificial Sequence: Synthetic oligonucleotide
cuggcacagugugggcauu

SEQ ID NO: 1737878 - RNA, 19 nt, Artificial Sequence
  Description of Artificial Sequence: Synthetic oligonucleotide
cggaaugcucgcccacagu

SEQ ID NO: 1737879 - RNA, 19 nt, Artificial Sequence
  Description of Artificial Sequence: Synthetic oligonucleotide
gccccgcuggcggaaugcu

SEQ ID NO: 1737880 - RNA, 19 nt, Artificial Sequence
  Description of Artificial Sequence: Synthetic oligonucleotide
gggcaucgguauggcuugu

SEQ ID NO: 1737881 - RNA, 19 nt, Artificial Sequence
  Description of Artificial Sequence: Synthetic oligonucleotide
ccucggagguugccccgcu

SEQ ID NO: 1737882 - RNA, 19 nt, Artificial Sequence
  Description of Artificial Sequence: Synthetic oligonucleotide
cccgagugcaggcgcucau

SEQ ID NO: 1737883 - RNA, 19 nt, Artificial Sequence
  Description of Artificial Sequence: Synthetic oligonucleotide
cggcgcagcuugguagcca

SEQ ID NO: 1737884 - RNA, 19 nt, Artificial Sequence
  Description of Artificial Sequence: Synthetic oligonucleotide
gcgcagcuugguagccagu

SEQ ID NO: 1737885 - RNA, 19 nt, Artificial Sequence
  Description of Artificial Sequence: Synthetic oligonucleotide
cggguaccauaagccuugu

SEQ ID NO: 1737886 - RNA, 19 nt, Artificial Sequence
  Description of Artificial Sequence: Synthetic oligonucleotide
gcccagccaugugggcuuu

SEQ ID NO: 1737887 - RNA, 19 nt, Artificial Sequence
  Description of Artificial Sequence: Synthetic oligonucleotide
aaauuauugaccaaugcac

SEQ ID NO: 1737888 - RNA, 19 nt, Artificial Sequence
  Description of Artificial Sequence: Synthetic oligonucleotide
aaaauuauugaccaaugca

SEQ ID NO: 1737889 - RNA, 19 nt, Artificial Sequence
  Description of Artificial Sequence: Synthetic oligonucleotide
aauugauggccaaagaucc

SEQ ID NO: 1737890 - RNA, 19 nt, Artificial Sequence
  Description of Artificial Sequence: Synthetic oligonucleotide
uuugguauuaccaacuccc

SEQ ID NO: 1737891 - RNA, 19 nt, Artificial Sequence
  Description of Artificial Sequence: Synthetic oligonucleotide
aaauuuugcagagcaagcc

SEQ ID NO: 1737892 - RNA, 19 nt, Artificial Sequence
  Description of Artificial Sequence: Synthetic oligonucleotide
aauuauugaccaaugcacc

SEQ ID NO: 1737893 - RNA, 19 nt, Artificial Sequence
  Description of Artificial Sequence: Synthetic oligonucleotide
uacaucuuaaaccaugggc

SEQ ID NO: 1737894 - RNA, 19 nt, Artificial Sequence
  Description of Artificial Sequence: Synthetic oligonucleotide
acuaacacgaauugauggc

SEQ ID NO: 1737895 - RNA, 19 nt, Artificial Sequence
  Description of Artificial Sequence: Synthetic oligonucleotide
uaaaccaugggcuuaauuc

SEQ ID NO: 1737896 - RNA, 19 nt, Artificial Sequence
  Description of Artificial Sequence: Synthetic oligonucleotide
gacuaacacgaauugaugg

SEQ ID NO: 1737897 - RNA, 19 nt, Artificial Sequence
  Description of Artificial Sequence: Synthetic oligonucleotide
ucuuauaucgaugucuccg

SEQ ID NO: 1737898 - RNA, 19 nt, Artificial Sequence
  Description of Artificial Sequence: Synthetic oligonucleotide
aucguuggcagcuagauug

SEQ ID NO: 1737899 - RNA, 19 nt, Artificial Sequence
  Description of Artificial Sequence: Synthetic oligonucleotide
cuagauugcggcaacagcc

SEQ ID NO: 1737900 - RNA, 19 nt, Artificial Sequence
  Description of Artificial Sequence: Synthetic oligonucleotide
ugagguaacucgaacuugg

SEQ ID NO: 1737901 - RNA, 19 nt, Artificial Sequence
  Description of Artificial Sequence: Synthetic oligonucleotide
uauaccguaggacauguca

SEQ ID NO: 1737902 - RNA, 19 nt, Artificial Sequence
  Description of Artificial Sequence: Synthetic oligonucleotide
agugagauaggucuuccac

SEQ ID NO: 1737903 - RNA, 19 nt, Artificial Sequence
  Description of Artificial Sequence: Synthetic oligonucleotide
uaucuugaggcacauaacu

SEQ ID NO: 1737904 - RNA, 19 nt, Artificial Sequence
  Description of Artificial Sequence: Synthetic oligonucleotide
uucccugauaucuugaggc

SEQ ID NO: 1737905 - RNA, 19 nt, Artificial Sequence
  Description of Artificial Sequence: Synthetic oligonucleotide
ugugguacacggcacaucc

SEQ ID NO: 1737906 - RNA, 19 nt, Artificial Sequence
  Description of Artificial Sequence: Synthetic oligonucleotide
ucggaagugagauaggucu

SEQ ID NO: 1737907 - RNA, 19 nt, Artificial Sequence
  Description of Artificial Sequence: Synthetic oligonucleotide
uacucauucuguaagugug

SEQ ID NO: 1737908 - RNA, 19 nt, Artificial Sequence
  Description of Artificial Sequence: Synthetic oligonucleotide
gaaguggagagaucguugg

SEQ ID NO: 1737909 - RNA, 19 nt, Artificial Sequence
  Description of Artificial Sequence: Synthetic oligonucleotide
aaccuaugcauuuugcaga

SEQ ID NO: 1737910 - RNA, 19 nt, Artificial Sequence
  Description of Artificial Sequence: Synthetic oligonucleotide
aaaauuagccaugagguuu

SEQ ID NO: 1737911 - RNA, 19 nt, Artificial Sequence
  Description of Artificial Sequence: Synthetic oligonucleotide
agcuguuccagcuuagcac

SEQ ID NO: 1737912 - RNA, 19 nt, Artificial Sequence
  Description of Artificial Sequence: Synthetic oligonucleotide
aaguagaguagacaacgug

SEQ ID NO: 1737913 - RNA, 19 nt, Artificial Sequence
  Description of Artificial Sequence: Synthetic oligonucleotide
ugcauuuugcagaaguaca

SEQ ID NO: 1737914 - RNA, 19 nt, Artificial Sequence
  Description of Artificial Sequence: Synthetic oligonucleotide
uaaugagucauugucuucc

SEQ ID NO: 1737915 - RNA, 19 nt, Artificial Sequence
  Description of Artificial Sequence: Synthetic oligonucleotide
ucacauuaucccaagcagc

SEQ ID NO: 1737916 - RNA, 19 nt, Artificial Sequence
  Description of Artificial Sequence: Synthetic oligonucleotide
cauaggcccaaaauuagcc

SEQ ID NO: 1737917 - RNA, 19 nt, Artificial Sequence
  Description of Artificial Sequence: Synthetic oligonucleotide
uacauaggcccaaaauuag

SEQ ID NO: 1737918 - RNA, 19 nt, Artificial Sequence
  Description of Artificial Sequence: Synthetic oligonucleotide
gaugcuauauugauuggcc

SEQ ID NO: 1737919 - RNA, 19 nt, Artificial Sequence
  Description of Artificial Sequence: Synthetic oligonucleotide
cuguaagugugacagagag

SEQ ID NO: 1737920 - RNA, 19 nt, Artificial Sequence
  Description of Artificial Sequence: Synthetic oligonucleotide
caugaaaagcuuucggaag

SEQ ID NO: 1737921 - RNA, 19 nt, Artificial Sequence
  Description of Artificial Sequence: Synthetic oligonucleotide
auaucgaugucuccgcggg

SEQ ID NO: 1737922 - RNA, 19 nt, Artificial Sequence
  Description of Artificial Sequence: Synthetic oligonucleotide
uccaugaaaagcuuucgga

SEQ ID NO: 1737923 - RNA, 19 nt, Artificial Sequence
  Description of Artificial Sequence: Synthetic oligonucleotide
cugagagaagacuaacacg

SEQ ID NO: 1737924 - RNA, 19 nt, Artificial Sequence
  Description of Artificial Sequence: Synthetic oligonucleotide
uccuacuucagggacacgg

SEQ ID NO: 1737925 - RNA, 19 nt, Artificial Sequence
  Description of Artificial Sequence: Synthetic oligonucleotide
aaacagaauguguccauga

SEQ ID NO: 1737926 - RNA, 19 nt, Artificial Sequence
  Description of Artificial Sequence: Synthetic oligonucleotide
auccccaaauuguauaccg

SEQ ID NO: 1737927 - RNA, 19 nt, Artificial Sequence
  Description of Artificial Sequence: Synthetic oligonucleotide
ugcaccauacuucugcucu

SEQ ID NO: 1737928 - RNA, 19 nt, Artificial Sequence
  Description of Artificial Sequence: Synthetic oligonucleotide
aauccaugagaccuaggcu

SEQ ID NO: 1737929 - RNA, 19 nt, Artificial Sequence
  Description of Artificial Sequence: Synthetic oligonucleotide
ucuucccaaguuuacaucu

SEQ ID NO: 1737930 - RNA, 19 nt, Artificial Sequence
  Description of Artificial Sequence: Synthetic oligonucleotide
agaagacuaacacgaauug

SEQ ID NO: 1737931 - RNA, 19 nt, Artificial Sequence
  Description of Artificial Sequence: Synthetic oligonucleotide
caaccuaugcauuuugcag

SEQ ID NO: 1737932 - RNA, 19 nt, Artificial Sequence
  Description of Artificial Sequence: Synthetic oligonucleotide
uuauaucgaugucuccgcg

SEQ ID NO: 1737933 - RNA, 19 nt, Artificial Sequence
  Description of Artificial Sequence: Synthetic oligonucleotide
cuuauaucgaugucuccgc

SEQ ID NO: 1737934 - RNA, 19 nt, Artificial Sequence
  Description of Artificial Sequence: Synthetic oligonucleotide
cucacauuaucccaagcag

SEQ ID NO: 1737935 - RNA, 19 nt, Artificial Sequence
  Description of Artificial Sequence: Synthetic oligonucleotide
acaucuuaaaccaugggcu

SEQ ID NO: 1737936 - RNA, 19 nt, Artificial Sequence
  Description of Artificial Sequence: Synthetic oligonucleotide
ugccaagucuagcaggagg

SEQ ID NO: 1737937 - RNA, 19 nt, Artificial Sequence
  Description of Artificial Sequence: Synthetic oligonucleotide
agaguagacaacgugaccu

SEQ ID NO: 1737938 - RNA, 19 nt, Artificial Sequence
  Description of Artificial Sequence: Synthetic oligonucleotide
aaaagcuuucggaagugag

SEQ ID NO: 1737939 - RNA, 19 nt, Artificial Sequence
  Description of Artificial Sequence: Synthetic oligonucleotide
gguaacucgaacuugguuc

SEQ ID NO: 1737940 - RNA, 19 nt, Artificial Sequence
  Description of Artificial Sequence: Synthetic oligonucleotide
aacgccccuuaauacgggc

SEQ ID NO: 1737941 - RNA, 19 nt, Artificial Sequence
  Description of Artificial Sequence: Synthetic oligonucleotide
uuagccaugagguuuggua

SEQ ID NO: 1737942 - RNA, 19 nt, Artificial Sequence
  Description of Artificial Sequence: Synthetic oligonucleotide
augcauuuugcagaaguac

SEQ ID NO: 1737943 - RNA, 19 nt, Artificial Sequence
  Description of Artificial Sequence: Synthetic oligonucleotide
ugaccaaugcaccauacuu

SEQ ID NO: 1737944 - RNA, 19 nt, Artificial Sequence
  Description of Artificial Sequence: Synthetic oligonucleotide
augaaaagcuuucggaagu

SEQ ID NO: 1737945 - RNA, 19 nt, Artificial Sequence
  Description of Artificial Sequence: Synthetic oligonucleotide
aagcaucggagguuuggac

SEQ ID NO: 1737946 - RNA, 19 nt, Artificial Sequence
  Description of Artificial Sequence: Synthetic oligonucleotide
guaacucgaacuugguucc

SEQ ID NO: 1737947 - RNA, 19 nt, Artificial Sequence
  Description of Artificial Sequence: Synthetic oligonucleotide
cuucuuauaucgaugucuc

SEQ ID NO: 1737948 - RNA, 19 nt, Artificial Sequence
  Description of Artificial Sequence: Synthetic oligonucleotide
uuggcagcuagauugcggc

SEQ ID NO: 1737949 - RNA, 19 nt, Artificial Sequence
  Description of Artificial Sequence: Synthetic oligonucleotide
uauugguuagauuguuucu

SEQ ID NO: 1737950 - RNA, 19 nt, Artificial Sequence
  Description of Artificial Sequence: Synthetic oligonucleotide
cccaaaauuagccaugagg

SEQ ID NO: 1737951 - RNA, 19 nt, Artificial Sequence
  Description of Artificial Sequence: Synthetic oligonucleotide
aguagaguagacaacguga

SEQ ID NO: 1737952 - RNA, 19 nt, Artificial Sequence
  Description of Artificial Sequence: Synthetic oligonucleotide
ugaugcuauauugauuggc

SEQ ID NO: 1737953 - RNA, 19 nt, Artificial Sequence
  Description of Artificial Sequence: Synthetic oligonucleotide
uagauuguuucuucccaag

SEQ ID NO: 1737954 - RNA, 19 nt, Artificial Sequence
  Description of Artificial Sequence: Synthetic oligonucleotide
aagauguuguucucuuccu

SEQ ID NO: 1737955 - RNA, 19 nt, Artificial Sequence
  Description of Artificial Sequence: Synthetic oligonucleotide
cuauucgggaaguggagag

SEQ ID NO: 1737956 - RNA, 19 nt, Artificial Sequence
  Description of Artificial Sequence: Synthetic oligonucleotide
accaaugcaccauacuucu

SEQ ID NO: 1737957 - RNA, 19 nt, Artificial Sequence
  Description of Artificial Sequence: Synthetic oligonucleotide
uggagaaaggucacucuca

SEQ ID NO: 1737958 - RNA, 19 nt, Artificial Sequence
  Description of Artificial Sequence: Synthetic oligonucleotide
ugaaccuugaugcuauauu

SEQ ID NO: 1737959 - RNA, 19 nt, Artificial Sequence
  Description of Artificial Sequence: Synthetic oligonucleotide
uuggagaaaggucacucuc

SEQ ID NO: 1737960 - RNA, 19 nt, Artificial Sequence
  Description of Artificial Sequence: Synthetic oligonucleotide
auacucauucuguaagugu

SEQ ID NO: 1737961 - RNA, 19 nt, Artificial Sequence
  Description of Artificial Sequence: Synthetic oligonucleotide
agauaggucuuccacuuga

SEQ ID NO: 1737962 - RNA, 19 nt, Artificial Sequence
  Description of Artificial Sequence: Synthetic oligonucleotide
agauguuguucucuuccuc

SEQ ID NO: 1737963 - RNA, 19 nt, Artificial Sequence
  Description of Artificial Sequence: Synthetic oligonucleotide
ugaagcaucggagguuugg

SEQ ID NO: 1737964 - RNA, 19 nt, Artificial Sequence
  Description of Artificial Sequence: Synthetic oligonucleotide
ugccuauucgggaagugga

SEQ ID NO: 1737965 - RNA, 19 nt, Artificial Sequence
  Description of Artificial Sequence: Synthetic oligonucleotide
uccggaucccuaaugaguc

SEQ ID NO: 1737966 - RNA, 19 nt, Artificial Sequence
  Description of Artificial Sequence: Synthetic oligonucleotide
aguagacaacgugaccucc

SEQ ID NO: 1737967 - RNA, 19 nt, Artificial Sequence
  Description of Artificial Sequence: Synthetic oligonucleotide
uugguauuaccaacucccc

SEQ ID NO: 1737968 - RNA, 19 nt, Artificial Sequence
  Description of Artificial Sequence: Synthetic oligonucleotide
guuugguauuaccaacucc

SEQ ID NO: 1737969 - RNA, 19 nt, Artificial Sequence
  Description of Artificial Sequence: Synthetic oligonucleotide
uugauggccaaagaucccc

SEQ ID NO: 1737970 - RNA, 19 nt, Artificial Sequence
  Description of Artificial Sequence: Synthetic oligonucleotide
aagucuagcaggagggaag

SEQ ID NO: 1737971 - RNA, 19 nt, Artificial Sequence
  Description of Artificial Sequence: Synthetic oligonucleotide
uuagauuguuucuucccaa

SEQ ID NO: 1737972 - RNA, 19 nt, Artificial Sequence
  Description of Artificial Sequence: Synthetic oligonucleotide
ugagauaggucuuccacuu

SEQ ID NO: 1737973 - RNA, 19 nt, Artificial Sequence
  Description of Artificial Sequence: Synthetic oligonucleotide
caagcagcaaaauuauuga

SEQ ID NO: 1737974 - RNA, 19 nt, Artificial Sequence
  Description of Artificial Sequence: Synthetic oligonucleotide
cucaugaagggaguggcgg

SEQ ID NO: 1737975 - RNA, 19 nt, Artificial Sequence
  Description of Artificial Sequence: Synthetic oligonucleotide
aagcuuucggaagugagau

SEQ ID NO: 1737976 - RNA, 19 nt, Artificial Sequence
  Description of Artificial Sequence: Synthetic oligonucleotide
uugaugcuauauugauugg

SEQ ID NO: 1737977 - RNA, 19 nt, Artificial Sequence
  Description of Artificial Sequence: Synthetic oligonucleotide
ugguuagauuguuucuucc

SEQ ID NO: 1737978 - RNA, 19 nt, Artificial Sequence
  Description of Artificial Sequence: Synthetic oligonucleotide
ugguauuaccaacucccca

SEQ ID NO: 1737979 - RNA, 19 nt, Artificial Sequence
  Description of Artificial Sequence: Synthetic oligonucleotide
guaguaauccaugagaccu

SEQ ID NO: 1737980 - RNA, 19 nt, Artificial Sequence
  Description of Artificial Sequence: Synthetic oligonucleotide
guagcaaggaggcagcauc

SEQ ID NO: 1737981 - RNA, 19 nt, Artificial Sequence
  Description of Artificial Sequence: Synthetic oligonucleotide
aaagcuuucggaagugaga

SEQ ID NO: 1737982 - RNA, 19 nt, Artificial Sequence
  Description of Artificial Sequence: Synthetic oligonucleotide
uagaguagacaacgugacc

SEQ ID NO: 1737983 - RNA, 19 nt, Artificial Sequence
  Description of Artificial Sequence: Synthetic oligonucleotide
uccaugagaccuaggcugc

SEQ ID NO: 1737984 - RNA, 19 nt, Artificial Sequence
  Description of Artificial Sequence: Synthetic oligonucleotide
uccaccaacacucggucau

SEQ ID NO: 1737985 - RNA, 19 nt, Artificial Sequence
  Description of Artificial Sequence: Synthetic oligonucleotide
aucagguaguaauccauga

SEQ ID NO: 1737986 - RNA, 19 nt, Artificial Sequence
  Description of Artificial Sequence: Synthetic oligonucleotide
gcuuucggaagugagauag

SEQ ID NO: 1737987 - RNA, 19 nt, Artificial Sequence
  Description of Artificial Sequence: Synthetic oligonucleotide
agcaucggagguuuggacu

SEQ ID NO: 1737988 - RNA, 19 nt, Artificial Sequence
  Description of Artificial Sequence: Synthetic oligonucleotide
ucuguaagugugacagaga

SEQ ID NO: 1737989 - RNA, 19 nt, Artificial Sequence
  Description of Artificial Sequence: Synthetic oligonucleotide
ucaagcacggugucuccag

SEQ ID NO: 1737990 - RNA, 19 nt, Artificial Sequence
  Description of Artificial Sequence: Synthetic oligonucleotide
ggacaugucaaaauuuugc

SEQ ID NO: 1737991 - RNA, 19 nt, Artificial Sequence
  Description of Artificial Sequence: Synthetic oligonucleotide
auaggcccaaaauuagcca

SEQ ID NO: 1737992 - RNA, 19 nt, Artificial Sequence
  Description of Artificial Sequence: Synthetic oligonucleotide
uggccaaagauccccaaau

SEQ ID NO: 1737993 - RNA, 19 nt, Artificial Sequence
  Description of Artificial Sequence: Synthetic oligonucleotide
uugguuagauuguuucuuc

SEQ ID NO: 1737994 - RNA, 19 nt, Artificial Sequence
  Description of Artificial Sequence: Synthetic oligonucleotide
uguccggaucccuaaugag

SEQ ID NO: 1737995 - RNA, 19 nt, Artificial Sequence
  Description of Artificial Sequence: Synthetic oligonucleotide
uuaauacgggcgcagccau

SEQ ID NO: 1737996 - RNA, 19 nt, Artificial Sequence
  Description of Artificial Sequence: Synthetic oligonucleotide
gguuagauuguuucuuccc

SEQ ID NO: 1737997 - RNA, 19 nt, Artificial Sequence
  Description of Artificial Sequence: Synthetic oligonucleotide
gaucccuaaugagucauug

SEQ ID NO: 1737998 - RNA, 19 nt, Artificial Sequence
  Description of Artificial Sequence: Synthetic oligonucleotide
uuuugcagagcaagccgac

SEQ ID NO: 1737999 - RNA, 19 nt, Artificial Sequence
  Description of Artificial Sequence: Synthetic oligonucleotide
gaguccagccgcgagaagc

SEQ ID NO: 1738000 - RNA, 19 nt, Artificial Sequence
  Description of Artificial Sequence: Synthetic oligonucleotide
caacacucggucauaggug

SEQ ID NO: 1738001 - RNA, 19 nt, Artificial Sequence
  Description of Artificial Sequence: Synthetic oligonucleotide
uguauaccguaggacaugu

SEQ ID NO: 1738002 - RNA, 19 nt, Artificial Sequence
  Description of Artificial Sequence: Synthetic oligonucleotide
uagccaugagguuugguau

SEQ ID NO: 1738003 - RNA, 19 nt, Artificial Sequence
  Description of Artificial Sequence: Synthetic oligonucleotide
agaccuaggcugccaaguc

SEQ ID NO: 1738004 - RNA, 19 nt, Artificial Sequence
  Description of Artificial Sequence: Synthetic oligonucleotide
aggucaagcacggugucuc

SEQ ID NO: 1738005 - RNA, 19 nt, Artificial Sequence
  Description of Artificial Sequence: Synthetic oligonucleotide
uucuuauaucgaugucucc

SEQ ID NO: 1738006 - RNA, 19 nt, Artificial Sequence
  Description of Artificial Sequence: Synthetic oligonucleotide
ccaaauuguauaccguagg

SEQ ID NO: 1738007 - RNA, 19 nt, Artificial Sequence
  Description of Artificial Sequence: Synthetic oligonucleotide
guagaguagacaacgugac

SEQ ID NO: 1738008 - RNA, 19 nt, Artificial Sequence
  Description of Artificial Sequence: Synthetic oligonucleotide
uagcacucacauuauccca

SEQ ID NO: 1738009 - RNA, 19 nt, Artificial Sequence
  Description of Artificial Sequence: Synthetic oligonucleotide
cacgaauugauggccaaag

SEQ ID NO: 1738010 - RNA, 19 nt, Artificial Sequence
  Description of Artificial Sequence: Synthetic oligonucleotide
aaccuugaugcuauauuga

SEQ ID NO: 1738011 - RNA, 19 nt, Artificial Sequence
  Description of Artificial Sequence: Synthetic oligonucleotide
augcuauauugauuggcca

SEQ ID NO: 1738012 - RNA, 19 nt, Artificial Sequence
  Description of Artificial Sequence: Synthetic oligonucleotide
uuccgaacgccccuuaaua

SEQ ID NO: 1738013 - RNA, 19 nt, Artificial Sequence
  Description of Artificial Sequence: Synthetic oligonucleotide
cagcuuagcacucacauua

SEQ ID NO: 1738014 - RNA, 19 nt, Artificial Sequence
  Description of Artificial Sequence: Synthetic oligonucleotide
uuccuugaccgcuggaaga

SEQ ID NO: 1738015 - RNA, 19 nt, Artificial Sequence
  Description of Artificial Sequence: Synthetic oligonucleotide
accuugaugcuauauugau

SEQ ID NO: 1738016 - RNA, 19 nt, Artificial Sequence
  Description of Artificial Sequence: Synthetic oligonucleotide
uuaaaccaugggcuuaauu

SEQ ID NO: 1738017 - RNA, 19 nt, Artificial Sequence
  Description of Artificial Sequence: Synthetic oligonucleotide
cauccaucagguaguaauc

SEQ ID NO: 1738018 - RNA, 19 nt, Artificial Sequence
  Description of Artificial Sequence: Synthetic oligonucleotide
uccgaacgccccuuaauac

SEQ ID NO: 1738019 - RNA, 19 nt, Artificial Sequence
  Description of Artificial Sequence: Synthetic oligonucleotide
acggugacacuauggcaac

SEQ ID NO: 1738020 - RNA, 19 nt, Artificial Sequence
  Description of Artificial Sequence: Synthetic oligonucleotide
ugucaaaauuuugcagagc

SEQ ID NO: 1738021 - RNA, 19 nt, Artificial Sequence
  Description of Artificial Sequence: Synthetic oligonucleotide
agagaucguuggcagcuag

SEQ ID NO: 1738022 - RNA, 19 nt, Artificial Sequence
  Description of Artificial Sequence: Synthetic oligonucleotide
gcaacagccaguuugaagu

SEQ ID NO: 1738023 - RNA, 19 nt, Artificial Sequence
  Description of Artificial Sequence: Synthetic oligonucleotide
aaagauccccaaauuguau

SEQ ID NO: 1738024 - RNA, 19 nt, Artificial Sequence
  Description of Artificial Sequence: Synthetic oligonucleotide
ggcaccuugcaccacauac

SEQ ID NO: 1738025 - RNA, 19 nt, Artificial Sequence
  Description of Artificial Sequence: Synthetic oligonucleotide
ccaaaauuagccaugaggu

SEQ ID NO: 1738026 - RNA, 19 nt, Artificial Sequence
  Description of Artificial Sequence: Synthetic oligonucleotide
gguauuaccaacuccccaa

SEQ ID NO: 1738027 - RNA, 19 nt, Artificial Sequence
  Description of Artificial Sequence: Synthetic oligonucleotide
gaccaaugcaccauacuuc

SEQ ID NO: 1738028 - RNA, 19 nt, Artificial Sequence
  Description of Artificial Sequence: Synthetic oligonucleotide
guacauaggcccaaaauua

SEQ ID NO: 1738029 - RNA, 19 nt, Artificial Sequence
  Description of Artificial Sequence: Synthetic oligonucleotide
aagcgccugacauccccuc

SEQ ID NO: 1738030 - RNA, 19 nt, Artificial Sequence
  Description of Artificial Sequence: Synthetic oligonucleotide
ucuggcgagagauggcuuc

SEQ ID NO: 1738031 - RNA, 19 nt, Artificial Sequence
  Description of Artificial Sequence: Synthetic oligonucleotide
ucccaaguuuacaucuuaa

SEQ ID NO: 1738032 - RNA, 19 nt, Artificial Sequence
  Description of Artificial Sequence: Synthetic oligonucleotide
uuguauaccguaggacaug

SEQ ID NO: 1738033 - RNA, 19 nt, Artificial Sequence
  Description of Artificial Sequence: Synthetic oligonucleotide
uggcaaccuaugcauuuug

SEQ ID NO: 1738034 - RNA, 19 nt, Artificial Sequence
  Description of Artificial Sequence: Synthetic oligonucleotide
ucguuggcagcuagauugc

SEQ ID NO: 1738035 - RNA, 19 nt, Artificial Sequence
  Description of Artificial Sequence: Synthetic oligonucleotide
guacacggcacauccacca

SEQ ID NO: 1738036 - RNA, 19 nt, Artificial Sequence
  Description of Artificial Sequence: Synthetic oligonucleotide
gggcuuaauucacugauuc

SEQ ID NO: 1738037 - RNA, 19 nt, Artificial Sequence
  Description of Artificial Sequence: Synthetic oligonucleotide
accaacacucggucauagg

SEQ ID NO: 1738038 - RNA, 19 nt, Artificial Sequence
  Description of Artificial Sequence: Synthetic oligonucleotide
agacuaacacgaauugaug

SEQ ID NO: 1738039 - RNA, 19 nt, Artificial Sequence
  Description of Artificial Sequence: Synthetic oligonucleotide
agauugcggcaacagccag

SEQ ID NO: 1738040 - RNA, 19 nt, Artificial Sequence
  Description of Artificial Sequence: Synthetic oligonucleotide
gaguagacaacgugaccuc

SEQ ID NO: 1738041 - RNA, 19 nt, Artificial Sequence
  Description of Artificial Sequence: Synthetic oligonucleotide
uucccaaguuuacaucuua

SEQ ID NO: 1738042 - RNA, 19 nt, Artificial Sequence
  Description of Artificial Sequence: Synthetic oligonucleotide
accuaugcauuuugcagaa

SEQ ID NO: 1738043 - RNA, 19 nt, Artificial Sequence
  Description of Artificial Sequence: Synthetic oligonucleotide
ugagaccuaggcugccaag

SEQ ID NO: 1738044 - RNA, 19 nt, Artificial Sequence
  Description of Artificial Sequence: Synthetic oligonucleotide
acgaauugauggccaaaga

SEQ ID NO: 1738045 - RNA, 19 nt, Artificial Sequence
  Description of Artificial Sequence: Synthetic oligonucleotide
uaguaauccaugagaccua

SEQ ID NO: 1738046 - RNA, 19 nt, Artificial Sequence
  Description of Artificial Sequence: Synthetic oligonucleotide
cugccuauucgggaagugg

SEQ ID NO: 1738047 - RNA, 19 nt, Artificial Sequence
  Description of Artificial Sequence: Synthetic oligonucleotide
uccugccaucccaugaggu

SEQ ID NO: 1738048 - RNA, 19 nt, Artificial Sequence
  Description of Artificial Sequence: Synthetic oligonucleotide
acucggucauagguguccc

SEQ ID NO: 1738049 - RNA, 19 nt, Artificial Sequence
  Description of Artificial Sequence: Synthetic oligonucleotide
cuuaauacgggcgcagcca

SEQ ID NO: 1738050 - RNA, 19 nt, Artificial Sequence
  Description of Artificial Sequence: Synthetic oligonucleotide
ggcuucauucacaaagucc

SEQ ID NO: 1738051 - RNA, 19 nt, Artificial Sequence
  Description of Artificial Sequence: Synthetic oligonucleotide
uaccguaggacaugucaaa

SEQ ID NO: 1738052 - RNA, 19 nt, Artificial Sequence
  Description of Artificial Sequence: Synthetic oligonucleotide
augucuccgcgggacaggc

SEQ ID NO: 1738053 - RNA, 19 nt, Artificial Sequence
  Description of Artificial Sequence: Synthetic oligonucleotide
augagguaacucgaacuug

SEQ ID NO: 1738054 - RNA, 19 nt, Artificial Sequence
  Description of Artificial Sequence: Synthetic oligonucleotide
agucugccuauucgggaag

SEQ ID NO: 1738055 - RNA, 19 nt, Artificial Sequence
  Description of Artificial Sequence: Synthetic oligonucleotide
gccaagucuagcaggaggg

SEQ ID NO: 1738056 - RNA, 19 nt, Artificial Sequence
  Description of Artificial Sequence: Synthetic oligonucleotide
cucauucuguaagugugac

SEQ ID NO: 1738057 - RNA, 19 nt, Artificial Sequence
  Description of Artificial Sequence: Synthetic oligonucleotide
cccaaauuguauaccguag

SEQ ID NO: 1738058 - RNA, 19 nt, Artificial Sequence
  Description of Artificial Sequence: Synthetic oligonucleotide
aggaccuuuugcagucugc

SEQ ID NO: 1738059 - RNA, 19 nt, Artificial Sequence
  Description of Artificial Sequence: Synthetic oligonucleotide
gagaagacuaacacgaauu

SEQ ID NO: 1738060 - RNA, 19 nt, Artificial Sequence
  Description of Artificial Sequence: Synthetic oligonucleotide
ugaccgcuggaagauguug

SEQ ID NO: 1738061 - RNA, 19 nt, Artificial Sequence
  Description of Artificial Sequence: Synthetic oligonucleotide
gcuagauugcggcaacagc

SEQ ID NO: 1738062 - RNA, 19 nt, Artificial Sequence
  Description of Artificial Sequence: Synthetic oligonucleotide
auucgggaaguggagagau

SEQ ID NO: 1738063 - RNA, 19 nt, Artificial Sequence
  Description of Artificial Sequence: Synthetic oligonucleotide
gaaguaaugccaguguuuu

SEQ ID NO: 1738064 - RNA, 19 nt, Artificial Sequence
  Description of Artificial Sequence: Synthetic oligonucleotide
agaucguuggcagcuagau

SEQ ID NO: 1738065 - RNA, 19 nt, Artificial Sequence
  Description of Artificial Sequence: Synthetic oligonucleotide
gaaguacauaggcccaaaa

SEQ ID NO: 1738066 - RNA, 19 nt, Artificial Sequence
  Description of Artificial Sequence: Synthetic oligonucleotide
cacugauucuguccggauc

SEQ ID NO: 1738067 - RNA, 19 nt, Artificial Sequence
  Description of Artificial Sequence: Synthetic oligonucleotide
aacagccaguuugaaguaa

SEQ ID NO: 1738068 - RNA, 19 nt, Artificial Sequence
  Description of Artificial Sequence: Synthetic oligonucleotide
gcaucggagguuuggacug

SEQ ID NO: 1738069 - RNA, 19 nt, Artificial Sequence
  Description of Artificial Sequence: Synthetic oligonucleotide
ggcggucugugguacacgg

SEQ ID NO: 1738070 - RNA, 19 nt, Artificial Sequence
  Description of Artificial Sequence: Synthetic oligonucleotide
cacucggucauaggugucc

SEQ ID NO: 1738071 - RNA, 19 nt, Artificial Sequence
  Description of Artificial Sequence: Synthetic oligonucleotide
acggcacauccaccaacac

SEQ ID NO: 1738072 - RNA, 19 nt, Artificial Sequence
  Description of Artificial Sequence: Synthetic oligonucleotide
ugggcuuaauucacugauu

SEQ ID NO: 1738073 - RNA, 19 nt, Artificial Sequence
  Description of Artificial Sequence: Synthetic oligonucleotide
acauaacugugaaggaccu

SEQ ID NO: 1738074 - RNA, 19 nt, Artificial Sequence
  Description of Artificial Sequence: Synthetic oligonucleotide
ccgaacgccccuuaauacg

SEQ ID NO: 1738075 - RNA, 19 nt, Artificial Sequence
  Description of Artificial Sequence: Synthetic oligonucleotide
aagugaagcaucggagguu

SEQ ID NO: 1738076 - RNA, 19 nt, Artificial Sequence
  Description of Artificial Sequence: Synthetic oligonucleotide
gcaaccuaugcauuuugca

SEQ ID NO: 1738077 - RNA, 19 nt, Artificial Sequence
  Description of Artificial Sequence: Synthetic oligonucleotide
ucccaugagguaacucgaa

SEQ ID NO: 1738078 - RNA, 19 nt, Artificial Sequence
  Description of Artificial Sequence: Synthetic oligonucleotide
cacucacauuaucccaagc

SEQ ID NO: 1738079 - RNA, 19 nt, Artificial Sequence
  Description of Artificial Sequence: Synthetic oligonucleotide
uccuugaccgcuggaagau

SEQ ID NO: 1738080 - RNA, 19 nt, Artificial Sequence
  Description of Artificial Sequence: Synthetic oligonucleotide
auaccguaggacaugucaa

SEQ ID NO: 1738081 - RNA, 19 nt, Artificial Sequence
  Description of Artificial Sequence: Synthetic oligonucleotide
agggaguggcggucugugg

SEQ ID NO: 1738082 - RNA, 19 nt, Artificial Sequence
  Description of Artificial Sequence: Synthetic oligonucleotide
auugcggcaacagccaguu

SEQ ID NO: 1738083 - RNA, 19 nt, Artificial Sequence
  Description of Artificial Sequence: Synthetic oligonucleotide
gcgagagauggcuucauuc

SEQ ID NO: 1738084 - RNA, 19 nt, Artificial Sequence
  Description of Artificial Sequence: Synthetic oligonucleotide
ccuuaauacgggcgcagcc

SEQ ID NO: 1738085 - RNA, 19 nt, Artificial Sequence
  Description of Artificial Sequence: Synthetic oligonucleotide
ggaagcgccugacaucccc

SEQ ID NO: 1738086 - RNA, 19 nt, Artificial Sequence
  Description of Artificial Sequence: Synthetic oligonucleotide
caugggcuuaauucacuga

SEQ ID NO: 1738087 - RNA, 19 nt, Artificial Sequence
  Description of Artificial Sequence: Synthetic oligonucleotide
acucauucuguaaguguga

SEQ ID NO: 1738088 - RNA, 19 nt, Artificial Sequence
  Description of Artificial Sequence: Synthetic oligonucleotide
gaacgccccuuaauacggg

SEQ ID NO: 1738089 - RNA, 19 nt, Artificial Sequence
  Description of Artificial Sequence: Synthetic oligonucleotide
cuguccggaucccuaauga

SEQ ID NO: 1738090 - RNA, 19 nt, Artificial Sequence
  Description of Artificial Sequence: Synthetic oligonucleotide
ggaccuuuugcagucugcc

SEQ ID NO: 1738091 - RNA, 19 nt, Artificial Sequence
  Description of Artificial Sequence: Synthetic oligonucleotide
cgaacgccccuuaauacgg

SEQ ID NO: 1738092 - RNA, 19 nt, Artificial Sequence
  Description of Artificial Sequence: Synthetic oligonucleotide
ucacugauucuguccggau

SEQ ID NO: 1738093 - RNA, 19 nt, Artificial Sequence
  Description of Artificial Sequence: Synthetic oligonucleotide
gcauccaucagguaguaau

SEQ ID NO: 1738094 - RNA, 19 nt, Artificial Sequence
  Description of Artificial Sequence: Synthetic oligonucleotide
cuaggcugccaagucuagc

SEQ ID NO: 1738095 - RNA, 19 nt, Artificial Sequence
  Description of Artificial Sequence: Synthetic oligonucleotide
aucccaugagguaacucga

SEQ ID NO: 1738096 - RNA, 19 nt, Artificial Sequence
  Description of Artificial Sequence: Synthetic oligonucleotide
caugaagggaguggcgguc

SEQ ID NO: 1738097 - RNA, 19 nt, Artificial Sequence
  Description of Artificial Sequence: Synthetic oligonucleotide
ugauucuguccggaucccu

SEQ ID NO: 1738098 - RNA, 19 nt, Artificial Sequence
  Description of Artificial Sequence: Synthetic oligonucleotide
ucuccccacuuccugccau

SEQ ID NO: 1738099 - RNA, 19 nt, Artificial Sequence
  Description of Artificial Sequence: Synthetic oligonucleotide
caugagguaacucgaacuu

SEQ ID NO: 1738100 - RNA, 19 nt, Artificial Sequence
  Description of Artificial Sequence: Synthetic oligonucleotide
caguuucuggcgagagaug

SEQ ID NO: 1738101 - RNA, 19 nt, Artificial Sequence
  Description of Artificial Sequence: Synthetic oligonucleotide
cuugaccgcuggaagaugu

SEQ ID NO: 1738102 - RNA, 19 nt, Artificial Sequence
  Description of Artificial Sequence: Synthetic oligonucleotide
uaacucgaacuugguuccc

SEQ ID NO: 1738103 - RNA, 19 nt, Artificial Sequence
  Description of Artificial Sequence: Synthetic oligonucleotide
acgccccuuaauacgggcg

SEQ ID NO: 1738104 - RNA, 19 nt, Artificial Sequence
  Description of Artificial Sequence: Synthetic oligonucleotide
uucuguccggaucccuaau

SEQ ID NO: 1738105 - RNA, 19 nt, Artificial Sequence
  Description of Artificial Sequence: Synthetic oligonucleotide
accguaggacaugucaaaa

SEQ ID NO: 1738106 - RNA, 19 nt, Artificial Sequence
  Description of Artificial Sequence: Synthetic oligonucleotide
cucggucauaggugucccc

SEQ ID NO: 1738107 - RNA, 19 nt, Artificial Sequence
  Description of Artificial Sequence: Synthetic oligonucleotide
gaccuaggcugccaagucu

SEQ ID NO: 1738108 - RNA, 19 nt, Artificial Sequence
  Description of Artificial Sequence: Synthetic oligonucleotide
gcuguuccagcuuagcacu

SEQ ID NO: 1738109 - RNA, 19 nt, Artificial Sequence
  Description of Artificial Sequence: Synthetic oligonucleotide
gagaccuaggcugccaagu

SEQ ID NO: 1738110 - RNA, 19 nt, Artificial Sequence
  Description of Artificial Sequence: Synthetic oligonucleotide
caaaauuagccaugagguu

SEQ ID NO: 1738111 - RNA, 19 nt, Artificial Sequence
  Description of Artificial Sequence: Synthetic oligonucleotide
uucuggcgagagauggcuu

SEQ ID NO: 1738112 - RNA, 19 nt, Artificial Sequence
  Description of Artificial Sequence: Synthetic oligonucleotide
uggcggucugugguacacg

SEQ ID NO: 1738113 - RNA, 19 nt, Artificial Sequence
  Description of Artificial Sequence: Synthetic oligonucleotide
ggaagugagauaggucuuc

SEQ ID NO: 1738114 - RNA, 19 nt, Artificial Sequence
  Description of Artificial Sequence: Synthetic oligonucleotide
auuagccaugagguuuggu

SEQ ID NO: 1738115 - RNA, 19 nt, Artificial Sequence
  Description of Artificial Sequence: Synthetic oligonucleotide
uugaccgcuggaagauguu

SEQ ID NO: 1738116 - RNA, 19 nt, Artificial Sequence
  Description of Artificial Sequence: Synthetic oligonucleotide
gagaucguuggcagcuaga

SEQ ID NO: 1738117 - RNA, 19 nt, Artificial Sequence
  Description of Artificial Sequence: Synthetic oligonucleotide
caagucuagcaggagggaa

SEQ ID NO: 1738118 - RNA, 19 nt, Artificial Sequence
  Description of Artificial Sequence: Synthetic oligonucleotide
guaggacaugucaaaauuu

SEQ ID NO: 1738119 - RNA, 19 nt, Artificial Sequence
  Description of Artificial Sequence: Synthetic oligonucleotide
ggaguuggagaaaggucac

SEQ ID NO: 1738120 - RNA, 19 nt, Artificial Sequence
  Description of Artificial Sequence: Synthetic oligonucleotide
caucggagguuuggacugc

SEQ ID NO: 1738121 - RNA, 19 nt, Artificial Sequence
  Description of Artificial Sequence: Synthetic oligonucleotide
gguacacggcacauccacc

SEQ ID NO: 1738122 - RNA, 19 nt, Artificial Sequence
  Description of Artificial Sequence: Synthetic oligonucleotide
auggcaaccuaugcauuuu

SEQ ID NO: 1738123 - RNA, 19 nt, Artificial Sequence
  Description of Artificial Sequence: Synthetic oligonucleotide
aguggcggucugugguaca

SEQ ID NO: 1738124 - RNA, 19 nt, Artificial Sequence
  Description of Artificial Sequence: Synthetic oligonucleotide
cccaugagguaacucgaac

SEQ ID NO: 1738125 - RNA, 19 nt, Artificial Sequence
  Description of Artificial Sequence: Synthetic oligonucleotide
gcagucugccuauucggga

SEQ ID NO: 1738126 - RNA, 19 nt, Artificial Sequence
  Description of Artificial Sequence: Synthetic oligonucleotide
ugauaucuugaggcacaua

SEQ ID NO: 1738127 - RNA, 19 nt, Artificial Sequence
  Description of Artificial Sequence: Synthetic oligonucleotide
caagccgacuggcugggaa

SEQ ID NO: 1738128 - RNA, 19 nt, Artificial Sequence
  Description of Artificial Sequence: Synthetic oligonucleotide
gucuccgcgggacaggcgu

SEQ ID NO: 1738129 - RNA, 19 nt, Artificial Sequence
  Description of Artificial Sequence: Synthetic oligonucleotide
agaagcucaauggcaccuu

SEQ ID NO: 1738130 - RNA, 19 nt, Artificial Sequence
  Description of Artificial Sequence: Synthetic oligonucleotide
agcuuucggaagugagaua

SEQ ID NO: 1738131 - RNA, 19 nt, Artificial Sequence
  Description of Artificial Sequence: Synthetic oligonucleotide
ggucaagcacggugucucc

SEQ ID NO: 1738132 - RNA, 19 nt, Artificial Sequence
  Description of Artificial Sequence: Synthetic oligonucleotide
ggagagaucguuggcagcu

SEQ ID NO: 1738133 - RNA, 19 nt, Artificial Sequence
  Description of Artificial Sequence: Synthetic oligonucleotide
gccuauucgggaaguggag

SEQ ID NO: 1738134 - RNA, 19 nt, Artificial Sequence
  Description of Artificial Sequence: Synthetic oligonucleotide
gacagguagcaaggaggca

SEQ ID NO: 1738135 - RNA, 19 nt, Artificial Sequence
  Description of Artificial Sequence: Synthetic oligonucleotide
gaccgcuggaagauguugu

SEQ ID NO: 1738136 - RNA, 19 nt, Artificial Sequence
  Description of Artificial Sequence: Synthetic oligonucleotide
gcugccaagucuagcagga

SEQ ID NO: 1738137 - RNA, 19 nt, Artificial Sequence
  Description of Artificial Sequence: Synthetic oligonucleotide
ccaacacucggucauaggu

SEQ ID NO: 1738138 - RNA, 19 nt, Artificial Sequence
  Description of Artificial Sequence: Synthetic oligonucleotide
gcagcuagauugcggcaac

SEQ ID NO: 1738139 - RNA, 19 nt, Artificial Sequence
  Description of Artificial Sequence: Synthetic oligonucleotide
caacgugaccuccagguuu

SEQ ID NO: 1738140 - RNA, 19 nt, Artificial Sequence
  Description of Artificial Sequence: Synthetic oligonucleotide
gucgcuccuucuuccuuga

SEQ ID NO: 1738141 - RNA, 19 nt, Artificial Sequence
  Description of Artificial Sequence: Synthetic oligonucleotide
gucaagcacggugucucca

SEQ ID NO: 1738142 - RNA, 19 nt, Artificial Sequence
  Description of Artificial Sequence: Synthetic oligonucleotide
caacagccaguuugaagua

SEQ ID NO: 1738143 - RNA, 19 nt, Artificial Sequence
  Description of Artificial Sequence: Synthetic oligonucleotide
ccccaaccuggcaggaugg

SEQ ID NO: 1738144 - RNA, 19 nt, Artificial Sequence
  Description of Artificial Sequence: Synthetic oligonucleotide
uuccuacuucagggacacg

SEQ ID NO: 1738145 - RNA, 19 nt, Artificial Sequence
  Description of Artificial Sequence: Synthetic oligonucleotide
caugagaccuaggcugcca

SEQ ID NO: 1738146 - RNA, 19 nt, Artificial Sequence
  Description of Artificial Sequence: Synthetic oligonucleotide
ggcuuaauucacugauucu

SEQ ID NO: 1738147 - RNA, 19 nt, Artificial Sequence
  Description of Artificial Sequence: Synthetic oligonucleotide
guggcggucugugguacac

SEQ ID NO: 1738148 - RNA, 19 nt, Artificial Sequence
  Description of Artificial Sequence: Synthetic oligonucleotide
gauugcggcaacagccagu

SEQ ID NO: 1738149 - RNA, 19 nt, Artificial Sequence
  Description of Artificial Sequence: Synthetic oligonucleotide
gggacacggugacacuaug

SEQ ID NO: 1738150 - RNA, 19 nt, Artificial Sequence
  Description of Artificial Sequence: Synthetic oligonucleotide
agcuuagcacucacauuau

SEQ ID NO: 1738151 - RNA, 19 nt, Artificial Sequence
  Description of Artificial Sequence: Synthetic oligonucleotide
ccaugagguaacucgaacu

SEQ ID NO: 1738152 - RNA, 19 nt, Artificial Sequence
  Description of Artificial Sequence: Synthetic oligonucleotide
aucggagguuuggacugca

SEQ ID NO: 1738153 - RNA, 19 nt, Artificial Sequence
  Description of Artificial Sequence: Synthetic oligonucleotide
accuugcaccacauacuca

SEQ ID NO: 1738154 - RNA, 19 nt, Artificial Sequence
  Description of Artificial Sequence: Synthetic oligonucleotide
cugugguacacggcacauc

SEQ ID NO: 1738155 - RNA, 19 nt, Artificial Sequence
  Description of Artificial Sequence: Synthetic oligonucleotide
ccuugcaccacauacucau

SEQ ID NO: 1738156 - RNA, 19 nt, Artificial Sequence
  Description of Artificial Sequence: Synthetic oligonucleotide
gaucguuggcagcuagauu

SEQ ID NO: 1738157 - RNA, 19 nt, Artificial Sequence
  Description of Artificial Sequence: Synthetic oligonucleotide
agggacacggugacacuau

SEQ ID NO: 1738158 - RNA, 19 nt, Artificial Sequence
  Description of Artificial Sequence: Synthetic oligonucleotide
agccgacuggcugggaaau

SEQ ID NO: 1738159 - RNA, 19 nt, Artificial Sequence
  Description of Artificial Sequence: Synthetic oligonucleotide
ggcagcuagauugcggcaa

SEQ ID NO: 1738160 - RNA, 19 nt, Artificial Sequence
  Description of Artificial Sequence: Synthetic oligonucleotide
ccuaggcugccaagucuag

SEQ ID NO: 1738161 - RNA, 19 nt, Artificial Sequence
  Description of Artificial Sequence: Synthetic oligonucleotide
cagaagcucaauggcaccu

SEQ ID NO: 1738162 - RNA, 19 nt, Artificial Sequence
  Description of Artificial Sequence: Synthetic oligonucleotide
gcgccugacauccccucug

SEQ ID NO: 1738163 - RNA, 19 nt, Artificial Sequence
  Description of Artificial Sequence: Synthetic oligonucleotide
gagguaacucgaacuuggu

SEQ ID NO: 1738164 - RNA, 19 nt, Artificial Sequence
  Description of Artificial Sequence: Synthetic oligonucleotide
gggaguggcggucuguggu

SEQ ID NO: 1738165 - RNA, 19 nt, Artificial Sequence
  Description of Artificial Sequence: Synthetic oligonucleotide
cccuaaugagucauugucu

SEQ ID NO: 1738166 - RNA, 19 nt, Artificial Sequence
  Description of Artificial Sequence: Synthetic oligonucleotide
guagcccauuucuucuuau

SEQ ID NO: 1738167 - RNA, 19 nt, Artificial Sequence
  Description of Artificial Sequence: Synthetic oligonucleotide
gaguuggagaaaggucacu

SEQ ID NO: 1738168 - RNA, 19 nt, Artificial Sequence
  Description of Artificial Sequence: Synthetic oligonucleotide
cgcgagaagcugcaccugc

SEQ ID NO: 1738169 - RNA, 19 nt, Artificial Sequence
  Description of Artificial Sequence: Synthetic oligonucleotide
ggcgugaaguccacgagcu

SEQ ID NO: 1738170 - RNA, 19 nt, Artificial Sequence
  Description of Artificial Sequence: Synthetic oligonucleotide
ccaaugcaccauacuucug

SEQ ID NO: 1738171 - RNA, 19 nt, Artificial Sequence
  Description of Artificial Sequence: Synthetic oligonucleotide
guauaccguaggacauguc

SEQ ID NO: 1738172 - RNA, 19 nt, Artificial Sequence
  Description of Artificial Sequence: Synthetic oligonucleotide
ggucugugguacacggcac

SEQ ID NO: 1738173 - RNA, 19 nt, Artificial Sequence
  Description of Artificial Sequence: Synthetic oligonucleotide
gaagcgccugacauccccu

SEQ ID NO: 1738174 - RNA, 19 nt, Artificial Sequence
  Description of Artificial Sequence: Synthetic oligonucleotide
cuuccgaacgccccuuaau

SEQ ID NO: 1738175 - RNA, 19 nt, Artificial Sequence
  Description of Artificial Sequence: Synthetic oligonucleotide
cgccccuuaauacgggcgc

SEQ ID NO: 1738176 - RNA, 19 nt, Artificial Sequence
  Description of Artificial Sequence: Synthetic oligonucleotide
ccuauucgggaaguggaga

SEQ ID NO: 1738177 - RNA, 19 nt, Artificial Sequence
  Description of Artificial Sequence: Synthetic oligonucleotide
gugaagcaucggagguuug

SEQ ID NO: 1738178 - RNA, 19 nt, Artificial Sequence
  Description of Artificial Sequence: Synthetic oligonucleotide
cccuuaauacgggcgcagc

SEQ ID NO: 1738179 - RNA, 19 nt, Artificial Sequence
  Description of Artificial Sequence: Synthetic oligonucleotide
agcuuccgaacgccccuua

SEQ ID NO: 1738180 - RNA, 19 nt, Artificial Sequence
  Description of Artificial Sequence: Synthetic oligonucleotide
acgugaccuccagguuugg

SEQ ID NO: 1738181 - RNA, 19 nt, Artificial Sequence
  Description of Artificial Sequence: Synthetic oligonucleotide
uggcgagagauggcuucau

SEQ ID NO: 1738182 - RNA, 19 nt, Artificial Sequence
  Description of Artificial Sequence: Synthetic oligonucleotide
gagagaucguuggcagcua

SEQ ID NO: 1738183 - RNA, 19 nt, Artificial Sequence
  Description of Artificial Sequence: Synthetic oligonucleotide
gccgcgagaagcugcaccu

SEQ ID NO: 1738184 - RNA, 19 nt, Artificial Sequence
  Description of Artificial Sequence: Synthetic oligonucleotide
gcggcaacagccaguuuga

SEQ ID NO: 1738185 - RNA, 19 nt, Artificial Sequence
  Description of Artificial Sequence: Synthetic oligonucleotide
ggaguggcggucuguggua

SEQ ID NO: 1738186 - RNA, 19 nt, Artificial Sequence
  Description of Artificial Sequence: Synthetic oligonucleotide
guucugugguagcccauuu

SEQ ID NO: 1738187 - RNA, 19 nt, Artificial Sequence
  Description of Artificial Sequence: Synthetic oligonucleotide
ccccuuaauacgggcgcag

SEQ ID NO: 1738188 - RNA, 19 nt, Artificial Sequence
  Description of Artificial Sequence: Synthetic oligonucleotide
cugugguagcccauuucuu

SEQ ID NO: 1738189 - RNA, 19 nt, Artificial Sequence
  Description of Artificial Sequence: Synthetic oligonucleotide
cguaggacaugucaaaauu

SEQ ID NO: 1738190 - RNA, 19 nt, Artificial Sequence
  Description of Artificial Sequence: Synthetic oligonucleotide
ccugccaucccaugaggua

SEQ ID NO: 1738191 - RNA, 19 nt, Artificial Sequence
  Description of Artificial Sequence: Synthetic oligonucleotide
uugcggcaacagccaguuu

SEQ ID NO: 1738192 - RNA, 19 nt, Artificial Sequence
  Description of Artificial Sequence: Synthetic oligonucleotide
ccaugagaccuaggcugcc

SEQ ID NO: 1738193 - RNA, 19 nt, Artificial Sequence
  Description of Artificial Sequence: Synthetic oligonucleotide
gcuuccgaacgccccuuaa

SEQ ID NO: 1738194 - RNA, 19 nt, Artificial Sequence
  Description of Artificial Sequence: Synthetic oligonucleotide
cguuggcagcuagauugcg

SEQ ID NO: 1738195 - RNA, 19 nt, Artificial Sequence
  Description of Artificial Sequence: Synthetic oligonucleotide
cccaaccuggcaggauggg

SEQ ID NO: 1738196 - RNA, 19 nt, Artificial Sequence
  Description of Artificial Sequence: Synthetic oligonucleotide
uccgcgggacaggcgugaa

SEQ ID NO: 1738197 - RNA, 19 nt, Artificial Sequence
  Description of Artificial Sequence: Synthetic oligonucleotide
cgaugucuccgcgggacag

SEQ ID NO: 1738198 - RNA, 19 nt, Artificial Sequence
  Description of Artificial Sequence: Synthetic oligonucleotide
cuugcaccacauacucauu

SEQ ID NO: 1738199 - RNA, 19 nt, Artificial Sequence
  Description of Artificial Sequence: Synthetic oligonucleotide
gcgagaagcugcaccugca

SEQ ID NO: 1738200 - RNA, 19 nt, Artificial Sequence
  Description of Artificial Sequence: Synthetic oligonucleotide
gucugccuauucgggaagu

SEQ ID NO: 1738201 - RNA, 19 nt, Artificial Sequence
  Description of Artificial Sequence: Synthetic oligonucleotide
gggaaguggagagaucguu

SEQ ID NO: 1738202 - RNA, 19 nt, Artificial Sequence
  Description of Artificial Sequence: Synthetic oligonucleotide
ccuugaccgcuggaagaug

SEQ ID NO: 1738203 - RNA, 19 nt, Artificial Sequence
  Description of Artificial Sequence: Synthetic oligonucleotide
ccaaccuggcaggauggga

SEQ ID NO: 1738204 - RNA, 19 nt, Artificial Sequence
  Description of Artificial Sequence: Synthetic oligonucleotide
ccaagucuagcaggaggga

SEQ ID NO: 1738205 - RNA, 19 nt, Artificial Sequence
  Description of Artificial Sequence: Synthetic oligonucleotide
cuccgcgggacaggcguga

SEQ ID NO: 1738206 - RNA, 19 nt, Artificial Sequence
  Description of Artificial Sequence: Synthetic oligonucleotide
gcaaggaguccagccgcga

SEQ ID NO: 1738207 - RNA, 19 nt, Artificial Sequence
  Description of Artificial Sequence: Synthetic oligonucleotide
gguagcaaggaggcagcau

SEQ ID NO: 1738208 - RNA, 19 nt, Artificial Sequence
  Description of Artificial Sequence: Synthetic oligonucleotide
cauaacugugaaggaccuu

SEQ ID NO: 1738209 - RNA, 19 nt, Artificial Sequence
  Description of Artificial Sequence: Synthetic oligonucleotide
gccccuuaauacgggcgca

SEQ ID NO: 1738210 - RNA, 19 nt, Artificial Sequence
  Description of Artificial Sequence: Synthetic oligonucleotide
cagccgcgagaagcugcac

SEQ ID NO: 1738211 - RNA, 19 nt, Artificial Sequence
  Description of Artificial Sequence: Synthetic oligonucleotide
gggaagcgccugacauccc

SEQ ID NO: 1738212 - RNA, 19 nt, Artificial Sequence
  Description of Artificial Sequence: Synthetic oligonucleotide
ccgcgggacaggcgugaag

SEQ ID NO: 1738213 - RNA, 19 nt, Artificial Sequence
  Description of Artificial Sequence: Synthetic oligonucleotide
ggcgagagauggcuucauu

SEQ ID NO: 1738214 - RNA, 19 nt, Artificial Sequence
  Description of Artificial Sequence: Synthetic oligonucleotide
cacacaggucaagcacggu

SEQ ID NO: 1738215 - RNA, 19 nt, Artificial Sequence
  Description of Artificial Sequence: Synthetic oligonucleotide
ccgcgagaagcugcaccug

SEQ ID NO: 1738216 - RNA, 19 nt, Artificial Sequence
  Description of Artificial Sequence: Synthetic oligonucleotide
ggucuuccacuugaaccuu

SEQ ID NO: 1738217 - RNA, 19 nt, Artificial Sequence
  Description of Artificial Sequence: Synthetic oligonucleotide
cuccccaaccuggcaggau

SEQ ID NO: 1738218 - RNA, 19 nt, Artificial Sequence
  Description of Artificial Sequence: Synthetic oligonucleotide
gcaagccgacuggcuggga

SEQ ID NO: 1738219 - RNA, 19 nt, Artificial Sequence
  Description of Artificial Sequence: Synthetic oligonucleotide
gcgugaaguccacgagcuu

SEQ ID NO: 1738220 - RNA, 19 nt, Artificial Sequence
  Description of Artificial Sequence: Synthetic oligonucleotide
gccgacuggcugggaaauu

SEQ ID NO: 1738221 - RNA, 19 nt, Artificial Sequence
  Description of Artificial Sequence: Synthetic oligonucleotide
cggcaacagccaguuugaa

SEQ ID NO: 1738222 - RNA, 19 nt, Artificial Sequence
  Description of Artificial Sequence: Synthetic oligonucleotide
aacaucauaggcuaguuug

SEQ ID NO: 1738223 - RNA, 19 nt, Artificial Sequence
  Description of Artificial Sequence: Synthetic oligonucleotide
uuuaaaaccuuucauuagc

SEQ ID NO: 1738224 - RNA, 19 nt, Artificial Sequence
  Description of Artificial Sequence: Synthetic oligonucleotide
uccucuaaaugcaagauug

SEQ ID NO: 1738225 - RNA, 19 nt, Artificial Sequence
  Description of Artificial Sequence: Synthetic oligonucleotide
ucuauucuagcuuugaccu

SEQ ID NO: 1738226 - RNA, 19 nt, Artificial Sequence
  Description of Artificial Sequence: Synthetic oligonucleotide
agaauuggcccauagcccc

SEQ ID NO: 1738227 - RNA, 19 nt, Artificial Sequence
  Description of Artificial Sequence: Synthetic oligonucleotide
uuuauuaaucaaacaaugu

SEQ ID NO: 1738228 - RNA, 19 nt, Artificial Sequence
  Description of Artificial Sequence: Synthetic oligonucleotide
auggccgcaguuuugaugc

SEQ ID NO: 1738229 - RNA, 19 nt, Artificial Sequence
  Description of Artificial Sequence: Synthetic oligonucleotide
uguaaguccugaaggaacg

SEQ ID NO: 1738230 - RNA, 19 nt, Artificial Sequence
  Description of Artificial Sequence: Synthetic oligonucleotide
uggcauucgaaaauggagg

SEQ ID NO: 1738231 - RNA, 19 nt, Artificial Sequence
  Description of Artificial Sequence: Synthetic oligonucleotide
uuaagacuaauucuucuug

SEQ ID NO: 1738232 - RNA, 19 nt, Artificial Sequence
  Description of Artificial Sequence: Synthetic oligonucleotide
guaaggaagaaugugauug

SEQ ID NO: 1738233 - RNA, 19 nt, Artificial Sequence
  Description of Artificial Sequence: Synthetic oligonucleotide
ugcaagauuguaaauaguc

SEQ ID NO: 1738234 - RNA, 19 nt, Artificial Sequence
  Description of Artificial Sequence: Synthetic oligonucleotide
ugguuuuggcuucugaccg

SEQ ID NO: 1738235 - RNA, 19 nt, Artificial Sequence
  Description of Artificial Sequence: Synthetic oligonucleotide
uucuauucuagcuuugacc

SEQ ID NO: 1738236 - RNA, 19 nt, Artificial Sequence
  Description of Artificial Sequence: Synthetic oligonucleotide
ucuagcuuugaccugcucc

SEQ ID NO: 1738237 - RNA, 19 nt, Artificial Sequence
  Description of Artificial Sequence: Synthetic oligonucleotide
ucuagcucaaucaugugcu

SEQ ID NO: 1738238 - RNA, 19 nt, Artificial Sequence
  Description of Artificial Sequence: Synthetic oligonucleotide
aaccaaggauuucagguuc

SEQ ID NO: 1738239 - RNA, 19 nt, Artificial Sequence
  Description of Artificial Sequence: Synthetic oligonucleotide
ucuaaaugcaagauuguaa

SEQ ID NO: 1738240 - RNA, 19 nt, Artificial Sequence
  Description of Artificial Sequence: Synthetic oligonucleotide
acaacauuggcuugacuac

SEQ ID NO: 1738241 - RNA, 19 nt, Artificial Sequence
  Description of Artificial Sequence: Synthetic oligonucleotide
aaguaagccaggccagugc

SEQ ID NO: 1738242 - RNA, 19 nt, Artificial Sequence
  Description of Artificial Sequence: Synthetic oligonucleotide
caucaaauggaaaugaaca

SEQ ID NO: 1738243 - RNA, 19 nt, Artificial Sequence
  Description of Artificial Sequence: Synthetic oligonucleotide
aguaagccaggccagugcc

SEQ ID NO: 1738244 - RNA, 19 nt, Artificial Sequence
  Description of Artificial Sequence: Synthetic oligonucleotide
ucaaucuuugccaucagau

SEQ ID NO: 1738245 - RNA, 19 nt, Artificial Sequence
  Description of Artificial Sequence: Synthetic oligonucleotide
uuaaaaccuuucauuagca

SEQ ID NO: 1738246 - RNA, 19 nt, Artificial Sequence
  Description of Artificial Sequence: Synthetic oligonucleotide
uccaugauaucccaggagu

SEQ ID NO: 1738247 - RNA, 19 nt, Artificial Sequence
  Description of Artificial Sequence: Synthetic oligonucleotide
ugucgaguuaugaugaagu

SEQ ID NO: 1738248 - RNA, 19 nt, Artificial Sequence
  Description of Artificial Sequence: Synthetic oligonucleotide
uugacuacaaacugacagc

SEQ ID NO: 1738249 - RNA, 19 nt, Artificial Sequence
  Description of Artificial Sequence: Synthetic oligonucleotide
guuaugaugaaguaugcaa

SEQ ID NO: 1738250 - RNA, 19 nt, Artificial Sequence
  Description of Artificial Sequence: Synthetic oligonucleotide
aaaugcaagauuguaaaua

SEQ ID NO: 1738251 - RNA, 19 nt, Artificial Sequence
  Description of Artificial Sequence: Synthetic oligonucleotide
gacuaauucuucuuguuga

SEQ ID NO: 1738252 - RNA, 19 nt, Artificial Sequence
  Description of Artificial Sequence: Synthetic oligonucleotide
uuggcuugacuacaaacug

SEQ ID NO: 1738253 - RNA, 19 nt, Artificial Sequence
  Description of Artificial Sequence: Synthetic oligonucleotide
uagucugugaaccaaggau

SEQ ID NO: 1738254 - RNA, 19 nt, Artificial Sequence
  Description of Artificial Sequence: Synthetic oligonucleotide
uuguuaaugaccaguuuaa

SEQ ID NO: 1738255 - RNA, 19 nt, Artificial Sequence
  Description of Artificial Sequence: Synthetic oligonucleotide
aguguuaccaagggaagac

SEQ ID NO: 1738256 - RNA, 19 nt, Artificial Sequence
  Description of Artificial Sequence: Synthetic oligonucleotide
gacaacauuggcuugacua

SEQ ID NO: 1738257 - RNA, 19 nt, Artificial Sequence
  Description of Artificial Sequence: Synthetic oligonucleotide
cuggcauucgaaaauggag

SEQ ID NO: 1738258 - RNA, 19 nt, Artificial Sequence
  Description of Artificial Sequence: Synthetic oligonucleotide
uauucuagcuuugaccugc

SEQ ID NO: 1738259 - RNA, 19 nt, Artificial Sequence
  Description of Artificial Sequence: Synthetic oligonucleotide
uccuccuuuaacuuguugu

SEQ ID NO: 1738260 - RNA, 19 nt, Artificial Sequence
  Description of Artificial Sequence: Synthetic oligonucleotide
aaacguaaggaagaaugug

SEQ ID NO: 1738261 - RNA, 19 nt, Artificial Sequence
  Description of Artificial Sequence: Synthetic oligonucleotide
uguucgguugguaagucac

SEQ ID NO: 1738262 - RNA, 19 nt, Artificial Sequence
  Description of Artificial Sequence: Synthetic oligonucleotide
uaguauuuugaauuuccac

SEQ ID NO: 1738263 - RNA, 19 nt, Artificial Sequence
  Description of Artificial Sequence: Synthetic oligonucleotide
uaaucaaacaaugucugaa

SEQ ID NO: 1738264 - RNA, 19 nt, Artificial Sequence
  Description of Artificial Sequence: Synthetic oligonucleotide
aacguaaggaagaauguga

SEQ ID NO: 1738265 - RNA, 19 nt, Artificial Sequence
  Description of Artificial Sequence: Synthetic oligonucleotide
cuaaaugcaagauuguaaa

SEQ ID NO: 1738266 - RNA, 19 nt, Artificial Sequence
  Description of Artificial Sequence: Synthetic oligonucleotide
cauucgaaaauggagggag

SEQ ID NO: 1738267 - RNA, 19 nt, Artificial Sequence
  Description of Artificial Sequence: Synthetic oligonucleotide
uaagacuaauucuucuugu

SEQ ID NO: 1738268 - RNA, 19 nt, Artificial Sequence
  Description of Artificial Sequence: Synthetic oligonucleotide
ugaaggaacgagccuacug

SEQ ID NO: 1738269 - RNA, 19 nt, Artificial Sequence
  Description of Artificial Sequence: Synthetic oligonucleotide
ugaguguuaccaagggaag

SEQ ID NO: 1738270 - RNA, 19 nt, Artificial Sequence
  Description of Artificial Sequence: Synthetic oligonucleotide
ucagcguugaagcuggaau

SEQ ID NO: 1738271 - RNA, 19 nt, Artificial Sequence
  Description of Artificial Sequence: Synthetic oligonucleotide
uauuucaucagguggcauc

SEQ ID NO: 1738272 - RNA, 19 nt, Artificial Sequence
  Description of Artificial Sequence: Synthetic oligonucleotide
cugguuuuggcuucugacc

SEQ ID NO: 1738273 - RNA, 19 nt, Artificial Sequence
  Description of Artificial Sequence: Synthetic oligonucleotide
uguuccauaguggagggcu

SEQ ID NO: 1738274 - RNA, 19 nt, Artificial Sequence
  Description of Artificial Sequence: Synthetic oligonucleotide
gauagagcccgcucgggag

SEQ ID NO: 1738275 - RNA, 19 nt, Artificial Sequence
  Description of Artificial Sequence: Synthetic oligonucleotide
gagugaguguuaccaaggg

SEQ ID NO: 1738276 - RNA, 19 nt, Artificial Sequence
  Description of Artificial Sequence: Synthetic oligonucleotide
uuuaaaacuuaagacuaau

SEQ ID NO: 1738277 - RNA, 19 nt, Artificial Sequence
  Description of Artificial Sequence: Synthetic oligonucleotide
guuaaugaccaguuuaaaa

SEQ ID NO: 1738278 - RNA, 19 nt, Artificial Sequence
  Description of Artificial Sequence: Synthetic oligonucleotide
ugugauugguuccaugaua

SEQ ID NO: 1738279 - RNA, 19 nt, Artificial Sequence
  Description of Artificial Sequence: Synthetic oligonucleotide
aagaaugugauugguucca

SEQ ID NO: 1738280 - RNA, 19 nt, Artificial Sequence
  Description of Artificial Sequence: Synthetic oligonucleotide
cacuguuccauaguggagg

SEQ ID NO: 1738281 - RNA, 19 nt, Artificial Sequence
  Description of Artificial Sequence: Synthetic oligonucleotide
cagaauuggcccauagccc

SEQ ID NO: 1738282 - RNA, 19 nt, Artificial Sequence
  Description of Artificial Sequence: Synthetic oligonucleotide
aaccaucaaauggaaauga

SEQ ID NO: 1738283 - RNA, 19 nt, Artificial Sequence
  Description of Artificial Sequence: Synthetic oligonucleotide
gcaaacguaaggaagaaug

SEQ ID NO: 1738284 - RNA, 19 nt, Artificial Sequence
  Description of Artificial Sequence: Synthetic oligonucleotide
cauuggcuugacuacaaac

SEQ ID NO: 1738285 - RNA, 19 nt, Artificial Sequence
  Description of Artificial Sequence: Synthetic oligonucleotide
ucgaaaauggagggagugg

SEQ ID NO: 1738286 - RNA, 19 nt, Artificial Sequence
  Description of Artificial Sequence: Synthetic oligonucleotide
aggcuaguuuguuaaugac

SEQ ID NO: 1738287 - RNA, 19 nt, Artificial Sequence
  Description of Artificial Sequence: Synthetic oligonucleotide
gaaucucacugccaucugc

SEQ ID NO: 1738288 - RNA, 19 nt, Artificial Sequence
  Description of Artificial Sequence: Synthetic oligonucleotide
ugugacacugaacaucaua

SEQ ID NO: 1738289 - RNA, 19 nt, Artificial Sequence
  Description of Artificial Sequence: Synthetic oligonucleotide
cacacauauuuauuaauca

SEQ ID NO: 1738290 - RNA, 19 nt, Artificial Sequence
  Description of Artificial Sequence: Synthetic oligonucleotide
aauguucgguugguaaguc

SEQ ID NO: 1738291 - RNA, 19 nt, Artificial Sequence
  Description of Artificial Sequence: Synthetic oligonucleotide
auagagcccgcucgggagc

SEQ ID NO: 1738292 - RNA, 19 nt, Artificial Sequence
  Description of Artificial Sequence: Synthetic oligonucleotide
acuguuccauaguggaggg

SEQ ID NO: 1738293 - RNA, 19 nt, Artificial Sequence
  Description of Artificial Sequence: Synthetic oligonucleotide
agccccauaauguuuaaaa

SEQ ID NO: 1738294 - RNA, 19 nt, Artificial Sequence
  Description of Artificial Sequence: Synthetic oligonucleotide
guaagucacagaauuggcc

SEQ ID NO: 1738295 - RNA, 19 nt, Artificial Sequence
  Description of Artificial Sequence: Synthetic oligonucleotide
aagucacagaauuggccca

SEQ ID NO: 1738296 - RNA, 19 nt, Artificial Sequence
  Description of Artificial Sequence: Synthetic oligonucleotide
aauggagggaguggcgcac

SEQ ID NO: 1738297 - RNA, 19 nt, Artificial Sequence
  Description of Artificial Sequence: Synthetic oligonucleotide
augucuauaauuaacuguu

SEQ ID NO: 1738298 - RNA, 19 nt, Artificial Sequence
  Description of Artificial Sequence: Synthetic oligonucleotide
caggaguacacccaccaag

SEQ ID NO: 1738299 - RNA, 19 nt, Artificial Sequence
  Description of Artificial Sequence: Synthetic oligonucleotide
aaauggagggaguggcgca

SEQ ID NO: 1738300 - RNA, 19 nt, Artificial Sequence
  Description of Artificial Sequence: Synthetic oligonucleotide
agcuaagccagcccauagg

SEQ ID NO: 1738301 - RNA, 19 nt, Artificial Sequence
  Description of Artificial Sequence: Synthetic oligonucleotide
aguucugucgaguuaugau

SEQ ID NO: 1738302 - RNA, 19 nt, Artificial Sequence
  Description of Artificial Sequence: Synthetic oligonucleotide
ggcauucgaaaauggaggg

SEQ ID NO: 1738303 - RNA, 19 nt, Artificial Sequence
  Description of Artificial Sequence: Synthetic oligonucleotide
cagagugaguguuaccaag

SEQ ID NO: 1738304 - RNA, 19 nt, Artificial Sequence
  Description of Artificial Sequence: Synthetic oligonucleotide
uagccucagacacgcacgg

SEQ ID NO: 1738305 - RNA, 19 nt, Artificial Sequence
  Description of Artificial Sequence: Synthetic oligonucleotide
uucaguuggcuucucuuuc

SEQ ID NO: 1738306 - RNA, 19 nt, Artificial Sequence
  Description of Artificial Sequence: Synthetic oligonucleotide
uaaguguaguucugucgag

SEQ ID NO: 1738307 - RNA, 19 nt, Artificial Sequence
  Description of Artificial Sequence: Synthetic oligonucleotide
ucagguggcaucacuguuc

SEQ ID NO: 1738308 - RNA, 19 nt, Artificial Sequence
  Description of Artificial Sequence: Synthetic oligonucleotide
gauggccgcaguuuugaug

SEQ ID NO: 1738309 - RNA, 19 nt, Artificial Sequence
  Description of Artificial Sequence: Synthetic oligonucleotide
agagugaguguuaccaagg

SEQ ID NO: 1738310 - RNA, 19 nt, Artificial Sequence
  Description of Artificial Sequence: Synthetic oligonucleotide
uggcuugacuacaaacuga

SEQ ID NO: 1738311 - RNA, 19 nt, Artificial Sequence
  Description of Artificial Sequence: Synthetic oligonucleotide
uucgguugguaagucacag

SEQ ID NO: 1738312 - RNA, 19 nt, Artificial Sequence
  Description of Artificial Sequence: Synthetic oligonucleotide
cgaguuaugaugaaguaug

SEQ ID NO: 1738313 - RNA, 19 nt, Artificial Sequence
  Description of Artificial Sequence: Synthetic oligonucleotide
gaaggaacgagccuacugu

SEQ ID NO: 1738314 - RNA, 19 nt, Artificial Sequence
  Description of Artificial Sequence: Synthetic oligonucleotide
gugaguguuaccaagggaa

SEQ ID NO: 1738315 - RNA, 19 nt, Artificial Sequence
  Description of Artificial Sequence: Synthetic oligonucleotide
ucaaaacacuguugcuuug

SEQ ID NO: 1738316 - RNA, 19 nt, Artificial Sequence
  Description of Artificial Sequence: Synthetic oligonucleotide
acugacagcgcuccuuucu

SEQ ID NO: 1738317 - RNA, 19 nt, Artificial Sequence
  Description of Artificial Sequence: Synthetic oligonucleotide
agcgcuccuuucuggaugg

SEQ ID NO: 1738318 - RNA, 19 nt, Artificial Sequence
  Description of Artificial Sequence: Synthetic oligonucleotide
gcuaguuuguuaaugacca

SEQ ID NO: 1738319 - RNA, 19 nt, Artificial Sequence
  Description of Artificial Sequence: Synthetic oligonucleotide
ucgaguuaugaugaaguau

SEQ ID NO: 1738320 - RNA, 19 nt, Artificial Sequence
  Description of Artificial Sequence: Synthetic oligonucleotide
caugauaucccaggaguac

SEQ ID NO: 1738321 - RNA, 19 nt, Artificial Sequence
  Description of Artificial Sequence: Synthetic oligonucleotide
caccaaguaagccaggcca

SEQ ID NO: 1738322 - RNA, 19 nt, Artificial Sequence
  Description of Artificial Sequence: Synthetic oligonucleotide
acggucacgggcucggauc

SEQ ID NO: 1738323 - RNA, 19 nt, Artificial Sequence
  Description of Artificial Sequence: Synthetic oligonucleotide
gagccuacuguugacaaca

SEQ ID NO: 1738324 - RNA, 19 nt, Artificial Sequence
  Description of Artificial Sequence: Synthetic oligonucleotide
gaguacacccaccaaguaa

SEQ ID NO: 1738325 - RNA, 19 nt, Artificial Sequence
  Description of Artificial Sequence: Synthetic oligonucleotide
gaaaugaacaugaccuuaa

SEQ ID NO: 1738326 - RNA, 19 nt, Artificial Sequence
  Description of Artificial Sequence: Synthetic oligonucleotide
accgagcuucuauucuagc

SEQ ID NO: 1738327 - RNA, 19 nt, Artificial Sequence
  Description of Artificial Sequence: Synthetic oligonucleotide
gacgaguaaguguaguucu

SEQ ID NO: 1738328 - RNA, 19 nt, Artificial Sequence
  Description of Artificial Sequence: Synthetic oligonucleotide
aguuaugaugaaguaugca

SEQ ID NO: 1738329 - RNA, 19 nt, Artificial Sequence
  Description of Artificial Sequence: Synthetic oligonucleotide
ugucuauaauuaacuguua

SEQ ID NO: 1738330 - RNA, 19 nt, Artificial Sequence
  Description of Artificial Sequence: Synthetic oligonucleotide
aaguguaguucugucgagu

SEQ ID NO: 1738331 - RNA, 19 nt, Artificial Sequence
  Description of Artificial Sequence: Synthetic oligonucleotide
uuccucuaaaugcaagauu

SEQ ID NO: 1738332 - RNA, 19 nt, Artificial Sequence
  Description of Artificial Sequence: Synthetic oligonucleotide
gaguuaugaugaaguaugc

SEQ ID NO: 1738333 - RNA, 19 nt, Artificial Sequence
  Description of Artificial Sequence: Synthetic oligonucleotide
uggcgcacguucuccaggg

SEQ ID NO: 1738334 - RNA, 19 nt, Artificial Sequence
  Description of Artificial Sequence: Synthetic oligonucleotide
ugacagcgcuccuuucugg

SEQ ID NO: 1738335 - RNA, 19 nt, Artificial Sequence
  Description of Artificial Sequence: Synthetic oligonucleotide
ucugaccgagcuucuauuc

SEQ ID NO: 1738336 - RNA, 19 nt, Artificial Sequence
  Description of Artificial Sequence: Synthetic oligonucleotide
aacugacagcgcuccuuuc

SEQ ID NO: 1738337 - RNA, 19 nt, Artificial Sequence
  Description of Artificial Sequence: Synthetic oligonucleotide
ugaccaguuuaaaaccuuu

SEQ ID NO: 1738338 - RNA, 19 nt, Artificial Sequence
  Description of Artificial Sequence: Synthetic oligonucleotide
caagggaagaccaugucua

SEQ ID NO: 1738339 - RNA, 19 nt, Artificial Sequence
  Description of Artificial Sequence: Synthetic oligonucleotide
gaaccgacgaguaagugua

SEQ ID NO: 1738340 - RNA, 19 nt, Artificial Sequence
  Description of Artificial Sequence: Synthetic oligonucleotide
gccgcuagagcccagcccg

SEQ ID NO: 1738341 - RNA, 19 nt, Artificial Sequence
  Description of Artificial Sequence: Synthetic oligonucleotide
aguguaguucugucgaguu

SEQ ID NO: 1738342 - RNA, 19 nt, Artificial Sequence
  Description of Artificial Sequence: Synthetic oligonucleotide
guauuguuccacaucaaaa

SEQ ID NO: 1738343 - RNA, 19 nt, Artificial Sequence
  Description of Artificial Sequence: Synthetic oligonucleotide
cagguggcaucacuguucc

SEQ ID NO: 1738344 - RNA, 19 nt, Artificial Sequence
  Description of Artificial Sequence: Synthetic oligonucleotide
gagggaguggcgcacguuc

SEQ ID NO: 1738345 - RNA, 19 nt, Artificial Sequence
  Description of Artificial Sequence: Synthetic oligonucleotide
gaacagagagcagagcuaa

SEQ ID NO: 1738346 - RNA, 19 nt, Artificial Sequence
  Description of Artificial Sequence: Synthetic oligonucleotide
uguuaaugaccaguuuaaa

SEQ ID NO: 1738347 - RNA, 19 nt, Artificial Sequence
  Description of Artificial Sequence: Synthetic oligonucleotide
cagcguugaagcuggaauc

SEQ ID NO: 1738348 - RNA, 19 nt, Artificial Sequence
  Description of Artificial Sequence: Synthetic oligonucleotide
cuccgaaccgacgaguaag

SEQ ID NO: 1738349 - RNA, 19 nt, Artificial Sequence
  Description of Artificial Sequence: Synthetic oligonucleotide
agauagagcccgcucggga

SEQ ID NO: 1738350 - RNA, 19 nt, Artificial Sequence
  Description of Artificial Sequence: Synthetic oligonucleotide
aacgagccuacuguugaca

SEQ ID NO: 1738351 - RNA, 19 nt, Artificial Sequence
  Description of Artificial Sequence: Synthetic oligonucleotide
augauaucccaggaguaca

SEQ ID NO: 1738352 - RNA, 19 nt, Artificial Sequence
  Description of Artificial Sequence: Synthetic oligonucleotide
ucagacacgcacggucacg

SEQ ID NO: 1738353 - RNA, 19 nt, Artificial Sequence
  Description of Artificial Sequence: Synthetic oligonucleotide
uccgaaccgacgaguaagu

SEQ ID NO: 1738354 - RNA, 19 nt, Artificial Sequence
  Description of Artificial Sequence: Synthetic oligonucleotide
ucagauggcgcucccuuuu

SEQ ID NO: 1738355 - RNA, 19 nt, Artificial Sequence
  Description of Artificial Sequence: Synthetic oligonucleotide
cuauucuagcuuugaccug

SEQ ID NO: 1738356 - RNA, 19 nt, Artificial Sequence
  Description of Artificial Sequence: Synthetic oligonucleotide
ucacgggcucggaucgucg

SEQ ID NO: 1738357 - RNA, 19 nt, Artificial Sequence
  Description of Artificial Sequence: Synthetic oligonucleotide
agccacgcauccuccugcc

SEQ ID NO: 1738358 - RNA, 19 nt, Artificial Sequence
  Description of Artificial Sequence: Synthetic oligonucleotide
agucugugaaccaaggauu

SEQ ID NO: 1738359 - RNA, 19 nt, Artificial Sequence
  Description of Artificial Sequence: Synthetic oligonucleotide
cauggaauuugcaaacgua

SEQ ID NO: 1738360 - RNA, 19 nt, Artificial Sequence
  Description of Artificial Sequence: Synthetic oligonucleotide
ggauucuguagccuuggug

SEQ ID NO: 1738361 - RNA, 19 nt, Artificial Sequence
  Description of Artificial Sequence: Synthetic oligonucleotide
aucauaggcuaguuuguua

SEQ ID NO: 1738362 - RNA, 19 nt, Artificial Sequence
  Description of Artificial Sequence: Synthetic oligonucleotide
ugaccgagcuucuauucua

SEQ ID NO: 1738363 - RNA, 19 nt, Artificial Sequence
  Description of Artificial Sequence: Synthetic oligonucleotide
cagcgaccgucccagauag

SEQ ID NO: 1738364 - RNA, 19 nt, Artificial Sequence
  Description of Artificial Sequence: Synthetic oligonucleotide
cagacacgcacggucacgg

SEQ ID NO: 1738365 - RNA, 19 nt, Artificial Sequence
  Description of Artificial Sequence: Synthetic oligonucleotide
agcguugaagcuggaaucu

SEQ ID NO: 1738366 - RNA, 19 nt, Artificial Sequence
  Description of Artificial Sequence: Synthetic oligonucleotide
uaguucugucgaguuauga

SEQ ID NO: 1738367 - RNA, 19 nt, Artificial Sequence
  Description of Artificial Sequence: Synthetic oligonucleotide
guugaagcuggaaucucac

SEQ ID NO: 1738368 - RNA, 19 nt, Artificial Sequence
  Description of Artificial Sequence: Synthetic oligonucleotide
ggauuucagguucucuagc

SEQ ID NO: 1738369 - RNA, 19 nt, Artificial Sequence
  Description of Artificial Sequence: Synthetic oligonucleotide
cauagccccauaauguuua

SEQ ID NO: 1738370 - RNA, 19 nt, Artificial Sequence
  Description of Artificial Sequence: Synthetic oligonucleotide
aggaguacacccaccaagu

SEQ ID NO: 1738371 - RNA, 19 nt, Artificial Sequence
  Description of Artificial Sequence: Synthetic oligonucleotide
aacauuggcuugacuacaa

SEQ ID NO: 1738372 - RNA, 19 nt, Artificial Sequence
  Description of Artificial Sequence: Synthetic oligonucleotide
uaggagaccgcugguuuug

SEQ ID NO: 1738373 - RNA, 19 nt, Artificial Sequence
  Description of Artificial Sequence: Synthetic oligonucleotide
gguaagucacagaauuggc

SEQ ID NO: 1738374 - RNA, 19 nt, Artificial Sequence
  Description of Artificial Sequence: Synthetic oligonucleotide
cugugaaccaaggauuuca

SEQ ID NO: 1738375 - RNA, 19 nt, Artificial Sequence
  Description of Artificial Sequence: Synthetic oligonucleotide
gucuauaauuaacuguuau

SEQ ID NO: 1738376 - RNA, 19 nt, Artificial Sequence
  Description of Artificial Sequence: Synthetic oligonucleotide
accaaguaagccaggccag

SEQ ID NO: 1738377 - RNA, 19 nt, Artificial Sequence
  Description of Artificial Sequence: Synthetic oligonucleotide
gucaaucuuugccaucaga

SEQ ID NO: 1738378 - RNA, 19 nt, Artificial Sequence
  Description of Artificial Sequence: Synthetic oligonucleotide
ggaacgagccuacuguuga

SEQ ID NO: 1738379 - RNA, 19 nt, Artificial Sequence
  Description of Artificial Sequence: Synthetic oligonucleotide
gcccauaggagaccgcugg

SEQ ID NO: 1738380 - RNA, 19 nt, Artificial Sequence
  Description of Artificial Sequence: Synthetic oligonucleotide
cugucgaguuaugaugaag

SEQ ID NO: 1738381 - RNA, 19 nt, Artificial Sequence
  Description of Artificial Sequence: Synthetic oligonucleotide
gacuacaaacugacagcgc

SEQ ID NO: 1738382 - RNA, 19 nt, Artificial Sequence
  Description of Artificial Sequence: Synthetic oligonucleotide
cugacagcgcuccuuucug

SEQ ID NO: 1738383 - RNA, 19 nt, Artificial Sequence
  Description of Artificial Sequence: Synthetic oligonucleotide
caaacguaaggaagaaugu

SEQ ID NO: 1738384 - RNA, 19 nt, Artificial Sequence
  Description of Artificial Sequence: Synthetic oligonucleotide
ucgguugguaagucacaga

SEQ ID NO: 1738385 - RNA, 19 nt, Artificial Sequence
  Description of Artificial Sequence: Synthetic oligonucleotide
gcuaagccagcccauagga

SEQ ID NO: 1738386 - RNA, 19 nt, Artificial Sequence
  Description of Artificial Sequence: Synthetic oligonucleotide
ugauugguuccaugauauc

SEQ ID NO: 1738387 - RNA, 19 nt, Artificial Sequence
  Description of Artificial Sequence: Synthetic oligonucleotide
agaaacugccugcuccgaa

SEQ ID NO: 1738388 - RNA, 19 nt, Artificial Sequence
  Description of Artificial Sequence: Synthetic oligonucleotide
gacagcgcuccuuucugga

SEQ ID NO: 1738389 - RNA, 19 nt, Artificial Sequence
  Description of Artificial Sequence: Synthetic oligonucleotide
agcauccuucugcccggcc

SEQ ID NO: 1738390 - RNA, 19 nt, Artificial Sequence
  Description of Artificial Sequence: Synthetic oligonucleotide
gaguguuaccaagggaaga

SEQ ID NO: 1738391 - RNA, 19 nt, Artificial Sequence
  Description of Artificial Sequence: Synthetic oligonucleotide
acgagccuacuguugacaa

SEQ ID NO: 1738392 - RNA, 19 nt, Artificial Sequence
  Description of Artificial Sequence: Synthetic oligonucleotide
aguggcgcacguucuccag

SEQ ID NO: 1738393 - RNA, 19 nt, Artificial Sequence
  Description of Artificial Sequence: Synthetic oligonucleotide
uucugaccgagcuucuauu

SEQ ID NO: 1738394 - RNA, 19 nt, Artificial Sequence
  Description of Artificial Sequence: Synthetic oligonucleotide
acguaaggaagaaugugau

SEQ ID NO: 1738395 - RNA, 19 nt, Artificial Sequence
  Description of Artificial Sequence: Synthetic oligonucleotide
gaacgagccuacuguugac

SEQ ID NO: 1738396 - RNA, 19 nt, Artificial Sequence
  Description of Artificial Sequence: Synthetic oligonucleotide
agaccgcugguuuuggcuu

SEQ ID NO: 1738397 - RNA, 19 nt, Artificial Sequence
  Description of Artificial Sequence: Synthetic oligonucleotide
cauuagcaaaguguccauc

SEQ ID NO: 1738398 - RNA, 19 nt, Artificial Sequence
  Description of Artificial Sequence: Synthetic oligonucleotide
uggcgcucccuuuucuucu

SEQ ID NO: 1738399 - RNA, 19 nt, Artificial Sequence
  Description of Artificial Sequence: Synthetic oligonucleotide
guguuaccaagggaagacc

SEQ ID NO: 1738400 - RNA, 19 nt, Artificial Sequence
  Description of Artificial Sequence: Synthetic oligonucleotide
guggcgcacguucuccagg

SEQ ID NO: 1738401 - RNA, 19 nt, Artificial Sequence
  Description of Artificial Sequence: Synthetic oligonucleotide
ugcuccgaaccgacgagua

SEQ ID NO: 1738402 - RNA, 19 nt, Artificial Sequence
  Description of Artificial Sequence: Synthetic oligonucleotide
uggcccauagccccauaau

SEQ ID NO: 1738403 - RNA, 19 nt, Artificial Sequence
  Description of Artificial Sequence: Synthetic oligonucleotide
ucggaucgucggcagcagc

SEQ ID NO: 1738404 - RNA, 19 nt, Artificial Sequence
  Description of Artificial Sequence: Synthetic oligonucleotide
uuauuucaucagguggcau

SEQ ID NO: 1738405 - RNA, 19 nt, Artificial Sequence
  Description of Artificial Sequence: Synthetic oligonucleotide
ugcaaacguaaggaagaau

SEQ ID NO: 1738406 - RNA, 19 nt, Artificial Sequence
  Description of Artificial Sequence: Synthetic oligonucleotide
agacacgcacggucacggg

SEQ ID NO: 1738407 - RNA, 19 nt, Artificial Sequence
  Description of Artificial Sequence: Synthetic oligonucleotide
cagcgcuccuuucuggaug

SEQ ID NO: 1738408 - RNA, 19 nt, Artificial Sequence
  Description of Artificial Sequence: Synthetic oligonucleotide
gucgaguuaugaugaagua

SEQ ID NO: 1738409 - RNA, 19 nt, Artificial Sequence
  Description of Artificial Sequence: Synthetic oligonucleotide
gugauugguuccaugauau

SEQ ID NO: 1738410 - RNA, 19 nt, Artificial Sequence
  Description of Artificial Sequence: Synthetic oligonucleotide
cucuaaaugcaagauugua

SEQ ID NO: 1738411 - RNA, 19 nt, Artificial Sequence
  Description of Artificial Sequence: Synthetic oligonucleotide
guggccguagccucagaca

SEQ ID NO: 1738412 - RNA, 19 nt, Artificial Sequence
  Description of Artificial Sequence: Synthetic oligonucleotide
aggaacgagccuacuguug

SEQ ID NO: 1738413 - RNA, 19 nt, Artificial Sequence
  Description of Artificial Sequence: Synthetic oligonucleotide
gcgaccgucccagauagag

SEQ ID NO: 1738414 - RNA, 19 nt, Artificial Sequence
  Description of Artificial Sequence: Synthetic oligonucleotide
auucgaaaauggagggagu

SEQ ID NO: 1738415 - RNA, 19 nt, Artificial Sequence
  Description of Artificial Sequence: Synthetic oligonucleotide
cagauagagcccgcucggg

SEQ ID NO: 1738416 - RNA, 19 nt, Artificial Sequence
  Description of Artificial Sequence: Synthetic oligonucleotide
cucagacacgcacggucac

SEQ ID NO: 1738417 - RNA, 19 nt, Artificial Sequence
  Description of Artificial Sequence: Synthetic oligonucleotide
caacauuggcuugacuaca

SEQ ID NO: 1738418 - RNA, 19 nt, Artificial Sequence
  Description of Artificial Sequence: Synthetic oligonucleotide
caaugucugaaaccaucaa

SEQ ID NO: 1738419 - RNA, 19 nt, Artificial Sequence
  Description of Artificial Sequence: Synthetic oligonucleotide
aauuggcccauagccccau

SEQ ID NO: 1738420 - RNA, 19 nt, Artificial Sequence
  Description of Artificial Sequence: Synthetic oligonucleotide
aaccgacgaguaaguguag

SEQ ID NO: 1738421 - RNA, 19 nt, Artificial Sequence
  Description of Artificial Sequence: Synthetic oligonucleotide
aucagauggcgcucccuuu

SEQ ID NO: 1738422 - RNA, 19 nt, Artificial Sequence
  Description of Artificial Sequence: Synthetic oligonucleotide
caaucaugugcucuucagu

SEQ ID NO: 1738423 - RNA, 19 nt, Artificial Sequence
  Description of Artificial Sequence: Synthetic oligonucleotide
accgacgaguaaguguagu

SEQ ID NO: 1738424 - RNA, 19 nt, Artificial Sequence
  Description of Artificial Sequence: Synthetic oligonucleotide
accgucccagauagagccc

SEQ ID NO: 1738425 - RNA, 19 nt, Artificial Sequence
  Description of Artificial Sequence: Synthetic oligonucleotide
guaagccaggccagugccc

SEQ ID NO: 1738426 - RNA, 19 nt, Artificial Sequence
  Description of Artificial Sequence: Synthetic oligonucleotide
agucacagaauuggcccau

SEQ ID NO: 1738427 - RNA, 19 nt, Artificial Sequence
  Description of Artificial Sequence: Synthetic oligonucleotide
auagccccauaauguuuaa

SEQ ID NO: 1738428 - RNA, 19 nt, Artificial Sequence
  Description of Artificial Sequence: Synthetic oligonucleotide
gcaagauuguaaauagucu

SEQ ID NO: 1738429 - RNA, 19 nt, Artificial Sequence
  Description of Artificial Sequence: Synthetic oligonucleotide
gccucagacacgcacgguc

SEQ ID NO: 1738430 - RNA, 19 nt, Artificial Sequence
  Description of Artificial Sequence: Synthetic oligonucleotide
agaaugugauugguuccau

SEQ ID NO: 1738431 - RNA, 19 nt, Artificial Sequence
  Description of Artificial Sequence: Synthetic oligonucleotide
augaccaguuuaaaaccuu

SEQ ID NO: 1738432 - RNA, 19 nt, Artificial Sequence
  Description of Artificial Sequence: Synthetic oligonucleotide
cccauaauguuuaaaacuu

SEQ ID NO: 1738433 - RNA, 19 nt, Artificial Sequence
  Description of Artificial Sequence: Synthetic oligonucleotide
gaccgcugguuuuggcuuc

SEQ ID NO: 1738434 - RNA, 19 nt, Artificial Sequence
  Description of Artificial Sequence: Synthetic oligonucleotide
gaauuggcccauagcccca

SEQ ID NO: 1738435 - RNA, 19 nt, Artificial Sequence
  Description of Artificial Sequence: Synthetic oligonucleotide
guaguucugucgaguuaug

SEQ ID NO: 1738436 - RNA, 19 nt, Artificial Sequence
  Description of Artificial Sequence: Synthetic oligonucleotide
ccugaaggaacgagccuac

SEQ ID NO: 1738437 - RNA, 19 nt, Artificial Sequence
  Description of Artificial Sequence: Synthetic oligonucleotide
guacacccaccaaguaagc

SEQ ID NO: 1738438 - RNA, 19 nt, Artificial Sequence
  Description of Artificial Sequence: Synthetic oligonucleotide
cagugccccucccugaaca

SEQ ID NO: 1738439 - RNA, 19 nt, Artificial Sequence
  Description of Artificial Sequence: Synthetic oligonucleotide
ugauggccgcaguuuugau

SEQ ID NO: 1738440 - RNA, 19 nt, Artificial Sequence
  Description of Artificial Sequence: Synthetic oligonucleotide
aguucuccuggcauucgaa

SEQ ID NO: 1738441 - RNA, 19 nt, Artificial Sequence
  Description of Artificial Sequence: Synthetic oligonucleotide
guguaguucugucgaguua

SEQ ID NO: 1738442 - RNA, 19 nt, Artificial Sequence
  Description of Artificial Sequence: Synthetic oligonucleotide
cucuuucuugugacacuga

SEQ ID NO: 1738443 - RNA, 19 nt, Artificial Sequence
  Description of Artificial Sequence: Synthetic oligonucleotide
gauggcagagugaguguua

SEQ ID NO: 1738444 - RNA, 19 nt, Artificial Sequence
  Description of Artificial Sequence: Synthetic oligonucleotide
agagcuaagccagcccaua

SEQ ID NO: 1738445 - RNA, 19 nt, Artificial Sequence
  Description of Artificial Sequence: Synthetic oligonucleotide
cagauggcgcucccuuuuc

SEQ ID NO: 1738446 - RNA, 19 nt, Artificial Sequence
  Description of Artificial Sequence: Synthetic oligonucleotide
cguagccucagacacgcac

SEQ ID NO: 1738447 - RNA, 19 nt, Artificial Sequence
  Description of Artificial Sequence: Synthetic oligonucleotide
cugaacaucauaggcuagu

SEQ ID NO: 1738448 - RNA, 19 nt, Artificial Sequence
  Description of Artificial Sequence: Synthetic oligonucleotide
guucgguugguaagucaca

SEQ ID NO: 1738449 - RNA, 19 nt, Artificial Sequence
  Description of Artificial Sequence: Synthetic oligonucleotide
uagccccauaauguuuaaa

SEQ ID NO: 1738450 - RNA, 19 nt, Artificial Sequence
  Description of Artificial Sequence: Synthetic oligonucleotide
cuguuccauaguggagggc

SEQ ID NO: 1738451 - RNA, 19 nt, Artificial Sequence
  Description of Artificial Sequence: Synthetic oligonucleotide
ggaguggcgcacguucucc

SEQ ID NO: 1738452 - RNA, 19 nt, Artificial Sequence
  Description of Artificial Sequence: Synthetic oligonucleotide
guggcaucacuguuccaua

SEQ ID NO: 1738453 - RNA, 19 nt, Artificial Sequence
  Description of Artificial Sequence: Synthetic oligonucleotide
cugaccgagcuucuauucu

SEQ ID NO: 1738454 - RNA, 19 nt, Artificial Sequence
  Description of Artificial Sequence: Synthetic oligonucleotide
gguggcaucacuguuccau

SEQ ID NO: 1738455 - RNA, 19 nt, Artificial Sequence
  Description of Artificial Sequence: Synthetic oligonucleotide
uggccgcaguuuugaugcc

SEQ ID NO: 1738456 - RNA, 19 nt, Artificial Sequence
  Description of Artificial Sequence: Synthetic oligonucleotide
gauggcgcucccuuuucuu

SEQ ID NO: 1738457 - RNA, 19 nt, Artificial Sequence
  Description of Artificial Sequence: Synthetic oligonucleotide
cgguugguaagucacagaa

SEQ ID NO: 1738458 - RNA, 19 nt, Artificial Sequence
  Description of Artificial Sequence: Synthetic oligonucleotide
uucugcccggcccgagcuc

SEQ ID NO: 1738459 - RNA, 19 nt, Artificial Sequence
  Description of Artificial Sequence: Synthetic oligonucleotide
ggagaccgcugguuuuggc

SEQ ID NO: 1738460 - RNA, 19 nt, Artificial Sequence
  Description of Artificial Sequence: Synthetic oligonucleotide
gggcuugguaguauuuuga

SEQ ID NO: 1738461 - RNA, 19 nt, Artificial Sequence
  Description of Artificial Sequence: Synthetic oligonucleotide
ccccucccugaacagagag

SEQ ID NO: 1738462 - RNA, 19 nt, Artificial Sequence
  Description of Artificial Sequence: Synthetic oligonucleotide
agggaguggcgcacguucu

SEQ ID NO: 1738463 - RNA, 19 nt, Artificial Sequence
  Description of Artificial Sequence: Synthetic oligonucleotide
ccgucccagauagagcccg

SEQ ID NO: 1738464 - RNA, 19 nt, Artificial Sequence
  Description of Artificial Sequence: Synthetic oligonucleotide
guuaccaagggaagaccau

SEQ ID NO: 1738465 - RNA, 19 nt, Artificial Sequence
  Description of Artificial Sequence: Synthetic oligonucleotide
cuagagcccagcccgcugu

SEQ ID NO: 1738466 - RNA, 19 nt, Artificial Sequence
  Description of Artificial Sequence: Synthetic oligonucleotide
cgacgaguaaguguaguuc

SEQ ID NO: 1738467 - RNA, 19 nt, Artificial Sequence
  Description of Artificial Sequence: Synthetic oligonucleotide
gcuagagcccagcccgcug

SEQ ID NO: 1738468 - RNA, 19 nt, Artificial Sequence
  Description of Artificial Sequence: Synthetic oligonucleotide
uccuucugcccggcccgag

SEQ ID NO: 1738469 - RNA, 19 nt, Artificial Sequence
  Description of Artificial Sequence: Synthetic oligonucleotide
gcuccuggcgucagccacg

SEQ ID NO: 1738470 - RNA, 19 nt, Artificial Sequence
  Description of Artificial Sequence: Synthetic oligonucleotide
cauaggcuaguuuguuaau

SEQ ID NO: 1738471 - RNA, 19 nt, Artificial Sequence
  Description of Artificial Sequence: Synthetic oligonucleotide
ggcgcucccuuuucuucug

SEQ ID NO: 1738472 - RNA, 19 nt, Artificial Sequence
  Description of Artificial Sequence: Synthetic oligonucleotide
gcccauagccccauaaugu

SEQ ID NO: 1738473 - RNA, 19 nt, Artificial Sequence
  Description of Artificial Sequence: Synthetic oligonucleotide
gucacgggcucggaucguc

SEQ ID NO: 1738474 - RNA, 19 nt, Artificial Sequence
  Description of Artificial Sequence: Synthetic oligonucleotide
ggaguacacccaccaagua

SEQ ID NO: 1738475 - RNA, 19 nt, Artificial Sequence
  Description of Artificial Sequence: Synthetic oligonucleotide
cggucacgggcucggaucg

SEQ ID NO: 1738476 - RNA, 19 nt, Artificial Sequence
  Description of Artificial Sequence: Synthetic oligonucleotide
acgcacggucacgggcucg

SEQ ID NO: 1738477 - RNA, 19 nt, Artificial Sequence
  Description of Artificial Sequence: Synthetic oligonucleotide
accgcugguuuuggcuucu

SEQ ID NO: 1738478 - RNA, 19 nt, Artificial Sequence
  Description of Artificial Sequence: Synthetic oligonucleotide
cgccccgccaacuggggcg

SEQ ID NO: 1738479 - RNA, 19 nt, Artificial Sequence
  Description of Artificial Sequence: Synthetic oligonucleotide
cagaaacugccugcuccga

SEQ ID NO: 1738480 - RNA, 19 nt, Artificial Sequence
  Description of Artificial Sequence: Synthetic oligonucleotide
cacgcacggucacgggcuc

SEQ ID NO: 1738481 - RNA, 19 nt, Artificial Sequence
  Description of Artificial Sequence: Synthetic oligonucleotide
gcagcgaccgucccagaua

SEQ ID NO: 1738482 - RNA, 19 nt, Artificial Sequence
  Description of Artificial Sequence: Synthetic oligonucleotide
ccgagcuucuauucuagcu

SEQ ID NO: 1738483 - RNA, 19 nt, Artificial Sequence
  Description of Artificial Sequence: Synthetic oligonucleotide
gggcucggaucgucggcag

SEQ ID NO: 1738484 - RNA, 19 nt, Artificial Sequence
  Description of Artificial Sequence: Synthetic oligonucleotide
ggcucggaucgucggcagc

SEQ ID NO: 1738485 - RNA, 19 nt, Artificial Sequence
  Description of Artificial Sequence: Synthetic oligonucleotide
gcccgcugugggcucagcc

SEQ ID NO: 1738486 - RNA, 19 nt, Artificial Sequence
  Description of Artificial Sequence: Synthetic oligonucleotide
gccaucagauggcgcuccc

SEQ ID NO: 1738487 - RNA, 19 nt, Artificial Sequence
  Description of Artificial Sequence: Synthetic oligonucleotide
cacgcauccuccugccgcu

SEQ ID NO: 1738488 - RNA, 19 nt, Artificial Sequence
  Description of Artificial Sequence: Synthetic oligonucleotide
gcuugacuacaaacugaca

SEQ ID NO: 1738489 - RNA, 19 nt, Artificial Sequence
  Description of Artificial Sequence: Synthetic oligonucleotide
agccuacuguugacaacau

SEQ ID NO: 1738490 - RNA, 19 nt, Artificial Sequence
  Description of Artificial Sequence: Synthetic oligonucleotide
cgaaccgacgaguaagugu

SEQ ID NO: 1738491 - RNA, 19 nt, Artificial Sequence
  Description of Artificial Sequence: Synthetic oligonucleotide
cgagccuacuguugacaac

SEQ ID NO: 1738492 - RNA, 19 nt, Artificial Sequence
  Description of Artificial Sequence: Synthetic oligonucleotide
ccgcucgggagcauccuuc

SEQ ID NO: 1738493 - RNA, 19 nt, Artificial Sequence
  Description of Artificial Sequence: Synthetic oligonucleotide
cucagcccgccccgccaac

SEQ ID NO: 1738494 - RNA, 19 nt, Artificial Sequence
  Description of Artificial Sequence: Synthetic oligonucleotide
gagcccgcucgggagcauc

SEQ ID NO: 1738495 - RNA, 19 nt, Artificial Sequence
  Description of Artificial Sequence: Synthetic oligonucleotide
ccucuaaaugcaagauugu

SEQ ID NO: 1738496 - RNA, 19 nt, Artificial Sequence
  Description of Artificial Sequence: Synthetic oligonucleotide
gcuccgaaccgacgaguaa

SEQ ID NO: 1738497 - RNA, 19 nt, Artificial Sequence
  Description of Artificial Sequence: Synthetic oligonucleotide
uccuggcgucagccacgca

SEQ ID NO: 1738498 - RNA, 19 nt, Artificial Sequence
  Description of Artificial Sequence: Synthetic oligonucleotide
gguugguaagucacagaau

SEQ ID NO: 1738499 - RNA, 19 nt, Artificial Sequence
  Description of Artificial Sequence: Synthetic oligonucleotide
ccagcccauaggagaccgc

SEQ ID NO: 1738500 - RNA, 19 nt, Artificial Sequence
  Description of Artificial Sequence: Synthetic oligonucleotide
ccgaaccgacgaguaagug

SEQ ID NO: 1738501 - RNA, 19 nt, Artificial Sequence
  Description of Artificial Sequence: Synthetic oligonucleotide
ggcggugacaggagggugu

SEQ ID NO: 1738502 - RNA, 19 nt, Artificial Sequence
  Description of Artificial Sequence: Synthetic oligonucleotide
gccccgccaacuggggcgg

SEQ ID NO: 1738503 - RNA, 19 nt, Artificial Sequence
  Description of Artificial Sequence: Synthetic oligonucleotide
gcccggcccgagcuccugg

SEQ ID NO: 1738504 - RNA, 19 nt, Artificial Sequence
  Description of Artificial Sequence: Synthetic oligonucleotide
ccgcuagagcccagcccgc

SEQ ID NO: 1738505 - RNA, 19 nt, Artificial Sequence
  Description of Artificial Sequence: Synthetic oligonucleotide
cccggcccgagcuccuggc

SEQ ID NO: 1738506 - RNA, 19 nt, Artificial Sequence
  Description of Artificial Sequence: Synthetic oligonucleotide
cugcuccgaaccgacgagu

SEQ ID NO: 1738507 - RNA, 19 nt, Artificial Sequence
  Description of Artificial Sequence: Synthetic oligonucleotide
cugaaggaacgagccuacu

SEQ ID NO: 1738508 - RNA, 19 nt, Artificial Sequence
  Description of Artificial Sequence: Synthetic oligonucleotide
gcgcacguucuccagggau

SEQ ID NO: 1738509 - RNA, 19 nt, Artificial Sequence
  Description of Artificial Sequence: Synthetic oligonucleotide
cccgccccgccaacugggg

SEQ ID NO: 1738510 - RNA, 19 nt, Artificial Sequence
  Description of Artificial Sequence: Synthetic oligonucleotide
ggcgcacguucuccaggga

SEQ ID NO: 1738511 - RNA, 19 nt, Artificial Sequence
  Description of Artificial Sequence: Synthetic oligonucleotide
ccauagccccauaauguuu

SEQ ID NO: 1738512 - RNA, 19 nt, Artificial Sequence
  Description of Artificial Sequence: Synthetic oligonucleotide
cgggagcauccuucugccc

SEQ ID NO: 1738513 - RNA, 19 nt, Artificial Sequence
  Description of Artificial Sequence: Synthetic oligonucleotide
agcgaccgucccagauaga

SEQ ID NO: 1738514 - RNA, 19 nt, Artificial Sequence
  Description of Artificial Sequence: Synthetic oligonucleotide
ccgacgaguaaguguaguu

SEQ ID NO: 1738515 - RNA, 19 nt, Artificial Sequence
  Description of Artificial Sequence: Synthetic oligonucleotide
gcucagcccgccccgccaa

SEQ ID NO: 1738516 - RNA, 19 nt, Artificial Sequence
  Description of Artificial Sequence: Synthetic oligonucleotide
ccgccccgccaacuggggc

SEQ ID NO: 1738517 - RNA, 19 nt, Artificial Sequence
  Description of Artificial Sequence: Synthetic oligonucleotide
cgcugugggcucagcccgc

SEQ ID NO: 1738518 - RNA, 19 nt, Artificial Sequence
  Description of Artificial Sequence: Synthetic oligonucleotide
acgcauccuccugccgcua

SEQ ID NO: 1738519 - RNA, 19 nt, Artificial Sequence
  Description of Artificial Sequence: Synthetic oligonucleotide
ccaaguaagccaggccagu

SEQ ID NO: 1738520 - RNA, 19 nt, Artificial Sequence
  Description of Artificial Sequence: Synthetic oligonucleotide
cacugccaucugcugugau

SEQ ID NO: 1738521 - RNA, 19 nt, Artificial Sequence
  Description of Artificial Sequence: Synthetic oligonucleotide
cccagcccgcugugggcuc

SEQ ID NO: 1738522 - RNA, 19 nt, Artificial Sequence
  Description of Artificial Sequence: Synthetic oligonucleotide
gccgcaguuuugaugccuu

SEQ ID NO: 1738523 - RNA, 19 nt, Artificial Sequence
  Description of Artificial Sequence: Synthetic oligonucleotide
cgccaacuggggcggugac

SEQ ID NO: 1738524 - RNA, 19 nt, Artificial Sequence
  Description of Artificial Sequence: Synthetic oligonucleotide
gcgcuccuuucuggauggc

SEQ ID NO: 1738525 - RNA, 19 nt, Artificial Sequence
  Description of Artificial Sequence: Synthetic oligonucleotide
ccgcugguuuuggcuucug

SEQ ID NO: 1738526 - RNA, 19 nt, Artificial Sequence
  Description of Artificial Sequence: Synthetic oligonucleotide
ccguagccucagacacgca

SEQ ID NO: 1738527 - RNA, 19 nt, Artificial Sequence
  Description of Artificial Sequence: Synthetic oligonucleotide
ggucacgggcucggaucgu

SEQ ID NO: 1738528 - RNA, 19 nt, Artificial Sequence
  Description of Artificial Sequence: Synthetic oligonucleotide
ccgcaguuuugaugccuuu

SEQ ID NO: 1738529 - RNA, 19 nt, Artificial Sequence
  Description of Artificial Sequence: Synthetic oligonucleotide
gcccgcucgggagcauccu

SEQ ID NO: 1738530 - RNA, 19 nt, Artificial Sequence
  Description of Artificial Sequence: Synthetic oligonucleotide
cccgcucgggagcauccuu

SEQ ID NO: 1738531 - RNA, 19 nt, Artificial Sequence
  Description of Artificial Sequence: Synthetic oligonucleotide
ccccgccaacuggggcggu

SEQ ID NO: 1738532 - RNA, 19 nt, Artificial Sequence
  Description of Artificial Sequence: Synthetic oligonucleotide
acuaaugccauccugaccc

SEQ ID NO: 1738533 - RNA, 19 nt, Artificial Sequence
  Description of Artificial Sequence: Synthetic oligonucleotide
aauccuuguagccaugacg

SEQ ID NO: 1738534 - RNA, 19 nt, Artificial Sequence
  Description of Artificial Sequence: Synthetic oligonucleotide
cuuacaggcaaaaucaggg

SEQ ID NO: 1738535 - RNA, 19 nt, Artificial Sequence
  Description of Artificial Sequence: Synthetic oligonucleotide
aauuagguauaacccuucc

SEQ ID NO: 1738536 - RNA, 19 nt, Artificial Sequence
  Description of Artificial Sequence: Synthetic oligonucleotide
uucaguaggacuaaugcca

SEQ ID NO: 1738537 - RNA, 19 nt, Artificial Sequence
  Description of Artificial Sequence: Synthetic oligonucleotide
cuuaauaacccucugcuag

SEQ ID NO: 1738538 - RNA, 19 nt, Artificial Sequence
  Description of Artificial Sequence: Synthetic oligonucleotide
uuagguauaacccuuccac

SEQ ID NO: 1738539 - RNA, 19 nt, Artificial Sequence
  Description of Artificial Sequence: Synthetic oligonucleotide
aucaaugacuccuccaagc

SEQ ID NO: 1738540 - RNA, 19 nt, Artificial Sequence
  Description of Artificial Sequence: Synthetic oligonucleotide
uucaguauaucucgcagcc

SEQ ID NO: 1738541 - RNA, 19 nt, Artificial Sequence
  Description of Artificial Sequence: Synthetic oligonucleotide
aguaggacuaaugccaucc

SEQ ID NO: 1738542 - RNA, 19 nt, Artificial Sequence
  Description of Artificial Sequence: Synthetic oligonucleotide
ugagagucggcuuugcagg

SEQ ID NO: 1738543 - RNA, 19 nt, Artificial Sequence
  Description of Artificial Sequence: Synthetic oligonucleotide
ucagguagaaccuccuugg

SEQ ID NO: 1738544 - RNA, 19 nt, Artificial Sequence
  Description of Artificial Sequence: Synthetic oligonucleotide
auauuuguccacuuccccg

SEQ ID NO: 1738545 - RNA, 19 nt, Artificial Sequence
  Description of Artificial Sequence: Synthetic oligonucleotide
aggaucgaagagcagaugg

SEQ ID NO: 1738546 - RNA, 19 nt, Artificial Sequence
  Description of Artificial Sequence: Synthetic oligonucleotide
aggguaucgagcugcaucc

SEQ ID NO: 1738547 - RNA, 19 nt, Artificial Sequence
  Description of Artificial Sequence: Synthetic oligonucleotide
aaccaaggagcacuagagc

SEQ ID NO: 1738548 - RNA, 19 nt, Artificial Sequence
  Description of Artificial Sequence: Synthetic oligonucleotide
aaaagauagcccugggucu

SEQ ID NO: 1738549 - RNA, 19 nt, Artificial Sequence
  Description of Artificial Sequence: Synthetic oligonucleotide
ucugcuagcccaauucagg

SEQ ID NO: 1738550 - RNA, 19 nt, Artificial Sequence
  Description of Artificial Sequence: Synthetic oligonucleotide
caguuuucaguauaucucg

SEQ ID NO: 1738551 - RNA, 19 nt, Artificial Sequence
  Description of Artificial Sequence: Synthetic oligonucleotide
aucaauuagguauaacccu

SEQ ID NO: 1738552 - RNA, 19 nt, Artificial Sequence
  Description of Artificial Sequence: Synthetic oligonucleotide
ugcaguuuucaguauaucu

SEQ ID NO: 1738553 - RNA, 19 nt, Artificial Sequence
  Description of Artificial Sequence: Synthetic oligonucleotide
acccauuggacaccaaacc

SEQ ID NO: 1738554 - RNA, 19 nt, Artificial Sequence
  Description of Artificial Sequence: Synthetic oligonucleotide
ccaucaauuagguauaacc

SEQ ID NO: 1738555 - RNA, 19 nt, Artificial Sequence
  Description of Artificial Sequence: Synthetic oligonucleotide
cauccugaccccaauaccc

SEQ ID NO: 1738556 - RNA, 19 nt, Artificial Sequence
  Description of Artificial Sequence: Synthetic oligonucleotide
agaaugcugaaucagccca

SEQ ID NO: 1738557 - RNA, 19 nt, Artificial Sequence
  Description of Artificial Sequence: Synthetic oligonucleotide
cuucaguaggacuaaugcc

SEQ ID NO: 1738558 - RNA, 19 nt, Artificial Sequence
  Description of Artificial Sequence: Synthetic oligonucleotide
uuaauaacccucugcuagc

SEQ ID NO: 1738559 - RNA, 19 nt, Artificial Sequence
  Description of Artificial Sequence: Synthetic oligonucleotide
uauuuguccacuuccccgc

SEQ ID NO: 1738560 - RNA, 19 nt, Artificial Sequence
  Description of Artificial Sequence: Synthetic oligonucleotide
uaucucgcagcccaccagg

SEQ ID NO: 1738561 - RNA, 19 nt, Artificial Sequence
  Description of Artificial Sequence: Synthetic oligonucleotide
gguagaaccuccuugggag

SEQ ID NO: 1738562 - RNA, 19 nt, Artificial Sequence
  Description of Artificial Sequence: Synthetic oligonucleotide
gacuccaucaauuagguau

SEQ ID NO: 1738563 - RNA, 19 nt, Artificial Sequence
  Description of Artificial Sequence: Synthetic oligonucleotide
ucaauuagguauaacccuu

SEQ ID NO: 1738564 - RNA, 19 nt, Artificial Sequence
  Description of Artificial Sequence: Synthetic oligonucleotide
cuuguagugaaccaaggca

SEQ ID NO: 1738565 - RNA, 19 nt, Artificial Sequence
  Description of Artificial Sequence: Synthetic oligonucleotide
agacuuacaggcaaaauca

SEQ ID NO: 1738566 - RNA, 19 nt, Artificial Sequence
  Description of Artificial Sequence: Synthetic oligonucleotide
aucaggguuagccccaagg

SEQ ID NO: 1738567 - RNA, 19 nt, Artificial Sequence
  Description of Artificial Sequence: Synthetic oligonucleotide
cagacuuacaggcaaaauc

SEQ ID NO: 1738568 - RNA, 19 nt, Artificial Sequence
  Description of Artificial Sequence: Synthetic oligonucleotide
uuagguugggcugucgagg

SEQ ID NO: 1738569 - RNA, 19 nt, Artificial Sequence
  Description of Artificial Sequence: Synthetic oligonucleotide
aaagauagcccugggucuc

SEQ ID NO: 1738570 - RNA, 19 nt, Artificial Sequence
  Description of Artificial Sequence: Synthetic oligonucleotide
agugaaccaaggcagccuc

SEQ ID NO: 1738571 - RNA, 19 nt, Artificial Sequence
  Description of Artificial Sequence: Synthetic oligonucleotide
uuuagguugggcugucgag

SEQ ID NO: 1738572 - RNA, 19 nt, Artificial Sequence
  Description of Artificial Sequence: Synthetic oligonucleotide
ucugcaaguaccgcaaacc

SEQ ID NO: 1738573 - RNA, 19 nt, Artificial Sequence
  Description of Artificial Sequence: Synthetic oligonucleotide
gaauggacaagagggagcc

SEQ ID NO: 1738574 - RNA, 19 nt, Artificial Sequence
  Description of Artificial Sequence: Synthetic oligonucleotide
ugucgaggaucgaagagca

SEQ ID NO: 1738575 - RNA, 19 nt, Artificial Sequence
  Description of Artificial Sequence: Synthetic oligonucleotide
agagguuuagguugggcug

SEQ ID NO: 1738576 - RNA, 19 nt, Artificial Sequence
  Description of Artificial Sequence: Synthetic oligonucleotide
auagggaucugagagucgg

SEQ ID NO: 1738577 - RNA, 19 nt, Artificial Sequence
  Description of Artificial Sequence: Synthetic oligonucleotide
uguagugaaccaaggcagc

SEQ ID NO: 1738578 - RNA, 19 nt, Artificial Sequence
  Description of Artificial Sequence: Synthetic oligonucleotide
agcgcugucugcaaguacc

SEQ ID NO: 1738579 - RNA, 19 nt, Artificial Sequence
  Description of Artificial Sequence: Synthetic oligonucleotide
acuccagccuuaauaaccc

SEQ ID NO: 1738580 - RNA, 19 nt, Artificial Sequence
  Description of Artificial Sequence: Synthetic oligonucleotide
cauauuuguccacuucccc

SEQ ID NO: 1738581 - RNA, 19 nt, Artificial Sequence
  Description of Artificial Sequence: Synthetic oligonucleotide
aacgguugcugacccauug

SEQ ID NO: 1738582 - RNA, 19 nt, Artificial Sequence
  Description of Artificial Sequence: Synthetic oligonucleotide
ugggagguuccucuucugg

SEQ ID NO: 1738583 - RNA, 19 nt, Artificial Sequence
  Description of Artificial Sequence: Synthetic oligonucleotide
uauaucucgcagcccacca

SEQ ID NO: 1738584 - RNA, 19 nt, Artificial Sequence
  Description of Artificial Sequence: Synthetic oligonucleotide
uguguccuuguagugaacc

SEQ ID NO: 1738585 - RNA, 19 nt, Artificial Sequence
  Description of Artificial Sequence: Synthetic oligonucleotide
auuagguauaacccuucca

SEQ ID NO: 1738586 - RNA, 19 nt, Artificial Sequence
  Description of Artificial Sequence: Synthetic oligonucleotide
cuuuagguuacuaggccuc

SEQ ID NO: 1738587 - RNA, 19 nt, Artificial Sequence
  Description of Artificial Sequence: Synthetic oligonucleotide
cagucguuuggccugacag

SEQ ID NO: 1738588 - RNA, 19 nt, Artificial Sequence
  Description of Artificial Sequence: Synthetic oligonucleotide
uagguauaacccuuccaca

SEQ ID NO: 1738589 - RNA, 19 nt, Artificial Sequence
  Description of Artificial Sequence: Synthetic oligonucleotide
uggacaccaaaccaauccu

SEQ ID NO: 1738590 - RNA, 19 nt, Artificial Sequence
  Description of Artificial Sequence: Synthetic oligonucleotide
agcagaugggcauagggau

SEQ ID NO: 1738591 - RNA, 19 nt, Artificial Sequence
  Description of Artificial Sequence: Synthetic oligonucleotide
guugcugacccauuggaca

SEQ ID NO: 1738592 - RNA, 19 nt, Artificial Sequence
  Description of Artificial Sequence: Synthetic oligonucleotide
aaccaauccuuguagccau

SEQ ID NO: 1738593 - RNA, 19 nt, Artificial Sequence
  Description of Artificial Sequence: Synthetic oligonucleotide
aguuuucaguauaucucgc

SEQ ID NO: 1738594 - RNA, 19 nt, Artificial Sequence
  Description of Artificial Sequence: Synthetic oligonucleotide
ucgaggaucgaagagcaga

SEQ ID NO: 1738595 - RNA, 19 nt, Artificial Sequence
  Description of Artificial Sequence: Synthetic oligonucleotide
agguauaacccuuccacau

SEQ ID NO: 1738596 - RNA, 19 nt, Artificial Sequence
  Description of Artificial Sequence: Synthetic oligonucleotide
uuacaggcaaaaucagggu

SEQ ID NO: 1738597 - RNA, 19 nt, Artificial Sequence
  Description of Artificial Sequence: Synthetic oligonucleotide
aaccacaucuuggucacug

SEQ ID NO: 1738598 - RNA, 19 nt, Artificial Sequence
  Description of Artificial Sequence: Synthetic oligonucleotide
gaggguaucgagcugcauc

SEQ ID NO: 1738599 - RNA, 19 nt, Artificial Sequence
  Description of Artificial Sequence: Synthetic oligonucleotide
ucuguguccuuguagugaa

SEQ ID NO: 1738600 - RNA, 19 nt, Artificial Sequence
  Description of Artificial Sequence: Synthetic oligonucleotide
auuuguccacuuccccgcc

SEQ ID NO: 1738601 - RNA, 19 nt, Artificial Sequence
  Description of Artificial Sequence: Synthetic oligonucleotide
auccuuguagccaugacgu

SEQ ID NO: 1738602 - RNA, 19 nt, Artificial Sequence
  Description of Artificial Sequence: Synthetic oligonucleotide
uuccccaucaaugacuccu

SEQ ID NO: 1738603 - RNA, 19 nt, Artificial Sequence
  Description of Artificial Sequence: Synthetic oligonucleotide
uccagacucgcccggcugg

SEQ ID NO: 1738604 - RNA, 19 nt, Artificial Sequence
  Description of Artificial Sequence: Synthetic oligonucleotide
aaguaccgcaaaccaagga

SEQ ID NO: 1738605 - RNA, 19 nt, Artificial Sequence
  Description of Artificial Sequence: Synthetic oligonucleotide
gaccccaauacccugggca

SEQ ID NO: 1738606 - RNA, 19 nt, Artificial Sequence
  Description of Artificial Sequence: Synthetic oligonucleotide
cagaaugcugaaucagccc

SEQ ID NO: 1738607 - RNA, 19 nt, Artificial Sequence
  Description of Artificial Sequence: Synthetic oligonucleotide
uaccuuaacugcaacucau

SEQ ID NO: 1738608 - RNA, 19 nt, Artificial Sequence
  Description of Artificial Sequence: Synthetic oligonucleotide
uccuuccccaucaaugacu

SEQ ID NO: 1738609 - RNA, 19 nt, Artificial Sequence
  Description of Artificial Sequence: Synthetic oligonucleotide
uaccgcaaaccaaggagca

SEQ ID NO: 1738610 - RNA, 19 nt, Artificial Sequence
  Description of Artificial Sequence: Synthetic oligonucleotide
caggaaggugccaagguuc

SEQ ID NO: 1738611 - RNA, 19 nt, Artificial Sequence
  Description of Artificial Sequence: Synthetic oligonucleotide
ucccacuccagccuuaaua

SEQ ID NO: 1738612 - RNA, 19 nt, Artificial Sequence
  Description of Artificial Sequence: Synthetic oligonucleotide
gacuaaugccauccugacc

SEQ ID NO: 1738613 - RNA, 19 nt, Artificial Sequence
  Description of Artificial Sequence: Synthetic oligonucleotide
uaauaacccucugcuagcc

SEQ ID NO: 1738614 - RNA, 19 nt, Artificial Sequence
  Description of Artificial Sequence: Synthetic oligonucleotide
uuggccugacaguagccag

SEQ ID NO: 1738615 - RNA, 19 nt, Artificial Sequence
  Description of Artificial Sequence: Synthetic oligonucleotide
ggaggugcccgcuacagag

SEQ ID NO: 1738616 - RNA, 19 nt, Artificial Sequence
  Description of Artificial Sequence: Synthetic oligonucleotide
caaguaccgcaaaccaagg

SEQ ID NO: 1738617 - RNA, 19 nt, Artificial Sequence
  Description of Artificial Sequence: Synthetic oligonucleotide
ucaguaggacuaaugccau

SEQ ID NO: 1738618 - RNA, 19 nt, Artificial Sequence
  Description of Artificial Sequence: Synthetic oligonucleotide
cugucgaggaucgaagagc

SEQ ID NO: 1738619 - RNA, 19 nt, Artificial Sequence
  Description of Artificial Sequence: Synthetic oligonucleotide
uugcugacccauuggacac

SEQ ID NO: 1738620 - RNA, 19 nt, Artificial Sequence
  Description of Artificial Sequence: Synthetic oligonucleotide
guuuucaguauaucucgca

SEQ ID NO: 1738621 - RNA, 19 nt, Artificial Sequence
  Description of Artificial Sequence: Synthetic oligonucleotide
caguauaucucgcagccca

SEQ ID NO: 1738622 - RNA, 19 nt, Artificial Sequence
  Description of Artificial Sequence: Synthetic oligonucleotide
gcaaguaccgcaaaccaag

SEQ ID NO: 1738623 - RNA, 19 nt, Artificial Sequence
  Description of Artificial Sequence: Synthetic oligonucleotide
gacuuacaggcaaaaucag

SEQ ID NO: 1738624 - RNA, 19 nt, Artificial Sequence
  Description of Artificial Sequence: Synthetic oligonucleotide
guagaaccuccuugggagg

SEQ ID NO: 1738625 - RNA, 19 nt, Artificial Sequence
  Description of Artificial Sequence: Synthetic oligonucleotide
ugcauccagacucgcccgg

SEQ ID NO: 1738626 - RNA, 19 nt, Artificial Sequence
  Description of Artificial Sequence: Synthetic oligonucleotide
aaggggacuccaucaauua

SEQ ID NO: 1738627 - RNA, 19 nt, Artificial Sequence
  Description of Artificial Sequence: Synthetic oligonucleotide
cucugcuagcccaauucag

SEQ ID NO: 1738628 - RNA, 19 nt, Artificial Sequence
  Description of Artificial Sequence: Synthetic oligonucleotide
uuggaggggcagcaccacg

SEQ ID NO: 1738629 - RNA, 19 nt, Artificial Sequence
  Description of Artificial Sequence: Synthetic oligonucleotide
aggaagugaagagccgucg

SEQ ID NO: 1738630 - RNA, 19 nt, Artificial Sequence
  Description of Artificial Sequence: Synthetic oligonucleotide
aggacuaaugccauccuga

SEQ ID NO: 1738631 - RNA, 19 nt, Artificial Sequence
  Description of Artificial Sequence: Synthetic oligonucleotide
caauuagguauaacccuuc

SEQ ID NO: 1738632 - RNA, 19 nt, Artificial Sequence
  Description of Artificial Sequence: Synthetic oligonucleotide
gauacgggguuggaggggc

SEQ ID NO: 1738633 - RNA, 19 nt, Artificial Sequence
  Description of Artificial Sequence: Synthetic oligonucleotide
auaucucgcagcccaccag

SEQ ID NO: 1738634 - RNA, 19 nt, Artificial Sequence
  Description of Artificial Sequence: Synthetic oligonucleotide
caaaccaaggagcacuaga

SEQ ID NO: 1738635 - RNA, 19 nt, Artificial Sequence
  Description of Artificial Sequence: Synthetic oligonucleotide
agugaagagccgucggggu

SEQ ID NO: 1738636 - RNA, 19 nt, Artificial Sequence
  Description of Artificial Sequence: Synthetic oligonucleotide
augacguccgcaacagugg

SEQ ID NO: 1738637 - RNA, 19 nt, Artificial Sequence
  Description of Artificial Sequence: Synthetic oligonucleotide
acgguugcugacccauugg

SEQ ID NO: 1738638 - RNA, 19 nt, Artificial Sequence
  Description of Artificial Sequence: Synthetic oligonucleotide
uagguugggcugucgagga

SEQ ID NO: 1738639 - RNA, 19 nt, Artificial Sequence
  Description of Artificial Sequence: Synthetic oligonucleotide
gguugcaacaggagaaggg

SEQ ID NO: 1738640 - RNA, 19 nt, Artificial Sequence
  Description of Artificial Sequence: Synthetic oligonucleotide
agucguuuggccugacagu

SEQ ID NO: 1738641 - RNA, 19 nt, Artificial Sequence
  Description of Artificial Sequence: Synthetic oligonucleotide
uccggucaaccacaucuug

SEQ ID NO: 1738642 - RNA, 19 nt, Artificial Sequence
  Description of Artificial Sequence: Synthetic oligonucleotide
uuuagguuacuaggccuca

SEQ ID NO: 1738643 - RNA, 19 nt, Artificial Sequence
  Description of Artificial Sequence: Synthetic oligonucleotide
accacaucuuggucacugg

SEQ ID NO: 1738644 - RNA, 19 nt, Artificial Sequence
  Description of Artificial Sequence: Synthetic oligonucleotide
acaccaaaccaauccuugu

SEQ ID NO: 1738645 - RNA, 19 nt, Artificial Sequence
  Description of Artificial Sequence: Synthetic oligonucleotide
ugaaccaaggcagccucca

SEQ ID NO: 1738646 - RNA, 19 nt, Artificial Sequence
  Description of Artificial Sequence: Synthetic oligonucleotide
uguccuuguagugaaccaa

SEQ ID NO: 1738647 - RNA, 19 nt, Artificial Sequence
  Description of Artificial Sequence: Synthetic oligonucleotide
uuacuaggccucagguaga

SEQ ID NO: 1738648 - RNA, 19 nt, Artificial Sequence
  Description of Artificial Sequence: Synthetic oligonucleotide
gaaggugccaagguuccac

SEQ ID NO: 1738649 - RNA, 19 nt, Artificial Sequence
  Description of Artificial Sequence: Synthetic oligonucleotide
cuaguccugugccuagagc

SEQ ID NO: 1738650 - RNA, 19 nt, Artificial Sequence
  Description of Artificial Sequence: Synthetic oligonucleotide
ucguuuggccugacaguag

SEQ ID NO: 1738651 - RNA, 19 nt, Artificial Sequence
  Description of Artificial Sequence: Synthetic oligonucleotide
guagugaaccaaggcagcc

SEQ ID NO: 1738652 - RNA, 19 nt, Artificial Sequence
  Description of Artificial Sequence: Synthetic oligonucleotide
guuuagguugggcugucga

SEQ ID NO: 1738653 - RNA, 19 nt, Artificial Sequence
  Description of Artificial Sequence: Synthetic oligonucleotide
ucugcccaaggaagugaag

SEQ ID NO: 1738654 - RNA, 19 nt, Artificial Sequence
  Description of Artificial Sequence: Synthetic oligonucleotide
guagccaugacguccgcaa

SEQ ID NO: 1738655 - RNA, 19 nt, Artificial Sequence
  Description of Artificial Sequence: Synthetic oligonucleotide
guuagccccaaggcaaggg

SEQ ID NO: 1738656 - RNA, 19 nt, Artificial Sequence
  Description of Artificial Sequence: Synthetic oligonucleotide
guagggccucuucaggugc

SEQ ID NO: 1738657 - RNA, 19 nt, Artificial Sequence
  Description of Artificial Sequence: Synthetic oligonucleotide
gagagucggcuuugcaggc

SEQ ID NO: 1738658 - RNA, 19 nt, Artificial Sequence
  Description of Artificial Sequence: Synthetic oligonucleotide
guccuuguagugaaccaag

SEQ ID NO: 1738659 - RNA, 19 nt, Artificial Sequence
  Description of Artificial Sequence: Synthetic oligonucleotide
ugacguccgcaacaguggu

SEQ ID NO: 1738660 - RNA, 19 nt, Artificial Sequence
  Description of Artificial Sequence: Synthetic oligonucleotide
aguauaucucgcagcccac

SEQ ID NO: 1738661 - RNA, 19 nt, Artificial Sequence
  Description of Artificial Sequence: Synthetic oligonucleotide
ugggcccagagguuuaggu

SEQ ID NO: 1738662 - RNA, 19 nt, Artificial Sequence
  Description of Artificial Sequence: Synthetic oligonucleotide
ucaguauaucucgcagccc

SEQ ID NO: 1738663 - RNA, 19 nt, Artificial Sequence
  Description of Artificial Sequence: Synthetic oligonucleotide
ugccuagagccaccgcucc

SEQ ID NO: 1738664 - RNA, 19 nt, Artificial Sequence
  Description of Artificial Sequence: Synthetic oligonucleotide
gugcccgcuacagaggagg

SEQ ID NO: 1738665 - RNA, 19 nt, Artificial Sequence
  Description of Artificial Sequence: Synthetic oligonucleotide
cucgccaaggaggguaucg

SEQ ID NO: 1738666 - RNA, 19 nt, Artificial Sequence
  Description of Artificial Sequence: Synthetic oligonucleotide
guugggcugucgaggaucg

SEQ ID NO: 1738667 - RNA, 19 nt, Artificial Sequence
  Description of Artificial Sequence: Synthetic oligonucleotide
auuggacaccaaaccaauc

SEQ ID NO: 1738668 - RNA, 19 nt, Artificial Sequence
  Description of Artificial Sequence: Synthetic oligonucleotide
gacggauacgggguuggag

SEQ ID NO: 1738669 - RNA, 19 nt, Artificial Sequence
  Description of Artificial Sequence: Synthetic oligonucleotide
gagcagaugggcauaggga

SEQ ID NO: 1738670 - RNA, 19 nt, Artificial Sequence
  Description of Artificial Sequence: Synthetic oligonucleotide
ugaaucagcccagccuggc

SEQ ID NO: 1738671 - RNA, 19 nt, Artificial Sequence
  Description of Artificial Sequence: Synthetic oligonucleotide
uguagccaugcaguuuuca

SEQ ID NO: 1738672 - RNA, 19 nt, Artificial Sequence
  Description of Artificial Sequence: Synthetic oligonucleotide
cagcaugcuucccagugug

SEQ ID NO: 1738673 - RNA, 19 nt, Artificial Sequence
  Description of Artificial Sequence: Synthetic oligonucleotide
gaccccucgccaaggaggg

SEQ ID NO: 1738674 - RNA, 19 nt, Artificial Sequence
  Description of Artificial Sequence: Synthetic oligonucleotide
aggagaggagccagagccc

SEQ ID NO: 1738675 - RNA, 19 nt, Artificial Sequence
  Description of Artificial Sequence: Synthetic oligonucleotide
cagguagaaccuccuuggg

SEQ ID NO: 1738676 - RNA, 19 nt, Artificial Sequence
  Description of Artificial Sequence: Synthetic oligonucleotide
accuuaacugcaacucauc

SEQ ID NO: 1738677 - RNA, 19 nt, Artificial Sequence
  Description of Artificial Sequence: Synthetic oligonucleotide
uagugaaccaaggcagccu

SEQ ID NO: 1738678 - RNA, 19 nt, Artificial Sequence
  Description of Artificial Sequence: Synthetic oligonucleotide
uggacucaggaccccucgc

SEQ ID NO: 1738679 - RNA, 19 nt, Artificial Sequence
  Description of Artificial Sequence: Synthetic oligonucleotide
uccagcgcugucugcaagu

SEQ ID NO: 1738680 - RNA, 19 nt, Artificial Sequence
  Description of Artificial Sequence: Synthetic oligonucleotide
agacucgcccggcuggcuc

SEQ ID NO: 1738681 - RNA, 19 nt, Artificial Sequence
  Description of Artificial Sequence: Synthetic oligonucleotide
accucauggcacccuuggg

SEQ ID NO: 1738682 - RNA, 19 nt, Artificial Sequence
  Description of Artificial Sequence: Synthetic oligonucleotide
agaaggggacuccaucaau

SEQ ID NO: 1738683 - RNA, 19 nt, Artificial Sequence
  Description of Artificial Sequence: Synthetic oligonucleotide
cugcaaguaccgcaaacca

SEQ ID NO: 1738684 - RNA, 19 nt, Artificial Sequence
  Description of Artificial Sequence: Synthetic oligonucleotide
ugcccgcuacagaggaggg

SEQ ID NO: 1738685 - RNA, 19 nt, Artificial Sequence
  Description of Artificial Sequence: Synthetic oligonucleotide
aggguugcaacaggagaag

SEQ ID NO: 1738686 - RNA, 19 nt, Artificial Sequence
  Description of Artificial Sequence: Synthetic oligonucleotide
gggaauggacaagagggag

SEQ ID NO: 1738687 - RNA, 19 nt, Artificial Sequence
  Description of Artificial Sequence: Synthetic oligonucleotide
augcaguuuucaguauauc

SEQ ID NO: 1738688 - RNA, 19 nt, Artificial Sequence
  Description of Artificial Sequence: Synthetic oligonucleotide
aggugccaagguuccacag

SEQ ID NO: 1738689 - RNA, 19 nt, Artificial Sequence
  Description of Artificial Sequence: Synthetic oligonucleotide
acaggcaaaaucaggguua

SEQ ID NO: 1738690 - RNA, 19 nt, Artificial Sequence
  Description of Artificial Sequence: Synthetic oligonucleotide
aacucauccaucagucguu

SEQ ID NO: 1738691 - RNA, 19 nt, Artificial Sequence
  Description of Artificial Sequence: Synthetic oligonucleotide
gauagcccugggucucucc

SEQ ID NO: 1738692 - RNA, 19 nt, Artificial Sequence
  Description of Artificial Sequence: Synthetic oligonucleotide
ucgcagcccaccaggaaaa

SEQ ID NO: 1738693 - RNA, 19 nt, Artificial Sequence
  Description of Artificial Sequence: Synthetic oligonucleotide
ucucugcccaaggaaguga

SEQ ID NO: 1738694 - RNA, 19 nt, Artificial Sequence
  Description of Artificial Sequence: Synthetic oligonucleotide
uagaaccuccuugggaggu

SEQ ID NO: 1738695 - RNA, 19 nt, Artificial Sequence
  Description of Artificial Sequence: Synthetic oligonucleotide
guauaucucgcagcccacc

SEQ ID NO: 1738696 - RNA, 19 nt, Artificial Sequence
  Description of Artificial Sequence: Synthetic oligonucleotide
ucaggaccccucgccaagg

SEQ ID NO: 1738697 - RNA, 19 nt, Artificial Sequence
  Description of Artificial Sequence: Synthetic oligonucleotide
uccaucaauuagguauaac

SEQ ID NO: 1738698 - RNA, 19 nt, Artificial Sequence
  Description of Artificial Sequence: Synthetic oligonucleotide
gcugucgaggaucgaagag

SEQ ID NO: 1738699 - RNA, 19 nt, Artificial Sequence
  Description of Artificial Sequence: Synthetic oligonucleotide
ggugagugaggguugcaac

SEQ ID NO: 1738700 - RNA, 19 nt, Artificial Sequence
  Description of Artificial Sequence: Synthetic oligonucleotide
ggugccaagguuccacagc

SEQ ID NO: 1738701 - RNA, 19 nt, Artificial Sequence
  Description of Artificial Sequence: Synthetic oligonucleotide
cugcuagcccaauucagga

SEQ ID NO: 1738702 - RNA, 19 nt, Artificial Sequence
  Description of Artificial Sequence: Synthetic oligonucleotide
aggugcccgcuacagagga

SEQ ID NO: 1738703 - RNA, 19 nt, Artificial Sequence
  Description of Artificial Sequence: Synthetic oligonucleotide
ccuuguagccaugacgucc

SEQ ID NO: 1738704 - RNA, 19 nt, Artificial Sequence
  Description of Artificial Sequence: Synthetic oligonucleotide
gacucaggaccccucgcca

SEQ ID NO: 1738705 - RNA, 19 nt, Artificial Sequence
  Description of Artificial Sequence: Synthetic oligonucleotide
accccaauacccugggcau

SEQ ID NO: 1738706 - RNA, 19 nt, Artificial Sequence
  Description of Artificial Sequence: Synthetic oligonucleotide
ugcagacuuacaggcaaaa

SEQ ID NO: 1738707 - RNA, 19 nt, Artificial Sequence
  Description of Artificial Sequence: Synthetic oligonucleotide
aaugccauccugaccccaa

SEQ ID NO: 1738708 - RNA, 19 nt, Artificial Sequence
  Description of Artificial Sequence: Synthetic oligonucleotide
accgcaaaccaaggagcac

SEQ ID NO: 1738709 - RNA, 19 nt, Artificial Sequence
  Description of Artificial Sequence: Synthetic oligonucleotide
ggaccccucgccaaggagg

SEQ ID NO: 1738710 - RNA, 19 nt, Artificial Sequence
  Description of Artificial Sequence: Synthetic oligonucleotide
caauccuuguagccaugac

SEQ ID NO: 1738711 - RNA, 19 nt, Artificial Sequence
  Description of Artificial Sequence: Synthetic oligonucleotide
ggugcagacuuacaggcaa

SEQ ID NO: 1738712 - RNA, 19 nt, Artificial Sequence
  Description of Artificial Sequence: Synthetic oligonucleotide
caacucauccaucagucgu

SEQ ID NO: 1738713 - RNA, 19 nt, Artificial Sequence
  Description of Artificial Sequence: Synthetic oligonucleotide
ggacuaaugccauccugac

SEQ ID NO: 1738714 - RNA, 19 nt, Artificial Sequence
  Description of Artificial Sequence: Synthetic oligonucleotide
uccccaucaaugacuccuc

SEQ ID NO: 1738715 - RNA, 19 nt, Artificial Sequence
  Description of Artificial Sequence: Synthetic oligonucleotide
cagugguaccuuaacugca

SEQ ID NO: 1738716 - RNA, 19 nt, Artificial Sequence
  Description of Artificial Sequence: Synthetic oligonucleotide
cagacggauacgggguugg

SEQ ID NO: 1738717 - RNA, 19 nt, Artificial Sequence
  Description of Artificial Sequence: Synthetic oligonucleotide
agcaugcuucccagugugc

SEQ ID NO: 1738718 - RNA, 19 nt, Artificial Sequence
  Description of Artificial Sequence: Synthetic oligonucleotide
ugggcugucgaggaucgaa

SEQ ID NO: 1738719 - RNA, 19 nt, Artificial Sequence
  Description of Artificial Sequence: Synthetic oligonucleotide
gccuuaauaacccucugcu

SEQ ID NO: 1738720 - RNA, 19 nt, Artificial Sequence
  Description of Artificial Sequence: Synthetic oligonucleotide
uguagccaugacguccgca

SEQ ID NO: 1738721 - RNA, 19 nt, Artificial Sequence
  Description of Artificial Sequence: Synthetic oligonucleotide
cuggauccggucaaccaca

SEQ ID NO: 1738722 - RNA, 19 nt, Artificial Sequence
  Description of Artificial Sequence: Synthetic oligonucleotide
gacaagagggagccaggaa

SEQ ID NO: 1738723 - RNA, 19 nt, Artificial Sequence
  Description of Artificial Sequence: Synthetic oligonucleotide
cucaggaccccucgccaag

SEQ ID NO: 1738724 - RNA, 19 nt, Artificial Sequence
  Description of Artificial Sequence: Synthetic oligonucleotide
uugggagguuccucuucug

SEQ ID NO: 1738725 - RNA, 19 nt, Artificial Sequence
  Description of Artificial Sequence: Synthetic oligonucleotide
ugccaagguuccacagcug

SEQ ID NO: 1738726 - RNA, 19 nt, Artificial Sequence
  Description of Artificial Sequence: Synthetic oligonucleotide
aggaccccucgccaaggag

SEQ ID NO: 1738727 - RNA, 19 nt, Artificial Sequence
  Description of Artificial Sequence: Synthetic oligonucleotide
accacgggcagcaccggcg

SEQ ID NO: 1738728 - RNA, 19 nt, Artificial Sequence
  Description of Artificial Sequence: Synthetic oligonucleotide
ugugcccgacaaacccugc

SEQ ID NO: 1738729 - RNA, 19 nt, Artificial Sequence
  Description of Artificial Sequence: Synthetic oligonucleotide
aucucugcccaaggaagug

SEQ ID NO: 1738730 - RNA, 19 nt, Artificial Sequence
  Description of Artificial Sequence: Synthetic oligonucleotide
ucacugggguccagguaac

SEQ ID NO: 1738731 - RNA, 19 nt, Artificial Sequence
  Description of Artificial Sequence: Synthetic oligonucleotide
ccaaggaagugaagagccg

SEQ ID NO: 1738732 - RNA, 19 nt, Artificial Sequence
  Description of Artificial Sequence: Synthetic oligonucleotide
gccagcaugcuucccagug

SEQ ID NO: 1738733 - RNA, 19 nt, Artificial Sequence
  Description of Artificial Sequence: Synthetic oligonucleotide
gccauccugaccccaauac

SEQ ID NO: 1738734 - RNA, 19 nt, Artificial Sequence
  Description of Artificial Sequence: Synthetic oligonucleotide
ggacucaggaccccucgcc

SEQ ID NO: 1738735 - RNA, 19 nt, Artificial Sequence
  Description of Artificial Sequence: Synthetic oligonucleotide
cugcgccagacggauacgg

SEQ ID NO: 1738736 - RNA, 19 nt, Artificial Sequence
  Description of Artificial Sequence: Synthetic oligonucleotide
cgacaaacccugcaggugc

SEQ ID NO: 1738737 - RNA, 19 nt, Artificial Sequence
  Description of Artificial Sequence: Synthetic oligonucleotide
aagauagcccugggucucu

SEQ ID NO: 1738738 - RNA, 19 nt, Artificial Sequence
  Description of Artificial Sequence: Synthetic oligonucleotide
ccaucagucguuuggccug

SEQ ID NO: 1738739 - RNA, 19 nt, Artificial Sequence
  Description of Artificial Sequence: Synthetic oligonucleotide
acuccaucaauuagguaua

SEQ ID NO: 1738740 - RNA, 19 nt, Artificial Sequence
  Description of Artificial Sequence: Synthetic oligonucleotide
aauggacaagagggagcca

SEQ ID NO: 1738741 - RNA, 19 nt, Artificial Sequence
  Description of Artificial Sequence: Synthetic oligonucleotide
gaggagggugaggccaccg

SEQ ID NO: 1738742 - RNA, 19 nt, Artificial Sequence
  Description of Artificial Sequence: Synthetic oligonucleotide
ucucgcagcccaccaggaa

SEQ ID NO: 1738743 - RNA, 19 nt, Artificial Sequence
  Description of Artificial Sequence: Synthetic oligonucleotide
uaaugccauccugacccca

SEQ ID NO: 1738744 - RNA, 19 nt, Artificial Sequence
  Description of Artificial Sequence: Synthetic oligonucleotide
aguggacucaggaccccuc

SEQ ID NO: 1738745 - RNA, 19 nt, Artificial Sequence
  Description of Artificial Sequence: Synthetic oligonucleotide
agagccccugcgccagacg

SEQ ID NO: 1738746 - RNA, 19 nt, Artificial Sequence
  Description of Artificial Sequence: Synthetic oligonucleotide
ucgccaaggaggguaucga

SEQ ID NO: 1738747 - RNA, 19 nt, Artificial Sequence
  Description of Artificial Sequence: Synthetic oligonucleotide
agugugcccgacaaacccu

SEQ ID NO: 1738748 - RNA, 19 nt, Artificial Sequence
  Description of Artificial Sequence: Synthetic oligonucleotide
cucgcagcccaccaggaaa

SEQ ID NO: 1738749 - RNA, 19 nt, Artificial Sequence
  Description of Artificial Sequence: Synthetic oligonucleotide
gcccgacaaacccugcagg

SEQ ID NO: 1738750 - RNA, 19 nt, Artificial Sequence
  Description of Artificial Sequence: Synthetic oligonucleotide
gaagagccgucgggguugg

SEQ ID NO: 1738751 - RNA, 19 nt, Artificial Sequence
  Description of Artificial Sequence: Synthetic oligonucleotide
uacgggguuggaggggcag

SEQ ID NO: 1738752 - RNA, 19 nt, Artificial Sequence
  Description of Artificial Sequence: Synthetic oligonucleotide
acucaggaccccucgccaa

SEQ ID NO: 1738753 - RNA, 19 nt, Artificial Sequence
  Description of Artificial Sequence: Synthetic oligonucleotide
uccuuguagccaugacguc

SEQ ID NO: 1738754 - RNA, 19 nt, Artificial Sequence
  Description of Artificial Sequence: Synthetic oligonucleotide
ggcagucccucccuguagc

SEQ ID NO: 1738755 - RNA, 19 nt, Artificial Sequence
  Description of Artificial Sequence: Synthetic oligonucleotide
acuaggccucagguagaac

SEQ ID NO: 1738756 - RNA, 19 nt, Artificial Sequence
  Description of Artificial Sequence: Synthetic oligonucleotide
ccauccugaccccaauacc

SEQ ID NO: 1738757 - RNA, 19 nt, Artificial Sequence
  Description of Artificial Sequence: Synthetic oligonucleotide
gagucggcuuugcaggcaa

SEQ ID NO: 1738758 - RNA, 19 nt, Artificial Sequence
  Description of Artificial Sequence: Synthetic oligonucleotide
ggguuggaggggcagcacc

SEQ ID NO: 1738759 - RNA, 19 nt, Artificial Sequence
  Description of Artificial Sequence: Synthetic oligonucleotide
ugcugacccauuggacacc

SEQ ID NO: 1738760 - RNA, 19 nt, Artificial Sequence
  Description of Artificial Sequence: Synthetic oligonucleotide
caccaaaccaauccuugua

SEQ ID NO: 1738761 - RNA, 19 nt, Artificial Sequence
  Description of Artificial Sequence: Synthetic oligonucleotide
cauuggacaccaaaccaau

SEQ ID NO: 1738762 - RNA, 19 nt, Artificial Sequence
  Description of Artificial Sequence: Synthetic oligonucleotide
cuuccccaucaaugacucc

SEQ ID NO: 1738763 - RNA, 19 nt, Artificial Sequence
  Description of Artificial Sequence: Synthetic oligonucleotide
uuguagccaugacguccgc

SEQ ID NO: 1738764 - RNA, 19 nt, Artificial Sequence
  Description of Artificial Sequence: Synthetic oligonucleotide
aggagcacuagagccugca

SEQ ID NO: 1738765 - RNA, 19 nt, Artificial Sequence
  Description of Artificial Sequence: Synthetic oligonucleotide
gugugcccgacaaacccug

SEQ ID NO: 1738766 - RNA, 19 nt, Artificial Sequence
  Description of Artificial Sequence: Synthetic oligonucleotide
gcaagggccagcaacccac

SEQ ID NO: 1738767 - RNA, 19 nt, Artificial Sequence
  Description of Artificial Sequence: Synthetic oligonucleotide
aggaggugcccgcuacaga

SEQ ID NO: 1738768 - RNA, 19 nt, Artificial Sequence
  Description of Artificial Sequence: Synthetic oligonucleotide
gguuacuaggccucaggua

SEQ ID NO: 1738769 - RNA, 19 nt, Artificial Sequence
  Description of Artificial Sequence: Synthetic oligonucleotide
agaaggugacagccagcau

SEQ ID NO: 1738770 - RNA, 19 nt, Artificial Sequence
  Description of Artificial Sequence: Synthetic oligonucleotide
gaaccuccuugggagguuc

SEQ ID NO: 1738771 - RNA, 19 nt, Artificial Sequence
  Description of Artificial Sequence: Synthetic oligonucleotide
ggcuucaguaggacuaaug

SEQ ID NO: 1738772 - RNA, 19 nt, Artificial Sequence
  Description of Artificial Sequence: Synthetic oligonucleotide
ucccuguagccaugcaguu

SEQ ID NO: 1738773 - RNA, 19 nt, Artificial Sequence
  Description of Artificial Sequence: Synthetic oligonucleotide
agguuuagguugggcuguc

SEQ ID NO: 1738774 - RNA, 19 nt, Artificial Sequence
  Description of Artificial Sequence: Synthetic oligonucleotide
caguaggacuaaugccauc

SEQ ID NO: 1738775 - RNA, 19 nt, Artificial Sequence
  Description of Artificial Sequence: Synthetic oligonucleotide
uccgcaacagugguaccuu

SEQ ID NO: 1738776 - RNA, 19 nt, Artificial Sequence
  Description of Artificial Sequence: Synthetic oligonucleotide
caacccaccgccugcagcu

SEQ ID NO: 1738777 - RNA, 19 nt, Artificial Sequence
  Description of Artificial Sequence: Synthetic oligonucleotide
cccauuggacaccaaacca

SEQ ID NO: 1738778 - RNA, 19 nt, Artificial Sequence
  Description of Artificial Sequence: Synthetic oligonucleotide
agcaacccaccgccugcag

SEQ ID NO: 1738779 - RNA, 19 nt, Artificial Sequence
  Description of Artificial Sequence: Synthetic oligonucleotide
aagccccuccagcgcuguc

SEQ ID NO: 1738780 - RNA, 19 nt, Artificial Sequence
  Description of Artificial Sequence: Synthetic oligonucleotide
cucugcccaaggaagugaa

SEQ ID NO: 1738781 - RNA, 19 nt, Artificial Sequence
  Description of Artificial Sequence: Synthetic oligonucleotide
cguuuggccugacaguagc

SEQ ID NO: 1738782 - RNA, 19 nt, Artificial Sequence
  Description of Artificial Sequence: Synthetic oligonucleotide
gccaugacguccgcaacag

SEQ ID NO: 1738783 - RNA, 19 nt, Artificial Sequence
  Description of Artificial Sequence: Synthetic oligonucleotide
cugccagcaguggacucag

SEQ ID NO: 1738784 - RNA, 19 nt, Artificial Sequence
  Description of Artificial Sequence: Synthetic oligonucleotide
gguugcugacccauuggac

SEQ ID NO: 1738785 - RNA, 19 nt, Artificial Sequence
  Description of Artificial Sequence: Synthetic oligonucleotide
gucccuggugcagacuuac

SEQ ID NO: 1738786 - RNA, 19 nt, Artificial Sequence
  Description of Artificial Sequence: Synthetic oligonucleotide
uaacgguugcugacccauu

SEQ ID NO: 1738787 - RNA, 19 nt, Artificial Sequence
  Description of Artificial Sequence: Synthetic oligonucleotide
cccaauacccugggcaucc

SEQ ID NO: 1738788 - RNA, 19 nt, Artificial Sequence
  Description of Artificial Sequence: Synthetic oligonucleotide
caaggaagugaagagccgu

SEQ ID NO: 1738789 - RNA, 19 nt, Artificial Sequence
  Description of Artificial Sequence: Synthetic oligonucleotide
agauagcccugggucucuc

SEQ ID NO: 1738790 - RNA, 19 nt, Artificial Sequence
  Description of Artificial Sequence: Synthetic oligonucleotide
ggauacgggguuggagggg

SEQ ID NO: 1738791 - RNA, 19 nt, Artificial Sequence
  Description of Artificial Sequence: Synthetic oligonucleotide
guaacgguugcugacccau

SEQ ID NO: 1738792 - RNA, 19 nt, Artificial Sequence
  Description of Artificial Sequence: Synthetic oligonucleotide
cccgcuacagaggagggug

SEQ ID NO: 1738793 - RNA, 19 nt, Artificial Sequence
  Description of Artificial Sequence: Synthetic oligonucleotide
agagucggcuuugcaggca

SEQ ID NO: 1738794 - RNA, 19 nt, Artificial Sequence
  Description of Artificial Sequence: Synthetic oligonucleotide
cugugccaggaggugcccg

SEQ ID NO: 1738795 - RNA, 19 nt, Artificial Sequence
  Description of Artificial Sequence: Synthetic oligonucleotide
gguuuagguugggcugucg

SEQ ID NO: 1738796 - RNA, 19 nt, Artificial Sequence
  Description of Artificial Sequence: Synthetic oligonucleotide
acucauccaucagucguuu

SEQ ID NO: 1738797 - RNA, 19 nt, Artificial Sequence
  Description of Artificial Sequence: Synthetic oligonucleotide
ccaagguuccacagcugug

SEQ ID NO: 1738798 - RNA, 19 nt, Artificial Sequence
  Description of Artificial Sequence: Synthetic oligonucleotide
ccuaguccugugccuagag

SEQ ID NO: 1738799 - RNA, 19 nt, Artificial Sequence
  Description of Artificial Sequence: Synthetic oligonucleotide
guaggacuaaugccauccu

SEQ ID NO: 1738800 - RNA, 19 nt, Artificial Sequence
  Description of Artificial Sequence: Synthetic oligonucleotide
ucgcccggcuggcuccugc

SEQ ID NO: 1738801 - RNA, 19 nt, Artificial Sequence
  Description of Artificial Sequence: Synthetic oligonucleotide
gguuagccccaaggcaagg

SEQ ID NO: 1738802 - RNA, 19 nt, Artificial Sequence
  Description of Artificial Sequence: Synthetic oligonucleotide
cagaugggcauagggaucu

SEQ ID NO: 1738803 - RNA, 19 nt, Artificial Sequence
  Description of Artificial Sequence: Synthetic oligonucleotide
gugccuagagccaccgcuc

SEQ ID NO: 1738804 - RNA, 19 nt, Artificial Sequence
  Description of Artificial Sequence: Synthetic oligonucleotide
cccugcgccagacggauac

SEQ ID NO: 1738805 - RNA, 19 nt, Artificial Sequence
  Description of Artificial Sequence: Synthetic oligonucleotide
cagcgcugucugcaaguac

SEQ ID NO: 1738806 - RNA, 19 nt, Artificial Sequence
  Description of Artificial Sequence: Synthetic oligonucleotide
gggcugucgaggaucgaag

SEQ ID NO: 1738807 - RNA, 19 nt, Artificial Sequence
  Description of Artificial Sequence: Synthetic oligonucleotide
gccagcaacccaccgccug

SEQ ID NO: 1738808 - RNA, 19 nt, Artificial Sequence
  Description of Artificial Sequence: Synthetic oligonucleotide
gucgaggaucgaagagcag

SEQ ID NO: 1738809 - RNA, 19 nt, Artificial Sequence
  Description of Artificial Sequence: Synthetic oligonucleotide
aacccaccgccugcagcug

SEQ ID NO: 1738810 - RNA, 19 nt, Artificial Sequence
  Description of Artificial Sequence: Synthetic oligonucleotide
cuguagccaugcaguuuuc

SEQ ID NO: 1738811 - RNA, 19 nt, Artificial Sequence
  Description of Artificial Sequence: Synthetic oligonucleotide
cugugccuagagccaccgc

SEQ ID NO: 1738812 - RNA, 19 nt, Artificial Sequence
  Description of Artificial Sequence: Synthetic oligonucleotide
gccaagguuccacagcugu

SEQ ID NO: 1738813 - RNA, 19 nt, Artificial Sequence
  Description of Artificial Sequence: Synthetic oligonucleotide
aucagucguuuggccugac

SEQ ID NO: 1738814 - RNA, 19 nt, Artificial Sequence
  Description of Artificial Sequence: Synthetic oligonucleotide
ggcacccuugggcccagag

SEQ ID NO: 1738815 - RNA, 19 nt, Artificial Sequence
  Description of Artificial Sequence: Synthetic oligonucleotide
ggcauagggaucugagagu

SEQ ID NO: 1738816 - RNA, 19 nt, Artificial Sequence
  Description of Artificial Sequence: Synthetic oligonucleotide
cuucaggugcuggcuugug

SEQ ID NO: 1738817 - RNA, 19 nt, Artificial Sequence
  Description of Artificial Sequence: Synthetic oligonucleotide
gcagucccucccuguagcc

SEQ ID NO: 1738818 - RNA, 19 nt, Artificial Sequence
  Description of Artificial Sequence: Synthetic oligonucleotide
ggguuagccccaaggcaag

SEQ ID NO: 1738819 - RNA, 19 nt, Artificial Sequence
  Description of Artificial Sequence: Synthetic oligonucleotide
gcgcugucugcaaguaccg

SEQ ID NO: 1738820 - RNA, 19 nt, Artificial Sequence
  Description of Artificial Sequence: Synthetic oligonucleotide
gguauaacccuuccacauu

SEQ ID NO: 1738821 - RNA, 19 nt, Artificial Sequence
  Description of Artificial Sequence: Synthetic oligonucleotide
gguaacgguugcugaccca

SEQ ID NO: 1738822 - RNA, 19 nt, Artificial Sequence
  Description of Artificial Sequence: Synthetic oligonucleotide
aucucgcagcccaccagga

SEQ ID NO: 1738823 - RNA, 19 nt, Artificial Sequence
  Description of Artificial Sequence: Synthetic oligonucleotide
gggagguuccucuucuggu

SEQ ID NO: 1738824 - RNA, 19 nt, Artificial Sequence
  Description of Artificial Sequence: Synthetic oligonucleotide
accaauccuuguagccaug

SEQ ID NO: 1738825 - RNA, 19 nt, Artificial Sequence
  Description of Artificial Sequence: Synthetic oligonucleotide
ccuuaauaacccucugcua

SEQ ID NO: 1738826 - RNA, 19 nt, Artificial Sequence
  Description of Artificial Sequence: Synthetic oligonucleotide
guccgcaacagugguaccu

SEQ ID NO: 1738827 - RNA, 19 nt, Artificial Sequence
  Description of Artificial Sequence: Synthetic oligonucleotide
aacccucugcuagcccaau

SEQ ID NO: 1738828 - RNA, 19 nt, Artificial Sequence
  Description of Artificial Sequence: Synthetic oligonucleotide
agaaccuccuugggagguu

SEQ ID NO: 1738829 - RNA, 19 nt, Artificial Sequence
  Description of Artificial Sequence: Synthetic oligonucleotide
agucggcuuugcaggcaag

SEQ ID NO: 1738830 - RNA, 19 nt, Artificial Sequence
  Description of Artificial Sequence: Synthetic oligonucleotide
aggaggguaucgagcugca

SEQ ID NO: 1738831 - RNA, 19 nt, Artificial Sequence
  Description of Artificial Sequence: Synthetic oligonucleotide
acccucugcuagcccaauu

SEQ ID NO: 1738832 - RNA, 19 nt, Artificial Sequence
  Description of Artificial Sequence: Synthetic oligonucleotide
gggacuccaucaauuaggu

SEQ ID NO: 1738833 - RNA, 19 nt, Artificial Sequence
  Description of Artificial Sequence: Synthetic oligonucleotide
uggcuucaguaggacuaau

SEQ ID NO: 1738834 - RNA, 19 nt, Artificial Sequence
  Description of Artificial Sequence: Synthetic oligonucleotide
aagagccgucgggguuggg

SEQ ID NO: 1738835 - RNA, 19 nt, Artificial Sequence
  Description of Artificial Sequence: Synthetic oligonucleotide
agacggauacgggguugga

SEQ ID NO: 1738836 - RNA, 19 nt, Artificial Sequence
  Description of Artificial Sequence: Synthetic oligonucleotide
caucagucguuuggccuga

SEQ ID NO: 1738837 - RNA, 19 nt, Artificial Sequence
  Description of Artificial Sequence: Synthetic oligonucleotide
gugaagagccgucgggguu

SEQ ID NO: 1738838 - RNA, 19 nt, Artificial Sequence
  Description of Artificial Sequence: Synthetic oligonucleotide
ccuguagccaugcaguuuu

SEQ ID NO: 1738839 - RNA, 19 nt, Artificial Sequence
  Description of Artificial Sequence: Synthetic oligonucleotide
ccaugcaguuuucaguaua

SEQ ID NO: 1738840 - RNA, 19 nt, Artificial Sequence
  Description of Artificial Sequence: Synthetic oligonucleotide
gugcagacuuacaggcaaa

SEQ ID NO: 1738841 - RNA, 19 nt, Artificial Sequence
  Description of Artificial Sequence: Synthetic oligonucleotide
ugcuggcuugugggcaguc

SEQ ID NO: 1738842 - RNA, 19 nt, Artificial Sequence
  Description of Artificial Sequence: Synthetic oligonucleotide
uugggcugucgaggaucga

SEQ ID NO: 1738843 - RNA, 19 nt, Artificial Sequence
  Description of Artificial Sequence: Synthetic oligonucleotide
caggaccccucgccaagga

SEQ ID NO: 1738844 - RNA, 19 nt, Artificial Sequence
  Description of Artificial Sequence: Synthetic oligonucleotide
ccaauccuuguagccauga

SEQ ID NO: 1738845 - RNA, 19 nt, Artificial Sequence
  Description of Artificial Sequence: Synthetic oligonucleotide
ccccuaguccugugccuag

SEQ ID NO: 1738846 - RNA, 19 nt, Artificial Sequence
  Description of Artificial Sequence: Synthetic oligonucleotide
ccagacggauacgggguug

SEQ ID NO: 1738847 - RNA, 19 nt, Artificial Sequence
  Description of Artificial Sequence: Synthetic oligonucleotide
auacgggguuggaggggca

SEQ ID NO: 1738848 - RNA, 19 nt, Artificial Sequence
  Description of Artificial Sequence: Synthetic oligonucleotide
ggauccggucaaccacauc

SEQ ID NO: 1738849 - RNA, 19 nt, Artificial Sequence
  Description of Artificial Sequence: Synthetic oligonucleotide
ggugcccgcuacagaggag

SEQ ID NO: 1738850 - RNA, 19 nt, Artificial Sequence
  Description of Artificial Sequence: Synthetic oligonucleotide
cuccagccuuaauaacccu

SEQ ID NO: 1738851 - RNA, 19 nt, Artificial Sequence
  Description of Artificial Sequence: Synthetic oligonucleotide
gcgccaucucccaucucug

SEQ ID NO: 1738852 - RNA, 19 nt, Artificial Sequence
  Description of Artificial Sequence: Synthetic oligonucleotide
ggacuccaucaauuaggua

SEQ ID NO: 1738853 - RNA, 19 nt, Artificial Sequence
  Description of Artificial Sequence: Synthetic oligonucleotide
cauccagacucgcccggcu

SEQ ID NO: 1738854 - RNA, 19 nt, Artificial Sequence
  Description of Artificial Sequence: Synthetic oligonucleotide
gucccucccuguagccaug

SEQ ID NO: 1738855 - RNA, 19 nt, Artificial Sequence
  Description of Artificial Sequence: Synthetic oligonucleotide
agccccugcgccagacgga

SEQ ID NO: 1738856 - RNA, 19 nt, Artificial Sequence
  Description of Artificial Sequence: Synthetic oligonucleotide
cgguugcugacccauugga

SEQ ID NO: 1738857 - RNA, 19 nt, Artificial Sequence
  Description of Artificial Sequence: Synthetic oligonucleotide
ccaagccccuccagcgcug

SEQ ID NO: 1738858 - RNA, 19 nt, Artificial Sequence
  Description of Artificial Sequence: Synthetic oligonucleotide
cccgacaaacccugcaggu

SEQ ID NO: 1738859 - RNA, 19 nt, Artificial Sequence
  Description of Artificial Sequence: Synthetic oligonucleotide
gcaaggccggggugaguga

SEQ ID NO: 1738860 - RNA, 19 nt, Artificial Sequence
  Description of Artificial Sequence: Synthetic oligonucleotide
ccgcaaaccaaggagcacu

SEQ ID NO: 1738861 - RNA, 19 nt, Artificial Sequence
  Description of Artificial Sequence: Synthetic oligonucleotide
ccagacucgcccggcuggc

SEQ ID NO: 1738862 - RNA, 19 nt, Artificial Sequence
  Description of Artificial Sequence: Synthetic oligonucleotide
gggcccagagguuuagguu

SEQ ID NO: 1738863 - RNA, 19 nt, Artificial Sequence
  Description of Artificial Sequence: Synthetic oligonucleotide
cccaccgccugcagcugug

SEQ ID NO: 1738864 - RNA, 19 nt, Artificial Sequence
  Description of Artificial Sequence: Synthetic oligonucleotide
ccugcgccagacggauacg

SEQ ID NO: 1738865 - RNA, 19 nt, Artificial Sequence
  Description of Artificial Sequence: Synthetic oligonucleotide
ggguaucgagcugcaucca

SEQ ID NO: 1738866 - RNA, 19 nt, Artificial Sequence
  Description of Artificial Sequence: Synthetic oligonucleotide
gccccaaggcaagggccag

SEQ ID NO: 1738867 - RNA, 19 nt, Artificial Sequence
  Description of Artificial Sequence: Synthetic oligonucleotide
cccagagguuuagguuggg

SEQ ID NO: 1738868 - RNA, 19 nt, Artificial Sequence
  Description of Artificial Sequence: Synthetic oligonucleotide
cgcaacagugguaccuuaa

SEQ ID NO: 1738869 - RNA, 19 nt, Artificial Sequence
  Description of Artificial Sequence: Synthetic oligonucleotide
gcaccggcgccaucuccca

SEQ ID NO: 1738870 - RNA, 19 nt, Artificial Sequence
  Description of Artificial Sequence: Synthetic oligonucleotide
gcaccacgggcagcaccgg

SEQ ID NO: 1738871 - RNA, 19 nt, Artificial Sequence
  Description of Artificial Sequence: Synthetic oligonucleotide
cugacccauuggacaccaa

SEQ ID NO: 1738872 - RNA, 19 nt, Artificial Sequence
  Description of Artificial Sequence: Synthetic oligonucleotide
gggguuggaggggcagcac

SEQ ID NO: 1738873 - RNA, 19 nt, Artificial Sequence
  Description of Artificial Sequence: Synthetic oligonucleotide
aggcaaggccggggugagu

SEQ ID NO: 1738874 - RNA, 19 nt, Artificial Sequence
  Description of Artificial Sequence: Synthetic oligonucleotide
cgaggaucgaagagcagau

SEQ ID NO: 1738875 - RNA, 19 nt, Artificial Sequence
  Description of Artificial Sequence: Synthetic oligonucleotide
ccccaauacccugggcauc

SEQ ID NO: 1738876 - RNA, 19 nt, Artificial Sequence
  Description of Artificial Sequence: Synthetic oligonucleotide
ccagcaugcuucccagugu

SEQ ID NO: 1738877 - RNA, 19 nt, Artificial Sequence
  Description of Artificial Sequence: Synthetic oligonucleotide
caguggacucaggaccccu

SEQ ID NO: 1738878 - RNA, 19 nt, Artificial Sequence
  Description of Artificial Sequence: Synthetic oligonucleotide
ccgcuacagaggaggguga

SEQ ID NO: 1738879 - RNA, 19 nt, Artificial Sequence
  Description of Artificial Sequence: Synthetic oligonucleotide
cguccgcaacagugguacc

SEQ ID NO: 1738880 - RNA, 19 nt, Artificial Sequence
  Description of Artificial Sequence: Synthetic oligonucleotide
cgcaaaccaaggagcacua

SEQ ID NO: 1738881 - RNA, 19 nt, Artificial Sequence
  Description of Artificial Sequence: Synthetic oligonucleotide
accccucgccaaggagggu

SEQ ID NO: 1738882 - RNA, 19 nt, Artificial Sequence
  Description of Artificial Sequence: Synthetic oligonucleotide
cgcccggcuggcuccugcg

SEQ ID NO: 1738883 - RNA, 19 nt, Artificial Sequence
  Description of Artificial Sequence: Synthetic oligonucleotide
ccuugggcccagagguuua

SEQ ID NO: 1738884 - RNA, 19 nt, Artificial Sequence
  Description of Artificial Sequence: Synthetic oligonucleotide
cccacacuuuagguuacua

SEQ ID NO: 1738885 - RNA, 19 nt, Artificial Sequence
  Description of Artificial Sequence: Synthetic oligonucleotide
gccucagguagaaccuccu

SEQ ID NO: 1738886 - RNA, 19 nt, Artificial Sequence
  Description of Artificial Sequence: Synthetic oligonucleotide
cgccagacggauacggggu

SEQ ID NO: 1738887 - RNA, 19 nt, Artificial Sequence
  Description of Artificial Sequence: Synthetic oligonucleotide
gccagacggauacgggguu

SEQ ID NO: 1738888 - RNA, 19 nt, Artificial Sequence
  Description of Artificial Sequence: Synthetic oligonucleotide
ccgcaacagugguaccuua

SEQ ID NO: 1738889 - RNA, 19 nt, Artificial Sequence
  Description of Artificial Sequence: Synthetic oligonucleotide
cucgcccggcuggcuccug

SEQ ID NO: 1738890 - RNA, 19 nt, Artificial Sequence
  Description of Artificial Sequence: Synthetic oligonucleotide
cccuaguccugugccuaga

SEQ ID NO: 1738891 - RNA, 19 nt, Artificial Sequence
  Description of Artificial Sequence: Synthetic oligonucleotide
cucccacuccagccuuaau

SEQ ID NO: 1738892 - RNA, 19 nt, Artificial Sequence
  Description of Artificial Sequence: Synthetic oligonucleotide
cagacucgcccggcuggcu

SEQ ID NO: 1738893 - RNA, 19 nt, Artificial Sequence
  Description of Artificial Sequence: Synthetic oligonucleotide
ccucagguagaaccuccuu

SEQ ID NO: 1738894 - RNA, 19 nt, Artificial Sequence
  Description of Artificial Sequence: Synthetic oligonucleotide
ccucccacuccagccuuaa

SEQ ID NO: 1738895 - RNA, 19 nt, Artificial Sequence
  Description of Artificial Sequence: Synthetic oligonucleotide
gccccugcgccagacggau

SEQ ID NO: 1738896 - RNA, 19 nt, Artificial Sequence
  Description of Artificial Sequence: Synthetic oligonucleotide
gcccgcuacagaggagggu

SEQ ID NO: 1738897 - RNA, 19 nt, Artificial Sequence
  Description of Artificial Sequence: Synthetic oligonucleotide
cccucccuguagccaugca

SEQ ID NO: 1738898 - RNA, 19 nt, Artificial Sequence
  Description of Artificial Sequence: Synthetic oligonucleotide
ccggcgccaucucccaucu

SEQ ID NO: 1738899 - RNA, 19 nt, Artificial Sequence
  Description of Artificial Sequence: Synthetic oligonucleotide
ccaugacguccgcaacagu

SEQ ID NO: 1738900 - RNA, 19 nt, Artificial Sequence
  Description of Artificial Sequence: Synthetic oligonucleotide
cccucgccaaggaggguau

SEQ ID NO: 1738901 - RNA, 19 nt, Artificial Sequence
  Description of Artificial Sequence: Synthetic oligonucleotide
cccuugggcccagagguuu

SEQ ID NO: 1738902 - RNA, 19 nt, Artificial Sequence
  Description of Artificial Sequence: Synthetic oligonucleotide
caccggcgccaucucccau

SEQ ID NO: 1738903 - RNA, 19 nt, Artificial Sequence
  Description of Artificial Sequence: Synthetic oligonucleotide
ccagucccuggugcagacu

SEQ ID NO: 1738904 - RNA, 19 nt, Artificial Sequence
  Description of Artificial Sequence: Synthetic oligonucleotide
ccccacacuuuagguuacu

SEQ ID NO: 1738905 - RNA, 19 nt, Artificial Sequence
  Description of Artificial Sequence: Synthetic oligonucleotide
ccccugcgccagacggaua

SEQ ID NO: 1738906 - RNA, 19 nt, Artificial Sequence
  Description of Artificial Sequence: Synthetic oligonucleotide
agagucuucaaauaagucc

SEQ ID NO: 1738907 - RNA, 19 nt, Artificial Sequence
  Description of Artificial Sequence: Synthetic oligonucleotide
aaucaaacauccuuccacc

SEQ ID NO: 1738908 - RNA, 19 nt, Artificial Sequence
  Description of Artificial Sequence: Synthetic oligonucleotide
ugaaauaccaggaaguuca

SEQ ID NO: 1738909 - RNA, 19 nt, Artificial Sequence
  Description of Artificial Sequence: Synthetic oligonucleotide
uuugucaccaaucaucggg

SEQ ID NO: 1738910 - RNA, 19 nt, Artificial Sequence
  Description of Artificial Sequence: Synthetic oligonucleotide
uucaaugccaaauuuaggc

SEQ ID NO: 1738911 - RNA, 19 nt, Artificial Sequence
  Description of Artificial Sequence: Synthetic oligonucleotide
uucucuuugacaauggcag

SEQ ID NO: 1738912 - RNA, 19 nt, Artificial Sequence
  Description of Artificial Sequence: Synthetic oligonucleotide
auauaaaacacacugcucu

SEQ ID NO: 1738913 - RNA, 19 nt, Artificial Sequence
  Description of Artificial Sequence: Synthetic oligonucleotide
aaauuuaggcuucccugcc

SEQ ID NO: 1738914 - RNA, 19 nt, Artificial Sequence
  Description of Artificial Sequence: Synthetic oligonucleotide
agauauaaaacacacugcu

SEQ ID NO: 1738915 - RNA, 19 nt, Artificial Sequence
  Description of Artificial Sequence: Synthetic oligonucleotide
caaggcuaaacacaaaugg

SEQ ID NO: 1738916 - RNA, 19 nt, Artificial Sequence
  Description of Artificial Sequence: Synthetic oligonucleotide
aaucuucccguacugaauc

SEQ ID NO: 1738917 - RNA, 19 nt, Artificial Sequence
  Description of Artificial Sequence: Synthetic oligonucleotide
ucuaucacgacuggaaucg

SEQ ID NO: 1738918 - RNA, 19 nt, Artificial Sequence
  Description of Artificial Sequence: Synthetic oligonucleotide
caaaccuuacacuagacac

SEQ ID NO: 1738919 - RNA, 19 nt, Artificial Sequence
  Description of Artificial Sequence: Synthetic oligonucleotide
uuuucgaagcucuuaagug

SEQ ID NO: 1738920 - RNA, 19 nt, Artificial Sequence
  Description of Artificial Sequence: Synthetic oligonucleotide
aaggcuaaacacaaauggc

SEQ ID NO: 1738921 - RNA, 19 nt, Artificial Sequence
  Description of Artificial Sequence: Synthetic oligonucleotide
uguaacaaaccuuacacua

SEQ ID NO: 1738922 - RNA, 19 nt, Artificial Sequence
  Description of Artificial Sequence: Synthetic oligonucleotide
uuacacuagacacuguuca

SEQ ID NO: 1738923 - RNA, 19 nt, Artificial Sequence
  Description of Artificial Sequence: Synthetic oligonucleotide
ucuacagucuucuugcuca

SEQ ID NO: 1738924 - RNA, 19 nt, Artificial Sequence
  Description of Artificial Sequence: Synthetic oligonucleotide
aaauggcucauuucuauca

SEQ ID NO: 1738925 - RNA, 19 nt, Artificial Sequence
  Description of Artificial Sequence: Synthetic oligonucleotide
aauuccaaugggaaugucg

SEQ ID NO: 1738926 - RNA, 19 nt, Artificial Sequence
  Description of Artificial Sequence: Synthetic oligonucleotide
ucucggaucuuuuacaggc

SEQ ID NO: 1738927 - RNA, 19 nt, Artificial Sequence
  Description of Artificial Sequence: Synthetic oligonucleotide
auaccaggaaguucaauac

SEQ ID NO: 1738928 - RNA, 19 nt, Artificial Sequence
  Description of Artificial Sequence: Synthetic oligonucleotide
cucccuugaaguuacaccg

SEQ ID NO: 1738929 - RNA, 19 nt, Artificial Sequence
  Description of Artificial Sequence: Synthetic oligonucleotide
aaaacacacugcucuuccc

SEQ ID NO: 1738930 - RNA, 19 nt, Artificial Sequence
  Description of Artificial Sequence: Synthetic oligonucleotide
ugacaauuuuccuuuguag

SEQ ID NO: 1738931 - RNA, 19 nt, Artificial Sequence
  Description of Artificial Sequence: Synthetic oligonucleotide
acaauuuuccuuuguagug

SEQ ID NO: 1738932 - RNA, 19 nt, Artificial Sequence
  Description of Artificial Sequence: Synthetic oligonucleotide
aguaauaucuucuccuugu

SEQ ID NO: 1738933 - RNA, 19 nt, Artificial Sequence
  Description of Artificial Sequence: Synthetic oligonucleotide
ucugcaaucaaacauccuu

SEQ ID NO: 1738934 - RNA, 19 nt, Artificial Sequence
  Description of Artificial Sequence: Synthetic oligonucleotide
uuuggauuggaguagcccu

SEQ ID NO: 1738935 - RNA, 19 nt, Artificial Sequence
  Description of Artificial Sequence: Synthetic oligonucleotide
cucauuucuaucacgacug

SEQ ID NO: 1738936 - RNA, 19 nt, Artificial Sequence
  Description of Artificial Sequence: Synthetic oligonucleotide
gaagcuauugguuuugcca

SEQ ID NO: 1738937 - RNA, 19 nt, Artificial Sequence
  Description of Artificial Sequence: Synthetic oligonucleotide
cuugaaguuacaccguucc

SEQ ID NO: 1738938 - RNA, 19 nt, Artificial Sequence
  Description of Artificial Sequence: Synthetic oligonucleotide
uccuuguucaaccacggug

SEQ ID NO: 1738939 - RNA, 19 nt, Artificial Sequence
  Description of Artificial Sequence: Synthetic oligonucleotide
caaauuuaggcuucccugc

SEQ ID NO: 1738940 - RNA, 19 nt, Artificial Sequence
  Description of Artificial Sequence: Synthetic oligonucleotide
aucuuuuacaggccucucc

SEQ ID NO: 1738941 - RNA, 19 nt, Artificial Sequence
  Description of Artificial Sequence: Synthetic oligonucleotide
uucuucaugguagacaccc

SEQ ID NO: 1738942 - RNA, 19 nt, Artificial Sequence
  Description of Artificial Sequence: Synthetic oligonucleotide
ugaaucacagccugcaugu

SEQ ID NO: 1738943 - RNA, 19 nt, Artificial Sequence
  Description of Artificial Sequence: Synthetic oligonucleotide
gaacuuggugaacauauug

SEQ ID NO: 1738944 - RNA, 19 nt, Artificial Sequence
  Description of Artificial Sequence: Synthetic oligonucleotide
cuuuguaguggacauaaac

SEQ ID NO: 1738945 - RNA, 19 nt, Artificial Sequence
  Description of Artificial Sequence: Synthetic oligonucleotide
uuuaauacgccucuaucuu

SEQ ID NO: 1738946 - RNA, 19 nt, Artificial Sequence
  Description of Artificial Sequence: Synthetic oligonucleotide
aauaaguccucuccuuuga

SEQ ID NO: 1738947 - RNA, 19 nt, Artificial Sequence
  Description of Artificial Sequence: Synthetic oligonucleotide
ucuuuuacaggccucuccu

SEQ ID NO: 1738948 - RNA, 19 nt, Artificial Sequence
  Description of Artificial Sequence: Synthetic oligonucleotide
uauugguuuugccauuugc

SEQ ID NO: 1738949 - RNA, 19 nt, Artificial Sequence
  Description of Artificial Sequence: Synthetic oligonucleotide
uugucaccaaucaucgggg

SEQ ID NO: 1738950 - RNA, 19 nt, Artificial Sequence
  Description of Artificial Sequence: Synthetic oligonucleotide
uuucgaagcucuuaagugu

SEQ ID NO: 1738951 - RNA, 19 nt, Artificial Sequence
  Description of Artificial Sequence: Synthetic oligonucleotide
uagucauuguguuuuauaa

SEQ ID NO: 1738952 - RNA, 19 nt, Artificial Sequence
  Description of Artificial Sequence: Synthetic oligonucleotide
uaacaaaccuuacacuaga

SEQ ID NO: 1738953 - RNA, 19 nt, Artificial Sequence
  Description of Artificial Sequence: Synthetic oligonucleotide
uucggauaaugccagaguc

SEQ ID NO: 1738954 - RNA, 19 nt, Artificial Sequence
  Description of Artificial Sequence: Synthetic oligonucleotide
aaucccagagacuguaaca

SEQ ID NO: 1738955 - RNA, 19 nt, Artificial Sequence
  Description of Artificial Sequence: Synthetic oligonucleotide
aaugccaaauuuaggcuuc

SEQ ID NO: 1738956 - RNA, 19 nt, Artificial Sequence
  Description of Artificial Sequence: Synthetic oligonucleotide
uugucaauuccaaugggaa

SEQ ID NO: 1738957 - RNA, 19 nt, Artificial Sequence
  Description of Artificial Sequence: Synthetic oligonucleotide
uuguguuuuauaaguagaa

SEQ ID NO: 1738958 - RNA, 19 nt, Artificial Sequence
  Description of Artificial Sequence: Synthetic oligonucleotide
aaguccucuccuuugaaau

SEQ ID NO: 1738959 - RNA, 19 nt, Artificial Sequence
  Description of Artificial Sequence: Synthetic oligonucleotide
agucauuguguuuuauaag

SEQ ID NO: 1738960 - RNA, 19 nt, Artificial Sequence
  Description of Artificial Sequence: Synthetic oligonucleotide
acuagacacuguucagucc

SEQ ID NO: 1738961 - RNA, 19 nt, Artificial Sequence
  Description of Artificial Sequence: Synthetic oligonucleotide
uuguaguggacauaaacuu

SEQ ID NO: 1738962 - RNA, 19 nt, Artificial Sequence
  Description of Artificial Sequence: Synthetic oligonucleotide
ucucugcaaucaaacaucc

SEQ ID NO: 1738963 - RNA, 19 nt, Artificial Sequence
  Description of Artificial Sequence: Synthetic oligonucleotide
agcauacucugguuuacac

SEQ ID NO: 1738964 - RNA, 19 nt, Artificial Sequence
  Description of Artificial Sequence: Synthetic oligonucleotide
aaccuuacacuagacacug

SEQ ID NO: 1738965 - RNA, 19 nt, Artificial Sequence
  Description of Artificial Sequence: Synthetic oligonucleotide
cuuuccguuugauucuucg

SEQ ID NO: 1738966 - RNA, 19 nt, Artificial Sequence
  Description of Artificial Sequence: Synthetic oligonucleotide
cuccaaaaccguaucgugg

SEQ ID NO: 1738967 - RNA, 19 nt, Artificial Sequence
  Description of Artificial Sequence: Synthetic oligonucleotide
gauucuucggauaaugcca

SEQ ID NO: 1738968 - RNA, 19 nt, Artificial Sequence
  Description of Artificial Sequence: Synthetic oligonucleotide
ugaaguuacaccguucccu

SEQ ID NO: 1738969 - RNA, 19 nt, Artificial Sequence
  Description of Artificial Sequence: Synthetic oligonucleotide
ugcaaucaaacauccuucc

SEQ ID NO: 1738970 - RNA, 19 nt, Artificial Sequence
  Description of Artificial Sequence: Synthetic oligonucleotide
gauaaugccagagucuuca

SEQ ID NO: 1738971 - RNA, 19 nt, Artificial Sequence
  Description of Artificial Sequence: Synthetic oligonucleotide
uaagugugacuucauacau

SEQ ID NO: 1738972 - RNA, 19 nt, Artificial Sequence
  Description of Artificial Sequence: Synthetic oligonucleotide
uccaaaaccguaucguggu

SEQ ID NO: 1738973 - RNA, 19 nt, Artificial Sequence
  Description of Artificial Sequence: Synthetic oligonucleotide
acaaucuuuaauacgccuc

SEQ ID NO: 1738974 - RNA, 19 nt, Artificial Sequence
  Description of Artificial Sequence: Synthetic oligonucleotide
gcuuugucaauuccaaugg

SEQ ID NO: 1738975 - RNA, 19 nt, Artificial Sequence
  Description of Artificial Sequence: Synthetic oligonucleotide
aaaaccguaucguggucca

SEQ ID NO: 1738976 - RNA, 19 nt, Artificial Sequence
  Description of Artificial Sequence: Synthetic oligonucleotide
ucaaacauccuuccaccac

SEQ ID NO: 1738977 - RNA, 19 nt, Artificial Sequence
  Description of Artificial Sequence: Synthetic oligonucleotide
ugacaaucuuuaauacgcc

SEQ ID NO: 1738978 - RNA, 19 nt, Artificial Sequence
  Description of Artificial Sequence: Synthetic oligonucleotide
gacauaaacuuugucacca

SEQ ID NO: 1738979 - RNA, 19 nt, Artificial Sequence
  Description of Artificial Sequence: Synthetic oligonucleotide
cacaucucugcaaucaaac

SEQ ID NO: 1738980 - RNA, 19 nt, Artificial Sequence
  Description of Artificial Sequence: Synthetic oligonucleotide
uggaaucgaacuucuuucc

SEQ ID NO: 1738981 - RNA, 19 nt, Artificial Sequence
  Description of Artificial Sequence: Synthetic oligonucleotide
auuggaguagcccucuccu

SEQ ID NO: 1738982 - RNA, 19 nt, Artificial Sequence
  Description of Artificial Sequence: Synthetic oligonucleotide
uucccguacugaaucacag

SEQ ID NO: 1738983 - RNA, 19 nt, Artificial Sequence
  Description of Artificial Sequence: Synthetic oligonucleotide
aguggacauaaacuuuguc

SEQ ID NO: 1738984 - RNA, 19 nt, Artificial Sequence
  Description of Artificial Sequence: Synthetic oligonucleotide
aacaaaccuuacacuagac

SEQ ID NO: 1738985 - RNA, 19 nt, Artificial Sequence
  Description of Artificial Sequence: Synthetic oligonucleotide
acauaagcucagcauuggg

SEQ ID NO: 1738986 - RNA, 19 nt, Artificial Sequence
  Description of Artificial Sequence: Synthetic oligonucleotide
cauauuggcguacacccug

SEQ ID NO: 1738987 - RNA, 19 nt, Artificial Sequence
  Description of Artificial Sequence: Synthetic oligonucleotide
cuuugucaauuccaauggg

SEQ ID NO: 1738988 - RNA, 19 nt, Artificial Sequence
  Description of Artificial Sequence: Synthetic oligonucleotide
guaguggacauaaacuuug

SEQ ID NO: 1738989 - RNA, 19 nt, Artificial Sequence
  Description of Artificial Sequence: Synthetic oligonucleotide
uguaguggacauaaacuuu

SEQ ID NO: 1738990 - RNA, 19 nt, Artificial Sequence
  Description of Artificial Sequence: Synthetic oligonucleotide
gagccauaagcauacucug

SEQ ID NO: 1738991 - RNA, 19 nt, Artificial Sequence
  Description of Artificial Sequence: Synthetic oligonucleotide
cuuugccaaggcuaaacac

SEQ ID NO: 1738992 - RNA, 19 nt, Artificial Sequence
  Description of Artificial Sequence: Synthetic oligonucleotide
aagcucuuaagugugacuu

SEQ ID NO: 1738993 - RNA, 19 nt, Artificial Sequence
  Description of Artificial Sequence: Synthetic oligonucleotide
guaacaaaccuuacacuag

SEQ ID NO: 1738994 - RNA, 19 nt, Artificial Sequence
  Description of Artificial Sequence: Synthetic oligonucleotide
uacacuagacacuguucag

SEQ ID NO: 1738995 - RNA, 19 nt, Artificial Sequence
  Description of Artificial Sequence: Synthetic oligonucleotide
ucggauaaugccagagucu

SEQ ID NO: 1738996 - RNA, 19 nt, Artificial Sequence
  Description of Artificial Sequence: Synthetic oligonucleotide
ccuuguucaaccacggugg

SEQ ID NO: 1738997 - RNA, 19 nt, Artificial Sequence
  Description of Artificial Sequence: Synthetic oligonucleotide
ucuuccauggccugccucu

SEQ ID NO: 1738998 - RNA, 19 nt, Artificial Sequence
  Description of Artificial Sequence: Synthetic oligonucleotide
uacauaagcucagcauugg

SEQ ID NO: 1738999 - RNA, 19 nt, Artificial Sequence
  Description of Artificial Sequence: Synthetic oligonucleotide
uuuugggaagcuauugguu

SEQ ID NO: 1739000 - RNA, 19 nt, Artificial Sequence
  Description of Artificial Sequence: Synthetic oligonucleotide
uccauuugacaauuuuccu

SEQ ID NO: 1739001 - RNA, 19 nt, Artificial Sequence
  Description of Artificial Sequence: Synthetic oligonucleotide
acgacuggaaucgaacuuc

SEQ ID NO: 1739002 - RNA, 19 nt, Artificial Sequence
  Description of Artificial Sequence: Synthetic oligonucleotide
gacuguaacaaaccuuaca

SEQ ID NO: 1739003 - RNA, 19 nt, Artificial Sequence
  Description of Artificial Sequence: Synthetic oligonucleotide
cuuugcaucccgcuccgcg

SEQ ID NO: 1739004 - RNA, 19 nt, Artificial Sequence
  Description of Artificial Sequence: Synthetic oligonucleotide
uugaaguuacaccguuccc

SEQ ID NO: 1739005 - RNA, 19 nt, Artificial Sequence
  Description of Artificial Sequence: Synthetic oligonucleotide
gagacuguaacaaaccuua

SEQ ID NO: 1739006 - RNA, 19 nt, Artificial Sequence
  Description of Artificial Sequence: Synthetic oligonucleotide
guaaguggcagaccucucc

SEQ ID NO: 1739007 - RNA, 19 nt, Artificial Sequence
  Description of Artificial Sequence: Synthetic oligonucleotide
ugguuuugccauuugcuuc

SEQ ID NO: 1739008 - RNA, 19 nt, Artificial Sequence
  Description of Artificial Sequence: Synthetic oligonucleotide
uucguuuggauuggaguag

SEQ ID NO: 1739009 - RNA, 19 nt, Artificial Sequence
  Description of Artificial Sequence: Synthetic oligonucleotide
auggcucauuucuaucacg

SEQ ID NO: 1739010 - RNA, 19 nt, Artificial Sequence
  Description of Artificial Sequence: Synthetic oligonucleotide
uccuuuguaguggacauaa

SEQ ID NO: 1739011 - RNA, 19 nt, Artificial Sequence
  Description of Artificial Sequence: Synthetic oligonucleotide
uucuaucacgacuggaauc

SEQ ID NO: 1739012 - RNA, 19 nt, Artificial Sequence
  Description of Artificial Sequence: Synthetic oligonucleotide
cuuacacuagacacuguuc

SEQ ID NO: 1739013 - RNA, 19 nt, Artificial Sequence
  Description of Artificial Sequence: Synthetic oligonucleotide
cuuuaauacgccucuaucu

SEQ ID NO: 1739014 - RNA, 19 nt, Artificial Sequence
  Description of Artificial Sequence: Synthetic oligonucleotide
cuuugaaauaccaggaagu

SEQ ID NO: 1739015 - RNA, 19 nt, Artificial Sequence
  Description of Artificial Sequence: Synthetic oligonucleotide
guagacaccccaauguccc

SEQ ID NO: 1739016 - RNA, 19 nt, Artificial Sequence
  Description of Artificial Sequence: Synthetic oligonucleotide
aucacgacuggaaucgaac

SEQ ID NO: 1739017 - RNA, 19 nt, Artificial Sequence
  Description of Artificial Sequence: Synthetic oligonucleotide
auuccaaugggaaugucgu

SEQ ID NO: 1739018 - RNA, 19 nt, Artificial Sequence
  Description of Artificial Sequence: Synthetic oligonucleotide
auaaccuggccuuugccaa

SEQ ID NO: 1739019 - RNA, 19 nt, Artificial Sequence
  Description of Artificial Sequence: Synthetic oligonucleotide
auuucuaucacgacuggaa

SEQ ID NO: 1739020 - RNA, 19 nt, Artificial Sequence
  Description of Artificial Sequence: Synthetic oligonucleotide
ugaacauauuggcguacac

SEQ ID NO: 1739021 - RNA, 19 nt, Artificial Sequence
  Description of Artificial Sequence: Synthetic oligonucleotide
uuaggacucucuucccucc

SEQ ID NO: 1739022 - RNA, 19 nt, Artificial Sequence
  Description of Artificial Sequence: Synthetic oligonucleotide
ucggaucuuuuacaggccu

SEQ ID NO: 1739023 - RNA, 19 nt, Artificial Sequence
  Description of Artificial Sequence: Synthetic oligonucleotide
cucuccuuugaaauaccag

SEQ ID NO: 1739024 - RNA, 19 nt, Artificial Sequence
  Description of Artificial Sequence: Synthetic oligonucleotide
aaccguaucgugguccaag

SEQ ID NO: 1739025 - RNA, 19 nt, Artificial Sequence
  Description of Artificial Sequence: Synthetic oligonucleotide
caaaaccguaucguggucc

SEQ ID NO: 1739026 - RNA, 19 nt, Artificial Sequence
  Description of Artificial Sequence: Synthetic oligonucleotide
uaauacgccucuaucuuuu

SEQ ID NO: 1739027 - RNA, 19 nt, Artificial Sequence
  Description of Artificial Sequence: Synthetic oligonucleotide
auuggcguacacccugcgg

SEQ ID NO: 1739028 - RNA, 19 nt, Artificial Sequence
  Description of Artificial Sequence: Synthetic oligonucleotide
aucaucgggguuuccucac

SEQ ID NO: 1739029 - RNA, 19 nt, Artificial Sequence
  Description of Artificial Sequence: Synthetic oligonucleotide
augucccaggcuuugauaa

SEQ ID NO: 1739030 - RNA, 19 nt, Artificial Sequence
  Description of Artificial Sequence: Synthetic oligonucleotide
uugguuuugccauuugcuu

SEQ ID NO: 1739031 - RNA, 19 nt, Artificial Sequence
  Description of Artificial Sequence: Synthetic oligonucleotide
ucacgacuggaaucgaacu

SEQ ID NO: 1739032 - RNA, 19 nt, Artificial Sequence
  Description of Artificial Sequence: Synthetic oligonucleotide
uuugauaaccuggccuuug

SEQ ID NO: 1739033 - RNA, 19 nt, Artificial Sequence
  Description of Artificial Sequence: Synthetic oligonucleotide
ugucaauuccaaugggaau

SEQ ID NO: 1739034 - RNA, 19 nt, Artificial Sequence
  Description of Artificial Sequence: Synthetic oligonucleotide
agcucuuaagugugacuuc

SEQ ID NO: 1739035 - RNA, 19 nt, Artificial Sequence
  Description of Artificial Sequence: Synthetic oligonucleotide
aguucauuaggacucucuu

SEQ ID NO: 1739036 - RNA, 19 nt, Artificial Sequence
  Description of Artificial Sequence: Synthetic oligonucleotide
cagcauuggguucaaugcc

SEQ ID NO: 1739037 - RNA, 19 nt, Artificial Sequence
  Description of Artificial Sequence: Synthetic oligonucleotide
ccaaauuuaggcuucccug

SEQ ID NO: 1739038 - RNA, 19 nt, Artificial Sequence
  Description of Artificial Sequence: Synthetic oligonucleotide
uuacuggugccuucaucag

SEQ ID NO: 1739039 - RNA, 19 nt, Artificial Sequence
  Description of Artificial Sequence: Synthetic oligonucleotide
gaaugucguggucuucucc

SEQ ID NO: 1739040 - RNA, 19 nt, Artificial Sequence
  Description of Artificial Sequence: Synthetic oligonucleotide
uauuggcguacacccugcg

SEQ ID NO: 1739041 - RNA, 19 nt, Artificial Sequence
  Description of Artificial Sequence: Synthetic oligonucleotide
ggcguggcgucauacaugg

SEQ ID NO: 1739042 - RNA, 19 nt, Artificial Sequence
  Description of Artificial Sequence: Synthetic oligonucleotide
uugaaauaccaggaaguuc

SEQ ID NO: 1739043 - RNA, 19 nt, Artificial Sequence
  Description of Artificial Sequence: Synthetic oligonucleotide
ucccgcuccgcgaacuugg

SEQ ID NO: 1739044 - RNA, 19 nt, Artificial Sequence
  Description of Artificial Sequence: Synthetic oligonucleotide
cacuagacacuguucaguc

SEQ ID NO: 1739045 - RNA, 19 nt, Artificial Sequence
  Description of Artificial Sequence: Synthetic oligonucleotide
uggaccuccaccgucgccc

SEQ ID NO: 1739046 - RNA, 19 nt, Artificial Sequence
  Description of Artificial Sequence: Synthetic oligonucleotide
aucuuuaauacgccucuau

SEQ ID NO: 1739047 - RNA, 19 nt, Artificial Sequence
  Description of Artificial Sequence: Synthetic oligonucleotide
uuaauacgccucuaucuuu

SEQ ID NO: 1739048 - RNA, 19 nt, Artificial Sequence
  Description of Artificial Sequence: Synthetic oligonucleotide
uaaguccucuccuuugaaa

SEQ ID NO: 1739049 - RNA, 19 nt, Artificial Sequence
  Description of Artificial Sequence: Synthetic oligonucleotide
guuuggauuggaguagccc

SEQ ID NO: 1739050 - RNA, 19 nt, Artificial Sequence
  Description of Artificial Sequence: Synthetic oligonucleotide
uccuuugcaucccgcuccg

SEQ ID NO: 1739051 - RNA, 19 nt, Artificial Sequence
  Description of Artificial Sequence: Synthetic oligonucleotide
auuugacaauuuuccuuug

SEQ ID NO: 1739052 - RNA, 19 nt, Artificial Sequence
  Description of Artificial Sequence: Synthetic oligonucleotide
cuucguuuggauuggagua

SEQ ID NO: 1739053 - RNA, 19 nt, Artificial Sequence
  Description of Artificial Sequence: Synthetic oligonucleotide
cuccuuugaaauaccagga

SEQ ID NO: 1739054 - RNA, 19 nt, Artificial Sequence
  Description of Artificial Sequence: Synthetic oligonucleotide
uuggauuggaguagcccuc

SEQ ID NO: 1739055 - RNA, 19 nt, Artificial Sequence
  Description of Artificial Sequence: Synthetic oligonucleotide
ucgcucaucuccagccagg

SEQ ID NO: 1739056 - RNA, 19 nt, Artificial Sequence
  Description of Artificial Sequence: Synthetic oligonucleotide
uguuacuggugccuucauc

SEQ ID NO: 1739057 - RNA, 19 nt, Artificial Sequence
  Description of Artificial Sequence: Synthetic oligonucleotide
ucagccuuuccuucuucca

SEQ ID NO: 1739058 - RNA, 19 nt, Artificial Sequence
  Description of Artificial Sequence: Synthetic oligonucleotide
uccgcgaacuuggugaaca

SEQ ID NO: 1739059 - RNA, 19 nt, Artificial Sequence
  Description of Artificial Sequence: Synthetic oligonucleotide
auauuggcguacacccugc

SEQ ID NO: 1739060 - RNA, 19 nt, Artificial Sequence
  Description of Artificial Sequence: Synthetic oligonucleotide
ucaccaaucaucgggguuu

SEQ ID NO: 1739061 - RNA, 19 nt, Artificial Sequence
  Description of Artificial Sequence: Synthetic oligonucleotide
cuuugucaccaaucaucgg

SEQ ID NO: 1739062 - RNA, 19 nt, Artificial Sequence
  Description of Artificial Sequence: Synthetic oligonucleotide
ugccucucggaucuuuuac

SEQ ID NO: 1739063 - RNA, 19 nt, Artificial Sequence
  Description of Artificial Sequence: Synthetic oligonucleotide
uuucuucaugguagacacc

SEQ ID NO: 1739064 - RNA, 19 nt, Artificial Sequence
  Description of Artificial Sequence: Synthetic oligonucleotide
uccguuugauucuucggau

SEQ ID NO: 1739065 - RNA, 19 nt, Artificial Sequence
  Description of Artificial Sequence: Synthetic oligonucleotide
uuggcguggcgucauacau

SEQ ID NO: 1739066 - RNA, 19 nt, Artificial Sequence
  Description of Artificial Sequence: Synthetic oligonucleotide
uggaguagcccucuccuuu

SEQ ID NO: 1739067 - RNA, 19 nt, Artificial Sequence
  Description of Artificial Sequence: Synthetic oligonucleotide
ugcgggguuuucuccauug

SEQ ID NO: 1739068 - RNA, 19 nt, Artificial Sequence
  Description of Artificial Sequence: Synthetic oligonucleotide
gacaaucuuuaauacgccu

SEQ ID NO: 1739069 - RNA, 19 nt, Artificial Sequence
  Description of Artificial Sequence: Synthetic oligonucleotide
aguagcccucuccuuuccg

SEQ ID NO: 1739070 - RNA, 19 nt, Artificial Sequence
  Description of Artificial Sequence: Synthetic oligonucleotide
gguccaagauauaaaacac

SEQ ID NO: 1739071 - RNA, 19 nt, Artificial Sequence
  Description of Artificial Sequence: Synthetic oligonucleotide
caaucaucgggguuuccuc

SEQ ID NO: 1739072 - RNA, 19 nt, Artificial Sequence
  Description of Artificial Sequence: Synthetic oligonucleotide
cccguacugaaucacagcc

SEQ ID NO: 1739073 - RNA, 19 nt, Artificial Sequence
  Description of Artificial Sequence: Synthetic oligonucleotide
uaucacgacuggaaucgaa

SEQ ID NO: 1739074 - RNA, 19 nt, Artificial Sequence
  Description of Artificial Sequence: Synthetic oligonucleotide
ucgugguccaagauauaaa

SEQ ID NO: 1739075 - RNA, 19 nt, Artificial Sequence
  Description of Artificial Sequence: Synthetic oligonucleotide
uacuggugccuucaucagu

SEQ ID NO: 1739076 - RNA, 19 nt, Artificial Sequence
  Description of Artificial Sequence: Synthetic oligonucleotide
cuuuucgaagcucuuaagu

SEQ ID NO: 1739077 - RNA, 19 nt, Artificial Sequence
  Description of Artificial Sequence: Synthetic oligonucleotide
cucggaucuuuuacaggcc

SEQ ID NO: 1739078 - RNA, 19 nt, Artificial Sequence
  Description of Artificial Sequence: Synthetic oligonucleotide
acuaguccccacucuuuug

SEQ ID NO: 1739079 - RNA, 19 nt, Artificial Sequence
  Description of Artificial Sequence: Synthetic oligonucleotide
uaagcauacucugguuuac

SEQ ID NO: 1739080 - RNA, 19 nt, Artificial Sequence
  Description of Artificial Sequence: Synthetic oligonucleotide
agccauaagcauacucugg

SEQ ID NO: 1739081 - RNA, 19 nt, Artificial Sequence
  Description of Artificial Sequence: Synthetic oligonucleotide
acacuagacacuguucagu

SEQ ID NO: 1739082 - RNA, 19 nt, Artificial Sequence
  Description of Artificial Sequence: Synthetic oligonucleotide
uaaccuggccuuugccaag

SEQ ID NO: 1739083 - RNA, 19 nt, Artificial Sequence
  Description of Artificial Sequence: Synthetic oligonucleotide
ucccguacugaaucacagc

SEQ ID NO: 1739084 - RNA, 19 nt, Artificial Sequence
  Description of Artificial Sequence: Synthetic oligonucleotide
uccucuccuuugaaauacc

SEQ ID NO: 1739085 - RNA, 19 nt, Artificial Sequence
  Description of Artificial Sequence: Synthetic oligonucleotide
uuccaaugggaaugucgug

SEQ ID NO: 1739086 - RNA, 19 nt, Artificial Sequence
  Description of Artificial Sequence: Synthetic oligonucleotide
acacaguaaguggcagacc

SEQ ID NO: 1739087 - RNA, 19 nt, Artificial Sequence
  Description of Artificial Sequence: Synthetic oligonucleotide
cuuguucaaccacgguggc

SEQ ID NO: 1739088 - RNA, 19 nt, Artificial Sequence
  Description of Artificial Sequence: Synthetic oligonucleotide
aucccagagacuguaacaa

SEQ ID NO: 1739089 - RNA, 19 nt, Artificial Sequence
  Description of Artificial Sequence: Synthetic oligonucleotide
uugccucccuugaaguuac

SEQ ID NO: 1739090 - RNA, 19 nt, Artificial Sequence
  Description of Artificial Sequence: Synthetic oligonucleotide
guagucauuguguuuuaua

SEQ ID NO: 1739091 - RNA, 19 nt, Artificial Sequence
  Description of Artificial Sequence: Synthetic oligonucleotide
uuuuggggaggcugccagc

SEQ ID NO: 1739092 - RNA, 19 nt, Artificial Sequence
  Description of Artificial Sequence: Synthetic oligonucleotide
ucguuuggauuggaguagc

SEQ ID NO: 1739093 - RNA, 19 nt, Artificial Sequence
  Description of Artificial Sequence: Synthetic oligonucleotide
cauaagcucagcauugggu

SEQ ID NO: 1739094 - RNA, 19 nt, Artificial Sequence
  Description of Artificial Sequence: Synthetic oligonucleotide
uccucacuaguccccacuc

SEQ ID NO: 1739095 - RNA, 19 nt, Artificial Sequence
  Description of Artificial Sequence: Synthetic oligonucleotide
ucgaagcucuuaaguguga

SEQ ID NO: 1739096 - RNA, 19 nt, Artificial Sequence
  Description of Artificial Sequence: Synthetic oligonucleotide
uggcguggcgucauacaug

SEQ ID NO: 1739097 - RNA, 19 nt, Artificial Sequence
  Description of Artificial Sequence: Synthetic oligonucleotide
cacaguaaguggcagaccu

SEQ ID NO: 1739098 - RNA, 19 nt, Artificial Sequence
  Description of Artificial Sequence: Synthetic oligonucleotide
ugccucuccaaaaccguau

SEQ ID NO: 1739099 - RNA, 19 nt, Artificial Sequence
  Description of Artificial Sequence: Synthetic oligonucleotide
aucgggguuuccucacuag

SEQ ID NO: 1739100 - RNA, 19 nt, Artificial Sequence
  Description of Artificial Sequence: Synthetic oligonucleotide
aaauaccaggaaguucaau

SEQ ID NO: 1739101 - RNA, 19 nt, Artificial Sequence
  Description of Artificial Sequence: Synthetic oligonucleotide
ucccuugaaguuacaccgu

SEQ ID NO: 1739102 - RNA, 19 nt, Artificial Sequence
  Description of Artificial Sequence: Synthetic oligonucleotide
uccaccgucgccccuucgu

SEQ ID NO: 1739103 - RNA, 19 nt, Artificial Sequence
  Description of Artificial Sequence: Synthetic oligonucleotide
aucaguagucauuguguuu

SEQ ID NO: 1739104 - RNA, 19 nt, Artificial Sequence
  Description of Artificial Sequence: Synthetic oligonucleotide
aagcauacucugguuuaca

SEQ ID NO: 1739105 - RNA, 19 nt, Artificial Sequence
  Description of Artificial Sequence: Synthetic oligonucleotide
uggcagaccucuccuuucu

SEQ ID NO: 1739106 - RNA, 19 nt, Artificial Sequence
  Description of Artificial Sequence: Synthetic oligonucleotide
acaccacaucucugcaauc

SEQ ID NO: 1739107 - RNA, 19 nt, Artificial Sequence
  Description of Artificial Sequence: Synthetic oligonucleotide
acauaaacuuugucaccaa

SEQ ID NO: 1739108 - RNA, 19 nt, Artificial Sequence
  Description of Artificial Sequence: Synthetic oligonucleotide
cccagagacuguaacaaac

SEQ ID NO: 1739109 - RNA, 19 nt, Artificial Sequence
  Description of Artificial Sequence: Synthetic oligonucleotide
uggugccuucaucaguagu

SEQ ID NO: 1739110 - RNA, 19 nt, Artificial Sequence
  Description of Artificial Sequence: Synthetic oligonucleotide
aguccccacucuuuugaca

SEQ ID NO: 1739111 - RNA, 19 nt, Artificial Sequence
  Description of Artificial Sequence: Synthetic oligonucleotide
caaucuuuaauacgccucu

SEQ ID NO: 1739112 - RNA, 19 nt, Artificial Sequence
  Description of Artificial Sequence: Synthetic oligonucleotide
ucccaggcuuugauaaccu

SEQ ID NO: 1739113 - RNA, 19 nt, Artificial Sequence
  Description of Artificial Sequence: Synthetic oligonucleotide
ugucaccaaucaucggggu

SEQ ID NO: 1739114 - RNA, 19 nt, Artificial Sequence
  Description of Artificial Sequence: Synthetic oligonucleotide
ucacuaguccccacucuuu

SEQ ID NO: 1739115 - RNA, 19 nt, Artificial Sequence
  Description of Artificial Sequence: Synthetic oligonucleotide
aggauucuuuggccuuuuc

SEQ ID NO: 1739116 - RNA, 19 nt, Artificial Sequence
  Description of Artificial Sequence: Synthetic oligonucleotide
cuucaccaacaaugaacac

SEQ ID NO: 1739117 - RNA, 19 nt, Artificial Sequence
  Description of Artificial Sequence: Synthetic oligonucleotide
ggaagcuauugguuuugcc

SEQ ID NO: 1739118 - RNA, 19 nt, Artificial Sequence
  Description of Artificial Sequence: Synthetic oligonucleotide
aguugggugugagcccagc

SEQ ID NO: 1739119 - RNA, 19 nt, Artificial Sequence
  Description of Artificial Sequence: Synthetic oligonucleotide
ccaaggcuaaacacaaaug

SEQ ID NO: 1739120 - RNA, 19 nt, Artificial Sequence
  Description of Artificial Sequence: Synthetic oligonucleotide
cauuguuacuggugccuuc

SEQ ID NO: 1739121 - RNA, 19 nt, Artificial Sequence
  Description of Artificial Sequence: Synthetic oligonucleotide
caucucugcaaucaaacau

SEQ ID NO: 1739122 - RNA, 19 nt, Artificial Sequence
  Description of Artificial Sequence: Synthetic oligonucleotide
uccugaguugggugugagc

SEQ ID NO: 1739123 - RNA, 19 nt, Artificial Sequence
  Description of Artificial Sequence: Synthetic oligonucleotide
accguaucgugguccaaga

SEQ ID NO: 1739124 - RNA, 19 nt, Artificial Sequence
  Description of Artificial Sequence: Synthetic oligonucleotide
ggugguuauuuugggaagc

SEQ ID NO: 1739125 - RNA, 19 nt, Artificial Sequence
  Description of Artificial Sequence: Synthetic oligonucleotide
gugguccaagauauaaaac

SEQ ID NO: 1739126 - RNA, 19 nt, Artificial Sequence
  Description of Artificial Sequence: Synthetic oligonucleotide
accgucgccccuucguuug

SEQ ID NO: 1739127 - RNA, 19 nt, Artificial Sequence
  Description of Artificial Sequence: Synthetic oligonucleotide
cagcagggugguuauuuug

SEQ ID NO: 1739128 - RNA, 19 nt, Artificial Sequence
  Description of Artificial Sequence: Synthetic oligonucleotide
guaucgugguccaagauau

SEQ ID NO: 1739129 - RNA, 19 nt, Artificial Sequence
  Description of Artificial Sequence: Synthetic oligonucleotide
aaucuuuaauacgccucua

SEQ ID NO: 1739130 - RNA, 19 nt, Artificial Sequence
  Description of Artificial Sequence: Synthetic oligonucleotide
cguggcgucauacauggcc

SEQ ID NO: 1739131 - RNA, 19 nt, Artificial Sequence
  Description of Artificial Sequence: Synthetic oligonucleotide
acaguaaguggcagaccuc

SEQ ID NO: 1739132 - RNA, 19 nt, Artificial Sequence
  Description of Artificial Sequence: Synthetic oligonucleotide
ugucccaggcuuugauaac

SEQ ID NO: 1739133 - RNA, 19 nt, Artificial Sequence
  Description of Artificial Sequence: Synthetic oligonucleotide
aagugugacuucauacaua

SEQ ID NO: 1739134 - RNA, 19 nt, Artificial Sequence
  Description of Artificial Sequence: Synthetic oligonucleotide
gcagggugguuauuuuggg

SEQ ID NO: 1739135 - RNA, 19 nt, Artificial Sequence
  Description of Artificial Sequence: Synthetic oligonucleotide
ucaucgggguuuccucacu

SEQ ID NO: 1739136 - RNA, 19 nt, Artificial Sequence
  Description of Artificial Sequence: Synthetic oligonucleotide
gaaguuacaccguucccuu

SEQ ID NO: 1739137 - RNA, 19 nt, Artificial Sequence
  Description of Artificial Sequence: Synthetic oligonucleotide
acugaaucacagccugcau

SEQ ID NO: 1739138 - RNA, 19 nt, Artificial Sequence
  Description of Artificial Sequence: Synthetic oligonucleotide
ucccagagacuguaacaaa

SEQ ID NO: 1739139 - RNA, 19 nt, Artificial Sequence
  Description of Artificial Sequence: Synthetic oligonucleotide
aguccucuccuuugaaaua

SEQ ID NO: 1739140 - RNA, 19 nt, Artificial Sequence
  Description of Artificial Sequence: Synthetic oligonucleotide
gaagcucuuaagugugacu

SEQ ID NO: 1739141 - RNA, 19 nt, Artificial Sequence
  Description of Artificial Sequence: Synthetic oligonucleotide
uaggacucucuucccuccu

SEQ ID NO: 1739142 - RNA, 19 nt, Artificial Sequence
  Description of Artificial Sequence: Synthetic oligonucleotide
cuucccguacugaaucaca

SEQ ID NO: 1739143 - RNA, 19 nt, Artificial Sequence
  Description of Artificial Sequence: Synthetic oligonucleotide
ccucucggaucuuuuacag

SEQ ID NO: 1739144 - RNA, 19 nt, Artificial Sequence
  Description of Artificial Sequence: Synthetic oligonucleotide
ggcuaaacacaaauggcuc

SEQ ID NO: 1739145 - RNA, 19 nt, Artificial Sequence
  Description of Artificial Sequence: Synthetic oligonucleotide
uggauuggaguagcccucu

SEQ ID NO: 1739146 - RNA, 19 nt, Artificial Sequence
  Description of Artificial Sequence: Synthetic oligonucleotide
cuccaguuuucuuuggugu

SEQ ID NO: 1739147 - RNA, 19 nt, Artificial Sequence
  Description of Artificial Sequence: Synthetic oligonucleotide
uugcaucccgcuccgcgaa

SEQ ID NO: 1739148 - RNA, 19 nt, Artificial Sequence
  Description of Artificial Sequence: Synthetic oligonucleotide
uaguccccacucuuuugac

SEQ ID NO: 1739149 - RNA, 19 nt, Artificial Sequence
  Description of Artificial Sequence: Synthetic oligonucleotide
uucuucggauaaugccaga

SEQ ID NO: 1739150 - RNA, 19 nt, Artificial Sequence
  Description of Artificial Sequence: Synthetic oligonucleotide
aguaaguggcagaccucuc

SEQ ID NO: 1739151 - RNA, 19 nt, Artificial Sequence
  Description of Artificial Sequence: Synthetic oligonucleotide
ggguuuccucacuaguccc

SEQ ID NO: 1739152 - RNA, 19 nt, Artificial Sequence
  Description of Artificial Sequence: Synthetic oligonucleotide
uuacaggccucuccuucua

SEQ ID NO: 1739153 - RNA, 19 nt, Artificial Sequence
  Description of Artificial Sequence: Synthetic oligonucleotide
uuguucaaccacgguggcu

SEQ ID NO: 1739154 - RNA, 19 nt, Artificial Sequence
  Description of Artificial Sequence: Synthetic oligonucleotide
uugcuuccagaaucccaga

SEQ ID NO: 1739155 - RNA, 19 nt, Artificial Sequence
  Description of Artificial Sequence: Synthetic oligonucleotide
ugcauuggaggggaauuuu

SEQ ID NO: 1739156 - RNA, 19 nt, Artificial Sequence
  Description of Artificial Sequence: Synthetic oligonucleotide
auaaugccagagucuucaa

SEQ ID NO: 1739157 - RNA, 19 nt, Artificial Sequence
  Description of Artificial Sequence: Synthetic oligonucleotide
gcauacucugguuuacaca

SEQ ID NO: 1739158 - RNA, 19 nt, Artificial Sequence
  Description of Artificial Sequence: Synthetic oligonucleotide
uagacaccccaauguccca

SEQ ID NO: 1739159 - RNA, 19 nt, Artificial Sequence
  Description of Artificial Sequence: Synthetic oligonucleotide
agggccgaguucauuagga

SEQ ID NO: 1739160 - RNA, 19 nt, Artificial Sequence
  Description of Artificial Sequence: Synthetic oligonucleotide
uggcugcgggguuuucucc

SEQ ID NO: 1739161 - RNA, 19 nt, Artificial Sequence
  Description of Artificial Sequence: Synthetic oligonucleotide
ugguuauuuugggaagcua

SEQ ID NO: 1739162 - RNA, 19 nt, Artificial Sequence
  Description of Artificial Sequence: Synthetic oligonucleotide
guguccaucucccaggauu

SEQ ID NO: 1739163 - RNA, 19 nt, Artificial Sequence
  Description of Artificial Sequence: Synthetic oligonucleotide
gugaacauauuggcguaca

SEQ ID NO: 1739164 - RNA, 19 nt, Artificial Sequence
  Description of Artificial Sequence: Synthetic oligonucleotide
gucguggucuucuccuuca

SEQ ID NO: 1739165 - RNA, 19 nt, Artificial Sequence
  Description of Artificial Sequence: Synthetic oligonucleotide
uacauggccuucagccuuu

SEQ ID NO: 1739166 - RNA, 19 nt, Artificial Sequence
  Description of Artificial Sequence: Synthetic oligonucleotide
agcagcagggugguuauuu

SEQ ID NO: 1739167 - RNA, 19 nt, Artificial Sequence
  Description of Artificial Sequence: Synthetic oligonucleotide
uuaggcuucccugccucuc

SEQ ID NO: 1739168 - RNA, 19 nt, Artificial Sequence
  Description of Artificial Sequence: Synthetic oligonucleotide
acauauuggcguacacccu

SEQ ID NO: 1739169 - RNA, 19 nt, Artificial Sequence
  Description of Artificial Sequence: Synthetic oligonucleotide
cuuggcguggcgucauaca

SEQ ID NO: 1739170 - RNA, 19 nt, Artificial Sequence
  Description of Artificial Sequence: Synthetic oligonucleotide
uaaacacaaauggcucauu

SEQ ID NO: 1739171 - RNA, 19 nt, Artificial Sequence
  Description of Artificial Sequence: Synthetic oligonucleotide
gaucuuuuacaggccucuc

SEQ ID NO: 1739172 - RNA, 19 nt, Artificial Sequence
  Description of Artificial Sequence: Synthetic oligonucleotide
uugcauuggaggggaauuu

SEQ ID NO: 1739173 - RNA, 19 nt, Artificial Sequence
  Description of Artificial Sequence: Synthetic oligonucleotide
agcuauugguuuugccauu

SEQ ID NO: 1739174 - RNA, 19 nt, Artificial Sequence
  Description of Artificial Sequence: Synthetic oligonucleotide
cagggugguuauuuuggga

SEQ ID NO: 1739175 - RNA, 19 nt, Artificial Sequence
  Description of Artificial Sequence: Synthetic oligonucleotide
ggagggccgaguucauuag

SEQ ID NO: 1739176 - RNA, 19 nt, Artificial Sequence
  Description of Artificial Sequence: Synthetic oligonucleotide
gcaaucaaacauccuucca

SEQ ID NO: 1739177 - RNA, 19 nt, Artificial Sequence
  Description of Artificial Sequence: Synthetic oligonucleotide
ccuuuucgaagcucuuaag

SEQ ID NO: 1739178 - RNA, 19 nt, Artificial Sequence
  Description of Artificial Sequence: Synthetic oligonucleotide
uggcguacacccugcgguc

SEQ ID NO: 1739179 - RNA, 19 nt, Artificial Sequence
  Description of Artificial Sequence: Synthetic oligonucleotide
gguuauuuugggaagcuau

SEQ ID NO: 1739180 - RNA, 19 nt, Artificial Sequence
  Description of Artificial Sequence: Synthetic oligonucleotide
guuacaccguucccuucuc

SEQ ID NO: 1739181 - RNA, 19 nt, Artificial Sequence
  Description of Artificial Sequence: Synthetic oligonucleotide
accaaucaucgggguuucc

SEQ ID NO: 1739182 - RNA, 19 nt, Artificial Sequence
  Description of Artificial Sequence: Synthetic oligonucleotide
gaguucauuaggacucucu

SEQ ID NO: 1739183 - RNA, 19 nt, Artificial Sequence
  Description of Artificial Sequence: Synthetic oligonucleotide
gugccuucaucaguaguca

SEQ ID NO: 1739184 - RNA, 19 nt, Artificial Sequence
  Description of Artificial Sequence: Synthetic oligonucleotide
caaccacgguggcugcggg

SEQ ID NO: 1739185 - RNA, 19 nt, Artificial Sequence
  Description of Artificial Sequence: Synthetic oligonucleotide
gccauaagcauacucuggu

SEQ ID NO: 1739186 - RNA, 19 nt, Artificial Sequence
  Description of Artificial Sequence: Synthetic oligonucleotide
uaucgugguccaagauaua

SEQ ID NO: 1739187 - RNA, 19 nt, Artificial Sequence
  Description of Artificial Sequence: Synthetic oligonucleotide
gccuuuucgaagcucuuaa

SEQ ID NO: 1739188 - RNA, 19 nt, Artificial Sequence
  Description of Artificial Sequence: Synthetic oligonucleotide
cuucggauaaugccagagu

SEQ ID NO: 1739189 - RNA, 19 nt, Artificial Sequence
  Description of Artificial Sequence: Synthetic oligonucleotide
agccugcauguacuugccu

SEQ ID NO: 1739190 - RNA, 19 nt, Artificial Sequence
  Description of Artificial Sequence: Synthetic oligonucleotide
cuaaacacaaauggcucau

SEQ ID NO: 1739191 - RNA, 19 nt, Artificial Sequence
  Description of Artificial Sequence: Synthetic oligonucleotide
caucaguagucauuguguu

SEQ ID NO: 1739192 - RNA, 19 nt, Artificial Sequence
  Description of Artificial Sequence: Synthetic oligonucleotide
caguaaguggcagaccucu

SEQ ID NO: 1739193 - RNA, 19 nt, Artificial Sequence
  Description of Artificial Sequence: Synthetic oligonucleotide
uacacccugcggucucgcu

SEQ ID NO: 1739194 - RNA, 19 nt, Artificial Sequence
  Description of Artificial Sequence: Synthetic oligonucleotide
gggguuuucuccauuguua

SEQ ID NO: 1739195 - RNA, 19 nt, Artificial Sequence
  Description of Artificial Sequence: Synthetic oligonucleotide
ggugaacauauuggcguac

SEQ ID NO: 1739196 - RNA, 19 nt, Artificial Sequence
  Description of Artificial Sequence: Synthetic oligonucleotide
cuucccuccuuggcguggc

SEQ ID NO: 1739197 - RNA, 19 nt, Artificial Sequence
  Description of Artificial Sequence: Synthetic oligonucleotide
gccaaauuuaggcuucccu

SEQ ID NO: 1739198 - RNA, 19 nt, Artificial Sequence
  Description of Artificial Sequence: Synthetic oligonucleotide
uuccuuuguaguggacaua

SEQ ID NO: 1739199 - RNA, 19 nt, Artificial Sequence
  Description of Artificial Sequence: Synthetic oligonucleotide
uccuuuccguuugauucuu

SEQ ID NO: 1739200 - RNA, 19 nt, Artificial Sequence
  Description of Artificial Sequence: Synthetic oligonucleotide
guagcccucuccuuuccgu

SEQ ID NO: 1739201 - RNA, 19 nt, Artificial Sequence
  Description of Artificial Sequence: Synthetic oligonucleotide
gccucucggaucuuuuaca

SEQ ID NO: 1739202 - RNA, 19 nt, Artificial Sequence
  Description of Artificial Sequence: Synthetic oligonucleotide
cagaaucccagagacugua

SEQ ID NO: 1739203 - RNA, 19 nt, Artificial Sequence
  Description of Artificial Sequence: Synthetic oligonucleotide
caaucuucccguacugaau

SEQ ID NO: 1739204 - RNA, 19 nt, Artificial Sequence
  Description of Artificial Sequence: Synthetic oligonucleotide
guccugaguugggugugag

SEQ ID NO: 1739205 - RNA, 19 nt, Artificial Sequence
  Description of Artificial Sequence: Synthetic oligonucleotide
ggguucaaugccaaauuua

SEQ ID NO: 1739206 - RNA, 19 nt, Artificial Sequence
  Description of Artificial Sequence: Synthetic oligonucleotide
gccuuugccaaggcuaaac

SEQ ID NO: 1739207 - RNA, 19 nt, Artificial Sequence
  Description of Artificial Sequence: Synthetic oligonucleotide
uggcgucauacauggccuu

SEQ ID NO: 1739208 - RNA, 19 nt, Artificial Sequence
  Description of Artificial Sequence: Synthetic oligonucleotide
ggaaugucguggucuucuc

SEQ ID NO: 1739209 - RNA, 19 nt, Artificial Sequence
  Description of Artificial Sequence: Synthetic oligonucleotide
aaaccguaucgugguccaa

SEQ ID NO: 1739210 - RNA, 19 nt, Artificial Sequence
  Description of Artificial Sequence: Synthetic oligonucleotide
gggccgaguucauuaggac

SEQ ID NO: 1739211 - RNA, 19 nt, Artificial Sequence
  Description of Artificial Sequence: Synthetic oligonucleotide
ggccgaguucauuaggacu

SEQ ID NO: 1739212 - RNA, 19 nt, Artificial Sequence
  Description of Artificial Sequence: Synthetic oligonucleotide
gcgaacuuggugaacauau

SEQ ID NO: 1739213 - RNA, 19 nt, Artificial Sequence
  Description of Artificial Sequence: Synthetic oligonucleotide
ucccuccuuggcguggcgu

SEQ ID NO: 1739214 - RNA, 19 nt, Artificial Sequence
  Description of Artificial Sequence: Synthetic oligonucleotide
gugguuauuuugggaagcu

SEQ ID NO: 1739215 - RNA, 19 nt, Artificial Sequence
  Description of Artificial Sequence: Synthetic oligonucleotide
ggaucuuuuacaggccucu

SEQ ID NO: 1739216 - RNA, 19 nt, Artificial Sequence
  Description of Artificial Sequence: Synthetic oligonucleotide
ccuucguuuggauuggagu

SEQ ID NO: 1739217 - RNA, 19 nt, Artificial Sequence
  Description of Artificial Sequence: Synthetic oligonucleotide
cccuucguuuggauuggag

SEQ ID NO: 1739218 - RNA, 19 nt, Artificial Sequence
  Description of Artificial Sequence: Synthetic oligonucleotide
cucacuaguccccacucuu

SEQ ID NO: 1739219 - RNA, 19 nt, Artificial Sequence
  Description of Artificial Sequence: Synthetic oligonucleotide
cguuugauucuucggauaa

SEQ ID NO: 1739220 - RNA, 19 nt, Artificial Sequence
  Description of Artificial Sequence: Synthetic oligonucleotide
ccauuugacaauuuuccuu

SEQ ID NO: 1739221 - RNA, 19 nt, Artificial Sequence
  Description of Artificial Sequence: Synthetic oligonucleotide
gggaagcuauugguuuugc

SEQ ID NO: 1739222 - RNA, 19 nt, Artificial Sequence
  Description of Artificial Sequence: Synthetic oligonucleotide
ccaagauauaaaacacacu

SEQ ID NO: 1739223 - RNA, 19 nt, Artificial Sequence
  Description of Artificial Sequence: Synthetic oligonucleotide
gccucuccaaaaccguauc

SEQ ID NO: 1739224 - RNA, 19 nt, Artificial Sequence
  Description of Artificial Sequence: Synthetic oligonucleotide
cgcuccgcgaacuugguga

SEQ ID NO: 1739225 - RNA, 19 nt, Artificial Sequence
  Description of Artificial Sequence: Synthetic oligonucleotide
ggcugcgggguuuucucca

SEQ ID NO: 1739226 - RNA, 19 nt, Artificial Sequence
  Description of Artificial Sequence: Synthetic oligonucleotide
caccaaucaucgggguuuc

SEQ ID NO: 1739227 - RNA, 19 nt, Artificial Sequence
  Description of Artificial Sequence: Synthetic oligonucleotide
ccucuccuuugaaauacca

SEQ ID NO: 1739228 - RNA, 19 nt, Artificial Sequence
  Description of Artificial Sequence: Synthetic oligonucleotide
cugccucuccaaaaccgua

SEQ ID NO: 1739229 - RNA, 19 nt, Artificial Sequence
  Description of Artificial Sequence: Synthetic oligonucleotide
cguuuggauuggaguagcc

SEQ ID NO: 1739230 - RNA, 19 nt, Artificial Sequence
  Description of Artificial Sequence: Synthetic oligonucleotide
cuggcugcuuccuuugcau

SEQ ID NO: 1739231 - RNA, 19 nt, Artificial Sequence
  Description of Artificial Sequence: Synthetic oligonucleotide
gucaccaaucaucgggguu

SEQ ID NO: 1739232 - RNA, 19 nt, Artificial Sequence
  Description of Artificial Sequence: Synthetic oligonucleotide
gguggaccuccaccgucgc

SEQ ID NO: 1739233 - RNA, 19 nt, Artificial Sequence
  Description of Artificial Sequence: Synthetic oligonucleotide
cguaucgugguccaagaua

SEQ ID NO: 1739234 - RNA, 19 nt, Artificial Sequence
  Description of Artificial Sequence: Synthetic oligonucleotide
cacgacuggaaucgaacuu

SEQ ID NO: 1739235 - RNA, 19 nt, Artificial Sequence
  Description of Artificial Sequence: Synthetic oligonucleotide
gaaucacagccugcaugua

SEQ ID NO: 1739236 - RNA, 19 nt, Artificial Sequence
  Description of Artificial Sequence: Synthetic oligonucleotide
cuaucacgacuggaaucga

SEQ ID NO: 1739237 - RNA, 19 nt, Artificial Sequence
  Description of Artificial Sequence: Synthetic oligonucleotide
ggaccuccaccgucgcccc

SEQ ID NO: 1739238 - RNA, 19 nt, Artificial Sequence
  Description of Artificial Sequence: Synthetic oligonucleotide
caguagucauuguguuuua

SEQ ID NO: 1739239 - RNA, 19 nt, Artificial Sequence
  Description of Artificial Sequence: Synthetic oligonucleotide
cuuuuacaggccucuccuu

SEQ ID NO: 1739240 - RNA, 19 nt, Artificial Sequence
  Description of Artificial Sequence: Synthetic oligonucleotide
cugccucucggaucuuuua

SEQ ID NO: 1739241 - RNA, 19 nt, Artificial Sequence
  Description of Artificial Sequence: Synthetic oligonucleotide
cgaagcucuuaagugugac

SEQ ID NO: 1739242 - RNA, 19 nt, Artificial Sequence
  Description of Artificial Sequence: Synthetic oligonucleotide
gccucccuugaaguuacac

SEQ ID NO: 1739243 - RNA, 19 nt, Artificial Sequence
  Description of Artificial Sequence: Synthetic oligonucleotide
gccccuucguuuggauugg

SEQ ID NO: 1739244 - RNA, 19 nt, Artificial Sequence
  Description of Artificial Sequence: Synthetic oligonucleotide
cuccaccgucgccccuucg

SEQ ID NO: 1739245 - RNA, 19 nt, Artificial Sequence
  Description of Artificial Sequence: Synthetic oligonucleotide
uccuuggcguggcgucaua

SEQ ID NO: 1739246 - RNA, 19 nt, Artificial Sequence
  Description of Artificial Sequence: Synthetic oligonucleotide
accuuacacuagacacugu

SEQ ID NO: 1739247 - RNA, 19 nt, Artificial Sequence
  Description of Artificial Sequence: Synthetic oligonucleotide
ggauuggaguagcccucuc

SEQ ID NO: 1739248 - RNA, 19 nt, Artificial Sequence
  Description of Artificial Sequence: Synthetic oligonucleotide
ccccacucuuuugacaauc

SEQ ID NO: 1739249 - RNA, 19 nt, Artificial Sequence
  Description of Artificial Sequence: Synthetic oligonucleotide
ggcgucauacauggccuuc

SEQ ID NO: 1739250 - RNA, 19 nt, Artificial Sequence
  Description of Artificial Sequence: Synthetic oligonucleotide
gcgucauacauggccuuca

SEQ ID NO: 1739251 - RNA, 19 nt, Artificial Sequence
  Description of Artificial Sequence: Synthetic oligonucleotide
cacuaguccccacucuuuu

SEQ ID NO: 1739252 - RNA, 19 nt, Artificial Sequence
  Description of Artificial Sequence: Synthetic oligonucleotide
cggaucuuuuacaggccuc

SEQ ID NO: 1739253 - RNA, 19 nt, Artificial Sequence
  Description of Artificial Sequence: Synthetic oligonucleotide
cuccgcgaacuuggugaac

SEQ ID NO: 1739254 - RNA, 19 nt, Artificial Sequence
  Description of Artificial Sequence: Synthetic oligonucleotide
ccaaugggaaugucguggu

SEQ ID NO: 1739255 - RNA, 19 nt, Artificial Sequence
  Description of Artificial Sequence: Synthetic oligonucleotide
gcauuggguucaaugccaa

SEQ ID NO: 1739256 - RNA, 19 nt, Artificial Sequence
  Description of Artificial Sequence: Synthetic oligonucleotide
cauggccugccucucggau

SEQ ID NO: 1739257 - RNA, 19 nt, Artificial Sequence
  Description of Artificial Sequence: Synthetic oligonucleotide
ccuuggcguggcgucauac

SEQ ID NO: 1739258 - RNA, 19 nt, Artificial Sequence
  Description of Artificial Sequence: Synthetic oligonucleotide
ccuuuccguuugauucuuc

SEQ ID NO: 1739259 - RNA, 19 nt, Artificial Sequence
  Description of Artificial Sequence: Synthetic oligonucleotide
gcuccgcgaacuuggugaa

SEQ ID NO: 1739260 - RNA, 19 nt, Artificial Sequence
  Description of Artificial Sequence: Synthetic oligonucleotide
ccguuugauucuucggaua

SEQ ID NO: 1739261 - RNA, 19 nt, Artificial Sequence
  Description of Artificial Sequence: Synthetic oligonucleotide
cuccuuguucaaccacggu

SEQ ID NO: 1739262 - RNA, 19 nt, Artificial Sequence
  Description of Artificial Sequence: Synthetic oligonucleotide
ccaaucaucgggguuuccu

SEQ ID NO: 1739263 - RNA, 19 nt, Artificial Sequence
  Description of Artificial Sequence: Synthetic oligonucleotide
gcggucucgcucaucucca

SEQ ID NO: 1739264 - RNA, 19 nt, Artificial Sequence
  Description of Artificial Sequence: Synthetic oligonucleotide
ccguacugaaucacagccu

SEQ ID NO: 1739265 - RNA, 19 nt, Artificial Sequence
  Description of Artificial Sequence: Synthetic oligonucleotide
ccguucccuucucuuugac

SEQ ID NO: 1739266 - RNA, 19 nt, Artificial Sequence
  Description of Artificial Sequence: Synthetic oligonucleotide
cuuugcuggcugcuuccuu

SEQ ID NO: 1739267 - RNA, 19 nt, Artificial Sequence
  Description of Artificial Sequence: Synthetic oligonucleotide
acgguggcugcgggguuuu

SEQ ID NO: 1739268 - RNA, 19 nt, Artificial Sequence
  Description of Artificial Sequence: Synthetic oligonucleotide
gccuucaucaguagucauu

SEQ ID NO: 1739269 - RNA, 19 nt, Artificial Sequence
  Description of Artificial Sequence: Synthetic oligonucleotide
gucgccccuucguuuggau

SEQ ID NO: 1739270 - RNA, 19 nt, Artificial Sequence
  Description of Artificial Sequence: Synthetic oligonucleotide
ccgucgccccuucguuugg

SEQ ID NO: 1739271 - RNA, 19 nt, Artificial Sequence
  Description of Artificial Sequence: Synthetic oligonucleotide
gcgggguuuucuccauugu

SEQ ID NO: 1739272 - RNA, 19 nt, Artificial Sequence
  Description of Artificial Sequence: Synthetic oligonucleotide
ggcuucccugccucuccaa

SEQ ID NO: 1739273 - RNA, 19 nt, Artificial Sequence
  Description of Artificial Sequence: Synthetic oligonucleotide
ccgcuccgcgaacuuggug

SEQ ID NO: 1739274 - RNA, 19 nt, Artificial Sequence
  Description of Artificial Sequence: Synthetic oligonucleotide
cggucucgcucaucuccag

SEQ ID NO: 1739275 - RNA, 19 nt, Artificial Sequence
  Description of Artificial Sequence: Synthetic oligonucleotide
caccgucgccccuucguuu

SEQ ID NO: 1739276 - RNA, 19 nt, Artificial Sequence
  Description of Artificial Sequence: Synthetic oligonucleotide
ccuuugcaucccgcuccgc

SEQ ID NO: 1739277 - RNA, 19 nt, Artificial Sequence
  Description of Artificial Sequence: Synthetic oligonucleotide
ggcguacacccugcggucu

SEQ ID NO: 1739278 - RNA, 19 nt, Artificial Sequence
  Description of Artificial Sequence: Synthetic oligonucleotide
ccucacuaguccccacucu

SEQ ID NO: 1739279 - RNA, 19 nt, Artificial Sequence
  Description of Artificial Sequence: Synthetic oligonucleotide
cccuugaaguuacaccguu

SEQ ID NO: 1739280 - RNA, 19 nt, Artificial Sequence
  Description of Artificial Sequence: Synthetic oligonucleotide
ccauggccugccucucgga

SEQ ID NO: 1739281 - RNA, 19 nt, Artificial Sequence
  Description of Artificial Sequence: Synthetic oligonucleotide
gguguccaucucccaggau

SEQ ID NO: 1739282 - RNA, 19 nt, Artificial Sequence
  Description of Artificial Sequence: Synthetic oligonucleotide
gcaucccgcuccgcgaacu

SEQ ID NO: 1739283 - RNA, 19 nt, Artificial Sequence
  Description of Artificial Sequence: Synthetic oligonucleotide
cccaggauucuuuggccuu

SEQ ID NO: 1739284 - RNA, 19 nt, Artificial Sequence
  Description of Artificial Sequence: Synthetic oligonucleotide
ggcagaccucuccuuucuu

SEQ ID NO: 1739285 - RNA, 19 nt, Artificial Sequence
  Description of Artificial Sequence: Synthetic oligonucleotide
caucccgcuccgcgaacuu

SEQ ID NO: 1739286 - RNA, 19 nt, Artificial Sequence
  Description of Artificial Sequence: Synthetic oligonucleotide
ccuccaccgucgccccuuc

SEQ ID NO: 1739287 - RNA, 19 nt, Artificial Sequence
  Description of Artificial Sequence: Synthetic oligonucleotide
cuccuuggcguggcgucau

SEQ ID NO: 1739288 - RNA, 19 nt, Artificial Sequence
  Description of Artificial Sequence: Synthetic oligonucleotide
cccucuccuuuccguuuga

SEQ ID NO: 1739289 - RNA, 19 nt, Artificial Sequence
  Description of Artificial Sequence: Synthetic oligonucleotide
ccauuguuacuggugccuu

SEQ ID NO: 1739290 - RNA, 19 nt, Artificial Sequence
  Description of Artificial Sequence: Synthetic oligonucleotide
gcguggcgucauacauggc

SEQ ID NO: 1739291 - RNA, 19 nt, Artificial Sequence
  Description of Artificial Sequence: Synthetic oligonucleotide
cacgguggcugcgggguuu

SEQ ID NO: 1739292 - RNA, 19 nt, Artificial Sequence
  Description of Artificial Sequence: Synthetic oligonucleotide
ccgaguucauuaggacucu

SEQ ID NO: 1739293 - RNA, 19 nt, Artificial Sequence
  Description of Artificial Sequence: Synthetic oligonucleotide
ccguaucgugguccaagau

SEQ ID NO: 1739294 - RNA, 19 nt, Artificial Sequence
  Description of Artificial Sequence: Synthetic oligonucleotide
cgcgaacuuggugaacaua

SEQ ID NO: 1739295 - RNA, 19 nt, Artificial Sequence
  Description of Artificial Sequence: Synthetic oligonucleotide
ccgcgaacuuggugaacau

SEQ ID NO: 1739296 - RNA, 19 nt, Artificial Sequence
  Description of Artificial Sequence: Synthetic oligonucleotide
ccaccgucgccccuucguu

SEQ ID NO: 1739297 - RNA, 19 nt, Artificial Sequence
  Description of Artificial Sequence: Synthetic oligonucleotide
ccccaaugucccaggcuuu

SEQ ID NO: 1739298 - RNA, 19 nt, Artificial Sequence
  Description of Artificial Sequence: Synthetic oligonucleotide
ccccuucguuuggauugga

SEQ ID NO: 1739299 - RNA, 19 nt, Artificial Sequence
  Description of Artificial Sequence: Synthetic oligonucleotide
cgucgccccuucguuugga

SEQ ID NO: 1739300 - RNA, 19 nt, Artificial Sequence
  Description of Artificial Sequence: Synthetic oligonucleotide
cagcagcagggugguuauu

SEQ ID NO: 1739301 - RNA, 19 nt, Artificial Sequence
  Description of Artificial Sequence: Synthetic oligonucleotide
ccacgguggcugcgggguu

SEQ ID NO: 1739302 - RNA, 19 nt, Artificial Sequence
  Description of Artificial Sequence: Synthetic oligonucleotide
aaauaaguuaugcacagag

SEQ ID NO: 1739303 - RNA, 19 nt, Artificial Sequence
  Description of Artificial Sequence: Synthetic oligonucleotide
uagaacaaacuaaauaacg

SEQ ID NO: 1739304 - RNA, 19 nt, Artificial Sequence
  Description of Artificial Sequence: Synthetic oligonucleotide
aacuacuuuaaguagaaca

SEQ ID NO: 1739305 - RNA, 19 nt, Artificial Sequence
  Description of Artificial Sequence: Synthetic oligonucleotide
uuucuauuuacauuauugg

SEQ ID NO: 1739306 - RNA, 19 nt, Artificial Sequence
  Description of Artificial Sequence: Synthetic oligonucleotide
aguagaacaaacuaaauaa

SEQ ID NO: 1739307 - RNA, 19 nt, Artificial Sequence
  Description of Artificial Sequence: Synthetic oligonucleotide
uauaucaucuuuauuaacu

SEQ ID NO: 1739308 - RNA, 19 nt, Artificial Sequence
  Description of Artificial Sequence: Synthetic oligonucleotide
ugagauagcuuccagagcc

SEQ ID NO: 1739309 - RNA, 19 nt, Artificial Sequence
  Description of Artificial Sequence: Synthetic oligonucleotide
acucaaaccaaaccaaacc

SEQ ID NO: 1739310 - RNA, 19 nt, Artificial Sequence
  Description of Artificial Sequence: Synthetic oligonucleotide
uuuucaacccacaaucccg

SEQ ID NO: 1739311 - RNA, 19 nt, Artificial Sequence
  Description of Artificial Sequence: Synthetic oligonucleotide
uuuaaguagaacaaacuaa

SEQ ID NO: 1739312 - RNA, 19 nt, Artificial Sequence
  Description of Artificial Sequence: Synthetic oligonucleotide
aacaaaaguuccuauugag

SEQ ID NO: 1739313 - RNA, 19 nt, Artificial Sequence
  Description of Artificial Sequence: Synthetic oligonucleotide
uuccuauugagucaaauga

SEQ ID NO: 1739314 - RNA, 19 nt, Artificial Sequence
  Description of Artificial Sequence: Synthetic oligonucleotide
uuaaguagaacaaacuaaa

SEQ ID NO: 1739315 - RNA, 19 nt, Artificial Sequence
  Description of Artificial Sequence: Synthetic oligonucleotide
cuaaauaacguauuuaaca

SEQ ID NO: 1739316 - RNA, 19 nt, Artificial Sequence
  Description of Artificial Sequence: Synthetic oligonucleotide
aaacagcuaacauucauca

SEQ ID NO: 1739317 - RNA, 19 nt, Artificial Sequence
  Description of Artificial Sequence: Synthetic oligonucleotide
aaauaacguauuuaacaag

SEQ ID NO: 1739318 - RNA, 19 nt, Artificial Sequence
  Description of Artificial Sequence: Synthetic oligonucleotide
uaaauaacguauuuaacaa

SEQ ID NO: 1739319 - RNA, 19 nt, Artificial Sequence
  Description of Artificial Sequence: Synthetic oligonucleotide
aguuaaguaacaaaaguuc

SEQ ID NO: 1739320 - RNA, 19 nt, Artificial Sequence
  Description of Artificial Sequence: Synthetic oligonucleotide
aguuuugguucauuuauac

SEQ ID NO: 1739321 - RNA, 19 nt, Artificial Sequence
  Description of Artificial Sequence: Synthetic oligonucleotide
uuugguucaaacaugccac

SEQ ID NO: 1739322 - RNA, 19 nt, Artificial Sequence
  Description of Artificial Sequence: Synthetic oligonucleotide
ucaaacagcccuuucaacc

SEQ ID NO: 1739323 - RNA, 19 nt, Artificial Sequence
  Description of Artificial Sequence: Synthetic oligonucleotide
aauaacguauuuaacaagu

SEQ ID NO: 1739324 - RNA, 19 nt, Artificial Sequence
  Description of Artificial Sequence: Synthetic oligonucleotide
uauuaacuacuuuaaguag

SEQ ID NO: 1739325 - RNA, 19 nt, Artificial Sequence
  Description of Artificial Sequence: Synthetic oligonucleotide
aaggccuuguaucaaacag

SEQ ID NO: 1739326 - RNA, 19 nt, Artificial Sequence
  Description of Artificial Sequence: Synthetic oligonucleotide
gaaaccuugguucuagucc

SEQ ID NO: 1739327 - RNA, 19 nt, Artificial Sequence
  Description of Artificial Sequence: Synthetic oligonucleotide
ucuauuuacauuauugguu

SEQ ID NO: 1739328 - RNA, 19 nt, Artificial Sequence
  Description of Artificial Sequence: Synthetic oligonucleotide
caacacaugaggcagaagc

SEQ ID NO: 1739329 - RNA, 19 nt, Artificial Sequence
  Description of Artificial Sequence: Synthetic oligonucleotide
auugagucaaaugacaaag

SEQ ID NO: 1739330 - RNA, 19 nt, Artificial Sequence
  Description of Artificial Sequence: Synthetic oligonucleotide
aaguagaacaaacuaaaua

SEQ ID NO: 1739331 - RNA, 19 nt, Artificial Sequence
  Description of Artificial Sequence: Synthetic oligonucleotide
auuauugguuuucuguagg

SEQ ID NO: 1739332 - RNA, 19 nt, Artificial Sequence
  Description of Artificial Sequence: Synthetic oligonucleotide
agaguuaaguaacaaaagu

SEQ ID NO: 1739333 - RNA, 19 nt, Artificial Sequence
  Description of Artificial Sequence: Synthetic oligonucleotide
ugagucaaaugacaaagca

SEQ ID NO: 1739334 - RNA, 19 nt, Artificial Sequence
  Description of Artificial Sequence: Synthetic oligonucleotide
aaaggaauauaucaucuuu

SEQ ID NO: 1739335 - RNA, 19 nt, Artificial Sequence
  Description of Artificial Sequence: Synthetic oligonucleotide
auaaguuaugcacagaguu

SEQ ID NO: 1739336 - RNA, 19 nt, Artificial Sequence
  Description of Artificial Sequence: Synthetic oligonucleotide
aggaauauacuugaguggg

SEQ ID NO: 1739337 - RNA, 19 nt, Artificial Sequence
  Description of Artificial Sequence: Synthetic oligonucleotide
uacuuuaaguagaacaaac

SEQ ID NO: 1739338 - RNA, 19 nt, Artificial Sequence
  Description of Artificial Sequence: Synthetic oligonucleotide
auuugguucaaacaugcca

SEQ ID NO: 1739339 - RNA, 19 nt, Artificial Sequence
  Description of Artificial Sequence: Synthetic oligonucleotide
uuguuagucagaaaggaau

SEQ ID NO: 1739340 - RNA, 19 nt, Artificial Sequence
  Description of Artificial Sequence: Synthetic oligonucleotide
agcccuuucaaccauucac

SEQ ID NO: 1739341 - RNA, 19 nt, Artificial Sequence
  Description of Artificial Sequence: Synthetic oligonucleotide
auugacaguguacacuggg

SEQ ID NO: 1739342 - RNA, 19 nt, Artificial Sequence
  Description of Artificial Sequence: Synthetic oligonucleotide
uaagcauugacaguguaca

SEQ ID NO: 1739343 - RNA, 19 nt, Artificial Sequence
  Description of Artificial Sequence: Synthetic oligonucleotide
uuauugguuuucuguaggg

SEQ ID NO: 1739344 - RNA, 19 nt, Artificial Sequence
  Description of Artificial Sequence: Synthetic oligonucleotide
ucagaaaggaauauaucau

SEQ ID NO: 1739345 - RNA, 19 nt, Artificial Sequence
  Description of Artificial Sequence: Synthetic oligonucleotide
ucaaccauucacuggaaca

SEQ ID NO: 1739346 - RNA, 19 nt, Artificial Sequence
  Description of Artificial Sequence: Synthetic oligonucleotide
aaagccuccaagauguguc

SEQ ID NO: 1739347 - RNA, 19 nt, Artificial Sequence
  Description of Artificial Sequence: Synthetic oligonucleotide
guuaaguaacaaaaguucc

SEQ ID NO: 1739348 - RNA, 19 nt, Artificial Sequence
  Description of Artificial Sequence: Synthetic oligonucleotide
gaagaaagccuccaagaug

SEQ ID NO: 1739349 - RNA, 19 nt, Artificial Sequence
  Description of Artificial Sequence: Synthetic oligonucleotide
accaaaccgaaacagaaca

SEQ ID NO: 1739350 - RNA, 19 nt, Artificial Sequence
  Description of Artificial Sequence: Synthetic oligonucleotide
acagcuaacauucaucaaa

SEQ ID NO: 1739351 - RNA, 19 nt, Artificial Sequence
  Description of Artificial Sequence: Synthetic oligonucleotide
uuaacuacuuuaaguagaa

SEQ ID NO: 1739352 - RNA, 19 nt, Artificial Sequence
  Description of Artificial Sequence: Synthetic oligonucleotide
uagucagaaaggaauauau

SEQ ID NO: 1739353 - RNA, 19 nt, Artificial Sequence
  Description of Artificial Sequence: Synthetic oligonucleotide
ucugcuaagcagcugccag

SEQ ID NO: 1739354 - RNA, 19 nt, Artificial Sequence
  Description of Artificial Sequence: Synthetic oligonucleotide
uaaacugacucaaaccaaa

SEQ ID NO: 1739355 - RNA, 19 nt, Artificial Sequence
  Description of Artificial Sequence: Synthetic oligonucleotide
gguauaagcauugacagug

SEQ ID NO: 1739356 - RNA, 19 nt, Artificial Sequence
  Description of Artificial Sequence: Synthetic oligonucleotide
uuuauacaguacauuaaau

SEQ ID NO: 1739357 - RNA, 19 nt, Artificial Sequence
  Description of Artificial Sequence: Synthetic oligonucleotide
uaugcacagaguuaaguaa

SEQ ID NO: 1739358 - RNA, 19 nt, Artificial Sequence
  Description of Artificial Sequence: Synthetic oligonucleotide
aacguauuuaacaaguuuu

SEQ ID NO: 1739359 - RNA, 19 nt, Artificial Sequence
  Description of Artificial Sequence: Synthetic oligonucleotide
agugggaagcaccaccuac

SEQ ID NO: 1739360 - RNA, 19 nt, Artificial Sequence
  Description of Artificial Sequence: Synthetic oligonucleotide
agagauugagggucaaauc

SEQ ID NO: 1739361 - RNA, 19 nt, Artificial Sequence
  Description of Artificial Sequence: Synthetic oligonucleotide
ugucucgauaaacugacuc

SEQ ID NO: 1739362 - RNA, 19 nt, Artificial Sequence
  Description of Artificial Sequence: Synthetic oligonucleotide
uuucuguagggauggagcc

SEQ ID NO: 1739363 - RNA, 19 nt, Artificial Sequence
  Description of Artificial Sequence: Synthetic oligonucleotide
uggcuuucuauuuacauua

SEQ ID NO: 1739364 - RNA, 19 nt, Artificial Sequence
  Description of Artificial Sequence: Synthetic oligonucleotide
uugguucuaguccaguucu

SEQ ID NO: 1739365 - RNA, 19 nt, Artificial Sequence
  Description of Artificial Sequence: Synthetic oligonucleotide
uucuaguccaguucugaag

SEQ ID NO: 1739366 - RNA, 19 nt, Artificial Sequence
  Description of Artificial Sequence: Synthetic oligonucleotide
acauucaucaccaaccucu

SEQ ID NO: 1739367 - RNA, 19 nt, Artificial Sequence
  Description of Artificial Sequence: Synthetic oligonucleotide
cuuucaaccauucacugga

SEQ ID NO: 1739368 - RNA, 19 nt, Artificial Sequence
  Description of Artificial Sequence: Synthetic oligonucleotide
uguguccuauuuguaaugg

SEQ ID NO: 1739369 - RNA, 19 nt, Artificial Sequence
  Description of Artificial Sequence: Synthetic oligonucleotide
uccuauugagucaaaugac

SEQ ID NO: 1739370 - RNA, 19 nt, Artificial Sequence
  Description of Artificial Sequence: Synthetic oligonucleotide
ugacaguguacacugggca

SEQ ID NO: 1739371 - RNA, 19 nt, Artificial Sequence
  Description of Artificial Sequence: Synthetic oligonucleotide
agaacaaacuaaauaacgu

SEQ ID NO: 1739372 - RNA, 19 nt, Artificial Sequence
  Description of Artificial Sequence: Synthetic oligonucleotide
cagaguuaaguaacaaaag

SEQ ID NO: 1739373 - RNA, 19 nt, Artificial Sequence
  Description of Artificial Sequence: Synthetic oligonucleotide
aaguuaugcacagaguuaa

SEQ ID NO: 1739374 - RNA, 19 nt, Artificial Sequence
  Description of Artificial Sequence: Synthetic oligonucleotide
caucucaacuucuuccugg

SEQ ID NO: 1739375 - RNA, 19 nt, Artificial Sequence
  Description of Artificial Sequence: Synthetic oligonucleotide
cugcacaugcccuauuugg

SEQ ID NO: 1739376 - RNA, 19 nt, Artificial Sequence
  Description of Artificial Sequence: Synthetic oligonucleotide
uuaugcacagaguuaagua

SEQ ID NO: 1739377 - RNA, 19 nt, Artificial Sequence
  Description of Artificial Sequence: Synthetic oligonucleotide
auuaacuacuuuaaguaga

SEQ ID NO: 1739378 - RNA, 19 nt, Artificial Sequence
  Description of Artificial Sequence: Synthetic oligonucleotide
acagaguuaaguaacaaaa

SEQ ID NO: 1739379 - RNA, 19 nt, Artificial Sequence
  Description of Artificial Sequence: Synthetic oligonucleotide
uugagucaaaugacaaagc

SEQ ID NO: 1739380 - RNA, 19 nt, Artificial Sequence
  Description of Artificial Sequence: Synthetic oligonucleotide
cacauacuugcugagauag

SEQ ID NO: 1739381 - RNA, 19 nt, Artificial Sequence
  Description of Artificial Sequence: Synthetic oligonucleotide
uugguuuucuguagggaug

SEQ ID NO: 1739382 - RNA, 19 nt, Artificial Sequence
  Description of Artificial Sequence: Synthetic oligonucleotide
auauacuugagugggcagg

SEQ ID NO: 1739383 - RNA, 19 nt, Artificial Sequence
  Description of Artificial Sequence: Synthetic oligonucleotide
auaagcauugacaguguac

SEQ ID NO: 1739384 - RNA, 19 nt, Artificial Sequence
  Description of Artificial Sequence: Synthetic oligonucleotide
uaacguauuuaacaaguuu

SEQ ID NO: 1739385 - RNA, 19 nt, Artificial Sequence
  Description of Artificial Sequence: Synthetic oligonucleotide
uuuacauuauugguuuucu

SEQ ID NO: 1739386 - RNA, 19 nt, Artificial Sequence
  Description of Artificial Sequence: Synthetic oligonucleotide
guuccuauugagucaaaug

SEQ ID NO: 1739387 - RNA, 19 nt, Artificial Sequence
  Description of Artificial Sequence: Synthetic oligonucleotide
uguuagucagaaaggaaua

SEQ ID NO: 1739388 - RNA, 19 nt, Artificial Sequence
  Description of Artificial Sequence: Synthetic oligonucleotide
aucaaacagcccuuucaac

SEQ ID NO: 1739389 - RNA, 19 nt, Artificial Sequence
  Description of Artificial Sequence: Synthetic oligonucleotide
gaacaauuguugcagcuuc

SEQ ID NO: 1739390 - RNA, 19 nt, Artificial Sequence
  Description of Artificial Sequence: Synthetic oligonucleotide
caaacagcuaacauucauc

SEQ ID NO: 1739391 - RNA, 19 nt, Artificial Sequence
  Description of Artificial Sequence: Synthetic oligonucleotide
aacuacaaggcagggacug

SEQ ID NO: 1739392 - RNA, 19 nt, Artificial Sequence
  Description of Artificial Sequence: Synthetic oligonucleotide
uaaguuaugcacagaguua

SEQ ID NO: 1739393 - RNA, 19 nt, Artificial Sequence
  Description of Artificial Sequence: Synthetic oligonucleotide
cagaaaggaauauaucauc

SEQ ID NO: 1739394 - RNA, 19 nt, Artificial Sequence
  Description of Artificial Sequence: Synthetic oligonucleotide
ucucacauuugguucaaac

SEQ ID NO: 1739395 - RNA, 19 nt, Artificial Sequence
  Description of Artificial Sequence: Synthetic oligonucleotide
aaccagauucaaauguauc

SEQ ID NO: 1739396 - RNA, 19 nt, Artificial Sequence
  Description of Artificial Sequence: Synthetic oligonucleotide
cagcuaacauucaucaaag

SEQ ID NO: 1739397 - RNA, 19 nt, Artificial Sequence
  Description of Artificial Sequence: Synthetic oligonucleotide
ugguuuucuguagggaugg

SEQ ID NO: 1739398 - RNA, 19 nt, Artificial Sequence
  Description of Artificial Sequence: Synthetic oligonucleotide
gacaguguacacugggcag

SEQ ID NO: 1739399 - RNA, 19 nt, Artificial Sequence
  Description of Artificial Sequence: Synthetic oligonucleotide
aguaacaaaaguuccuauu

SEQ ID NO: 1739400 - RNA, 19 nt, Artificial Sequence
  Description of Artificial Sequence: Synthetic oligonucleotide
agcuaacauucaucaaagc

SEQ ID NO: 1739401 - RNA, 19 nt, Artificial Sequence
  Description of Artificial Sequence: Synthetic oligonucleotide
aaacuaaauaacguauuua

SEQ ID NO: 1739402 - RNA, 19 nt, Artificial Sequence
  Description of Artificial Sequence: Synthetic oligonucleotide
cuggcaacuacaaggcagg

SEQ ID NO: 1739403 - RNA, 19 nt, Artificial Sequence
  Description of Artificial Sequence: Synthetic oligonucleotide
aauaaguuaugcacagagu

SEQ ID NO: 1739404 - RNA, 19 nt, Artificial Sequence
  Description of Artificial Sequence: Synthetic oligonucleotide
gcugagauagcuuccagag

SEQ ID NO: 1739405 - RNA, 19 nt, Artificial Sequence
  Description of Artificial Sequence: Synthetic oligonucleotide
gguaguucagcauuuuggc

SEQ ID NO: 1739406 - RNA, 19 nt, Artificial Sequence
  Description of Artificial Sequence: Synthetic oligonucleotide
uauugagucaaaugacaaa

SEQ ID NO: 1739407 - RNA, 19 nt, Artificial Sequence
  Description of Artificial Sequence: Synthetic oligonucleotide
aacauucaucaaagcacgc

SEQ ID NO: 1739408 - RNA, 19 nt, Artificial Sequence
  Description of Artificial Sequence: Synthetic oligonucleotide
acuacuuuaaguagaacaa

SEQ ID NO: 1739409 - RNA, 19 nt, Artificial Sequence
  Description of Artificial Sequence: Synthetic oligonucleotide
uguggguggcuucacauuc

SEQ ID NO: 1739410 - RNA, 19 nt, Artificial Sequence
  Description of Artificial Sequence: Synthetic oligonucleotide
acaguguacacugggcagc

SEQ ID NO: 1739411 - RNA, 19 nt, Artificial Sequence
  Description of Artificial Sequence: Synthetic oligonucleotide
gcaacuacaaggcagggac

SEQ ID NO: 1739412 - RNA, 19 nt, Artificial Sequence
  Description of Artificial Sequence: Synthetic oligonucleotide
cuuacuccaucaucuuugg

SEQ ID NO: 1739413 - RNA, 19 nt, Artificial Sequence
  Description of Artificial Sequence: Synthetic oligonucleotide
aaaguuccuauugagucaa

SEQ ID NO: 1739414 - RNA, 19 nt, Artificial Sequence
  Description of Artificial Sequence: Synthetic oligonucleotide
auaucaucuuuauuaacua

SEQ ID NO: 1739415 - RNA, 19 nt, Artificial Sequence
  Description of Artificial Sequence: Synthetic oligonucleotide
aaggggugucaacacauga

SEQ ID NO: 1739416 - RNA, 19 nt, Artificial Sequence
  Description of Artificial Sequence: Synthetic oligonucleotide
uuucaacccacaaucccgu

SEQ ID NO: 1739417 - RNA, 19 nt, Artificial Sequence
  Description of Artificial Sequence: Synthetic oligonucleotide
guguacacugggcagcugg

SEQ ID NO: 1739418 - RNA, 19 nt, Artificial Sequence
  Description of Artificial Sequence: Synthetic oligonucleotide
gcuaacauucaucaaagca

SEQ ID NO: 1739419 - RNA, 19 nt, Artificial Sequence
  Description of Artificial Sequence: Synthetic oligonucleotide
uaaguaacaaaaguuccua

SEQ ID NO: 1739420 - RNA, 19 nt, Artificial Sequence
  Description of Artificial Sequence: Synthetic oligonucleotide
gucugcaguuuccaggacg

SEQ ID NO: 1739421 - RNA, 19 nt, Artificial Sequence
  Description of Artificial Sequence: Synthetic oligonucleotide
ugagugggaagcaccaccu

SEQ ID NO: 1739422 - RNA, 19 nt, Artificial Sequence
  Description of Artificial Sequence: Synthetic oligonucleotide
aaagccacaggaguggaau

SEQ ID NO: 1739423 - RNA, 19 nt, Artificial Sequence
  Description of Artificial Sequence: Synthetic oligonucleotide
guagaacaaacuaaauaac

SEQ ID NO: 1739424 - RNA, 19 nt, Artificial Sequence
  Description of Artificial Sequence: Synthetic oligonucleotide
ugcacagaguuaaguaaca

SEQ ID NO: 1739425 - RNA, 19 nt, Artificial Sequence
  Description of Artificial Sequence: Synthetic oligonucleotide
uuccuuaugcucuguugag

SEQ ID NO: 1739426 - RNA, 19 nt, Artificial Sequence
  Description of Artificial Sequence: Synthetic oligonucleotide
uagggauggagccuuugca

SEQ ID NO: 1739427 - RNA, 19 nt, Artificial Sequence
  Description of Artificial Sequence: Synthetic oligonucleotide
cuguugaguccucacauac

SEQ ID NO: 1739428 - RNA, 19 nt, Artificial Sequence
  Description of Artificial Sequence: Synthetic oligonucleotide
aaucccgucugcaguuucc

SEQ ID NO: 1739429 - RNA, 19 nt, Artificial Sequence
  Description of Artificial Sequence: Synthetic oligonucleotide
uggaacaauuguugcagcu

SEQ ID NO: 1739430 - RNA, 19 nt, Artificial Sequence
  Description of Artificial Sequence: Synthetic oligonucleotide
ucagcauuuuggcuuuaca

SEQ ID NO: 1739431 - RNA, 19 nt, Artificial Sequence
  Description of Artificial Sequence: Synthetic oligonucleotide
ggaaugaaggccuuguauc

SEQ ID NO: 1739432 - RNA, 19 nt, Artificial Sequence
  Description of Artificial Sequence: Synthetic oligonucleotide
uuuuggcuuuacaaggaau

SEQ ID NO: 1739433 - RNA, 19 nt, Artificial Sequence
  Description of Artificial Sequence: Synthetic oligonucleotide
ucaacccacaaucccgucu

SEQ ID NO: 1739434 - RNA, 19 nt, Artificial Sequence
  Description of Artificial Sequence: Synthetic oligonucleotide
acuuuaaguagaacaaacu

SEQ ID NO: 1739435 - RNA, 19 nt, Artificial Sequence
  Description of Artificial Sequence: Synthetic oligonucleotide
auucaucaaagcacgcugg

SEQ ID NO: 1739436 - RNA, 19 nt, Artificial Sequence
  Description of Artificial Sequence: Synthetic oligonucleotide
uucucugcaaacagcuaac

SEQ ID NO: 1739437 - RNA, 19 nt, Artificial Sequence
  Description of Artificial Sequence: Synthetic oligonucleotide
aaaaccagauucaaaugua

SEQ ID NO: 1739438 - RNA, 19 nt, Artificial Sequence
  Description of Artificial Sequence: Synthetic oligonucleotide
ugcacaugcccuauuuggu

SEQ ID NO: 1739439 - RNA, 19 nt, Artificial Sequence
  Description of Artificial Sequence: Synthetic oligonucleotide
aaagcacgcuggcuugguc

SEQ ID NO: 1739440 - RNA, 19 nt, Artificial Sequence
  Description of Artificial Sequence: Synthetic oligonucleotide
aggccuuguaucaaacagc

SEQ ID NO: 1739441 - RNA, 19 nt, Artificial Sequence
  Description of Artificial Sequence: Synthetic oligonucleotide
cuuaugcucuguugagucc

SEQ ID NO: 1739442 - RNA, 19 nt, Artificial Sequence
  Description of Artificial Sequence: Synthetic oligonucleotide
ucuaccuccuuagugcuga

SEQ ID NO: 1739443 - RNA, 19 nt, Artificial Sequence
  Description of Artificial Sequence: Synthetic oligonucleotide
agggucaaaucauugccca

SEQ ID NO: 1739444 - RNA, 19 nt, Artificial Sequence
  Description of Artificial Sequence: Synthetic oligonucleotide
uuaugcucuguugaguccu

SEQ ID NO: 1739445 - RNA, 19 nt, Artificial Sequence
  Description of Artificial Sequence: Synthetic oligonucleotide
aaaccgaaacagaacaaaa

SEQ ID NO: 1739446 - RNA, 19 nt, Artificial Sequence
  Description of Artificial Sequence: Synthetic oligonucleotide
ggggugucaacacaugagg

SEQ ID NO: 1739447 - RNA, 19 nt, Artificial Sequence
  Description of Artificial Sequence: Synthetic oligonucleotide
gugucaacacaugaggcag

SEQ ID NO: 1739448 - RNA, 19 nt, Artificial Sequence
  Description of Artificial Sequence: Synthetic oligonucleotide
cauuccuuaugcucuguug

SEQ ID NO: 1739449 - RNA, 19 nt, Artificial Sequence
  Description of Artificial Sequence: Synthetic oligonucleotide
gcauugacaguguacacug

SEQ ID NO: 1739450 - RNA, 19 nt, Artificial Sequence
  Description of Artificial Sequence: Synthetic oligonucleotide
cuaagcagcugccagguca

SEQ ID NO: 1739451 - RNA, 19 nt, Artificial Sequence
  Description of Artificial Sequence: Synthetic oligonucleotide
ucucgauaaacugacucaa

SEQ ID NO: 1739452 - RNA, 19 nt, Artificial Sequence
  Description of Artificial Sequence: Synthetic oligonucleotide
uuggcuuucuauuuacauu

SEQ ID NO: 1739453 - RNA, 19 nt, Artificial Sequence
  Description of Artificial Sequence: Synthetic oligonucleotide
uauugguuuucuguaggga

SEQ ID NO: 1739454 - RNA, 19 nt, Artificial Sequence
  Description of Artificial Sequence: Synthetic oligonucleotide
cuugguucuaguccaguuc

SEQ ID NO: 1739455 - RNA, 19 nt, Artificial Sequence
  Description of Artificial Sequence: Synthetic oligonucleotide
ugcugagauagcuuccaga

SEQ ID NO: 1739456 - RNA, 19 nt, Artificial Sequence
  Description of Artificial Sequence: Synthetic oligonucleotide
uucaaccauucacuggaac

SEQ ID NO: 1739457 - RNA, 19 nt, Artificial Sequence
  Description of Artificial Sequence: Synthetic oligonucleotide
acaaaaguuccuauugagu

SEQ ID NO: 1739458 - RNA, 19 nt, Artificial Sequence
  Description of Artificial Sequence: Synthetic oligonucleotide
uguugaguccucacauacu

SEQ ID NO: 1739459 - RNA, 19 nt, Artificial Sequence
  Description of Artificial Sequence: Synthetic oligonucleotide
cuauugagucaaaugacaa

SEQ ID NO: 1739460 - RNA, 19 nt, Artificial Sequence
  Description of Artificial Sequence: Synthetic oligonucleotide
aaagcacagaaaaccagau

SEQ ID NO: 1739461 - RNA, 19 nt, Artificial Sequence
  Description of Artificial Sequence: Synthetic oligonucleotide
aucaaagcacgcuggcuug

SEQ ID NO: 1739462 - RNA, 19 nt, Artificial Sequence
  Description of Artificial Sequence: Synthetic oligonucleotide
acguauuuaacaaguuuug

SEQ ID NO: 1739463 - RNA, 19 nt, Artificial Sequence
  Description of Artificial Sequence: Synthetic oligonucleotide
gucucgauaaacugacuca

SEQ ID NO: 1739464 - RNA, 19 nt, Artificial Sequence
  Description of Artificial Sequence: Synthetic oligonucleotide
uuuggaaaggggugucaac

SEQ ID NO: 1739465 - RNA, 19 nt, Artificial Sequence
  Description of Artificial Sequence: Synthetic oligonucleotide
acaauuguugcagcuucuc

SEQ ID NO: 1739466 - RNA, 19 nt, Artificial Sequence
  Description of Artificial Sequence: Synthetic oligonucleotide
aaaccagauucaaauguau

SEQ ID NO: 1739467 - RNA, 19 nt, Artificial Sequence
  Description of Artificial Sequence: Synthetic oligonucleotide
gagggucaaaucauugccc

SEQ ID NO: 1739468 - RNA, 19 nt, Artificial Sequence
  Description of Artificial Sequence: Synthetic oligonucleotide
uuagucagaaaggaauaua

SEQ ID NO: 1739469 - RNA, 19 nt, Artificial Sequence
  Description of Artificial Sequence: Synthetic oligonucleotide
caaauguauccugugggug

SEQ ID NO: 1739470 - RNA, 19 nt, Artificial Sequence
  Description of Artificial Sequence: Synthetic oligonucleotide
gacgauggccaucugcuca

SEQ ID NO: 1739471 - RNA, 19 nt, Artificial Sequence
  Description of Artificial Sequence: Synthetic oligonucleotide
guuuugguucauuuauaca

SEQ ID NO: 1739472 - RNA, 19 nt, Artificial Sequence
  Description of Artificial Sequence: Synthetic oligonucleotide
ugguauaagcauugacagu

SEQ ID NO: 1739473 - RNA, 19 nt, Artificial Sequence
  Description of Artificial Sequence: Synthetic oligonucleotide
uugaguccucacauacuug

SEQ ID NO: 1739474 - RNA, 19 nt, Artificial Sequence
  Description of Artificial Sequence: Synthetic oligonucleotide
caaccucugcaaaccaugc

SEQ ID NO: 1739475 - RNA, 19 nt, Artificial Sequence
  Description of Artificial Sequence: Synthetic oligonucleotide
uacuugagugggcaggcuc

SEQ ID NO: 1739476 - RNA, 19 nt, Artificial Sequence
  Description of Artificial Sequence: Synthetic oligonucleotide
cauuugguucaaacaugcc

SEQ ID NO: 1739477 - RNA, 19 nt, Artificial Sequence
  Description of Artificial Sequence: Synthetic oligonucleotide
aaccucugcaaaccaugcu

SEQ ID NO: 1739478 - RNA, 19 nt, Artificial Sequence
  Description of Artificial Sequence: Synthetic oligonucleotide
cacacuuacuccaucaucu

SEQ ID NO: 1739479 - RNA, 19 nt, Artificial Sequence
  Description of Artificial Sequence: Synthetic oligonucleotide
uccuauuuguaaugguuuu

SEQ ID NO: 1739480 - RNA, 19 nt, Artificial Sequence
  Description of Artificial Sequence: Synthetic oligonucleotide
auugagggucaaaucauug

SEQ ID NO: 1739481 - RNA, 19 nt, Artificial Sequence
  Description of Artificial Sequence: Synthetic oligonucleotide
ggaacuuggaaagccacag

SEQ ID NO: 1739482 - RNA, 19 nt, Artificial Sequence
  Description of Artificial Sequence: Synthetic oligonucleotide
acauucaucaaagcacgcu

SEQ ID NO: 1739483 - RNA, 19 nt, Artificial Sequence
  Description of Artificial Sequence: Synthetic oligonucleotide
accucuugggcuguggaag

SEQ ID NO: 1739484 - RNA, 19 nt, Artificial Sequence
  Description of Artificial Sequence: Synthetic oligonucleotide
uguacacugggcagcugga

SEQ ID NO: 1739485 - RNA, 19 nt, Artificial Sequence
  Description of Artificial Sequence: Synthetic oligonucleotide
cugcuaagcagcugccagg

SEQ ID NO: 1739486 - RNA, 19 nt, Artificial Sequence
  Description of Artificial Sequence: Synthetic oligonucleotide
uggccaucugcucauuccu

SEQ ID NO: 1739487 - RNA, 19 nt, Artificial Sequence
  Description of Artificial Sequence: Synthetic oligonucleotide
cugcucauuccuuaugcuc

SEQ ID NO: 1739488 - RNA, 19 nt, Artificial Sequence
  Description of Artificial Sequence: Synthetic oligonucleotide
agauagcuuccagagccac

SEQ ID NO: 1739489 - RNA, 19 nt, Artificial Sequence
  Description of Artificial Sequence: Synthetic oligonucleotide
caagauguguccuauuugu

SEQ ID NO: 1739490 - RNA, 19 nt, Artificial Sequence
  Description of Artificial Sequence: Synthetic oligonucleotide
aagcacagaaaaccagauu

SEQ ID NO: 1739491 - RNA, 19 nt, Artificial Sequence
  Description of Artificial Sequence: Synthetic oligonucleotide
auuauaggugugugccaug

SEQ ID NO: 1739492 - RNA, 19 nt, Artificial Sequence
  Description of Artificial Sequence: Synthetic oligonucleotide
aaugaaggccuuguaucaa

SEQ ID NO: 1739493 - RNA, 19 nt, Artificial Sequence
  Description of Artificial Sequence: Synthetic oligonucleotide
ugucaacacaugaggcaga

SEQ ID NO: 1739494 - RNA, 19 nt, Artificial Sequence
  Description of Artificial Sequence: Synthetic oligonucleotide
aaccaugcuuggaagcuug

SEQ ID NO: 1739495 - RNA, 19 nt, Artificial Sequence
  Description of Artificial Sequence: Synthetic oligonucleotide
augcuuggaagcuuggcuu

SEQ ID NO: 1739496 - RNA, 19 nt, Artificial Sequence
  Description of Artificial Sequence: Synthetic oligonucleotide
gaguuaaguaacaaaaguu

SEQ ID NO: 1739497 - RNA, 19 nt, Artificial Sequence
  Description of Artificial Sequence: Synthetic oligonucleotide
cauucaucaccaaccucug

SEQ ID NO: 1739498 - RNA, 19 nt, Artificial Sequence
  Description of Artificial Sequence: Synthetic oligonucleotide
ucaaagcacgcuggcuugg

SEQ ID NO: 1739499 - RNA, 19 nt, Artificial Sequence
  Description of Artificial Sequence: Synthetic oligonucleotide
uccucacauacuugcugag

SEQ ID NO: 1739500 - RNA, 19 nt, Artificial Sequence
  Description of Artificial Sequence: Synthetic oligonucleotide
cuggaacaauuguugcagc

SEQ ID NO: 1739501 - RNA, 19 nt, Artificial Sequence
  Description of Artificial Sequence: Synthetic oligonucleotide
cauugacaguguacacugg

SEQ ID NO: 1739502 - RNA, 19 nt, Artificial Sequence
  Description of Artificial Sequence: Synthetic oligonucleotide
uauuugguauaagcauuga

SEQ ID NO: 1739503 - RNA, 19 nt, Artificial Sequence
  Description of Artificial Sequence: Synthetic oligonucleotide
gauguguccuauuuguaau

SEQ ID NO: 1739504 - RNA, 19 nt, Artificial Sequence
  Description of Artificial Sequence: Synthetic oligonucleotide
ggaagcaccaccuaccucu

SEQ ID NO: 1739505 - RNA, 19 nt, Artificial Sequence
  Description of Artificial Sequence: Synthetic oligonucleotide
uugcugagauagcuuccag

SEQ ID NO: 1739506 - RNA, 19 nt, Artificial Sequence
  Description of Artificial Sequence: Synthetic oligonucleotide
gugugugccaugguggugc

SEQ ID NO: 1739507 - RNA, 19 nt, Artificial Sequence
  Description of Artificial Sequence: Synthetic oligonucleotide
cuggcucacacuuacucca

SEQ ID NO: 1739508 - RNA, 19 nt, Artificial Sequence
  Description of Artificial Sequence: Synthetic oligonucleotide
acaaacuaaauaacguauu

SEQ ID NO: 1739509 - RNA, 19 nt, Artificial Sequence
  Description of Artificial Sequence: Synthetic oligonucleotide
cacagaguuaaguaacaaa

SEQ ID NO: 1739510 - RNA, 19 nt, Artificial Sequence
  Description of Artificial Sequence: Synthetic oligonucleotide
uggggucugagugggaagc

SEQ ID NO: 1739511 - RNA, 19 nt, Artificial Sequence
  Description of Artificial Sequence: Synthetic oligonucleotide
acaaggcagggacugggcu

SEQ ID NO: 1739512 - RNA, 19 nt, Artificial Sequence
  Description of Artificial Sequence: Synthetic oligonucleotide
ggucaaaucauugcccacc

SEQ ID NO: 1739513 - RNA, 19 nt, Artificial Sequence
  Description of Artificial Sequence: Synthetic oligonucleotide
ggugucaacacaugaggca

SEQ ID NO: 1739514 - RNA, 19 nt, Artificial Sequence
  Description of Artificial Sequence: Synthetic oligonucleotide
agcucaguuucuucuggcu

SEQ ID NO: 1739515 - RNA, 19 nt, Artificial Sequence
  Description of Artificial Sequence: Synthetic oligonucleotide
aacaauuguugcagcuucu

SEQ ID NO: 1739516 - RNA, 19 nt, Artificial Sequence
  Description of Artificial Sequence: Synthetic oligonucleotide
ccugucucgauaaacugac

SEQ ID NO: 1739517 - RNA, 19 nt, Artificial Sequence
  Description of Artificial Sequence: Synthetic oligonucleotide
ggccuuguaucaaacagcc

SEQ ID NO: 1739518 - RNA, 19 nt, Artificial Sequence
  Description of Artificial Sequence: Synthetic oligonucleotide
cuuggaaagccacaggagu

SEQ ID NO: 1739519 - RNA, 19 nt, Artificial Sequence
  Description of Artificial Sequence: Synthetic oligonucleotide
ggucaaggaucuuccacag

SEQ ID NO: 1739520 - RNA, 19 nt, Artificial Sequence
  Description of Artificial Sequence: Synthetic oligonucleotide
ugcuaagcagcugccaggu

SEQ ID NO: 1739521 - RNA, 19 nt, Artificial Sequence
  Description of Artificial Sequence: Synthetic oligonucleotide
gucaaaucauugcccacca

SEQ ID NO: 1739522 - RNA, 19 nt, Artificial Sequence
  Description of Artificial Sequence: Synthetic oligonucleotide
auaaacugacucaaaccaa

SEQ ID NO: 1739523 - RNA, 19 nt, Artificial Sequence
  Description of Artificial Sequence: Synthetic oligonucleotide
aaaggggugucaacacaug

SEQ ID NO: 1739524 - RNA, 19 nt, Artificial Sequence
  Description of Artificial Sequence: Synthetic oligonucleotide
uauaggugugugccauggu

SEQ ID NO: 1739525 - RNA, 19 nt, Artificial Sequence
  Description of Artificial Sequence: Synthetic oligonucleotide
ccuuucaaccauucacugg

SEQ ID NO: 1739526 - RNA, 19 nt, Artificial Sequence
  Description of Artificial Sequence: Synthetic oligonucleotide
aggggugucaacacaugag

SEQ ID NO: 1739527 - RNA, 19 nt, Artificial Sequence
  Description of Artificial Sequence: Synthetic oligonucleotide
gcaaaccaugcuuggaagc

SEQ ID NO: 1739528 - RNA, 19 nt, Artificial Sequence
  Description of Artificial Sequence: Synthetic oligonucleotide
cuggaaaccuugguucuag

SEQ ID NO: 1739529 - RNA, 19 nt, Artificial Sequence
  Description of Artificial Sequence: Synthetic oligonucleotide
uuucaaccauucacuggaa

SEQ ID NO: 1739530 - RNA, 19 nt, Artificial Sequence
  Description of Artificial Sequence: Synthetic oligonucleotide
ucuguagggauggagccuu

SEQ ID NO: 1739531 - RNA, 19 nt, Artificial Sequence
  Description of Artificial Sequence: Synthetic oligonucleotide
uauccuguggguggcuuca

SEQ ID NO: 1739532 - RNA, 19 nt, Artificial Sequence
  Description of Artificial Sequence: Synthetic oligonucleotide
agauugagggucaaaucau

SEQ ID NO: 1739533 - RNA, 19 nt, Artificial Sequence
  Description of Artificial Sequence: Synthetic oligonucleotide
uccuuaugcucuguugagu

SEQ ID NO: 1739534 - RNA, 19 nt, Artificial Sequence
  Description of Artificial Sequence: Synthetic oligonucleotide
acacuagccagcucaguuu

SEQ ID NO: 1739535 - RNA, 19 nt, Artificial Sequence
  Description of Artificial Sequence: Synthetic oligonucleotide
ugguucuaguccaguucug

SEQ ID NO: 1739536 - RNA, 19 nt, Artificial Sequence
  Description of Artificial Sequence: Synthetic oligonucleotide
cacuggaacaauuguugca

SEQ ID NO: 1739537 - RNA, 19 nt, Artificial Sequence
  Description of Artificial Sequence: Synthetic oligonucleotide
ucacauacuugcugagaua

SEQ ID NO: 1739538 - RNA, 19 nt, Artificial Sequence
  Description of Artificial Sequence: Synthetic oligonucleotide
ccuauugagucaaaugaca

SEQ ID NO: 1739539 - RNA, 19 nt, Artificial Sequence
  Description of Artificial Sequence: Synthetic oligonucleotide
ugacaagauggggucugag

SEQ ID NO: 1739540 - RNA, 19 nt, Artificial Sequence
  Description of Artificial Sequence: Synthetic oligonucleotide
ccuuaugcucuguugaguc

SEQ ID NO: 1739541 - RNA, 19 nt, Artificial Sequence
  Description of Artificial Sequence: Synthetic oligonucleotide
gugggaagcaccaccuacc

SEQ ID NO: 1739542 - RNA, 19 nt, Artificial Sequence
  Description of Artificial Sequence: Synthetic oligonucleotide
agugggcaggcucugcuaa

SEQ ID NO: 1739543 - RNA, 19 nt, Artificial Sequence
  Description of Artificial Sequence: Synthetic oligonucleotide
cagcucaguuucuucuggc

SEQ ID NO: 1739544 - RNA, 19 nt, Artificial Sequence
  Description of Artificial Sequence: Synthetic oligonucleotide
auggggucugagugggaag

SEQ ID NO: 1739545 - RNA, 19 nt, Artificial Sequence
  Description of Artificial Sequence: Synthetic oligonucleotide
aacaugccaccacccaguu

SEQ ID NO: 1739546 - RNA, 19 nt, Artificial Sequence
  Description of Artificial Sequence: Synthetic oligonucleotide
gagagauugagggucaaau

SEQ ID NO: 1739547 - RNA, 19 nt, Artificial Sequence
  Description of Artificial Sequence: Synthetic oligonucleotide
uucuguagggauggagccu

SEQ ID NO: 1739548 - RNA, 19 nt, Artificial Sequence
  Description of Artificial Sequence: Synthetic oligonucleotide
cuggaggccugacaagaug

SEQ ID NO: 1739549 - RNA, 19 nt, Artificial Sequence
  Description of Artificial Sequence: Synthetic oligonucleotide
uaguccaguucugaagaaa

SEQ ID NO: 1739550 - RNA, 19 nt, Artificial Sequence
  Description of Artificial Sequence: Synthetic oligonucleotide
aguuccuauugagucaaau

SEQ ID NO: 1739551 - RNA, 19 nt, Artificial Sequence
  Description of Artificial Sequence: Synthetic oligonucleotide
ccuuguaucaaacagcccu

SEQ ID NO: 1739552 - RNA, 19 nt, Artificial Sequence
  Description of Artificial Sequence: Synthetic oligonucleotide
uggcuuuacaaggaauaua

SEQ ID NO: 1739553 - RNA, 19 nt, Artificial Sequence
  Description of Artificial Sequence: Synthetic oligonucleotide
acaugaggcagaagcaggu

SEQ ID NO: 1739554 - RNA, 19 nt, Artificial Sequence
  Description of Artificial Sequence: Synthetic oligonucleotide
ugcuuggaagcuuggcuuu

SEQ ID NO: 1739555 - RNA, 19 nt, Artificial Sequence
  Description of Artificial Sequence: Synthetic oligonucleotide
ggaaaccuugguucuaguc

SEQ ID NO: 1739556 - RNA, 19 nt, Artificial Sequence
  Description of Artificial Sequence: Synthetic oligonucleotide
ucaaaucauugcccaccau

SEQ ID NO: 1739557 - RNA, 19 nt, Artificial Sequence
  Description of Artificial Sequence: Synthetic oligonucleotide
acuugagugggcaggcucu

SEQ ID NO: 1739558 - RNA, 19 nt, Artificial Sequence
  Description of Artificial Sequence: Synthetic oligonucleotide
cugcaaaccaugcuuggaa

SEQ ID NO: 1739559 - RNA, 19 nt, Artificial Sequence
  Description of Artificial Sequence: Synthetic oligonucleotide
auaacguauuuaacaaguu

SEQ ID NO: 1739560 - RNA, 19 nt, Artificial Sequence
  Description of Artificial Sequence: Synthetic oligonucleotide
caaacuaaauaacguauuu

SEQ ID NO: 1739561 - RNA, 19 nt, Artificial Sequence
  Description of Artificial Sequence: Synthetic oligonucleotide
caucaggaacuuggaaagc

SEQ ID NO: 1739562 - RNA, 19 nt, Artificial Sequence
  Description of Artificial Sequence: Synthetic oligonucleotide
uguagggauggagccuuug

SEQ ID NO: 1739563 - RNA, 19 nt, Artificial Sequence
  Description of Artificial Sequence: Synthetic oligonucleotide
acagcccuuucaaccauuc

SEQ ID NO: 1739564 - RNA, 19 nt, Artificial Sequence
  Description of Artificial Sequence: Synthetic oligonucleotide
aggccugacaagauggggu

SEQ ID NO: 1739565 - RNA, 19 nt, Artificial Sequence
  Description of Artificial Sequence: Synthetic oligonucleotide
aguuaugcacagaguuaag

SEQ ID NO: 1739566 - RNA, 19 nt, Artificial Sequence
  Description of Artificial Sequence: Synthetic oligonucleotide
aagauguguccuauuugua

SEQ ID NO: 1739567 - RNA, 19 nt, Artificial Sequence
  Description of Artificial Sequence: Synthetic oligonucleotide
guucuaguccaguucugaa

SEQ ID NO: 1739568 - RNA, 19 nt, Artificial Sequence
  Description of Artificial Sequence: Synthetic oligonucleotide
caugcuuggaagcuuggcu

SEQ ID NO: 1739569 - RNA, 19 nt, Artificial Sequence
  Description of Artificial Sequence: Synthetic oligonucleotide
uucagcauuuuggcuuuac

SEQ ID NO: 1739570 - RNA, 19 nt, Artificial Sequence
  Description of Artificial Sequence: Synthetic oligonucleotide
uggcaacuacaaggcaggg

SEQ ID NO: 1739571 - RNA, 19 nt, Artificial Sequence
  Description of Artificial Sequence: Synthetic oligonucleotide
guaguucagcauuuuggcu

SEQ ID NO: 1739572 - RNA, 19 nt, Artificial Sequence
  Description of Artificial Sequence: Synthetic oligonucleotide
gauggggucugagugggaa

SEQ ID NO: 1739573 - RNA, 19 nt, Artificial Sequence
  Description of Artificial Sequence: Synthetic oligonucleotide
gaaaggggugucaacacau

SEQ ID NO: 1739574 - RNA, 19 nt, Artificial Sequence
  Description of Artificial Sequence: Synthetic oligonucleotide
cccgucugcaguuuccagg

SEQ ID NO: 1739575 - RNA, 19 nt, Artificial Sequence
  Description of Artificial Sequence: Synthetic oligonucleotide
ccuggcucacacuuacucc

SEQ ID NO: 1739576 - RNA, 19 nt, Artificial Sequence
  Description of Artificial Sequence: Synthetic oligonucleotide
cucacauacuugcugagau

SEQ ID NO: 1739577 - RNA, 19 nt, Artificial Sequence
  Description of Artificial Sequence: Synthetic oligonucleotide
uggguggcuucacauucau

SEQ ID NO: 1739578 - RNA, 19 nt, Artificial Sequence
  Description of Artificial Sequence: Synthetic oligonucleotide
uggaaaccuugguucuagu

SEQ ID NO: 1739579 - RNA, 19 nt, Artificial Sequence
  Description of Artificial Sequence: Synthetic oligonucleotide
caccaccuaccucuugggc

SEQ ID NO: 1739580 - RNA, 19 nt, Artificial Sequence
  Description of Artificial Sequence: Synthetic oligonucleotide
acacuuacuccaucaucuu

SEQ ID NO: 1739581 - RNA, 19 nt, Artificial Sequence
  Description of Artificial Sequence: Synthetic oligonucleotide
gaagcagguaguucagcau

SEQ ID NO: 1739582 - RNA, 19 nt, Artificial Sequence
  Description of Artificial Sequence: Synthetic oligonucleotide
cuggcccacacuagccagc

SEQ ID NO: 1739583 - RNA, 19 nt, Artificial Sequence
  Description of Artificial Sequence: Synthetic oligonucleotide
aaccuugguucuaguccag

SEQ ID NO: 1739584 - RNA, 19 nt, Artificial Sequence
  Description of Artificial Sequence: Synthetic oligonucleotide
uuucucacauuugguucaa

SEQ ID NO: 1739585 - RNA, 19 nt, Artificial Sequence
  Description of Artificial Sequence: Synthetic oligonucleotide
ccagcucaguuucuucugg

SEQ ID NO: 1739586 - RNA, 19 nt, Artificial Sequence
  Description of Artificial Sequence: Synthetic oligonucleotide
gccuuugcagccucaucag

SEQ ID NO: 1739587 - RNA, 19 nt, Artificial Sequence
  Description of Artificial Sequence: Synthetic oligonucleotide
acaguacauuaaauaaguu

SEQ ID NO: 1739588 - RNA, 19 nt, Artificial Sequence
  Description of Artificial Sequence: Synthetic oligonucleotide
aggagccuggaaaccuugg

SEQ ID NO: 1739589 - RNA, 19 nt, Artificial Sequence
  Description of Artificial Sequence: Synthetic oligonucleotide
guacacugggcagcuggag

SEQ ID NO: 1739590 - RNA, 19 nt, Artificial Sequence
  Description of Artificial Sequence: Synthetic oligonucleotide
uucaacccacaaucccguc

SEQ ID NO: 1739591 - RNA, 19 nt, Artificial Sequence
  Description of Artificial Sequence: Synthetic oligonucleotide
gaaagccuccaagaugugu

SEQ ID NO: 1739592 - RNA, 19 nt, Artificial Sequence
  Description of Artificial Sequence: Synthetic oligonucleotide
guauccuguggguggcuuc

SEQ ID NO: 1739593 - RNA, 19 nt, Artificial Sequence
  Description of Artificial Sequence: Synthetic oligonucleotide
ccaccuaccucuugggcug

SEQ ID NO: 1739594 - RNA, 19 nt, Artificial Sequence
  Description of Artificial Sequence: Synthetic oligonucleotide
acaugcccuauuugguaua

SEQ ID NO: 1739595 - RNA, 19 nt, Artificial Sequence
  Description of Artificial Sequence: Synthetic oligonucleotide
uggcucacacuuacuccau

SEQ ID NO: 1739596 - RNA, 19 nt, Artificial Sequence
  Description of Artificial Sequence: Synthetic oligonucleotide
cccuuucaaccauucacug

SEQ ID NO: 1739597 - RNA, 19 nt, Artificial Sequence
  Description of Artificial Sequence: Synthetic oligonucleotide
ccucuugggcuguggaagg

SEQ ID NO: 1739598 - RNA, 19 nt, Artificial Sequence
  Description of Artificial Sequence: Synthetic oligonucleotide
uguauccuguggguggcuu

SEQ ID NO: 1739599 - RNA, 19 nt, Artificial Sequence
  Description of Artificial Sequence: Synthetic oligonucleotide
caaaccaugcuuggaagcu

SEQ ID NO: 1739600 - RNA, 19 nt, Artificial Sequence
  Description of Artificial Sequence: Synthetic oligonucleotide
ggccugacaagaugggguc

SEQ ID NO: 1739601 - RNA, 19 nt, Artificial Sequence
  Description of Artificial Sequence: Synthetic oligonucleotide
cuuguaucaaacagcccuu

SEQ ID NO: 1739602 - RNA, 19 nt, Artificial Sequence
  Description of Artificial Sequence: Synthetic oligonucleotide
agcacgcuggcuuggucuu

SEQ ID NO: 1739603 - RNA, 19 nt, Artificial Sequence
  Description of Artificial Sequence: Synthetic oligonucleotide
cuaccucuugggcugugga

SEQ ID NO: 1739604 - RNA, 19 nt, Artificial Sequence
  Description of Artificial Sequence: Synthetic oligonucleotide
gguucuaguccaguucuga

SEQ ID NO: 1739605 - RNA, 19 nt, Artificial Sequence
  Description of Artificial Sequence: Synthetic oligonucleotide
caaucccgucugcaguuuc

SEQ ID NO: 1739606 - RNA, 19 nt, Artificial Sequence
  Description of Artificial Sequence: Synthetic oligonucleotide
ggaggccugacaagauggg

SEQ ID NO: 1739607 - RNA, 19 nt, Artificial Sequence
  Description of Artificial Sequence: Synthetic oligonucleotide
cuguggaaggagagauuga

SEQ ID NO: 1739608 - RNA, 19 nt, Artificial Sequence
  Description of Artificial Sequence: Synthetic oligonucleotide
gcucuguugaguccucaca

SEQ ID NO: 1739609 - RNA, 19 nt, Artificial Sequence
  Description of Artificial Sequence: Synthetic oligonucleotide
uaccuccuuagugcugaga

SEQ ID NO: 1739610 - RNA, 19 nt, Artificial Sequence
  Description of Artificial Sequence: Synthetic oligonucleotide
guccuauuuguaaugguuu

SEQ ID NO: 1739611 - RNA, 19 nt, Artificial Sequence
  Description of Artificial Sequence: Synthetic oligonucleotide
gauugagggucaaaucauu

SEQ ID NO: 1739612 - RNA, 19 nt, Artificial Sequence
  Description of Artificial Sequence: Synthetic oligonucleotide
aacagcccuuucaaccauu

SEQ ID NO: 1739613 - RNA, 19 nt, Artificial Sequence
  Description of Artificial Sequence: Synthetic oligonucleotide
gggucaaaucauugcccac

SEQ ID NO: 1739614 - RNA, 19 nt, Artificial Sequence
  Description of Artificial Sequence: Synthetic oligonucleotide
auacuugagugggcaggcu

SEQ ID NO: 1739615 - RNA, 19 nt, Artificial Sequence
  Description of Artificial Sequence: Synthetic oligonucleotide
ugccaugguggugcacgcc

SEQ ID NO: 1739616 - RNA, 19 nt, Artificial Sequence
  Description of Artificial Sequence: Synthetic oligonucleotide
guguccuauuuguaauggu

SEQ ID NO: 1739617 - RNA, 19 nt, Artificial Sequence
  Description of Artificial Sequence: Synthetic oligonucleotide
cacaugcccuauuugguau

SEQ ID NO: 1739618 - RNA, 19 nt, Artificial Sequence
  Description of Artificial Sequence: Synthetic oligonucleotide
agccacucagaaagguccu

SEQ ID NO: 1739619 - RNA, 19 nt, Artificial Sequence
  Description of Artificial Sequence: Synthetic oligonucleotide
cacacuagccagcucaguu

SEQ ID NO: 1739620 - RNA, 19 nt, Artificial Sequence
  Description of Artificial Sequence: Synthetic oligonucleotide
guauaagcauugacagugu

SEQ ID NO: 1739621 - RNA, 19 nt, Artificial Sequence
  Description of Artificial Sequence: Synthetic oligonucleotide
gcaaacagcuaacauucau

SEQ ID NO: 1739622 - RNA, 19 nt, Artificial Sequence
  Description of Artificial Sequence: Synthetic oligonucleotide
cccugucucgauaaacuga

SEQ ID NO: 1739623 - RNA, 19 nt, Artificial Sequence
  Description of Artificial Sequence: Synthetic oligonucleotide
caccaaccucugcaaacca

SEQ ID NO: 1739624 - RNA, 19 nt, Artificial Sequence
  Description of Artificial Sequence: Synthetic oligonucleotide
cucugcaaacagcuaacau

SEQ ID NO: 1739625 - RNA, 19 nt, Artificial Sequence
  Description of Artificial Sequence: Synthetic oligonucleotide
gagugggcaggcucugcua

SEQ ID NO: 1739626 - RNA, 19 nt, Artificial Sequence
  Description of Artificial Sequence: Synthetic oligonucleotide
aguucucugcaaacagcua

SEQ ID NO: 1739627 - RNA, 19 nt, Artificial Sequence
  Description of Artificial Sequence: Synthetic oligonucleotide
uucucacauuugguucaaa

SEQ ID NO: 1739628 - RNA, 19 nt, Artificial Sequence
  Description of Artificial Sequence: Synthetic oligonucleotide
gcacaugcccuauuuggua

SEQ ID NO: 1739629 - RNA, 19 nt, Artificial Sequence
  Description of Artificial Sequence: Synthetic oligonucleotide
ccaguucugaagaaagccu

SEQ ID NO: 1739630 - RNA, 19 nt, Artificial Sequence
  Description of Artificial Sequence: Synthetic oligonucleotide
ggcaacuacaaggcaggga

SEQ ID NO: 1739631 - RNA, 19 nt, Artificial Sequence
  Description of Artificial Sequence: Synthetic oligonucleotide
caugcccuauuugguauaa

SEQ ID NO: 1739632 - RNA, 19 nt, Artificial Sequence
  Description of Artificial Sequence: Synthetic oligonucleotide
gagugggaagcaccaccua

SEQ ID NO: 1739633 - RNA, 19 nt, Artificial Sequence
  Description of Artificial Sequence: Synthetic oligonucleotide
cccacacuagccagcucag

SEQ ID NO: 1739634 - RNA, 19 nt, Artificial Sequence
  Description of Artificial Sequence: Synthetic oligonucleotide
ccagauucaaauguauccu

SEQ ID NO: 1739635 - RNA, 19 nt, Artificial Sequence
  Description of Artificial Sequence: Synthetic oligonucleotide
ccaaaccgaaacagaacaa

SEQ ID NO: 1739636 - RNA, 19 nt, Artificial Sequence
  Description of Artificial Sequence: Synthetic oligonucleotide
cucugcuaagcagcugcca

SEQ ID NO: 1739637 - RNA, 19 nt, Artificial Sequence
  Description of Artificial Sequence: Synthetic oligonucleotide
caacuacaaggcagggacu

SEQ ID NO: 1739638 - RNA, 19 nt, Artificial Sequence
  Description of Artificial Sequence: Synthetic oligonucleotide
cacaaucccgucugcaguu

SEQ ID NO: 1739639 - RNA, 19 nt, Artificial Sequence
  Description of Artificial Sequence: Synthetic oligonucleotide
aaguuccuauugagucaaa

SEQ ID NO: 1739640 - RNA, 19 nt, Artificial Sequence
  Description of Artificial Sequence: Synthetic oligonucleotide
acaaucccgucugcaguuu

SEQ ID NO: 1739641 - RNA, 19 nt, Artificial Sequence
  Description of Artificial Sequence: Synthetic oligonucleotide
ggaaagccacaggagugga

SEQ ID NO: 1739642 - RNA, 19 nt, Artificial Sequence
  Description of Artificial Sequence: Synthetic oligonucleotide
ggacgauggccaucugcuc

SEQ ID NO: 1739643 - RNA, 19 nt, Artificial Sequence
  Description of Artificial Sequence: Synthetic oligonucleotide
auguauccuguggguggcu

SEQ ID NO: 1739644 - RNA, 19 nt, Artificial Sequence
  Description of Artificial Sequence: Synthetic oligonucleotide
aggagagauugagggucaa

SEQ ID NO: 1739645 - RNA, 19 nt, Artificial Sequence
  Description of Artificial Sequence: Synthetic oligonucleotide
gcacagaguuaaguaacaa

SEQ ID NO: 1739646 - RNA, 19 nt, Artificial Sequence
  Description of Artificial Sequence: Synthetic oligonucleotide
gcccuuucaaccauucacu

SEQ ID NO: 1739647 - RNA, 19 nt, Artificial Sequence
  Description of Artificial Sequence: Synthetic oligonucleotide
gggaagcaccaccuaccuc

SEQ ID NO: 1739648 - RNA, 19 nt, Artificial Sequence
  Description of Artificial Sequence: Synthetic oligonucleotide
gccuuguaucaaacagccc

SEQ ID NO: 1739649 - RNA, 19 nt, Artificial Sequence
  Description of Artificial Sequence: Synthetic oligonucleotide
cagccucaucaggaacuug

SEQ ID NO: 1739650 - RNA, 19 nt, Artificial Sequence
  Description of Artificial Sequence: Synthetic oligonucleotide
cugucucgauaaacugacu

SEQ ID NO: 1739651 - RNA, 19 nt, Artificial Sequence
  Description of Artificial Sequence: Synthetic oligonucleotide
ggagagauugagggucaaa

SEQ ID NO: 1739652 - RNA, 19 nt, Artificial Sequence
  Description of Artificial Sequence: Synthetic oligonucleotide
gcuuggaagcuuggcuuuc

SEQ ID NO: 1739653 - RNA, 19 nt, Artificial Sequence
  Description of Artificial Sequence: Synthetic oligonucleotide
gcuaagcagcugccagguc

SEQ ID NO: 1739654 - RNA, 19 nt, Artificial Sequence
  Description of Artificial Sequence: Synthetic oligonucleotide
ccucacauacuugcugaga

SEQ ID NO: 1739655 - RNA, 19 nt, Artificial Sequence
  Description of Artificial Sequence: Synthetic oligonucleotide
accuaccucuugggcugug

SEQ ID NO: 1739656 - RNA, 19 nt, Artificial Sequence
  Description of Artificial Sequence: Synthetic oligonucleotide
gccacaggaguggaaugaa

SEQ ID NO: 1739657 - RNA, 19 nt, Artificial Sequence
  Description of Artificial Sequence: Synthetic oligonucleotide
gccacucagaaagguccuc

SEQ ID NO: 1739658 - RNA, 19 nt, Artificial Sequence
  Description of Artificial Sequence: Synthetic oligonucleotide
caaagcacgcuggcuuggu

SEQ ID NO: 1739659 - RNA, 19 nt, Artificial Sequence
  Description of Artificial Sequence: Synthetic oligonucleotide
cucauuccuuaugcucugu

SEQ ID NO: 1739660 - RNA, 19 nt, Artificial Sequence
  Description of Artificial Sequence: Synthetic oligonucleotide
cagaaagguccuccugcuu

SEQ ID NO: 1739661 - RNA, 19 nt, Artificial Sequence
  Description of Artificial Sequence: Synthetic oligonucleotide
gugugccaugguggugcac

SEQ ID NO: 1739662 - RNA, 19 nt, Artificial Sequence
  Description of Artificial Sequence: Synthetic oligonucleotide
ccuuagugcugagauuaua

SEQ ID NO: 1739663 - RNA, 19 nt, Artificial Sequence
  Description of Artificial Sequence: Synthetic oligonucleotide
cuccaagauguguccuauu

SEQ ID NO: 1739664 - RNA, 19 nt, Artificial Sequence
  Description of Artificial Sequence: Synthetic oligonucleotide
ggagccuuugcagccucau

SEQ ID NO: 1739665 - RNA, 19 nt, Artificial Sequence
  Description of Artificial Sequence: Synthetic oligonucleotide
cgucugcaguuuccaggac

SEQ ID NO: 1739666 - RNA, 19 nt, Artificial Sequence
  Description of Artificial Sequence: Synthetic oligonucleotide
cuguagggauggagccuuu

SEQ ID NO: 1739667 - RNA, 19 nt, Artificial Sequence
  Description of Artificial Sequence: Synthetic oligonucleotide
gcacgcuggcuuggucuuc

SEQ ID NO: 1739668 - RNA, 19 nt, Artificial Sequence
  Description of Artificial Sequence: Synthetic oligonucleotide
caccuaccucuugggcugu

SEQ ID NO: 1739669 - RNA, 19 nt, Artificial Sequence
  Description of Artificial Sequence: Synthetic oligonucleotide
cagcugcacaugcccuauu

SEQ ID NO: 1739670 - RNA, 19 nt, Artificial Sequence
  Description of Artificial Sequence: Synthetic oligonucleotide
ccagcugcacaugcccuau

SEQ ID NO: 1739671 - RNA, 19 nt, Artificial Sequence
  Description of Artificial Sequence: Synthetic oligonucleotide
cugccaggucaaggaucuu

SEQ ID NO: 1739672 - RNA, 19 nt, Artificial Sequence
  Description of Artificial Sequence: Synthetic oligonucleotide
uguucaauaaguuuuaagg

SEQ ID NO: 1739673 - RNA, 19 nt, Artificial Sequence
  Description of Artificial Sequence: Synthetic oligonucleotide
uuuaauauaaccugguuag

SEQ ID NO: 1739674 - RNA, 19 nt, Artificial Sequence
  Description of Artificial Sequence: Synthetic oligonucleotide
uuuagaauuauacaggggc

SEQ ID NO: 1739675 - RNA, 19 nt, Artificial Sequence
  Description of Artificial Sequence: Synthetic oligonucleotide
auagacuucaaauuuauac

SEQ ID NO: 1739676 - RNA, 19 nt, Artificial Sequence
  Description of Artificial Sequence: Synthetic oligonucleotide
ucaaauuuauacuugaugc

SEQ ID NO: 1739677 - RNA, 19 nt, Artificial Sequence
  Description of Artificial Sequence: Synthetic oligonucleotide
auuguuuagaauuauacag

SEQ ID NO: 1739678 - RNA, 19 nt, Artificial Sequence
  Description of Artificial Sequence: Synthetic oligonucleotide
uauauuuaauauaaccugg

SEQ ID NO: 1739679 - RNA, 19 nt, Artificial Sequence
  Description of Artificial Sequence: Synthetic oligonucleotide
aaguacuugaauucguucc

SEQ ID NO: 1739680 - RNA, 19 nt, Artificial Sequence
  Description of Artificial Sequence: Synthetic oligonucleotide
uuaacaguagcuauuaugc

SEQ ID NO: 1739681 - RNA, 19 nt, Artificial Sequence
  Description of Artificial Sequence: Synthetic oligonucleotide
augaaaauaauucuaauug

SEQ ID NO: 1739682 - RNA, 19 nt, Artificial Sequence
  Description of Artificial Sequence: Synthetic oligonucleotide
aguuuaguaagcaauaucc

SEQ ID NO: 1739683 - RNA, 19 nt, Artificial Sequence
  Description of Artificial Sequence: Synthetic oligonucleotide
uacuuauucaucuagcucc

SEQ ID NO: 1739684 - RNA, 19 nt, Artificial Sequence
  Description of Artificial Sequence: Synthetic oligonucleotide
agaacuuuauggcaaaugg

SEQ ID NO: 1739685 - RNA, 19 nt, Artificial Sequence
  Description of Artificial Sequence: Synthetic oligonucleotide
uguuuagaauuauacaggg

SEQ ID NO: 1739686 - RNA, 19 nt, Artificial Sequence
  Description of Artificial Sequence: Synthetic oligonucleotide
uuguuuagaauuauacagg

SEQ ID NO: 1739687 - RNA, 19 nt, Artificial Sequence
  Description of Artificial Sequence: Synthetic oligonucleotide
aaacggagaaguuaaaugu

SEQ ID NO: 1739688 - RNA, 19 nt, Artificial Sequence
  Description of Artificial Sequence: Synthetic oligonucleotide
uuuaaaacccauuucugcc

SEQ ID NO: 1739689 - RNA, 19 nt, Artificial Sequence
  Description of Artificial Sequence: Synthetic oligonucleotide
gaucuaauuuucuuuaaag

SEQ ID NO: 1739690 - RNA, 19 nt, Artificial Sequence
  Description of Artificial Sequence: Synthetic oligonucleotide
uuaauucuguccuuuaaag

SEQ ID NO: 1739691 - RNA, 19 nt, Artificial Sequence
  Description of Artificial Sequence: Synthetic oligonucleotide
uucaaauuuauacuugaug

SEQ ID NO: 1739692 - RNA, 19 nt, Artificial Sequence
  Description of Artificial Sequence: Synthetic oligonucleotide
agcucugcuguuuaaaacc

SEQ ID NO: 1739693 - RNA, 19 nt, Artificial Sequence
  Description of Artificial Sequence: Synthetic oligonucleotide
ucagucucuacuuugaucu

SEQ ID NO: 1739694 - RNA, 19 nt, Artificial Sequence
  Description of Artificial Sequence: Synthetic oligonucleotide
ucucuaaggagcacaaugg

SEQ ID NO: 1739695 - RNA, 19 nt, Artificial Sequence
  Description of Artificial Sequence: Synthetic oligonucleotide
gaaaaugagcuccuugugg

SEQ ID NO: 1739696 - RNA, 19 nt, Artificial Sequence
  Description of Artificial Sequence: Synthetic oligonucleotide
aaguuuaguaagcaauauc

SEQ ID NO: 1739697 - RNA, 19 nt, Artificial Sequence
  Description of Artificial Sequence: Synthetic oligonucleotide
uugaauucguuccugagca

SEQ ID NO: 1739698 - RNA, 19 nt, Artificial Sequence
  Description of Artificial Sequence: Synthetic oligonucleotide
ugcagaauaauucagucuc

SEQ ID NO: 1739699 - RNA, 19 nt, Artificial Sequence
  Description of Artificial Sequence: Synthetic oligonucleotide
aaauaauucuaauuguuua

SEQ ID NO: 1739700 - RNA, 19 nt, Artificial Sequence
  Description of Artificial Sequence: Synthetic oligonucleotide
uuaccuuccacugaggagg

SEQ ID NO: 1739701 - RNA, 19 nt, Artificial Sequence
  Description of Artificial Sequence: Synthetic oligonucleotide
aauauaaccugguuagacu

SEQ ID NO: 1739702 - RNA, 19 nt, Artificial Sequence
  Description of Artificial Sequence: Synthetic oligonucleotide
ucucaauucauuaucucug

SEQ ID NO: 1739703 - RNA, 19 nt, Artificial Sequence
  Description of Artificial Sequence: Synthetic oligonucleotide
aauaaguuuuaaggcaucg

SEQ ID NO: 1739704 - RNA, 19 nt, Artificial Sequence
  Description of Artificial Sequence: Synthetic oligonucleotide
cugaagaugagaaacggag

SEQ ID NO: 1739705 - RNA, 19 nt, Artificial Sequence
  Description of Artificial Sequence: Synthetic oligonucleotide
aaauuuauacuugaugccu

SEQ ID NO: 1739706 - RNA, 19 nt, Artificial Sequence
  Description of Artificial Sequence: Synthetic oligonucleotide
gaaacggagaaguuaaaug

SEQ ID NO: 1739707 - RNA, 19 nt, Artificial Sequence
  Description of Artificial Sequence: Synthetic oligonucleotide
guucaauaaguuuuaaggc

SEQ ID NO: 1739708 - RNA, 19 nt, Artificial Sequence
  Description of Artificial Sequence: Synthetic oligonucleotide
aguauauuuaauauaaccu

SEQ ID NO: 1739709 - RNA, 19 nt, Artificial Sequence
  Description of Artificial Sequence: Synthetic oligonucleotide
ggcauugagaacuuuaugg

SEQ ID NO: 1739710 - RNA, 19 nt, Artificial Sequence
  Description of Artificial Sequence: Synthetic oligonucleotide
aauucuuaacaguagcuau

SEQ ID NO: 1739711 - RNA, 19 nt, Artificial Sequence
  Description of Artificial Sequence: Synthetic oligonucleotide
gucacuuucaaauuccugc

SEQ ID NO: 1739712 - RNA, 19 nt, Artificial Sequence
  Description of Artificial Sequence: Synthetic oligonucleotide
aacuuuauggcaaauggug

SEQ ID NO: 1739713 - RNA, 19 nt, Artificial Sequence
  Description of Artificial Sequence: Synthetic oligonucleotide
uaucucugaauucuuaaca

SEQ ID NO: 1739714 - RNA, 19 nt, Artificial Sequence
  Description of Artificial Sequence: Synthetic oligonucleotide
uacccuaugcaucugcugg

SEQ ID NO: 1739715 - RNA, 19 nt, Artificial Sequence
  Description of Artificial Sequence: Synthetic oligonucleotide
uaaaggucgauucuucuca

SEQ ID NO: 1739716 - RNA, 19 nt, Artificial Sequence
  Description of Artificial Sequence: Synthetic oligonucleotide
cuuaacaguagcuauuaug

SEQ ID NO: 1739717 - RNA, 19 nt, Artificial Sequence
  Description of Artificial Sequence: Synthetic oligonucleotide
caaauuuauacuugaugcc

SEQ ID NO: 1739718 - RNA, 19 nt, Artificial Sequence
  Description of Artificial Sequence: Synthetic oligonucleotide
ucucaauuuacccauuuuc

SEQ ID NO: 1739719 - RNA, 19 nt, Artificial Sequence
  Description of Artificial Sequence: Synthetic oligonucleotide
uaaggcaucguccagacuu

SEQ ID NO: 1739720 - RNA, 19 nt, Artificial Sequence
  Description of Artificial Sequence: Synthetic oligonucleotide
aacagaacucugcucagag

SEQ ID NO: 1739721 - RNA, 19 nt, Artificial Sequence
  Description of Artificial Sequence: Synthetic oligonucleotide
ugagaaacggagaaguuaa

SEQ ID NO: 1739722 - RNA, 19 nt, Artificial Sequence
  Description of Artificial Sequence: Synthetic oligonucleotide
uaucugcuaacucugguug

SEQ ID NO: 1739723 - RNA, 19 nt, Artificial Sequence
  Description of Artificial Sequence: Synthetic oligonucleotide
ucaauaaguuuuaaggcau

SEQ ID NO: 1739724 - RNA, 19 nt, Artificial Sequence
  Description of Artificial Sequence: Synthetic oligonucleotide
ucaauuuacccauuuucug

SEQ ID NO: 1739725 - RNA, 19 nt, Artificial Sequence
  Description of Artificial Sequence: Synthetic oligonucleotide
uuuggaaguacuugaauuc

SEQ ID NO: 1739726 - RNA, 19 nt, Artificial Sequence
  Description of Artificial Sequence: Synthetic oligonucleotide
uuaaaacccauuucugccc

SEQ ID NO: 1739727 - RNA, 19 nt, Artificial Sequence
  Description of Artificial Sequence: Synthetic oligonucleotide
uucauuaucucugaauucu

SEQ ID NO: 1739728 - RNA, 19 nt, Artificial Sequence
  Description of Artificial Sequence: Synthetic oligonucleotide
uuuaguaagcaauauccau

SEQ ID NO: 1739729 - RNA, 19 nt, Artificial Sequence
  Description of Artificial Sequence: Synthetic oligonucleotide
ugucugagugaacagaacu

SEQ ID NO: 1739730 - RNA, 19 nt, Artificial Sequence
  Description of Artificial Sequence: Synthetic oligonucleotide
ucuccaaaucaauuucugg

SEQ ID NO: 1739731 - RNA, 19 nt, Artificial Sequence
  Description of Artificial Sequence: Synthetic oligonucleotide
aucucugaauucuuaacag

SEQ ID NO: 1739732 - RNA, 19 nt, Artificial Sequence
  Description of Artificial Sequence: Synthetic oligonucleotide
ugaugugcagaauaauuca

SEQ ID NO: 1739733 - RNA, 19 nt, Artificial Sequence
  Description of Artificial Sequence: Synthetic oligonucleotide
ugagcauuggccagggaag

SEQ ID NO: 1739734 - RNA, 19 nt, Artificial Sequence
  Description of Artificial Sequence: Synthetic oligonucleotide
uguacuuauucaucuagcu

SEQ ID NO: 1739735 - RNA, 19 nt, Artificial Sequence
  Description of Artificial Sequence: Synthetic oligonucleotide
ucaucuagcuccuaucucu

SEQ ID NO: 1739736 - RNA, 19 nt, Artificial Sequence
  Description of Artificial Sequence: Synthetic oligonucleotide
aauuauacaggggcugggg

SEQ ID NO: 1739737 - RNA, 19 nt, Artificial Sequence
  Description of Artificial Sequence: Synthetic oligonucleotide
aaccugguuagacuaauga

SEQ ID NO: 1739738 - RNA, 19 nt, Artificial Sequence
  Description of Artificial Sequence: Synthetic oligonucleotide
agaaccagguuuuccggcc

SEQ ID NO: 1739739 - RNA, 19 nt, Artificial Sequence
  Description of Artificial Sequence: Synthetic oligonucleotide
uuaguaagcaauauccauu

SEQ ID NO: 1739740 - RNA, 19 nt, Artificial Sequence
  Description of Artificial Sequence: Synthetic oligonucleotide
cauauucugggacacggcg

SEQ ID NO: 1739741 - RNA, 19 nt, Artificial Sequence
  Description of Artificial Sequence: Synthetic oligonucleotide
ugguuguucaauaaguuuu

SEQ ID NO: 1739742 - RNA, 19 nt, Artificial Sequence
  Description of Artificial Sequence: Synthetic oligonucleotide
aacaguagcuauuaugcuu

SEQ ID NO: 1739743 - RNA, 19 nt, Artificial Sequence
  Description of Artificial Sequence: Synthetic oligonucleotide
agaccuuauauaauccucc

SEQ ID NO: 1739744 - RNA, 19 nt, Artificial Sequence
  Description of Artificial Sequence: Synthetic oligonucleotide
aaacggaacugccuccaac

SEQ ID NO: 1739745 - RNA, 19 nt, Artificial Sequence
  Description of Artificial Sequence: Synthetic oligonucleotide
uccaaaucaauuucuggga

SEQ ID NO: 1739746 - RNA, 19 nt, Artificial Sequence
  Description of Artificial Sequence: Synthetic oligonucleotide
aauauccauucucaauuca

SEQ ID NO: 1739747 - RNA, 19 nt, Artificial Sequence
  Description of Artificial Sequence: Synthetic oligonucleotide
agaaaggaccccuggguac

SEQ ID NO: 1739748 - RNA, 19 nt, Artificial Sequence
  Description of Artificial Sequence: Synthetic oligonucleotide
uuggaaguacuugaauucg

SEQ ID NO: 1739749 - RNA, 19 nt, Artificial Sequence
  Description of Artificial Sequence: Synthetic oligonucleotide
uuauauaauccuccaccug

SEQ ID NO: 1739750 - RNA, 19 nt, Artificial Sequence
  Description of Artificial Sequence: Synthetic oligonucleotide
aacggaacugccuccaacu

SEQ ID NO: 1739751 - RNA, 19 nt, Artificial Sequence
  Description of Artificial Sequence: Synthetic oligonucleotide
uaauauaaccugguuagac

SEQ ID NO: 1739752 - RNA, 19 nt, Artificial Sequence
  Description of Artificial Sequence: Synthetic oligonucleotide
cucacugaagaugagaaac

SEQ ID NO: 1739753 - RNA, 19 nt, Artificial Sequence
  Description of Artificial Sequence: Synthetic oligonucleotide
cugaauucuuaacaguagc

SEQ ID NO: 1739754 - RNA, 19 nt, Artificial Sequence
  Description of Artificial Sequence: Synthetic oligonucleotide
ugagaacuauauuaauucu

SEQ ID NO: 1739755 - RNA, 19 nt, Artificial Sequence
  Description of Artificial Sequence: Synthetic oligonucleotide
gagaacuauauuaauucug

SEQ ID NO: 1739756 - RNA, 19 nt, Artificial Sequence
  Description of Artificial Sequence: Synthetic oligonucleotide
uauuaugcuugccauuacu

SEQ ID NO: 1739757 - RNA, 19 nt, Artificial Sequence
  Description of Artificial Sequence: Synthetic oligonucleotide
uaguaagcaauauccauuc

SEQ ID NO: 1739758 - RNA, 19 nt, Artificial Sequence
  Description of Artificial Sequence: Synthetic oligonucleotide
ucugaugugcagaauaauu

SEQ ID NO: 1739759 - RNA, 19 nt, Artificial Sequence
  Description of Artificial Sequence: Synthetic oligonucleotide
uaugcuugccauuacuuaa

SEQ ID NO: 1739760 - RNA, 19 nt, Artificial Sequence
  Description of Artificial Sequence: Synthetic oligonucleotide
gaauaauucagucucuacu

SEQ ID NO: 1739761 - RNA, 19 nt, Artificial Sequence
  Description of Artificial Sequence: Synthetic oligonucleotide
uuguaaacggaacugccuc

SEQ ID NO: 1739762 - RNA, 19 nt, Artificial Sequence
  Description of Artificial Sequence: Synthetic oligonucleotide
aaaccauguccacuuuauc

SEQ ID NO: 1739763 - RNA, 19 nt, Artificial Sequence
  Description of Artificial Sequence: Synthetic oligonucleotide
ccuuauauaauccuccacc

SEQ ID NO: 1739764 - RNA, 19 nt, Artificial Sequence
  Description of Artificial Sequence: Synthetic oligonucleotide
uaaggagcacaauggagcc

SEQ ID NO: 1739765 - RNA, 19 nt, Artificial Sequence
  Description of Artificial Sequence: Synthetic oligonucleotide
cucuuguacacacacuacc

SEQ ID NO: 1739766 - RNA, 19 nt, Artificial Sequence
  Description of Artificial Sequence: Synthetic oligonucleotide
uauuaauucuguccuuuaa

SEQ ID NO: 1739767 - RNA, 19 nt, Artificial Sequence
  Description of Artificial Sequence: Synthetic oligonucleotide
gugaacagaacucugcuca

SEQ ID NO: 1739768 - RNA, 19 nt, Artificial Sequence
  Description of Artificial Sequence: Synthetic oligonucleotide
uuagacuaaugaaaaugaa

SEQ ID NO: 1739769 - RNA, 19 nt, Artificial Sequence
  Description of Artificial Sequence: Synthetic oligonucleotide
uuuaaaggucgauucuucu

SEQ ID NO: 1739770 - RNA, 19 nt, Artificial Sequence
  Description of Artificial Sequence: Synthetic oligonucleotide
agaacuauauuaauucugu

SEQ ID NO: 1739771 - RNA, 19 nt, Artificial Sequence
  Description of Artificial Sequence: Synthetic oligonucleotide
ugcuguuuaaaacccauuu

SEQ ID NO: 1739772 - RNA, 19 nt, Artificial Sequence
  Description of Artificial Sequence: Synthetic oligonucleotide
agaugagaaacggagaagu

SEQ ID NO: 1739773 - RNA, 19 nt, Artificial Sequence
  Description of Artificial Sequence: Synthetic oligonucleotide
ucauagacuucaaauuuau

SEQ ID NO: 1739774 - RNA, 19 nt, Artificial Sequence
  Description of Artificial Sequence: Synthetic oligonucleotide
agugaacagaacucugcuc

SEQ ID NO: 1739775 - RNA, 19 nt, Artificial Sequence
  Description of Artificial Sequence: Synthetic oligonucleotide
guuagacuaaugaaaauga

SEQ ID NO: 1739776 - RNA, 19 nt, Artificial Sequence
  Description of Artificial Sequence: Synthetic oligonucleotide
uccagaccuuauauaaucc

SEQ ID NO: 1739777 - RNA, 19 nt, Artificial Sequence
  Description of Artificial Sequence: Synthetic oligonucleotide
ucuagcuccuaucucuaug

SEQ ID NO: 1739778 - RNA, 19 nt, Artificial Sequence
  Description of Artificial Sequence: Synthetic oligonucleotide
cagacuuuuggcaagaaaa

SEQ ID NO: 1739779 - RNA, 19 nt, Artificial Sequence
  Description of Artificial Sequence: Synthetic oligonucleotide
aaaggucgauucuucucag

SEQ ID NO: 1739780 - RNA, 19 nt, Artificial Sequence
  Description of Artificial Sequence: Synthetic oligonucleotide
uuccagaccuuauauaauc

SEQ ID NO: 1739781 - RNA, 19 nt, Artificial Sequence
  Description of Artificial Sequence: Synthetic oligonucleotide
auuaucucugaauucuuaa

SEQ ID NO: 1739782 - RNA, 19 nt, Artificial Sequence
  Description of Artificial Sequence: Synthetic oligonucleotide
accuuauauaauccuccac

SEQ ID NO: 1739783 - RNA, 19 nt, Artificial Sequence
  Description of Artificial Sequence: Synthetic oligonucleotide
ugggacacggcgacgaugc

SEQ ID NO: 1739784 - RNA, 19 nt, Artificial Sequence
  Description of Artificial Sequence: Synthetic oligonucleotide
agaauuauacaggggcugg

SEQ ID NO: 1739785 - RNA, 19 nt, Artificial Sequence
  Description of Artificial Sequence: Synthetic oligonucleotide
uuaaaggucgauucuucuc

SEQ ID NO: 1739786 - RNA, 19 nt, Artificial Sequence
  Description of Artificial Sequence: Synthetic oligonucleotide
gguuagacuaaugaaaaug

SEQ ID NO: 1739787 - RNA, 19 nt, Artificial Sequence
  Description of Artificial Sequence: Synthetic oligonucleotide
acgugucacuuucaaauuc

SEQ ID NO: 1739788 - RNA, 19 nt, Artificial Sequence
  Description of Artificial Sequence: Synthetic oligonucleotide
uguaaacggaacugccucc

SEQ ID NO: 1739789 - RNA, 19 nt, Artificial Sequence
  Description of Artificial Sequence: Synthetic oligonucleotide
uauucugggacacggcgac

SEQ ID NO: 1739790 - RNA, 19 nt, Artificial Sequence
  Description of Artificial Sequence: Synthetic oligonucleotide
aagaugagaaacggagaag

SEQ ID NO: 1739791 - RNA, 19 nt, Artificial Sequence
  Description of Artificial Sequence: Synthetic oligonucleotide
aaaguuuaguaagcaauau

SEQ ID NO: 1739792 - RNA, 19 nt, Artificial Sequence
  Description of Artificial Sequence: Synthetic oligonucleotide
gaacgugucacuuucaaau

SEQ ID NO: 1739793 - RNA, 19 nt, Artificial Sequence
  Description of Artificial Sequence: Synthetic oligonucleotide
uccaacuauccaaaccaug

SEQ ID NO: 1739794 - RNA, 19 nt, Artificial Sequence
  Description of Artificial Sequence: Synthetic oligonucleotide
ucuccguucuugccgaugc

SEQ ID NO: 1739795 - RNA, 19 nt, Artificial Sequence
  Description of Artificial Sequence: Synthetic oligonucleotide
auaaucaccagguucuguu

SEQ ID NO: 1739796 - RNA, 19 nt, Artificial Sequence
  Description of Artificial Sequence: Synthetic oligonucleotide
ucuguuuaccuuccacuga

SEQ ID NO: 1739797 - RNA, 19 nt, Artificial Sequence
  Description of Artificial Sequence: Synthetic oligonucleotide
cuguuuaccuuccacugag

SEQ ID NO: 1739798 - RNA, 19 nt, Artificial Sequence
  Description of Artificial Sequence: Synthetic oligonucleotide
cuugccgaugcccauauuc

SEQ ID NO: 1739799 - RNA, 19 nt, Artificial Sequence
  Description of Artificial Sequence: Synthetic oligonucleotide
gucacaaagagucugagau

SEQ ID NO: 1739800 - RNA, 19 nt, Artificial Sequence
  Description of Artificial Sequence: Synthetic oligonucleotide
caugauccuugucacaaag

SEQ ID NO: 1739801 - RNA, 19 nt, Artificial Sequence
  Description of Artificial Sequence: Synthetic oligonucleotide
cuuuaaaggucgauucuuc

SEQ ID NO: 1739802 - RNA, 19 nt, Artificial Sequence
  Description of Artificial Sequence: Synthetic oligonucleotide
aguaucuuucuguuagccu

SEQ ID NO: 1739803 - RNA, 19 nt, Artificial Sequence
  Description of Artificial Sequence: Synthetic oligonucleotide
uauauuaauucuguccuuu

SEQ ID NO: 1739804 - RNA, 19 nt, Artificial Sequence
  Description of Artificial Sequence: Synthetic oligonucleotide
acucugguuguucaauaag

SEQ ID NO: 1739805 - RNA, 19 nt, Artificial Sequence
  Description of Artificial Sequence: Synthetic oligonucleotide
uacacacacuacccuaugc

SEQ ID NO: 1739806 - RNA, 19 nt, Artificial Sequence
  Description of Artificial Sequence: Synthetic oligonucleotide
cuaugcaucugcuggggag

SEQ ID NO: 1739807 - RNA, 19 nt, Artificial Sequence
  Description of Artificial Sequence: Synthetic oligonucleotide
uccuuuaaaggucgauucu

SEQ ID NO: 1739808 - RNA, 19 nt, Artificial Sequence
  Description of Artificial Sequence: Synthetic oligonucleotide
guuuagaauuauacagggg

SEQ ID NO: 1739809 - RNA, 19 nt, Artificial Sequence
  Description of Artificial Sequence: Synthetic oligonucleotide
uauucaucuagcuccuauc

SEQ ID NO: 1739810 - RNA, 19 nt, Artificial Sequence
  Description of Artificial Sequence: Synthetic oligonucleotide
cauucuuuggaaguacuug

SEQ ID NO: 1739811 - RNA, 19 nt, Artificial Sequence
  Description of Artificial Sequence: Synthetic oligonucleotide
ucacaaagagucugagaug

SEQ ID NO: 1739812 - RNA, 19 nt, Artificial Sequence
  Description of Artificial Sequence: Synthetic oligonucleotide
ucugguuguucaauaaguu

SEQ ID NO: 1739813 - RNA, 19 nt, Artificial Sequence
  Description of Artificial Sequence: Synthetic oligonucleotide
ucucuacugagaacuauau

SEQ ID NO: 1739814 - RNA, 19 nt, Artificial Sequence
  Description of Artificial Sequence: Synthetic oligonucleotide
uguacacacacuacccuau

SEQ ID NO: 1739815 - RNA, 19 nt, Artificial Sequence
  Description of Artificial Sequence: Synthetic oligonucleotide
gacuucaaauuuauacuug

SEQ ID NO: 1739816 - RNA, 19 nt, Artificial Sequence
  Description of Artificial Sequence: Synthetic oligonucleotide
aauucguuccugagcauug

SEQ ID NO: 1739817 - RNA, 19 nt, Artificial Sequence
  Description of Artificial Sequence: Synthetic oligonucleotide
ucguuccugagcauuggcc

SEQ ID NO: 1739818 - RNA, 19 nt, Artificial Sequence
  Description of Artificial Sequence: Synthetic oligonucleotide
ucgauucuucucaggaaug

SEQ ID NO: 1739819 - RNA, 19 nt, Artificial Sequence
  Description of Artificial Sequence: Synthetic oligonucleotide
gcauugagaacuuuauggc

SEQ ID NO: 1739820 - RNA, 19 nt, Artificial Sequence
  Description of Artificial Sequence: Synthetic oligonucleotide
auuauacaggggcugggga

SEQ ID NO: 1739821 - RNA, 19 nt, Artificial Sequence
  Description of Artificial Sequence: Synthetic oligonucleotide
uauacaggggcuggggaag

SEQ ID NO: 1739822 - RNA, 19 nt, Artificial Sequence
  Description of Artificial Sequence: Synthetic oligonucleotide
uuauacaggggcuggggaa

SEQ ID NO: 1739823 - RNA, 19 nt, Artificial Sequence
  Description of Artificial Sequence: Synthetic oligonucleotide
aacucugguuguucaauaa

SEQ ID NO: 1739824 - RNA, 19 nt, Artificial Sequence
  Description of Artificial Sequence: Synthetic oligonucleotide
uuaugcuugccauuacuua

SEQ ID NO: 1739825 - RNA, 19 nt, Artificial Sequence
  Description of Artificial Sequence: Synthetic oligonucleotide
guccuuuaaaggucgauuc

SEQ ID NO: 1739826 - RNA, 19 nt, Artificial Sequence
  Description of Artificial Sequence: Synthetic oligonucleotide
gaauuauacaggggcuggg

SEQ ID NO: 1739827 - RNA, 19 nt, Artificial Sequence
  Description of Artificial Sequence: Synthetic oligonucleotide
ucugggagaaguuuauauu

SEQ ID NO: 1739828 - RNA, 19 nt, Artificial Sequence
  Description of Artificial Sequence: Synthetic oligonucleotide
acggcgacgaugcaguuca

SEQ ID NO: 1739829 - RNA, 19 nt, Artificial Sequence
  Description of Artificial Sequence: Synthetic oligonucleotide
uaacaguagcuauuaugcu

SEQ ID NO: 1739830 - RNA, 19 nt, Artificial Sequence
  Description of Artificial Sequence: Synthetic oligonucleotide
uuccuuguaaacggaacug

SEQ ID NO: 1739831 - RNA, 19 nt, Artificial Sequence
  Description of Artificial Sequence: Synthetic oligonucleotide
uuuuccggcccauaaucac

SEQ ID NO: 1739832 - RNA, 19 nt, Artificial Sequence
  Description of Artificial Sequence: Synthetic oligonucleotide
guacuuauucaucuagcuc

SEQ ID NO: 1739833 - RNA, 19 nt, Artificial Sequence
  Description of Artificial Sequence: Synthetic oligonucleotide
ucuaauuguuuagaauuau

SEQ ID NO: 1739834 - RNA, 19 nt, Artificial Sequence
  Description of Artificial Sequence: Synthetic oligonucleotide
uggaaguacuugaauucgu

SEQ ID NO: 1739835 - RNA, 19 nt, Artificial Sequence
  Description of Artificial Sequence: Synthetic oligonucleotide
uauaaccugguuagacuaa

SEQ ID NO: 1739836 - RNA, 19 nt, Artificial Sequence
  Description of Artificial Sequence: Synthetic oligonucleotide
gaacuauauuaauucuguc

SEQ ID NO: 1739837 - RNA, 19 nt, Artificial Sequence
  Description of Artificial Sequence: Synthetic oligonucleotide
ucucuuguacacacacuac

SEQ ID NO: 1739838 - RNA, 19 nt, Artificial Sequence
  Description of Artificial Sequence: Synthetic oligonucleotide
acggagaaguuaaauguuc

SEQ ID NO: 1739839 - RNA, 19 nt, Artificial Sequence
  Description of Artificial Sequence: Synthetic oligonucleotide
caauauccauucucaauuc

SEQ ID NO: 1739840 - RNA, 19 nt, Artificial Sequence
  Description of Artificial Sequence: Synthetic oligonucleotide
cugguuagacuaaugaaaa

SEQ ID NO: 1739841 - RNA, 19 nt, Artificial Sequence
  Description of Artificial Sequence: Synthetic oligonucleotide
ugucacaaagagucugaga

SEQ ID NO: 1739842 - RNA, 19 nt, Artificial Sequence
  Description of Artificial Sequence: Synthetic oligonucleotide
uacuugaauucguuccuga

SEQ ID NO: 1739843 - RNA, 19 nt, Artificial Sequence
  Description of Artificial Sequence: Synthetic oligonucleotide
aauuuauacuugaugccuu

SEQ ID NO: 1739844 - RNA, 19 nt, Artificial Sequence
  Description of Artificial Sequence: Synthetic oligonucleotide
aacgugucacuuucaaauu

SEQ ID NO: 1739845 - RNA, 19 nt, Artificial Sequence
  Description of Artificial Sequence: Synthetic oligonucleotide
uuaauauaaccugguuaga

SEQ ID NO: 1739846 - RNA, 19 nt, Artificial Sequence
  Description of Artificial Sequence: Synthetic oligonucleotide
aucguccagacuuuuggca

SEQ ID NO: 1739847 - RNA, 19 nt, Artificial Sequence
  Description of Artificial Sequence: Synthetic oligonucleotide
uccuaucucuaugagcccc

SEQ ID NO: 1739848 - RNA, 19 nt, Artificial Sequence
  Description of Artificial Sequence: Synthetic oligonucleotide
ucuguuagccuuucuucuc

SEQ ID NO: 1739849 - RNA, 19 nt, Artificial Sequence
  Description of Artificial Sequence: Synthetic oligonucleotide
cuacugagaacuauauuaa

SEQ ID NO: 1739850 - RNA, 19 nt, Artificial Sequence
  Description of Artificial Sequence: Synthetic oligonucleotide
gaauucuuaacaguagcua

SEQ ID NO: 1739851 - RNA, 19 nt, Artificial Sequence
  Description of Artificial Sequence: Synthetic oligonucleotide
gcaucguccagacuuuugg

SEQ ID NO: 1739852 - RNA, 19 nt, Artificial Sequence
  Description of Artificial Sequence: Synthetic oligonucleotide
ugcuaacucugguuguuca

SEQ ID NO: 1739853 - RNA, 19 nt, Artificial Sequence
  Description of Artificial Sequence: Synthetic oligonucleotide
gagauggccuggcugauuc

SEQ ID NO: 1739854 - RNA, 19 nt, Artificial Sequence
  Description of Artificial Sequence: Synthetic oligonucleotide
uuguacacacacuacccua

SEQ ID NO: 1739855 - RNA, 19 nt, Artificial Sequence
  Description of Artificial Sequence: Synthetic oligonucleotide
uaucccuuggaaucucacu

SEQ ID NO: 1739856 - RNA, 19 nt, Artificial Sequence
  Description of Artificial Sequence: Synthetic oligonucleotide
uuacccauuuucugucuga

SEQ ID NO: 1739857 - RNA, 19 nt, Artificial Sequence
  Description of Artificial Sequence: Synthetic oligonucleotide
uagcucugcuguuuaaaac

SEQ ID NO: 1739858 - RNA, 19 nt, Artificial Sequence
  Description of Artificial Sequence: Synthetic oligonucleotide
uagcuauuaugcuugccau

SEQ ID NO: 1739859 - RNA, 19 nt, Artificial Sequence
  Description of Artificial Sequence: Synthetic oligonucleotide
guuuuaaggcaucguccag

SEQ ID NO: 1739860 - RNA, 19 nt, Artificial Sequence
  Description of Artificial Sequence: Synthetic oligonucleotide
agcggucgaaccaugacag

SEQ ID NO: 1739861 - RNA, 19 nt, Artificial Sequence
  Description of Artificial Sequence: Synthetic oligonucleotide
uauccaaaccauguccacu

SEQ ID NO: 1739862 - RNA, 19 nt, Artificial Sequence
  Description of Artificial Sequence: Synthetic oligonucleotide
accugguuagacuaaugaa

SEQ ID NO: 1739863 - RNA, 19 nt, Artificial Sequence
  Description of Artificial Sequence: Synthetic oligonucleotide
cuagcuccuaucucuauga

SEQ ID NO: 1739864 - RNA, 19 nt, Artificial Sequence
  Description of Artificial Sequence: Synthetic oligonucleotide
uaaccugguuagacuaaug

SEQ ID NO: 1739865 - RNA, 19 nt, Artificial Sequence
  Description of Artificial Sequence: Synthetic oligonucleotide
uggcaaaugguguuucuua

SEQ ID NO: 1739866 - RNA, 19 nt, Artificial Sequence
  Description of Artificial Sequence: Synthetic oligonucleotide
uucguuccugagcauuggc

SEQ ID NO: 1739867 - RNA, 19 nt, Artificial Sequence
  Description of Artificial Sequence: Synthetic oligonucleotide
acccuaugcaucugcuggg

SEQ ID NO: 1739868 - RNA, 19 nt, Artificial Sequence
  Description of Artificial Sequence: Synthetic oligonucleotide
auccaaaccauguccacuu

SEQ ID NO: 1739869 - RNA, 19 nt, Artificial Sequence
  Description of Artificial Sequence: Synthetic oligonucleotide
uacugagaacuauauuaau

SEQ ID NO: 1739870 - RNA, 19 nt, Artificial Sequence
  Description of Artificial Sequence: Synthetic oligonucleotide
caauaaguuuuaaggcauc

SEQ ID NO: 1739871 - RNA, 19 nt, Artificial Sequence
  Description of Artificial Sequence: Synthetic oligonucleotide
auuuauacuugaugccuuu

SEQ ID NO: 1739872 - RNA, 19 nt, Artificial Sequence
  Description of Artificial Sequence: Synthetic oligonucleotide
caucguccagacuuuuggc

SEQ ID NO: 1739873 - RNA, 19 nt, Artificial Sequence
  Description of Artificial Sequence: Synthetic oligonucleotide
acacacuacccuaugcauc

SEQ ID NO: 1739874 - RNA, 19 nt, Artificial Sequence
  Description of Artificial Sequence: Synthetic oligonucleotide
gacgaugcaguucagcggu

SEQ ID NO: 1739875 - RNA, 19 nt, Artificial Sequence
  Description of Artificial Sequence: Synthetic oligonucleotide
auauuaauucuguccuuua

SEQ ID NO: 1739876 - RNA, 19 nt, Artificial Sequence
  Description of Artificial Sequence: Synthetic oligonucleotide
uuuauggcaaaugguguuu

SEQ ID NO: 1739877 - RNA, 19 nt, Artificial Sequence
  Description of Artificial Sequence: Synthetic oligonucleotide
ggaagaacgugucacuuuc

SEQ ID NO: 1739878 - RNA, 19 nt, Artificial Sequence
  Description of Artificial Sequence: Synthetic oligonucleotide
gccacuugaggcugcaugg

SEQ ID NO: 1739879 - RNA, 19 nt, Artificial Sequence
  Description of Artificial Sequence: Synthetic oligonucleotide
ucauuaucucugaauucuu

SEQ ID NO: 1739880 - RNA, 19 nt, Artificial Sequence
  Description of Artificial Sequence: Synthetic oligonucleotide
ucagcggucgaaccaugac

SEQ ID NO: 1739881 - RNA, 19 nt, Artificial Sequence
  Description of Artificial Sequence: Synthetic oligonucleotide
uguccuuuaaaggucgauu

SEQ ID NO: 1739882 - RNA, 19 nt, Artificial Sequence
  Description of Artificial Sequence: Synthetic oligonucleotide
aggggcucuaugucuuugg

SEQ ID NO: 1739883 - RNA, 19 nt, Artificial Sequence
  Description of Artificial Sequence: Synthetic oligonucleotide
cacuuuaucugcuaacucu

SEQ ID NO: 1739884 - RNA, 19 nt, Artificial Sequence
  Description of Artificial Sequence: Synthetic oligonucleotide
uagccuuucuucucauaga

SEQ ID NO: 1739885 - RNA, 19 nt, Artificial Sequence
  Description of Artificial Sequence: Synthetic oligonucleotide
ucccuuggaaucucacuga

SEQ ID NO: 1739886 - RNA, 19 nt, Artificial Sequence
  Description of Artificial Sequence: Synthetic oligonucleotide
ggaaucucacugaagauga

SEQ ID NO: 1739887 - RNA, 19 nt, Artificial Sequence
  Description of Artificial Sequence: Synthetic oligonucleotide
aguaagcaauauccauucu

SEQ ID NO: 1739888 - RNA, 19 nt, Artificial Sequence
  Description of Artificial Sequence: Synthetic oligonucleotide
aacggagaaguuaaauguu

SEQ ID NO: 1739889 - RNA, 19 nt, Artificial Sequence
  Description of Artificial Sequence: Synthetic oligonucleotide
uggugguuccuugagcucu

SEQ ID NO: 1739890 - RNA, 19 nt, Artificial Sequence
  Description of Artificial Sequence: Synthetic oligonucleotide
gguuccuugagcucucuac

SEQ ID NO: 1739891 - RNA, 19 nt, Artificial Sequence
  Description of Artificial Sequence: Synthetic oligonucleotide
gguuuuccggcccauaauc

SEQ ID NO: 1739892 - RNA, 19 nt, Artificial Sequence
  Description of Artificial Sequence: Synthetic oligonucleotide
caacuauccaaaccauguc

SEQ ID NO: 1739893 - RNA, 19 nt, Artificial Sequence
  Description of Artificial Sequence: Synthetic oligonucleotide
gaaccagguuuuccggccc

SEQ ID NO: 1739894 - RNA, 19 nt, Artificial Sequence
  Description of Artificial Sequence: Synthetic oligonucleotide
ugguuagacuaaugaaaau

SEQ ID NO: 1739895 - RNA, 19 nt, Artificial Sequence
  Description of Artificial Sequence: Synthetic oligonucleotide
aacugccuccaacuaucca

SEQ ID NO: 1739896 - RNA, 19 nt, Artificial Sequence
  Description of Artificial Sequence: Synthetic oligonucleotide
cugagcauuggccagggaa

SEQ ID NO: 1739897 - RNA, 19 nt, Artificial Sequence
  Description of Artificial Sequence: Synthetic oligonucleotide
uucagcggucgaaccauga

SEQ ID NO: 1739898 - RNA, 19 nt, Artificial Sequence
  Description of Artificial Sequence: Synthetic oligonucleotide
ugccgaugcccauauucug

SEQ ID NO: 1739899 - RNA, 19 nt, Artificial Sequence
  Description of Artificial Sequence: Synthetic oligonucleotide
gcucccaucucuaaggagc

SEQ ID NO: 1739900 - RNA, 19 nt, Artificial Sequence
  Description of Artificial Sequence: Synthetic oligonucleotide
agaacgugucacuuucaaa

SEQ ID NO: 1739901 - RNA, 19 nt, Artificial Sequence
  Description of Artificial Sequence: Synthetic oligonucleotide
gucgaaccaugacagcagc

SEQ ID NO: 1739902 - RNA, 19 nt, Artificial Sequence
  Description of Artificial Sequence: Synthetic oligonucleotide
ugcaguucagcggucgaac

SEQ ID NO: 1739903 - RNA, 19 nt, Artificial Sequence
  Description of Artificial Sequence: Synthetic oligonucleotide
uucugggacacggcgacga

SEQ ID NO: 1739904 - RNA, 19 nt, Artificial Sequence
  Description of Artificial Sequence: Synthetic oligonucleotide
auucguuccugagcauugg

SEQ ID NO: 1739905 - RNA, 19 nt, Artificial Sequence
  Description of Artificial Sequence: Synthetic oligonucleotide
aucugcuaacucugguugu

SEQ ID NO: 1739906 - RNA, 19 nt, Artificial Sequence
  Description of Artificial Sequence: Synthetic oligonucleotide
cacuacccuaugcaucugc

SEQ ID NO: 1739907 - RNA, 19 nt, Artificial Sequence
  Description of Artificial Sequence: Synthetic oligonucleotide
acugaagaugagaaacgga

SEQ ID NO: 1739908 - RNA, 19 nt, Artificial Sequence
  Description of Artificial Sequence: Synthetic oligonucleotide
gagugaacagaacucugcu

SEQ ID NO: 1739909 - RNA, 19 nt, Artificial Sequence
  Description of Artificial Sequence: Synthetic oligonucleotide
gucugagugaacagaacuc

SEQ ID NO: 1739910 - RNA, 19 nt, Artificial Sequence
  Description of Artificial Sequence: Synthetic oligonucleotide
caugggaggggcauugaga

SEQ ID NO: 1739911 - RNA, 19 nt, Artificial Sequence
  Description of Artificial Sequence: Synthetic oligonucleotide
cuacccuaugcaucugcug

SEQ ID NO: 1739912 - RNA, 19 nt, Artificial Sequence
  Description of Artificial Sequence: Synthetic oligonucleotide
ucuguccuuuaaaggucga

SEQ ID NO: 1739913 - RNA, 19 nt, Artificial Sequence
  Description of Artificial Sequence: Synthetic oligonucleotide
ccauucucaauucauuauc

SEQ ID NO: 1739914 - RNA, 19 nt, Artificial Sequence
  Description of Artificial Sequence: Synthetic oligonucleotide
ggagaaguuaaauguucca

SEQ ID NO: 1739915 - RNA, 19 nt, Artificial Sequence
  Description of Artificial Sequence: Synthetic oligonucleotide
ccugguuagacuaaugaaa

SEQ ID NO: 1739916 - RNA, 19 nt, Artificial Sequence
  Description of Artificial Sequence: Synthetic oligonucleotide
ugugugugugugugugugu

SEQ ID NO: 1739917 - RNA, 19 nt, Artificial Sequence
  Description of Artificial Sequence: Synthetic oligonucleotide
ccuccaacuauccaaacca

SEQ ID NO: 1739918 - RNA, 19 nt, Artificial Sequence
  Description of Artificial Sequence: Synthetic oligonucleotide
cuuguaaacggaacugccu

SEQ ID NO: 1739919 - RNA, 19 nt, Artificial Sequence
  Description of Artificial Sequence: Synthetic oligonucleotide
gaacuuuauggcaaauggu

SEQ ID NO: 1739920 - RNA, 19 nt, Artificial Sequence
  Description of Artificial Sequence: Synthetic oligonucleotide
gggcucuaugucuuugggg

SEQ ID NO: 1739921 - RNA, 19 nt, Artificial Sequence
  Description of Artificial Sequence: Synthetic oligonucleotide
caauucauuaucucugaau

SEQ ID NO: 1739922 - RNA, 19 nt, Artificial Sequence
  Description of Artificial Sequence: Synthetic oligonucleotide
gugugugugugugugugug

SEQ ID NO: 1739923 - RNA, 19 nt, Artificial Sequence
  Description of Artificial Sequence: Synthetic oligonucleotide
guacacacacuacccuaug

SEQ ID NO: 1739924 - RNA, 19 nt, Artificial Sequence
  Description of Artificial Sequence: Synthetic oligonucleotide
uuaaggcaucguccagacu

SEQ ID NO: 1739925 - RNA, 19 nt, Artificial Sequence
  Description of Artificial Sequence: Synthetic oligonucleotide
agccagcucucaauuuacc

SEQ ID NO: 1739926 - RNA, 19 nt, Artificial Sequence
  Description of Artificial Sequence: Synthetic oligonucleotide
agcuauuaugcuugccauu

SEQ ID NO: 1739927 - RNA, 19 nt, Artificial Sequence
  Description of Artificial Sequence: Synthetic oligonucleotide
uaaacggaacugccuccaa

SEQ ID NO: 1739928 - RNA, 19 nt, Artificial Sequence
  Description of Artificial Sequence: Synthetic oligonucleotide
auggagccagcucucaauu

SEQ ID NO: 1739929 - RNA, 19 nt, Artificial Sequence
  Description of Artificial Sequence: Synthetic oligonucleotide
guacuugaauucguuccug

SEQ ID NO: 1739930 - RNA, 19 nt, Artificial Sequence
  Description of Artificial Sequence: Synthetic oligonucleotide
ggaauggagaaccagguuu

SEQ ID NO: 1739931 - RNA, 19 nt, Artificial Sequence
  Description of Artificial Sequence: Synthetic oligonucleotide
cuuccuuguaaacggaacu

SEQ ID NO: 1739932 - RNA, 19 nt, Artificial Sequence
  Description of Artificial Sequence: Synthetic oligonucleotide
aggucuccguucuugccga

SEQ ID NO: 1739933 - RNA, 19 nt, Artificial Sequence
  Description of Artificial Sequence: Synthetic oligonucleotide
gucgauucuucucaggaau

SEQ ID NO: 1739934 - RNA, 19 nt, Artificial Sequence
  Description of Artificial Sequence: Synthetic oligonucleotide
cccauauucugggacacgg

SEQ ID NO: 1739935 - RNA, 19 nt, Artificial Sequence
  Description of Artificial Sequence: Synthetic oligonucleotide
cuguuagccuuucuucuca

SEQ ID NO: 1739936 - RNA, 19 nt, Artificial Sequence
  Description of Artificial Sequence: Synthetic oligonucleotide
cuccuaucucuaugagccc

SEQ ID NO: 1739937 - RNA, 19 nt, Artificial Sequence
  Description of Artificial Sequence: Synthetic oligonucleotide
gaugcaguucagcggucga

SEQ ID NO: 1739938 - RNA, 19 nt, Artificial Sequence
  Description of Artificial Sequence: Synthetic oligonucleotide
agucugaugugcagaauaa

SEQ ID NO: 1739939 - RNA, 19 nt, Artificial Sequence
  Description of Artificial Sequence: Synthetic oligonucleotide
uggccagggaaggucuccg

SEQ ID NO: 1739940 - RNA, 19 nt, Artificial Sequence
  Description of Artificial Sequence: Synthetic oligonucleotide
agucucuacuuugaucuaa

SEQ ID NO: 1739941 - RNA, 19 nt, Artificial Sequence
  Description of Artificial Sequence: Synthetic oligonucleotide
cucucuacugagaacuaua

SEQ ID NO: 1739942 - RNA, 19 nt, Artificial Sequence
  Description of Artificial Sequence: Synthetic oligonucleotide
guaaacggaacugccucca

SEQ ID NO: 1739943 - RNA, 19 nt, Artificial Sequence
  Description of Artificial Sequence: Synthetic oligonucleotide
guuccuugagcucucuacu

SEQ ID NO: 1739944 - RNA, 19 nt, Artificial Sequence
  Description of Artificial Sequence: Synthetic oligonucleotide
guuuuccggcccauaauca

SEQ ID NO: 1739945 - RNA, 19 nt, Artificial Sequence
  Description of Artificial Sequence: Synthetic oligonucleotide
aaacccauuucugcccuuu

SEQ ID NO: 1739946 - RNA, 19 nt, Artificial Sequence
  Description of Artificial Sequence: Synthetic oligonucleotide
ucucuacuuugaucuaauu

SEQ ID NO: 1739947 - RNA, 19 nt, Artificial Sequence
  Description of Artificial Sequence: Synthetic oligonucleotide
ucugcuaacucugguuguu

SEQ ID NO: 1739948 - RNA, 19 nt, Artificial Sequence
  Description of Artificial Sequence: Synthetic oligonucleotide
ugaauucguuccugagcau

SEQ ID NO: 1739949 - RNA, 19 nt, Artificial Sequence
  Description of Artificial Sequence: Synthetic oligonucleotide
agguuuuccggcccauaau

SEQ ID NO: 1739950 - RNA, 19 nt, Artificial Sequence
  Description of Artificial Sequence: Synthetic oligonucleotide
ggggcucuaugucuuuggg

SEQ ID NO: 1739951 - RNA, 19 nt, Artificial Sequence
  Description of Artificial Sequence: Synthetic oligonucleotide
cuugagcucucuacugaga

SEQ ID NO: 1739952 - RNA, 19 nt, Artificial Sequence
  Description of Artificial Sequence: Synthetic oligonucleotide
gagccagcucucaauuuac

SEQ ID NO: 1739953 - RNA, 19 nt, Artificial Sequence
  Description of Artificial Sequence: Synthetic oligonucleotide
gccgaugcccauauucugg

SEQ ID NO: 1739954 - RNA, 19 nt, Artificial Sequence
  Description of Artificial Sequence: Synthetic oligonucleotide
uuggccagggaaggucucc

SEQ ID NO: 1739955 - RNA, 19 nt, Artificial Sequence
  Description of Artificial Sequence: Synthetic oligonucleotide
gcuauuaugcuugccauua

SEQ ID NO: 1739956 - RNA, 19 nt, Artificial Sequence
  Description of Artificial Sequence: Synthetic oligonucleotide
ggucgaaccaugacagcag

SEQ ID NO: 1739957 - RNA, 19 nt, Artificial Sequence
  Description of Artificial Sequence: Synthetic oligonucleotide
cuuguacacacacuacccu

SEQ ID NO: 1739958 - RNA, 19 nt, Artificial Sequence
  Description of Artificial Sequence: Synthetic oligonucleotide
gaacagaacucugcucaga

SEQ ID NO: 1739959 - RNA, 19 nt, Artificial Sequence
  Description of Artificial Sequence: Synthetic oligonucleotide
cagcggucgaaccaugaca

SEQ ID NO: 1739960 - RNA, 19 nt, Artificial Sequence
  Description of Artificial Sequence: Synthetic oligonucleotide
acuacccuaugcaucugcu

SEQ ID NO: 1739961 - RNA, 19 nt, Artificial Sequence
  Description of Artificial Sequence: Synthetic oligonucleotide
ggcaaaugguguuucuuaa

SEQ ID NO: 1739962 - RNA, 19 nt, Artificial Sequence
  Description of Artificial Sequence: Synthetic oligonucleotide
uucuagcucugcuguuuaa

SEQ ID NO: 1739963 - RNA, 19 nt, Artificial Sequence
  Description of Artificial Sequence: Synthetic oligonucleotide
cucugggagaaguuuauau

SEQ ID NO: 1739964 - RNA, 19 nt, Artificial Sequence
  Description of Artificial Sequence: Synthetic oligonucleotide
caaaccauguccacuuuau

SEQ ID NO: 1739965 - RNA, 19 nt, Artificial Sequence
  Description of Artificial Sequence: Synthetic oligonucleotide
auaucagcucaugcucuca

SEQ ID NO: 1739966 - RNA, 19 nt, Artificial Sequence
  Description of Artificial Sequence: Synthetic oligonucleotide
ccgaugcccauauucuggg

SEQ ID NO: 1739967 - RNA, 19 nt, Artificial Sequence
  Description of Artificial Sequence: Synthetic oligonucleotide
uguguguguguguguguuu

SEQ ID NO: 1739968 - RNA, 19 nt, Artificial Sequence
  Description of Artificial Sequence: Synthetic oligonucleotide
ccaacuauccaaaccaugu

SEQ ID NO: 1739969 - RNA, 19 nt, Artificial Sequence
  Description of Artificial Sequence: Synthetic oligonucleotide
gaagaacgugucacuuuca

SEQ ID NO: 1739970 - RNA, 19 nt, Artificial Sequence
  Description of Artificial Sequence: Synthetic oligonucleotide
ccagcucucaauuuaccca

SEQ ID NO: 1739971 - RNA, 19 nt, Artificial Sequence
  Description of Artificial Sequence: Synthetic oligonucleotide
caguucagcggucgaacca

SEQ ID NO: 1739972 - RNA, 19 nt, Artificial Sequence
  Description of Artificial Sequence: Synthetic oligonucleotide
gcaguucagcggucgaacc

SEQ ID NO: 1739973 - RNA, 19 nt, Artificial Sequence
  Description of Artificial Sequence: Synthetic oligonucleotide
aucuagcuccuaucucuau

SEQ ID NO: 1739974 - RNA, 19 nt, Artificial Sequence
  Description of Artificial Sequence: Synthetic oligonucleotide
guaucccuuggaaucucac

SEQ ID NO: 1739975 - RNA, 19 nt, Artificial Sequence
  Description of Artificial Sequence: Synthetic oligonucleotide
aguaucccuuggaaucuca

SEQ ID NO: 1739976 - RNA, 19 nt, Artificial Sequence
  Description of Artificial Sequence: Synthetic oligonucleotide
auucugggacacggcgacg

SEQ ID NO: 1739977 - RNA, 19 nt, Artificial Sequence
  Description of Artificial Sequence: Synthetic oligonucleotide
ggagccagcucucaauuua

SEQ ID NO: 1739978 - RNA, 19 nt, Artificial Sequence
  Description of Artificial Sequence: Synthetic oligonucleotide
uggagccagcucucaauuu

SEQ ID NO: 1739979 - RNA, 19 nt, Artificial Sequence
  Description of Artificial Sequence: Synthetic oligonucleotide
ccauauucugggacacggc

SEQ ID NO: 1739980 - RNA, 19 nt, Artificial Sequence
  Description of Artificial Sequence: Synthetic oligonucleotide
ucuaugucuuuggggucuc

SEQ ID NO: 1739981 - RNA, 19 nt, Artificial Sequence
  Description of Artificial Sequence: Synthetic oligonucleotide
cugguuguucaauaaguuu

SEQ ID NO: 1739982 - RNA, 19 nt, Artificial Sequence
  Description of Artificial Sequence: Synthetic oligonucleotide
cuauucuuguucugucacu

SEQ ID NO: 1739983 - RNA, 19 nt, Artificial Sequence
  Description of Artificial Sequence: Synthetic oligonucleotide
augcuugccauuacuuaau

SEQ ID NO: 1739984 - RNA, 19 nt, Artificial Sequence
  Description of Artificial Sequence: Synthetic oligonucleotide
gaaaggaccccuggguacu

SEQ ID NO: 1739985 - RNA, 19 nt, Artificial Sequence
  Description of Artificial Sequence: Synthetic oligonucleotide
aaggcaucguccagacuuu

SEQ ID NO: 1739986 - RNA, 19 nt, Artificial Sequence
  Description of Artificial Sequence: Synthetic oligonucleotide
cagaauaauucagucucua

SEQ ID NO: 1739987 - RNA, 19 nt, Artificial Sequence
  Description of Artificial Sequence: Synthetic oligonucleotide
gcuuccuuguaaacggaac

SEQ ID NO: 1739988 - RNA, 19 nt, Artificial Sequence
  Description of Artificial Sequence: Synthetic oligonucleotide
uucugcccuuuguacuuau

SEQ ID NO: 1739989 - RNA, 19 nt, Artificial Sequence
  Description of Artificial Sequence: Synthetic oligonucleotide
gcaaaugguguuucuuaaa

SEQ ID NO: 1739990 - RNA, 19 nt, Artificial Sequence
  Description of Artificial Sequence: Synthetic oligonucleotide
ggacacggcgacgaugcag

SEQ ID NO: 1739991 - RNA, 19 nt, Artificial Sequence
  Description of Artificial Sequence: Synthetic oligonucleotide
cgacgaugcaguucagcgg

SEQ ID NO: 1739992 - RNA, 19 nt, Artificial Sequence
  Description of Artificial Sequence: Synthetic oligonucleotide
cuccguucuugccgaugcc

SEQ ID NO: 1739993 - RNA, 19 nt, Artificial Sequence
  Description of Artificial Sequence: Synthetic oligonucleotide
cauuggccagggaaggucu

SEQ ID NO: 1739994 - RNA, 19 nt, Artificial Sequence
  Description of Artificial Sequence: Synthetic oligonucleotide
gguuguucaauaaguuuua

SEQ ID NO: 1739995 - RNA, 19 nt, Artificial Sequence
  Description of Artificial Sequence: Synthetic oligonucleotide
cugcuaacucugguuguuc

SEQ ID NO: 1739996 - RNA, 19 nt, Artificial Sequence
  Description of Artificial Sequence: Synthetic oligonucleotide
ugguuccuugagcucucua

SEQ ID NO: 1739997 - RNA, 19 nt, Artificial Sequence
  Description of Artificial Sequence: Synthetic oligonucleotide
agcauuggccagggaaggu

SEQ ID NO: 1739998 - RNA, 19 nt, Artificial Sequence
  Description of Artificial Sequence: Synthetic oligonucleotide
ccauuuucugucugaguga

SEQ ID NO: 1739999 - RNA, 19 nt, Artificial Sequence
  Description of Artificial Sequence: Synthetic oligonucleotide
cagcucucaauuuacccau

SEQ ID NO: 1740000 - RNA, 19 nt, Artificial Sequence
  Description of Artificial Sequence: Synthetic oligonucleotide
cacacacuacccuaugcau

SEQ ID NO: 1740001 - RNA, 19 nt, Artificial Sequence
  Description of Artificial Sequence: Synthetic oligonucleotide
gaugagaaacggagaaguu

SEQ ID NO: 1740002 - RNA, 19 nt, Artificial Sequence
  Description of Artificial Sequence: Synthetic oligonucleotide
gucauucuuuggaaguacu

SEQ ID NO: 1740003 - RNA, 19 nt, Artificial Sequence
  Description of Artificial Sequence: Synthetic oligonucleotide
ucaugcucucaggggcucu

SEQ ID NO: 1740004 - RNA, 19 nt, Artificial Sequence
  Description of Artificial Sequence: Synthetic oligonucleotide
cucuaugucuuuggggucu

SEQ ID NO: 1740005 - RNA, 19 nt, Artificial Sequence
  Description of Artificial Sequence: Synthetic oligonucleotide
augcaguucagcggucgaa

SEQ ID NO: 1740006 - RNA, 19 nt, Artificial Sequence
  Description of Artificial Sequence: Synthetic oligonucleotide
auacaggggcuggggaagu

SEQ ID NO: 1740007 - RNA, 19 nt, Artificial Sequence
  Description of Artificial Sequence: Synthetic oligonucleotide
gcuaacucugguuguucaa

SEQ ID NO: 1740008 - RNA, 19 nt, Artificial Sequence
  Description of Artificial Sequence: Synthetic oligonucleotide
auggccuggcugauucaug

SEQ ID NO: 1740009 - RNA, 19 nt, Artificial Sequence
  Description of Artificial Sequence: Synthetic oligonucleotide
gcucuaugucuuugggguc

SEQ ID NO: 1740010 - RNA, 19 nt, Artificial Sequence
  Description of Artificial Sequence: Synthetic oligonucleotide
guucagcggucgaaccaug

SEQ ID NO: 1740011 - RNA, 19 nt, Artificial Sequence
  Description of Artificial Sequence: Synthetic oligonucleotide
gagcacaauggagccagcu

SEQ ID NO: 1740012 - RNA, 19 nt, Artificial Sequence
  Description of Artificial Sequence: Synthetic oligonucleotide
caccagguucuguuuaccu

SEQ ID NO: 1740013 - RNA, 19 nt, Artificial Sequence
  Description of Artificial Sequence: Synthetic oligonucleotide
acgaugcaguucagcgguc

SEQ ID NO: 1740014 - RNA, 19 nt, Artificial Sequence
  Description of Artificial Sequence: Synthetic oligonucleotide
gcauuggccagggaagguc

SEQ ID NO: 1740015 - RNA, 19 nt, Artificial Sequence
  Description of Artificial Sequence: Synthetic oligonucleotide
cucaugcucucaggggcuc

SEQ ID NO: 1740016 - RNA, 19 nt, Artificial Sequence
  Description of Artificial Sequence: Synthetic oligonucleotide
ggcgacgaugcaguucagc

SEQ ID NO: 1740017 - RNA, 19 nt, Artificial Sequence
  Description of Artificial Sequence: Synthetic oligonucleotide
cacggcgacgaugcaguuc

SEQ ID NO: 1740018 - RNA, 19 nt, Artificial Sequence
  Description of Artificial Sequence: Synthetic oligonucleotide
ggcaucguccagacuuuug

SEQ ID NO: 1740019 - RNA, 19 nt, Artificial Sequence
  Description of Artificial Sequence: Synthetic oligonucleotide
ggacuucagaaaggacccc

SEQ ID NO: 1740020 - RNA, 19 nt, Artificial Sequence
  Description of Artificial Sequence: Synthetic oligonucleotide
cauaaucaccagguucugu

SEQ ID NO: 1740021 - RNA, 19 nt, Artificial Sequence
  Description of Artificial Sequence: Synthetic oligonucleotide
ucuugccgaugcccauauu

SEQ ID NO: 1740022 - RNA, 19 nt, Artificial Sequence
  Description of Artificial Sequence: Synthetic oligonucleotide
cuccaacuauccaaaccau

SEQ ID NO: 1740023 - RNA, 19 nt, Artificial Sequence
  Description of Artificial Sequence: Synthetic oligonucleotide
ccagaccuuauauaauccu

SEQ ID NO: 1740024 - RNA, 19 nt, Artificial Sequence
  Description of Artificial Sequence: Synthetic oligonucleotide
guucuugccgaugcccaua

SEQ ID NO: 1740025 - RNA, 19 nt, Artificial Sequence
  Description of Artificial Sequence: Synthetic oligonucleotide
guguguguguguguguuuu

SEQ ID NO: 1740026 - RNA, 19 nt, Artificial Sequence
  Description of Artificial Sequence: Synthetic oligonucleotide
gucucuacuuugaucuaau

SEQ ID NO: 1740027 - RNA, 19 nt, Artificial Sequence
  Description of Artificial Sequence: Synthetic oligonucleotide
cgaugcaguucagcggucg

SEQ ID NO: 1740028 - RNA, 19 nt, Artificial Sequence
  Description of Artificial Sequence: Synthetic oligonucleotide
gcccauauucugggacacg

SEQ ID NO: 1740029 - RNA, 19 nt, Artificial Sequence
  Description of Artificial Sequence: Synthetic oligonucleotide
uacaggggcuggggaagua

SEQ ID NO: 1740030 - RNA, 19 nt, Artificial Sequence
  Description of Artificial Sequence: Synthetic oligonucleotide
ggcaagaaaaugagcuccu

SEQ ID NO: 1740031 - RNA, 19 nt, Artificial Sequence
  Description of Artificial Sequence: Synthetic oligonucleotide
ccagacuuuuggcaagaaa

SEQ ID NO: 1740032 - RNA, 19 nt, Artificial Sequence
  Description of Artificial Sequence: Synthetic oligonucleotide
cagucucuacuuugaucua

SEQ ID NO: 1740033 - RNA, 19 nt, Artificial Sequence
  Description of Artificial Sequence: Synthetic oligonucleotide
gcggucgaaccaugacagc

SEQ ID NO: 1740034 - RNA, 19 nt, Artificial Sequence
  Description of Artificial Sequence: Synthetic oligonucleotide
guguguguguguguguguu

SEQ ID NO: 1740035 - RNA, 19 nt, Artificial Sequence
  Description of Artificial Sequence: Synthetic oligonucleotide
gcaguaucccuuggaaucu

SEQ ID NO: 1740036 - RNA, 19 nt, Artificial Sequence
  Description of Artificial Sequence: Synthetic oligonucleotide
agcucucuacugagaacua

SEQ ID NO: 1740037 - RNA, 19 nt, Artificial Sequence
  Description of Artificial Sequence: Synthetic oligonucleotide
cugcuguuuaaaacccauu

SEQ ID NO: 1740038 - RNA, 19 nt, Artificial Sequence
  Description of Artificial Sequence: Synthetic oligonucleotide
cuuauucaucuagcuccua

SEQ ID NO: 1740039 - RNA, 19 nt, Artificial Sequence
  Description of Artificial Sequence: Synthetic oligonucleotide
ggggcauugagaacuuuau

SEQ ID NO: 1740040 - RNA, 19 nt, Artificial Sequence
  Description of Artificial Sequence: Synthetic oligonucleotide
ggugguuccuugagcucuc

SEQ ID NO: 1740041 - RNA, 19 nt, Artificial Sequence
  Description of Artificial Sequence: Synthetic oligonucleotide
acacggcgacgaugcaguu

SEQ ID NO: 1740042 - RNA, 19 nt, Artificial Sequence
  Description of Artificial Sequence: Synthetic oligonucleotide
agcucucaauuuacccauu

SEQ ID NO: 1740043 - RNA, 19 nt, Artificial Sequence
  Description of Artificial Sequence: Synthetic oligonucleotide
cggucgaaccaugacagca

SEQ ID NO: 1740044 - RNA, 19 nt, Artificial Sequence
  Description of Artificial Sequence: Synthetic oligonucleotide
ccuaugcaucugcugggga

SEQ ID NO: 1740045 - RNA, 19 nt, Artificial Sequence
  Description of Artificial Sequence: Synthetic oligonucleotide
cccuuggaaucucacugaa

SEQ ID NO: 1740046 - RNA, 19 nt, Artificial Sequence
  Description of Artificial Sequence: Synthetic oligonucleotide
aggcaucguccagacuuuu

SEQ ID NO: 1740047 - RNA, 19 nt, Artificial Sequence
  Description of Artificial Sequence: Synthetic oligonucleotide
ccuuuaaaggucgauucuu

SEQ ID NO: 1740048 - RNA, 19 nt, Artificial Sequence
  Description of Artificial Sequence: Synthetic oligonucleotide
caugcucucaggggcucua

SEQ ID NO: 1740049 - RNA, 19 nt, Artificial Sequence
  Description of Artificial Sequence: Synthetic oligonucleotide
ggagcacaauggagccagc

SEQ ID NO: 1740050 - RNA, 19 nt, Artificial Sequence
  Description of Artificial Sequence: Synthetic oligonucleotide
cggcccauaaucaccaggu

SEQ ID NO: 1740051 - RNA, 19 nt, Artificial Sequence
  Description of Artificial Sequence: Synthetic oligonucleotide
ggggucucuuguacacaca

SEQ ID NO: 1740052 - RNA, 19 nt, Artificial Sequence
  Description of Artificial Sequence: Synthetic oligonucleotide
caucucuaaggagcacaau

SEQ ID NO: 1740053 - RNA, 19 nt, Artificial Sequence
  Description of Artificial Sequence: Synthetic oligonucleotide
gcucucuacugagaacuau

SEQ ID NO: 1740054 - RNA, 19 nt, Artificial Sequence
  Description of Artificial Sequence: Synthetic oligonucleotide
ccaccugcucccaucucua

SEQ ID NO: 1740055 - RNA, 19 nt, Artificial Sequence
  Description of Artificial Sequence: Synthetic oligonucleotide
gggacacggcgacgaugca

SEQ ID NO: 1740056 - RNA, 19 nt, Artificial Sequence
  Description of Artificial Sequence: Synthetic oligonucleotide
gccagggaaggucuccguu

SEQ ID NO: 1740057 - RNA, 19 nt, Artificial Sequence
  Description of Artificial Sequence: Synthetic oligonucleotide
cgaugcccauauucuggga

SEQ ID NO: 1740058 - RNA, 19 nt, Artificial Sequence
  Description of Artificial Sequence: Synthetic oligonucleotide
cguucuugccgaugcccau

SEQ ID NO: 1740059 - RNA, 19 nt, Artificial Sequence
  Description of Artificial Sequence: Synthetic oligonucleotide
cggcgacgaugcaguucag

SEQ ID NO: 1740060 - RNA, 19 nt, Artificial Sequence
  Description of Artificial Sequence: Synthetic oligonucleotide
aaugaagcacauuugaugc

SEQ ID NO: 1740061 - RNA, 19 nt, Artificial Sequence
  Description of Artificial Sequence: Synthetic oligonucleotide
accauaaucacauuuaagc

SEQ ID NO: 1740062 - RNA, 19 nt, Artificial Sequence
  Description of Artificial Sequence: Synthetic oligonucleotide
aacaccaaaauccauacgg

SEQ ID NO: 1740063 - RNA, 19 nt, Artificial Sequence
  Description of Artificial Sequence: Synthetic oligonucleotide
aaaugaagauuuuagaaug

SEQ ID NO: 1740064 - RNA, 19 nt, Artificial Sequence
  Description of Artificial Sequence: Synthetic oligonucleotide
aaaagguucacacugcauc

SEQ ID NO: 1740065 - RNA, 19 nt, Artificial Sequence
  Description of Artificial Sequence: Synthetic oligonucleotide
uuuauauacagacuauagg

SEQ ID NO: 1740066 - RNA, 19 nt, Artificial Sequence
  Description of Artificial Sequence: Synthetic oligonucleotide
aacgugaacacucagaacu

SEQ ID NO: 1740067 - RNA, 19 nt, Artificial Sequence
  Description of Artificial Sequence: Synthetic oligonucleotide
aaugcaaagagccauuaag

SEQ ID NO: 1740068 - RNA, 19 nt, Artificial Sequence
  Description of Artificial Sequence: Synthetic oligonucleotide
aaugcaaugugauacaaca

SEQ ID NO: 1740069 - RNA, 19 nt, Artificial Sequence
  Description of Artificial Sequence: Synthetic oligonucleotide
uagaguaaugcaaagagcc

SEQ ID NO: 1740070 - RNA, 19 nt, Artificial Sequence
  Description of Artificial Sequence: Synthetic oligonucleotide
aaauauccaagucacuugg

SEQ ID NO: 1740071 - RNA, 19 nt, Artificial Sequence
  Description of Artificial Sequence: Synthetic oligonucleotide
aguauuucuaagcauaauc

SEQ ID NO: 1740072 - RNA, 19 nt, Artificial Sequence
  Description of Artificial Sequence: Synthetic oligonucleotide
caagcaaugagguagaaag

SEQ ID NO: 1740073 - RNA, 19 nt, Artificial Sequence
  Description of Artificial Sequence: Synthetic oligonucleotide
aaauuucaguaguuuaggc

SEQ ID NO: 1740074 - RNA, 19 nt, Artificial Sequence
  Description of Artificial Sequence: Synthetic oligonucleotide
aguaauauuggugaccucc

SEQ ID NO: 1740075 - RNA, 19 nt, Artificial Sequence
  Description of Artificial Sequence: Synthetic oligonucleotide
ucgaaaaugaacuauaaau

SEQ ID NO: 1740076 - RNA, 19 nt, Artificial Sequence
  Description of Artificial Sequence: Synthetic oligonucleotide
aguagaguaaugcaaagag

SEQ ID NO: 1740077 - RNA, 19 nt, Artificial Sequence
  Description of Artificial Sequence: Synthetic oligonucleotide
auuaggauugucuagugag

SEQ ID NO: 1740078 - RNA, 19 nt, Artificial Sequence
  Description of Artificial Sequence: Synthetic oligonucleotide
aaaacuagacuggucaagc

SEQ ID NO: 1740079 - RNA, 19 nt, Artificial Sequence
  Description of Artificial Sequence: Synthetic oligonucleotide
aagauuuuagaauggaagu

SEQ ID NO: 1740080 - RNA, 19 nt, Artificial Sequence
  Description of Artificial Sequence: Synthetic oligonucleotide
ugcaucuugguuuugaaag

SEQ ID NO: 1740081 - RNA, 19 nt, Artificial Sequence
  Description of Artificial Sequence: Synthetic oligonucleotide
uguacaaguaauauuggug

SEQ ID NO: 1740082 - RNA, 19 nt, Artificial Sequence
  Description of Artificial Sequence: Synthetic oligonucleotide
uauuuuagcaaguaucacc

SEQ ID NO: 1740083 - RNA, 19 nt, Artificial Sequence
  Description of Artificial Sequence: Synthetic oligonucleotide
aauauuggugaccuccaac

SEQ ID NO: 1740084 - RNA, 19 nt, Artificial Sequence
  Description of Artificial Sequence: Synthetic oligonucleotide
aagaagaucuagcaaauga

SEQ ID NO: 1740085 - RNA, 19 nt, Artificial Sequence
  Description of Artificial Sequence: Synthetic oligonucleotide
auaugucaaaacuagacug

SEQ ID NO: 1740086 - RNA, 19 nt, Artificial Sequence
  Description of Artificial Sequence: Synthetic oligonucleotide
auuucaguaguuuaggcug

SEQ ID NO: 1740087 - RNA, 19 nt, Artificial Sequence
  Description of Artificial Sequence: Synthetic oligonucleotide
gaagauuuuagaauggaag

SEQ ID NO: 1740088 - RNA, 19 nt, Artificial Sequence
  Description of Artificial Sequence: Synthetic oligonucleotide
ucugauaccaaacugggaa

SEQ ID NO: 1740089 - RNA, 19 nt, Artificial Sequence
  Description of Artificial Sequence: Synthetic oligonucleotide
ugcaaugugauacaacacc

SEQ ID NO: 1740090 - RNA, 19 nt, Artificial Sequence
  Description of Artificial Sequence: Synthetic oligonucleotide
uaugcaagcaccuuuuagc

SEQ ID NO: 1740091 - RNA, 19 nt, Artificial Sequence
  Description of Artificial Sequence: Synthetic oligonucleotide
augauaaagugauuuuggc

SEQ ID NO: 1740092 - RNA, 19 nt, Artificial Sequence
  Description of Artificial Sequence: Synthetic oligonucleotide
uauauacagacuauaggca

SEQ ID NO: 1740093 - RNA, 19 nt, Artificial Sequence
  Description of Artificial Sequence: Synthetic oligonucleotide
gcaaguaucaccuugcagg

SEQ ID NO: 1740094 - RNA, 19 nt, Artificial Sequence
  Description of Artificial Sequence: Synthetic oligonucleotide
uagaaugguaauuuuaaga

SEQ ID NO: 1740095 - RNA, 19 nt, Artificial Sequence
  Description of Artificial Sequence: Synthetic oligonucleotide
agauauuuuagcaaguauc

SEQ ID NO: 1740096 - RNA, 19 nt, Artificial Sequence
  Description of Artificial Sequence: Synthetic oligonucleotide
acugacuuacuguuaaugg

SEQ ID NO: 1740097 - RNA, 19 nt, Artificial Sequence
  Description of Artificial Sequence: Synthetic oligonucleotide
ugaaacuauacauuaagau

SEQ ID NO: 1740098 - RNA, 19 nt, Artificial Sequence
  Description of Artificial Sequence: Synthetic oligonucleotide
uuacuguuaauggaaaagg

SEQ ID NO: 1740099 - RNA, 19 nt, Artificial Sequence
  Description of Artificial Sequence: Synthetic oligonucleotide
agcaagguugcucaaaggg

SEQ ID NO: 1740100 - RNA, 19 nt, Artificial Sequence
  Description of Artificial Sequence: Synthetic oligonucleotide
auuuaagccacugacuuac

SEQ ID NO: 1740101 - RNA, 19 nt, Artificial Sequence
  Description of Artificial Sequence: Synthetic oligonucleotide
uuuagcaaguaucaccuug

SEQ ID NO: 1740102 - RNA, 19 nt, Artificial Sequence
  Description of Artificial Sequence: Synthetic oligonucleotide
uuagaauggaaguauacuc

SEQ ID NO: 1740103 - RNA, 19 nt, Artificial Sequence
  Description of Artificial Sequence: Synthetic oligonucleotide
aaugacacaccacuguuga

SEQ ID NO: 1740104 - RNA, 19 nt, Artificial Sequence
  Description of Artificial Sequence: Synthetic oligonucleotide
ugugauacaacaccaaaau

SEQ ID NO: 1740105 - RNA, 19 nt, Artificial Sequence
  Description of Artificial Sequence: Synthetic oligonucleotide
gacuggucaagcuaagugg

SEQ ID NO: 1740106 - RNA, 19 nt, Artificial Sequence
  Description of Artificial Sequence: Synthetic oligonucleotide
aacuauaaaugcaucuugg

SEQ ID NO: 1740107 - RNA, 19 nt, Artificial Sequence
  Description of Artificial Sequence: Synthetic oligonucleotide
auaaucacauuuaagccac

SEQ ID NO: 1740108 - RNA, 19 nt, Artificial Sequence
  Description of Artificial Sequence: Synthetic oligonucleotide
aagcauuaggaacauauau

SEQ ID NO: 1740109 - RNA, 19 nt, Artificial Sequence
  Description of Artificial Sequence: Synthetic oligonucleotide
acaagcauaugucaaaacu

SEQ ID NO: 1740110 - RNA, 19 nt, Artificial Sequence
  Description of Artificial Sequence: Synthetic oligonucleotide
uguacuugguaccagagua

SEQ ID NO: 1740111 - RNA, 19 nt, Artificial Sequence
  Description of Artificial Sequence: Synthetic oligonucleotide
agugcaguaacuguuuagc

SEQ ID NO: 1740112 - RNA, 19 nt, Artificial Sequence
  Description of Artificial Sequence: Synthetic oligonucleotide
guuaagaagaucuagcaaa

SEQ ID NO: 1740113 - RNA, 19 nt, Artificial Sequence
  Description of Artificial Sequence: Synthetic oligonucleotide
aagaaaagguaucuugacu

SEQ ID NO: 1740114 - RNA, 19 nt, Artificial Sequence
  Description of Artificial Sequence: Synthetic oligonucleotide
uggaaugccacauccauug

SEQ ID NO: 1740115 - RNA, 19 nt, Artificial Sequence
  Description of Artificial Sequence: Synthetic oligonucleotide
uuaggaacauauauaaaau

SEQ ID NO: 1740116 - RNA, 19 nt, Artificial Sequence
  Description of Artificial Sequence: Synthetic oligonucleotide
agugauuuuggcuuaguca

SEQ ID NO: 1740117 - RNA, 19 nt, Artificial Sequence
  Description of Artificial Sequence: Synthetic oligonucleotide
aaugaagauuuuagaaugg

SEQ ID NO: 1740118 - RNA, 19 nt, Artificial Sequence
  Description of Artificial Sequence: Synthetic oligonucleotide
acuaaacacggguggaacc

SEQ ID NO: 1740119 - RNA, 19 nt, Artificial Sequence
  Description of Artificial Sequence: Synthetic oligonucleotide
ucuagugagaccugaaacu

SEQ ID NO: 1740120 - RNA, 19 nt, Artificial Sequence
  Description of Artificial Sequence: Synthetic oligonucleotide
uccguaagcauuaggaaca

SEQ ID NO: 1740121 - RNA, 19 nt, Artificial Sequence
  Description of Artificial Sequence: Synthetic oligonucleotide
uuuggcuuagucauguacu

SEQ ID NO: 1740122 - RNA, 19 nt, Artificial Sequence
  Description of Artificial Sequence: Synthetic oligonucleotide
gauauuuuagcaaguauca

SEQ ID NO: 1740123 - RNA, 19 nt, Artificial Sequence
  Description of Artificial Sequence: Synthetic oligonucleotide
aagugauuuuggcuuaguc

SEQ ID NO: 1740124 - RNA, 19 nt, Artificial Sequence
  Description of Artificial Sequence: Synthetic oligonucleotide
cuaagugggauguuggagc

SEQ ID NO: 1740125 - RNA, 19 nt, Artificial Sequence
  Description of Artificial Sequence: Synthetic oligonucleotide
agaaaagguaucuugacua

SEQ ID NO: 1740126 - RNA, 19 nt, Artificial Sequence
  Description of Artificial Sequence: Synthetic oligonucleotide
aaagguucacacugcaucu

SEQ ID NO: 1740127 - RNA, 19 nt, Artificial Sequence
  Description of Artificial Sequence: Synthetic oligonucleotide
cacacuuggauuuuacugc

SEQ ID NO: 1740128 - RNA, 19 nt, Artificial Sequence
  Description of Artificial Sequence: Synthetic oligonucleotide
uuagcaaguaucaccuugc

SEQ ID NO: 1740129 - RNA, 19 nt, Artificial Sequence
  Description of Artificial Sequence: Synthetic oligonucleotide
aaugugauacaacaccaaa

SEQ ID NO: 1740130 - RNA, 19 nt, Artificial Sequence
  Description of Artificial Sequence: Synthetic oligonucleotide
cagacuauaggcauggcac

SEQ ID NO: 1740131 - RNA, 19 nt, Artificial Sequence
  Description of Artificial Sequence: Synthetic oligonucleotide
gaaugcacaauccuccuug

SEQ ID NO: 1740132 - RNA, 19 nt, Artificial Sequence
  Description of Artificial Sequence: Synthetic oligonucleotide
aguucugauaccaaacugg

SEQ ID NO: 1740133 - RNA, 19 nt, Artificial Sequence
  Description of Artificial Sequence: Synthetic oligonucleotide
uagccaacauuuuauauac

SEQ ID NO: 1740134 - RNA, 19 nt, Artificial Sequence
  Description of Artificial Sequence: Synthetic oligonucleotide
auauuggugaccuccaaca

SEQ ID NO: 1740135 - RNA, 19 nt, Artificial Sequence
  Description of Artificial Sequence: Synthetic oligonucleotide
uugaaagcaaaauauccaa

SEQ ID NO: 1740136 - RNA, 19 nt, Artificial Sequence
  Description of Artificial Sequence: Synthetic oligonucleotide
aaugaacuauaaaugcauc

SEQ ID NO: 1740137 - RNA, 19 nt, Artificial Sequence
  Description of Artificial Sequence: Synthetic oligonucleotide
acccuaucaaaguacuagc

SEQ ID NO: 1740138 - RNA, 19 nt, Artificial Sequence
  Description of Artificial Sequence: Synthetic oligonucleotide
cuaagcauaaucacagcug

SEQ ID NO: 1740139 - RNA, 19 nt, Artificial Sequence
  Description of Artificial Sequence: Synthetic oligonucleotide
ucuuggcacaaaaugauaa

SEQ ID NO: 1740140 - RNA, 19 nt, Artificial Sequence
  Description of Artificial Sequence: Synthetic oligonucleotide
uuuagaauggaaguauacu

SEQ ID NO: 1740141 - RNA, 19 nt, Artificial Sequence
  Description of Artificial Sequence: Synthetic oligonucleotide
caauuaaccuaguugguac

SEQ ID NO: 1740142 - RNA, 19 nt, Artificial Sequence
  Description of Artificial Sequence: Synthetic oligonucleotide
acggaugucacauggugac

SEQ ID NO: 1740143 - RNA, 19 nt, Artificial Sequence
  Description of Artificial Sequence: Synthetic oligonucleotide
aaaugaacuauaaaugcau

SEQ ID NO: 1740144 - RNA, 19 nt, Artificial Sequence
  Description of Artificial Sequence: Synthetic oligonucleotide
gaagaucuagcaaaugaag

SEQ ID NO: 1740145 - RNA, 19 nt, Artificial Sequence
  Description of Artificial Sequence: Synthetic oligonucleotide
aacagcauuugaucacuuc

SEQ ID NO: 1740146 - RNA, 19 nt, Artificial Sequence
  Description of Artificial Sequence: Synthetic oligonucleotide
aaauguaguggaauuagga

SEQ ID NO: 1740147 - RNA, 19 nt, Artificial Sequence
  Description of Artificial Sequence: Synthetic oligonucleotide
aguuacaacaacaaaacau

SEQ ID NO: 1740148 - RNA, 19 nt, Artificial Sequence
  Description of Artificial Sequence: Synthetic oligonucleotide
gucaaaacuagacugguca

SEQ ID NO: 1740149 - RNA, 19 nt, Artificial Sequence
  Description of Artificial Sequence: Synthetic oligonucleotide
gaugcuggaaugcacaauc

SEQ ID NO: 1740150 - RNA, 19 nt, Artificial Sequence
  Description of Artificial Sequence: Synthetic oligonucleotide
cauaaucacauuuaagcca

SEQ ID NO: 1740151 - RNA, 19 nt, Artificial Sequence
  Description of Artificial Sequence: Synthetic oligonucleotide
caagguugcucaaagggcc

SEQ ID NO: 1740152 - RNA, 19 nt, Artificial Sequence
  Description of Artificial Sequence: Synthetic oligonucleotide
aaugcacaauccuccuugg

SEQ ID NO: 1740153 - RNA, 19 nt, Artificial Sequence
  Description of Artificial Sequence: Synthetic oligonucleotide
aacuaaacacggguggaac

SEQ ID NO: 1740154 - RNA, 19 nt, Artificial Sequence
  Description of Artificial Sequence: Synthetic oligonucleotide
ugacuuacuguuaauggaa

SEQ ID NO: 1740155 - RNA, 19 nt, Artificial Sequence
  Description of Artificial Sequence: Synthetic oligonucleotide
aaaaugacacaccacuguu

SEQ ID NO: 1740156 - RNA, 19 nt, Artificial Sequence
  Description of Artificial Sequence: Synthetic oligonucleotide
aauuaaccuaguugguacu

SEQ ID NO: 1740157 - RNA, 19 nt, Artificial Sequence
  Description of Artificial Sequence: Synthetic oligonucleotide
cuuacuguuaauggaaaag

SEQ ID NO: 1740158 - RNA, 19 nt, Artificial Sequence
  Description of Artificial Sequence: Synthetic oligonucleotide
ugggaaaguaacgugaaca

SEQ ID NO: 1740159 - RNA, 19 nt, Artificial Sequence
  Description of Artificial Sequence: Synthetic oligonucleotide
augaacuauaaaugcaucu

SEQ ID NO: 1740160 - RNA, 19 nt, Artificial Sequence
  Description of Artificial Sequence: Synthetic oligonucleotide
aacaguguaucuuggcaca

SEQ ID NO: 1740161 - RNA, 19 nt, Artificial Sequence
  Description of Artificial Sequence: Synthetic oligonucleotide
agaaauguaguggaauuag

SEQ ID NO: 1740162 - RNA, 19 nt, Artificial Sequence
  Description of Artificial Sequence: Synthetic oligonucleotide
uauacagacuauaggcaug

SEQ ID NO: 1740163 - RNA, 19 nt, Artificial Sequence
  Description of Artificial Sequence: Synthetic oligonucleotide
uggaauuaggauugucuag

SEQ ID NO: 1740164 - RNA, 19 nt, Artificial Sequence
  Description of Artificial Sequence: Synthetic oligonucleotide
accuccaacaagcauaugu

SEQ ID NO: 1740165 - RNA, 19 nt, Artificial Sequence
  Description of Artificial Sequence: Synthetic oligonucleotide
uaagaaaagguaucuugac

SEQ ID NO: 1740166 - RNA, 19 nt, Artificial Sequence
  Description of Artificial Sequence: Synthetic oligonucleotide
uccauugauaguuucuaga

SEQ ID NO: 1740167 - RNA, 19 nt, Artificial Sequence
  Description of Artificial Sequence: Synthetic oligonucleotide
ugcaguaacuguuuagcca

SEQ ID NO: 1740168 - RNA, 19 nt, Artificial Sequence
  Description of Artificial Sequence: Synthetic oligonucleotide
agaucuagcaaaugaagau

SEQ ID NO: 1740169 - RNA, 19 nt, Artificial Sequence
  Description of Artificial Sequence: Synthetic oligonucleotide
uuugggagaguuccguaag

SEQ ID NO: 1740170 - RNA, 19 nt, Artificial Sequence
  Description of Artificial Sequence: Synthetic oligonucleotide
uuaagaagaucuagcaaau

SEQ ID NO: 1740171 - RNA, 19 nt, Artificial Sequence
  Description of Artificial Sequence: Synthetic oligonucleotide
uuccguaagcauuaggaac

SEQ ID NO: 1740172 - RNA, 19 nt, Artificial Sequence
  Description of Artificial Sequence: Synthetic oligonucleotide
acuagggaaauggaaugcc

SEQ ID NO: 1740173 - RNA, 19 nt, Artificial Sequence
  Description of Artificial Sequence: Synthetic oligonucleotide
uacuguuaauggaaaaggu

SEQ ID NO: 1740174 - RNA, 19 nt, Artificial Sequence
  Description of Artificial Sequence: Synthetic oligonucleotide
ugaagauuuuagaauggaa

SEQ ID NO: 1740175 - RNA, 19 nt, Artificial Sequence
  Description of Artificial Sequence: Synthetic oligonucleotide
aagaucuagcaaaugaaga

SEQ ID NO: 1740176 - RNA, 19 nt, Artificial Sequence
  Description of Artificial Sequence: Synthetic oligonucleotide
ugauugaaugcaaugugau

SEQ ID NO: 1740177 - RNA, 19 nt, Artificial Sequence
  Description of Artificial Sequence: Synthetic oligonucleotide
aaaacucgaaaaugaacua

SEQ ID NO: 1740178 - RNA, 19 nt, Artificial Sequence
  Description of Artificial Sequence: Synthetic oligonucleotide
auauacagacuauaggcau

SEQ ID NO: 1740179 - RNA, 19 nt, Artificial Sequence
  Description of Artificial Sequence: Synthetic oligonucleotide
uauacuccagcaacuguug

SEQ ID NO: 1740180 - RNA, 19 nt, Artificial Sequence
  Description of Artificial Sequence: Synthetic oligonucleotide
agaauggaaguauacucca

SEQ ID NO: 1740181 - RNA, 19 nt, Artificial Sequence
  Description of Artificial Sequence: Synthetic oligonucleotide
uaaccuaguugguacuagg

SEQ ID NO: 1740182 - RNA, 19 nt, Artificial Sequence
  Description of Artificial Sequence: Synthetic oligonucleotide
ucuaguuacuauaguauuu

SEQ ID NO: 1740183 - RNA, 19 nt, Artificial Sequence
  Description of Artificial Sequence: Synthetic oligonucleotide
acuuggauuuuacugccag

SEQ ID NO: 1740184 - RNA, 19 nt, Artificial Sequence
  Description of Artificial Sequence: Synthetic oligonucleotide
aggauugucuagugagacc

SEQ ID NO: 1740185 - RNA, 19 nt, Artificial Sequence
  Description of Artificial Sequence: Synthetic oligonucleotide
acuauaaaugcaucuuggu

SEQ ID NO: 1740186 - RNA, 19 nt, Artificial Sequence
  Description of Artificial Sequence: Synthetic oligonucleotide
aaaacuaaacacgggugga

SEQ ID NO: 1740187 - RNA, 19 nt, Artificial Sequence
  Description of Artificial Sequence: Synthetic oligonucleotide
auauuuuagcaaguaucac

SEQ ID NO: 1740188 - RNA, 19 nt, Artificial Sequence
  Description of Artificial Sequence: Synthetic oligonucleotide
gaaaagguaucuugacuac

SEQ ID NO: 1740189 - RNA, 19 nt, Artificial Sequence
  Description of Artificial Sequence: Synthetic oligonucleotide
uucuagaaugguaauuuua

SEQ ID NO: 1740190 - RNA, 19 nt, Artificial Sequence
  Description of Artificial Sequence: Synthetic oligonucleotide
uuaggauugucuagugaga

SEQ ID NO: 1740191 - RNA, 19 nt, Artificial Sequence
  Description of Artificial Sequence: Synthetic oligonucleotide
auauaaaaugacacaccac

SEQ ID NO: 1740192 - RNA, 19 nt, Artificial Sequence
  Description of Artificial Sequence: Synthetic oligonucleotide
ugaaguucacacaaacaua

SEQ ID NO: 1740193 - RNA, 19 nt, Artificial Sequence
  Description of Artificial Sequence: Synthetic oligonucleotide
uagauauuuuagcaaguau

SEQ ID NO: 1740194 - RNA, 19 nt, Artificial Sequence
  Description of Artificial Sequence: Synthetic oligonucleotide
uagucauguacuugguacc

SEQ ID NO: 1740195 - RNA, 19 nt, Artificial Sequence
  Description of Artificial Sequence: Synthetic oligonucleotide
auacagacuauaggcaugg

SEQ ID NO: 1740196 - RNA, 19 nt, Artificial Sequence
  Description of Artificial Sequence: Synthetic oligonucleotide
auacggaugucacauggug

SEQ ID NO: 1740197 - RNA, 19 nt, Artificial Sequence
  Description of Artificial Sequence: Synthetic oligonucleotide
uuaagccacugacuuacug

SEQ ID NO: 1740198 - RNA, 19 nt, Artificial Sequence
  Description of Artificial Sequence: Synthetic oligonucleotide
guacuagggaaauggaaug

SEQ ID NO: 1740199 - RNA, 19 nt, Artificial Sequence
  Description of Artificial Sequence: Synthetic oligonucleotide
aaccuaguugguacuaggg

SEQ ID NO: 1740200 - RNA, 19 nt, Artificial Sequence
  Description of Artificial Sequence: Synthetic oligonucleotide
guaacgugaacacucagaa

SEQ ID NO: 1740201 - RNA, 19 nt, Artificial Sequence
  Description of Artificial Sequence: Synthetic oligonucleotide
aaacuagacuggucaagcu

SEQ ID NO: 1740202 - RNA, 19 nt, Artificial Sequence
  Description of Artificial Sequence: Synthetic oligonucleotide
aguuccguaagcauuagga

SEQ ID NO: 1740203 - RNA, 19 nt, Artificial Sequence
  Description of Artificial Sequence: Synthetic oligonucleotide
uaacuuuauuuugggagag

SEQ ID NO: 1740204 - RNA, 19 nt, Artificial Sequence
  Description of Artificial Sequence: Synthetic oligonucleotide
aacuagacuggucaagcua

SEQ ID NO: 1740205 - RNA, 19 nt, Artificial Sequence
  Description of Artificial Sequence: Synthetic oligonucleotide
caacaguguaucuuggcac

SEQ ID NO: 1740206 - RNA, 19 nt, Artificial Sequence
  Description of Artificial Sequence: Synthetic oligonucleotide
cacaaaaugauaaagugau

SEQ ID NO: 1740207 - RNA, 19 nt, Artificial Sequence
  Description of Artificial Sequence: Synthetic oligonucleotide
ccauaaucacauuuaagcc

SEQ ID NO: 1740208 - RNA, 19 nt, Artificial Sequence
  Description of Artificial Sequence: Synthetic oligonucleotide
acauacaaucacaaauuuc

SEQ ID NO: 1740209 - RNA, 19 nt, Artificial Sequence
  Description of Artificial Sequence: Synthetic oligonucleotide
aaguaacgugaacacucag

SEQ ID NO: 1740210 - RNA, 19 nt, Artificial Sequence
  Description of Artificial Sequence: Synthetic oligonucleotide
aauccauacggaugucaca

SEQ ID NO: 1740211 - RNA, 19 nt, Artificial Sequence
  Description of Artificial Sequence: Synthetic oligonucleotide
gaauuaggauugucuagug

SEQ ID NO: 1740212 - RNA, 19 nt, Artificial Sequence
  Description of Artificial Sequence: Synthetic oligonucleotide
agcauuugaucacuuccag

SEQ ID NO: 1740213 - RNA, 19 nt, Artificial Sequence
  Description of Artificial Sequence: Synthetic oligonucleotide
guaugcaagcaccuuuuag

SEQ ID NO: 1740214 - RNA, 19 nt, Artificial Sequence
  Description of Artificial Sequence: Synthetic oligonucleotide
aaacucgaaaaugaacuau

SEQ ID NO: 1740215 - RNA, 19 nt, Artificial Sequence
  Description of Artificial Sequence: Synthetic oligonucleotide
agcaaugagguagaaagga

SEQ ID NO: 1740216 - RNA, 19 nt, Artificial Sequence
  Description of Artificial Sequence: Synthetic oligonucleotide
aaaggacuguccaggcacc

SEQ ID NO: 1740217 - RNA, 19 nt, Artificial Sequence
  Description of Artificial Sequence: Synthetic oligonucleotide
cauuaagaaucuuucauua

SEQ ID NO: 1740218 - RNA, 19 nt, Artificial Sequence
  Description of Artificial Sequence: Synthetic oligonucleotide
aagcaaugagguagaaagg

SEQ ID NO: 1740219 - RNA, 19 nt, Artificial Sequence
  Description of Artificial Sequence: Synthetic oligonucleotide
acuggucaagcuaaguggg

SEQ ID NO: 1740220 - RNA, 19 nt, Artificial Sequence
  Description of Artificial Sequence: Synthetic oligonucleotide
gaaugguaauuuuaagaaa

SEQ ID NO: 1740221 - RNA, 19 nt, Artificial Sequence
  Description of Artificial Sequence: Synthetic oligonucleotide
aaaagguaucuugacuaca

SEQ ID NO: 1740222 - RNA, 19 nt, Artificial Sequence
  Description of Artificial Sequence: Synthetic oligonucleotide
aaguauacuccagcaacug

SEQ ID NO: 1740223 - RNA, 19 nt, Artificial Sequence
  Description of Artificial Sequence: Synthetic oligonucleotide
cuaaacacggguggaaccc

SEQ ID NO: 1740224 - RNA, 19 nt, Artificial Sequence
  Description of Artificial Sequence: Synthetic oligonucleotide
uacaaguaauauuggugac

SEQ ID NO: 1740225 - RNA, 19 nt, Artificial Sequence
  Description of Artificial Sequence: Synthetic oligonucleotide
augcaagcaccuuuuagca

SEQ ID NO: 1740226 - RNA, 19 nt, Artificial Sequence
  Description of Artificial Sequence: Synthetic oligonucleotide
aaaugacacaccacuguug

SEQ ID NO: 1740227 - RNA, 19 nt, Artificial Sequence
  Description of Artificial Sequence: Synthetic oligonucleotide
ugacuacaugcucugacuc

SEQ ID NO: 1740228 - RNA, 19 nt, Artificial Sequence
  Description of Artificial Sequence: Synthetic oligonucleotide
uuuugggagaguuccguaa

SEQ ID NO: 1740229 - RNA, 19 nt, Artificial Sequence
  Description of Artificial Sequence: Synthetic oligonucleotide
aaagguaucuugacuacau

SEQ ID NO: 1740230 - RNA, 19 nt, Artificial Sequence
  Description of Artificial Sequence: Synthetic oligonucleotide
uacggaugucacaugguga

SEQ ID NO: 1740231 - RNA, 19 nt, Artificial Sequence
  Description of Artificial Sequence: Synthetic oligonucleotide
uaacuguuuagccaacauu

SEQ ID NO: 1740232 - RNA, 19 nt, Artificial Sequence
  Description of Artificial Sequence: Synthetic oligonucleotide
auaaucacagcugauugaa

SEQ ID NO: 1740233 - RNA, 19 nt, Artificial Sequence
  Description of Artificial Sequence: Synthetic oligonucleotide
gcaagcaccuuuuagcaag

SEQ ID NO: 1740234 - RNA, 19 nt, Artificial Sequence
  Description of Artificial Sequence: Synthetic oligonucleotide
augguaccagugcaguaac

SEQ ID NO: 1740235 - RNA, 19 nt, Artificial Sequence
  Description of Artificial Sequence: Synthetic oligonucleotide
accuugcaggaccauaauc

SEQ ID NO: 1740236 - RNA, 19 nt, Artificial Sequence
  Description of Artificial Sequence: Synthetic oligonucleotide
uuaaccuaguugguacuag

SEQ ID NO: 1740237 - RNA, 19 nt, Artificial Sequence
  Description of Artificial Sequence: Synthetic oligonucleotide
aaguaauauuggugaccuc

SEQ ID NO: 1740238 - RNA, 19 nt, Artificial Sequence
  Description of Artificial Sequence: Synthetic oligonucleotide
uuuuccaauuaaccuaguu

SEQ ID NO: 1740239 - RNA, 19 nt, Artificial Sequence
  Description of Artificial Sequence: Synthetic oligonucleotide
cugcaucuaguuacuauag

SEQ ID NO: 1740240 - RNA, 19 nt, Artificial Sequence
  Description of Artificial Sequence: Synthetic oligonucleotide
aucuaguuacuauaguauu

SEQ ID NO: 1740241 - RNA, 19 nt, Artificial Sequence
  Description of Artificial Sequence: Synthetic oligonucleotide
agcaaguaucaccuugcag

SEQ ID NO: 1740242 - RNA, 19 nt, Artificial Sequence
  Description of Artificial Sequence: Synthetic oligonucleotide
guagaguaaugcaaagagc

SEQ ID NO: 1740243 - RNA, 19 nt, Artificial Sequence
  Description of Artificial Sequence: Synthetic oligonucleotide
guuggagccaaacagaaau

SEQ ID NO: 1740244 - RNA, 19 nt, Artificial Sequence
  Description of Artificial Sequence: Synthetic oligonucleotide
ccugaaacuauacauuaag

SEQ ID NO: 1740245 - RNA, 19 nt, Artificial Sequence
  Description of Artificial Sequence: Synthetic oligonucleotide
gugguuaagaagaucuagc

SEQ ID NO: 1740246 - RNA, 19 nt, Artificial Sequence
  Description of Artificial Sequence: Synthetic oligonucleotide
uaagcauuaggaacauaua

SEQ ID NO: 1740247 - RNA, 19 nt, Artificial Sequence
  Description of Artificial Sequence: Synthetic oligonucleotide
uggaaguauacuccagcaa

SEQ ID NO: 1740248 - RNA, 19 nt, Artificial Sequence
  Description of Artificial Sequence: Synthetic oligonucleotide
auuugaugcuggaaugcac

SEQ ID NO: 1740249 - RNA, 19 nt, Artificial Sequence
  Description of Artificial Sequence: Synthetic oligonucleotide
ccaaacagaaauguagugg

SEQ ID NO: 1740250 - RNA, 19 nt, Artificial Sequence
  Description of Artificial Sequence: Synthetic oligonucleotide
cugauugaaugcaauguga

SEQ ID NO: 1740251 - RNA, 19 nt, Artificial Sequence
  Description of Artificial Sequence: Synthetic oligonucleotide
gcauaaucacagcugauug

SEQ ID NO: 1740252 - RNA, 19 nt, Artificial Sequence
  Description of Artificial Sequence: Synthetic oligonucleotide
uacuagggaaauggaaugc

SEQ ID NO: 1740253 - RNA, 19 nt, Artificial Sequence
  Description of Artificial Sequence: Synthetic oligonucleotide
cugaaacuauacauuaaga

SEQ ID NO: 1740254 - RNA, 19 nt, Artificial Sequence
  Description of Artificial Sequence: Synthetic oligonucleotide
aguguaucuuggcacaaaa

SEQ ID NO: 1740255 - RNA, 19 nt, Artificial Sequence
  Description of Artificial Sequence: Synthetic oligonucleotide
gauaguuucuagaauggua

SEQ ID NO: 1740256 - RNA, 19 nt, Artificial Sequence
  Description of Artificial Sequence: Synthetic oligonucleotide
ugcaucuaguuacuauagu

SEQ ID NO: 1740257 - RNA, 19 nt, Artificial Sequence
  Description of Artificial Sequence: Synthetic oligonucleotide
uaggauugucuagugagac

SEQ ID NO: 1740258 - RNA, 19 nt, Artificial Sequence
  Description of Artificial Sequence: Synthetic oligonucleotide
cugacuuacuguuaaugga

SEQ ID NO: 1740259 - RNA, 19 nt, Artificial Sequence
  Description of Artificial Sequence: Synthetic oligonucleotide
uuggaaguuggcaguacuc

SEQ ID NO: 1740260 - RNA, 19 nt, Artificial Sequence
  Description of Artificial Sequence: Synthetic oligonucleotide
uaguuacuauaguauuucu

SEQ ID NO: 1740261 - RNA, 19 nt, Artificial Sequence
  Description of Artificial Sequence: Synthetic oligonucleotide
cuuggauuuuacugccagc

SEQ ID NO: 1740262 - RNA, 19 nt, Artificial Sequence
  Description of Artificial Sequence: Synthetic oligonucleotide
acacucagaacugaaauuu

SEQ ID NO: 1740263 - RNA, 19 nt, Artificial Sequence
  Description of Artificial Sequence: Synthetic oligonucleotide
uugguacuagggaaaugga

SEQ ID NO: 1740264 - RNA, 19 nt, Artificial Sequence
  Description of Artificial Sequence: Synthetic oligonucleotide
ucacuuggaaguuggcagu

SEQ ID NO: 1740265 - RNA, 19 nt, Artificial Sequence
  Description of Artificial Sequence: Synthetic oligonucleotide
guaucuugacuacaugcuc

SEQ ID NO: 1740266 - RNA, 19 nt, Artificial Sequence
  Description of Artificial Sequence: Synthetic oligonucleotide
cucacuaagugguuaagaa

SEQ ID NO: 1740267 - RNA, 19 nt, Artificial Sequence
  Description of Artificial Sequence: Synthetic oligonucleotide
gcaccuuuuagcaagguug

SEQ ID NO: 1740268 - RNA, 19 nt, Artificial Sequence
  Description of Artificial Sequence: Synthetic oligonucleotide
uucugauaccaaacuggga

SEQ ID NO: 1740269 - RNA, 19 nt, Artificial Sequence
  Description of Artificial Sequence: Synthetic oligonucleotide
aacucgaaaaugaacuaua

SEQ ID NO: 1740270 - RNA, 19 nt, Artificial Sequence
  Description of Artificial Sequence: Synthetic oligonucleotide
agacuauaggcauggcaca

SEQ ID NO: 1740271 - RNA, 19 nt, Artificial Sequence
  Description of Artificial Sequence: Synthetic oligonucleotide
ugucaaaacuagacugguc

SEQ ID NO: 1740272 - RNA, 19 nt, Artificial Sequence
  Description of Artificial Sequence: Synthetic oligonucleotide
agccauuaagaaucuuuca

SEQ ID NO: 1740273 - RNA, 19 nt, Artificial Sequence
  Description of Artificial Sequence: Synthetic oligonucleotide
gugcaguaacuguuuagcc

SEQ ID NO: 1740274 - RNA, 19 nt, Artificial Sequence
  Description of Artificial Sequence: Synthetic oligonucleotide
gggaaaguaacgugaacac

SEQ ID NO: 1740275 - RNA, 19 nt, Artificial Sequence
  Description of Artificial Sequence: Synthetic oligonucleotide
aaacuaaacacggguggaa

SEQ ID NO: 1740276 - RNA, 19 nt, Artificial Sequence
  Description of Artificial Sequence: Synthetic oligonucleotide
aguaacgugaacacucaga

SEQ ID NO: 1740277 - RNA, 19 nt, Artificial Sequence
  Description of Artificial Sequence: Synthetic oligonucleotide
cauaaucacagcugauuga

SEQ ID NO: 1740278 - RNA, 19 nt, Artificial Sequence
  Description of Artificial Sequence: Synthetic oligonucleotide
gugauacaacaccaaaauc

SEQ ID NO: 1740279 - RNA, 19 nt, Artificial Sequence
  Description of Artificial Sequence: Synthetic oligonucleotide
gaguuccguaagcauuagg

SEQ ID NO: 1740280 - RNA, 19 nt, Artificial Sequence
  Description of Artificial Sequence: Synthetic oligonucleotide
gauugaaugcaaugugaua

SEQ ID NO: 1740281 - RNA, 19 nt, Artificial Sequence
  Description of Artificial Sequence: Synthetic oligonucleotide
uaauauuggugaccuccaa

SEQ ID NO: 1740282 - RNA, 19 nt, Artificial Sequence
  Description of Artificial Sequence: Synthetic oligonucleotide
augcaaugugauacaacac

SEQ ID NO: 1740283 - RNA, 19 nt, Artificial Sequence
  Description of Artificial Sequence: Synthetic oligonucleotide
cauaugucaaaacuagacu

SEQ ID NO: 1740284 - RNA, 19 nt, Artificial Sequence
  Description of Artificial Sequence: Synthetic oligonucleotide
aagggccaagcaaugaggu

SEQ ID NO: 1740285 - RNA, 19 nt, Artificial Sequence
  Description of Artificial Sequence: Synthetic oligonucleotide
gacuacaugcucugacuca

SEQ ID NO: 1740286 - RNA, 19 nt, Artificial Sequence
  Description of Artificial Sequence: Synthetic oligonucleotide
auccauacggaugucacau

SEQ ID NO: 1740287 - RNA, 19 nt, Artificial Sequence
  Description of Artificial Sequence: Synthetic oligonucleotide
aaagcucacuaagugguua

SEQ ID NO: 1740288 - RNA, 19 nt, Artificial Sequence
  Description of Artificial Sequence: Synthetic oligonucleotide
caaguaucaccuugcagga

SEQ ID NO: 1740289 - RNA, 19 nt, Artificial Sequence
  Description of Artificial Sequence: Synthetic oligonucleotide
uuuagcaagguugcucaaa

SEQ ID NO: 1740290 - RNA, 19 nt, Artificial Sequence
  Description of Artificial Sequence: Synthetic oligonucleotide
gaaugcaaugugauacaac

SEQ ID NO: 1740291 - RNA, 19 nt, Artificial Sequence
  Description of Artificial Sequence: Synthetic oligonucleotide
guggaauuaggauugucua

SEQ ID NO: 1740292 - RNA, 19 nt, Artificial Sequence
  Description of Artificial Sequence: Synthetic oligonucleotide
uauaggcauggcacacuug

SEQ ID NO: 1740293 - RNA, 19 nt, Artificial Sequence
  Description of Artificial Sequence: Synthetic oligonucleotide
uaacgugaacacucagaac

SEQ ID NO: 1740294 - RNA, 19 nt, Artificial Sequence
  Description of Artificial Sequence: Synthetic oligonucleotide
ugucacauggugacagcau

SEQ ID NO: 1740295 - RNA, 19 nt, Artificial Sequence
  Description of Artificial Sequence: Synthetic oligonucleotide
agcauuaggaacauauaua

SEQ ID NO: 1740296 - RNA, 19 nt, Artificial Sequence
  Description of Artificial Sequence: Synthetic oligonucleotide
acuagacuggucaagcuaa

SEQ ID NO: 1740297 - RNA, 19 nt, Artificial Sequence
  Description of Artificial Sequence: Synthetic oligonucleotide
ucuagcaaaugaagauuuu

SEQ ID NO: 1740298 - RNA, 19 nt, Artificial Sequence
  Description of Artificial Sequence: Synthetic oligonucleotide
aagcacauuugaugcugga

SEQ ID NO: 1740299 - RNA, 19 nt, Artificial Sequence
  Description of Artificial Sequence: Synthetic oligonucleotide
augaagcacauuugaugcu

SEQ ID NO: 1740300 - RNA, 19 nt, Artificial Sequence
  Description of Artificial Sequence: Synthetic oligonucleotide
ccauacggaugucacaugg

SEQ ID NO: 1740301 - RNA, 19 nt, Artificial Sequence
  Description of Artificial Sequence: Synthetic oligonucleotide
gggccaagcaaugagguag

SEQ ID NO: 1740302 - RNA, 19 nt, Artificial Sequence
  Description of Artificial Sequence: Synthetic oligonucleotide
auuuuacugccagccacag

SEQ ID NO: 1740303 - RNA, 19 nt, Artificial Sequence
  Description of Artificial Sequence: Synthetic oligonucleotide
uggaaugcacaauccuccu

SEQ ID NO: 1740304 - RNA, 19 nt, Artificial Sequence
  Description of Artificial Sequence: Synthetic oligonucleotide
ugggagaguuccguaagca

SEQ ID NO: 1740305 - RNA, 19 nt, Artificial Sequence
  Description of Artificial Sequence: Synthetic oligonucleotide
agucacuuggaaguuggca

SEQ ID NO: 1740306 - RNA, 19 nt, Artificial Sequence
  Description of Artificial Sequence: Synthetic oligonucleotide
uugaugcuggaaugcacaa

SEQ ID NO: 1740307 - RNA, 19 nt, Artificial Sequence
  Description of Artificial Sequence: Synthetic oligonucleotide
uuggcuuagucauguacuu

SEQ ID NO: 1740308 - RNA, 19 nt, Artificial Sequence
  Description of Artificial Sequence: Synthetic oligonucleotide
acuauacauuaagaugaug

SEQ ID NO: 1740309 - RNA, 19 nt, Artificial Sequence
  Description of Artificial Sequence: Synthetic oligonucleotide
ccuugcaggaccauaauca

SEQ ID NO: 1740310 - RNA, 19 nt, Artificial Sequence
  Description of Artificial Sequence: Synthetic oligonucleotide
aacuauacauuaagaugau

SEQ ID NO: 1740311 - RNA, 19 nt, Artificial Sequence
  Description of Artificial Sequence: Synthetic oligonucleotide
cuaguugguacuagggaaa

SEQ ID NO: 1740312 - RNA, 19 nt, Artificial Sequence
  Description of Artificial Sequence: Synthetic oligonucleotide
cuagggaaauggaaugcca

SEQ ID NO: 1740313 - RNA, 19 nt, Artificial Sequence
  Description of Artificial Sequence: Synthetic oligonucleotide
augugauacaacaccaaaa

SEQ ID NO: 1740314 - RNA, 19 nt, Artificial Sequence
  Description of Artificial Sequence: Synthetic oligonucleotide
augucaaaacuagacuggu

SEQ ID NO: 1740315 - RNA, 19 nt, Artificial Sequence
  Description of Artificial Sequence: Synthetic oligonucleotide
gacuauaggcauggcacac

SEQ ID NO: 1740316 - RNA, 19 nt, Artificial Sequence
  Description of Artificial Sequence: Synthetic oligonucleotide
uaguuucuagaaugguaau

SEQ ID NO: 1740317 - RNA, 19 nt, Artificial Sequence
  Description of Artificial Sequence: Synthetic oligonucleotide
caucuaguuacuauaguau

SEQ ID NO: 1740318 - RNA, 19 nt, Artificial Sequence
  Description of Artificial Sequence: Synthetic oligonucleotide
agcuaagugggauguugga

SEQ ID NO: 1740319 - RNA, 19 nt, Artificial Sequence
  Description of Artificial Sequence: Synthetic oligonucleotide
uaaucacagcugauugaau

SEQ ID NO: 1740320 - RNA, 19 nt, Artificial Sequence
  Description of Artificial Sequence: Synthetic oligonucleotide
agucauguacuugguacca

SEQ ID NO: 1740321 - RNA, 19 nt, Artificial Sequence
  Description of Artificial Sequence: Synthetic oligonucleotide
cacauccauugauaguuuc

SEQ ID NO: 1740322 - RNA, 19 nt, Artificial Sequence
  Description of Artificial Sequence: Synthetic oligonucleotide
uuuaagccacugacuuacu

SEQ ID NO: 1740323 - RNA, 19 nt, Artificial Sequence
  Description of Artificial Sequence: Synthetic oligonucleotide
caaguaauauuggugaccu

SEQ ID NO: 1740324 - RNA, 19 nt, Artificial Sequence
  Description of Artificial Sequence: Synthetic oligonucleotide
gguuaagaagaucuagcaa

SEQ ID NO: 1740325 - RNA, 19 nt, Artificial Sequence
  Description of Artificial Sequence: Synthetic oligonucleotide
ugcaagcaccuuuuagcaa

SEQ ID NO: 1740326 - RNA, 19 nt, Artificial Sequence
  Description of Artificial Sequence: Synthetic oligonucleotide
guaauauuggugaccucca

SEQ ID NO: 1740327 - RNA, 19 nt, Artificial Sequence
  Description of Artificial Sequence: Synthetic oligonucleotide
aguaacuguuuagccaaca

SEQ ID NO: 1740328 - RNA, 19 nt, Artificial Sequence
  Description of Artificial Sequence: Synthetic oligonucleotide
acauccauugauaguuucu

SEQ ID NO: 1740329 - RNA, 19 nt, Artificial Sequence
  Description of Artificial Sequence: Synthetic oligonucleotide
auaccaaacugggaaagua

SEQ ID NO: 1740330 - RNA, 19 nt, Artificial Sequence
  Description of Artificial Sequence: Synthetic oligonucleotide
gcaucuaguuacuauagua

SEQ ID NO: 1740331 - RNA, 19 nt, Artificial Sequence
  Description of Artificial Sequence: Synthetic oligonucleotide
auuugaucacuuccagcuu

SEQ ID NO: 1740332 - RNA, 19 nt, Artificial Sequence
  Description of Artificial Sequence: Synthetic oligonucleotide
cucgaaaaugaacuauaaa

SEQ ID NO: 1740333 - RNA, 19 nt, Artificial Sequence
  Description of Artificial Sequence: Synthetic oligonucleotide
uccauacggaugucacaug

SEQ ID NO: 1740334 - RNA, 19 nt, Artificial Sequence
  Description of Artificial Sequence: Synthetic oligonucleotide
gcauuugaucacuuccagc

SEQ ID NO: 1740335 - RNA, 19 nt, Artificial Sequence
  Description of Artificial Sequence: Synthetic oligonucleotide
agaccugaaacuauacauu

SEQ ID NO: 1740336 - RNA, 19 nt, Artificial Sequence
  Description of Artificial Sequence: Synthetic oligonucleotide
ggguggaacccuaucaaag

SEQ ID NO: 1740337 - RNA, 19 nt, Artificial Sequence
  Description of Artificial Sequence: Synthetic oligonucleotide
uggcacacuuggauuuuac

SEQ ID NO: 1740338 - RNA, 19 nt, Artificial Sequence
  Description of Artificial Sequence: Synthetic oligonucleotide
acacggguggaacccuauc

SEQ ID NO: 1740339 - RNA, 19 nt, Artificial Sequence
  Description of Artificial Sequence: Synthetic oligonucleotide
aggaccauaaucacauuua

SEQ ID NO: 1740340 - RNA, 19 nt, Artificial Sequence
  Description of Artificial Sequence: Synthetic oligonucleotide
acggguggaacccuaucaa

SEQ ID NO: 1740341 - RNA, 19 nt, Artificial Sequence
  Description of Artificial Sequence: Synthetic oligonucleotide
gcaagguugcucaaagggc

SEQ ID NO: 1740342 - RNA, 19 nt, Artificial Sequence
  Description of Artificial Sequence: Synthetic oligonucleotide
agcaccuuuuagcaagguu

SEQ ID NO: 1740343 - RNA, 19 nt, Artificial Sequence
  Description of Artificial Sequence: Synthetic oligonucleotide
cuacaugcucugacucacc

SEQ ID NO: 1740344 - RNA, 19 nt, Artificial Sequence
  Description of Artificial Sequence: Synthetic oligonucleotide
uaaacacggguggaacccu

SEQ ID NO: 1740345 - RNA, 19 nt, Artificial Sequence
  Description of Artificial Sequence: Synthetic oligonucleotide
ggucaagcuaagugggaug

SEQ ID NO: 1740346 - RNA, 19 nt, Artificial Sequence
  Description of Artificial Sequence: Synthetic oligonucleotide
acucgaaaaugaacuauaa

SEQ ID NO: 1740347 - RNA, 19 nt, Artificial Sequence
  Description of Artificial Sequence: Synthetic oligonucleotide
agcauaugucaaaacuaga

SEQ ID NO: 1740348 - RNA, 19 nt, Artificial Sequence
  Description of Artificial Sequence: Synthetic oligonucleotide
caaugugauacaacaccaa

SEQ ID NO: 1740349 - RNA, 19 nt, Artificial Sequence
  Description of Artificial Sequence: Synthetic oligonucleotide
aagguugcucaaagggcca

SEQ ID NO: 1740350 - RNA, 19 nt, Artificial Sequence
  Description of Artificial Sequence: Synthetic oligonucleotide
gcaaugugauacaacacca

SEQ ID NO: 1740351 - RNA, 19 nt, Artificial Sequence
  Description of Artificial Sequence: Synthetic oligonucleotide
gacuuacuguuaauggaaa

SEQ ID NO: 1740352 - RNA, 19 nt, Artificial Sequence
  Description of Artificial Sequence: Synthetic oligonucleotide
agcaacugggaaagcucac

SEQ ID NO: 1740353 - RNA, 19 nt, Artificial Sequence
  Description of Artificial Sequence: Synthetic oligonucleotide
aucacaaauuucaguaguu

SEQ ID NO: 1740354 - RNA, 19 nt, Artificial Sequence
  Description of Artificial Sequence: Synthetic oligonucleotide
acuauaggcauggcacacu

SEQ ID NO: 1740355 - RNA, 19 nt, Artificial Sequence
  Description of Artificial Sequence: Synthetic oligonucleotide
ggauugucuagugagaccu

SEQ ID NO: 1740356 - RNA, 19 nt, Artificial Sequence
  Description of Artificial Sequence: Synthetic oligonucleotide
gaucuagcaaaugaagauu

SEQ ID NO: 1740357 - RNA, 19 nt, Artificial Sequence
  Description of Artificial Sequence: Synthetic oligonucleotide
cuagugagaccugaaacua

SEQ ID NO: 1740358 - RNA, 19 nt, Artificial Sequence
  Description of Artificial Sequence: Synthetic oligonucleotide
gauugucuagugagaccug

SEQ ID NO: 1740359 - RNA, 19 nt, Artificial Sequence
  Description of Artificial Sequence: Synthetic oligonucleotide
ggaaagcucacuaaguggu

SEQ ID NO: 1740360 - RNA, 19 nt, Artificial Sequence
  Description of Artificial Sequence: Synthetic oligonucleotide
ccauugauaguuucuagaa

SEQ ID NO: 1740361 - RNA, 19 nt, Artificial Sequence
  Description of Artificial Sequence: Synthetic oligonucleotide
uaguugguacuagggaaau

SEQ ID NO: 1740362 - RNA, 19 nt, Artificial Sequence
  Description of Artificial Sequence: Synthetic oligonucleotide
ggaauuaggauugucuagu

SEQ ID NO: 1740363 - RNA, 19 nt, Artificial Sequence
  Description of Artificial Sequence: Synthetic oligonucleotide
cacggguggaacccuauca

SEQ ID NO: 1740364 - RNA, 19 nt, Artificial Sequence
  Description of Artificial Sequence: Synthetic oligonucleotide
ccaaguagaguaaugcaaa

SEQ ID NO: 1740365 - RNA, 19 nt, Artificial Sequence
  Description of Artificial Sequence: Synthetic oligonucleotide
acgugaacacucagaacug

SEQ ID NO: 1740366 - RNA, 19 nt, Artificial Sequence
  Description of Artificial Sequence: Synthetic oligonucleotide
agcacauuugaugcuggaa

SEQ ID NO: 1740367 - RNA, 19 nt, Artificial Sequence
  Description of Artificial Sequence: Synthetic oligonucleotide
aguugguacuagggaaaug

SEQ ID NO: 1740368 - RNA, 19 nt, Artificial Sequence
  Description of Artificial Sequence: Synthetic oligonucleotide
cuuagucauguacuuggua

SEQ ID NO: 1740369 - RNA, 19 nt, Artificial Sequence
  Description of Artificial Sequence: Synthetic oligonucleotide
agcucacuaagugguuaag

SEQ ID NO: 1740370 - RNA, 19 nt, Artificial Sequence
  Description of Artificial Sequence: Synthetic oligonucleotide
acagcugauugaaugcaau

SEQ ID NO: 1740371 - RNA, 19 nt, Artificial Sequence
  Description of Artificial Sequence: Synthetic oligonucleotide
cauuuaagccacugacuua

SEQ ID NO: 1740372 - RNA, 19 nt, Artificial Sequence
  Description of Artificial Sequence: Synthetic oligonucleotide
gguacuagggaaauggaau

SEQ ID NO: 1740373 - RNA, 19 nt, Artificial Sequence
  Description of Artificial Sequence: Synthetic oligonucleotide
uggcaguacucaguaugca

SEQ ID NO: 1740374 - RNA, 19 nt, Artificial Sequence
  Description of Artificial Sequence: Synthetic oligonucleotide
aagguucacacugcaucua

SEQ ID NO: 1740375 - RNA, 19 nt, Artificial Sequence
  Description of Artificial Sequence: Synthetic oligonucleotide
gccauuaagaaucuuucau

SEQ ID NO: 1740376 - RNA, 19 nt, Artificial Sequence
  Description of Artificial Sequence: Synthetic oligonucleotide
cauccauugauaguuucua

SEQ ID NO: 1740377 - RNA, 19 nt, Artificial Sequence
  Description of Artificial Sequence: Synthetic oligonucleotide
cacaauccuccuuggguga

SEQ ID NO: 1740378 - RNA, 19 nt, Artificial Sequence
  Description of Artificial Sequence: Synthetic oligonucleotide
gauaccaaacugggaaagu

SEQ ID NO: 1740379 - RNA, 19 nt, Artificial Sequence
  Description of Artificial Sequence: Synthetic oligonucleotide
uaguggaauuaggauuguc

SEQ ID NO: 1740380 - RNA, 19 nt, Artificial Sequence
  Description of Artificial Sequence: Synthetic oligonucleotide
gguaucuugacuacaugcu

SEQ ID NO: 1740381 - RNA, 19 nt, Artificial Sequence
  Description of Artificial Sequence: Synthetic oligonucleotide
ccuuuuagcaagguugcuc

SEQ ID NO: 1740382 - RNA, 19 nt, Artificial Sequence
  Description of Artificial Sequence: Synthetic oligonucleotide
caggcaccaacaguguauc

SEQ ID NO: 1740383 - RNA, 19 nt, Artificial Sequence
  Description of Artificial Sequence: Synthetic oligonucleotide
acaaaaugauaaagugauu

SEQ ID NO: 1740384 - RNA, 19 nt, Artificial Sequence
  Description of Artificial Sequence: Synthetic oligonucleotide
gucaagcuaagugggaugu

SEQ ID NO: 1740385 - RNA, 19 nt, Artificial Sequence
  Description of Artificial Sequence: Synthetic oligonucleotide
gguggaacccuaucaaagu

SEQ ID NO: 1740386 - RNA, 19 nt, Artificial Sequence
  Description of Artificial Sequence: Synthetic oligonucleotide
gcacauuugaugcuggaau

SEQ ID NO: 1740387 - RNA, 19 nt, Artificial Sequence
  Description of Artificial Sequence: Synthetic oligonucleotide
cuuggaaguuggcaguacu

SEQ ID NO: 1740388 - RNA, 19 nt, Artificial Sequence
  Description of Artificial Sequence: Synthetic oligonucleotide
guacuagcagcaacuggga

SEQ ID NO: 1740389 - RNA, 19 nt, Artificial Sequence
  Description of Artificial Sequence: Synthetic oligonucleotide
uacagacuauaggcauggc

SEQ ID NO: 1740390 - RNA, 19 nt, Artificial Sequence
  Description of Artificial Sequence: Synthetic oligonucleotide
aagcaccuuuuagcaaggu

SEQ ID NO: 1740391 - RNA, 19 nt, Artificial Sequence
  Description of Artificial Sequence: Synthetic oligonucleotide
cugggaaagcucacuaagu

SEQ ID NO: 1740392 - RNA, 19 nt, Artificial Sequence
  Description of Artificial Sequence: Synthetic oligonucleotide
aacacggguggaacccuau

SEQ ID NO: 1740393 - RNA, 19 nt, Artificial Sequence
  Description of Artificial Sequence: Synthetic oligonucleotide
agggccaagcaaugaggua

SEQ ID NO: 1740394 - RNA, 19 nt, Artificial Sequence
  Description of Artificial Sequence: Synthetic oligonucleotide
cauacggaugucacauggu

SEQ ID NO: 1740395 - RNA, 19 nt, Artificial Sequence
  Description of Artificial Sequence: Synthetic oligonucleotide
aaacacggguggaacccua

SEQ ID NO: 1740396 - RNA, 19 nt, Artificial Sequence
  Description of Artificial Sequence: Synthetic oligonucleotide
ucaagcuaagugggauguu

SEQ ID NO: 1740397 - RNA, 19 nt, Artificial Sequence
  Description of Artificial Sequence: Synthetic oligonucleotide
gcucacuaagugguuaaga

SEQ ID NO: 1740398 - RNA, 19 nt, Artificial Sequence
  Description of Artificial Sequence: Synthetic oligonucleotide
cacacugcaucuaguuacu

SEQ ID NO: 1740399 - RNA, 19 nt, Artificial Sequence
  Description of Artificial Sequence: Synthetic oligonucleotide
gguugcucaaagggccaag

SEQ ID NO: 1740400 - RNA, 19 nt, Artificial Sequence
  Description of Artificial Sequence: Synthetic oligonucleotide
ggaacccuaucaaaguacu

SEQ ID NO: 1740401 - RNA, 19 nt, Artificial Sequence
  Description of Artificial Sequence: Synthetic oligonucleotide
acaauccuccuugggugaa

SEQ ID NO: 1740402 - RNA, 19 nt, Artificial Sequence
  Description of Artificial Sequence: Synthetic oligonucleotide
cuauaggcauggcacacuu

SEQ ID NO: 1740403 - RNA, 19 nt, Artificial Sequence
  Description of Artificial Sequence: Synthetic oligonucleotide
ccaagucacuuggaaguug

SEQ ID NO: 1740404 - RNA, 19 nt, Artificial Sequence
  Description of Artificial Sequence: Synthetic oligonucleotide
gcucaaagggccaagcaau

SEQ ID NO: 1740405 - RNA, 19 nt, Artificial Sequence
  Description of Artificial Sequence: Synthetic oligonucleotide
ggagccaaacagaaaugua

SEQ ID NO: 1740406 - RNA, 19 nt, Artificial Sequence
  Description of Artificial Sequence: Synthetic oligonucleotide
ggagaguuccguaagcauu

SEQ ID NO: 1740407 - RNA, 19 nt, Artificial Sequence
  Description of Artificial Sequence: Synthetic oligonucleotide
cacucagaacugaaauuuu

SEQ ID NO: 1740408 - RNA, 19 nt, Artificial Sequence
  Description of Artificial Sequence: Synthetic oligonucleotide
ggccaagcaaugagguaga

SEQ ID NO: 1740409 - RNA, 19 nt, Artificial Sequence
  Description of Artificial Sequence: Synthetic oligonucleotide
gaccuccaacaagcauaug

SEQ ID NO: 1740410 - RNA, 19 nt, Artificial Sequence
  Description of Artificial Sequence: Synthetic oligonucleotide
ggcaccaacaguguaucuu

SEQ ID NO: 1740411 - RNA, 19 nt, Artificial Sequence
  Description of Artificial Sequence: Synthetic oligonucleotide
guaccagaguagccauggu

SEQ ID NO: 1740412 - RNA, 19 nt, Artificial Sequence
  Description of Artificial Sequence: Synthetic oligonucleotide
guaguggaauuaggauugu

SEQ ID NO: 1740413 - RNA, 19 nt, Artificial Sequence
  Description of Artificial Sequence: Synthetic oligonucleotide
ccaagcaaugagguagaaa

SEQ ID NO: 1740414 - RNA, 19 nt, Artificial Sequence
  Description of Artificial Sequence: Synthetic oligonucleotide
gccaugguaccagugcagu

SEQ ID NO: 1740415 - RNA, 19 nt, Artificial Sequence
  Description of Artificial Sequence: Synthetic oligonucleotide
gcuuagucauguacuuggu

SEQ ID NO: 1740416 - RNA, 19 nt, Artificial Sequence
  Description of Artificial Sequence: Synthetic oligonucleotide
gcaugugcucugaguucug

SEQ ID NO: 1740417 - RNA, 19 nt, Artificial Sequence
  Description of Artificial Sequence: Synthetic oligonucleotide
ccaugguaccagugcagua

SEQ ID NO: 1740418 - RNA, 19 nt, Artificial Sequence
  Description of Artificial Sequence: Synthetic oligonucleotide
caccuugcaggaccauaau

SEQ ID NO: 1740419 - RNA, 19 nt, Artificial Sequence
  Description of Artificial Sequence: Synthetic oligonucleotide
cggguggaacccuaucaaa

SEQ ID NO: 1740420 - RNA, 19 nt, Artificial Sequence
  Description of Artificial Sequence: Synthetic oligonucleotide
gccaagcaaugagguagaa

SEQ ID NO: 1740421 - RNA, 19 nt, Artificial Sequence
  Description of Artificial Sequence: Synthetic oligonucleotide
cguaagcauuaggaacaua

SEQ ID NO: 1740422 - RNA, 19 nt, Artificial Sequence
  Description of Artificial Sequence: Synthetic oligonucleotide
ccguaagcauuaggaacau

SEQ ID NO: 1740423 - RNA, 19 nt, Artificial Sequence
  Description of Artificial Sequence: Synthetic oligonucleotide
acauucaucaguuuggccg

SEQ ID NO: 1740424 - RNA, 19 nt, Artificial Sequence
  Description of Artificial Sequence: Synthetic oligonucleotide
auagauucgugucagaguc

SEQ ID NO: 1740425 - RNA, 19 nt, Artificial Sequence
  Description of Artificial Sequence: Synthetic oligonucleotide
aauaacgcaagcgaccugc

SEQ ID NO: 1740426 - RNA, 19 nt, Artificial Sequence
  Description of Artificial Sequence: Synthetic oligonucleotide
gaaaauuaauccaagaauc

SEQ ID NO: 1740427 - RNA, 19 nt, Artificial Sequence
  Description of Artificial Sequence: Synthetic oligonucleotide
uuuagauguuuguagagug

SEQ ID NO: 1740428 - RNA, 19 nt, Artificial Sequence
  Description of Artificial Sequence: Synthetic oligonucleotide
uaacgaguuuauuagaaug

SEQ ID NO: 1740429 - RNA, 19 nt, Artificial Sequence
  Description of Artificial Sequence: Synthetic oligonucleotide
auuagaaugucucuguagu

SEQ ID NO: 1740430 - RNA, 19 nt, Artificial Sequence
  Description of Artificial Sequence: Synthetic oligonucleotide
uuuccgugcgaucagaagc

SEQ ID NO: 1740431 - RNA, 19 nt, Artificial Sequence
  Description of Artificial Sequence: Synthetic oligonucleotide
aaauagauucgugucagag

SEQ ID NO: 1740432 - RNA, 19 nt, Artificial Sequence
  Description of Artificial Sequence: Synthetic oligonucleotide
gaaguaugagcccagacuc

SEQ ID NO: 1740433 - RNA, 19 nt, Artificial Sequence
  Description of Artificial Sequence: Synthetic oligonucleotide
agcgucaugaugcagucac

SEQ ID NO: 1740434 - RNA, 19 nt, Artificial Sequence
  Description of Artificial Sequence: Synthetic oligonucleotide
uuuucgguaggcuuaacga

SEQ ID NO: 1740435 - RNA, 19 nt, Artificial Sequence
  Description of Artificial Sequence: Synthetic oligonucleotide
uucgucuauggcuaggagg

SEQ ID NO: 1740436 - RNA, 19 nt, Artificial Sequence
  Description of Artificial Sequence: Synthetic oligonucleotide
aauagauucgugucagagu

SEQ ID NO: 1740437 - RNA, 19 nt, Artificial Sequence
  Description of Artificial Sequence: Synthetic oligonucleotide
aaaauuaauccaagaauca

SEQ ID NO: 1740438 - RNA, 19 nt, Artificial Sequence
  Description of Artificial Sequence: Synthetic oligonucleotide
aaaauaacgcaagcgaccu

SEQ ID NO: 1740439 - RNA, 19 nt, Artificial Sequence
  Description of Artificial Sequence: Synthetic oligonucleotide
agagagauauaagggaccc

SEQ ID NO: 1740440 - RNA, 19 nt, Artificial Sequence
  Description of Artificial Sequence: Synthetic oligonucleotide
acgaaaauuaauccaagaa

SEQ ID NO: 1740441 - RNA, 19 nt, Artificial Sequence
  Description of Artificial Sequence: Synthetic oligonucleotide
auauaagggacccauuggu

SEQ ID NO: 1740442 - RNA, 19 nt, Artificial Sequence
  Description of Artificial Sequence: Synthetic oligonucleotide
cagcgcaauaacaaaauag

SEQ ID NO: 1740443 - RNA, 19 nt, Artificial Sequence
  Description of Artificial Sequence: Synthetic oligonucleotide
uuucgguaggcuuaacgag

SEQ ID NO: 1740444 - RNA, 19 nt, Artificial Sequence
  Description of Artificial Sequence: Synthetic oligonucleotide
gauguuuguagagugucag

SEQ ID NO: 1740445 - RNA, 19 nt, Artificial Sequence
  Description of Artificial Sequence: Synthetic oligonucleotide
ugguuauugccucugcucu

SEQ ID NO: 1740446 - RNA, 19 nt, Artificial Sequence
  Description of Artificial Sequence: Synthetic oligonucleotide
aagggcgaaguaugagccc

SEQ ID NO: 1740447 - RNA, 19 nt, Artificial Sequence
  Description of Artificial Sequence: Synthetic oligonucleotide
ugcuuuagauguuuguaga

SEQ ID NO: 1740448 - RNA, 19 nt, Artificial Sequence
  Description of Artificial Sequence: Synthetic oligonucleotide
agauucgugucagagucgc

SEQ ID NO: 1740449 - RNA, 19 nt, Artificial Sequence
  Description of Artificial Sequence: Synthetic oligonucleotide
ugugugacaguucgugacc

SEQ ID NO: 1740450 - RNA, 19 nt, Artificial Sequence
  Description of Artificial Sequence: Synthetic oligonucleotide
caguucgugaccaggaggc

SEQ ID NO: 1740451 - RNA, 19 nt, Artificial Sequence
  Description of Artificial Sequence: Synthetic oligonucleotide
caggacuacacugucaggg

SEQ ID NO: 1740452 - RNA, 19 nt, Artificial Sequence
  Description of Artificial Sequence: Synthetic oligonucleotide
acaguucgugaccaggagg

SEQ ID NO: 1740453 - RNA, 19 nt, Artificial Sequence
  Description of Artificial Sequence: Synthetic oligonucleotide
cugcauaccggauacccgg

SEQ ID NO: 1740454 - RNA, 19 nt, Artificial Sequence
  Description of Artificial Sequence: Synthetic oligonucleotide
ggcuuaacgaguuuauuag

SEQ ID NO: 1740455 - RNA, 19 nt, Artificial Sequence
  Description of Artificial Sequence: Synthetic oligonucleotide
uuagauguuuguagagugu

SEQ ID NO: 1740456 - RNA, 19 nt, Artificial Sequence
  Description of Artificial Sequence: Synthetic oligonucleotide
cauucaucaguuuggccgc

SEQ ID NO: 1740457 - RNA, 19 nt, Artificial Sequence
  Description of Artificial Sequence: Synthetic oligonucleotide
uccccacgaaaauuaaucc

SEQ ID NO: 1740458 - RNA, 19 nt, Artificial Sequence
  Description of Artificial Sequence: Synthetic oligonucleotide
cacaggacuacacugucag

SEQ ID NO: 1740459 - RNA, 19 nt, Artificial Sequence
  Description of Artificial Sequence: Synthetic oligonucleotide
auccccacgaaaauuaauc

SEQ ID NO: 1740460 - RNA, 19 nt, Artificial Sequence
  Description of Artificial Sequence: Synthetic oligonucleotide
ggugaggcgauccugacgc

SEQ ID NO: 1740461 - RNA, 19 nt, Artificial Sequence
  Description of Artificial Sequence: Synthetic oligonucleotide
uuaacgaguuuauuagaau

SEQ ID NO: 1740462 - RNA, 19 nt, Artificial Sequence
  Description of Artificial Sequence: Synthetic oligonucleotide
uuuacgggacagcaacuca

SEQ ID NO: 1740463 - RNA, 19 nt, Artificial Sequence
  Description of Artificial Sequence: Synthetic oligonucleotide
aucucagucgcggugacuc

SEQ ID NO: 1740464 - RNA, 19 nt, Artificial Sequence
  Description of Artificial Sequence: Synthetic oligonucleotide
uccagcgucaugaugcagu

SEQ ID NO: 1740465 - RNA, 19 nt, Artificial Sequence
  Description of Artificial Sequence: Synthetic oligonucleotide
gaacgacuggaucagugug

SEQ ID NO: 1740466 - RNA, 19 nt, Artificial Sequence
  Description of Artificial Sequence: Synthetic oligonucleotide
aacaccuuuccgugcgauc

SEQ ID NO: 1740467 - RNA, 19 nt, Artificial Sequence
  Description of Artificial Sequence: Synthetic oligonucleotide
cuuaacgaguuuauuagaa

SEQ ID NO: 1740468 - RNA, 19 nt, Artificial Sequence
  Description of Artificial Sequence: Synthetic oligonucleotide
aaaauagauucgugucaga

SEQ ID NO: 1740469 - RNA, 19 nt, Artificial Sequence
  Description of Artificial Sequence: Synthetic oligonucleotide
uugguuauugccucugcuc

SEQ ID NO: 1740470 - RNA, 19 nt, Artificial Sequence
  Description of Artificial Sequence: Synthetic oligonucleotide
gagggauuguucuugggga

SEQ ID NO: 1740471 - RNA, 19 nt, Artificial Sequence
  Description of Artificial Sequence: Synthetic oligonucleotide
ugacaguucgugaccagga

SEQ ID NO: 1740472 - RNA, 19 nt, Artificial Sequence
  Description of Artificial Sequence: Synthetic oligonucleotide
aacgcaagcgaccugccuu

SEQ ID NO: 1740473 - RNA, 19 nt, Artificial Sequence
  Description of Artificial Sequence: Synthetic oligonucleotide
uagauucgugucagagucg

SEQ ID NO: 1740474 - RNA, 19 nt, Artificial Sequence
  Description of Artificial Sequence: Synthetic oligonucleotide
uguagagugucagcguucc

SEQ ID NO: 1740475 - RNA, 19 nt, Artificial Sequence
  Description of Artificial Sequence: Synthetic oligonucleotide
auucgugucagagucgcag

SEQ ID NO: 1740476 - RNA, 19 nt, Artificial Sequence
  Description of Artificial Sequence: Synthetic oligonucleotide
accucgaccaagccuuggc

SEQ ID NO: 1740477 - RNA, 19 nt, Artificial Sequence
  Description of Artificial Sequence: Synthetic oligonucleotide
uucugagccgcguugucgc

SEQ ID NO: 1740478 - RNA, 19 nt, Artificial Sequence
  Description of Artificial Sequence: Synthetic oligonucleotide
uccccaagggcgaaguaug

SEQ ID NO: 1740479 - RNA, 19 nt, Artificial Sequence
  Description of Artificial Sequence: Synthetic oligonucleotide
uuacgggacagcaacucaa

SEQ ID NO: 1740480 - RNA, 19 nt, Artificial Sequence
  Description of Artificial Sequence: Synthetic oligonucleotide
gaaggucucacggguaggg

SEQ ID NO: 1740481 - RNA, 19 nt, Artificial Sequence
  Description of Artificial Sequence: Synthetic oligonucleotide
agaacgacuggaucagugu

SEQ ID NO: 1740482 - RNA, 19 nt, Artificial Sequence
  Description of Artificial Sequence: Synthetic oligonucleotide
ucucaucucagucgcggug

SEQ ID NO: 1740483 - RNA, 19 nt, Artificial Sequence
  Description of Artificial Sequence: Synthetic oligonucleotide
auugguuauugccucugcu

SEQ ID NO: 1740484 - RNA, 19 nt, Artificial Sequence
  Description of Artificial Sequence: Synthetic oligonucleotide
uuccgugcgaucagaagcu

SEQ ID NO: 1740485 - RNA, 19 nt, Artificial Sequence
  Description of Artificial Sequence: Synthetic oligonucleotide
uccucuucgucuauggcua

SEQ ID NO: 1740486 - RNA, 19 nt, Artificial Sequence
  Description of Artificial Sequence: Synthetic oligonucleotide
aggcuuaacgaguuuauua

SEQ ID NO: 1740487 - RNA, 19 nt, Artificial Sequence
  Description of Artificial Sequence: Synthetic oligonucleotide
ugucucggcgaccaccugc

SEQ ID NO: 1740488 - RNA, 19 nt, Artificial Sequence
  Description of Artificial Sequence: Synthetic oligonucleotide
cucuccucacaguaacugg

SEQ ID NO: 1740489 - RNA, 19 nt, Artificial Sequence
  Description of Artificial Sequence: Synthetic oligonucleotide
ugcacaguucacugucccg

SEQ ID NO: 1740490 - RNA, 19 nt, Artificial Sequence
  Description of Artificial Sequence: Synthetic oligonucleotide
aaauaacgcaagcgaccug

SEQ ID NO: 1740491 - RNA, 19 nt, Artificial Sequence
  Description of Artificial Sequence: Synthetic oligonucleotide
cauaccggauacccggacg

SEQ ID NO: 1740492 - RNA, 19 nt, Artificial Sequence
  Description of Artificial Sequence: Synthetic oligonucleotide
gacuggaucagugugaagu

SEQ ID NO: 1740493 - RNA, 19 nt, Artificial Sequence
  Description of Artificial Sequence: Synthetic oligonucleotide
agugucagcguuccuccag

SEQ ID NO: 1740494 - RNA, 19 nt, Artificial Sequence
  Description of Artificial Sequence: Synthetic oligonucleotide
uuagaaugucucuguagua

SEQ ID NO: 1740495 - RNA, 19 nt, Artificial Sequence
  Description of Artificial Sequence: Synthetic oligonucleotide
auaccggauacccggacga

SEQ ID NO: 1740496 - RNA, 19 nt, Artificial Sequence
  Description of Artificial Sequence: Synthetic oligonucleotide
gacaguucgugaccaggag

SEQ ID NO: 1740497 - RNA, 19 nt, Artificial Sequence
  Description of Artificial Sequence: Synthetic oligonucleotide
aucugugugacaguucgug

SEQ ID NO: 1740498 - RNA, 19 nt, Artificial Sequence
  Description of Artificial Sequence: Synthetic oligonucleotide
cuguaguagaaacuuaaaa

SEQ ID NO: 1740499 - RNA, 19 nt, Artificial Sequence
  Description of Artificial Sequence: Synthetic oligonucleotide
ugagccgcguugucgcucg

SEQ ID NO: 1740500 - RNA, 19 nt, Artificial Sequence
  Description of Artificial Sequence: Synthetic oligonucleotide
uuuuacgggacagcaacuc

SEQ ID NO: 1740501 - RNA, 19 nt, Artificial Sequence
  Description of Artificial Sequence: Synthetic oligonucleotide
uugagggauuguucuuggg

SEQ ID NO: 1740502 - RNA, 19 nt, Artificial Sequence
  Description of Artificial Sequence: Synthetic oligonucleotide
gcuuuagauguuuguagag

SEQ ID NO: 1740503 - RNA, 19 nt, Artificial Sequence
  Description of Artificial Sequence: Synthetic oligonucleotide
ucagcgcaauaacaaaaua

SEQ ID NO: 1740504 - RNA, 19 nt, Artificial Sequence
  Description of Artificial Sequence: Synthetic oligonucleotide
aagcgaccugccuugcuca

SEQ ID NO: 1740505 - RNA, 19 nt, Artificial Sequence
  Description of Artificial Sequence: Synthetic oligonucleotide
cucuguaguagaaacuuaa

SEQ ID NO: 1740506 - RNA, 19 nt, Artificial Sequence
  Description of Artificial Sequence: Synthetic oligonucleotide
cucccggaaggucucacgg

SEQ ID NO: 1740507 - RNA, 19 nt, Artificial Sequence
  Description of Artificial Sequence: Synthetic oligonucleotide
ucggcgaccaccugcggug

SEQ ID NO: 1740508 - RNA, 19 nt, Artificial Sequence
  Description of Artificial Sequence: Synthetic oligonucleotide
gucagagucgcagucccgg

SEQ ID NO: 1740509 - RNA, 19 nt, Artificial Sequence
  Description of Artificial Sequence: Synthetic oligonucleotide
ucgagugcagacccucggc

SEQ ID NO: 1740510 - RNA, 19 nt, Artificial Sequence
  Description of Artificial Sequence: Synthetic oligonucleotide
ucagagucgcagucccggg

SEQ ID NO: 1740511 - RNA, 19 nt, Artificial Sequence
  Description of Artificial Sequence: Synthetic oligonucleotide
acaccuuuccgugcgauca

SEQ ID NO: 1740512 - RNA, 19 nt, Artificial Sequence
  Description of Artificial Sequence: Synthetic oligonucleotide
ugucagagucgcagucccg

SEQ ID NO: 1740513 - RNA, 19 nt, Artificial Sequence
  Description of Artificial Sequence: Synthetic oligonucleotide
aacgacuggaucaguguga

SEQ ID NO: 1740514 - RNA, 19 nt, Artificial Sequence
  Description of Artificial Sequence: Synthetic oligonucleotide
cacauucaucaguuuggcc

SEQ ID NO: 1740515 - RNA, 19 nt, Artificial Sequence
  Description of Artificial Sequence: Synthetic oligonucleotide
cacgaaaauuaauccaaga

SEQ ID NO: 1740516 - RNA, 19 nt, Artificial Sequence
  Description of Artificial Sequence: Synthetic oligonucleotide
agguugcaaaauccccacg

SEQ ID NO: 1740517 - RNA, 19 nt, Artificial Sequence
  Description of Artificial Sequence: Synthetic oligonucleotide
ucucuguaguagaaacuua

SEQ ID NO: 1740518 - RNA, 19 nt, Artificial Sequence
  Description of Artificial Sequence: Synthetic oligonucleotide
gguugcaaaauccccacga

SEQ ID NO: 1740519 - RNA, 19 nt, Artificial Sequence
  Description of Artificial Sequence: Synthetic oligonucleotide
gagugcagacccucggcgc

SEQ ID NO: 1740520 - RNA, 19 nt, Artificial Sequence
  Description of Artificial Sequence: Synthetic oligonucleotide
caucaguuuggccgccucg

SEQ ID NO: 1740521 - RNA, 19 nt, Artificial Sequence
  Description of Artificial Sequence: Synthetic oligonucleotide
agucgcggugacuccgccc

SEQ ID NO: 1740522 - RNA, 19 nt, Artificial Sequence
  Description of Artificial Sequence: Synthetic oligonucleotide
gcuacggucgccucuuccg

SEQ ID NO: 1740523 - RNA, 19 nt, Artificial Sequence
  Description of Artificial Sequence: Synthetic oligonucleotide
gucgcggugacuccgcccc

SEQ ID NO: 1740524 - RNA, 19 nt, Artificial Sequence
  Description of Artificial Sequence: Synthetic oligonucleotide
acaggacuacacugucagg

SEQ ID NO: 1740525 - RNA, 19 nt, Artificial Sequence
  Description of Artificial Sequence: Synthetic oligonucleotide
gauccugacgcugcgcggc

SEQ ID NO: 1740526 - RNA, 19 nt, Artificial Sequence
  Description of Artificial Sequence: Synthetic oligonucleotide
cauugguuauugccucugc

SEQ ID NO: 1740527 - RNA, 19 nt, Artificial Sequence
  Description of Artificial Sequence: Synthetic oligonucleotide
uacccggacgaugucaaug

SEQ ID NO: 1740528 - RNA, 19 nt, Artificial Sequence
  Description of Artificial Sequence: Synthetic oligonucleotide
acccggacgaugucaaugu

SEQ ID NO: 1740529 - RNA, 19 nt, Artificial Sequence
  Description of Artificial Sequence: Synthetic oligonucleotide
ccaagggcgaaguaugagc

SEQ ID NO: 1740530 - RNA, 19 nt, Artificial Sequence
  Description of Artificial Sequence: Synthetic oligonucleotide
gucgagugcagacccucgg

SEQ ID NO: 1740531 - RNA, 19 nt, Artificial Sequence
  Description of Artificial Sequence: Synthetic oligonucleotide
agagucgcagucccggggu

SEQ ID NO: 1740532 - RNA, 19 nt, Artificial Sequence
  Description of Artificial Sequence: Synthetic oligonucleotide
guuucugcgggcucgccca

SEQ ID NO: 1740533 - RNA, 19 nt, Artificial Sequence
  Description of Artificial Sequence: Synthetic oligonucleotide
uucgugucagagucgcagu

SEQ ID NO: 1740534 - RNA, 19 nt, Artificial Sequence
  Description of Artificial Sequence: Synthetic oligonucleotide
auaacgcaagcgaccugcc

SEQ ID NO: 1740535 - RNA, 19 nt, Artificial Sequence
  Description of Artificial Sequence: Synthetic oligonucleotide
cagacucaacccaagggga

SEQ ID NO: 1740536 - RNA, 19 nt, Artificial Sequence
  Description of Artificial Sequence: Synthetic oligonucleotide
gacgccucgccccugccug

SEQ ID NO: 1740537 - RNA, 19 nt, Artificial Sequence
  Description of Artificial Sequence: Synthetic oligonucleotide
aaguaugagcccagacuca

SEQ ID NO: 1740538 - RNA, 19 nt, Artificial Sequence
  Description of Artificial Sequence: Synthetic oligonucleotide
caagcgaccugccuugcuc

SEQ ID NO: 1740539 - RNA, 19 nt, Artificial Sequence
  Description of Artificial Sequence: Synthetic oligonucleotide
ugcauaccggauacccgga

SEQ ID NO: 1740540 - RNA, 19 nt, Artificial Sequence
  Description of Artificial Sequence: Synthetic oligonucleotide
acggucgccucuuccgccg

SEQ ID NO: 1740541 - RNA, 19 nt, Artificial Sequence
  Description of Artificial Sequence: Synthetic oligonucleotide
uaacgcaagcgaccugccu

SEQ ID NO: 1740542 - RNA, 19 nt, Artificial Sequence
  Description of Artificial Sequence: Synthetic oligonucleotide
agggcgaugucaucuuccu

SEQ ID NO: 1740543 - RNA, 19 nt, Artificial Sequence
  Description of Artificial Sequence: Synthetic oligonucleotide
aguaugagcccagacucaa

SEQ ID NO: 1740544 - RNA, 19 nt, Artificial Sequence
  Description of Artificial Sequence: Synthetic oligonucleotide
ucgaccaagccuuggcuuu

SEQ ID NO: 1740545 - RNA, 19 nt, Artificial Sequence
  Description of Artificial Sequence: Synthetic oligonucleotide
ugaugcagucacacuccac

SEQ ID NO: 1740546 - RNA, 19 nt, Artificial Sequence
  Description of Artificial Sequence: Synthetic oligonucleotide
cugccugcggcgucgagug

SEQ ID NO: 1740547 - RNA, 19 nt, Artificial Sequence
  Description of Artificial Sequence: Synthetic oligonucleotide
guugcaaaauccccacgaa

SEQ ID NO: 1740548 - RNA, 19 nt, Artificial Sequence
  Description of Artificial Sequence: Synthetic oligonucleotide
cagagucgcagucccgggg

SEQ ID NO: 1740549 - RNA, 19 nt, Artificial Sequence
  Description of Artificial Sequence: Synthetic oligonucleotide
ugaggcgauccugacgcug

SEQ ID NO: 1740550 - RNA, 19 nt, Artificial Sequence
  Description of Artificial Sequence: Synthetic oligonucleotide
gaggcgauccugacgcugc

SEQ ID NO: 1740551 - RNA, 19 nt, Artificial Sequence
  Description of Artificial Sequence: Synthetic oligonucleotide
agggauuguucuuggggau

SEQ ID NO: 1740552 - RNA, 19 nt, Artificial Sequence
  Description of Artificial Sequence: Synthetic oligonucleotide
cuacggucgccucuuccgc

SEQ ID NO: 1740553 - RNA, 19 nt, Artificial Sequence
  Description of Artificial Sequence: Synthetic oligonucleotide
aauccccacgaaaauuaau

SEQ ID NO: 1740554 - RNA, 19 nt, Artificial Sequence
  Description of Artificial Sequence: Synthetic oligonucleotide
aaauccccacgaaaauuaa

SEQ ID NO: 1740555 - RNA, 19 nt, Artificial Sequence
  Description of Artificial Sequence: Synthetic oligonucleotide
agggcgaaguaugagccca

SEQ ID NO: 1740556 - RNA, 19 nt, Artificial Sequence
  Description of Artificial Sequence: Synthetic oligonucleotide
ucugcgggcucgcccagga

SEQ ID NO: 1740557 - RNA, 19 nt, Artificial Sequence
  Description of Artificial Sequence: Synthetic oligonucleotide
uuccgccgugcacaguuca

SEQ ID NO: 1740558 - RNA, 19 nt, Artificial Sequence
  Description of Artificial Sequence: Synthetic oligonucleotide
agauguuuguagaguguca

SEQ ID NO: 1740559 - RNA, 19 nt, Artificial Sequence
  Description of Artificial Sequence: Synthetic oligonucleotide
caguuuggccgccucguac

SEQ ID NO: 1740560 - RNA, 19 nt, Artificial Sequence
  Description of Artificial Sequence: Synthetic oligonucleotide
gucucggcgaccaccugcg

SEQ ID NO: 1740561 - RNA, 19 nt, Artificial Sequence
  Description of Artificial Sequence: Synthetic oligonucleotide
gcgauccugacgcugcgcg

SEQ ID NO: 1740562 - RNA, 19 nt, Artificial Sequence
  Description of Artificial Sequence: Synthetic oligonucleotide
ugcggcgucgagugcagac

SEQ ID NO: 1740563 - RNA, 19 nt, Artificial Sequence
  Description of Artificial Sequence: Synthetic oligonucleotide
cccagacucaacccaaggg

SEQ ID NO: 1740564 - RNA, 19 nt, Artificial Sequence
  Description of Artificial Sequence: Synthetic oligonucleotide
agugugaaguggaucugca

SEQ ID NO: 1740565 - RNA, 19 nt, Artificial Sequence
  Description of Artificial Sequence: Synthetic oligonucleotide
gauacccggacgaugucaa

SEQ ID NO: 1740566 - RNA, 19 nt, Artificial Sequence
  Description of Artificial Sequence: Synthetic oligonucleotide
acgggacagcaacucaaca

SEQ ID NO: 1740567 - RNA, 19 nt, Artificial Sequence
  Description of Artificial Sequence: Synthetic oligonucleotide
ccacgaaaauuaauccaag

SEQ ID NO: 1740568 - RNA, 19 nt, Artificial Sequence
  Description of Artificial Sequence: Synthetic oligonucleotide
cgugcgaucagaagcuucc

SEQ ID NO: 1740569 - RNA, 19 nt, Artificial Sequence
  Description of Artificial Sequence: Synthetic oligonucleotide
uuauugccucugcucuccu

SEQ ID NO: 1740570 - RNA, 19 nt, Artificial Sequence
  Description of Artificial Sequence: Synthetic oligonucleotide
gcuuaacgaguuuauuaga

SEQ ID NO: 1740571 - RNA, 19 nt, Artificial Sequence
  Description of Artificial Sequence: Synthetic oligonucleotide
gacccauugguuauugccu

SEQ ID NO: 1740572 - RNA, 19 nt, Artificial Sequence
  Description of Artificial Sequence: Synthetic oligonucleotide
cucaacaguugcuuuagau

SEQ ID NO: 1740573 - RNA, 19 nt, Artificial Sequence
  Description of Artificial Sequence: Synthetic oligonucleotide
guuuguagagugucagcgu

SEQ ID NO: 1740574 - RNA, 19 nt, Artificial Sequence
  Description of Artificial Sequence: Synthetic oligonucleotide
aaggucucacggguagggu

SEQ ID NO: 1740575 - RNA, 19 nt, Artificial Sequence
  Description of Artificial Sequence: Synthetic oligonucleotide
uuucugcgggcucgcccag

SEQ ID NO: 1740576 - RNA, 19 nt, Artificial Sequence
  Description of Artificial Sequence: Synthetic oligonucleotide
uccagguaucugugugaca

SEQ ID NO: 1740577 - RNA, 19 nt, Artificial Sequence
  Description of Artificial Sequence: Synthetic oligonucleotide
gguuucugcgggcucgccc

SEQ ID NO: 1740578 - RNA, 19 nt, Artificial Sequence
  Description of Artificial Sequence: Synthetic oligonucleotide
cccacgaaaauuaauccaa

SEQ ID NO: 1740579 - RNA, 19 nt, Artificial Sequence
  Description of Artificial Sequence: Synthetic oligonucleotide
agucgcagucccggggucg

SEQ ID NO: 1740580 - RNA, 19 nt, Artificial Sequence
  Description of Artificial Sequence: Synthetic oligonucleotide
ugcaucuucugagccgcgu

SEQ ID NO: 1740581 - RNA, 19 nt, Artificial Sequence
  Description of Artificial Sequence: Synthetic oligonucleotide
aggcgauccugacgcugcg

SEQ ID NO: 1740582 - RNA, 19 nt, Artificial Sequence
  Description of Artificial Sequence: Synthetic oligonucleotide
cucaucucagucgcgguga

SEQ ID NO: 1740583 - RNA, 19 nt, Artificial Sequence
  Description of Artificial Sequence: Synthetic oligonucleotide
cuuccugucucggcgacca

SEQ ID NO: 1740584 - RNA, 19 nt, Artificial Sequence
  Description of Artificial Sequence: Synthetic oligonucleotide
agcgaccugccuugcucag

SEQ ID NO: 1740585 - RNA, 19 nt, Artificial Sequence
  Description of Artificial Sequence: Synthetic oligonucleotide
acgacuggaucagugugaa

SEQ ID NO: 1740586 - RNA, 19 nt, Artificial Sequence
  Description of Artificial Sequence: Synthetic oligonucleotide
gccucugcauaccggauac

SEQ ID NO: 1740587 - RNA, 19 nt, Artificial Sequence
  Description of Artificial Sequence: Synthetic oligonucleotide
uccgccgugcacaguucac

SEQ ID NO: 1740588 - RNA, 19 nt, Artificial Sequence
  Description of Artificial Sequence: Synthetic oligonucleotide
ucucggcgaccaccugcgg

SEQ ID NO: 1740589 - RNA, 19 nt, Artificial Sequence
  Description of Artificial Sequence: Synthetic oligonucleotide
gcgaucagaagcuuccaaa

SEQ ID NO: 1740590 - RNA, 19 nt, Artificial Sequence
  Description of Artificial Sequence: Synthetic oligonucleotide
gugucagcguuccuccaga

SEQ ID NO: 1740591 - RNA, 19 nt, Artificial Sequence
  Description of Artificial Sequence: Synthetic oligonucleotide
cucagcgcaauaacaaaau

SEQ ID NO: 1740592 - RNA, 19 nt, Artificial Sequence
  Description of Artificial Sequence: Synthetic oligonucleotide
ugucccgcaggguccggac

SEQ ID NO: 1740593 - RNA, 19 nt, Artificial Sequence
  Description of Artificial Sequence: Synthetic oligonucleotide
ggacuacacugucaggguc

SEQ ID NO: 1740594 - RNA, 19 nt, Artificial Sequence
  Description of Artificial Sequence: Synthetic oligonucleotide
gguuauugccucugcucuc

SEQ ID NO: 1740595 - RNA, 19 nt, Artificial Sequence
  Description of Artificial Sequence: Synthetic oligonucleotide
gugugacaguucgugacca

SEQ ID NO: 1740596 - RNA, 19 nt, Artificial Sequence
  Description of Artificial Sequence: Synthetic oligonucleotide
gacuucccuucccaagaaa

SEQ ID NO: 1740597 - RNA, 19 nt, Artificial Sequence
  Description of Artificial Sequence: Synthetic oligonucleotide
guuuggccgccucguacac

SEQ ID NO: 1740598 - RNA, 19 nt, Artificial Sequence
  Description of Artificial Sequence: Synthetic oligonucleotide
gacucaacccaaggggaaa

SEQ ID NO: 1740599 - RNA, 19 nt, Artificial Sequence
  Description of Artificial Sequence: Synthetic oligonucleotide
caccuuuccgugcgaucag

SEQ ID NO: 1740600 - RNA, 19 nt, Artificial Sequence
  Description of Artificial Sequence: Synthetic oligonucleotide
ucugagccgcguugucgcu

SEQ ID NO: 1740601 - RNA, 19 nt, Artificial Sequence
  Description of Artificial Sequence: Synthetic oligonucleotide
cuuccagcgucaugaugca

SEQ ID NO: 1740602 - RNA, 19 nt, Artificial Sequence
  Description of Artificial Sequence: Synthetic oligonucleotide
uuccagcgucaugaugcag

SEQ ID NO: 1740603 - RNA, 19 nt, Artificial Sequence
  Description of Artificial Sequence: Synthetic oligonucleotide
gucgucccggcucccgcgg

SEQ ID NO: 1740604 - RNA, 19 nt, Artificial Sequence
  Description of Artificial Sequence: Synthetic oligonucleotide
gacgcugcgcggccaccag

SEQ ID NO: 1740605 - RNA, 19 nt, Artificial Sequence
  Description of Artificial Sequence: Synthetic oligonucleotide
agggacccauugguuauug

SEQ ID NO: 1740606 - RNA, 19 nt, Artificial Sequence
  Description of Artificial Sequence: Synthetic oligonucleotide
gucagcguuccuccagaga

SEQ ID NO: 1740607 - RNA, 19 nt, Artificial Sequence
  Description of Artificial Sequence: Synthetic oligonucleotide
acuccgccccucccggaag

SEQ ID NO: 1740608 - RNA, 19 nt, Artificial Sequence
  Description of Artificial Sequence: Synthetic oligonucleotide
gguaggcuuaacgaguuua

SEQ ID NO: 1740609 - RNA, 19 nt, Artificial Sequence
  Description of Artificial Sequence: Synthetic oligonucleotide
agacucaacccaaggggaa

SEQ ID NO: 1740610 - RNA, 19 nt, Artificial Sequence
  Description of Artificial Sequence: Synthetic oligonucleotide
agccgcguugucgcucgcc

SEQ ID NO: 1740611 - RNA, 19 nt, Artificial Sequence
  Description of Artificial Sequence: Synthetic oligonucleotide
ggucaaauauguauuuuau

SEQ ID NO: 1740612 - RNA, 19 nt, Artificial Sequence
  Description of Artificial Sequence: Synthetic oligonucleotide
cgagugcagacccucggcg

SEQ ID NO: 1740613 - RNA, 19 nt, Artificial Sequence
  Description of Artificial Sequence: Synthetic oligonucleotide
cuccgccccucccggaagg

SEQ ID NO: 1740614 - RNA, 19 nt, Artificial Sequence
  Description of Artificial Sequence: Synthetic oligonucleotide
ggaaggucucacggguagg

SEQ ID NO: 1740615 - RNA, 19 nt, Artificial Sequence
  Description of Artificial Sequence: Synthetic oligonucleotide
gcgaaguaugagcccagac

SEQ ID NO: 1740616 - RNA, 19 nt, Artificial Sequence
  Description of Artificial Sequence: Synthetic oligonucleotide
guucgugaccaggaggcaa

SEQ ID NO: 1740617 - RNA, 19 nt, Artificial Sequence
  Description of Artificial Sequence: Synthetic oligonucleotide
gagugucagcguuccucca

SEQ ID NO: 1740618 - RNA, 19 nt, Artificial Sequence
  Description of Artificial Sequence: Synthetic oligonucleotide
ccccacgaaaauuaaucca

SEQ ID NO: 1740619 - RNA, 19 nt, Artificial Sequence
  Description of Artificial Sequence: Synthetic oligonucleotide
aguucgugaccaggaggca

SEQ ID NO: 1740620 - RNA, 19 nt, Artificial Sequence
  Description of Artificial Sequence: Synthetic oligonucleotide
cacugucccgcaggguccg

SEQ ID NO: 1740621 - RNA, 19 nt, Artificial Sequence
  Description of Artificial Sequence: Synthetic oligonucleotide
ugcagacccucggcgcucc

SEQ ID NO: 1740622 - RNA, 19 nt, Artificial Sequence
  Description of Artificial Sequence: Synthetic oligonucleotide
uucugcgggcucgcccagg

SEQ ID NO: 1740623 - RNA, 19 nt, Artificial Sequence
  Description of Artificial Sequence: Synthetic oligonucleotide
ugccuugcucagcgcaaua

SEQ ID NO: 1740624 - RNA, 19 nt, Artificial Sequence
  Description of Artificial Sequence: Synthetic oligonucleotide
guaugagcccagacucaac

SEQ ID NO: 1740625 - RNA, 19 nt, Artificial Sequence
  Description of Artificial Sequence: Synthetic oligonucleotide
ggucgucccggcucccgcg

SEQ ID NO: 1740626 - RNA, 19 nt, Artificial Sequence
  Description of Artificial Sequence: Synthetic oligonucleotide
cccacgaaagguccccaag

SEQ ID NO: 1740627 - RNA, 19 nt, Artificial Sequence
  Description of Artificial Sequence: Synthetic oligonucleotide
ggauacccggacgauguca

SEQ ID NO: 1740628 - RNA, 19 nt, Artificial Sequence
  Description of Artificial Sequence: Synthetic oligonucleotide
accgcccagagagccggcg

SEQ ID NO: 1740629 - RNA, 19 nt, Artificial Sequence
  Description of Artificial Sequence: Synthetic oligonucleotide
caacgccccgggcuccucc

SEQ ID NO: 1740630 - RNA, 19 nt, Artificial Sequence
  Description of Artificial Sequence: Synthetic oligonucleotide
gcucagcgcaauaacaaaa

SEQ ID NO: 1740631 - RNA, 19 nt, Artificial Sequence
  Description of Artificial Sequence: Synthetic oligonucleotide
ccgugcacaguucacuguc

SEQ ID NO: 1740632 - RNA, 19 nt, Artificial Sequence
  Description of Artificial Sequence: Synthetic oligonucleotide
cuuccgccgugcacaguuc

SEQ ID NO: 1740633 - RNA, 19 nt, Artificial Sequence
  Description of Artificial Sequence: Synthetic oligonucleotide
gcaaaauccccacgaaaau

SEQ ID NO: 1740634 - RNA, 19 nt, Artificial Sequence
  Description of Artificial Sequence: Synthetic oligonucleotide
gacuccgccccucccggaa

SEQ ID NO: 1740635 - RNA, 19 nt, Artificial Sequence
  Description of Artificial Sequence: Synthetic oligonucleotide
cuccgguuccaccgcccag

SEQ ID NO: 1740636 - RNA, 19 nt, Artificial Sequence
  Description of Artificial Sequence: Synthetic oligonucleotide
guaggcuuaacgaguuuau

SEQ ID NO: 1740637 - RNA, 19 nt, Artificial Sequence
  Description of Artificial Sequence: Synthetic oligonucleotide
gauucgugucagagucgca

SEQ ID NO: 1740638 - RNA, 19 nt, Artificial Sequence
  Description of Artificial Sequence: Synthetic oligonucleotide
cgcaauaacaaaauagauu

SEQ ID NO: 1740639 - RNA, 19 nt, Artificial Sequence
  Description of Artificial Sequence: Synthetic oligonucleotide
gucgccucuuccgccgugc

SEQ ID NO: 1740640 - RNA, 19 nt, Artificial Sequence
  Description of Artificial Sequence: Synthetic oligonucleotide
auacccggacgaugucaau

SEQ ID NO: 1740641 - RNA, 19 nt, Artificial Sequence
  Description of Artificial Sequence: Synthetic oligonucleotide
caccucgaccaagccuugg

SEQ ID NO: 1740642 - RNA, 19 nt, Artificial Sequence
  Description of Artificial Sequence: Synthetic oligonucleotide
cagucgcggugacuccgcc

SEQ ID NO: 1740643 - RNA, 19 nt, Artificial Sequence
  Description of Artificial Sequence: Synthetic oligonucleotide
gaggcggcgggacuucccu

SEQ ID NO: 1740644 - RNA, 19 nt, Artificial Sequence
  Description of Artificial Sequence: Synthetic oligonucleotide
gcauaccggauacccggac

SEQ ID NO: 1740645 - RNA, 19 nt, Artificial Sequence
  Description of Artificial Sequence: Synthetic oligonucleotide
ccauugguuauugccucug

SEQ ID NO: 1740646 - RNA, 19 nt, Artificial Sequence
  Description of Artificial Sequence: Synthetic oligonucleotide
uccggaggcggcgggacuu

SEQ ID NO: 1740647 - RNA, 19 nt, Artificial Sequence
  Description of Artificial Sequence: Synthetic oligonucleotide
uaccggauacccggacgau

SEQ ID NO: 1740648 - RNA, 19 nt, Artificial Sequence
  Description of Artificial Sequence: Synthetic oligonucleotide
gcuccaacgccccgggcuc

SEQ ID NO: 1740649 - RNA, 19 nt, Artificial Sequence
  Description of Artificial Sequence: Synthetic oligonucleotide
gacccucggcgcuccccgc

SEQ ID NO: 1740650 - RNA, 19 nt, Artificial Sequence
  Description of Artificial Sequence: Synthetic oligonucleotide
cucgaccaagccuuggcuu

SEQ ID NO: 1740651 - RNA, 19 nt, Artificial Sequence
  Description of Artificial Sequence: Synthetic oligonucleotide
ggcggcgggacuucccuuc

SEQ ID NO: 1740652 - RNA, 19 nt, Artificial Sequence
  Description of Artificial Sequence: Synthetic oligonucleotide
cagcaacucaacaguugcu

SEQ ID NO: 1740653 - RNA, 19 nt, Artificial Sequence
  Description of Artificial Sequence: Synthetic oligonucleotide
cugagccgcguugucgcuc

SEQ ID NO: 1740654 - RNA, 19 nt, Artificial Sequence
  Description of Artificial Sequence: Synthetic oligonucleotide
cagucccggggucgucccg

SEQ ID NO: 1740655 - RNA, 19 nt, Artificial Sequence
  Description of Artificial Sequence: Synthetic oligonucleotide
cccaagggcgaaguaugag

SEQ ID NO: 1740656 - RNA, 19 nt, Artificial Sequence
  Description of Artificial Sequence: Synthetic oligonucleotide
ggcuccaacgccccgggcu

SEQ ID NO: 1740657 - RNA, 19 nt, Artificial Sequence
  Description of Artificial Sequence: Synthetic oligonucleotide
ucucacggguaggguggcu

SEQ ID NO: 1740658 - RNA, 19 nt, Artificial Sequence
  Description of Artificial Sequence: Synthetic oligonucleotide
uccugacgcugcgcggcca

SEQ ID NO: 1740659 - RNA, 19 nt, Artificial Sequence
  Description of Artificial Sequence: Synthetic oligonucleotide
cgcguugucgcucgccacc

SEQ ID NO: 1740660 - RNA, 19 nt, Artificial Sequence
  Description of Artificial Sequence: Synthetic oligonucleotide
uccaacgccccgggcuccu

SEQ ID NO: 1740661 - RNA, 19 nt, Artificial Sequence
  Description of Artificial Sequence: Synthetic oligonucleotide
gugcgaucagaagcuucca

SEQ ID NO: 1740662 - RNA, 19 nt, Artificial Sequence
  Description of Artificial Sequence: Synthetic oligonucleotide
uccgugcgaucagaagcuu

SEQ ID NO: 1740663 - RNA, 19 nt, Artificial Sequence
  Description of Artificial Sequence: Synthetic oligonucleotide
cgucgagugcagacccucg

SEQ ID NO: 1740664 - RNA, 19 nt, Artificial Sequence
  Description of Artificial Sequence: Synthetic oligonucleotide
cuccaacgccccgggcucc

SEQ ID NO: 1740665 - RNA, 19 nt, Artificial Sequence
  Description of Artificial Sequence: Synthetic oligonucleotide
gcgcacuccccucucaucu

SEQ ID NO: 1740666 - RNA, 19 nt, Artificial Sequence
  Description of Artificial Sequence: Synthetic oligonucleotide
gcggcgucgagugcagacc

SEQ ID NO: 1740667 - RNA, 19 nt, Artificial Sequence
  Description of Artificial Sequence: Synthetic oligonucleotide
gcgcaauaacaaaauagau

SEQ ID NO: 1740668 - RNA, 19 nt, Artificial Sequence
  Description of Artificial Sequence: Synthetic oligonucleotide
caccugcggugcugcuccg

SEQ ID NO: 1740669 - RNA, 19 nt, Artificial Sequence
  Description of Artificial Sequence: Synthetic oligonucleotide
cugucucggcgaccaccug

SEQ ID NO: 1740670 - RNA, 19 nt, Artificial Sequence
  Description of Artificial Sequence: Synthetic oligonucleotide
ccgugcgaucagaagcuuc

SEQ ID NO: 1740671 - RNA, 19 nt, Artificial Sequence
  Description of Artificial Sequence: Synthetic oligonucleotide
gcagucccggggucguccc

SEQ ID NO: 1740672 - RNA, 19 nt, Artificial Sequence
  Description of Artificial Sequence: Synthetic oligonucleotide
ccucuuccgccgugcacag

SEQ ID NO: 1740673 - RNA, 19 nt, Artificial Sequence
  Description of Artificial Sequence: Synthetic oligonucleotide
caguggugcccaggguuuc

SEQ ID NO: 1740674 - RNA, 19 nt, Artificial Sequence
  Description of Artificial Sequence: Synthetic oligonucleotide
caggguccggacgccucgc

SEQ ID NO: 1740675 - RNA, 19 nt, Artificial Sequence
  Description of Artificial Sequence: Synthetic oligonucleotide
gggucgucccggcucccgc

SEQ ID NO: 1740676 - RNA, 19 nt, Artificial Sequence
  Description of Artificial Sequence: Synthetic oligonucleotide
cgauccugacgcugcgcgg

SEQ ID NO: 1740677 - RNA, 19 nt, Artificial Sequence
  Description of Artificial Sequence: Synthetic oligonucleotide
cucggcgaccaccugcggu

SEQ ID NO: 1740678 - RNA, 19 nt, Artificial Sequence
  Description of Artificial Sequence: Synthetic oligonucleotide
gccaccucgaccaagccuu

SEQ ID NO: 1740679 - RNA, 19 nt, Artificial Sequence
  Description of Artificial Sequence: Synthetic oligonucleotide
gggcgaaguaugagcccag

SEQ ID NO: 1740680 - RNA, 19 nt, Artificial Sequence
  Description of Artificial Sequence: Synthetic oligonucleotide
cggcgucgagugcagaccc

SEQ ID NO: 1740681 - RNA, 19 nt, Artificial Sequence
  Description of Artificial Sequence: Synthetic oligonucleotide
gucccggggucgucccggc

SEQ ID NO: 1740682 - RNA, 19 nt, Artificial Sequence
  Description of Artificial Sequence: Synthetic oligonucleotide
ggucaccgccugcaucuuc

SEQ ID NO: 1740683 - RNA, 19 nt, Artificial Sequence
  Description of Artificial Sequence: Synthetic oligonucleotide
ccugcggcgucgagugcag

SEQ ID NO: 1740684 - RNA, 19 nt, Artificial Sequence
  Description of Artificial Sequence: Synthetic oligonucleotide
guagagugucagcguuccu

SEQ ID NO: 1740685 - RNA, 19 nt, Artificial Sequence
  Description of Artificial Sequence: Synthetic oligonucleotide
ccgcccagagagccggcgg

SEQ ID NO: 1740686 - RNA, 19 nt, Artificial Sequence
  Description of Artificial Sequence: Synthetic oligonucleotide
ucgccccugccugcggcgu

SEQ ID NO: 1740687 - RNA, 19 nt, Artificial Sequence
  Description of Artificial Sequence: Synthetic oligonucleotide
ggcgauccugacgcugcgc

SEQ ID NO: 1740688 - RNA, 19 nt, Artificial Sequence
  Description of Artificial Sequence: Synthetic oligonucleotide
gcggcgggacuucccuucc

SEQ ID NO: 1740689 - RNA, 19 nt, Artificial Sequence
  Description of Artificial Sequence: Synthetic oligonucleotide
gcuccgguuccaccgccca

SEQ ID NO: 1740690 - RNA, 19 nt, Artificial Sequence
  Description of Artificial Sequence: Synthetic oligonucleotide
ggcgaaguaugagcccaga

SEQ ID NO: 1740691 - RNA, 19 nt, Artificial Sequence
  Description of Artificial Sequence: Synthetic oligonucleotide
ccggggucgucccggcucc

SEQ ID NO: 1740692 - RNA, 19 nt, Artificial Sequence
  Description of Artificial Sequence: Synthetic oligonucleotide
ccugacgcugcgcggccac

SEQ ID NO: 1740693 - RNA, 19 nt, Artificial Sequence
  Description of Artificial Sequence: Synthetic oligonucleotide
gcgucgagugcagacccuc

SEQ ID NO: 1740694 - RNA, 19 nt, Artificial Sequence
  Description of Artificial Sequence: Synthetic oligonucleotide
ggggucgucccggcucccg

SEQ ID NO: 1740695 - RNA, 19 nt, Artificial Sequence
  Description of Artificial Sequence: Synthetic oligonucleotide
aggcggcgggacuucccuu

SEQ ID NO: 1740696 - RNA, 19 nt, Artificial Sequence
  Description of Artificial Sequence: Synthetic oligonucleotide
gagccgcguugucgcucgc

SEQ ID NO: 1740697 - RNA, 19 nt, Artificial Sequence
  Description of Artificial Sequence: Synthetic oligonucleotide
ccugucucggcgaccaccu

SEQ ID NO: 1740698 - RNA, 19 nt, Artificial Sequence
  Description of Artificial Sequence: Synthetic oligonucleotide
cagcgucaugaugcaguca

SEQ ID NO: 1740699 - RNA, 19 nt, Artificial Sequence
  Description of Artificial Sequence: Synthetic oligonucleotide
gcgaccaccugcggugcug

SEQ ID NO: 1740700 - RNA, 19 nt, Artificial Sequence
  Description of Artificial Sequence: Synthetic oligonucleotide
ccucgccccugccugcggc

SEQ ID NO: 1740701 - RNA, 19 nt, Artificial Sequence
  Description of Artificial Sequence: Synthetic oligonucleotide
ccccacggugaggcgaucc

SEQ ID NO: 1740702 - RNA, 19 nt, Artificial Sequence
  Description of Artificial Sequence: Synthetic oligonucleotide
gcgaccugccuugcucagc

SEQ ID NO: 1740703 - RNA, 19 nt, Artificial Sequence
  Description of Artificial Sequence: Synthetic oligonucleotide
cccggacgaugucaauguc

SEQ ID NO: 1740704 - RNA, 19 nt, Artificial Sequence
  Description of Artificial Sequence: Synthetic oligonucleotide
ggacagcaacucaacaguu

SEQ ID NO: 1740705 - RNA, 19 nt, Artificial Sequence
  Description of Artificial Sequence: Synthetic oligonucleotide
ccccaagggcgaaguauga

SEQ ID NO: 1740706 - RNA, 19 nt, Artificial Sequence
  Description of Artificial Sequence: Synthetic oligonucleotide
cccggaaggucucacgggu

SEQ ID NO: 1740707 - RNA, 19 nt, Artificial Sequence
  Description of Artificial Sequence: Synthetic oligonucleotide
gcggcggucaccgccugca

SEQ ID NO: 1740708 - RNA, 19 nt, Artificial Sequence
  Description of Artificial Sequence: Synthetic oligonucleotide
ccaccucgaccaagccuug

SEQ ID NO: 1740709 - RNA, 19 nt, Artificial Sequence
  Description of Artificial Sequence: Synthetic oligonucleotide
cugucccgcaggguccgga

SEQ ID NO: 1740710 - RNA, 19 nt, Artificial Sequence
  Description of Artificial Sequence: Synthetic oligonucleotide
gccgugcacaguucacugu

SEQ ID NO: 1740711 - RNA, 19 nt, Artificial Sequence
  Description of Artificial Sequence: Synthetic oligonucleotide
cucacggguaggguggcuu

SEQ ID NO: 1740712 - RNA, 19 nt, Artificial Sequence
  Description of Artificial Sequence: Synthetic oligonucleotide
gugaggcgauccugacgcu

SEQ ID NO: 1740713 - RNA, 19 nt, Artificial Sequence
  Description of Artificial Sequence: Synthetic oligonucleotide
ccgcguugucgcucgccac

SEQ ID NO: 1740714 - RNA, 19 nt, Artificial Sequence
  Description of Artificial Sequence: Synthetic oligonucleotide
cgacuggaucagugugaag

SEQ ID NO: 1740715 - RNA, 19 nt, Artificial Sequence
  Description of Artificial Sequence: Synthetic oligonucleotide
cuguuccaccgcggcgguc

SEQ ID NO: 1740716 - RNA, 19 nt, Artificial Sequence
  Description of Artificial Sequence: Synthetic oligonucleotide
gcgucaugaugcagucaca

SEQ ID NO: 1740717 - RNA, 19 nt, Artificial Sequence
  Description of Artificial Sequence: Synthetic oligonucleotide
cgcagucccggggucgucc

SEQ ID NO: 1740718 - RNA, 19 nt, Artificial Sequence
  Description of Artificial Sequence: Synthetic oligonucleotide
ccucgaccaagccuuggcu

SEQ ID NO: 1740719 - RNA, 19 nt, Artificial Sequence
  Description of Artificial Sequence: Synthetic oligonucleotide
gccucgccccugccugcgg

SEQ ID NO: 1740720 - RNA, 19 nt, Artificial Sequence
  Description of Artificial Sequence: Synthetic oligonucleotide
cccauugguuauugccucu

SEQ ID NO: 1740721 - RNA, 19 nt, Artificial Sequence
  Description of Artificial Sequence: Synthetic oligonucleotide
cgaccaccugcggugcugc

SEQ ID NO: 1740722 - RNA, 19 nt, Artificial Sequence
  Description of Artificial Sequence: Synthetic oligonucleotide
gcaagcgaccugccuugcu

SEQ ID NO: 1740723 - RNA, 19 nt, Artificial Sequence
  Description of Artificial Sequence: Synthetic oligonucleotide
caucucagucgcggugacu

SEQ ID NO: 1740724 - RNA, 19 nt, Artificial Sequence
  Description of Artificial Sequence: Synthetic oligonucleotide
cccgcugcggcugcgugca

SEQ ID NO: 1740725 - RNA, 19 nt, Artificial Sequence
  Description of Artificial Sequence: Synthetic oligonucleotide
cugccuugcucagcgcaau

SEQ ID NO: 1740726 - RNA, 19 nt, Artificial Sequence
  Description of Artificial Sequence: Synthetic oligonucleotide
cggauacccggacgauguc

SEQ ID NO: 1740727 - RNA, 19 nt, Artificial Sequence
  Description of Artificial Sequence: Synthetic oligonucleotide
gcagaacgacuggaucagu

SEQ ID NO: 1740728 - RNA, 19 nt, Artificial Sequence
  Description of Artificial Sequence: Synthetic oligonucleotide
ggacgaugucaaugucauu

SEQ ID NO: 1740729 - RNA, 19 nt, Artificial Sequence
  Description of Artificial Sequence: Synthetic oligonucleotide
gggcgcgcacuccccucuc

SEQ ID NO: 1740730 - RNA, 19 nt, Artificial Sequence
  Description of Artificial Sequence: Synthetic oligonucleotide
ggcgggcgggcgcgcacuc

SEQ ID NO: 1740731 - RNA, 19 nt, Artificial Sequence
  Description of Artificial Sequence: Synthetic oligonucleotide
ccugccugcggcgucgagu

SEQ ID NO: 1740732 - RNA, 19 nt, Artificial Sequence
  Description of Artificial Sequence: Synthetic oligonucleotide
cugcggcgucgagugcaga

SEQ ID NO: 1740733 - RNA, 19 nt, Artificial Sequence
  Description of Artificial Sequence: Synthetic oligonucleotide
cugcggugcugcuccgguu

SEQ ID NO: 1740734 - RNA, 19 nt, Artificial Sequence
  Description of Artificial Sequence: Synthetic oligonucleotide
cgccccucccggaaggucu

SEQ ID NO: 1740735 - RNA, 19 nt, Artificial Sequence
  Description of Artificial Sequence: Synthetic oligonucleotide
ggcgaccaccugcggugcu

SEQ ID NO: 1740736 - RNA, 19 nt, Artificial Sequence
  Description of Artificial Sequence: Synthetic oligonucleotide
gcggcugcgugcagaggcu

SEQ ID NO: 1740737 - RNA, 19 nt, Artificial Sequence
  Description of Artificial Sequence: Synthetic oligonucleotide
ggcgucgagugcagacccu

SEQ ID NO: 1740738 - RNA, 19 nt, Artificial Sequence
  Description of Artificial Sequence: Synthetic oligonucleotide
cgccucgccccugccugcg

SEQ ID NO: 1740739 - RNA, 19 nt, Artificial Sequence
  Description of Artificial Sequence: Synthetic oligonucleotide
cggcgaccaccugcggugc

SEQ ID NO: 1740740 - RNA, 19 nt, Artificial Sequence
  Description of Artificial Sequence: Synthetic oligonucleotide
cggcugcgugcagaggcug

SEQ ID NO: 1740741 - RNA, 19 nt, Artificial Sequence
  Description of Artificial Sequence: Synthetic oligonucleotide
gcggcuacggucgccucuu

SEQ ID NO: 1740742 - RNA, 19 nt, Artificial Sequence
  Description of Artificial Sequence: Synthetic oligonucleotide
cccgcggcuacggucgccu

SEQ ID NO: 1740743 - RNA, 19 nt, Artificial Sequence
  Description of Artificial Sequence: Synthetic oligonucleotide
ccaacgccccgggcuccuc

SEQ ID NO: 1740744 - RNA, 19 nt, Artificial Sequence
  Description of Artificial Sequence: Synthetic oligonucleotide
cgcggcuacggucgccucu

SEQ ID NO: 1740745 - RNA, 19 nt, Artificial Sequence
  Description of Artificial Sequence: Synthetic oligonucleotide
cggcuacggucgccucuuc

SEQ ID NO: 1740746 - RNA, 19 nt, Artificial Sequence
  Description of Artificial Sequence: Synthetic oligonucleotide
ggguggcuuuugagggauu

SEQ ID NO: 1740747 - RNA, 19 nt, Artificial Sequence
  Description of Artificial Sequence: Synthetic oligonucleotide
cgggcgcgcacuccccucu

SEQ ID NO: 1740748 - RNA, 19 nt, Artificial Sequence
  Description of Artificial Sequence: Synthetic oligonucleotide
cgguaggcuuaacgaguuu

SEQ ID NO: 1740749 - RNA, 19 nt, Artificial Sequence
  Description of Artificial Sequence: Synthetic oligonucleotide
cgaccaagccuuggcuuuu

SEQ ID NO: 1740750 - RNA, 19 nt, Artificial Sequence
  Description of Artificial Sequence: Synthetic oligonucleotide
ccgcaggguccggacgccu

SEQ ID NO: 1740751 - RNA, 19 nt, Artificial Sequence
  Description of Artificial Sequence: Synthetic oligonucleotide
ccccugccugcggcgucga

SEQ ID NO: 1740752 - RNA, 19 nt, Artificial Sequence
  Description of Artificial Sequence: Synthetic oligonucleotide
cggucgccucuuccgccgu

SEQ ID NO: 1740753 - RNA, 19 nt, Artificial Sequence
  Description of Artificial Sequence: Synthetic oligonucleotide
cggcggucaccgccugcau

SEQ ID NO: 1740754 - RNA, 19 nt, Artificial Sequence
  Description of Artificial Sequence: Synthetic oligonucleotide
uguaauaggauuauaaggc

SEQ ID NO: 1740755 - RNA, 19 nt, Artificial Sequence
  Description of Artificial Sequence: Synthetic oligonucleotide
uauggauuaacccauaugc

SEQ ID NO: 1740756 - RNA, 19 nt, Artificial Sequence
  Description of Artificial Sequence: Synthetic oligonucleotide
auuuauacuauuuauaucu

SEQ ID NO: 1740757 - RNA, 19 nt, Artificial Sequence
  Description of Artificial Sequence: Synthetic oligonucleotide
aauccaauaaucuccaaag

SEQ ID NO: 1740758 - RNA, 19 nt, Artificial Sequence
  Description of Artificial Sequence: Synthetic oligonucleotide
uaauaaaugcuacaguagg

SEQ ID NO: 1740759 - RNA, 19 nt, Artificial Sequence
  Description of Artificial Sequence: Synthetic oligonucleotide
aaggaaaaccuucagaaag

SEQ ID NO: 1740760 - RNA, 19 nt, Artificial Sequence
  Description of Artificial Sequence: Synthetic oligonucleotide
aagucaugauauuagaguc

SEQ ID NO: 1740761 - RNA, 19 nt, Artificial Sequence
  Description of Artificial Sequence: Synthetic oligonucleotide
uuauaucuaauauucaaag

SEQ ID NO: 1740762 - RNA, 19 nt, Artificial Sequence
  Description of Artificial Sequence: Synthetic oligonucleotide
gugaacaaaagucagaucc

SEQ ID NO: 1740763 - RNA, 19 nt, Artificial Sequence
  Description of Artificial Sequence: Synthetic oligonucleotide
uuauuaauugaucccauag

SEQ ID NO: 1740764 - RNA, 19 nt, Artificial Sequence
  Description of Artificial Sequence: Synthetic oligonucleotide
aacucuuggagcuacuucg

SEQ ID NO: 1740765 - RNA, 19 nt, Artificial Sequence
  Description of Artificial Sequence: Synthetic oligonucleotide
auguaauaggauuauaagg

SEQ ID NO: 1740766 - RNA, 19 nt, Artificial Sequence
  Description of Artificial Sequence: Synthetic oligonucleotide
uuauaaauagagacggagg

SEQ ID NO: 1740767 - RNA, 19 nt, Artificial Sequence
  Description of Artificial Sequence: Synthetic oligonucleotide
uuugauaucacuuacucau

SEQ ID NO: 1740768 - RNA, 19 nt, Artificial Sequence
  Description of Artificial Sequence: Synthetic oligonucleotide
uagauuaauauuaaaauua

SEQ ID NO: 1740769 - RNA, 19 nt, Artificial Sequence
  Description of Artificial Sequence: Synthetic oligonucleotide
ugaaacaaauacaacagga

SEQ ID NO: 1740770 - RNA, 19 nt, Artificial Sequence
  Description of Artificial Sequence: Synthetic oligonucleotide
uguaaagugucuuaacuag

SEQ ID NO: 1740771 - RNA, 19 nt, Artificial Sequence
  Description of Artificial Sequence: Synthetic oligonucleotide
auuuugauaucacuuacuc

SEQ ID NO: 1740772 - RNA, 19 nt, Artificial Sequence
  Description of Artificial Sequence: Synthetic oligonucleotide
uauguaauaggauuauaag

SEQ ID NO: 1740773 - RNA, 19 nt, Artificial Sequence
  Description of Artificial Sequence: Synthetic oligonucleotide
aaaacguuacuuuuauuug

SEQ ID NO: 1740774 - RNA, 19 nt, Artificial Sequence
  Description of Artificial Sequence: Synthetic oligonucleotide
auaucuaauauucaaagaa

SEQ ID NO: 1740775 - RNA, 19 nt, Artificial Sequence
  Description of Artificial Sequence: Synthetic oligonucleotide
cuaauauucaaagaaaaug

SEQ ID NO: 1740776 - RNA, 19 nt, Artificial Sequence
  Description of Artificial Sequence: Synthetic oligonucleotide
auuaauugaucccauaggu

SEQ ID NO: 1740777 - RNA, 19 nt, Artificial Sequence
  Description of Artificial Sequence: Synthetic oligonucleotide
guuucuacuauguaauagg

SEQ ID NO: 1740778 - RNA, 19 nt, Artificial Sequence
  Description of Artificial Sequence: Synthetic oligonucleotide
acacauguagugcagacac

SEQ ID NO: 1740779 - RNA, 19 nt, Artificial Sequence
  Description of Artificial Sequence: Synthetic oligonucleotide
uaauuagaagucaugauau

SEQ ID NO: 1740780 - RNA, 19 nt, Artificial Sequence
  Description of Artificial Sequence: Synthetic oligonucleotide
caaauaaacacauguagug

SEQ ID NO: 1740781 - RNA, 19 nt, Artificial Sequence
  Description of Artificial Sequence: Synthetic oligonucleotide
ugauauuagagucuauucu

SEQ ID NO: 1740782 - RNA, 19 nt, Artificial Sequence
  Description of Artificial Sequence: Synthetic oligonucleotide
agucagauccaauucuucc

SEQ ID NO: 1740783 - RNA, 19 nt, Artificial Sequence
  Description of Artificial Sequence: Synthetic oligonucleotide
aauaggauuauaaggccac

SEQ ID NO: 1740784 - RNA, 19 nt, Artificial Sequence
  Description of Artificial Sequence: Synthetic oligonucleotide
uccaauaaucuccaaagga

SEQ ID NO: 1740785 - RNA, 19 nt, Artificial Sequence
  Description of Artificial Sequence: Synthetic oligonucleotide
aaacacauguagugcagac

SEQ ID NO: 1740786 - RNA, 19 nt, Artificial Sequence
  Description of Artificial Sequence: Synthetic oligonucleotide
uuaacccauaugcaaaucc

SEQ ID NO: 1740787 - RNA, 19 nt, Artificial Sequence
  Description of Artificial Sequence: Synthetic oligonucleotide
caccauuauaaauagagac

SEQ ID NO: 1740788 - RNA, 19 nt, Artificial Sequence
  Description of Artificial Sequence: Synthetic oligonucleotide
cacuaaaucaggaacacug

SEQ ID NO: 1740789 - RNA, 19 nt, Artificial Sequence
  Description of Artificial Sequence: Synthetic oligonucleotide
augauauuagagucuauuc

SEQ ID NO: 1740790 - RNA, 19 nt, Artificial Sequence
  Description of Artificial Sequence: Synthetic oligonucleotide
aagugucuuaacuagauua

SEQ ID NO: 1740791 - RNA, 19 nt, Artificial Sequence
  Description of Artificial Sequence: Synthetic oligonucleotide
acuaauaaaugcuacagua

SEQ ID NO: 1740792 - RNA, 19 nt, Artificial Sequence
  Description of Artificial Sequence: Synthetic oligonucleotide
auagguauaauuagaaguc

SEQ ID NO: 1740793 - RNA, 19 nt, Artificial Sequence
  Description of Artificial Sequence: Synthetic oligonucleotide
uaauugaucccauagguau

SEQ ID NO: 1740794 - RNA, 19 nt, Artificial Sequence
  Description of Artificial Sequence: Synthetic oligonucleotide
gucaccauuauaaauagag

SEQ ID NO: 1740795 - RNA, 19 nt, Artificial Sequence
  Description of Artificial Sequence: Synthetic oligonucleotide
auaauuagaagucaugaua

SEQ ID NO: 1740796 - RNA, 19 nt, Artificial Sequence
  Description of Artificial Sequence: Synthetic oligonucleotide
aaacguuacuuuuauuuga

SEQ ID NO: 1740797 - RNA, 19 nt, Artificial Sequence
  Description of Artificial Sequence: Synthetic oligonucleotide
uauacuauuuauaucuaau

SEQ ID NO: 1740798 - RNA, 19 nt, Artificial Sequence
  Description of Artificial Sequence: Synthetic oligonucleotide
aauauagauccccaaucca

SEQ ID NO: 1740799 - RNA, 19 nt, Artificial Sequence
  Description of Artificial Sequence: Synthetic oligonucleotide
cacaauauuccuuugggac

SEQ ID NO: 1740800 - RNA, 19 nt, Artificial Sequence
  Description of Artificial Sequence: Synthetic oligonucleotide
cuuaacuagauuaauauua

SEQ ID NO: 1740801 - RNA, 19 nt, Artificial Sequence
  Description of Artificial Sequence: Synthetic oligonucleotide
uuauaaggccacaauauuc

SEQ ID NO: 1740802 - RNA, 19 nt, Artificial Sequence
  Description of Artificial Sequence: Synthetic oligonucleotide
ucaguuaucugucacaguu

SEQ ID NO: 1740803 - RNA, 19 nt, Artificial Sequence
  Description of Artificial Sequence: Synthetic oligonucleotide
ugagacagcaacagagacg

SEQ ID NO: 1740804 - RNA, 19 nt, Artificial Sequence
  Description of Artificial Sequence: Synthetic oligonucleotide
uaucuaauauucaaagaaa

SEQ ID NO: 1740805 - RNA, 19 nt, Artificial Sequence
  Description of Artificial Sequence: Synthetic oligonucleotide
uuagagucuauucuguuuc

SEQ ID NO: 1740806 - RNA, 19 nt, Artificial Sequence
  Description of Artificial Sequence: Synthetic oligonucleotide
uuaacuagauuaauauuaa

SEQ ID NO: 1740807 - RNA, 19 nt, Artificial Sequence
  Description of Artificial Sequence: Synthetic oligonucleotide
aacuagauuaauauuaaaa

SEQ ID NO: 1740808 - RNA, 19 nt, Artificial Sequence
  Description of Artificial Sequence: Synthetic oligonucleotide
aaguguaaagugucuuaac

SEQ ID NO: 1740809 - RNA, 19 nt, Artificial Sequence
  Description of Artificial Sequence: Synthetic oligonucleotide
aggaacacugcauuuacag

SEQ ID NO: 1740810 - RNA, 19 nt, Artificial Sequence
  Description of Artificial Sequence: Synthetic oligonucleotide
aaauccaauaaucuccaaa

SEQ ID NO: 1740811 - RNA, 19 nt, Artificial Sequence
  Description of Artificial Sequence: Synthetic oligonucleotide
uguacuaauaaaugcuaca

SEQ ID NO: 1740812 - RNA, 19 nt, Artificial Sequence
  Description of Artificial Sequence: Synthetic oligonucleotide
ucugcgacaugguagcucg

SEQ ID NO: 1740813 - RNA, 19 nt, Artificial Sequence
  Description of Artificial Sequence: Synthetic oligonucleotide
aaauagacaguuucuacua

SEQ ID NO: 1740814 - RNA, 19 nt, Artificial Sequence
  Description of Artificial Sequence: Synthetic oligonucleotide
uaaauagagacggaggcug

SEQ ID NO: 1740815 - RNA, 19 nt, Artificial Sequence
  Description of Artificial Sequence: Synthetic oligonucleotide
uuuugaaguguaaaguguc

SEQ ID NO: 1740816 - RNA, 19 nt, Artificial Sequence
  Description of Artificial Sequence: Synthetic oligonucleotide
aguguaaagugucuuaacu

SEQ ID NO: 1740817 - RNA, 19 nt, Artificial Sequence
  Description of Artificial Sequence: Synthetic oligonucleotide
ucuaauauucaaagaaaau

SEQ ID NO: 1740818 - RNA, 19 nt, Artificial Sequence
  Description of Artificial Sequence: Synthetic oligonucleotide
acagugagaacucuuggag

SEQ ID NO: 1740819 - RNA, 19 nt, Artificial Sequence
  Description of Artificial Sequence: Synthetic oligonucleotide
caauauagauccccaaucc

SEQ ID NO: 1740820 - RNA, 19 nt, Artificial Sequence
  Description of Artificial Sequence: Synthetic oligonucleotide
auaugcaaauccaauaauc

SEQ ID NO: 1740821 - RNA, 19 nt, Artificial Sequence
  Description of Artificial Sequence: Synthetic oligonucleotide
uagauccccaauccaaugg

SEQ ID NO: 1740822 - RNA, 19 nt, Artificial Sequence
  Description of Artificial Sequence: Synthetic oligonucleotide
accauuauaaauagagacg

SEQ ID NO: 1740823 - RNA, 19 nt, Artificial Sequence
  Description of Artificial Sequence: Synthetic oligonucleotide
ugauuuugauaucacuuac

SEQ ID NO: 1740824 - RNA, 19 nt, Artificial Sequence
  Description of Artificial Sequence: Synthetic oligonucleotide
uuucuggccgacuugacca

SEQ ID NO: 1740825 - RNA, 19 nt, Artificial Sequence
  Description of Artificial Sequence: Synthetic oligonucleotide
guaauaggauuauaaggcc

SEQ ID NO: 1740826 - RNA, 19 nt, Artificial Sequence
  Description of Artificial Sequence: Synthetic oligonucleotide
ucugacaugcuuauuaauu

SEQ ID NO: 1740827 - RNA, 19 nt, Artificial Sequence
  Description of Artificial Sequence: Synthetic oligonucleotide
agauccccaauccaauggc

SEQ ID NO: 1740828 - RNA, 19 nt, Artificial Sequence
  Description of Artificial Sequence: Synthetic oligonucleotide
aaugcuacaguaggcauca

SEQ ID NO: 1740829 - RNA, 19 nt, Artificial Sequence
  Description of Artificial Sequence: Synthetic oligonucleotide
uuaaugauuuugauaucac

SEQ ID NO: 1740830 - RNA, 19 nt, Artificial Sequence
  Description of Artificial Sequence: Synthetic oligonucleotide
uauaauuagaagucaugau

SEQ ID NO: 1740831 - RNA, 19 nt, Artificial Sequence
  Description of Artificial Sequence: Synthetic oligonucleotide
guacuaauaaaugcuacag

SEQ ID NO: 1740832 - RNA, 19 nt, Artificial Sequence
  Description of Artificial Sequence: Synthetic oligonucleotide
ucuggguauggauuaaccc

SEQ ID NO: 1740833 - RNA, 19 nt, Artificial Sequence
  Description of Artificial Sequence: Synthetic oligonucleotide
ucuccaaaggauuuggcaa

SEQ ID NO: 1740834 - RNA, 19 nt, Artificial Sequence
  Description of Artificial Sequence: Synthetic oligonucleotide
uuuugauaucacuuacuca

SEQ ID NO: 1740835 - RNA, 19 nt, Artificial Sequence
  Description of Artificial Sequence: Synthetic oligonucleotide
ugaagugcaguucuaccca

SEQ ID NO: 1740836 - RNA, 19 nt, Artificial Sequence
  Description of Artificial Sequence: Synthetic oligonucleotide
uuaucugucacaguucaga

SEQ ID NO: 1740837 - RNA, 19 nt, Artificial Sequence
  Description of Artificial Sequence: Synthetic oligonucleotide
ugcauuuacagaacaaaua

SEQ ID NO: 1740838 - RNA, 19 nt, Artificial Sequence
  Description of Artificial Sequence: Synthetic oligonucleotide
cugaagugcaguucuaccc

SEQ ID NO: 1740839 - RNA, 19 nt, Artificial Sequence
  Description of Artificial Sequence: Synthetic oligonucleotide
uggauuaacccauaugcaa

SEQ ID NO: 1740840 - RNA, 19 nt, Artificial Sequence
  Description of Artificial Sequence: Synthetic oligonucleotide
gucagauccaauucuuccg

SEQ ID NO: 1740841 - RNA, 19 nt, Artificial Sequence
  Description of Artificial Sequence: Synthetic oligonucleotide
acaaaagucagauccaauu

SEQ ID NO: 1740842 - RNA, 19 nt, Artificial Sequence
  Description of Artificial Sequence: Synthetic oligonucleotide
cuugaccaaucccauaucc

SEQ ID NO: 1740843 - RNA, 19 nt, Artificial Sequence
  Description of Artificial Sequence: Synthetic oligonucleotide
cauagguauaauuagaagu

SEQ ID NO: 1740844 - RNA, 19 nt, Artificial Sequence
  Description of Artificial Sequence: Synthetic oligonucleotide
acuaaaucaggaacacugc

SEQ ID NO: 1740845 - RNA, 19 nt, Artificial Sequence
  Description of Artificial Sequence: Synthetic oligonucleotide
gaagucaugauauuagagu

SEQ ID NO: 1740846 - RNA, 19 nt, Artificial Sequence
  Description of Artificial Sequence: Synthetic oligonucleotide
ugcuuauuaauugauccca

SEQ ID NO: 1740847 - RNA, 19 nt, Artificial Sequence
  Description of Artificial Sequence: Synthetic oligonucleotide
aaaugcuacaguaggcauc

SEQ ID NO: 1740848 - RNA, 19 nt, Artificial Sequence
  Description of Artificial Sequence: Synthetic oligonucleotide
uuugaaguguaaagugucu

SEQ ID NO: 1740849 - RNA, 19 nt, Artificial Sequence
  Description of Artificial Sequence: Synthetic oligonucleotide
gauaucuuguggugucugg

SEQ ID NO: 1740850 - RNA, 19 nt, Artificial Sequence
  Description of Artificial Sequence: Synthetic oligonucleotide
uagacaguuucuacuaugu

SEQ ID NO: 1740851 - RNA, 19 nt, Artificial Sequence
  Description of Artificial Sequence: Synthetic oligonucleotide
aguuucuacuauguaauag

SEQ ID NO: 1740852 - RNA, 19 nt, Artificial Sequence
  Description of Artificial Sequence: Synthetic oligonucleotide
augucaccauuauaaauag

SEQ ID NO: 1740853 - RNA, 19 nt, Artificial Sequence
  Description of Artificial Sequence: Synthetic oligonucleotide
ucaccauuauaaauagaga

SEQ ID NO: 1740854 - RNA, 19 nt, Artificial Sequence
  Description of Artificial Sequence: Synthetic oligonucleotide
aaaaggugcuaguggaagu

SEQ ID NO: 1740855 - RNA, 19 nt, Artificial Sequence
  Description of Artificial Sequence: Synthetic oligonucleotide
aucccauagguauaauuag

SEQ ID NO: 1740856 - RNA, 19 nt, Artificial Sequence
  Description of Artificial Sequence: Synthetic oligonucleotide
ucagaaagucugcugagaa

SEQ ID NO: 1740857 - RNA, 19 nt, Artificial Sequence
  Description of Artificial Sequence: Synthetic oligonucleotide
ugugugaacaaaagucaga

SEQ ID NO: 1740858 - RNA, 19 nt, Artificial Sequence
  Description of Artificial Sequence: Synthetic oligonucleotide
guauaauuagaagucauga

SEQ ID NO: 1740859 - RNA, 19 nt, Artificial Sequence
  Description of Artificial Sequence: Synthetic oligonucleotide
cagacaugaauccucacug

SEQ ID NO: 1740860 - RNA, 19 nt, Artificial Sequence
  Description of Artificial Sequence: Synthetic oligonucleotide
ugauaucacuuacucauuc

SEQ ID NO: 1740861 - RNA, 19 nt, Artificial Sequence
  Description of Artificial Sequence: Synthetic oligonucleotide
ugucuuaacuagauuaaua

SEQ ID NO: 1740862 - RNA, 19 nt, Artificial Sequence
  Description of Artificial Sequence: Synthetic oligonucleotide
uuaauugaucccauaggua

SEQ ID NO: 1740863 - RNA, 19 nt, Artificial Sequence
  Description of Artificial Sequence: Synthetic oligonucleotide
aaucccauauccaaucuga

SEQ ID NO: 1740864 - RNA, 19 nt, Artificial Sequence
  Description of Artificial Sequence: Synthetic oligonucleotide
aguaguugugcgcuucggg

SEQ ID NO: 1740865 - RNA, 19 nt, Artificial Sequence
  Description of Artificial Sequence: Synthetic oligonucleotide
auagacaguuucuacuaug

SEQ ID NO: 1740866 - RNA, 19 nt, Artificial Sequence
  Description of Artificial Sequence: Synthetic oligonucleotide
ucuagucuuuuaaaauaga

SEQ ID NO: 1740867 - RNA, 19 nt, Artificial Sequence
  Description of Artificial Sequence: Synthetic oligonucleotide
ugcuaguggaaguugucag

SEQ ID NO: 1740868 - RNA, 19 nt, Artificial Sequence
  Description of Artificial Sequence: Synthetic oligonucleotide
agugcagacacccaaggau

SEQ ID NO: 1740869 - RNA, 19 nt, Artificial Sequence
  Description of Artificial Sequence: Synthetic oligonucleotide
ucuuccgucaaaaggugcu

SEQ ID NO: 1740870 - RNA, 19 nt, Artificial Sequence
  Description of Artificial Sequence: Synthetic oligonucleotide
ugacaugcuuauuaauuga

SEQ ID NO: 1740871 - RNA, 19 nt, Artificial Sequence
  Description of Artificial Sequence: Synthetic oligonucleotide
gaggcugguacacugcucc

SEQ ID NO: 1740872 - RNA, 19 nt, Artificial Sequence
  Description of Artificial Sequence: Synthetic oligonucleotide
aaguugucaggcgucuccc

SEQ ID NO: 1740873 - RNA, 19 nt, Artificial Sequence
  Description of Artificial Sequence: Synthetic oligonucleotide
cacccaaggaucaugcuag

SEQ ID NO: 1740874 - RNA, 19 nt, Artificial Sequence
  Description of Artificial Sequence: Synthetic oligonucleotide
aacacugcauuuacagaac

SEQ ID NO: 1740875 - RNA, 19 nt, Artificial Sequence
  Description of Artificial Sequence: Synthetic oligonucleotide
gacaugaauccucacugug

SEQ ID NO: 1740876 - RNA, 19 nt, Artificial Sequence
  Description of Artificial Sequence: Synthetic oligonucleotide
uuuauacuauuuauaucua

SEQ ID NO: 1740877 - RNA, 19 nt, Artificial Sequence
  Description of Artificial Sequence: Synthetic oligonucleotide
aauguacuaauaaaugcua

SEQ ID NO: 1740878 - RNA, 19 nt, Artificial Sequence
  Description of Artificial Sequence: Synthetic oligonucleotide
aauagacaguuucuacuau

SEQ ID NO: 1740879 - RNA, 19 nt, Artificial Sequence
  Description of Artificial Sequence: Synthetic oligonucleotide
uuucucuccaaagcugugg

SEQ ID NO: 1740880 - RNA, 19 nt, Artificial Sequence
  Description of Artificial Sequence: Synthetic oligonucleotide
uguuucacuaaaucaggaa

SEQ ID NO: 1740881 - RNA, 19 nt, Artificial Sequence
  Description of Artificial Sequence: Synthetic oligonucleotide
ucaggaacacugcauuuac

SEQ ID NO: 1740882 - RNA, 19 nt, Artificial Sequence
  Description of Artificial Sequence: Synthetic oligonucleotide
uauagauccccaauccaau

SEQ ID NO: 1740883 - RNA, 19 nt, Artificial Sequence
  Description of Artificial Sequence: Synthetic oligonucleotide
auuauaaggccacaauauu

SEQ ID NO: 1740884 - RNA, 19 nt, Artificial Sequence
  Description of Artificial Sequence: Synthetic oligonucleotide
ugaccaaucccauauccaa

SEQ ID NO: 1740885 - RNA, 19 nt, Artificial Sequence
  Description of Artificial Sequence: Synthetic oligonucleotide
uauuugaacucaccugagu

SEQ ID NO: 1740886 - RNA, 19 nt, Artificial Sequence
  Description of Artificial Sequence: Synthetic oligonucleotide
auguacuaauaaaugcuac

SEQ ID NO: 1740887 - RNA, 19 nt, Artificial Sequence
  Description of Artificial Sequence: Synthetic oligonucleotide
ucccauagguauaauuaga

SEQ ID NO: 1740888 - RNA, 19 nt, Artificial Sequence
  Description of Artificial Sequence: Synthetic oligonucleotide
uugaccaaucccauaucca

SEQ ID NO: 1740889 - RNA, 19 nt, Artificial Sequence
  Description of Artificial Sequence: Synthetic oligonucleotide
ucuuaacuagauuaauauu

SEQ ID NO: 1740890 - RNA, 19 nt, Artificial Sequence
  Description of Artificial Sequence: Synthetic oligonucleotide
aguucagacaugaauccuc

SEQ ID NO: 1740891 - RNA, 19 nt, Artificial Sequence
  Description of Artificial Sequence: Synthetic oligonucleotide
caacaggauauauacagca

SEQ ID NO: 1740892 - RNA, 19 nt, Artificial Sequence
  Description of Artificial Sequence: Synthetic oligonucleotide
cuuguggugucugggaucg

SEQ ID NO: 1740893 - RNA, 19 nt, Artificial Sequence
  Description of Artificial Sequence: Synthetic oligonucleotide
agucuauucuguuucacua

SEQ ID NO: 1740894 - RNA, 19 nt, Artificial Sequence
  Description of Artificial Sequence: Synthetic oligonucleotide
aguggaaguugucaggcgu

SEQ ID NO: 1740895 - RNA, 19 nt, Artificial Sequence
  Description of Artificial Sequence: Synthetic oligonucleotide
gucaaaaggugcuagugga

SEQ ID NO: 1740896 - RNA, 19 nt, Artificial Sequence
  Description of Artificial Sequence: Synthetic oligonucleotide
ucauuucuagucuuuuaaa

SEQ ID NO: 1740897 - RNA, 19 nt, Artificial Sequence
  Description of Artificial Sequence: Synthetic oligonucleotide
aauccaauggccagcagau

SEQ ID NO: 1740898 - RNA, 19 nt, Artificial Sequence
  Description of Artificial Sequence: Synthetic oligonucleotide
cuaguggaaguugucaggc

SEQ ID NO: 1740899 - RNA, 19 nt, Artificial Sequence
  Description of Artificial Sequence: Synthetic oligonucleotide
cauaugccuggguugacag

SEQ ID NO: 1740900 - RNA, 19 nt, Artificial Sequence
  Description of Artificial Sequence: Synthetic oligonucleotide
aauccucacugugugaaca

SEQ ID NO: 1740901 - RNA, 19 nt, Artificial Sequence
  Description of Artificial Sequence: Synthetic oligonucleotide
guauggauuaacccauaug

SEQ ID NO: 1740902 - RNA, 19 nt, Artificial Sequence
  Description of Artificial Sequence: Synthetic oligonucleotide
uggguauggauuaacccau

SEQ ID NO: 1740903 - RNA, 19 nt, Artificial Sequence
  Description of Artificial Sequence: Synthetic oligonucleotide
cuggguauggauuaaccca

SEQ ID NO: 1740904 - RNA, 19 nt, Artificial Sequence
  Description of Artificial Sequence: Synthetic oligonucleotide
ucacuuacucauucuuuug

SEQ ID NO: 1740905 - RNA, 19 nt, Artificial Sequence
  Description of Artificial Sequence: Synthetic oligonucleotide
ugaaguguaaagugucuua

SEQ ID NO: 1740906 - RNA, 19 nt, Artificial Sequence
  Description of Artificial Sequence: Synthetic oligonucleotide
uuugggaccaaacccuuua

SEQ ID NO: 1740907 - RNA, 19 nt, Artificial Sequence
  Description of Artificial Sequence: Synthetic oligonucleotide
caggcgucucccaauauag

SEQ ID NO: 1740908 - RNA, 19 nt, Artificial Sequence
  Description of Artificial Sequence: Synthetic oligonucleotide
uucuacuauguaauaggau

SEQ ID NO: 1740909 - RNA, 19 nt, Artificial Sequence
  Description of Artificial Sequence: Synthetic oligonucleotide
uucacuaaaucaggaacac

SEQ ID NO: 1740910 - RNA, 19 nt, Artificial Sequence
  Description of Artificial Sequence: Synthetic oligonucleotide
gaucccauagguauaauua

SEQ ID NO: 1740911 - RNA, 19 nt, Artificial Sequence
  Description of Artificial Sequence: Synthetic oligonucleotide
acagagacggaaggaaaac

SEQ ID NO: 1740912 - RNA, 19 nt, Artificial Sequence
  Description of Artificial Sequence: Synthetic oligonucleotide
ugaauccucacugugugaa

SEQ ID NO: 1740913 - RNA, 19 nt, Artificial Sequence
  Description of Artificial Sequence: Synthetic oligonucleotide
auagauccccaauccaaug

SEQ ID NO: 1740914 - RNA, 19 nt, Artificial Sequence
  Description of Artificial Sequence: Synthetic oligonucleotide
cagugagaacucuuggagc

SEQ ID NO: 1740915 - RNA, 19 nt, Artificial Sequence
  Description of Artificial Sequence: Synthetic oligonucleotide
caaaaggugcuaguggaag

SEQ ID NO: 1740916 - RNA, 19 nt, Artificial Sequence
  Description of Artificial Sequence: Synthetic oligonucleotide
aucacuuacucauucuuuu

SEQ ID NO: 1740917 - RNA, 19 nt, Artificial Sequence
  Description of Artificial Sequence: Synthetic oligonucleotide
agacacccaaggaucaugc

SEQ ID NO: 1740918 - RNA, 19 nt, Artificial Sequence
  Description of Artificial Sequence: Synthetic oligonucleotide
gauuauaaggccacaauau

SEQ ID NO: 1740919 - RNA, 19 nt, Artificial Sequence
  Description of Artificial Sequence: Synthetic oligonucleotide
ugguacacugcucccauuc

SEQ ID NO: 1740920 - RNA, 19 nt, Artificial Sequence
  Description of Artificial Sequence: Synthetic oligonucleotide
agaguaguugugcgcuucg

SEQ ID NO: 1740921 - RNA, 19 nt, Artificial Sequence
  Description of Artificial Sequence: Synthetic oligonucleotide
acaguuucuacuauguaau

SEQ ID NO: 1740922 - RNA, 19 nt, Artificial Sequence
  Description of Artificial Sequence: Synthetic oligonucleotide
agaacaugcuauagaaaag

SEQ ID NO: 1740923 - RNA, 19 nt, Artificial Sequence
  Description of Artificial Sequence: Synthetic oligonucleotide
gccacaauauuccuuuggg

SEQ ID NO: 1740924 - RNA, 19 nt, Artificial Sequence
  Description of Artificial Sequence: Synthetic oligonucleotide
gaagugcaguucuacccag

SEQ ID NO: 1740925 - RNA, 19 nt, Artificial Sequence
  Description of Artificial Sequence: Synthetic oligonucleotide
auaaauagagacggaggcu

SEQ ID NO: 1740926 - RNA, 19 nt, Artificial Sequence
  Description of Artificial Sequence: Synthetic oligonucleotide
cucuggguauggauuaacc

SEQ ID NO: 1740927 - RNA, 19 nt, Artificial Sequence
  Description of Artificial Sequence: Synthetic oligonucleotide
augcugagaguaguugugc

SEQ ID NO: 1740928 - RNA, 19 nt, Artificial Sequence
  Description of Artificial Sequence: Synthetic oligonucleotide
ucaaaaggugcuaguggaa

SEQ ID NO: 1740929 - RNA, 19 nt, Artificial Sequence
  Description of Artificial Sequence: Synthetic oligonucleotide
gucuuaacuagauuaauau

SEQ ID NO: 1740930 - RNA, 19 nt, Artificial Sequence
  Description of Artificial Sequence: Synthetic oligonucleotide
auaacgcugguguuucuca

SEQ ID NO: 1740931 - RNA, 19 nt, Artificial Sequence
  Description of Artificial Sequence: Synthetic oligonucleotide
acaugcuuauuaauugauc

SEQ ID NO: 1740932 - RNA, 19 nt, Artificial Sequence
  Description of Artificial Sequence: Synthetic oligonucleotide
gaacucaccugaguaagug

SEQ ID NO: 1740933 - RNA, 19 nt, Artificial Sequence
  Description of Artificial Sequence: Synthetic oligonucleotide
cucaccugaguaagugugg

SEQ ID NO: 1740934 - RNA, 19 nt, Artificial Sequence
  Description of Artificial Sequence: Synthetic oligonucleotide
aggauuauaaggccacaau

SEQ ID NO: 1740935 - RNA, 19 nt, Artificial Sequence
  Description of Artificial Sequence: Synthetic oligonucleotide
aacacauguagugcagaca

SEQ ID NO: 1740936 - RNA, 19 nt, Artificial Sequence
  Description of Artificial Sequence: Synthetic oligonucleotide
gaguaagugugggacaaug

SEQ ID NO: 1740937 - RNA, 19 nt, Artificial Sequence
  Description of Artificial Sequence: Synthetic oligonucleotide
acugcauuuacagaacaaa

SEQ ID NO: 1740938 - RNA, 19 nt, Artificial Sequence
  Description of Artificial Sequence: Synthetic oligonucleotide
acuuacucauucuuuugaa

SEQ ID NO: 1740939 - RNA, 19 nt, Artificial Sequence
  Description of Artificial Sequence: Synthetic oligonucleotide
ucaugcuagcucuucaguu

SEQ ID NO: 1740940 - RNA, 19 nt, Artificial Sequence
  Description of Artificial Sequence: Synthetic oligonucleotide
agacggaaggaaaaccuuc

SEQ ID NO: 1740941 - RNA, 19 nt, Artificial Sequence
  Description of Artificial Sequence: Synthetic oligonucleotide
cuaaaucaggaacacugca

SEQ ID NO: 1740942 - RNA, 19 nt, Artificial Sequence
  Description of Artificial Sequence: Synthetic oligonucleotide
aacguuacuuuuauuugaa

SEQ ID NO: 1740943 - RNA, 19 nt, Artificial Sequence
  Description of Artificial Sequence: Synthetic oligonucleotide
uagagacggaggcugguac

SEQ ID NO: 1740944 - RNA, 19 nt, Artificial Sequence
  Description of Artificial Sequence: Synthetic oligonucleotide
auuaacccauaugcaaauc

SEQ ID NO: 1740945 - RNA, 19 nt, Artificial Sequence
  Description of Artificial Sequence: Synthetic oligonucleotide
auauagauccccaauccaa

SEQ ID NO: 1740946 - RNA, 19 nt, Artificial Sequence
  Description of Artificial Sequence: Synthetic oligonucleotide
agagucuauucuguuucac

SEQ ID NO: 1740947 - RNA, 19 nt, Artificial Sequence
  Description of Artificial Sequence: Synthetic oligonucleotide
aggauauauacagcauguc

SEQ ID NO: 1740948 - RNA, 19 nt, Artificial Sequence
  Description of Artificial Sequence: Synthetic oligonucleotide
uacuucguccagauucaug

SEQ ID NO: 1740949 - RNA, 19 nt, Artificial Sequence
  Description of Artificial Sequence: Synthetic oligonucleotide
aaagucagauccaauucuu

SEQ ID NO: 1740950 - RNA, 19 nt, Artificial Sequence
  Description of Artificial Sequence: Synthetic oligonucleotide
agugcaguucuacccagga

SEQ ID NO: 1740951 - RNA, 19 nt, Artificial Sequence
  Description of Artificial Sequence: Synthetic oligonucleotide
uucauaacgcugguguuuc

SEQ ID NO: 1740952 - RNA, 19 nt, Artificial Sequence
  Description of Artificial Sequence: Synthetic oligonucleotide
ugugaacaaaagucagauc

SEQ ID NO: 1740953 - RNA, 19 nt, Artificial Sequence
  Description of Artificial Sequence: Synthetic oligonucleotide
ugguagcucggcagaagag

SEQ ID NO: 1740954 - RNA, 19 nt, Artificial Sequence
  Description of Artificial Sequence: Synthetic oligonucleotide
gacggaggcugguacacug

SEQ ID NO: 1740955 - RNA, 19 nt, Artificial Sequence
  Description of Artificial Sequence: Synthetic oligonucleotide
uguggugucugggaucgag

SEQ ID NO: 1740956 - RNA, 19 nt, Artificial Sequence
  Description of Artificial Sequence: Synthetic oligonucleotide
gguauaauuagaagucaug

SEQ ID NO: 1740957 - RNA, 19 nt, Artificial Sequence
  Description of Artificial Sequence: Synthetic oligonucleotide
guguaaagugucuuaacua

SEQ ID NO: 1740958 - RNA, 19 nt, Artificial Sequence
  Description of Artificial Sequence: Synthetic oligonucleotide
cuuuugaaguguaaagugu

SEQ ID NO: 1740959 - RNA, 19 nt, Artificial Sequence
  Description of Artificial Sequence: Synthetic oligonucleotide
aucaugcuagcucuucagu

SEQ ID NO: 1740960 - RNA, 19 nt, Artificial Sequence
  Description of Artificial Sequence: Synthetic oligonucleotide
cagaacaaauaaacacaug

SEQ ID NO: 1740961 - RNA, 19 nt, Artificial Sequence
  Description of Artificial Sequence: Synthetic oligonucleotide
cuacuauguaauaggauua

SEQ ID NO: 1740962 - RNA, 19 nt, Artificial Sequence
  Description of Artificial Sequence: Synthetic oligonucleotide
guuaaaacguuacuuuuau

SEQ ID NO: 1740963 - RNA, 19 nt, Artificial Sequence
  Description of Artificial Sequence: Synthetic oligonucleotide
agacaugaauccucacugu

SEQ ID NO: 1740964 - RNA, 19 nt, Artificial Sequence
  Description of Artificial Sequence: Synthetic oligonucleotide
uggugucugggaucgaggu

SEQ ID NO: 1740965 - RNA, 19 nt, Artificial Sequence
  Description of Artificial Sequence: Synthetic oligonucleotide
acucauucuuuugaagugu

SEQ ID NO: 1740966 - RNA, 19 nt, Artificial Sequence
  Description of Artificial Sequence: Synthetic oligonucleotide
ugagaacucuuggagcuac

SEQ ID NO: 1740967 - RNA, 19 nt, Artificial Sequence
  Description of Artificial Sequence: Synthetic oligonucleotide
uagagucuauucuguuuca

SEQ ID NO: 1740968 - RNA, 19 nt, Artificial Sequence
  Description of Artificial Sequence: Synthetic oligonucleotide
uacuauguaauaggauuau

SEQ ID NO: 1740969 - RNA, 19 nt, Artificial Sequence
  Description of Artificial Sequence: Synthetic oligonucleotide
caaucccauauccaaucug

SEQ ID NO: 1740970 - RNA, 19 nt, Artificial Sequence
  Description of Artificial Sequence: Synthetic oligonucleotide
gacaugguagcucggcaga

SEQ ID NO: 1740971 - RNA, 19 nt, Artificial Sequence
  Description of Artificial Sequence: Synthetic oligonucleotide
guagcucggcagaagagcc

SEQ ID NO: 1740972 - RNA, 19 nt, Artificial Sequence
  Description of Artificial Sequence: Synthetic oligonucleotide
ccaauauagauccccaauc

SEQ ID NO: 1740973 - RNA, 19 nt, Artificial Sequence
  Description of Artificial Sequence: Synthetic oligonucleotide
acagaaucucuggguaugg

SEQ ID NO: 1740974 - RNA, 19 nt, Artificial Sequence
  Description of Artificial Sequence: Synthetic oligonucleotide
uuaaaacguuacuuuuauu

SEQ ID NO: 1740975 - RNA, 19 nt, Artificial Sequence
  Description of Artificial Sequence: Synthetic oligonucleotide
uaggauuauaaggccacaa

SEQ ID NO: 1740976 - RNA, 19 nt, Artificial Sequence
  Description of Artificial Sequence: Synthetic oligonucleotide
agugugggacaaugaaaca

SEQ ID NO: 1740977 - RNA, 19 nt, Artificial Sequence
  Description of Artificial Sequence: Synthetic oligonucleotide
agucaugauauuagagucu

SEQ ID NO: 1740978 - RNA, 19 nt, Artificial Sequence
  Description of Artificial Sequence: Synthetic oligonucleotide
aaggugcuaguggaaguug

SEQ ID NO: 1740979 - RNA, 19 nt, Artificial Sequence
  Description of Artificial Sequence: Synthetic oligonucleotide
cgucucccaauauagaucc

SEQ ID NO: 1740980 - RNA, 19 nt, Artificial Sequence
  Description of Artificial Sequence: Synthetic oligonucleotide
agugucuuaacuagauuaa

SEQ ID NO: 1740981 - RNA, 19 nt, Artificial Sequence
  Description of Artificial Sequence: Synthetic oligonucleotide
uugauaucacuuacucauu

SEQ ID NO: 1740982 - RNA, 19 nt, Artificial Sequence
  Description of Artificial Sequence: Synthetic oligonucleotide
agcucggcagaagagcccg

SEQ ID NO: 1740983 - RNA, 19 nt, Artificial Sequence
  Description of Artificial Sequence: Synthetic oligonucleotide
uggccgacuugaccaaucc

SEQ ID NO: 1740984 - RNA, 19 nt, Artificial Sequence
  Description of Artificial Sequence: Synthetic oligonucleotide
gaucgagguggacugucac

SEQ ID NO: 1740985 - RNA, 19 nt, Artificial Sequence
  Description of Artificial Sequence: Synthetic oligonucleotide
auggauuaacccauaugca

SEQ ID NO: 1740986 - RNA, 19 nt, Artificial Sequence
  Description of Artificial Sequence: Synthetic oligonucleotide
guugacagaaucucugggu

SEQ ID NO: 1740987 - RNA, 19 nt, Artificial Sequence
  Description of Artificial Sequence: Synthetic oligonucleotide
cacuuacucauucuuuuga

SEQ ID NO: 1740988 - RNA, 19 nt, Artificial Sequence
  Description of Artificial Sequence: Synthetic oligonucleotide
uugaaguguaaagugucuu

SEQ ID NO: 1740989 - RNA, 19 nt, Artificial Sequence
  Description of Artificial Sequence: Synthetic oligonucleotide
ggguugacagaaucucugg

SEQ ID NO: 1740990 - RNA, 19 nt, Artificial Sequence
  Description of Artificial Sequence: Synthetic oligonucleotide
cucccauucccauugcuga

SEQ ID NO: 1740991 - RNA, 19 nt, Artificial Sequence
  Description of Artificial Sequence: Synthetic oligonucleotide
ccauagguauaauuagaag

SEQ ID NO: 1740992 - RNA, 19 nt, Artificial Sequence
  Description of Artificial Sequence: Synthetic oligonucleotide
gcuacaguaggcaucaguc

SEQ ID NO: 1740993 - RNA, 19 nt, Artificial Sequence
  Description of Artificial Sequence: Synthetic oligonucleotide
uguuucagcucuguugaua

SEQ ID NO: 1740994 - RNA, 19 nt, Artificial Sequence
  Description of Artificial Sequence: Synthetic oligonucleotide
cuguuucacuaaaucagga

SEQ ID NO: 1740995 - RNA, 19 nt, Artificial Sequence
  Description of Artificial Sequence: Synthetic oligonucleotide
uguggcugucuguuucagc

SEQ ID NO: 1740996 - RNA, 19 nt, Artificial Sequence
  Description of Artificial Sequence: Synthetic oligonucleotide
caguuaucugucacaguuc

SEQ ID NO: 1740997 - RNA, 19 nt, Artificial Sequence
  Description of Artificial Sequence: Synthetic oligonucleotide
aauugaucccauagguaua

SEQ ID NO: 1740998 - RNA, 19 nt, Artificial Sequence
  Description of Artificial Sequence: Synthetic oligonucleotide
gacggaaggaaaaccuuca

SEQ ID NO: 1740999 - RNA, 19 nt, Artificial Sequence
  Description of Artificial Sequence: Synthetic oligonucleotide
aucuuguggugucugggau

SEQ ID NO: 1741000 - RNA, 19 nt, Artificial Sequence
  Description of Artificial Sequence: Synthetic oligonucleotide
gauuuugauaucacuuacu

SEQ ID NO: 1741001 - RNA, 19 nt, Artificial Sequence
  Description of Artificial Sequence: Synthetic oligonucleotide
caaggaucaugcuagcucu

SEQ ID NO: 1741002 - RNA, 19 nt, Artificial Sequence
  Description of Artificial Sequence: Synthetic oligonucleotide
caggauauauacagcaugu

SEQ ID NO: 1741003 - RNA, 19 nt, Artificial Sequence
  Description of Artificial Sequence: Synthetic oligonucleotide
augcuagcucuucaguuau

SEQ ID NO: 1741004 - RNA, 19 nt, Artificial Sequence
  Description of Artificial Sequence: Synthetic oligonucleotide
agagacggaggcugguaca

SEQ ID NO: 1741005 - RNA, 19 nt, Artificial Sequence
  Description of Artificial Sequence: Synthetic oligonucleotide
cagucugacaugcuuauua

SEQ ID NO: 1741006 - RNA, 19 nt, Artificial Sequence
  Description of Artificial Sequence: Synthetic oligonucleotide
gaauccucacugugugaac

SEQ ID NO: 1741007 - RNA, 19 nt, Artificial Sequence
  Description of Artificial Sequence: Synthetic oligonucleotide
cuuauuaauugaucccaua

SEQ ID NO: 1741008 - RNA, 19 nt, Artificial Sequence
  Description of Artificial Sequence: Synthetic oligonucleotide
aguaagugugggacaauga

SEQ ID NO: 1741009 - RNA, 19 nt, Artificial Sequence
  Description of Artificial Sequence: Synthetic oligonucleotide
ugcgacaugguagcucggc

SEQ ID NO: 1741010 - RNA, 19 nt, Artificial Sequence
  Description of Artificial Sequence: Synthetic oligonucleotide
gcugaagugcaguucuacc

SEQ ID NO: 1741011 - RNA, 19 nt, Artificial Sequence
  Description of Artificial Sequence: Synthetic oligonucleotide
agguauaauuagaagucau

SEQ ID NO: 1741012 - RNA, 19 nt, Artificial Sequence
  Description of Artificial Sequence: Synthetic oligonucleotide
gcuauagaaaagaggaaga

SEQ ID NO: 1741013 - RNA, 19 nt, Artificial Sequence
  Description of Artificial Sequence: Synthetic oligonucleotide
gaguaguugugcgcuucgg

SEQ ID NO: 1741014 - RNA, 19 nt, Artificial Sequence
  Description of Artificial Sequence: Synthetic oligonucleotide
ucccaauauagauccccaa

SEQ ID NO: 1741015 - RNA, 19 nt, Artificial Sequence
  Description of Artificial Sequence: Synthetic oligonucleotide
uugggaccaaacccuuuaa

SEQ ID NO: 1741016 - RNA, 19 nt, Artificial Sequence
  Description of Artificial Sequence: Synthetic oligonucleotide
acccuuuaaugauuuugau

SEQ ID NO: 1741017 - RNA, 19 nt, Artificial Sequence
  Description of Artificial Sequence: Synthetic oligonucleotide
gacuguuaaaacguuacuu

SEQ ID NO: 1741018 - RNA, 19 nt, Artificial Sequence
  Description of Artificial Sequence: Synthetic oligonucleotide
caugcuagcucuucaguua

SEQ ID NO: 1741019 - RNA, 19 nt, Artificial Sequence
  Description of Artificial Sequence: Synthetic oligonucleotide
gguagcucggcagaagagc

SEQ ID NO: 1741020 - RNA, 19 nt, Artificial Sequence
  Description of Artificial Sequence: Synthetic oligonucleotide
uugauaucuuguggugucu

SEQ ID NO: 1741021 - RNA, 19 nt, Artificial Sequence
  Description of Artificial Sequence: Synthetic oligonucleotide
gaccaaacccuuuaaugau

SEQ ID NO: 1741022 - RNA, 19 nt, Artificial Sequence
  Description of Artificial Sequence: Synthetic oligonucleotide
ucggcagaagagcccgagc

SEQ ID NO: 1741023 - RNA, 19 nt, Artificial Sequence
  Description of Artificial Sequence: Synthetic oligonucleotide
guaguugugcgcuucgggu

SEQ ID NO: 1741024 - RNA, 19 nt, Artificial Sequence
  Description of Artificial Sequence: Synthetic oligonucleotide
uagcucggcagaagagccc

SEQ ID NO: 1741025 - RNA, 19 nt, Artificial Sequence
  Description of Artificial Sequence: Synthetic oligonucleotide
ucaaggaggcagccuuuaa

SEQ ID NO: 1741026 - RNA, 19 nt, Artificial Sequence
  Description of Artificial Sequence: Synthetic oligonucleotide
ccaaggaucaugcuagcuc

SEQ ID NO: 1741027 - RNA, 19 nt, Artificial Sequence
  Description of Artificial Sequence: Synthetic oligonucleotide
caagaugcuuucaacuucu

SEQ ID NO: 1741028 - RNA, 19 nt, Artificial Sequence
  Description of Artificial Sequence: Synthetic oligonucleotide
gcugagaguaguugugcgc

SEQ ID NO: 1741029 - RNA, 19 nt, Artificial Sequence
  Description of Artificial Sequence: Synthetic oligonucleotide
uucagacaugaauccucac

SEQ ID NO: 1741030 - RNA, 19 nt, Artificial Sequence
  Description of Artificial Sequence: Synthetic oligonucleotide
augaauccucacuguguga

SEQ ID NO: 1741031 - RNA, 19 nt, Artificial Sequence
  Description of Artificial Sequence: Synthetic oligonucleotide
gugugggacaaugaaacaa

SEQ ID NO: 1741032 - RNA, 19 nt, Artificial Sequence
  Description of Artificial Sequence: Synthetic oligonucleotide
guucagacaugaauccuca

SEQ ID NO: 1741033 - RNA, 19 nt, Artificial Sequence
  Description of Artificial Sequence: Synthetic oligonucleotide
ucaugauauuagagucuau

SEQ ID NO: 1741034 - RNA, 19 nt, Artificial Sequence
  Description of Artificial Sequence: Synthetic oligonucleotide
uuggagcuacuucguccag

SEQ ID NO: 1741035 - RNA, 19 nt, Artificial Sequence
  Description of Artificial Sequence: Synthetic oligonucleotide
gugcaguucuacccaggag

SEQ ID NO: 1741036 - RNA, 19 nt, Artificial Sequence
  Description of Artificial Sequence: Synthetic oligonucleotide
cauaacgcugguguuucuc

SEQ ID NO: 1741037 - RNA, 19 nt, Artificial Sequence
  Description of Artificial Sequence: Synthetic oligonucleotide
cgucaaaaggugcuagugg

SEQ ID NO: 1741038 - RNA, 19 nt, Artificial Sequence
  Description of Artificial Sequence: Synthetic oligonucleotide
caucagucugacaugcuua

SEQ ID NO: 1741039 - RNA, 19 nt, Artificial Sequence
  Description of Artificial Sequence: Synthetic oligonucleotide
gugcagacacccaaggauc

SEQ ID NO: 1741040 - RNA, 19 nt, Artificial Sequence
  Description of Artificial Sequence: Synthetic oligonucleotide
guuaucugucacaguucag

SEQ ID NO: 1741041 - RNA, 19 nt, Artificial Sequence
  Description of Artificial Sequence: Synthetic oligonucleotide
auaggauuauaaggccaca

SEQ ID NO: 1741042 - RNA, 19 nt, Artificial Sequence
  Description of Artificial Sequence: Synthetic oligonucleotide
ggauuaacccauaugcaaa

SEQ ID NO: 1741043 - RNA, 19 nt, Artificial Sequence
  Description of Artificial Sequence: Synthetic oligonucleotide
gugugaacaaaagucagau

SEQ ID NO: 1741044 - RNA, 19 nt, Artificial Sequence
  Description of Artificial Sequence: Synthetic oligonucleotide
ccauaugcaaauccaauaa

SEQ ID NO: 1741045 - RNA, 19 nt, Artificial Sequence
  Description of Artificial Sequence: Synthetic oligonucleotide
acaguaggcaucagucuga

SEQ ID NO: 1741046 - RNA, 19 nt, Artificial Sequence
  Description of Artificial Sequence: Synthetic oligonucleotide
aucccauauccaaucugag

SEQ ID NO: 1741047 - RNA, 19 nt, Artificial Sequence
  Description of Artificial Sequence: Synthetic oligonucleotide
uggagcuacuucguccaga

SEQ ID NO: 1741048 - RNA, 19 nt, Artificial Sequence
  Description of Artificial Sequence: Synthetic oligonucleotide
guggugucugggaucgagg

SEQ ID NO: 1741049 - RNA, 19 nt, Artificial Sequence
  Description of Artificial Sequence: Synthetic oligonucleotide
gguacacugcucccauucc

SEQ ID NO: 1741050 - RNA, 19 nt, Artificial Sequence
  Description of Artificial Sequence: Synthetic oligonucleotide
gagaguaguugugcgcuuc

SEQ ID NO: 1741051 - RNA, 19 nt, Artificial Sequence
  Description of Artificial Sequence: Synthetic oligonucleotide
acuauguaauaggauuaua

SEQ ID NO: 1741052 - RNA, 19 nt, Artificial Sequence
  Description of Artificial Sequence: Synthetic oligonucleotide
cagcucuguugauaucuug

SEQ ID NO: 1741053 - RNA, 19 nt, Artificial Sequence
  Description of Artificial Sequence: Synthetic oligonucleotide
caugguagcucggcagaag

SEQ ID NO: 1741054 - RNA, 19 nt, Artificial Sequence
  Description of Artificial Sequence: Synthetic oligonucleotide
uugucaggcgucucccaau

SEQ ID NO: 1741055 - RNA, 19 nt, Artificial Sequence
  Description of Artificial Sequence: Synthetic oligonucleotide
acggaggcugguacacugc

SEQ ID NO: 1741056 - RNA, 19 nt, Artificial Sequence
  Description of Artificial Sequence: Synthetic oligonucleotide
ggaaaaccuucagaaaguc

SEQ ID NO: 1741057 - RNA, 19 nt, Artificial Sequence
  Description of Artificial Sequence: Synthetic oligonucleotide
ugucaaggaggcagccuuu

SEQ ID NO: 1741058 - RNA, 19 nt, Artificial Sequence
  Description of Artificial Sequence: Synthetic oligonucleotide
gacaugcuuauuaauugau

SEQ ID NO: 1741059 - RNA, 19 nt, Artificial Sequence
  Description of Artificial Sequence: Synthetic oligonucleotide
cuguuaaaacguuacuuuu

SEQ ID NO: 1741060 - RNA, 19 nt, Artificial Sequence
  Description of Artificial Sequence: Synthetic oligonucleotide
cagacacccaaggaucaug

SEQ ID NO: 1741061 - RNA, 19 nt, Artificial Sequence
  Description of Artificial Sequence: Synthetic oligonucleotide
acccauaugcaaauccaau

SEQ ID NO: 1741062 - RNA, 19 nt, Artificial Sequence
  Description of Artificial Sequence: Synthetic oligonucleotide
gugcuaguggaaguuguca

SEQ ID NO: 1741063 - RNA, 19 nt, Artificial Sequence
  Description of Artificial Sequence: Synthetic oligonucleotide
guugucaggcgucucccaa

SEQ ID NO: 1741064 - RNA, 19 nt, Artificial Sequence
  Description of Artificial Sequence: Synthetic oligonucleotide
caugauauuagagucuauu

SEQ ID NO: 1741065 - RNA, 19 nt, Artificial Sequence
  Description of Artificial Sequence: Synthetic oligonucleotide
ccaauaaucuccaaaggau

SEQ ID NO: 1741066 - RNA, 19 nt, Artificial Sequence
  Description of Artificial Sequence: Synthetic oligonucleotide
ucauaacgcugguguuucu

SEQ ID NO: 1741067 - RNA, 19 nt, Artificial Sequence
  Description of Artificial Sequence: Synthetic oligonucleotide
cugaguaagugugggacaa

SEQ ID NO: 1741068 - RNA, 19 nt, Artificial Sequence
  Description of Artificial Sequence: Synthetic oligonucleotide
ugagaguaguugugcgcuu

SEQ ID NO: 1741069 - RNA, 19 nt, Artificial Sequence
  Description of Artificial Sequence: Synthetic oligonucleotide
cugcagcaggccucagcgg

SEQ ID NO: 1741070 - RNA, 19 nt, Artificial Sequence
  Description of Artificial Sequence: Synthetic oligonucleotide
gccgacuugaccaauccca

SEQ ID NO: 1741071 - RNA, 19 nt, Artificial Sequence
  Description of Artificial Sequence: Synthetic oligonucleotide
cccauagguauaauuagaa

SEQ ID NO: 1741072 - RNA, 19 nt, Artificial Sequence
  Description of Artificial Sequence: Synthetic oligonucleotide
agaacucuuggagcuacuu

SEQ ID NO: 1741073 - RNA, 19 nt, Artificial Sequence
  Description of Artificial Sequence: Synthetic oligonucleotide
ggaucaugcuagcucuuca

SEQ ID NO: 1741074 - RNA, 19 nt, Artificial Sequence
  Description of Artificial Sequence: Synthetic oligonucleotide
aggugcuaguggaaguugu

SEQ ID NO: 1741075 - RNA, 19 nt, Artificial Sequence
  Description of Artificial Sequence: Synthetic oligonucleotide
uucuggccgacuugaccaa

SEQ ID NO: 1741076 - RNA, 19 nt, Artificial Sequence
  Description of Artificial Sequence: Synthetic oligonucleotide
aggccacaauauuccuuug

SEQ ID NO: 1741077 - RNA, 19 nt, Artificial Sequence
  Description of Artificial Sequence: Synthetic oligonucleotide
cuggccgacuugaccaauc

SEQ ID NO: 1741078 - RNA, 19 nt, Artificial Sequence
  Description of Artificial Sequence: Synthetic oligonucleotide
uccucacugugugaacaaa

SEQ ID NO: 1741079 - RNA, 19 nt, Artificial Sequence
  Description of Artificial Sequence: Synthetic oligonucleotide
ugcuagcucuucaguuauc

SEQ ID NO: 1741080 - RNA, 19 nt, Artificial Sequence
  Description of Artificial Sequence: Synthetic oligonucleotide
guggaaguugucaggcguc

SEQ ID NO: 1741081 - RNA, 19 nt, Artificial Sequence
  Description of Artificial Sequence: Synthetic oligonucleotide
cugagaguaguugugcgcu

SEQ ID NO: 1741082 - RNA, 19 nt, Artificial Sequence
  Description of Artificial Sequence: Synthetic oligonucleotide
cucggcagaagagcccgag

SEQ ID NO: 1741083 - RNA, 19 nt, Artificial Sequence
  Description of Artificial Sequence: Synthetic oligonucleotide
cucugcgacaugguagcuc

SEQ ID NO: 1741084 - RNA, 19 nt, Artificial Sequence
  Description of Artificial Sequence: Synthetic oligonucleotide
ccuggguugacagaaucuc

SEQ ID NO: 1741085 - RNA, 19 nt, Artificial Sequence
  Description of Artificial Sequence: Synthetic oligonucleotide
aauauuccuuugggaccaa

SEQ ID NO: 1741086 - RNA, 19 nt, Artificial Sequence
  Description of Artificial Sequence: Synthetic oligonucleotide
caguaggcaucagucugac

SEQ ID NO: 1741087 - RNA, 19 nt, Artificial Sequence
  Description of Artificial Sequence: Synthetic oligonucleotide
auagagacggaggcuggua

SEQ ID NO: 1741088 - RNA, 19 nt, Artificial Sequence
  Description of Artificial Sequence: Synthetic oligonucleotide
agguggacugucacaguga

SEQ ID NO: 1741089 - RNA, 19 nt, Artificial Sequence
  Description of Artificial Sequence: Synthetic oligonucleotide
ccacaauauuccuuuggga

SEQ ID NO: 1741090 - RNA, 19 nt, Artificial Sequence
  Description of Artificial Sequence: Synthetic oligonucleotide
caguuucuacuauguaaua

SEQ ID NO: 1741091 - RNA, 19 nt, Artificial Sequence
  Description of Artificial Sequence: Synthetic oligonucleotide
cgcucugcgacaugguagc

SEQ ID NO: 1741092 - RNA, 19 nt, Artificial Sequence
  Description of Artificial Sequence: Synthetic oligonucleotide
cccauaugcaaauccaaua

SEQ ID NO: 1741093 - RNA, 19 nt, Artificial Sequence
  Description of Artificial Sequence: Synthetic oligonucleotide
cuauucuguuucacuaaau

SEQ ID NO: 1741094 - RNA, 19 nt, Artificial Sequence
  Description of Artificial Sequence: Synthetic oligonucleotide
auccaauggccagcagaug

SEQ ID NO: 1741095 - RNA, 19 nt, Artificial Sequence
  Description of Artificial Sequence: Synthetic oligonucleotide
ccgucaaaaggugcuagug

SEQ ID NO: 1741096 - RNA, 19 nt, Artificial Sequence
  Description of Artificial Sequence: Synthetic oligonucleotide
ggauuuggcaaagacuuau

SEQ ID NO: 1741097 - RNA, 19 nt, Artificial Sequence
  Description of Artificial Sequence: Synthetic oligonucleotide
ggggauguuuucuggccga

SEQ ID NO: 1741098 - RNA, 19 nt, Artificial Sequence
  Description of Artificial Sequence: Synthetic oligonucleotide
ccuuuaagaacaugcuaua

SEQ ID NO: 1741099 - RNA, 19 nt, Artificial Sequence
  Description of Artificial Sequence: Synthetic oligonucleotide
ggcgucucccaauauagau

SEQ ID NO: 1741100 - RNA, 19 nt, Artificial Sequence
  Description of Artificial Sequence: Synthetic oligonucleotide
caccugaguaaguguggga

SEQ ID NO: 1741101 - RNA, 19 nt, Artificial Sequence
  Description of Artificial Sequence: Synthetic oligonucleotide
ggcugucuguuucagcucu

SEQ ID NO: 1741102 - RNA, 19 nt, Artificial Sequence
  Description of Artificial Sequence: Synthetic oligonucleotide
gguauggauuaacccauau

SEQ ID NO: 1741103 - RNA, 19 nt, Artificial Sequence
  Description of Artificial Sequence: Synthetic oligonucleotide
gaccaaucccauauccaau

SEQ ID NO: 1741104 - RNA, 19 nt, Artificial Sequence
  Description of Artificial Sequence: Synthetic oligonucleotide
gcgucucccaauauagauc

SEQ ID NO: 1741105 - RNA, 19 nt, Artificial Sequence
  Description of Artificial Sequence: Synthetic oligonucleotide
ggagcuacuucguccagau

SEQ ID NO: 1741106 - RNA, 19 nt, Artificial Sequence
  Description of Artificial Sequence: Synthetic oligonucleotide
uccuccccgcucugcgaca

SEQ ID NO: 1741107 - RNA, 19 nt, Artificial Sequence
  Description of Artificial Sequence: Synthetic oligonucleotide
ggugcuaguggaaguuguc

SEQ ID NO: 1741108 - RNA, 19 nt, Artificial Sequence
  Description of Artificial Sequence: Synthetic oligonucleotide
cuucauaacgcugguguuu

SEQ ID NO: 1741109 - RNA, 19 nt, Artificial Sequence
  Description of Artificial Sequence: Synthetic oligonucleotide
ucuggccgacuugaccaau

SEQ ID NO: 1741110 - RNA, 19 nt, Artificial Sequence
  Description of Artificial Sequence: Synthetic oligonucleotide
aucucuggguauggauuaa

SEQ ID NO: 1741111 - RNA, 19 nt, Artificial Sequence
  Description of Artificial Sequence: Synthetic oligonucleotide
cagaaucucuggguaugga

SEQ ID NO: 1741112 - RNA, 19 nt, Artificial Sequence
  Description of Artificial Sequence: Synthetic oligonucleotide
ugggaucgagguggacugu

SEQ ID NO: 1741113 - RNA, 19 nt, Artificial Sequence
  Description of Artificial Sequence: Synthetic oligonucleotide
cugggcauaugccuggguu

SEQ ID NO: 1741114 - RNA, 19 nt, Artificial Sequence
  Description of Artificial Sequence: Synthetic oligonucleotide
agacggaggcugguacacu

SEQ ID NO: 1741115 - RNA, 19 nt, Artificial Sequence
  Description of Artificial Sequence: Synthetic oligonucleotide
ccucacugugugaacaaaa

SEQ ID NO: 1741116 - RNA, 19 nt, Artificial Sequence
  Description of Artificial Sequence: Synthetic oligonucleotide
aggcgucucccaauauaga

SEQ ID NO: 1741117 - RNA, 19 nt, Artificial Sequence
  Description of Artificial Sequence: Synthetic oligonucleotide
cugggcaucuagcaguauu

SEQ ID NO: 1741118 - RNA, 19 nt, Artificial Sequence
  Description of Artificial Sequence: Synthetic oligonucleotide
cuccaaagcuguggcuguc

SEQ ID NO: 1741119 - RNA, 19 nt, Artificial Sequence
  Description of Artificial Sequence: Synthetic oligonucleotide
gucacaguucagacaugaa

SEQ ID NO: 1741120 - RNA, 19 nt, Artificial Sequence
  Description of Artificial Sequence: Synthetic oligonucleotide
gucaaggaggcagccuuua

SEQ ID NO: 1741121 - RNA, 19 nt, Artificial Sequence
  Description of Artificial Sequence: Synthetic oligonucleotide
cuuccgucaaaaggugcua

SEQ ID NO: 1741122 - RNA, 19 nt, Artificial Sequence
  Description of Artificial Sequence: Synthetic oligonucleotide
gcaucagucugacaugcuu

SEQ ID NO: 1741123 - RNA, 19 nt, Artificial Sequence
  Description of Artificial Sequence: Synthetic oligonucleotide
gugggacaaugaaacaaau

SEQ ID NO: 1741124 - RNA, 19 nt, Artificial Sequence
  Description of Artificial Sequence: Synthetic oligonucleotide
gugcgcuucggguguuuaa

SEQ ID NO: 1741125 - RNA, 19 nt, Artificial Sequence
  Description of Artificial Sequence: Synthetic oligonucleotide
gggaucgagguggacuguc

SEQ ID NO: 1741126 - RNA, 19 nt, Artificial Sequence
  Description of Artificial Sequence: Synthetic oligonucleotide
caggccucagcggcgguca

SEQ ID NO: 1741127 - RNA, 19 nt, Artificial Sequence
  Description of Artificial Sequence: Synthetic oligonucleotide
caugucaaggaggcagccu

SEQ ID NO: 1741128 - RNA, 19 nt, Artificial Sequence
  Description of Artificial Sequence: Synthetic oligonucleotide
ggaucgagguggacuguca

SEQ ID NO: 1741129 - RNA, 19 nt, Artificial Sequence
  Description of Artificial Sequence: Synthetic oligonucleotide
gugagaacucuuggagcua

SEQ ID NO: 1741130 - RNA, 19 nt, Artificial Sequence
  Description of Artificial Sequence: Synthetic oligonucleotide
gggauguuuucuggccgac

SEQ ID NO: 1741131 - RNA, 19 nt, Artificial Sequence
  Description of Artificial Sequence: Synthetic oligonucleotide
guggacugucacagugaga

SEQ ID NO: 1741132 - RNA, 19 nt, Artificial Sequence
  Description of Artificial Sequence: Synthetic oligonucleotide
gcuuauuaauugaucccau

SEQ ID NO: 1741133 - RNA, 19 nt, Artificial Sequence
  Description of Artificial Sequence: Synthetic oligonucleotide
ccaaacccuuuaaugauuu

SEQ ID NO: 1741134 - RNA, 19 nt, Artificial Sequence
  Description of Artificial Sequence: Synthetic oligonucleotide
cuuugggaccaaacccuuu

SEQ ID NO: 1741135 - RNA, 19 nt, Artificial Sequence
  Description of Artificial Sequence: Synthetic oligonucleotide
uuguggugucugggaucga

SEQ ID NO: 1741136 - RNA, 19 nt, Artificial Sequence
  Description of Artificial Sequence: Synthetic oligonucleotide
ccaauccaauggccagcag

SEQ ID NO: 1741137 - RNA, 19 nt, Artificial Sequence
  Description of Artificial Sequence: Synthetic oligonucleotide
agcaggccucagcggcggu

SEQ ID NO: 1741138 - RNA, 19 nt, Artificial Sequence
  Description of Artificial Sequence: Synthetic oligonucleotide
gcgcuucggguguuuaaaa

SEQ ID NO: 1741139 - RNA, 19 nt, Artificial Sequence
  Description of Artificial Sequence: Synthetic oligonucleotide
ggcauaugccuggguugac

SEQ ID NO: 1741140 - RNA, 19 nt, Artificial Sequence
  Description of Artificial Sequence: Synthetic oligonucleotide
ccauauccaaucugaguuu

SEQ ID NO: 1741141 - RNA, 19 nt, Artificial Sequence
  Description of Artificial Sequence: Synthetic oligonucleotide
ccccuuucuucauaacgcu

SEQ ID NO: 1741142 - RNA, 19 nt, Artificial Sequence
  Description of Artificial Sequence: Synthetic oligonucleotide
ggauguuuucuggccgacu

SEQ ID NO: 1741143 - RNA, 19 nt, Artificial Sequence
  Description of Artificial Sequence: Synthetic oligonucleotide
ggccucagcggcggucacc

SEQ ID NO: 1741144 - RNA, 19 nt, Artificial Sequence
  Description of Artificial Sequence: Synthetic oligonucleotide
gagcuacuucguccagauu

SEQ ID NO: 1741145 - RNA, 19 nt, Artificial Sequence
  Description of Artificial Sequence: Synthetic oligonucleotide
ggguauggauuaacccaua

SEQ ID NO: 1741146 - RNA, 19 nt, Artificial Sequence
  Description of Artificial Sequence: Synthetic oligonucleotide
ccgacuugaccaaucccau

SEQ ID NO: 1741147 - RNA, 19 nt, Artificial Sequence
  Description of Artificial Sequence: Synthetic oligonucleotide
cugguacacugcucccauu

SEQ ID NO: 1741148 - RNA, 19 nt, Artificial Sequence
  Description of Artificial Sequence: Synthetic oligonucleotide
gggcaucuagcaguauuuu

SEQ ID NO: 1741149 - RNA, 19 nt, Artificial Sequence
  Description of Artificial Sequence: Synthetic oligonucleotide
cgacuugaccaaucccaua

SEQ ID NO: 1741150 - RNA, 19 nt, Artificial Sequence
  Description of Artificial Sequence: Synthetic oligonucleotide
cccaaggaucaugcuagcu

SEQ ID NO: 1741151 - RNA, 19 nt, Artificial Sequence
  Description of Artificial Sequence: Synthetic oligonucleotide
gcagacacccaaggaucau

SEQ ID NO: 1741152 - RNA, 19 nt, Artificial Sequence
  Description of Artificial Sequence: Synthetic oligonucleotide
gcucugcgacaugguagcu

SEQ ID NO: 1741153 - RNA, 19 nt, Artificial Sequence
  Description of Artificial Sequence: Synthetic oligonucleotide
  modified_base (4)..(4): a, c, u, g, unknown or other
uaanagaucauguagcuca

SEQ ID NO: 1741154 - RNA, 19 nt, Artificial Sequence
  Description of Artificial Sequence: Synthetic oligonucleotide
gaugacuagaguaaaaggg

SEQ ID NO: 1741155 - RNA, 19 nt, Artificial Sequence
  Description of Artificial Sequence: Synthetic oligonucleotide
agguccuuuacauaguucc

SEQ ID NO: 1741156 - RNA, 19 nt, Artificial Sequence
  Description of Artificial Sequence: Synthetic oligonucleotide
auaagaagguuccaccugc

SEQ ID NO: 1741157 - RNA, 19 nt, Artificial Sequence
  Description of Artificial Sequence: Synthetic oligonucleotide
ucuaagaugacgcacccgc

SEQ ID NO: 1741158 - RNA, 19 nt, Artificial Sequence
  Description of Artificial Sequence: Synthetic oligonucleotide
ucgaugaccacgcagaucu

SEQ ID NO: 1741159 - RNA, 19 nt, Artificial Sequence
  Description of Artificial Sequence: Synthetic oligonucleotide
guugucauugucuggaugg

SEQ ID NO: 1741160 - RNA, 19 nt, Artificial Sequence
  Description of Artificial Sequence: Synthetic oligonucleotide
aacucauccacgugaggcc

SEQ ID NO: 1741161 - RNA, 19 nt, Artificial Sequence
  Description of Artificial Sequence: Synthetic oligonucleotide
uauuuauacggcaccacag

SEQ ID NO: 1741162 - RNA, 19 nt, Artificial Sequence
  Description of Artificial Sequence: Synthetic oligonucleotide
uaaagucugggguuuaggg

SEQ ID NO: 1741163 - RNA, 19 nt, Artificial Sequence
  Description of Artificial Sequence: Synthetic oligonucleotide
guauacgucguccacacgg

SEQ ID NO: 1741164 - RNA, 19 nt, Artificial Sequence
  Description of Artificial Sequence: Synthetic oligonucleotide
uuugcuaacagcacaggca

SEQ ID NO: 1741165 - RNA, 19 nt, Artificial Sequence
  Description of Artificial Sequence: Synthetic oligonucleotide
agaguaaaagggcugggac

SEQ ID NO: 1741166 - RNA, 19 nt, Artificial Sequence
  Description of Artificial Sequence: Synthetic oligonucleotide
ugaauuaccccaucaaucu

SEQ ID NO: 1741167 - RNA, 19 nt, Artificial Sequence
  Description of Artificial Sequence: Synthetic oligonucleotide
  modified_base (8)..(8): a, c, u, g, unknown or other
aggguaanagaucauguag

SEQ ID NO: 1741168 - RNA, 19 nt, Artificial Sequence
  Description of Artificial Sequence: Synthetic oligonucleotide
uaccccaucaaucuccacg

SEQ ID NO: 1741169 - RNA, 19 nt, Artificial Sequence
  Description of Artificial Sequence: Synthetic oligonucleotide
augacuagaguaaaagggc

SEQ ID NO: 1741170 - RNA, 19 nt, Artificial Sequence
  Description of Artificial Sequence: Synthetic oligonucleotide
auuuauacggcaccacagg

SEQ ID NO: 1741171 - RNA, 19 nt, Artificial Sequence
  Description of Artificial Sequence: Synthetic oligonucleotide
agucugauggggaagaggc

SEQ ID NO: 1741172 - RNA, 19 nt, Artificial Sequence
  Description of Artificial Sequence: Synthetic oligonucleotide
uauugcauaggccaugggu

SEQ ID NO: 1741173 - RNA, 19 nt, Artificial Sequence
  Description of Artificial Sequence: Synthetic oligonucleotide
cugaguugcucgaagaggg

SEQ ID NO: 1741174 - RNA, 19 nt, Artificial Sequence
  Description of Artificial Sequence: Synthetic oligonucleotide
aagaugacgcacccgccgc

SEQ ID NO: 1741175 - RNA, 19 nt, Artificial Sequence
  Description of Artificial Sequence: Synthetic oligonucleotide
uaagaugacgcacccgccg

SEQ ID NO: 1741176 - RNA, 19 nt, Artificial Sequence
  Description of Artificial Sequence: Synthetic oligonucleotide
aaccccauaagaagguucc

SEQ ID NO: 1741177 - RNA, 19 nt, Artificial Sequence
  Description of Artificial Sequence: Synthetic oligonucleotide
aggaaauccugccaacccc

SEQ ID NO: 1741178 - RNA, 19 nt, Artificial Sequence
  Description of Artificial Sequence: Synthetic oligonucleotide
ugaguugucuaagaugacg

SEQ ID NO: 1741179 - RNA, 19 nt, Artificial Sequence
  Description of Artificial Sequence: Synthetic oligonucleotide
uugucuaagaugacgcacc

SEQ ID NO: 1741180 - RNA, 19 nt, Artificial Sequence
  Description of Artificial Sequence: Synthetic oligonucleotide
gauggcgccauuuuccucc

SEQ ID NO: 1741181 - RNA, 19 nt, Artificial Sequence
  Description of Artificial Sequence: Synthetic oligonucleotide
ugaggcaccagugaugagg

SEQ ID NO: 1741182 - RNA, 19 nt, Artificial Sequence
  Description of Artificial Sequence: Synthetic oligonucleotide
agaccugaugaauuacccc

SEQ ID NO: 1741183 - RNA, 19 nt, Artificial Sequence
  Description of Artificial Sequence: Synthetic oligonucleotide
uuuauacggcaccacagga

SEQ ID NO: 1741184 - RNA, 19 nt, Artificial Sequence
  Description of Artificial Sequence: Synthetic oligonucleotide
augaauuaccccaucaauc

SEQ ID NO: 1741185 - RNA, 19 nt, Artificial Sequence
  Description of Artificial Sequence: Synthetic oligonucleotide
accacgcagaucuuguccc

SEQ ID NO: 1741186 - RNA, 19 nt, Artificial Sequence
  Description of Artificial Sequence: Synthetic oligonucleotide
uagcacugaguauacgucg

SEQ ID NO: 1741187 - RNA, 19 nt, Artificial Sequence
  Description of Artificial Sequence: Synthetic oligonucleotide
aguaaaagggcugggacag

SEQ ID NO: 1741188 - RNA, 19 nt, Artificial Sequence
  Description of Artificial Sequence: Synthetic oligonucleotide
uauuucugggcccagggaa

SEQ ID NO: 1741189 - RNA, 19 nt, Artificial Sequence
  Description of Artificial Sequence: Synthetic oligonucleotide
caugacucucgaaacagcc

SEQ ID NO: 1741190 - RNA, 19 nt, Artificial Sequence
  Description of Artificial Sequence: Synthetic oligonucleotide
acagaagguacucaagugu

SEQ ID NO: 1741191 - RNA, 19 nt, Artificial Sequence
  Description of Artificial Sequence: Synthetic oligonucleotide
aggaggucuauccccaccc

SEQ ID NO: 1741192 - RNA, 19 nt, Artificial Sequence
  Description of Artificial Sequence: Synthetic oligonucleotide
auauuuauacggcaccaca

SEQ ID NO: 1741193 - RNA, 19 nt, Artificial Sequence
  Description of Artificial Sequence: Synthetic oligonucleotide
uagaccugaugaauuaccc

SEQ ID NO: 1741194 - RNA, 19 nt, Artificial Sequence
  Description of Artificial Sequence: Synthetic oligonucleotide
auacauauuuauacggcac

SEQ ID NO: 1741195 - RNA, 19 nt, Artificial Sequence
  Description of Artificial Sequence: Synthetic oligonucleotide
agcuacagggucugcauac

SEQ ID NO: 1741196 - RNA, 19 nt, Artificial Sequence
  Description of Artificial Sequence: Synthetic oligonucleotide
uauacggcaccacaggaaa

SEQ ID NO: 1741197 - RNA, 19 nt, Artificial Sequence
  Description of Artificial Sequence: Synthetic oligonucleotide
auagaccugaugaauuacc

SEQ ID NO: 1741198 - RNA, 19 nt, Artificial Sequence
  Description of Artificial Sequence: Synthetic oligonucleotide
ugcauacuuggcaaggcug

SEQ ID NO: 1741199 - RNA, 19 nt, Artificial Sequence
  Description of Artificial Sequence: Synthetic oligonucleotide
gcuuaaaugaugcagccug

SEQ ID NO: 1741200 - RNA, 19 nt, Artificial Sequence
  Description of Artificial Sequence: Synthetic oligonucleotide
gaccugaugaauuacccca

SEQ ID NO: 1741201 - RNA, 19 nt, Artificial Sequence
  Description of Artificial Sequence: Synthetic oligonucleotide
agacacaugacucucgaaa

SEQ ID NO: 1741202 - RNA, 19 nt, Artificial Sequence
  Description of Artificial Sequence: Synthetic oligonucleotide
ugaugaauuaccccaucaa

SEQ ID NO: 1741203 - RNA, 19 nt, Artificial Sequence
  Description of Artificial Sequence: Synthetic oligonucleotide
cuuaaaugaugcagccugg

SEQ ID NO: 1741204 - RNA, 19 nt, Artificial Sequence
  Description of Artificial Sequence: Synthetic oligonucleotide
  modified_base (14)..(14): a, c, u, g, unknown or other
ucgaagaggguaanagauc

SEQ ID NO: 1741205 - RNA, 19 nt, Artificial Sequence
  Description of Artificial Sequence: Synthetic oligonucleotide
gacacaugacucucgaaac

SEQ ID NO: 1741206 - RNA, 19 nt, Artificial Sequence
  Description of Artificial Sequence: Synthetic oligonucleotide
auugucuggauggaagacg

SEQ ID NO: 1741207 - RNA, 19 nt, Artificial Sequence
  Description of Artificial Sequence: Synthetic oligonucleotide
uaaaugaugcagccuggca

SEQ ID NO: 1741208 - RNA, 19 nt, Artificial Sequence
  Description of Artificial Sequence: Synthetic oligonucleotide
ucagugucacucauguugu

SEQ ID NO: 1741209 - RNA, 19 nt, Artificial Sequence
  Description of Artificial Sequence: Synthetic oligonucleotide
uccacggguaugaugaagu

SEQ ID NO: 1741210 - RNA, 19 nt, Artificial Sequence
  Description of Artificial Sequence: Synthetic oligonucleotide
  modified_base (17)..(17): a, c, u, g, unknown or other
ugcucgaagaggguaanag

SEQ ID NO: 1741211 - RNA, 19 nt, Artificial Sequence
  Description of Artificial Sequence: Synthetic oligonucleotide
ucagcauuauucacaggcu

SEQ ID NO: 1741212 - RNA, 19 nt, Artificial Sequence
  Description of Artificial Sequence: Synthetic oligonucleotide
acggguaugaugaagucag

SEQ ID NO: 1741213 - RNA, 19 nt, Artificial Sequence
  Description of Artificial Sequence: Synthetic oligonucleotide
uuggagaccuucugaaccc

SEQ ID NO: 1741214 - RNA, 19 nt, Artificial Sequence
  Description of Artificial Sequence: Synthetic oligonucleotide
gaagguuccaccugcuuca

SEQ ID NO: 1741215 - RNA, 19 nt, Artificial Sequence
  Description of Artificial Sequence: Synthetic oligonucleotide
uucagauacucugaaggca

SEQ ID NO: 1741216 - RNA, 19 nt, Artificial Sequence
  Description of Artificial Sequence: Synthetic oligonucleotide
gacacagcagaagagcgag

SEQ ID NO: 1741217 - RNA, 19 nt, Artificial Sequence
  Description of Artificial Sequence: Synthetic oligonucleotide
uggaagacguaggaggcgg

SEQ ID NO: 1741218 - RNA, 19 nt, Artificial Sequence
  Description of Artificial Sequence: Synthetic oligonucleotide
ucucgaaacagccgggcac

SEQ ID NO: 1741219 - RNA, 19 nt, Artificial Sequence
  Description of Artificial Sequence: Synthetic oligonucleotide
gaaggagcugugcaccagg

SEQ ID NO: 1741220 - RNA, 19 nt, Artificial Sequence
  Description of Artificial Sequence: Synthetic oligonucleotide
gggauuagcucacugcugg

SEQ ID NO: 1741221 - RNA, 19 nt, Artificial Sequence
  Description of Artificial Sequence: Synthetic oligonucleotide
agcucagugucacucaugu

SEQ ID NO: 1741222 - RNA, 19 nt, Artificial Sequence
  Description of Artificial Sequence: Synthetic oligonucleotide
ugucuaagaugacgcaccc

SEQ ID NO: 1741223 - RNA, 19 nt, Artificial Sequence
  Description of Artificial Sequence: Synthetic oligonucleotide
uguugucauugucuggaug

SEQ ID NO: 1741224 - RNA, 19 nt, Artificial Sequence
  Description of Artificial Sequence: Synthetic oligonucleotide
uuauacggcaccacaggaa

SEQ ID NO: 1741225 - RNA, 19 nt, Artificial Sequence
  Description of Artificial Sequence: Synthetic oligonucleotide
ugaagucagcauuauucac

SEQ ID NO: 1741226 - RNA, 19 nt, Artificial Sequence
  Description of Artificial Sequence: Synthetic oligonucleotide
uuaggggugaggcaccagu

SEQ ID NO: 1741227 - RNA, 19 nt, Artificial Sequence
  Description of Artificial Sequence: Synthetic oligonucleotide
  modified_base (3)..(3): a, c, u, g, unknown or other
aanagaucauguagcucag

SEQ ID NO: 1741228 - RNA, 19 nt, Artificial Sequence
  Description of Artificial Sequence: Synthetic oligonucleotide
aaucuccacggguaugaug

SEQ ID NO: 1741229 - RNA, 19 nt, Artificial Sequence
  Description of Artificial Sequence: Synthetic oligonucleotide
ucagcuggugggauuagcu

SEQ ID NO: 1741230 - RNA, 19 nt, Artificial Sequence
  Description of Artificial Sequence: Synthetic oligonucleotide
ucuauccccacccucuccu

SEQ ID NO: 1741231 - RNA, 19 nt, Artificial Sequence
  Description of Artificial Sequence: Synthetic oligonucleotide
gaguauacgucguccacac

SEQ ID NO: 1741232 - RNA, 19 nt, Artificial Sequence
  Description of Artificial Sequence: Synthetic oligonucleotide
  modified_base (7)..(7): a, c, u, g, unknown or other
ggguaanagaucauguagc

SEQ ID NO: 1741233 - RNA, 19 nt, Artificial Sequence
  Description of Artificial Sequence: Synthetic oligonucleotide
auuagcucacugcugggca

SEQ ID NO: 1741234 - RNA, 19 nt, Artificial Sequence
  Description of Artificial Sequence: Synthetic oligonucleotide
ugggguuuaggggugaggc

SEQ ID NO: 1741235 - RNA, 19 nt, Artificial Sequence
  Description of Artificial Sequence: Synthetic oligonucleotide
gaguaaaagggcugggaca

SEQ ID NO: 1741236 - RNA, 19 nt, Artificial Sequence
  Description of Artificial Sequence: Synthetic oligonucleotide
uuaaaugaugcagccuggc

SEQ ID NO: 1741237 - RNA, 19 nt, Artificial Sequence
  Description of Artificial Sequence: Synthetic oligonucleotide
ucaaucuccacggguauga

SEQ ID NO: 1741238 - RNA, 19 nt, Artificial Sequence
  Description of Artificial Sequence: Synthetic oligonucleotide
caagcuuuggggagacugg

SEQ ID NO: 1741239 - RNA, 19 nt, Artificial Sequence
  Description of Artificial Sequence: Synthetic oligonucleotide
aucuauauacacauauaca

SEQ ID NO: 1741240 - RNA, 19 nt, Artificial Sequence
  Description of Artificial Sequence: Synthetic oligonucleotide
cuagcacugaguauacguc

SEQ ID NO: 1741241 - RNA, 19 nt, Artificial Sequence
  Description of Artificial Sequence: Synthetic oligonucleotide
cacacggcugaguugcucg

SEQ ID NO: 1741242 - RNA, 19 nt, Artificial Sequence
  Description of Artificial Sequence: Synthetic oligonucleotide
acugaguauacgucgucca

SEQ ID NO: 1741243 - RNA, 19 nt, Artificial Sequence
  Description of Artificial Sequence: Synthetic oligonucleotide
ucgggaagcagguacugga

SEQ ID NO: 1741244 - RNA, 19 nt, Artificial Sequence
  Description of Artificial Sequence: Synthetic oligonucleotide
ugaguauacgucguccaca

SEQ ID NO: 1741245 - RNA, 19 nt, Artificial Sequence
  Description of Artificial Sequence: Synthetic oligonucleotide
gaaggcaccaguaaagucu

SEQ ID NO: 1741246 - RNA, 19 nt, Artificial Sequence
  Description of Artificial Sequence: Synthetic oligonucleotide
caggaaauccugccaaccc

SEQ ID NO: 1741247 - RNA, 19 nt, Artificial Sequence
  Description of Artificial Sequence: Synthetic oligonucleotide
ucucggcagacacagcaga

SEQ ID NO: 1741248 - RNA, 19 nt, Artificial Sequence
  Description of Artificial Sequence: Synthetic oligonucleotide
ugugaccccucacagccca

SEQ ID NO: 1741249 - RNA, 19 nt, Artificial Sequence
  Description of Artificial Sequence: Synthetic oligonucleotide
cacaugacucucgaaacag

SEQ ID NO: 1741250 - RNA, 19 nt, Artificial Sequence
  Description of Artificial Sequence: Synthetic oligonucleotide
ccagugaugaggcagggcc

SEQ ID NO: 1741251 - RNA, 19 nt, Artificial Sequence
  Description of Artificial Sequence: Synthetic oligonucleotide
gaagcagguacuggacugg

SEQ ID NO: 1741252 - RNA, 19 nt, Artificial Sequence
  Description of Artificial Sequence: Synthetic oligonucleotide
gaugaauuaccccaucaau

SEQ ID NO: 1741253 - RNA, 19 nt, Artificial Sequence
  Description of Artificial Sequence: Synthetic oligonucleotide
ugggauuagcucacugcug

SEQ ID NO: 1741254 - RNA, 19 nt, Artificial Sequence
  Description of Artificial Sequence: Synthetic oligonucleotide
acacaugacucucgaaaca

SEQ ID NO: 1741255 - RNA, 19 nt, Artificial Sequence
  Description of Artificial Sequence: Synthetic oligonucleotide
uacucugaaggcaccagua

SEQ ID NO: 1741256 - RNA, 19 nt, Artificial Sequence
  Description of Artificial Sequence: Synthetic oligonucleotide
guugucuaagaugacgcac

SEQ ID NO: 1741257 - RNA, 19 nt, Artificial Sequence
  Description of Artificial Sequence: Synthetic oligonucleotide
agcgaguggaggaugcccc

SEQ ID NO: 1741258 - RNA, 19 nt, Artificial Sequence
  Description of Artificial Sequence: Synthetic oligonucleotide
uagaguaaaagggcuggga

SEQ ID NO: 1741259 - RNA, 19 nt, Artificial Sequence
  Description of Artificial Sequence: Synthetic oligonucleotide
gaaacagccgggcaccgga

SEQ ID NO: 1741260 - RNA, 19 nt, Artificial Sequence
  Description of Artificial Sequence: Synthetic oligonucleotide
uggguuuugcuaacagcac

SEQ ID NO: 1741261 - RNA, 19 nt, Artificial Sequence
  Description of Artificial Sequence: Synthetic oligonucleotide
gauacucugaaggcaccag

SEQ ID NO: 1741262 - RNA, 19 nt, Artificial Sequence
  Description of Artificial Sequence: Synthetic oligonucleotide
cuucugaaccccauaagaa

SEQ ID NO: 1741263 - RNA, 19 nt, Artificial Sequence
  Description of Artificial Sequence: Synthetic oligonucleotide
uacgucguccacacggcug

SEQ ID NO: 1741264 - RNA, 19 nt, Artificial Sequence
  Description of Artificial Sequence: Synthetic oligonucleotide
cuaagaugacgcacccgcc

SEQ ID NO: 1741265 - RNA, 19 nt, Artificial Sequence
  Description of Artificial Sequence: Synthetic oligonucleotide
ucagcacauagaccugaug

SEQ ID NO: 1741266 - RNA, 19 nt, Artificial Sequence
  Description of Artificial Sequence: Synthetic oligonucleotide
auugcauaggccauggguu

SEQ ID NO: 1741267 - RNA, 19 nt, Artificial Sequence
  Description of Artificial Sequence: Synthetic oligonucleotide
acucucgaaacagccgggc

SEQ ID NO: 1741268 - RNA, 19 nt, Artificial Sequence
  Description of Artificial Sequence: Synthetic oligonucleotide
guaaagucugggguuuagg

SEQ ID NO: 1741269 - RNA, 19 nt, Artificial Sequence
  Description of Artificial Sequence: Synthetic oligonucleotide
aggggagccccacuguggg

SEQ ID NO: 1741270 - RNA, 19 nt, Artificial Sequence
  Description of Artificial Sequence: Synthetic oligonucleotide
ucugcauacuuggcaaggc

SEQ ID NO: 1741271 - RNA, 19 nt, Artificial Sequence
  Description of Artificial Sequence: Synthetic oligonucleotide
auacucugaaggcaccagu

SEQ ID NO: 1741272 - RNA, 19 nt, Artificial Sequence
  Description of Artificial Sequence: Synthetic oligonucleotide
ggugggauuagcucacugc

SEQ ID NO: 1741273 - RNA, 19 nt, Artificial Sequence
  Description of Artificial Sequence: Synthetic oligonucleotide
gaauuaccccaucaaucuc

SEQ ID NO: 1741274 - RNA, 19 nt, Artificial Sequence
  Description of Artificial Sequence: Synthetic oligonucleotide
ugaacagcacacacucaaa

SEQ ID NO: 1741275 - RNA, 19 nt, Artificial Sequence
  Description of Artificial Sequence: Synthetic oligonucleotide
ccugugaccccucacagcc

SEQ ID NO: 1741276 - RNA, 19 nt, Artificial Sequence
  Description of Artificial Sequence: Synthetic oligonucleotide
uugucccgaguccugggcc

SEQ ID NO: 1741277 - RNA, 19 nt, Artificial Sequence
  Description of Artificial Sequence: Synthetic oligonucleotide
accuucugaaccccauaag

SEQ ID NO: 1741278 - RNA, 19 nt, Artificial Sequence
  Description of Artificial Sequence: Synthetic oligonucleotide
aacagccgggcaccggaag

SEQ ID NO: 1741279 - RNA, 19 nt, Artificial Sequence
  Description of Artificial Sequence: Synthetic oligonucleotide
gguuuugcuaacagcacag

SEQ ID NO: 1741280 - RNA, 19 nt, Artificial Sequence
  Description of Artificial Sequence: Synthetic oligonucleotide
cauauuuauacggcaccac

SEQ ID NO: 1741281 - RNA, 19 nt, Artificial Sequence
  Description of Artificial Sequence: Synthetic oligonucleotide
guccacacggcugaguugc

SEQ ID NO: 1741282 - RNA, 19 nt, Artificial Sequence
  Description of Artificial Sequence: Synthetic oligonucleotide
gaugccccgacuucgggga

SEQ ID NO: 1741283 - RNA, 19 nt, Artificial Sequence
  Description of Artificial Sequence: Synthetic oligonucleotide
ucugauggggaagaggcuu

SEQ ID NO: 1741284 - RNA, 19 nt, Artificial Sequence
  Description of Artificial Sequence: Synthetic oligonucleotide
  modified_base (9)..(9): a, c, u, g, unknown or other
gaggguaanagaucaugua

SEQ ID NO: 1741285 - RNA, 19 nt, Artificial Sequence
  Description of Artificial Sequence: Synthetic oligonucleotide
ucucggcccagccugcuca

SEQ ID NO: 1741286 - RNA, 19 nt, Artificial Sequence
  Description of Artificial Sequence: Synthetic oligonucleotide
uggggucuuagggauggcg

SEQ ID NO: 1741287 - RNA, 19 nt, Artificial Sequence
  Description of Artificial Sequence: Synthetic oligonucleotide
guccuuuacauaguucccc

SEQ ID NO: 1741288 - RNA, 19 nt, Artificial Sequence
  Description of Artificial Sequence: Synthetic oligonucleotide
ucagcuacagggucugcau

SEQ ID NO: 1741289 - RNA, 19 nt, Artificial Sequence
  Description of Artificial Sequence: Synthetic oligonucleotide
gagggaggaggucuauccc

SEQ ID NO: 1741290 - RNA, 19 nt, Artificial Sequence
  Description of Artificial Sequence: Synthetic oligonucleotide
agcucccaggccuaggcug

SEQ ID NO: 1741291 - RNA, 19 nt, Artificial Sequence
  Description of Artificial Sequence: Synthetic oligonucleotide
augacucucgaaacagccg

SEQ ID NO: 1741292 - RNA, 19 nt, Artificial Sequence
  Description of Artificial Sequence: Synthetic oligonucleotide
agacguaggaggcggguga

SEQ ID NO: 1741293 - RNA, 19 nt, Artificial Sequence
  Description of Artificial Sequence: Synthetic oligonucleotide
ucacucauguugucauugu

SEQ ID NO: 1741294 - RNA, 19 nt, Artificial Sequence
  Description of Artificial Sequence: Synthetic oligonucleotide
acggcaccacaggaaaucc

SEQ ID NO: 1741295 - RNA, 19 nt, Artificial Sequence
  Description of Artificial Sequence: Synthetic oligonucleotide
gguauugcauaggccaugg

SEQ ID NO: 1741296 - RNA, 19 nt, Artificial Sequence
  Description of Artificial Sequence: Synthetic oligonucleotide
cacugaguauacgucgucc

SEQ ID NO: 1741297 - RNA, 19 nt, Artificial Sequence
  Description of Artificial Sequence: Synthetic oligonucleotide
  modified_base (5)..(5): a, c, u, g, unknown or other
guaanagaucauguagcuc

SEQ ID NO: 1741298 - RNA, 19 nt, Artificial Sequence
  Description of Artificial Sequence: Synthetic oligonucleotide
uuagcucacugcugggcac

SEQ ID NO: 1741299 - RNA, 19 nt, Artificial Sequence
  Description of Artificial Sequence: Synthetic oligonucleotide
agacaccucacuagcuccc

SEQ ID NO: 1741300 - RNA, 19 nt, Artificial Sequence
  Description of Artificial Sequence: Synthetic oligonucleotide
uggcaggugagacacccuc

SEQ ID NO: 1741301 - RNA, 19 nt, Artificial Sequence
  Description of Artificial Sequence: Synthetic oligonucleotide
gccauuuuccuccaccagc

SEQ ID NO: 1741302 - RNA, 19 nt, Artificial Sequence
  Description of Artificial Sequence: Synthetic oligonucleotide
aguauacgucguccacacg

SEQ ID NO: 1741303 - RNA, 19 nt, Artificial Sequence
  Description of Artificial Sequence: Synthetic oligonucleotide
gccgcuucagcacauagac

SEQ ID NO: 1741304 - RNA, 19 nt, Artificial Sequence
  Description of Artificial Sequence: Synthetic oligonucleotide
cauagaccugaugaauuac

SEQ ID NO: 1741305 - RNA, 19 nt, Artificial Sequence
  Description of Artificial Sequence: Synthetic oligonucleotide
caccucacuagcucccagg

SEQ ID NO: 1741306 - RNA, 19 nt, Artificial Sequence
  Description of Artificial Sequence: Synthetic oligonucleotide
cugcaggaacucauccacg

SEQ ID NO: 1741307 - RNA, 19 nt, Artificial Sequence
  Description of Artificial Sequence: Synthetic oligonucleotide
cccauaagaagguuccacc

SEQ ID NO: 1741308 - RNA, 19 nt, Artificial Sequence
  Description of Artificial Sequence: Synthetic oligonucleotide
uuggccucgggaagcaggu

SEQ ID NO: 1741309 - RNA, 19 nt, Artificial Sequence
  Description of Artificial Sequence: Synthetic oligonucleotide
uaggaggcgggugaguugu

SEQ ID NO: 1741310 - RNA, 19 nt, Artificial Sequence
  Description of Artificial Sequence: Synthetic oligonucleotide
cugaguauacgucguccac

SEQ ID NO: 1741311 - RNA, 19 nt, Artificial Sequence
  Description of Artificial Sequence: Synthetic oligonucleotide
gaccuucugaaccccauaa

SEQ ID NO: 1741312 - RNA, 19 nt, Artificial Sequence
  Description of Artificial Sequence: Synthetic oligonucleotide
gggugaguugucuaagaug

SEQ ID NO: 1741313 - RNA, 19 nt, Artificial Sequence
  Description of Artificial Sequence: Synthetic oligonucleotide
cucgaaacagccgggcacc

SEQ ID NO: 1741314 - RNA, 19 nt, Artificial Sequence
  Description of Artificial Sequence: Synthetic oligonucleotide
uggugggauuagcucacug

SEQ ID NO: 1741315 - RNA, 19 nt, Artificial Sequence
  Description of Artificial Sequence: Synthetic oligonucleotide
aggccauggguuuugcuaa

SEQ ID NO: 1741316 - RNA, 19 nt, Artificial Sequence
  Description of Artificial Sequence: Synthetic oligonucleotide
ucguccacacggcugaguu

SEQ ID NO: 1741317 - RNA, 19 nt, Artificial Sequence
  Description of Artificial Sequence: Synthetic oligonucleotide
  modified_base (6)..(6): a, c, u, g, unknown or other
gguaanagaucauguagcu

SEQ ID NO: 1741318 - RNA, 19 nt, Artificial Sequence
  Description of Artificial Sequence: Synthetic oligonucleotide
cagauacucugaaggcacc

SEQ ID NO: 1741319 - RNA, 19 nt, Artificial Sequence
  Description of Artificial Sequence: Synthetic oligonucleotide
cagugaugaggcagggccc

SEQ ID NO: 1741320 - RNA, 19 nt, Artificial Sequence
  Description of Artificial Sequence: Synthetic oligonucleotide
agagcucgcccauucgcug

SEQ ID NO: 1741321 - RNA, 19 nt, Artificial Sequence
  Description of Artificial Sequence: Synthetic oligonucleotide
aagaagguuccaccugcuu

SEQ ID NO: 1741322 - RNA, 19 nt, Artificial Sequence
  Description of Artificial Sequence: Synthetic oligonucleotide
  modified_base (2)..(2): a, c, u, g, unknown or other
anagaucauguagcucagu

SEQ ID NO: 1741323 - RNA, 19 nt, Artificial Sequence
  Description of Artificial Sequence: Synthetic oligonucleotide
auggaagacguaggaggcg

SEQ ID NO: 1741324 - RNA, 19 nt, Artificial Sequence
  Description of Artificial Sequence: Synthetic oligonucleotide
acucugaaggcaccaguaa

SEQ ID NO: 1741325 - RNA, 19 nt, Artificial Sequence
  Description of Artificial Sequence: Synthetic oligonucleotide
caggucgaugaccacgcag

SEQ ID NO: 1741326 - RNA, 19 nt, Artificial Sequence
  Description of Artificial Sequence: Synthetic oligonucleotide
cuugucccgaguccugggc

SEQ ID NO: 1741327 - RNA, 19 nt, Artificial Sequence
  Description of Artificial Sequence: Synthetic oligonucleotide
auuucugggcccagggaag

SEQ ID NO: 1741328 - RNA, 19 nt, Artificial Sequence
  Description of Artificial Sequence: Synthetic oligonucleotide
uacggcaccacaggaaauc

SEQ ID NO: 1741329 - RNA, 19 nt, Artificial Sequence
  Description of Artificial Sequence: Synthetic oligonucleotide
acgugaggccgcuucagca

SEQ ID NO: 1741330 - RNA, 19 nt, Artificial Sequence
  Description of Artificial Sequence: Synthetic oligonucleotide
gaaccccauaagaagguuc

SEQ ID NO: 1741331 - RNA, 19 nt, Artificial Sequence
  Description of Artificial Sequence: Synthetic oligonucleotide
gcugaguugcucgaagagg

SEQ ID NO: 1741332 - RNA, 19 nt, Artificial Sequence
  Description of Artificial Sequence: Synthetic oligonucleotide
ucccacagucugaugggga

SEQ ID NO: 1741333 - RNA, 19 nt, Artificial Sequence
  Description of Artificial Sequence: Synthetic oligonucleotide
guaugaugaagucagcauu

SEQ ID NO: 1741334 - RNA, 19 nt, Artificial Sequence
  Description of Artificial Sequence: Synthetic oligonucleotide
  modified_base (15)..(15): a, c, u, g, unknown or other
cucgaagaggguaanagau

SEQ ID NO: 1741335 - RNA, 19 nt, Artificial Sequence
  Description of Artificial Sequence: Synthetic oligonucleotide
ggggcuuaaaugaugcagc

SEQ ID NO: 1741336 - RNA, 19 nt, Artificial Sequence
  Description of Artificial Sequence: Synthetic oligonucleotide
uugcauaggccauggguuu

SEQ ID NO: 1741337 - RNA, 19 nt, Artificial Sequence
  Description of Artificial Sequence: Synthetic oligonucleotide
gacucucgaaacagccggg

SEQ ID NO: 1741338 - RNA, 19 nt, Artificial Sequence
  Description of Artificial Sequence: Synthetic oligonucleotide
guauugcauaggccauggg

SEQ ID NO: 1741339 - RNA, 19 nt, Artificial Sequence
  Description of Artificial Sequence: Synthetic oligonucleotide
agagcgaguggaggaugcc

SEQ ID NO: 1741340 - RNA, 19 nt, Artificial Sequence
  Description of Artificial Sequence: Synthetic oligonucleotide
gggcuuaaaugaugcagcc

SEQ ID NO: 1741341 - RNA, 19 nt, Artificial Sequence
  Description of Artificial Sequence: Synthetic oligonucleotide
uggaggaugccccgacuuc

SEQ ID NO: 1741342 - RNA, 19 nt, Artificial Sequence
  Description of Artificial Sequence: Synthetic oligonucleotide
ggcaccaguaaagucuggg

SEQ ID NO: 1741343 - RNA, 19 nt, Artificial Sequence
  Description of Artificial Sequence: Synthetic oligonucleotide
  modified_base (16)..(16): a, c, u, g, unknown or other
gcucgaagaggguaanaga

SEQ ID NO: 1741344 - RNA, 19 nt, Artificial Sequence
  Description of Artificial Sequence: Synthetic oligonucleotide
uccacgugaggccgcuuca

SEQ ID NO: 1741345 - RNA, 19 nt, Artificial Sequence
  Description of Artificial Sequence: Synthetic oligonucleotide
accagugaugaggcagggc

SEQ ID NO: 1741346 - RNA, 19 nt, Artificial Sequence
  Description of Artificial Sequence: Synthetic oligonucleotide
gugggauuagcucacugcu

SEQ ID NO: 1741347 - RNA, 19 nt, Artificial Sequence
  Description of Artificial Sequence: Synthetic oligonucleotide
ugccuagcacugaguauac

SEQ ID NO: 1741348 - RNA, 19 nt, Artificial Sequence
  Description of Artificial Sequence: Synthetic oligonucleotide
agauacucugaaggcacca

SEQ ID NO: 1741349 - RNA, 19 nt, Artificial Sequence
  Description of Artificial Sequence: Synthetic oligonucleotide
ggaggaugccccgacuucg

SEQ ID NO: 1741350 - RNA, 19 nt, Artificial Sequence
  Description of Artificial Sequence: Synthetic oligonucleotide
ugucccgaguccugggccu

SEQ ID NO: 1741351 - RNA, 19 nt, Artificial Sequence
  Description of Artificial Sequence: Synthetic oligonucleotide
cacucauguugucauuguc

SEQ ID NO: 1741352 - RNA, 19 nt, Artificial Sequence
  Description of Artificial Sequence: Synthetic oligonucleotide
gagcgaguggaggaugccc

SEQ ID NO: 1741353 - RNA, 19 nt, Artificial Sequence
  Description of Artificial Sequence: Synthetic oligonucleotide
cucacugcugggcacagaa

SEQ ID NO: 1741354 - RNA, 19 nt, Artificial Sequence
  Description of Artificial Sequence: Synthetic oligonucleotide
aggggugaggcaccaguga

SEQ ID NO: 1741355 - RNA, 19 nt, Artificial Sequence
  Description of Artificial Sequence: Synthetic oligonucleotide
gucuaagaugacgcacccg

SEQ ID NO: 1741356 - RNA, 19 nt, Artificial Sequence
  Description of Artificial Sequence: Synthetic oligonucleotide
acgcagaucuugucccgag

SEQ ID NO: 1741357 - RNA, 19 nt, Artificial Sequence
  Description of Artificial Sequence: Synthetic oligonucleotide
gaugacgcacccgccgcag

SEQ ID NO: 1741358 - RNA, 19 nt, Artificial Sequence
  Description of Artificial Sequence: Synthetic oligonucleotide
aggccgcuucagcacauag

SEQ ID NO: 1741359 - RNA, 19 nt, Artificial Sequence
  Description of Artificial Sequence: Synthetic oligonucleotide
ggauuagcucacugcuggg

SEQ ID NO: 1741360 - RNA, 19 nt, Artificial Sequence
  Description of Artificial Sequence: Synthetic oligonucleotide
ucgaaacagccgggcaccg

SEQ ID NO: 1741361 - RNA, 19 nt, Artificial Sequence
  Description of Artificial Sequence: Synthetic oligonucleotide
ggguuuaggggugaggcac

SEQ ID NO: 1741362 - RNA, 19 nt, Artificial Sequence
  Description of Artificial Sequence: Synthetic oligonucleotide
aucaaucuccacggguaug

SEQ ID NO: 1741363 - RNA, 19 nt, Artificial Sequence
  Description of Artificial Sequence: Synthetic oligonucleotide
cacacucaaagagcucgcc

SEQ ID NO: 1741364 - RNA, 19 nt, Artificial Sequence
  Description of Artificial Sequence: Synthetic oligonucleotide
auacgucguccacacggcu

SEQ ID NO: 1741365 - RNA, 19 nt, Artificial Sequence
  Description of Artificial Sequence: Synthetic oligonucleotide
agggccugugaccccucac

SEQ ID NO: 1741366 - RNA, 19 nt, Artificial Sequence
  Description of Artificial Sequence: Synthetic oligonucleotide
auaggccauggguuuugcu

SEQ ID NO: 1741367 - RNA, 19 nt, Artificial Sequence
  Description of Artificial Sequence: Synthetic oligonucleotide
agcacugaguauacgucgu

SEQ ID NO: 1741368 - RNA, 19 nt, Artificial Sequence
  Description of Artificial Sequence: Synthetic oligonucleotide
auuaccccaucaaucucca

SEQ ID NO: 1741369 - RNA, 19 nt, Artificial Sequence
  Description of Artificial Sequence: Synthetic oligonucleotide
uggagaccuucugaacccc

SEQ ID NO: 1741370 - RNA, 19 nt, Artificial Sequence
  Description of Artificial Sequence: Synthetic oligonucleotide
gaucuugucccgaguccug

SEQ ID NO: 1741371 - RNA, 19 nt, Artificial Sequence
  Description of Artificial Sequence: Synthetic oligonucleotide
acaccucacuagcucccag

SEQ ID NO: 1741372 - RNA, 19 nt, Artificial Sequence
  Description of Artificial Sequence: Synthetic oligonucleotide
aguggaggaugccccgacu

SEQ ID NO: 1741373 - RNA, 19 nt, Artificial Sequence
  Description of Artificial Sequence: Synthetic oligonucleotide
aguugcucgaagaggguaa

SEQ ID NO: 1741374 - RNA, 19 nt, Artificial Sequence
  Description of Artificial Sequence: Synthetic oligonucleotide
ggcgccauuuuccuccacc

SEQ ID NO: 1741375 - RNA, 19 nt, Artificial Sequence
  Description of Artificial Sequence: Synthetic oligonucleotide
gcagaucuugucccgaguc

SEQ ID NO: 1741376 - RNA, 19 nt, Artificial Sequence
  Description of Artificial Sequence: Synthetic oligonucleotide
cacgugaggccgcuucagc

SEQ ID NO: 1741377 - RNA, 19 nt, Artificial Sequence
  Description of Artificial Sequence: Synthetic oligonucleotide
uuuaggggugaggcaccag

SEQ ID NO: 1741378 - RNA, 19 nt, Artificial Sequence
  Description of Artificial Sequence: Synthetic oligonucleotide
gacguaggaggcgggugag

SEQ ID NO: 1741379 - RNA, 19 nt, Artificial Sequence
  Description of Artificial Sequence: Synthetic oligonucleotide
cugccuagcacugaguaua

SEQ ID NO: 1741380 - RNA, 19 nt, Artificial Sequence
  Description of Artificial Sequence: Synthetic oligonucleotide
gguaugaugaagucagcau

SEQ ID NO: 1741381 - RNA, 19 nt, Artificial Sequence
  Description of Artificial Sequence: Synthetic oligonucleotide
gaagaggcuugggccuugg

SEQ ID NO: 1741382 - RNA, 19 nt, Artificial Sequence
  Description of Artificial Sequence: Synthetic oligonucleotide
augacgcacccgccgcagg

SEQ ID NO: 1741383 - RNA, 19 nt, Artificial Sequence
  Description of Artificial Sequence: Synthetic oligonucleotide
agaugacgcacccgccgca

SEQ ID NO: 1741384 - RNA, 19 nt, Artificial Sequence
  Description of Artificial Sequence: Synthetic oligonucleotide
agacacagcagaagagcga

SEQ ID NO: 1741385 - RNA, 19 nt, Artificial Sequence
  Description of Artificial Sequence: Synthetic oligonucleotide
cucauccacgugaggccgc

SEQ ID NO: 1741386 - RNA, 19 nt, Artificial Sequence
  Description of Artificial Sequence: Synthetic oligonucleotide
aggccuaggcugccuagca

SEQ ID NO: 1741387 - RNA, 19 nt, Artificial Sequence
  Description of Artificial Sequence: Synthetic oligonucleotide
ugaccacgcagaucuuguc

SEQ ID NO: 1741388 - RNA, 19 nt, Artificial Sequence
  Description of Artificial Sequence: Synthetic oligonucleotide
aagaggcuugggccuuggu

SEQ ID NO: 1741389 - RNA, 19 nt, Artificial Sequence
  Description of Artificial Sequence: Synthetic oligonucleotide
caccaguaaagucuggggu

SEQ ID NO: 1741390 - RNA, 19 nt, Artificial Sequence
  Description of Artificial Sequence: Synthetic oligonucleotide
auguugucauugucuggau

SEQ ID NO: 1741391 - RNA, 19 nt, Artificial Sequence
  Description of Artificial Sequence: Synthetic oligonucleotide
ucugggguuuaggggugag

SEQ ID NO: 1741392 - RNA, 19 nt, Artificial Sequence
  Description of Artificial Sequence: Synthetic oligonucleotide
ggguaugaugaagucagca

SEQ ID NO: 1741393 - RNA, 19 nt, Artificial Sequence
  Description of Artificial Sequence: Synthetic oligonucleotide
gguccuggccccgagacac

SEQ ID NO: 1741394 - RNA, 19 nt, Artificial Sequence
  Description of Artificial Sequence: Synthetic oligonucleotide
ugaaccccauaagaagguu

SEQ ID NO: 1741395 - RNA, 19 nt, Artificial Sequence
  Description of Artificial Sequence: Synthetic oligonucleotide
gguccuuuacauaguuccc

SEQ ID NO: 1741396 - RNA, 19 nt, Artificial Sequence
  Description of Artificial Sequence: Synthetic oligonucleotide
gaagguacucaaguguuuu

SEQ ID NO: 1741397 - RNA, 19 nt, Artificial Sequence
  Description of Artificial Sequence: Synthetic oligonucleotide
cccgagacaccucacuagc

SEQ ID NO: 1741398 - RNA, 19 nt, Artificial Sequence
  Description of Artificial Sequence: Synthetic oligonucleotide
cacauagaccugaugaauu

SEQ ID NO: 1741399 - RNA, 19 nt, Artificial Sequence
  Description of Artificial Sequence: Synthetic oligonucleotide
gacuucggggaucccggga

SEQ ID NO: 1741400 - RNA, 19 nt, Artificial Sequence
  Description of Artificial Sequence: Synthetic oligonucleotide
ggggucuuagggauggcgc

SEQ ID NO: 1741401 - RNA, 19 nt, Artificial Sequence
  Description of Artificial Sequence: Synthetic oligonucleotide
ccgacuucggggaucccgg

SEQ ID NO: 1741402 - RNA, 19 nt, Artificial Sequence
  Description of Artificial Sequence: Synthetic oligonucleotide
cacggguaugaugaaguca

SEQ ID NO: 1741403 - RNA, 19 nt, Artificial Sequence
  Description of Artificial Sequence: Synthetic oligonucleotide
gcauuauucacaggcuuga

SEQ ID NO: 1741404 - RNA, 19 nt, Artificial Sequence
  Description of Artificial Sequence: Synthetic oligonucleotide
cucgcccauucgcugcagg

SEQ ID NO: 1741405 - RNA, 19 nt, Artificial Sequence
  Description of Artificial Sequence: Synthetic oligonucleotide
cucagcuggugggauuagc

SEQ ID NO: 1741406 - RNA, 19 nt, Artificial Sequence
  Description of Artificial Sequence: Synthetic oligonucleotide
cugggguuuaggggugagg

SEQ ID NO: 1741407 - RNA, 19 nt, Artificial Sequence
  Description of Artificial Sequence: Synthetic oligonucleotide
cugugaccccucacagccc

SEQ ID NO: 1741408 - RNA, 19 nt, Artificial Sequence
  Description of Artificial Sequence: Synthetic oligonucleotide
auucgcugcaggaacucau

SEQ ID NO: 1741409 - RNA, 19 nt, Artificial Sequence
  Description of Artificial Sequence: Synthetic oligonucleotide
cacagucugauggggaaga

SEQ ID NO: 1741410 - RNA, 19 nt, Artificial Sequence
  Description of Artificial Sequence: Synthetic oligonucleotide
caucaucucggcagacaca

SEQ ID NO: 1741411 - RNA, 19 nt, Artificial Sequence
  Description of Artificial Sequence: Synthetic oligonucleotide
cagaagguacucaaguguu

SEQ ID NO: 1741412 - RNA, 19 nt, Artificial Sequence
  Description of Artificial Sequence: Synthetic oligonucleotide
aggcgggugaguugucuaa

SEQ ID NO: 1741413 - RNA, 19 nt, Artificial Sequence
  Description of Artificial Sequence: Synthetic oligonucleotide
gugaggccgcuucagcaca

SEQ ID NO: 1741414 - RNA, 19 nt, Artificial Sequence
  Description of Artificial Sequence: Synthetic oligonucleotide
agugaacagcacacacuca

SEQ ID NO: 1741415 - RNA, 19 nt, Artificial Sequence
  Description of Artificial Sequence: Synthetic oligonucleotide
agaagguacucaaguguuu

SEQ ID NO: 1741416 - RNA, 19 nt, Artificial Sequence
  Description of Artificial Sequence: Synthetic oligonucleotide
cucucgaaacagccgggca

SEQ ID NO: 1741417 - RNA, 19 nt, Artificial Sequence
  Description of Artificial Sequence: Synthetic oligonucleotide
ugaggccgcuucagcacau

SEQ ID NO: 1741418 - RNA, 19 nt, Artificial Sequence
  Description of Artificial Sequence: Synthetic oligonucleotide
uuaccccaucaaucuccac

SEQ ID NO: 1741419 - RNA, 19 nt, Artificial Sequence
  Description of Artificial Sequence: Synthetic oligonucleotide
ccuagcacugaguauacgu

SEQ ID NO: 1741420 - RNA, 19 nt, Artificial Sequence
  Description of Artificial Sequence: Synthetic oligonucleotide
gcccauucgcugcaggaac

SEQ ID NO: 1741421 - RNA, 19 nt, Artificial Sequence
  Description of Artificial Sequence: Synthetic oligonucleotide
caccagugaugaggcaggg

SEQ ID NO: 1741422 - RNA, 19 nt, Artificial Sequence
  Description of Artificial Sequence: Synthetic oligonucleotide
cuggccccgagacaccuca

SEQ ID NO: 1741423 - RNA, 19 nt, Artificial Sequence
  Description of Artificial Sequence: Synthetic oligonucleotide
gguuuaggggugaggcacc

SEQ ID NO: 1741424 - RNA, 19 nt, Artificial Sequence
  Description of Artificial Sequence: Synthetic oligonucleotide
  modified_base (18)..(18): a, c, u, g, unknown or other
uugcucgaagaggguaana

SEQ ID NO: 1741425 - RNA, 19 nt, Artificial Sequence
  Description of Artificial Sequence: Synthetic oligonucleotide
cuauccccacccucuccuc

SEQ ID NO: 1741426 - RNA, 19 nt, Artificial Sequence
  Description of Artificial Sequence: Synthetic oligonucleotide
gcgaguggaggaugccccg

SEQ ID NO: 1741427 - RNA, 19 nt, Artificial Sequence
  Description of Artificial Sequence: Synthetic oligonucleotide
acgcacccgccgcaggucu

SEQ ID NO: 1741428 - RNA, 19 nt, Artificial Sequence
  Description of Artificial Sequence: Synthetic oligonucleotide
gaggcgggugaguugucua

SEQ ID NO: 1741429 - RNA, 19 nt, Artificial Sequence
  Description of Artificial Sequence: Synthetic oligonucleotide
auggcgccauuuuccucca

SEQ ID NO: 1741430 - RNA, 19 nt, Artificial Sequence
  Description of Artificial Sequence: Synthetic oligonucleotide
gugaguugucuaagaugac

SEQ ID NO: 1741431 - RNA, 19 nt, Artificial Sequence
  Description of Artificial Sequence: Synthetic oligonucleotide
ggguauugcauaggccaug

SEQ ID NO: 1741432 - RNA, 19 nt, Artificial Sequence
  Description of Artificial Sequence: Synthetic oligonucleotide
ccccgagacaccucacuag

SEQ ID NO: 1741433 - RNA, 19 nt, Artificial Sequence
  Description of Artificial Sequence: Synthetic oligonucleotide
gucgaugaccacgcagauc

SEQ ID NO: 1741434 - RNA, 19 nt, Artificial Sequence
  Description of Artificial Sequence: Synthetic oligonucleotide
cucucgcccucccuuaaaa

SEQ ID NO: 1741435 - RNA, 19 nt, Artificial Sequence
  Description of Artificial Sequence: Synthetic oligonucleotide
cugaaggcaccaguaaagu

SEQ ID NO: 1741436 - RNA, 19 nt, Artificial Sequence
  Description of Artificial Sequence: Synthetic oligonucleotide
guagcucagugucacucau

SEQ ID NO: 1741437 - RNA, 19 nt, Artificial Sequence
  Description of Artificial Sequence: Synthetic oligonucleotide
  modified_base (19)..(19): a, c, u, g, unknown or other
guugcucgaagaggguaan

SEQ ID NO: 1741438 - RNA, 19 nt, Artificial Sequence
  Description of Artificial Sequence: Synthetic oligonucleotide
gaagacguaggaggcgggu

SEQ ID NO: 1741439 - RNA, 19 nt, Artificial Sequence
  Description of Artificial Sequence: Synthetic oligonucleotide
cugcauacuuggcaaggcu

SEQ ID NO: 1741440 - RNA, 19 nt, Artificial Sequence
  Description of Artificial Sequence: Synthetic oligonucleotide
cucggcccagccugcucag

SEQ ID NO: 1741441 - RNA, 19 nt, Artificial Sequence
  Description of Artificial Sequence: Synthetic oligonucleotide
gggccugugaccccucaca

SEQ ID NO: 1741442 - RNA, 19 nt, Artificial Sequence
  Description of Artificial Sequence: Synthetic oligonucleotide
agcucacugcugggcacag

SEQ ID NO: 1741443 - RNA, 19 nt, Artificial Sequence
  Description of Artificial Sequence: Synthetic oligonucleotide
cauuauucacaggcuugaa

SEQ ID NO: 1741444 - RNA, 19 nt, Artificial Sequence
  Description of Artificial Sequence: Synthetic oligonucleotide
gcgccauuuuccuccacca

SEQ ID NO: 1741445 - RNA, 19 nt, Artificial Sequence
  Description of Artificial Sequence: Synthetic oligonucleotide
ggccuccccaucaucucgg

SEQ ID NO: 1741446 - RNA, 19 nt, Artificial Sequence
  Description of Artificial Sequence: Synthetic oligonucleotide
  modified_base (12)..(12): a, c, u, g, unknown or other
gaagaggguaanagaucau

SEQ ID NO: 1741447 - RNA, 19 nt, Artificial Sequence
  Description of Artificial Sequence: Synthetic oligonucleotide
ccugaugaauuaccccauc

SEQ ID NO: 1741448 - RNA, 19 nt, Artificial Sequence
  Description of Artificial Sequence: Synthetic oligonucleotide
ggcgggugaguugucuaag

SEQ ID NO: 1741449 - RNA, 19 nt, Artificial Sequence
  Description of Artificial Sequence: Synthetic oligonucleotide
cauucgcugcaggaacuca

SEQ ID NO: 1741450 - RNA, 19 nt, Artificial Sequence
  Description of Artificial Sequence: Synthetic oligonucleotide
gggguuuaggggugaggca

SEQ ID NO: 1741451 - RNA, 19 nt, Artificial Sequence
  Description of Artificial Sequence: Synthetic oligonucleotide
cccgacuucggggaucccg

SEQ ID NO: 1741452 - RNA, 19 nt, Artificial Sequence
  Description of Artificial Sequence: Synthetic oligonucleotide
accccauaagaagguucca

SEQ ID NO: 1741453 - RNA, 19 nt, Artificial Sequence
  Description of Artificial Sequence: Synthetic oligonucleotide
gcuggugggauuagcucac

SEQ ID NO: 1741454 - RNA, 19 nt, Artificial Sequence
  Description of Artificial Sequence: Synthetic oligonucleotide
ccacccucuccucucgccc

SEQ ID NO: 1741455 - RNA, 19 nt, Artificial Sequence
  Description of Artificial Sequence: Synthetic oligonucleotide
gugagggaggaggucuauc

SEQ ID NO: 1741456 - RNA, 19 nt, Artificial Sequence
  Description of Artificial Sequence: Synthetic oligonucleotide
cgugaggccgcuucagcac

SEQ ID NO: 1741457 - RNA, 19 nt, Artificial Sequence
  Description of Artificial Sequence: Synthetic oligonucleotide
ccccacugugggcaggccg

SEQ ID NO: 1741458 - RNA, 19 nt, Artificial Sequence
  Description of Artificial Sequence: Synthetic oligonucleotide
agggucucguccaggucga

SEQ ID NO: 1741459 - RNA, 19 nt, Artificial Sequence
  Description of Artificial Sequence: Synthetic oligonucleotide
auacggcaccacaggaaau

SEQ ID NO: 1741460 - RNA, 19 nt, Artificial Sequence
  Description of Artificial Sequence: Synthetic oligonucleotide
gccuaggcugccuagcacu

SEQ ID NO: 1741461 - RNA, 19 nt, Artificial Sequence
  Description of Artificial Sequence: Synthetic oligonucleotide
accccucacagcccagcuu

SEQ ID NO: 1741462 - RNA, 19 nt, Artificial Sequence
  Description of Artificial Sequence: Synthetic oligonucleotide
caucaaucuccacggguau

SEQ ID NO: 1741463 - RNA, 19 nt, Artificial Sequence
  Description of Artificial Sequence: Synthetic oligonucleotide
guggaggaugccccgacuu

SEQ ID NO: 1741464 - RNA, 19 nt, Artificial Sequence
  Description of Artificial Sequence: Synthetic oligonucleotide
ggacuggggucuuagggau

SEQ ID NO: 1741465 - RNA, 19 nt, Artificial Sequence
  Description of Artificial Sequence: Synthetic oligonucleotide
cacuagcucccaggccuag

SEQ ID NO: 1741466 - RNA, 19 nt, Artificial Sequence
  Description of Artificial Sequence: Synthetic oligonucleotide
aggcaccaguaaagucugg

SEQ ID NO: 1741467 - RNA, 19 nt, Artificial Sequence
  Description of Artificial Sequence: Synthetic oligonucleotide
ccacggguaugaugaaguc

SEQ ID NO: 1741468 - RNA, 19 nt, Artificial Sequence
  Description of Artificial Sequence: Synthetic oligonucleotide
ggccuaggcugccuagcac

SEQ ID NO: 1741469 - RNA, 19 nt, Artificial Sequence
  Description of Artificial Sequence: Synthetic oligonucleotide
ggaggaggucuauccccac

SEQ ID NO: 1741470 - RNA, 19 nt, Artificial Sequence
  Description of Artificial Sequence: Synthetic oligonucleotide
gcgggugaguugucuaaga

SEQ ID NO: 1741471 - RNA, 19 nt, Artificial Sequence
  Description of Artificial Sequence: Synthetic oligonucleotide
cagggccauggguauugca

SEQ ID NO: 1741472 - RNA, 19 nt, Artificial Sequence
  Description of Artificial Sequence: Synthetic oligonucleotide
ccugcucagguccuuuaca

SEQ ID NO: 1741473 - RNA, 19 nt, Artificial Sequence
  Description of Artificial Sequence: Synthetic oligonucleotide
uggccccgagacaccucac

SEQ ID NO: 1741474 - RNA, 19 nt, Artificial Sequence
  Description of Artificial Sequence: Synthetic oligonucleotide
ggauggcgccauuuuccuc

SEQ ID NO: 1741475 - RNA, 19 nt, Artificial Sequence
  Description of Artificial Sequence: Synthetic oligonucleotide
cugggccuuggccucggga

SEQ ID NO: 1741476 - RNA, 19 nt, Artificial Sequence
  Description of Artificial Sequence: Synthetic oligonucleotide
cacgcagaucuugucccga

SEQ ID NO: 1741477 - RNA, 19 nt, Artificial Sequence
  Description of Artificial Sequence: Synthetic oligonucleotide
ccgggcaccggaaggcccc

SEQ ID NO: 1741478 - RNA, 19 nt, Artificial Sequence
  Description of Artificial Sequence: Synthetic oligonucleotide
gccuagcacugaguauacg

SEQ ID NO: 1741479 - RNA, 19 nt, Artificial Sequence
  Description of Artificial Sequence: Synthetic oligonucleotide
cccacccucuccucucgcc

SEQ ID NO: 1741480 - RNA, 19 nt, Artificial Sequence
  Description of Artificial Sequence: Synthetic oligonucleotide
cagcuacagggucugcaua

SEQ ID NO: 1741481 - RNA, 19 nt, Artificial Sequence
  Description of Artificial Sequence: Synthetic oligonucleotide
cccuauuucugggcccagg

SEQ ID NO: 1741482 - RNA, 19 nt, Artificial Sequence
  Description of Artificial Sequence: Synthetic oligonucleotide
cauguagcucagugucacu

SEQ ID NO: 1741483 - RNA, 19 nt, Artificial Sequence
  Description of Artificial Sequence: Synthetic oligonucleotide
aggcaggcucccacagucu

SEQ ID NO: 1741484 - RNA, 19 nt, Artificial Sequence
  Description of Artificial Sequence: Synthetic oligonucleotide
gucucggcccagccugcuc

SEQ ID NO: 1741485 - RNA, 19 nt, Artificial Sequence
  Description of Artificial Sequence: Synthetic oligonucleotide
cuuagggauggcgccauuu

SEQ ID NO: 1741486 - RNA, 19 nt, Artificial Sequence
  Description of Artificial Sequence: Synthetic oligonucleotide
ggcuuaaaugaugcagccu

SEQ ID NO: 1741487 - RNA, 19 nt, Artificial Sequence
  Description of Artificial Sequence: Synthetic oligonucleotide
ccccaucaaucuccacggg

SEQ ID NO: 1741488 - RNA, 19 nt, Artificial Sequence
  Description of Artificial Sequence: Synthetic oligonucleotide
cucccaggccuaggcugcc

SEQ ID NO: 1741489 - RNA, 19 nt, Artificial Sequence
  Description of Artificial Sequence: Synthetic oligonucleotide
ggaagaggcuugggccuug

SEQ ID NO: 1741490 - RNA, 19 nt, Artificial Sequence
  Description of Artificial Sequence: Synthetic oligonucleotide
ggaaggggugagggaggag

SEQ ID NO: 1741491 - RNA, 19 nt, Artificial Sequence
  Description of Artificial Sequence: Synthetic oligonucleotide
gcacccgccgcaggucucg

SEQ ID NO: 1741492 - RNA, 19 nt, Artificial Sequence
  Description of Artificial Sequence: Synthetic oligonucleotide
cuggggucuuagggauggc

SEQ ID NO: 1741493 - RNA, 19 nt, Artificial Sequence
  Description of Artificial Sequence: Synthetic oligonucleotide
cuacagggucugcauacuu

SEQ ID NO: 1741494 - RNA, 19 nt, Artificial Sequence
  Description of Artificial Sequence: Synthetic oligonucleotide
cuccucucgcccucccuua

SEQ ID NO: 1741495 - RNA, 19 nt, Artificial Sequence
  Description of Artificial Sequence: Synthetic oligonucleotide
gugaccccucacagcccag

SEQ ID NO: 1741496 - RNA, 19 nt, Artificial Sequence
  Description of Artificial Sequence: Synthetic oligonucleotide
aggaggcgggugaguuguc

SEQ ID NO: 1741497 - RNA, 19 nt, Artificial Sequence
  Description of Artificial Sequence: Synthetic oligonucleotide
augccccgacuucggggau

SEQ ID NO: 1741498 - RNA, 19 nt, Artificial Sequence
  Description of Artificial Sequence: Synthetic oligonucleotide
ccauucgcugcaggaacuc

SEQ ID NO: 1741499 - RNA, 19 nt, Artificial Sequence
  Description of Artificial Sequence: Synthetic oligonucleotide
gucugggguuuagggguga

SEQ ID NO: 1741500 - RNA, 19 nt, Artificial Sequence
  Description of Artificial Sequence: Synthetic oligonucleotide
cccaucaaucuccacgggu

SEQ ID NO: 1741501 - RNA, 19 nt, Artificial Sequence
  Description of Artificial Sequence: Synthetic oligonucleotide
gccauggguuuugcuaaca

SEQ ID NO: 1741502 - RNA, 19 nt, Artificial Sequence
  Description of Artificial Sequence: Synthetic oligonucleotide
ccacgugaggccgcuucag

SEQ ID NO: 1741503 - RNA, 19 nt, Artificial Sequence
  Description of Artificial Sequence: Synthetic oligonucleotide
ccucgggaagcagguacug

SEQ ID NO: 1741504 - RNA, 19 nt, Artificial Sequence
  Description of Artificial Sequence: Synthetic oligonucleotide
ggaggucuauccccacccu

SEQ ID NO: 1741505 - RNA, 19 nt, Artificial Sequence
  Description of Artificial Sequence: Synthetic oligonucleotide
gcugccuagcacugaguau

SEQ ID NO: 1741506 - RNA, 19 nt, Artificial Sequence
  Description of Artificial Sequence: Synthetic oligonucleotide
cguccacacggcugaguug

SEQ ID NO: 1741507 - RNA, 19 nt, Artificial Sequence
  Description of Artificial Sequence: Synthetic oligonucleotide
ggucgaugaccacgcagau

SEQ ID NO: 1741508 - RNA, 19 nt, Artificial Sequence
  Description of Artificial Sequence: Synthetic oligonucleotide
gcaggugagacacccucuu

SEQ ID NO: 1741509 - RNA, 19 nt, Artificial Sequence
  Description of Artificial Sequence: Synthetic oligonucleotide
gucuuagggauggcgccau

SEQ ID NO: 1741510 - RNA, 19 nt, Artificial Sequence
  Description of Artificial Sequence: Synthetic oligonucleotide
ggcaggccgggccucccca

SEQ ID NO: 1741511 - RNA, 19 nt, Artificial Sequence
  Description of Artificial Sequence: Synthetic oligonucleotide
cgaaacagccgggcaccgg

SEQ ID NO: 1741512 - RNA, 19 nt, Artificial Sequence
  Description of Artificial Sequence: Synthetic oligonucleotide
uggccucgggaagcaggua

SEQ ID NO: 1741513 - RNA, 19 nt, Artificial Sequence
  Description of Artificial Sequence: Synthetic oligonucleotide
caggcucccacagucugau

SEQ ID NO: 1741514 - RNA, 19 nt, Artificial Sequence
  Description of Artificial Sequence: Synthetic oligonucleotide
cacccgccgcaggucucgg

SEQ ID NO: 1741515 - RNA, 19 nt, Artificial Sequence
  Description of Artificial Sequence: Synthetic oligonucleotide
cacggcugaguugcucgaa

SEQ ID NO: 1741516 - RNA, 19 nt, Artificial Sequence
  Description of Artificial Sequence: Synthetic oligonucleotide
ggucagcuacagggucugc

SEQ ID NO: 1741517 - RNA, 19 nt, Artificial Sequence
  Description of Artificial Sequence: Synthetic oligonucleotide
gaggccgcuucagcacaua

SEQ ID NO: 1741518 - RNA, 19 nt, Artificial Sequence
  Description of Artificial Sequence: Synthetic oligonucleotide
ggccccgagacaccucacu

SEQ ID NO: 1741519 - RNA, 19 nt, Artificial Sequence
  Description of Artificial Sequence: Synthetic oligonucleotide
cccauucgcugcaggaacu

SEQ ID NO: 1741520 - RNA, 19 nt, Artificial Sequence
  Description of Artificial Sequence: Synthetic oligonucleotide
ccccaagcuuuggggagac

SEQ ID NO: 1741521 - RNA, 19 nt, Artificial Sequence
  Description of Artificial Sequence: Synthetic oligonucleotide
gucguccacacggcugagu

SEQ ID NO: 1741522 - RNA, 19 nt, Artificial Sequence
  Description of Artificial Sequence: Synthetic oligonucleotide
ggaggcgggugaguugucu

SEQ ID NO: 1741523 - RNA, 19 nt, Artificial Sequence
  Description of Artificial Sequence: Synthetic oligonucleotide
ccacacggcugaguugcuc

SEQ ID NO: 1741524 - RNA, 19 nt, Artificial Sequence
  Description of Artificial Sequence: Synthetic oligonucleotide
ccagggccauggguauugc

SEQ ID NO: 1741525 - RNA, 19 nt, Artificial Sequence
  Description of Artificial Sequence: Synthetic oligonucleotide
ccaguaaagucugggguuu

SEQ ID NO: 1741526 - RNA, 19 nt, Artificial Sequence
  Description of Artificial Sequence: Synthetic oligonucleotide
guacuggacuggggucuua

SEQ ID NO: 1741527 - RNA, 19 nt, Artificial Sequence
  Description of Artificial Sequence: Synthetic oligonucleotide
ccgagacaccucacuagcu

SEQ ID NO: 1741528 - RNA, 19 nt, Artificial Sequence
  Description of Artificial Sequence: Synthetic oligonucleotide
ccccacccucuccucucgc

SEQ ID NO: 1741529 - RNA, 19 nt, Artificial Sequence
  Description of Artificial Sequence: Synthetic oligonucleotide
ccuggccccgagacaccuc

SEQ ID NO: 1741530 - RNA, 19 nt, Artificial Sequence
  Description of Artificial Sequence: Synthetic oligonucleotide
ccccaucaucucggcagac

SEQ ID NO: 1741531 - RNA, 19 nt, Artificial Sequence
  Description of Artificial Sequence: Synthetic oligonucleotide
cuggugggauuagcucacu

SEQ ID NO: 1741532 - RNA, 19 nt, Artificial Sequence
  Description of Artificial Sequence: Synthetic oligonucleotide
ccaggucgaugaccacgca

SEQ ID NO: 1741533 - RNA, 19 nt, Artificial Sequence
  Description of Artificial Sequence: Synthetic oligonucleotide
ccccuauuucugggcccag

SEQ ID NO: 1741534 - RNA, 19 nt, Artificial Sequence
  Description of Artificial Sequence: Synthetic oligonucleotide
gguacuggacuggggucuu

SEQ ID NO: 1741535 - RNA, 19 nt, Artificial Sequence
  Description of Artificial Sequence: Synthetic oligonucleotide
cgggugaguugucuaagau

SEQ ID NO: 1741536 - RNA, 19 nt, Artificial Sequence
  Description of Artificial Sequence: Synthetic oligonucleotide
ccucucgcccucccuuaaa

SEQ ID NO: 1741537 - RNA, 19 nt, Artificial Sequence
  Description of Artificial Sequence: Synthetic oligonucleotide
ccgcaggucucggcccagc

SEQ ID NO: 1741538 - RNA, 19 nt, Artificial Sequence
  Description of Artificial Sequence: Synthetic oligonucleotide
cccucccacucagcuggug

SEQ ID NO: 1741539 - RNA, 19 nt, Artificial Sequence
  Description of Artificial Sequence: Synthetic oligonucleotide
cgcacccgccgcaggucuc

SEQ ID NO: 1741540 - RNA, 19 nt, Artificial Sequence
  Description of Artificial Sequence: Synthetic oligonucleotide
gcaggccgggccuccccau

SEQ ID NO: 1741541 - RNA, 19 nt, Artificial Sequence
  Description of Artificial Sequence: Synthetic oligonucleotide
cauccacgugaggccgcuu

SEQ ID NO: 1741542 - RNA, 19 nt, Artificial Sequence
  Description of Artificial Sequence: Synthetic oligonucleotide
ccccgacuucggggauccc

SEQ ID NO: 1741543 - RNA, 19 nt, Artificial Sequence
  Description of Artificial Sequence: Synthetic oligonucleotide
ccucacagcccagcuuguu

SEQ ID NO: 1741544 - RNA, 19 nt, Artificial Sequence
  Description of Artificial Sequence: Synthetic oligonucleotide
cgaugaccacgcagaucuu

SEQ ID NO: 1741545 - RNA, 19 nt, Artificial Sequence
  Description of Artificial Sequence: Synthetic oligonucleotide
ccccagggccauggguauu

SEQ ID NO: 1741546 - RNA, 19 nt, Artificial Sequence
  Description of Artificial Sequence: Synthetic oligonucleotide
aaugccaagacuuaaaauc

SEQ ID NO: 1741547 - RNA, 19 nt, Artificial Sequence
  Description of Artificial Sequence: Synthetic oligonucleotide
cuaaaguccacuuagaagc

SEQ ID NO: 1741548 - RNA, 19 nt, Artificial Sequence
  Description of Artificial Sequence: Synthetic oligonucleotide
acuuaaaaucuauuggucc

SEQ ID NO: 1741549 - RNA, 19 nt, Artificial Sequence
  Description of Artificial Sequence: Synthetic oligonucleotide
ucuauggcuagaaucaccc

SEQ ID NO: 1741550 - RNA, 19 nt, Artificial Sequence
  Description of Artificial Sequence: Synthetic oligonucleotide
caagacuuaaaaucuauug

SEQ ID NO: 1741551 - RNA, 19 nt, Artificial Sequence
  Description of Artificial Sequence: Synthetic oligonucleotide
agacuuaaaaucuauuggu

SEQ ID NO: 1741552 - RNA, 19 nt, Artificial Sequence
  Description of Artificial Sequence: Synthetic oligonucleotide
uuuucuagaagaaaccuuu

SEQ ID NO: 1741553 - RNA, 19 nt, Artificial Sequence
  Description of Artificial Sequence: Synthetic oligonucleotide
uuuaaccagucucugggcc

SEQ ID NO: 1741554 - RNA, 19 nt, Artificial Sequence
  Description of Artificial Sequence: Synthetic oligonucleotide
aaaugccaagacuuaaaau

SEQ ID NO: 1741555 - RNA, 19 nt, Artificial Sequence
  Description of Artificial Sequence: Synthetic oligonucleotide
gaagggguggguugggugg

SEQ ID NO: 1741556 - RNA, 19 nt, Artificial Sequence
  Description of Artificial Sequence: Synthetic oligonucleotide
uaaaguccacuuagaagcc

SEQ ID NO: 1741557 - RNA, 19 nt, Artificial Sequence
  Description of Artificial Sequence: Synthetic oligonucleotide
uaaaaucuauugguccugg

SEQ ID NO: 1741558 - RNA, 19 nt, Artificial Sequence
  Description of Artificial Sequence: Synthetic oligonucleotide
ucucagguccuaaagucca

SEQ ID NO: 1741559 - RNA, 19 nt, Artificial Sequence
  Description of Artificial Sequence: Synthetic oligonucleotide
uggacugaaaugccaagac

SEQ ID NO: 1741560 - RNA, 19 nt, Artificial Sequence
  Description of Artificial Sequence: Synthetic oligonucleotide
ugaaaugccaagacuuaaa

SEQ ID NO: 1741561 - RNA, 19 nt, Artificial Sequence
  Description of Artificial Sequence: Synthetic oligonucleotide
uuaaaaucuauugguccug

SEQ ID NO: 1741562 - RNA, 19 nt, Artificial Sequence
  Description of Artificial Sequence: Synthetic oligonucleotide
uccuaaaguccacuuagaa

SEQ ID NO: 1741563 - RNA, 19 nt, Artificial Sequence
  Description of Artificial Sequence: Synthetic oligonucleotide
gguccuaaaguccacuuag

SEQ ID NO: 1741564 - RNA, 19 nt, Artificial Sequence
  Description of Artificial Sequence: Synthetic oligonucleotide
gaaaugccaagacuuaaaa

SEQ ID NO: 1741565 - RNA, 19 nt, Artificial Sequence
  Description of Artificial Sequence: Synthetic oligonucleotide
cuugccucaagagagggac

SEQ ID NO: 1741566 - RNA, 19 nt, Artificial Sequence
  Description of Artificial Sequence: Synthetic oligonucleotide
uuaaccagucucugggcca

SEQ ID NO: 1741567 - RNA, 19 nt, Artificial Sequence
  Description of Artificial Sequence: Synthetic oligonucleotide
gacuuaaaaucuauugguc

SEQ ID NO: 1741568 - RNA, 19 nt, Artificial Sequence
  Description of Artificial Sequence: Synthetic oligonucleotide
cucugggccacgaaggggc

SEQ ID NO: 1741569 - RNA, 19 nt, Artificial Sequence
  Description of Artificial Sequence: Synthetic oligonucleotide
cucucagguccuaaagucc

SEQ ID NO: 1741570 - RNA, 19 nt, Artificial Sequence
  Description of Artificial Sequence: Synthetic oligonucleotide
uggcucagccccaagcugc

SEQ ID NO: 1741571 - RNA, 19 nt, Artificial Sequence
  Description of Artificial Sequence: Synthetic oligonucleotide
cuuaaaaucuauugguccu

SEQ ID NO: 1741572 - RNA, 19 nt, Artificial Sequence
  Description of Artificial Sequence: Synthetic oligonucleotide
accaccuugccucaagaga

SEQ ID NO: 1741573 - RNA, 19 nt, Artificial Sequence
  Description of Artificial Sequence: Synthetic oligonucleotide
ccuaaaguccacuuagaag

SEQ ID NO: 1741574 - RNA, 19 nt, Artificial Sequence
  Description of Artificial Sequence: Synthetic oligonucleotide
ugaagggguggguugggug

SEQ ID NO: 1741575 - RNA, 19 nt, Artificial Sequence
  Description of Artificial Sequence: Synthetic oligonucleotide
ggcagaggaaguucuaugc

SEQ ID NO: 1741576 - RNA, 19 nt, Artificial Sequence
  Description of Artificial Sequence: Synthetic oligonucleotide
augccaagacuuaaaaucu

SEQ ID NO: 1741577 - RNA, 19 nt, Artificial Sequence
  Description of Artificial Sequence: Synthetic oligonucleotide
agucucugggccacgaagg

SEQ ID NO: 1741578 - RNA, 19 nt, Artificial Sequence
  Description of Artificial Sequence: Synthetic oligonucleotide
gacugaagggguggguugg

SEQ ID NO: 1741579 - RNA, 19 nt, Artificial Sequence
  Description of Artificial Sequence: Synthetic oligonucleotide
aaaguccacuuagaagccu

SEQ ID NO: 1741580 - RNA, 19 nt, Artificial Sequence
  Description of Artificial Sequence: Synthetic oligonucleotide
ccaccuugccucaagagag

SEQ ID NO: 1741581 - RNA, 19 nt, Artificial Sequence
  Description of Artificial Sequence: Synthetic oligonucleotide
ugguggcucagccccaagc

SEQ ID NO: 1741582 - RNA, 19 nt, Artificial Sequence
  Description of Artificial Sequence: Synthetic oligonucleotide
ugccucaagagagggacug

SEQ ID NO: 1741583 - RNA, 19 nt, Artificial Sequence
  Description of Artificial Sequence: Synthetic oligonucleotide
agagggacugaaggggugg

SEQ ID NO: 1741584 - RNA, 19 nt, Artificial Sequence
  Description of Artificial Sequence: Synthetic oligonucleotide
agccccaagcugcccaggc

SEQ ID NO: 1741585 - RNA, 19 nt, Artificial Sequence
  Description of Artificial Sequence: Synthetic oligonucleotide
cagucucugggccacgaag

SEQ ID NO: 1741586 - RNA, 19 nt, Artificial Sequence
  Description of Artificial Sequence: Synthetic oligonucleotide
cuauggcuagaaucacccc

SEQ ID NO: 1741587 - RNA, 19 nt, Artificial Sequence
  Description of Artificial Sequence: Synthetic oligonucleotide
gacugaaaugccaagacuu

SEQ ID NO: 1741588 - RNA, 19 nt, Artificial Sequence
  Description of Artificial Sequence: Synthetic oligonucleotide
gucucugggccacgaaggg

SEQ ID NO: 1741589 - RNA, 19 nt, Artificial Sequence
  Description of Artificial Sequence: Synthetic oligonucleotide
ucucugggccacgaagggg

SEQ ID NO: 1741590 - RNA, 19 nt, Artificial Sequence
  Description of Artificial Sequence: Synthetic oligonucleotide
ugccaagacuuaaaaucua

SEQ ID NO: 1741591 - RNA, 19 nt, Artificial Sequence
  Description of Artificial Sequence: Synthetic oligonucleotide
ucugggccacgaaggggcg

SEQ ID NO: 1741592 - RNA, 19 nt, Artificial Sequence
  Description of Artificial Sequence: Synthetic oligonucleotide
accuugccucaagagaggg

SEQ ID NO: 1741593 - RNA, 19 nt, Artificial Sequence
  Description of Artificial Sequence: Synthetic oligonucleotide
ugucuauggcuagaaucac

SEQ ID NO: 1741594 - RNA, 19 nt, Artificial Sequence
  Description of Artificial Sequence: Synthetic oligonucleotide
gucuauggcuagaaucacc

SEQ ID NO: 1741595 - RNA, 19 nt, Artificial Sequence
  Description of Artificial Sequence: Synthetic oligonucleotide
acaacagccccaaccaccu

SEQ ID NO: 1741596 - RNA, 19 nt, Artificial Sequence
  Description of Artificial Sequence: Synthetic oligonucleotide
caccuugccucaagagagg

SEQ ID NO: 1741597 - RNA, 19 nt, Artificial Sequence
  Description of Artificial Sequence: Synthetic oligonucleotide
ucagguccuaaaguccacu

SEQ ID NO: 1741598 - RNA, 19 nt, Artificial Sequence
  Description of Artificial Sequence: Synthetic oligonucleotide
gucuucgcagcguugugga

SEQ ID NO: 1741599 - RNA, 19 nt, Artificial Sequence
  Description of Artificial Sequence: Synthetic oligonucleotide
ccucucagguccuaaaguc

SEQ ID NO: 1741600 - RNA, 19 nt, Artificial Sequence
  Description of Artificial Sequence: Synthetic oligonucleotide
aaguccacuuagaagccuu

SEQ ID NO: 1741601 - RNA, 19 nt, Artificial Sequence
  Description of Artificial Sequence: Synthetic oligonucleotide
agguccuaaaguccacuua

SEQ ID NO: 1741602 - RNA, 19 nt, Artificial Sequence
  Description of Artificial Sequence: Synthetic oligonucleotide
gagggacugaagggguggg

SEQ ID NO: 1741603 - RNA, 19 nt, Artificial Sequence
  Description of Artificial Sequence: Synthetic oligonucleotide
guggcucagccccaagcug

SEQ ID NO: 1741604 - RNA, 19 nt, Artificial Sequence
  Description of Artificial Sequence: Synthetic oligonucleotide
ggucuucgcagcguugugg

SEQ ID NO: 1741605 - RNA, 19 nt, Artificial Sequence
  Description of Artificial Sequence: Synthetic oligonucleotide
acugaaaugccaagacuua

SEQ ID NO: 1741606 - RNA, 19 nt, Artificial Sequence
  Description of Artificial Sequence: Synthetic oligonucleotide
gccccaaccaccuugccuc

SEQ ID NO: 1741607 - RNA, 19 nt, Artificial Sequence
  Description of Artificial Sequence: Synthetic oligonucleotide
aguccacuuagaagccuuc

SEQ ID NO: 1741608 - RNA, 19 nt, Artificial Sequence
  Description of Artificial Sequence: Synthetic oligonucleotide
uugccucaagagagggacu

SEQ ID NO: 1741609 - RNA, 19 nt, Artificial Sequence
  Description of Artificial Sequence: Synthetic oligonucleotide
cuucgcagcguuguggaca

SEQ ID NO: 1741610 - RNA, 19 nt, Artificial Sequence
  Description of Artificial Sequence: Synthetic oligonucleotide
cucagguccuaaaguccac

SEQ ID NO: 1741611 - RNA, 19 nt, Artificial Sequence
  Description of Artificial Sequence: Synthetic oligonucleotide
ggacugaagggguggguug

SEQ ID NO: 1741612 - RNA, 19 nt, Artificial Sequence
  Description of Artificial Sequence: Synthetic oligonucleotide
gggcagaggaaguucuaug

SEQ ID NO: 1741613 - RNA, 19 nt, Artificial Sequence
  Description of Artificial Sequence: Synthetic oligonucleotide
acugaagggguggguuggg

SEQ ID NO: 1741614 - RNA, 19 nt, Artificial Sequence
  Description of Artificial Sequence: Synthetic oligonucleotide
ccccacaacagccccaacc

SEQ ID NO: 1741615 - RNA, 19 nt, Artificial Sequence
  Description of Artificial Sequence: Synthetic oligonucleotide
ugggccacgaaggggcggc

SEQ ID NO: 1741616 - RNA, 19 nt, Artificial Sequence
  Description of Artificial Sequence: Synthetic oligonucleotide
ucuucgcagcguuguggac

SEQ ID NO: 1741617 - RNA, 19 nt, Artificial Sequence
  Description of Artificial Sequence: Synthetic oligonucleotide
cuacaccagccgagggcgg

SEQ ID NO: 1741618 - RNA, 19 nt, Artificial Sequence
  Description of Artificial Sequence: Synthetic oligonucleotide
cugaaaugccaagacuuaa

SEQ ID NO: 1741619 - RNA, 19 nt, Artificial Sequence
  Description of Artificial Sequence: Synthetic oligonucleotide
aaccagucucugggccacg

SEQ ID NO: 1741620 - RNA, 19 nt, Artificial Sequence
  Description of Artificial Sequence: Synthetic oligonucleotide
cucagccccaagcugccca

SEQ ID NO: 1741621 - RNA, 19 nt, Artificial Sequence
  Description of Artificial Sequence: Synthetic oligonucleotide
cccacaacagccccaacca

SEQ ID NO: 1741622 - RNA, 19 nt, Artificial Sequence
  Description of Artificial Sequence: Synthetic oligonucleotide
ggacugaaaugccaagacu

SEQ ID NO: 1741623 - RNA, 19 nt, Artificial Sequence
  Description of Artificial Sequence: Synthetic oligonucleotide
guccuaaaguccacuuaga

SEQ ID NO: 1741624 - RNA, 19 nt, Artificial Sequence
  Description of Artificial Sequence: Synthetic oligonucleotide
gguggcucagccccaagcu

SEQ ID NO: 1741625 - RNA, 19 nt, Artificial Sequence
  Description of Artificial Sequence: Synthetic oligonucleotide
ccaaccaccuugccucaag

SEQ ID NO: 1741626 - RNA, 19 nt, Artificial Sequence
  Description of Artificial Sequence: Synthetic oligonucleotide
accagucucugggccacga

SEQ ID NO: 1741627 - RNA, 19 nt, Artificial Sequence
  Description of Artificial Sequence: Synthetic oligonucleotide
cugggccacgaaggggcgg

SEQ ID NO: 1741628 - RNA, 19 nt, Artificial Sequence
  Description of Artificial Sequence: Synthetic oligonucleotide
ccacaacagccccaaccac

SEQ ID NO: 1741629 - RNA, 19 nt, Artificial Sequence
  Description of Artificial Sequence: Synthetic oligonucleotide
gggucuucgcagcguugug

SEQ ID NO: 1741630 - RNA, 19 nt, Artificial Sequence
  Description of Artificial Sequence: Synthetic oligonucleotide
gaggggucuucgcagcguu

SEQ ID NO: 1741631 - RNA, 19 nt, Artificial Sequence
  Description of Artificial Sequence: Synthetic oligonucleotide
guccccacaacagccccaa

SEQ ID NO: 1741632 - RNA, 19 nt, Artificial Sequence
  Description of Artificial Sequence: Synthetic oligonucleotide
aggggucuucgcagcguug

SEQ ID NO: 1741633 - RNA, 19 nt, Artificial Sequence
  Description of Artificial Sequence: Synthetic oligonucleotide
gccaagacuuaaaaucuau

SEQ ID NO: 1741634 - RNA, 19 nt, Artificial Sequence
  Description of Artificial Sequence: Synthetic oligonucleotide
ggcucagccccaagcugcc

SEQ ID NO: 1741635 - RNA, 19 nt, Artificial Sequence
  Description of Artificial Sequence: Synthetic oligonucleotide
cagguccuaaaguccacuu

SEQ ID NO: 1741636 - RNA, 19 nt, Artificial Sequence
  Description of Artificial Sequence: Synthetic oligonucleotide
cagccccaagcugcccagg

SEQ ID NO: 1741637 - RNA, 19 nt, Artificial Sequence
  Description of Artificial Sequence: Synthetic oligonucleotide
ccaagacuuaaaaucuauu

SEQ ID NO: 1741638 - RNA, 19 nt, Artificial Sequence
  Description of Artificial Sequence: Synthetic oligonucleotide
ccuugccucaagagaggga

SEQ ID NO: 1741639 - RNA, 19 nt, Artificial Sequence
  Description of Artificial Sequence: Synthetic oligonucleotide
ggggucuucgcagcguugu

SEQ ID NO: 1741640 - RNA, 19 nt, Artificial Sequence
  Description of Artificial Sequence: Synthetic oligonucleotide
gggacugaagggguggguu

SEQ ID NO: 1741641 - RNA, 19 nt, Artificial Sequence
  Description of Artificial Sequence: Synthetic oligonucleotide
gccucaagagagggacuga

SEQ ID NO: 1741642 - RNA, 19 nt, Artificial Sequence
  Description of Artificial Sequence: Synthetic oligonucleotide
cugaagggguggguugggu

SEQ ID NO: 1741643 - RNA, 19 nt, Artificial Sequence
  Description of Artificial Sequence: Synthetic oligonucleotide
ggggcagaggaaguucuau

SEQ ID NO: 1741644 - RNA, 19 nt, Artificial Sequence
  Description of Artificial Sequence: Synthetic oligonucleotide
gcucagccccaagcugccc

SEQ ID NO: 1741645 - RNA, 19 nt, Artificial Sequence
  Description of Artificial Sequence: Synthetic oligonucleotide
gccccaagcugcccaggcu

SEQ ID NO: 1741646 - RNA, 19 nt, Artificial Sequence
  Description of Artificial Sequence: Synthetic oligonucleotide
ccccaaccaccuugccuca

SEQ ID NO: 1741647 - RNA, 19 nt, Artificial Sequence
  Description of Artificial Sequence: Synthetic oligonucleotide
ccagucucugggccacgaa

SEQ ID NO: 1741648 - RNA, 19 nt, Artificial Sequence
  Description of Artificial Sequence: Synthetic oligonucleotide
caacagccccaaccaccuu

SEQ ID NO: 1741649 - RNA, 19 nt, Artificial Sequence
  Description of Artificial Sequence: Synthetic oligonucleotide
cccaaccaccuugccucaa

SEQ ID NO: 1741650 - RNA, 19 nt, Artificial Sequence
  Description of Artificial Sequence: Synthetic oligonucleotide
aauuccugaauacagagcc

SEQ ID NO: 1741651 - RNA, 19 nt, Artificial Sequence
  Description of Artificial Sequence: Synthetic oligonucleotide
uuuaguaagguccacaggg

SEQ ID NO: 1741652 - RNA, 19 nt, Artificial Sequence
  Description of Artificial Sequence: Synthetic oligonucleotide
uaaauaccaauuuugaugg

SEQ ID NO: 1741653 - RNA, 19 nt, Artificial Sequence
  Description of Artificial Sequence: Synthetic oligonucleotide
uaaaauaccauccaaagua

SEQ ID NO: 1741654 - RNA, 19 nt, Artificial Sequence
  Description of Artificial Sequence: Synthetic oligonucleotide
uauauaucaaugaagcugc

SEQ ID NO: 1741655 - RNA, 19 nt, Artificial Sequence
  Description of Artificial Sequence: Synthetic oligonucleotide
uuauagauucggaacaagg

SEQ ID NO: 1741656 - RNA, 19 nt, Artificial Sequence
  Description of Artificial Sequence: Synthetic oligonucleotide
uaaccaacuacauuuaacc

SEQ ID NO: 1741657 - RNA, 19 nt, Artificial Sequence
  Description of Artificial Sequence: Synthetic oligonucleotide
aauaccauccaaaguaccc

SEQ ID NO: 1741658 - RNA, 19 nt, Artificial Sequence
  Description of Artificial Sequence: Synthetic oligonucleotide
aaccaacuacauuuaaccc

SEQ ID NO: 1741659 - RNA, 19 nt, Artificial Sequence
  Description of Artificial Sequence: Synthetic oligonucleotide
uugguaauaucauaaacug

SEQ ID NO: 1741660 - RNA, 19 nt, Artificial Sequence
  Description of Artificial Sequence: Synthetic oligonucleotide
augaaaucacuccugacac

SEQ ID NO: 1741661 - RNA, 19 nt, Artificial Sequence
  Description of Artificial Sequence: Synthetic oligonucleotide
ucuuuagaacaucaguggg

SEQ ID NO: 1741662 - RNA, 19 nt, Artificial Sequence
  Description of Artificial Sequence: Synthetic oligonucleotide
ucuuuauagauucggaaca

SEQ ID NO: 1741663 - RNA, 19 nt, Artificial Sequence
  Description of Artificial Sequence: Synthetic oligonucleotide
aacaaggcaugaaacaucc

SEQ ID NO: 1741664 - RNA, 19 nt, Artificial Sequence
  Description of Artificial Sequence: Synthetic oligonucleotide
uauagauucggaacaaggc

SEQ ID NO: 1741665 - RNA, 19 nt, Artificial Sequence
  Description of Artificial Sequence: Synthetic oligonucleotide
uguuccaggguccaagucg

SEQ ID NO: 1741666 - RNA, 19 nt, Artificial Sequence
  Description of Artificial Sequence: Synthetic oligonucleotide
aaaauggugucuccgagca

SEQ ID NO: 1741667 - RNA, 19 nt, Artificial Sequence
  Description of Artificial Sequence: Synthetic oligonucleotide
guauauaucaaugaagcug

SEQ ID NO: 1741668 - RNA, 19 nt, Artificial Sequence
  Description of Artificial Sequence: Synthetic oligonucleotide
acacauaacaucuuuguca

SEQ ID NO: 1741669 - RNA, 19 nt, Artificial Sequence
  Description of Artificial Sequence: Synthetic oligonucleotide
ucuuaguaaagcaggagca

SEQ ID NO: 1741670 - RNA, 19 nt, Artificial Sequence
  Description of Artificial Sequence: Synthetic oligonucleotide
acacucucaauguuaauac

SEQ ID NO: 1741671 - RNA, 19 nt, Artificial Sequence
  Description of Artificial Sequence: Synthetic oligonucleotide
gucuauaacauacauaaca

SEQ ID NO: 1741672 - RNA, 19 nt, Artificial Sequence
  Description of Artificial Sequence: Synthetic oligonucleotide
aauuuugauggugccauac

SEQ ID NO: 1741673 - RNA, 19 nt, Artificial Sequence
  Description of Artificial Sequence: Synthetic oligonucleotide
aaaauaccauccaaaguac

SEQ ID NO: 1741674 - RNA, 19 nt, Artificial Sequence
  Description of Artificial Sequence: Synthetic oligonucleotide
gaugaaaucacuccugaca

SEQ ID NO: 1741675 - RNA, 19 nt, Artificial Sequence
  Description of Artificial Sequence: Synthetic oligonucleotide
aucauauuaauuaggagag

SEQ ID NO: 1741676 - RNA, 19 nt, Artificial Sequence
  Description of Artificial Sequence: Synthetic oligonucleotide
cuuuagaacaucagugggg

SEQ ID NO: 1741677 - RNA, 19 nt, Artificial Sequence
  Description of Artificial Sequence: Synthetic oligonucleotide
ucaagcuuugguaaauacc

SEQ ID NO: 1741678 - RNA, 19 nt, Artificial Sequence
  Description of Artificial Sequence: Synthetic oligonucleotide
uuaaaauggugucuccgag

SEQ ID NO: 1741679 - RNA, 19 nt, Artificial Sequence
  Description of Artificial Sequence: Synthetic oligonucleotide
aaucguuucaagcuuuggu

SEQ ID NO: 1741680 - RNA, 19 nt, Artificial Sequence
  Description of Artificial Sequence: Synthetic oligonucleotide
aguguguuaaaaugguguc

SEQ ID NO: 1741681 - RNA, 19 nt, Artificial Sequence
  Description of Artificial Sequence: Synthetic oligonucleotide
acaaaguguguuaaaaugg

SEQ ID NO: 1741682 - RNA, 19 nt, Artificial Sequence
  Description of Artificial Sequence: Synthetic oligonucleotide
acauacauaacaguaacug

SEQ ID NO: 1741683 - RNA, 19 nt, Artificial Sequence
  Description of Artificial Sequence: Synthetic oligonucleotide
aaaguacccuuguagaggu

SEQ ID NO: 1741684 - RNA, 19 nt, Artificial Sequence
  Description of Artificial Sequence: Synthetic oligonucleotide
aacucagcaacaauagagg

SEQ ID NO: 1741685 - RNA, 19 nt, Artificial Sequence
  Description of Artificial Sequence: Synthetic oligonucleotide
uggguuagaugccaaagcc

SEQ ID NO: 1741686 - RNA, 19 nt, Artificial Sequence
  Description of Artificial Sequence: Synthetic oligonucleotide
uggccaaaauccuuuauag

SEQ ID NO: 1741687 - RNA, 19 nt, Artificial Sequence
  Description of Artificial Sequence: Synthetic oligonucleotide
uagauuugaagccucuuga

SEQ ID NO: 1741688 - RNA, 19 nt, Artificial Sequence
  Description of Artificial Sequence: Synthetic oligonucleotide
auagauucggaacaaggca

SEQ ID NO: 1741689 - RNA, 19 nt, Artificial Sequence
  Description of Artificial Sequence: Synthetic oligonucleotide
uuuugauggugccauacga

SEQ ID NO: 1741690 - RNA, 19 nt, Artificial Sequence
  Description of Artificial Sequence: Synthetic oligonucleotide
uauuaauuaggagaguuuc

SEQ ID NO: 1741691 - RNA, 19 nt, Artificial Sequence
  Description of Artificial Sequence: Synthetic oligonucleotide
uguuaaaauggugucuccg

SEQ ID NO: 1741692 - RNA, 19 nt, Artificial Sequence
  Description of Artificial Sequence: Synthetic oligonucleotide
uguuaauacuucucuucgg

SEQ ID NO: 1741693 - RNA, 19 nt, Artificial Sequence
  Description of Artificial Sequence: Synthetic oligonucleotide
aaauaccauccaaaguacc

SEQ ID NO: 1741694 - RNA, 19 nt, Artificial Sequence
  Description of Artificial Sequence: Synthetic oligonucleotide
aaauaaucguuucaagcuu

SEQ ID NO: 1741695 - RNA, 19 nt, Artificial Sequence
  Description of Artificial Sequence: Synthetic oligonucleotide
auaucaaugaagcugccaa

SEQ ID NO: 1741696 - RNA, 19 nt, Artificial Sequence
  Description of Artificial Sequence: Synthetic oligonucleotide
agauuuucaguucuuagau

SEQ ID NO: 1741697 - RNA, 19 nt, Artificial Sequence
  Description of Artificial Sequence: Synthetic oligonucleotide
aacgcucuacaaauaaucg

SEQ ID NO: 1741698 - RNA, 19 nt, Artificial Sequence
  Description of Artificial Sequence: Synthetic oligonucleotide
acguuugaaaagaaggccc

SEQ ID NO: 1741699 - RNA, 19 nt, Artificial Sequence
  Description of Artificial Sequence: Synthetic oligonucleotide
uucuaaacgcucuacaaau

SEQ ID NO: 1741700 - RNA, 19 nt, Artificial Sequence
  Description of Artificial Sequence: Synthetic oligonucleotide
accaaggucuauaacauac

SEQ ID NO: 1741701 - RNA, 19 nt, Artificial Sequence
  Description of Artificial Sequence: Synthetic oligonucleotide
auaccaauuuugauggugc

SEQ ID NO: 1741702 - RNA, 19 nt, Artificial Sequence
  Description of Artificial Sequence: Synthetic oligonucleotide
gucuuaguaaagcaggagc

SEQ ID NO: 1741703 - RNA, 19 nt, Artificial Sequence
  Description of Artificial Sequence: Synthetic oligonucleotide
aaaugauguuccagggucc

SEQ ID NO: 1741704 - RNA, 19 nt, Artificial Sequence
  Description of Artificial Sequence: Synthetic oligonucleotide
gaaagugccgaacucagca

SEQ ID NO: 1741705 - RNA, 19 nt, Artificial Sequence
  Description of Artificial Sequence: Synthetic oligonucleotide
accaacuacauuuaaccca

SEQ ID NO: 1741706 - RNA, 19 nt, Artificial Sequence
  Description of Artificial Sequence: Synthetic oligonucleotide
cauucgaaucuuuagaaca

SEQ ID NO: 1741707 - RNA, 19 nt, Artificial Sequence
  Description of Artificial Sequence: Synthetic oligonucleotide
uuuagaacaucaguggggu

SEQ ID NO: 1741708 - RNA, 19 nt, Artificial Sequence
  Description of Artificial Sequence: Synthetic oligonucleotide
uuuaacccacguuugaaaa

SEQ ID NO: 1741709 - RNA, 19 nt, Artificial Sequence
  Description of Artificial Sequence: Synthetic oligonucleotide
cauccuacuacucuucagc

SEQ ID NO: 1741710 - RNA, 19 nt, Artificial Sequence
  Description of Artificial Sequence: Synthetic oligonucleotide
aagcuagaaacaaagugug

SEQ ID NO: 1741711 - RNA, 19 nt, Artificial Sequence
  Description of Artificial Sequence: Synthetic oligonucleotide
aacuacauuuaacccacgu

SEQ ID NO: 1741712 - RNA, 19 nt, Artificial Sequence
  Description of Artificial Sequence: Synthetic oligonucleotide
aucauaaacuggcagcucu

SEQ ID NO: 1741713 - RNA, 19 nt, Artificial Sequence
  Description of Artificial Sequence: Synthetic oligonucleotide
gaacaguagaaagaguggc

SEQ ID NO: 1741714 - RNA, 19 nt, Artificial Sequence
  Description of Artificial Sequence: Synthetic oligonucleotide
uaaaauggugucuccgagc

SEQ ID NO: 1741715 - RNA, 19 nt, Artificial Sequence
  Description of Artificial Sequence: Synthetic oligonucleotide
uuaacccacguuugaaaag

SEQ ID NO: 1741716 - RNA, 19 nt, Artificial Sequence
  Description of Artificial Sequence: Synthetic oligonucleotide
agucgaagccaguuuggcc

SEQ ID NO: 1741717 - RNA, 19 nt, Artificial Sequence
  Description of Artificial Sequence: Synthetic oligonucleotide
ugguucuguaaacacauaa

SEQ ID NO: 1741718 - RNA, 19 nt, Artificial Sequence
  Description of Artificial Sequence: Synthetic oligonucleotide
auaguagaugaaaucacuc

SEQ ID NO: 1741719 - RNA, 19 nt, Artificial Sequence
  Description of Artificial Sequence: Synthetic oligonucleotide
uagaugaaaucacuccuga

SEQ ID NO: 1741720 - RNA, 19 nt, Artificial Sequence
  Description of Artificial Sequence: Synthetic oligonucleotide
aggagcaauuccugaauac

SEQ ID NO: 1741721 - RNA, 19 nt, Artificial Sequence
  Description of Artificial Sequence: Synthetic oligonucleotide
ugauggugccauacgaugc

SEQ ID NO: 1741722 - RNA, 19 nt, Artificial Sequence
  Description of Artificial Sequence: Synthetic oligonucleotide
caacaauagaggcaaggcc

SEQ ID NO: 1741723 - RNA, 19 nt, Artificial Sequence
  Description of Artificial Sequence: Synthetic oligonucleotide
ugcauucgaaucuuuagaa

SEQ ID NO: 1741724 - RNA, 19 nt, Artificial Sequence
  Description of Artificial Sequence: Synthetic oligonucleotide
ugaaacaucccucuauauu

SEQ ID NO: 1741725 - RNA, 19 nt, Artificial Sequence
  Description of Artificial Sequence: Synthetic oligonucleotide
aagucgaagccaguuuggc

SEQ ID NO: 1741726 - RNA, 19 nt, Artificial Sequence
  Description of Artificial Sequence: Synthetic oligonucleotide
ugagccugcauucgaaucu

SEQ ID NO: 1741727 - RNA, 19 nt, Artificial Sequence
  Description of Artificial Sequence: Synthetic oligonucleotide
aguaaagcaggagcaauuc

SEQ ID NO: 1741728 - RNA, 19 nt, Artificial Sequence
  Description of Artificial Sequence: Synthetic oligonucleotide
ucuggggauaaccaacuac

SEQ ID NO: 1741729 - RNA, 19 nt, Artificial Sequence
  Description of Artificial Sequence: Synthetic oligonucleotide
uagauucggaacaaggcau

SEQ ID NO: 1741730 - RNA, 19 nt, Artificial Sequence
  Description of Artificial Sequence: Synthetic oligonucleotide
acuacucuucagcugguuc

SEQ ID NO: 1741731 - RNA, 19 nt, Artificial Sequence
  Description of Artificial Sequence: Synthetic oligonucleotide
accccugguaccuucuugc

SEQ ID NO: 1741732 - RNA, 19 nt, Artificial Sequence
  Description of Artificial Sequence: Synthetic oligonucleotide
aaucugggguuacacucuc

SEQ ID NO: 1741733 - RNA, 19 nt, Artificial Sequence
  Description of Artificial Sequence: Synthetic oligonucleotide
agaugaaaucacuccugac

SEQ ID NO: 1741734 - RNA, 19 nt, Artificial Sequence
  Description of Artificial Sequence: Synthetic oligonucleotide
uuaguaagguccacaggga

SEQ ID NO: 1741735 - RNA, 19 nt, Artificial Sequence
  Description of Artificial Sequence: Synthetic oligonucleotide
caaauaaucguuucaagcu

SEQ ID NO: 1741736 - RNA, 19 nt, Artificial Sequence
  Description of Artificial Sequence: Synthetic oligonucleotide
gaaagaguggcagggcugg

SEQ ID NO: 1741737 - RNA, 19 nt, Artificial Sequence
  Description of Artificial Sequence: Synthetic oligonucleotide
cacuauugcccucugauuc

SEQ ID NO: 1741738 - RNA, 19 nt, Artificial Sequence
  Description of Artificial Sequence: Synthetic oligonucleotide
uuuauagauucggaacaag

SEQ ID NO: 1741739 - RNA, 19 nt, Artificial Sequence
  Description of Artificial Sequence: Synthetic oligonucleotide
ucggaacaaggcaugaaac

SEQ ID NO: 1741740 - RNA, 19 nt, Artificial Sequence
  Description of Artificial Sequence: Synthetic oligonucleotide
ugcugguauauaucaauga

SEQ ID NO: 1741741 - RNA, 19 nt, Artificial Sequence
  Description of Artificial Sequence: Synthetic oligonucleotide
gaaucuuuagaacaucagu

SEQ ID NO: 1741742 - RNA, 19 nt, Artificial Sequence
  Description of Artificial Sequence: Synthetic oligonucleotide
gagcaauuccugaauacag

SEQ ID NO: 1741743 - RNA, 19 nt, Artificial Sequence
  Description of Artificial Sequence: Synthetic oligonucleotide
uggccaauaaauacuuuaa

SEQ ID NO: 1741744 - RNA, 19 nt, Artificial Sequence
  Description of Artificial Sequence: Synthetic oligonucleotide
uucucaccacgucaacugg

SEQ ID NO: 1741745 - RNA, 19 nt, Artificial Sequence
  Description of Artificial Sequence: Synthetic oligonucleotide
uucaagcuuugguaaauac

SEQ ID NO: 1741746 - RNA, 19 nt, Artificial Sequence
  Description of Artificial Sequence: Synthetic oligonucleotide
gauggugccauacgaugcc

SEQ ID NO: 1741747 - RNA, 19 nt, Artificial Sequence
  Description of Artificial Sequence: Synthetic oligonucleotide
ggaacaaacuuccuugagc

SEQ ID NO: 1741748 - RNA, 19 nt, Artificial Sequence
  Description of Artificial Sequence: Synthetic oligonucleotide
cauacgaugccugucuuag

SEQ ID NO: 1741749 - RNA, 19 nt, Artificial Sequence
  Description of Artificial Sequence: Synthetic oligonucleotide
aucguuucaagcuuuggua

SEQ ID NO: 1741750 - RNA, 19 nt, Artificial Sequence
  Description of Artificial Sequence: Synthetic oligonucleotide
uaacccacguuugaaaaga

SEQ ID NO: 1741751 - RNA, 19 nt, Artificial Sequence
  Description of Artificial Sequence: Synthetic oligonucleotide
ccugucuuaguaaagcagg

SEQ ID NO: 1741752 - RNA, 19 nt, Artificial Sequence
  Description of Artificial Sequence: Synthetic oligonucleotide
uacacucucaauguuaaua

SEQ ID NO: 1741753 - RNA, 19 nt, Artificial Sequence
  Description of Artificial Sequence: Synthetic oligonucleotide
gucgaagccaguuuggcca

SEQ ID NO: 1741754 - RNA, 19 nt, Artificial Sequence
  Description of Artificial Sequence: Synthetic oligonucleotide
ucguuucaagcuuugguaa

SEQ ID NO: 1741755 - RNA, 19 nt, Artificial Sequence
  Description of Artificial Sequence: Synthetic oligonucleotide
caauuccugaauacagagc

SEQ ID NO: 1741756 - RNA, 19 nt, Artificial Sequence
  Description of Artificial Sequence: Synthetic oligonucleotide
auuuaacccacguuugaaa

SEQ ID NO: 1741757 - RNA, 19 nt, Artificial Sequence
  Description of Artificial Sequence: Synthetic oligonucleotide
ccggguuuuaguaaggucc

SEQ ID NO: 1741758 - RNA, 19 nt, Artificial Sequence
  Description of Artificial Sequence: Synthetic oligonucleotide
gaaacggacaucgaugcuc

SEQ ID NO: 1741759 - RNA, 19 nt, Artificial Sequence
  Description of Artificial Sequence: Synthetic oligonucleotide
uacgaugccugucuuagua

SEQ ID NO: 1741760 - RNA, 19 nt, Artificial Sequence
  Description of Artificial Sequence: Synthetic oligonucleotide
agaggcaaggccgccauac

SEQ ID NO: 1741761 - RNA, 19 nt, Artificial Sequence
  Description of Artificial Sequence: Synthetic oligonucleotide
ucuccgagcauuccugaca

SEQ ID NO: 1741762 - RNA, 19 nt, Artificial Sequence
  Description of Artificial Sequence: Synthetic oligonucleotide
ugucuuaguaaagcaggag

SEQ ID NO: 1741763 - RNA, 19 nt, Artificial Sequence
  Description of Artificial Sequence: Synthetic oligonucleotide
uuccaguucagaccagaca

SEQ ID NO: 1741764 - RNA, 19 nt, Artificial Sequence
  Description of Artificial Sequence: Synthetic oligonucleotide
uaaacgcucuacaaauaau

SEQ ID NO: 1741765 - RNA, 19 nt, Artificial Sequence
  Description of Artificial Sequence: Synthetic oligonucleotide
uuaagucauccuacuacuc

SEQ ID NO: 1741766 - RNA, 19 nt, Artificial Sequence
  Description of Artificial Sequence: Synthetic oligonucleotide
cuggguuagaugccaaagc

SEQ ID NO: 1741767 - RNA, 19 nt, Artificial Sequence
  Description of Artificial Sequence: Synthetic oligonucleotide
aggcaaggccgccauacac

SEQ ID NO: 1741768 - RNA, 19 nt, Artificial Sequence
  Description of Artificial Sequence: Synthetic oligonucleotide
ugagaaccaaggucuauaa

SEQ ID NO: 1741769 - RNA, 19 nt, Artificial Sequence
  Description of Artificial Sequence: Synthetic oligonucleotide
uucgggaagagguaacaaa

SEQ ID NO: 1741770 - RNA, 19 nt, Artificial Sequence
  Description of Artificial Sequence: Synthetic oligonucleotide
agugggguuggcuauagua

SEQ ID NO: 1741771 - RNA, 19 nt, Artificial Sequence
  Description of Artificial Sequence: Synthetic oligonucleotide
caagucgaagccaguuugg

SEQ ID NO: 1741772 - RNA, 19 nt, Artificial Sequence
  Description of Artificial Sequence: Synthetic oligonucleotide
acuacauuuaacccacguu

SEQ ID NO: 1741773 - RNA, 19 nt, Artificial Sequence
  Description of Artificial Sequence: Synthetic oligonucleotide
agaagacaccaaucugggg

SEQ ID NO: 1741774 - RNA, 19 nt, Artificial Sequence
  Description of Artificial Sequence: Synthetic oligonucleotide
uaguaagguccacagggaa

SEQ ID NO: 1741775 - RNA, 19 nt, Artificial Sequence
  Description of Artificial Sequence: Synthetic oligonucleotide
ugggguuggcuauaguaga

SEQ ID NO: 1741776 - RNA, 19 nt, Artificial Sequence
  Description of Artificial Sequence: Synthetic oligonucleotide
uuaguaaagcaggagcaau

SEQ ID NO: 1741777 - RNA, 19 nt, Artificial Sequence
  Description of Artificial Sequence: Synthetic oligonucleotide
uaaucguuucaagcuuugg

SEQ ID NO: 1741778 - RNA, 19 nt, Artificial Sequence
  Description of Artificial Sequence: Synthetic oligonucleotide
uguaaacacauaacaucuu

SEQ ID NO: 1741779 - RNA, 19 nt, Artificial Sequence
  Description of Artificial Sequence: Synthetic oligonucleotide
uucuuagauuugaagccuc

SEQ ID NO: 1741780 - RNA, 19 nt, Artificial Sequence
  Description of Artificial Sequence: Synthetic oligonucleotide
acuauugcccucugauuca

SEQ ID NO: 1741781 - RNA, 19 nt, Artificial Sequence
  Description of Artificial Sequence: Synthetic oligonucleotide
ucuaaacgcucuacaaaua

SEQ ID NO: 1741782 - RNA, 19 nt, Artificial Sequence
  Description of Artificial Sequence: Synthetic oligonucleotide
uaccaauuuugauggugcc

SEQ ID NO: 1741783 - RNA, 19 nt, Artificial Sequence
  Description of Artificial Sequence: Synthetic oligonucleotide
cauguuuccacaucuuuaa

SEQ ID NO: 1741784 - RNA, 19 nt, Artificial Sequence
  Description of Artificial Sequence: Synthetic oligonucleotide
agcuuugguaaauaccaau

SEQ ID NO: 1741785 - RNA, 19 nt, Artificial Sequence
  Description of Artificial Sequence: Synthetic oligonucleotide
aaagugccgaacucagcaa

SEQ ID NO: 1741786 - RNA, 19 nt, Artificial Sequence
  Description of Artificial Sequence: Synthetic oligonucleotide
acauaacaguaacugugcu

SEQ ID NO: 1741787 - RNA, 19 nt, Artificial Sequence
  Description of Artificial Sequence: Synthetic oligonucleotide
agccaaaaucccuucuucu

SEQ ID NO: 1741788 - RNA, 19 nt, Artificial Sequence
  Description of Artificial Sequence: Synthetic oligonucleotide
auuaauuaggagaguuuca

SEQ ID NO: 1741789 - RNA, 19 nt, Artificial Sequence
  Description of Artificial Sequence: Synthetic oligonucleotide
gaaaucacuccugacacua

SEQ ID NO: 1741790 - RNA, 19 nt, Artificial Sequence
  Description of Artificial Sequence: Synthetic oligonucleotide
ccaacuacauuuaacccac

SEQ ID NO: 1741791 - RNA, 19 nt, Artificial Sequence
  Description of Artificial Sequence: Synthetic oligonucleotide
cuaaacgcucuacaaauaa

SEQ ID NO: 1741792 - RNA, 19 nt, Artificial Sequence
  Description of Artificial Sequence: Synthetic oligonucleotide
aaacggacaucgaugcucu

SEQ ID NO: 1741793 - RNA, 19 nt, Artificial Sequence
  Description of Artificial Sequence: Synthetic oligonucleotide
aauagaggcaaggccgcca

SEQ ID NO: 1741794 - RNA, 19 nt, Artificial Sequence
  Description of Artificial Sequence: Synthetic oligonucleotide
auccuacuacucuucagcu

SEQ ID NO: 1741795 - RNA, 19 nt, Artificial Sequence
  Description of Artificial Sequence: Synthetic oligonucleotide
uccuacuacucuucagcug

SEQ ID NO: 1741796 - RNA, 19 nt, Artificial Sequence
  Description of Artificial Sequence: Synthetic oligonucleotide
ugccugucuuaguaaagca

SEQ ID NO: 1741797 - RNA, 19 nt, Artificial Sequence
  Description of Artificial Sequence: Synthetic oligonucleotide
cuucuugcugguauauauc

SEQ ID NO: 1741798 - RNA, 19 nt, Artificial Sequence
  Description of Artificial Sequence: Synthetic oligonucleotide
acgucaacuggguuagaug

SEQ ID NO: 1741799 - RNA, 19 nt, Artificial Sequence
  Description of Artificial Sequence: Synthetic oligonucleotide
cuccgagcauuccugacag

SEQ ID NO: 1741800 - RNA, 19 nt, Artificial Sequence
  Description of Artificial Sequence: Synthetic oligonucleotide
ugaaaucacuccugacacu

SEQ ID NO: 1741801 - RNA, 19 nt, Artificial Sequence
  Description of Artificial Sequence: Synthetic oligonucleotide
gggauaaccaacuacauuu

SEQ ID NO: 1741802 - RNA, 19 nt, Artificial Sequence
  Description of Artificial Sequence: Synthetic oligonucleotide
uuugaaaagaaggcccuuu

SEQ ID NO: 1741803 - RNA, 19 nt, Artificial Sequence
  Description of Artificial Sequence: Synthetic oligonucleotide
aucaugcgcguucucacca

SEQ ID NO: 1741804 - RNA, 19 nt, Artificial Sequence
  Description of Artificial Sequence: Synthetic oligonucleotide
aacagccuuaagucauccu

SEQ ID NO: 1741805 - RNA, 19 nt, Artificial Sequence
  Description of Artificial Sequence: Synthetic oligonucleotide
cgucaacuggguuagaugc

SEQ ID NO: 1741806 - RNA, 19 nt, Artificial Sequence
  Description of Artificial Sequence: Synthetic oligonucleotide
cacaacgauggcagcacgc

SEQ ID NO: 1741807 - RNA, 19 nt, Artificial Sequence
  Description of Artificial Sequence: Synthetic oligonucleotide
ccacguuugaaaagaaggc

SEQ ID NO: 1741808 - RNA, 19 nt, Artificial Sequence
  Description of Artificial Sequence: Synthetic oligonucleotide
gaugccugucuuaguaaag

SEQ ID NO: 1741809 - RNA, 19 nt, Artificial Sequence
  Description of Artificial Sequence: Synthetic oligonucleotide
cuuaagucauccuacuacu

SEQ ID NO: 1741810 - RNA, 19 nt, Artificial Sequence
  Description of Artificial Sequence: Synthetic oligonucleotide
ucauaaacuggcagcucua

SEQ ID NO: 1741811 - RNA, 19 nt, Artificial Sequence
  Description of Artificial Sequence: Synthetic oligonucleotide
acggacaucgaugcucugg

SEQ ID NO: 1741812 - RNA, 19 nt, Artificial Sequence
  Description of Artificial Sequence: Synthetic oligonucleotide
cuucuaaacgcucuacaaa

SEQ ID NO: 1741813 - RNA, 19 nt, Artificial Sequence
  Description of Artificial Sequence: Synthetic oligonucleotide
uugagccugcauucgaauc

SEQ ID NO: 1741814 - RNA, 19 nt, Artificial Sequence
  Description of Artificial Sequence: Synthetic oligonucleotide
gagaaccaaggucuauaac

SEQ ID NO: 1741815 - RNA, 19 nt, Artificial Sequence
  Description of Artificial Sequence: Synthetic oligonucleotide
aacaucccucuauauuuua

SEQ ID NO: 1741816 - RNA, 19 nt, Artificial Sequence
  Description of Artificial Sequence: Synthetic oligonucleotide
ucauauuaauuaggagagu

SEQ ID NO: 1741817 - RNA, 19 nt, Artificial Sequence
  Description of Artificial Sequence: Synthetic oligonucleotide
ugaaacggacaucgaugcu

SEQ ID NO: 1741818 - RNA, 19 nt, Artificial Sequence
  Description of Artificial Sequence: Synthetic oligonucleotide
guguuaaaauggugucucc

SEQ ID NO: 1741819 - RNA, 19 nt, Artificial Sequence
  Description of Artificial Sequence: Synthetic oligonucleotide
uaaugagaaccaaggucua

SEQ ID NO: 1741820 - RNA, 19 nt, Artificial Sequence
  Description of Artificial Sequence: Synthetic oligonucleotide
cugcauucgaaucuuuaga

SEQ ID NO: 1741821 - RNA, 19 nt, Artificial Sequence
  Description of Artificial Sequence: Synthetic oligonucleotide
aaugagaaccaaggucuau

SEQ ID NO: 1741822 - RNA, 19 nt, Artificial Sequence
  Description of Artificial Sequence: Synthetic oligonucleotide
uggggauaaccaacuacau

SEQ ID NO: 1741823 - RNA, 19 nt, Artificial Sequence
  Description of Artificial Sequence: Synthetic oligonucleotide
guaauaucauaaacuggca

SEQ ID NO: 1741824 - RNA, 19 nt, Artificial Sequence
  Description of Artificial Sequence: Synthetic oligonucleotide
aauccuuuauagagggcaa

SEQ ID NO: 1741825 - RNA, 19 nt, Artificial Sequence
  Description of Artificial Sequence: Synthetic oligonucleotide
uucagaccagacaucucau

SEQ ID NO: 1741826 - RNA, 19 nt, Artificial Sequence
  Description of Artificial Sequence: Synthetic oligonucleotide
ccaaucugggguuacacuc

SEQ ID NO: 1741827 - RNA, 19 nt, Artificial Sequence
  Description of Artificial Sequence: Synthetic oligonucleotide
caaaguguguuaaaauggu

SEQ ID NO: 1741828 - RNA, 19 nt, Artificial Sequence
  Description of Artificial Sequence: Synthetic oligonucleotide
gcccuuuugaaugucaccc

SEQ ID NO: 1741829 - RNA, 19 nt, Artificial Sequence
  Description of Artificial Sequence: Synthetic oligonucleotide
auauuaauuaggagaguuu

SEQ ID NO: 1741830 - RNA, 19 nt, Artificial Sequence
  Description of Artificial Sequence: Synthetic oligonucleotide
auucgaaucuuuagaacau

SEQ ID NO: 1741831 - RNA, 19 nt, Artificial Sequence
  Description of Artificial Sequence: Synthetic oligonucleotide
gacaucgaugcucuggccu

SEQ ID NO: 1741832 - RNA, 19 nt, Artificial Sequence
  Description of Artificial Sequence: Synthetic oligonucleotide
agggaaagugccgaacuca

SEQ ID NO: 1741833 - RNA, 19 nt, Artificial Sequence
  Description of Artificial Sequence: Synthetic oligonucleotide
aacaguaacugugcuggua

SEQ ID NO: 1741834 - RNA, 19 nt, Artificial Sequence
  Description of Artificial Sequence: Synthetic oligonucleotide
agccuuaagucauccuacu

SEQ ID NO: 1741835 - RNA, 19 nt, Artificial Sequence
  Description of Artificial Sequence: Synthetic oligonucleotide
gguucuguaaacacauaac

SEQ ID NO: 1741836 - RNA, 19 nt, Artificial Sequence
  Description of Artificial Sequence: Synthetic oligonucleotide
uucgaaucuuuagaacauc

SEQ ID NO: 1741837 - RNA, 19 nt, Artificial Sequence
  Description of Artificial Sequence: Synthetic oligonucleotide
uggugccauacgaugccug

SEQ ID NO: 1741838 - RNA, 19 nt, Artificial Sequence
  Description of Artificial Sequence: Synthetic oligonucleotide
cauaaacuggcagcucuac

SEQ ID NO: 1741839 - RNA, 19 nt, Artificial Sequence
  Description of Artificial Sequence: Synthetic oligonucleotide
acaacgauggcagcacgcu

SEQ ID NO: 1741840 - RNA, 19 nt, Artificial Sequence
  Description of Artificial Sequence: Synthetic oligonucleotide
ccgaacucagcaacaauag

SEQ ID NO: 1741841 - RNA, 19 nt, Artificial Sequence
  Description of Artificial Sequence: Synthetic oligonucleotide
auaaucguuucaagcuuug

SEQ ID NO: 1741842 - RNA, 19 nt, Artificial Sequence
  Description of Artificial Sequence: Synthetic oligonucleotide
cugucuuaguaaagcagga

SEQ ID NO: 1741843 - RNA, 19 nt, Artificial Sequence
  Description of Artificial Sequence: Synthetic oligonucleotide
ugucccacuauugcccucu

SEQ ID NO: 1741844 - RNA, 19 nt, Artificial Sequence
  Description of Artificial Sequence: Synthetic oligonucleotide
acgcauaaacagccuuaag

SEQ ID NO: 1741845 - RNA, 19 nt, Artificial Sequence
  Description of Artificial Sequence: Synthetic oligonucleotide
gcagccggguuuuaguaag

SEQ ID NO: 1741846 - RNA, 19 nt, Artificial Sequence
  Description of Artificial Sequence: Synthetic oligonucleotide
cauauuaauuaggagaguu

SEQ ID NO: 1741847 - RNA, 19 nt, Artificial Sequence
  Description of Artificial Sequence: Synthetic oligonucleotide
cugcucguauguaauaaaa

SEQ ID NO: 1741848 - RNA, 19 nt, Artificial Sequence
  Description of Artificial Sequence: Synthetic oligonucleotide
uuucaagcuuugguaaaua

SEQ ID NO: 1741849 - RNA, 19 nt, Artificial Sequence
  Description of Artificial Sequence: Synthetic oligonucleotide
caugcgcguucucaccacg

SEQ ID NO: 1741850 - RNA, 19 nt, Artificial Sequence
  Description of Artificial Sequence: Synthetic oligonucleotide
ccaagucgaagccaguuug

SEQ ID NO: 1741851 - RNA, 19 nt, Artificial Sequence
  Description of Artificial Sequence: Synthetic oligonucleotide
gcauucgaaucuuuagaac

SEQ ID NO: 1741852 - RNA, 19 nt, Artificial Sequence
  Description of Artificial Sequence: Synthetic oligonucleotide
caucuucuaaacgcucuac

SEQ ID NO: 1741853 - RNA, 19 nt, Artificial Sequence
  Description of Artificial Sequence: Synthetic oligonucleotide
ugcagccggguuuuaguaa

SEQ ID NO: 1741854 - RNA, 19 nt, Artificial Sequence
  Description of Artificial Sequence: Synthetic oligonucleotide
uaucauaaacuggcagcuc

SEQ ID NO: 1741855 - RNA, 19 nt, Artificial Sequence
  Description of Artificial Sequence: Synthetic oligonucleotide
acaaggcaugaaacauccc

SEQ ID NO: 1741856 - RNA, 19 nt, Artificial Sequence
  Description of Artificial Sequence: Synthetic oligonucleotide
uccugaauacagagccaaa

SEQ ID NO: 1741857 - RNA, 19 nt, Artificial Sequence
  Description of Artificial Sequence: Synthetic oligonucleotide
uuguacuugcagccggguu

SEQ ID NO: 1741858 - RNA, 19 nt, Artificial Sequence
  Description of Artificial Sequence: Synthetic oligonucleotide
auggcuuaaaguggaacuu

SEQ ID NO: 1741859 - RNA, 19 nt, Artificial Sequence
  Description of Artificial Sequence: Synthetic oligonucleotide
aggcccuuuugaaugucac

SEQ ID NO: 1741860 - RNA, 19 nt, Artificial Sequence
  Description of Artificial Sequence: Synthetic oligonucleotide
gaccccugguaccuucuug

SEQ ID NO: 1741861 - RNA, 19 nt, Artificial Sequence
  Description of Artificial Sequence: Synthetic oligonucleotide
caacuacauuuaacccacg

SEQ ID NO: 1741862 - RNA, 19 nt, Artificial Sequence
  Description of Artificial Sequence: Synthetic oligonucleotide
uugcagccggguuuuagua

SEQ ID NO: 1741863 - RNA, 19 nt, Artificial Sequence
  Description of Artificial Sequence: Synthetic oligonucleotide
cuuuauagauucggaacaa

SEQ ID NO: 1741864 - RNA, 19 nt, Artificial Sequence
  Description of Artificial Sequence: Synthetic oligonucleotide
acgauggcagcacgcugag

SEQ ID NO: 1741865 - RNA, 19 nt, Artificial Sequence
  Description of Artificial Sequence: Synthetic oligonucleotide
cuuugaaacggacaucgau

SEQ ID NO: 1741866 - RNA, 19 nt, Artificial Sequence
  Description of Artificial Sequence: Synthetic oligonucleotide
cucuucgggaagagguaac

SEQ ID NO: 1741867 - RNA, 19 nt, Artificial Sequence
  Description of Artificial Sequence: Synthetic oligonucleotide
gucaacuggguuagaugcc

SEQ ID NO: 1741868 - RNA, 19 nt, Artificial Sequence
  Description of Artificial Sequence: Synthetic oligonucleotide
ggguuagaugccaaagccc

SEQ ID NO: 1741869 - RNA, 19 nt, Artificial Sequence
  Description of Artificial Sequence: Synthetic oligonucleotide
ggagcaauuccugaauaca

SEQ ID NO: 1741870 - RNA, 19 nt, Artificial Sequence
  Description of Artificial Sequence: Synthetic oligonucleotide
cagguaaagcuagaaacaa

SEQ ID NO: 1741871 - RNA, 19 nt, Artificial Sequence
  Description of Artificial Sequence: Synthetic oligonucleotide
gccuuguacuugcagccgg

SEQ ID NO: 1741872 - RNA, 19 nt, Artificial Sequence
  Description of Artificial Sequence: Synthetic oligonucleotide
cuuagauuuucaguucuua

SEQ ID NO: 1741873 - RNA, 19 nt, Artificial Sequence
  Description of Artificial Sequence: Synthetic oligonucleotide
acgaugccugucuuaguaa

SEQ ID NO: 1741874 - RNA, 19 nt, Artificial Sequence
  Description of Artificial Sequence: Synthetic oligonucleotide
gggaaagugccgaacucag

SEQ ID NO: 1741875 - RNA, 19 nt, Artificial Sequence
  Description of Artificial Sequence: Synthetic oligonucleotide
agcugcucguauguaauaa

SEQ ID NO: 1741876 - RNA, 19 nt, Artificial Sequence
  Description of Artificial Sequence: Synthetic oligonucleotide
cuuugguaaauaccaauuu

SEQ ID NO: 1741877 - RNA, 19 nt, Artificial Sequence
  Description of Artificial Sequence: Synthetic oligonucleotide
uuacacucucaauguuaau

SEQ ID NO: 1741878 - RNA, 19 nt, Artificial Sequence
  Description of Artificial Sequence: Synthetic oligonucleotide
gguuuuaguaagguccaca

SEQ ID NO: 1741879 - RNA, 19 nt, Artificial Sequence
  Description of Artificial Sequence: Synthetic oligonucleotide
ugcgcguucucaccacguc

SEQ ID NO: 1741880 - RNA, 19 nt, Artificial Sequence
  Description of Artificial Sequence: Synthetic oligonucleotide
caacgauggcagcacgcug

SEQ ID NO: 1741881 - RNA, 19 nt, Artificial Sequence
  Description of Artificial Sequence: Synthetic oligonucleotide
ucgaagccaguuuggccaa

SEQ ID NO: 1741882 - RNA, 19 nt, Artificial Sequence
  Description of Artificial Sequence: Synthetic oligonucleotide
ugccgaacucagcaacaau

SEQ ID NO: 1741883 - RNA, 19 nt, Artificial Sequence
  Description of Artificial Sequence: Synthetic oligonucleotide
cugaauacagagccaaaau

SEQ ID NO: 1741884 - RNA, 19 nt, Artificial Sequence
  Description of Artificial Sequence: Synthetic oligonucleotide
aacggacaucgaugcucug

SEQ ID NO: 1741885 - RNA, 19 nt, Artificial Sequence
  Description of Artificial Sequence: Synthetic oligonucleotide
agcuagaaacaaagugugu

SEQ ID NO: 1741886 - RNA, 19 nt, Artificial Sequence
  Description of Artificial Sequence: Synthetic oligonucleotide
ggccaaaauccuuuauaga

SEQ ID NO: 1741887 - RNA, 19 nt, Artificial Sequence
  Description of Artificial Sequence: Synthetic oligonucleotide
agguaaagcuagaaacaaa

SEQ ID NO: 1741888 - RNA, 19 nt, Artificial Sequence
  Description of Artificial Sequence: Synthetic oligonucleotide
agugccgaacucagcaaca

SEQ ID NO: 1741889 - RNA, 19 nt, Artificial Sequence
  Description of Artificial Sequence: Synthetic oligonucleotide
auacgaugccugucuuagu

SEQ ID NO: 1741890 - RNA, 19 nt, Artificial Sequence
  Description of Artificial Sequence: Synthetic oligonucleotide
augucccacuauugcccuc

SEQ ID NO: 1741891 - RNA, 19 nt, Artificial Sequence
  Description of Artificial Sequence: Synthetic oligonucleotide
auggugucuccgagcauuc

SEQ ID NO: 1741892 - RNA, 19 nt, Artificial Sequence
  Description of Artificial Sequence: Synthetic oligonucleotide
cacagggaaagugccgaac

SEQ ID NO: 1741893 - RNA, 19 nt, Artificial Sequence
  Description of Artificial Sequence: Synthetic oligonucleotide
caccacgucaacuggguua

SEQ ID NO: 1741894 - RNA, 19 nt, Artificial Sequence
  Description of Artificial Sequence: Synthetic oligonucleotide
cugggcuuagauuuucagu

SEQ ID NO: 1741895 - RNA, 19 nt, Artificial Sequence
  Description of Artificial Sequence: Synthetic oligonucleotide
ggcccuuuugaaugucacc

SEQ ID NO: 1741896 - RNA, 19 nt, Artificial Sequence
  Description of Artificial Sequence: Synthetic oligonucleotide
gguuacacucucaauguua

SEQ ID NO: 1741897 - RNA, 19 nt, Artificial Sequence
  Description of Artificial Sequence: Synthetic oligonucleotide
acaucccucuauauuuuau

SEQ ID NO: 1741898 - RNA, 19 nt, Artificial Sequence
  Description of Artificial Sequence: Synthetic oligonucleotide
gggguuacacucucaaugu

SEQ ID NO: 1741899 - RNA, 19 nt, Artificial Sequence
  Description of Artificial Sequence: Synthetic oligonucleotide
cacccaucaguauccaucu

SEQ ID NO: 1741900 - RNA, 19 nt, Artificial Sequence
  Description of Artificial Sequence: Synthetic oligonucleotide
ggaacaaggcaugaaacau

SEQ ID NO: 1741901 - RNA, 19 nt, Artificial Sequence
  Description of Artificial Sequence: Synthetic oligonucleotide
cuugcagccggguuuuagu

SEQ ID NO: 1741902 - RNA, 19 nt, Artificial Sequence
  Description of Artificial Sequence: Synthetic oligonucleotide
aacccacguuugaaaagaa

SEQ ID NO: 1741903 - RNA, 19 nt, Artificial Sequence
  Description of Artificial Sequence: Synthetic oligonucleotide
cugacacuaccccacagau

SEQ ID NO: 1741904 - RNA, 19 nt, Artificial Sequence
  Description of Artificial Sequence: Synthetic oligonucleotide
ccagccaaaccacagguaa

SEQ ID NO: 1741905 - RNA, 19 nt, Artificial Sequence
  Description of Artificial Sequence: Synthetic oligonucleotide
cccucugauucaucaugcg

SEQ ID NO: 1741906 - RNA, 19 nt, Artificial Sequence
  Description of Artificial Sequence: Synthetic oligonucleotide
caguucagaccagacaucu

SEQ ID NO: 1741907 - RNA, 19 nt, Artificial Sequence
  Description of Artificial Sequence: Synthetic oligonucleotide
caggagcaauuccugaaua

SEQ ID NO: 1741908 - RNA, 19 nt, Artificial Sequence
  Description of Artificial Sequence: Synthetic oligonucleotide
uacccuuguagagguccac

SEQ ID NO: 1741909 - RNA, 19 nt, Artificial Sequence
  Description of Artificial Sequence: Synthetic oligonucleotide
cgcauaaacagccuuaagu

SEQ ID NO: 1741910 - RNA, 19 nt, Artificial Sequence
  Description of Artificial Sequence: Synthetic oligonucleotide
guaccuucuugcugguaua

SEQ ID NO: 1741911 - RNA, 19 nt, Artificial Sequence
  Description of Artificial Sequence: Synthetic oligonucleotide
gaagccaguuuggccaaaa

SEQ ID NO: 1741912 - RNA, 19 nt, Artificial Sequence
  Description of Artificial Sequence: Synthetic oligonucleotide
cacucucaauguuaauacu

SEQ ID NO: 1741913 - RNA, 19 nt, Artificial Sequence
  Description of Artificial Sequence: Synthetic oligonucleotide
ggaaagugccgaacucagc

SEQ ID NO: 1741914 - RNA, 19 nt, Artificial Sequence
  Description of Artificial Sequence: Synthetic oligonucleotide
gccgaacucagcaacaaua

SEQ ID NO: 1741915 - RNA, 19 nt, Artificial Sequence
  Description of Artificial Sequence: Synthetic oligonucleotide
auggugccauacgaugccu

SEQ ID NO: 1741916 - RNA, 19 nt, Artificial Sequence
  Description of Artificial Sequence: Synthetic oligonucleotide
acaccaaucugggguuaca

SEQ ID NO: 1741917 - RNA, 19 nt, Artificial Sequence
  Description of Artificial Sequence: Synthetic oligonucleotide
ggacaucgaugcucuggcc

SEQ ID NO: 1741918 - RNA, 19 nt, Artificial Sequence
  Description of Artificial Sequence: Synthetic oligonucleotide
caucccucuauauuuuauu

SEQ ID NO: 1741919 - RNA, 19 nt, Artificial Sequence
  Description of Artificial Sequence: Synthetic oligonucleotide
gcaaggccgccauacacaa

SEQ ID NO: 1741920 - RNA, 19 nt, Artificial Sequence
  Description of Artificial Sequence: Synthetic oligonucleotide
ggcaaggccgccauacaca

SEQ ID NO: 1741921 - RNA, 19 nt, Artificial Sequence
  Description of Artificial Sequence: Synthetic oligonucleotide
caucgaugcucuggccuug

SEQ ID NO: 1741922 - RNA, 19 nt, Artificial Sequence
  Description of Artificial Sequence: Synthetic oligonucleotide
cggaacaaggcaugaaaca

SEQ ID NO: 1741923 - RNA, 19 nt, Artificial Sequence
  Description of Artificial Sequence: Synthetic oligonucleotide
cuucgggaagagguaacaa

SEQ ID NO: 1741924 - RNA, 19 nt, Artificial Sequence
  Description of Artificial Sequence: Synthetic oligonucleotide
caugucccacuauugcccu

SEQ ID NO: 1741925 - RNA, 19 nt, Artificial Sequence
  Description of Artificial Sequence: Synthetic oligonucleotide
uacuacucuucagcugguu

SEQ ID NO: 1741926 - RNA, 19 nt, Artificial Sequence
  Description of Artificial Sequence: Synthetic oligonucleotide
ggauaaccaacuacauuua

SEQ ID NO: 1741927 - RNA, 19 nt, Artificial Sequence
  Description of Artificial Sequence: Synthetic oligonucleotide
ccacaacgauggcagcacg

SEQ ID NO: 1741928 - RNA, 19 nt, Artificial Sequence
  Description of Artificial Sequence: Synthetic oligonucleotide
cuugagccugcauucgaau

SEQ ID NO: 1741929 - RNA, 19 nt, Artificial Sequence
  Description of Artificial Sequence: Synthetic oligonucleotide
ccugacacuaccccacaga

SEQ ID NO: 1741930 - RNA, 19 nt, Artificial Sequence
  Description of Artificial Sequence: Synthetic oligonucleotide
gcuuugguaaauaccaauu

SEQ ID NO: 1741931 - RNA, 19 nt, Artificial Sequence
  Description of Artificial Sequence: Synthetic oligonucleotide
aggccgccauacacaaaag

SEQ ID NO: 1741932 - RNA, 19 nt, Artificial Sequence
  Description of Artificial Sequence: Synthetic oligonucleotide
cccacaacgauggcagcac

SEQ ID NO: 1741933 - RNA, 19 nt, Artificial Sequence
  Description of Artificial Sequence: Synthetic oligonucleotide
augcgcguucucaccacgu

SEQ ID NO: 1741934 - RNA, 19 nt, Artificial Sequence
  Description of Artificial Sequence: Synthetic oligonucleotide
cuccugacacuaccccaca

SEQ ID NO: 1741935 - RNA, 19 nt, Artificial Sequence
  Description of Artificial Sequence: Synthetic oligonucleotide
ccacagguaaagcuagaaa

SEQ ID NO: 1741936 - RNA, 19 nt, Artificial Sequence
  Description of Artificial Sequence: Synthetic oligonucleotide
gugccgaacucagcaacaa

SEQ ID NO: 1741937 - RNA, 19 nt, Artificial Sequence
  Description of Artificial Sequence: Synthetic oligonucleotide
gucccacuauugcccucug

SEQ ID NO: 1741938 - RNA, 19 nt, Artificial Sequence
  Description of Artificial Sequence: Synthetic oligonucleotide
gccuuaagucauccuacua

SEQ ID NO: 1741939 - RNA, 19 nt, Artificial Sequence
  Description of Artificial Sequence: Synthetic oligonucleotide
aucugggguuacacucuca

SEQ ID NO: 1741940 - RNA, 19 nt, Artificial Sequence
  Description of Artificial Sequence: Synthetic oligonucleotide
cuuagauuugaagccucuu

SEQ ID NO: 1741941 - RNA, 19 nt, Artificial Sequence
  Description of Artificial Sequence: Synthetic oligonucleotide
cggguuuuaguaaggucca

SEQ ID NO: 1741942 - RNA, 19 nt, Artificial Sequence
  Description of Artificial Sequence: Synthetic oligonucleotide
caguugggaccacaccucu

SEQ ID NO: 1741943 - RNA, 19 nt, Artificial Sequence
  Description of Artificial Sequence: Synthetic oligonucleotide
agacaccaaucugggguua

SEQ ID NO: 1741944 - RNA, 19 nt, Artificial Sequence
  Description of Artificial Sequence: Synthetic oligonucleotide
ggguuuuaguaagguccac

SEQ ID NO: 1741945 - RNA, 19 nt, Artificial Sequence
  Description of Artificial Sequence: Synthetic oligonucleotide
ccuugagccugcauucgaa

SEQ ID NO: 1741946 - RNA, 19 nt, Artificial Sequence
  Description of Artificial Sequence: Synthetic oligonucleotide
cacgucaacuggguuagau

SEQ ID NO: 1741947 - RNA, 19 nt, Artificial Sequence
  Description of Artificial Sequence: Synthetic oligonucleotide
guacuugcagccggguuuu

SEQ ID NO: 1741948 - RNA, 19 nt, Artificial Sequence
  Description of Artificial Sequence: Synthetic oligonucleotide
gagccugcauucgaaucuu

SEQ ID NO: 1741949 - RNA, 19 nt, Artificial Sequence
  Description of Artificial Sequence: Synthetic oligonucleotide
ccgccauacacaaaagguu

SEQ ID NO: 1741950 - RNA, 19 nt, Artificial Sequence
  Description of Artificial Sequence: Synthetic oligonucleotide
caaggccgccauacacaaa

SEQ ID NO: 1741951 - RNA, 19 nt, Artificial Sequence
  Description of Artificial Sequence: Synthetic oligonucleotide
ccauacgaugccugucuua

SEQ ID NO: 1741952 - RNA, 19 nt, Artificial Sequence
  Description of Artificial Sequence: Synthetic oligonucleotide
ggcugggcuuagauuuuca

SEQ ID NO: 1741953 - RNA, 19 nt, Artificial Sequence
  Description of Artificial Sequence: Synthetic oligonucleotide
acacuaccccacagaucau

SEQ ID NO: 1741954 - RNA, 19 nt, Artificial Sequence
  Description of Artificial Sequence: Synthetic oligonucleotide
cugguaccuucuugcuggu

SEQ ID NO: 1741955 - RNA, 19 nt, Artificial Sequence
  Description of Artificial Sequence: Synthetic oligonucleotide
agccugcauucgaaucuuu

SEQ ID NO: 1741956 - RNA, 19 nt, Artificial Sequence
  Description of Artificial Sequence: Synthetic oligonucleotide
ccacuauugcccucugauu

SEQ ID NO: 1741957 - RNA, 19 nt, Artificial Sequence
  Description of Artificial Sequence: Synthetic oligonucleotide
ccacagggaaagugccgaa

SEQ ID NO: 1741958 - RNA, 19 nt, Artificial Sequence
  Description of Artificial Sequence: Synthetic oligonucleotide
agaaacaaggcuuagcagc

SEQ ID NO: 1741959 - RNA, 19 nt, Artificial Sequence
  Description of Artificial Sequence: Synthetic oligonucleotide
uuaauuaaaguccuauugc

SEQ ID NO: 1741960 - RNA, 19 nt, Artificial Sequence
  Description of Artificial Sequence: Synthetic oligonucleotide
aaugcgucuccacaaaggg

SEQ ID NO: 1741961 - RNA, 19 nt, Artificial Sequence
  Description of Artificial Sequence: Synthetic oligonucleotide
aguugugaaggcuaucucc

SEQ ID NO: 1741962 - RNA, 19 nt, Artificial Sequence
  Description of Artificial Sequence: Synthetic oligonucleotide
aaggcuaucucccaggaga

SEQ ID NO: 1741963 - RNA, 19 nt, Artificial Sequence
  Description of Artificial Sequence: Synthetic oligonucleotide
ucagcuaucaggaaccaug

SEQ ID NO: 1741964 - RNA, 19 nt, Artificial Sequence
  Description of Artificial Sequence: Synthetic oligonucleotide
uagcauauccacaagggcc

SEQ ID NO: 1741965 - RNA, 19 nt, Artificial Sequence
  Description of Artificial Sequence: Synthetic oligonucleotide
aaucugguaaagcagggcu

SEQ ID NO: 1741966 - RNA, 19 nt, Artificial Sequence
  Description of Artificial Sequence: Synthetic oligonucleotide
uggcucauggggcagaucg

SEQ ID NO: 1741967 - RNA, 19 nt, Artificial Sequence
  Description of Artificial Sequence: Synthetic oligonucleotide
cuuagcagcagcaaccucc

SEQ ID NO: 1741968 - RNA, 19 nt, Artificial Sequence
  Description of Artificial Sequence: Synthetic oligonucleotide
aagacugcuaggguggugc

SEQ ID NO: 1741969 - RNA, 19 nt, Artificial Sequence
  Description of Artificial Sequence: Synthetic oligonucleotide
uauaguaagcaugaggcug

SEQ ID NO: 1741970 - RNA, 19 nt, Artificial Sequence
  Description of Artificial Sequence: Synthetic oligonucleotide
auagaggaagaccccagcc

SEQ ID NO: 1741971 - RNA, 19 nt, Artificial Sequence
  Description of Artificial Sequence: Synthetic oligonucleotide
gaacacauggagcacaggc

SEQ ID NO: 1741972 - RNA, 19 nt, Artificial Sequence
  Description of Artificial Sequence: Synthetic oligonucleotide
aaggcuuagcagcagcaac

SEQ ID NO: 1741973 - RNA, 19 nt, Artificial Sequence
  Description of Artificial Sequence: Synthetic oligonucleotide
agaaccauccaugcgauac

SEQ ID NO: 1741974 - RNA, 19 nt, Artificial Sequence
  Description of Artificial Sequence: Synthetic oligonucleotide
agaggucuaggccugaggg

SEQ ID NO: 1741975 - RNA, 19 nt, Artificial Sequence
  Description of Artificial Sequence: Synthetic oligonucleotide
augcgauacugccugagcc

SEQ ID NO: 1741976 - RNA, 19 nt, Artificial Sequence
  Description of Artificial Sequence: Synthetic oligonucleotide
acaaagggugcccacggcc

SEQ ID NO: 1741977 - RNA, 19 nt, Artificial Sequence
  Description of Artificial Sequence: Synthetic oligonucleotide
ugguagcauauccacaagg

SEQ ID NO: 1741978 - RNA, 19 nt, Artificial Sequence
  Description of Artificial Sequence: Synthetic oligonucleotide
aaccauucagacaaucuuc

SEQ ID NO: 1741979 - RNA, 19 nt, Artificial Sequence
  Description of Artificial Sequence: Synthetic oligonucleotide
gauccuuugccacuggccc

SEQ ID NO: 1741980 - RNA, 19 nt, Artificial Sequence
  Description of Artificial Sequence: Synthetic oligonucleotide
gaagccgucagagaaggcg

SEQ ID NO: 1741981 - RNA, 19 nt, Artificial Sequence
  Description of Artificial Sequence: Synthetic oligonucleotide
gcuauaguaagcaugaggc

SEQ ID NO: 1741982 - RNA, 19 nt, Artificial Sequence
  Description of Artificial Sequence: Synthetic oligonucleotide
guaagcaugaggcugcccc

SEQ ID NO: 1741983 - RNA, 19 nt, Artificial Sequence
  Description of Artificial Sequence: Synthetic oligonucleotide
ucuagcacgaagagcagga

SEQ ID NO: 1741984 - RNA, 19 nt, Artificial Sequence
  Description of Artificial Sequence: Synthetic oligonucleotide
aaauugaccagcagcuggg

SEQ ID NO: 1741985 - RNA, 19 nt, Artificial Sequence
  Description of Artificial Sequence: Synthetic oligonucleotide
aaaguccuauugcuccuac

SEQ ID NO: 1741986 - RNA, 19 nt, Artificial Sequence
  Description of Artificial Sequence: Synthetic oligonucleotide
caacgaaugguccagcagc

SEQ ID NO: 1741987 - RNA, 19 nt, Artificial Sequence
  Description of Artificial Sequence: Synthetic oligonucleotide
aggagaaccauccaugcga

SEQ ID NO: 1741988 - RNA, 19 nt, Artificial Sequence
  Description of Artificial Sequence: Synthetic oligonucleotide
uuagcagcagcaaccuccg

SEQ ID NO: 1741989 - RNA, 19 nt, Artificial Sequence
  Description of Artificial Sequence: Synthetic oligonucleotide
aguccuauugcuccuacug

SEQ ID NO: 1741990 - RNA, 19 nt, Artificial Sequence
  Description of Artificial Sequence: Synthetic oligonucleotide
aaguugugaaggcuaucuc

SEQ ID NO: 1741991 - RNA, 19 nt, Artificial Sequence
  Description of Artificial Sequence: Synthetic oligonucleotide
aaccuccggaaugacagcc

SEQ ID NO: 1741992 - RNA, 19 nt, Artificial Sequence
  Description of Artificial Sequence: Synthetic oligonucleotide
acuaugucuuguguguugc

SEQ ID NO: 1741993 - RNA, 19 nt, Artificial Sequence
  Description of Artificial Sequence: Synthetic oligonucleotide
guucaccccagccugaagg

SEQ ID NO: 1741994 - RNA, 19 nt, Artificial Sequence
  Description of Artificial Sequence: Synthetic oligonucleotide
cauagcagagcaaacugac

SEQ ID NO: 1741995 - RNA, 19 nt, Artificial Sequence
  Description of Artificial Sequence: Synthetic oligonucleotide
aacaccggccguaacacac

SEQ ID NO: 1741996 - RNA, 19 nt, Artificial Sequence
  Description of Artificial Sequence: Synthetic oligonucleotide
cagaagacugcuagggugg

SEQ ID NO: 1741997 - RNA, 19 nt, Artificial Sequence
  Description of Artificial Sequence: Synthetic oligonucleotide
cugugaaagaggucuaggc

SEQ ID NO: 1741998 - RNA, 19 nt, Artificial Sequence
  Description of Artificial Sequence: Synthetic oligonucleotide
aaagcagggcuggacauag

SEQ ID NO: 1741999 - RNA, 19 nt, Artificial Sequence
  Description of Artificial Sequence: Synthetic oligonucleotide
gacgcagcaggacugguag

SEQ ID NO: 1742000 - RNA, 19 nt, Artificial Sequence
  Description of Artificial Sequence: Synthetic oligonucleotide
cuaucaggaaccaugggca

SEQ ID NO: 1742001 - RNA, 19 nt, Artificial Sequence
  Description of Artificial Sequence: Synthetic oligonucleotide
ccuaggaagccuaacaccg

SEQ ID NO: 1742002 - RNA, 19 nt, Artificial Sequence
  Description of Artificial Sequence: Synthetic oligonucleotide
aagaggucuaggccugagg

SEQ ID NO: 1742003 - RNA, 19 nt, Artificial Sequence
  Description of Artificial Sequence: Synthetic oligonucleotide
aagcugacgccccacccgg

SEQ ID NO: 1742004 - RNA, 19 nt, Artificial Sequence
  Description of Artificial Sequence: Synthetic oligonucleotide
gacaguacgucuccuggag

SEQ ID NO: 1742005 - RNA, 19 nt, Artificial Sequence
  Description of Artificial Sequence: Synthetic oligonucleotide
cugggaaccauucagacaa

SEQ ID NO: 1742006 - RNA, 19 nt, Artificial Sequence
  Description of Artificial Sequence: Synthetic oligonucleotide
uggcagaagacugcuaggg

SEQ ID NO: 1742007 - RNA, 19 nt, Artificial Sequence
  Description of Artificial Sequence: Synthetic oligonucleotide
ggcuauaguaagcaugagg

SEQ ID NO: 1742008 - RNA, 19 nt, Artificial Sequence
  Description of Artificial Sequence: Synthetic oligonucleotide
ucugugaaagaggucuagg

SEQ ID NO: 1742009 - RNA, 19 nt, Artificial Sequence
  Description of Artificial Sequence: Synthetic oligonucleotide
guugaggccaaaauugacc

SEQ ID NO: 1742010 - RNA, 19 nt, Artificial Sequence
  Description of Artificial Sequence: Synthetic oligonucleotide
guagcauauccacaagggc

SEQ ID NO: 1742011 - RNA, 19 nt, Artificial Sequence
  Description of Artificial Sequence: Synthetic oligonucleotide
gcuaucaggaaccaugggc

SEQ ID NO: 1742012 - RNA, 19 nt, Artificial Sequence
  Description of Artificial Sequence: Synthetic oligonucleotide
gccaaaauugaccagcagc

SEQ ID NO: 1742013 - RNA, 19 nt, Artificial Sequence
  Description of Artificial Sequence: Synthetic oligonucleotide
gagaagccgucagagaagg

SEQ ID NO: 1742014 - RNA, 19 nt, Artificial Sequence
  Description of Artificial Sequence: Synthetic oligonucleotide
agagcaaacugacgagggg

SEQ ID NO: 1742015 - RNA, 19 nt, Artificial Sequence
  Description of Artificial Sequence: Synthetic oligonucleotide
cagagcaaacugacgaggg

SEQ ID NO: 1742016 - RNA, 19 nt, Artificial Sequence
  Description of Artificial Sequence: Synthetic oligonucleotide
uaugucuuguguguugccc

SEQ ID NO: 1742017 - RNA, 19 nt, Artificial Sequence
  Description of Artificial Sequence: Synthetic oligonucleotide
cugucaaucugguaaagca

SEQ ID NO: 1742018 - RNA, 19 nt, Artificial Sequence
  Description of Artificial Sequence: Synthetic oligonucleotide
aggggaacagggcccaagc

SEQ ID NO: 1742019 - RNA, 19 nt, Artificial Sequence
  Description of Artificial Sequence: Synthetic oligonucleotide
aggguugaggccaaaauug

SEQ ID NO: 1742020 - RNA, 19 nt, Artificial Sequence
  Description of Artificial Sequence: Synthetic oligonucleotide
guugugaaggcuaucuccc

SEQ ID NO: 1742021 - RNA, 19 nt, Artificial Sequence
  Description of Artificial Sequence: Synthetic oligonucleotide
gacacggcugucaaucugg

SEQ ID NO: 1742022 - RNA, 19 nt, Artificial Sequence
  Description of Artificial Sequence: Synthetic oligonucleotide
gguagcauauccacaaggg

SEQ ID NO: 1742023 - RNA, 19 nt, Artificial Sequence
  Description of Artificial Sequence: Synthetic oligonucleotide
uacggguucuguuuaauua

SEQ ID NO: 1742024 - RNA, 19 nt, Artificial Sequence
  Description of Artificial Sequence: Synthetic oligonucleotide
agacaaucuucauucagau

SEQ ID NO: 1742025 - RNA, 19 nt, Artificial Sequence
  Description of Artificial Sequence: Synthetic oligonucleotide
cagacaguacgucuccugg

SEQ ID NO: 1742026 - RNA, 19 nt, Artificial Sequence
  Description of Artificial Sequence: Synthetic oligonucleotide
auggucagccaacgaaugg

SEQ ID NO: 1742027 - RNA, 19 nt, Artificial Sequence
  Description of Artificial Sequence: Synthetic oligonucleotide
agaggaagaccccagccgu

SEQ ID NO: 1742028 - RNA, 19 nt, Artificial Sequence
  Description of Artificial Sequence: Synthetic oligonucleotide
aggaaccaugggcaguagc

SEQ ID NO: 1742029 - RNA, 19 nt, Artificial Sequence
  Description of Artificial Sequence: Synthetic oligonucleotide
cagggcuauaguaagcaug

SEQ ID NO: 1742030 - RNA, 19 nt, Artificial Sequence
  Description of Artificial Sequence: Synthetic oligonucleotide
agaaggcggcaccuagugc

SEQ ID NO: 1742031 - RNA, 19 nt, Artificial Sequence
  Description of Artificial Sequence: Synthetic oligonucleotide
cacugauagcccuggaccc

SEQ ID NO: 1742032 - RNA, 19 nt, Artificial Sequence
  Description of Artificial Sequence: Synthetic oligonucleotide
ucagcuccgguuccugggg

SEQ ID NO: 1742033 - RNA, 19 nt, Artificial Sequence
  Description of Artificial Sequence: Synthetic oligonucleotide
ugccgcacaaguccuagca

SEQ ID NO: 1742034 - RNA, 19 nt, Artificial Sequence
  Description of Artificial Sequence: Synthetic oligonucleotide
ugacgccccacccggaggg

SEQ ID NO: 1742035 - RNA, 19 nt, Artificial Sequence
  Description of Artificial Sequence: Synthetic oligonucleotide
gagaaggcggcaccuagug

SEQ ID NO: 1742036 - RNA, 19 nt, Artificial Sequence
  Description of Artificial Sequence: Synthetic oligonucleotide
cagaaacaaggcuuagcag

SEQ ID NO: 1742037 - RNA, 19 nt, Artificial Sequence
  Description of Artificial Sequence: Synthetic oligonucleotide
gaaacaaggcuuagcagca

SEQ ID NO: 1742038 - RNA, 19 nt, Artificial Sequence
  Description of Artificial Sequence: Synthetic oligonucleotide
ugacagcccugccugaagc

SEQ ID NO: 1742039 - RNA, 19 nt, Artificial Sequence
  Description of Artificial Sequence: Synthetic oligonucleotide
auguuuucuagcacgaaga

SEQ ID NO: 1742040 - RNA, 19 nt, Artificial Sequence
  Description of Artificial Sequence: Synthetic oligonucleotide
agcagcaaccuccggaaug

SEQ ID NO: 1742041 - RNA, 19 nt, Artificial Sequence
  Description of Artificial Sequence: Synthetic oligonucleotide
caucagugaaguugugaag

SEQ ID NO: 1742042 - RNA, 19 nt, Artificial Sequence
  Description of Artificial Sequence: Synthetic oligonucleotide
cacaagggccacauagagg

SEQ ID NO: 1742043 - RNA, 19 nt, Artificial Sequence
  Description of Artificial Sequence: Synthetic oligonucleotide
gccacauagaggaagaccc

SEQ ID NO: 1742044 - RNA, 19 nt, Artificial Sequence
  Description of Artificial Sequence: Synthetic oligonucleotide
cuauugcuccuacuggccc

SEQ ID NO: 1742045 - RNA, 19 nt, Artificial Sequence
  Description of Artificial Sequence: Synthetic oligonucleotide
acugauagcccuggacccc

SEQ ID NO: 1742046 - RNA, 19 nt, Artificial Sequence
  Description of Artificial Sequence: Synthetic oligonucleotide
cuaggaagccuaacaccgg

SEQ ID NO: 1742047 - RNA, 19 nt, Artificial Sequence
  Description of Artificial Sequence: Synthetic oligonucleotide
aguagcuguuccuccagca

SEQ ID NO: 1742048 - RNA, 19 nt, Artificial Sequence
  Description of Artificial Sequence: Synthetic oligonucleotide
uuucuagcacgaagagcag

SEQ ID NO: 1742049 - RNA, 19 nt, Artificial Sequence
  Description of Artificial Sequence: Synthetic oligonucleotide
guagcaaugcgucuccaca

SEQ ID NO: 1742050 - RNA, 19 nt, Artificial Sequence
  Description of Artificial Sequence: Synthetic oligonucleotide
acaguacgucuccuggagg

SEQ ID NO: 1742051 - RNA, 19 nt, Artificial Sequence
  Description of Artificial Sequence: Synthetic oligonucleotide
ugcgauacugccugagccu

SEQ ID NO: 1742052 - RNA, 19 nt, Artificial Sequence
  Description of Artificial Sequence: Synthetic oligonucleotide
aguccuagcauguuuucua

SEQ ID NO: 1742053 - RNA, 19 nt, Artificial Sequence
  Description of Artificial Sequence: Synthetic oligonucleotide
agguguagcaaugcgucuc

SEQ ID NO: 1742054 - RNA, 19 nt, Artificial Sequence
  Description of Artificial Sequence: Synthetic oligonucleotide
gcacugauagcccuggacc

SEQ ID NO: 1742055 - RNA, 19 nt, Artificial Sequence
  Description of Artificial Sequence: Synthetic oligonucleotide
caagcugacgccccacccg

SEQ ID NO: 1742056 - RNA, 19 nt, Artificial Sequence
  Description of Artificial Sequence: Synthetic oligonucleotide
uguagcaaugcgucuccac

SEQ ID NO: 1742057 - RNA, 19 nt, Artificial Sequence
  Description of Artificial Sequence: Synthetic oligonucleotide
ggaagccuaacaccggccg

SEQ ID NO: 1742058 - RNA, 19 nt, Artificial Sequence
  Description of Artificial Sequence: Synthetic oligonucleotide
acggguucuguuuaauuaa

SEQ ID NO: 1742059 - RNA, 19 nt, Artificial Sequence
  Description of Artificial Sequence: Synthetic oligonucleotide
cagcauggcaaagucaccc

SEQ ID NO: 1742060 - RNA, 19 nt, Artificial Sequence
  Description of Artificial Sequence: Synthetic oligonucleotide
uggacauagcagagcaaac

SEQ ID NO: 1742061 - RNA, 19 nt, Artificial Sequence
  Description of Artificial Sequence: Synthetic oligonucleotide
ugcucacuaugucuugugu

SEQ ID NO: 1742062 - RNA, 19 nt, Artificial Sequence
  Description of Artificial Sequence: Synthetic oligonucleotide
gaagaggccaccaagcacu

SEQ ID NO: 1742063 - RNA, 19 nt, Artificial Sequence
  Description of Artificial Sequence: Synthetic oligonucleotide
aaccauccaugcgauacug

SEQ ID NO: 1742064 - RNA, 19 nt, Artificial Sequence
  Description of Artificial Sequence: Synthetic oligonucleotide
agggcuauaguaagcauga

SEQ ID NO: 1742065 - RNA, 19 nt, Artificial Sequence
  Description of Artificial Sequence: Synthetic oligonucleotide
ugacuccuccaguucaccc

SEQ ID NO: 1742066 - RNA, 19 nt, Artificial Sequence
  Description of Artificial Sequence: Synthetic oligonucleotide
caaacacccagggagugag

SEQ ID NO: 1742067 - RNA, 19 nt, Artificial Sequence
  Description of Artificial Sequence: Synthetic oligonucleotide
gauggucagccaacgaaug

SEQ ID NO: 1742068 - RNA, 19 nt, Artificial Sequence
  Description of Artificial Sequence: Synthetic oligonucleotide
ucugugccgcacaaguccu

SEQ ID NO: 1742069 - RNA, 19 nt, Artificial Sequence
  Description of Artificial Sequence: Synthetic oligonucleotide
aaguccuagcauguuuucu

SEQ ID NO: 1742070 - RNA, 19 nt, Artificial Sequence
  Description of Artificial Sequence: Synthetic oligonucleotide
auagcagagcaaacugacg

SEQ ID NO: 1742071 - RNA, 19 nt, Artificial Sequence
  Description of Artificial Sequence: Synthetic oligonucleotide
aacgaaugguccagcagca

SEQ ID NO: 1742072 - RNA, 19 nt, Artificial Sequence
  Description of Artificial Sequence: Synthetic oligonucleotide
gaaguugugaaggcuaucu

SEQ ID NO: 1742073 - RNA, 19 nt, Artificial Sequence
  Description of Artificial Sequence: Synthetic oligonucleotide
gaggucuaggccugagggc

SEQ ID NO: 1742074 - RNA, 19 nt, Artificial Sequence
  Description of Artificial Sequence: Synthetic oligonucleotide
ugugcguggggcagcaggu

SEQ ID NO: 1742075 - RNA, 19 nt, Artificial Sequence
  Description of Artificial Sequence: Synthetic oligonucleotide
uggucagccaacgaauggu

SEQ ID NO: 1742076 - RNA, 19 nt, Artificial Sequence
  Description of Artificial Sequence: Synthetic oligonucleotide
guguugcccuccuugugcg

SEQ ID NO: 1742077 - RNA, 19 nt, Artificial Sequence
  Description of Artificial Sequence: Synthetic oligonucleotide
uagcaaugcgucuccacaa

SEQ ID NO: 1742078 - RNA, 19 nt, Artificial Sequence
  Description of Artificial Sequence: Synthetic oligonucleotide
caugcgauacugccugagc

SEQ ID NO: 1742079 - RNA, 19 nt, Artificial Sequence
  Description of Artificial Sequence: Synthetic oligonucleotide
uccuagcauguuuucuagc

SEQ ID NO: 1742080 - RNA, 19 nt, Artificial Sequence
  Description of Artificial Sequence: Synthetic oligonucleotide
uggauccuuugccacuggc

SEQ ID NO: 1742081 - RNA, 19 nt, Artificial Sequence
  Description of Artificial Sequence: Synthetic oligonucleotide
uuggguacggguucuguuu

SEQ ID NO: 1742082 - RNA, 19 nt, Artificial Sequence
  Description of Artificial Sequence: Synthetic oligonucleotide
caggagaaccauccaugcg

SEQ ID NO: 1742083 - RNA, 19 nt, Artificial Sequence
  Description of Artificial Sequence: Synthetic oligonucleotide
gaagaccccagccgugacc

SEQ ID NO: 1742084 - RNA, 19 nt, Artificial Sequence
  Description of Artificial Sequence: Synthetic oligonucleotide
aaguccuauugcuccuacu

SEQ ID NO: 1742085 - RNA, 19 nt, Artificial Sequence
  Description of Artificial Sequence: Synthetic oligonucleotide
cauuccugcccagacauuc

SEQ ID NO: 1742086 - RNA, 19 nt, Artificial Sequence
  Description of Artificial Sequence: Synthetic oligonucleotide
aaacaaggcuuagcagcag

SEQ ID NO: 1742087 - RNA, 19 nt, Artificial Sequence
  Description of Artificial Sequence: Synthetic oligonucleotide
agcuccgguuccuggggcc

SEQ ID NO: 1742088 - RNA, 19 nt, Artificial Sequence
  Description of Artificial Sequence: Synthetic oligonucleotide
uugcucacuaugucuugug

SEQ ID NO: 1742089 - RNA, 19 nt, Artificial Sequence
  Description of Artificial Sequence: Synthetic oligonucleotide
ucauucagauggucagcca

SEQ ID NO: 1742090 - RNA, 19 nt, Artificial Sequence
  Description of Artificial Sequence: Synthetic oligonucleotide
uaggguggugcugaggcca

SEQ ID NO: 1742091 - RNA, 19 nt, Artificial Sequence
  Description of Artificial Sequence: Synthetic oligonucleotide
agcaaacugacgagggguc

SEQ ID NO: 1742092 - RNA, 19 nt, Artificial Sequence
  Description of Artificial Sequence: Synthetic oligonucleotide
cacuaugucuuguguguug

SEQ ID NO: 1742093 - RNA, 19 nt, Artificial Sequence
  Description of Artificial Sequence: Synthetic oligonucleotide
agccgugaccccaaacacc

SEQ ID NO: 1742094 - RNA, 19 nt, Artificial Sequence
  Description of Artificial Sequence: Synthetic oligonucleotide
ugugucccgccuccguucc

SEQ ID NO: 1742095 - RNA, 19 nt, Artificial Sequence
  Description of Artificial Sequence: Synthetic oligonucleotide
gguaaagcagggcuggaca

SEQ ID NO: 1742096 - RNA, 19 nt, Artificial Sequence
  Description of Artificial Sequence: Synthetic oligonucleotide
aacagggcccaagcugacg

SEQ ID NO: 1742097 - RNA, 19 nt, Artificial Sequence
  Description of Artificial Sequence: Synthetic oligonucleotide
accaagcacugauagcccu

SEQ ID NO: 1742098 - RNA, 19 nt, Artificial Sequence
  Description of Artificial Sequence: Synthetic oligonucleotide
gagcgagggaggcugagca

SEQ ID NO: 1742099 - RNA, 19 nt, Artificial Sequence
  Description of Artificial Sequence: Synthetic oligonucleotide
ucuuguguguugcccuccu

SEQ ID NO: 1742100 - RNA, 19 nt, Artificial Sequence
  Description of Artificial Sequence: Synthetic oligonucleotide
caaucugguaaagcagggc

SEQ ID NO: 1742101 - RNA, 19 nt, Artificial Sequence
  Description of Artificial Sequence: Synthetic oligonucleotide
cuucauucagauggucagc

SEQ ID NO: 1742102 - RNA, 19 nt, Artificial Sequence
  Description of Artificial Sequence: Synthetic oligonucleotide
gcuaucucccaggagaacc

SEQ ID NO: 1742103 - RNA, 19 nt, Artificial Sequence
  Description of Artificial Sequence: Synthetic oligonucleotide
caccccagccugaaggacc

SEQ ID NO: 1742104 - RNA, 19 nt, Artificial Sequence
  Description of Artificial Sequence: Synthetic oligonucleotide
gaugcagacacggcuguca

SEQ ID NO: 1742105 - RNA, 19 nt, Artificial Sequence
  Description of Artificial Sequence: Synthetic oligonucleotide
ugugccgcacaaguccuag

SEQ ID NO: 1742106 - RNA, 19 nt, Artificial Sequence
  Description of Artificial Sequence: Synthetic oligonucleotide
ccugccugaagcagcaugg

SEQ ID NO: 1742107 - RNA, 19 nt, Artificial Sequence
  Description of Artificial Sequence: Synthetic oligonucleotide
aacugacgaggggucagag

SEQ ID NO: 1742108 - RNA, 19 nt, Artificial Sequence
  Description of Artificial Sequence: Synthetic oligonucleotide
uuuggguacggguucuguu

SEQ ID NO: 1742109 - RNA, 19 nt, Artificial Sequence
  Description of Artificial Sequence: Synthetic oligonucleotide
agacaguacgucuccugga

SEQ ID NO: 1742110 - RNA, 19 nt, Artificial Sequence
  Description of Artificial Sequence: Synthetic oligonucleotide
cagagaaggcggcaccuag

SEQ ID NO: 1742111 - RNA, 19 nt, Artificial Sequence
  Description of Artificial Sequence: Synthetic oligonucleotide
cuaugucuuguguguugcc

SEQ ID NO: 1742112 - RNA, 19 nt, Artificial Sequence
  Description of Artificial Sequence: Synthetic oligonucleotide
agacacggcugucaaucug

SEQ ID NO: 1742113 - RNA, 19 nt, Artificial Sequence
  Description of Artificial Sequence: Synthetic oligonucleotide
aaggacccagaggcauucc

SEQ ID NO: 1742114 - RNA, 19 nt, Artificial Sequence
  Description of Artificial Sequence: Synthetic oligonucleotide
aggaagccuaacaccggcc

SEQ ID NO: 1742115 - RNA, 19 nt, Artificial Sequence
  Description of Artificial Sequence: Synthetic oligonucleotide
ccagaaacaaggcuuagca

SEQ ID NO: 1742116 - RNA, 19 nt, Artificial Sequence
  Description of Artificial Sequence: Synthetic oligonucleotide
caaaauugaccagcagcug

SEQ ID NO: 1742117 - RNA, 19 nt, Artificial Sequence
  Description of Artificial Sequence: Synthetic oligonucleotide
ucaggaaccaugggcagua

SEQ ID NO: 1742118 - RNA, 19 nt, Artificial Sequence
  Description of Artificial Sequence: Synthetic oligonucleotide
agcauggcaaagucaccca

SEQ ID NO: 1742119 - RNA, 19 nt, Artificial Sequence
  Description of Artificial Sequence: Synthetic oligonucleotide
aguaagcaugaggcugccc

SEQ ID NO: 1742120 - RNA, 19 nt, Artificial Sequence
  Description of Artificial Sequence: Synthetic oligonucleotide
gcucacuaugucuugugug

SEQ ID NO: 1742121 - RNA, 19 nt, Artificial Sequence
  Description of Artificial Sequence: Synthetic oligonucleotide
cagcagguguagcaaugcg

SEQ ID NO: 1742122 - RNA, 19 nt, Artificial Sequence
  Description of Artificial Sequence: Synthetic oligonucleotide
cucacuaugucuugugugu

SEQ ID NO: 1742123 - RNA, 19 nt, Artificial Sequence
  Description of Artificial Sequence: Synthetic oligonucleotide
acauucacacucagcuccg

SEQ ID NO: 1742124 - RNA, 19 nt, Artificial Sequence
  Description of Artificial Sequence: Synthetic oligonucleotide
caccaagcacugauagccc

SEQ ID NO: 1742125 - RNA, 19 nt, Artificial Sequence
  Description of Artificial Sequence: Synthetic oligonucleotide
guuuugaugcagacacggc

SEQ ID NO: 1742126 - RNA, 19 nt, Artificial Sequence
  Description of Artificial Sequence: Synthetic oligonucleotide
ggacugguagcauauccac

SEQ ID NO: 1742127 - RNA, 19 nt, Artificial Sequence
  Description of Artificial Sequence: Synthetic oligonucleotide
agaggagcaacaggguuga

SEQ ID NO: 1742128 - RNA, 19 nt, Artificial Sequence
  Description of Artificial Sequence: Synthetic oligonucleotide
cagauggucagccaacgaa

SEQ ID NO: 1742129 - RNA, 19 nt, Artificial Sequence
  Description of Artificial Sequence: Synthetic oligonucleotide
ggccaccaagcacugauag

SEQ ID NO: 1742130 - RNA, 19 nt, Artificial Sequence
  Description of Artificial Sequence: Synthetic oligonucleotide
gcagagcaaacugacgagg

SEQ ID NO: 1742131 - RNA, 19 nt, Artificial Sequence
  Description of Artificial Sequence: Synthetic oligonucleotide
agauggucagccaacgaau

SEQ ID NO: 1742132 - RNA, 19 nt, Artificial Sequence
  Description of Artificial Sequence: Synthetic oligonucleotide
auagcccuggaccccagau

SEQ ID NO: 1742133 - RNA, 19 nt, Artificial Sequence
  Description of Artificial Sequence: Synthetic oligonucleotide
gguguagcaaugcgucucc

SEQ ID NO: 1742134 - RNA, 19 nt, Artificial Sequence
  Description of Artificial Sequence: Synthetic oligonucleotide
uggguacggguucuguuua

SEQ ID NO: 1742135 - RNA, 19 nt, Artificial Sequence
  Description of Artificial Sequence: Synthetic oligonucleotide
aggacugguagcauaucca

SEQ ID NO: 1742136 - RNA, 19 nt, Artificial Sequence
  Description of Artificial Sequence: Synthetic oligonucleotide
agcagguguagcaaugcgu

SEQ ID NO: 1742137 - RNA, 19 nt, Artificial Sequence
  Description of Artificial Sequence: Synthetic oligonucleotide
cuaggguggugcugaggcc

SEQ ID NO: 1742138 - RNA, 19 nt, Artificial Sequence
  Description of Artificial Sequence: Synthetic oligonucleotide
uuuuggguacggguucugu

SEQ ID NO: 1742139 - RNA, 19 nt, Artificial Sequence
  Description of Artificial Sequence: Synthetic oligonucleotide
ccuagcauguuuucuagca

SEQ ID NO: 1742140 - RNA, 19 nt, Artificial Sequence
  Description of Artificial Sequence: Synthetic oligonucleotide
aaacugacgaggggucaga

SEQ ID NO: 1742141 - RNA, 19 nt, Artificial Sequence
  Description of Artificial Sequence: Synthetic oligonucleotide
gccguaacacacgaggucc

SEQ ID NO: 1742142 - RNA, 19 nt, Artificial Sequence
  Description of Artificial Sequence: Synthetic oligonucleotide
caaguccuagcauguuuuc

SEQ ID NO: 1742143 - RNA, 19 nt, Artificial Sequence
  Description of Artificial Sequence: Synthetic oligonucleotide
agcaaugcgucuccacaaa

SEQ ID NO: 1742144 - RNA, 19 nt, Artificial Sequence
  Description of Artificial Sequence: Synthetic oligonucleotide
auugaccagcagcugggaa

SEQ ID NO: 1742145 - RNA, 19 nt, Artificial Sequence
  Description of Artificial Sequence: Synthetic oligonucleotide
agcauguuuucuagcacga

SEQ ID NO: 1742146 - RNA, 19 nt, Artificial Sequence
  Description of Artificial Sequence: Synthetic oligonucleotide
ccuauugcuccuacuggcc

SEQ ID NO: 1742147 - RNA, 19 nt, Artificial Sequence
  Description of Artificial Sequence: Synthetic oligonucleotide
cugguagcauauccacaag

SEQ ID NO: 1742148 - RNA, 19 nt, Artificial Sequence
  Description of Artificial Sequence: Synthetic oligonucleotide
ugaaggacccagaggcauu

SEQ ID NO: 1742149 - RNA, 19 nt, Artificial Sequence
  Description of Artificial Sequence: Synthetic oligonucleotide
ccaaaauugaccagcagcu

SEQ ID NO: 1742150 - RNA, 19 nt, Artificial Sequence
  Description of Artificial Sequence: Synthetic oligonucleotide
ccaggagaaccauccaugc

SEQ ID NO: 1742151 - RNA, 19 nt, Artificial Sequence
  Description of Artificial Sequence: Synthetic oligonucleotide
gucugugaaagaggucuag

SEQ ID NO: 1742152 - RNA, 19 nt, Artificial Sequence
  Description of Artificial Sequence: Synthetic oligonucleotide
aggacccagaggcauuccu

SEQ ID NO: 1742153 - RNA, 19 nt, Artificial Sequence
  Description of Artificial Sequence: Synthetic oligonucleotide
cccuaggaagccuaacacc

SEQ ID NO: 1742154 - RNA, 19 nt, Artificial Sequence
  Description of Artificial Sequence: Synthetic oligonucleotide
guaacacacgaggucccag

SEQ ID NO: 1742155 - RNA, 19 nt, Artificial Sequence
  Description of Artificial Sequence: Synthetic oligonucleotide
agcagcugggaaccauuca

SEQ ID NO: 1742156 - RNA, 19 nt, Artificial Sequence
  Description of Artificial Sequence: Synthetic oligonucleotide
ccagcagggcuauaguaag

SEQ ID NO: 1742157 - RNA, 19 nt, Artificial Sequence
  Description of Artificial Sequence: Synthetic oligonucleotide
guacgucuccuggaggugc

SEQ ID NO: 1742158 - RNA, 19 nt, Artificial Sequence
  Description of Artificial Sequence: Synthetic oligonucleotide
gucagccaacgaauggucc

SEQ ID NO: 1742159 - RNA, 19 nt, Artificial Sequence
  Description of Artificial Sequence: Synthetic oligonucleotide
aagccuaacaccggccgua

SEQ ID NO: 1742160 - RNA, 19 nt, Artificial Sequence
  Description of Artificial Sequence: Synthetic oligonucleotide
agccaacgaaugguccagc

SEQ ID NO: 1742161 - RNA, 19 nt, Artificial Sequence
  Description of Artificial Sequence: Synthetic oligonucleotide
acaaggcuuagcagcagca

SEQ ID NO: 1742162 - RNA, 19 nt, Artificial Sequence
  Description of Artificial Sequence: Synthetic oligonucleotide
gagcaaacugacgaggggu

SEQ ID NO: 1742163 - RNA, 19 nt, Artificial Sequence
  Description of Artificial Sequence: Synthetic oligonucleotide
uccggaggacgcagcagga

SEQ ID NO: 1742164 - RNA, 19 nt, Artificial Sequence
  Description of Artificial Sequence: Synthetic oligonucleotide
cuauaguaagcaugaggcu

SEQ ID NO: 1742165 - RNA, 19 nt, Artificial Sequence
  Description of Artificial Sequence: Synthetic oligonucleotide
gcaaugcgucuccacaaag

SEQ ID NO: 1742166 - RNA, 19 nt, Artificial Sequence
  Description of Artificial Sequence: Synthetic oligonucleotide
aguucaccccagccugaag

SEQ ID NO: 1742167 - RNA, 19 nt, Artificial Sequence
  Description of Artificial Sequence: Synthetic oligonucleotide
gaccccagauccuccucug

SEQ ID NO: 1742168 - RNA, 19 nt, Artificial Sequence
  Description of Artificial Sequence: Synthetic oligonucleotide
cccaggagaaccauccaug

SEQ ID NO: 1742169 - RNA, 19 nt, Artificial Sequence
  Description of Artificial Sequence: Synthetic oligonucleotide
gcagacacggcugucaauc

SEQ ID NO: 1742170 - RNA, 19 nt, Artificial Sequence
  Description of Artificial Sequence: Synthetic oligonucleotide
ugagccuucugugccgcac

SEQ ID NO: 1742171 - RNA, 19 nt, Artificial Sequence
  Description of Artificial Sequence: Synthetic oligonucleotide
ccuagugcaagcccaucag

SEQ ID NO: 1742172 - RNA, 19 nt, Artificial Sequence
  Description of Artificial Sequence: Synthetic oligonucleotide
gccgugaccccaaacaccc

SEQ ID NO: 1742173 - RNA, 19 nt, Artificial Sequence
  Description of Artificial Sequence: Synthetic oligonucleotide
ugcuaggguggugcugagg

SEQ ID NO: 1742174 - RNA, 19 nt, Artificial Sequence
  Description of Artificial Sequence: Synthetic oligonucleotide
ggaacagggcccaagcuga

SEQ ID NO: 1742175 - RNA, 19 nt, Artificial Sequence
  Description of Artificial Sequence: Synthetic oligonucleotide
acgaggucccaggagccuc

SEQ ID NO: 1742176 - RNA, 19 nt, Artificial Sequence
  Description of Artificial Sequence: Synthetic oligonucleotide
gugcaagcccaucagugaa

SEQ ID NO: 1742177 - RNA, 19 nt, Artificial Sequence
  Description of Artificial Sequence: Synthetic oligonucleotide
ggauccuuugccacuggcc

SEQ ID NO: 1742178 - RNA, 19 nt, Artificial Sequence
  Description of Artificial Sequence: Synthetic oligonucleotide
gaggccaccaagcacugau

SEQ ID NO: 1742179 - RNA, 19 nt, Artificial Sequence
  Description of Artificial Sequence: Synthetic oligonucleotide
guugcccuccuugugcgug

SEQ ID NO: 1742180 - RNA, 19 nt, Artificial Sequence
  Description of Artificial Sequence: Synthetic oligonucleotide
cauucagacaaucuucauu

SEQ ID NO: 1742181 - RNA, 19 nt, Artificial Sequence
  Description of Artificial Sequence: Synthetic oligonucleotide
ugauagcccuggaccccag

SEQ ID NO: 1742182 - RNA, 19 nt, Artificial Sequence
  Description of Artificial Sequence: Synthetic oligonucleotide
aagcagggcuggacauagc

SEQ ID NO: 1742183 - RNA, 19 nt, Artificial Sequence
  Description of Artificial Sequence: Synthetic oligonucleotide
uaguaagcaugaggcugcc

SEQ ID NO: 1742184 - RNA, 19 nt, Artificial Sequence
  Description of Artificial Sequence: Synthetic oligonucleotide
ggccacauagaggaagacc

SEQ ID NO: 1742185 - RNA, 19 nt, Artificial Sequence
  Description of Artificial Sequence: Synthetic oligonucleotide
cagccaacgaaugguccag

SEQ ID NO: 1742186 - RNA, 19 nt, Artificial Sequence
  Description of Artificial Sequence: Synthetic oligonucleotide
ucacuaugucuuguguguu

SEQ ID NO: 1742187 - RNA, 19 nt, Artificial Sequence
  Description of Artificial Sequence: Synthetic oligonucleotide
ccaacgaaugguccagcag

SEQ ID NO: 1742188 - RNA, 19 nt, Artificial Sequence
  Description of Artificial Sequence: Synthetic oligonucleotide
cugacgccccacccggagg

SEQ ID NO: 1742189 - RNA, 19 nt, Artificial Sequence
  Description of Artificial Sequence: Synthetic oligonucleotide
gcagacaguacgucuccug

SEQ ID NO: 1742190 - RNA, 19 nt, Artificial Sequence
  Description of Artificial Sequence: Synthetic oligonucleotide
gaaccauccaugcgauacu

SEQ ID NO: 1742191 - RNA, 19 nt, Artificial Sequence
  Description of Artificial Sequence: Synthetic oligonucleotide
aggaagaccccagccguga

SEQ ID NO: 1742192 - RNA, 19 nt, Artificial Sequence
  Description of Artificial Sequence: Synthetic oligonucleotide
gcacuaugaagcagggcag

SEQ ID NO: 1742193 - RNA, 19 nt, Artificial Sequence
  Description of Artificial Sequence: Synthetic oligonucleotide
gaggaagaccccagccgug

SEQ ID NO: 1742194 - RNA, 19 nt, Artificial Sequence
  Description of Artificial Sequence: Synthetic oligonucleotide
ugucccgccuccguuccug

SEQ ID NO: 1742195 - RNA, 19 nt, Artificial Sequence
  Description of Artificial Sequence: Synthetic oligonucleotide
gguugcucacuaugucuug

SEQ ID NO: 1742196 - RNA, 19 nt, Artificial Sequence
  Description of Artificial Sequence: Synthetic oligonucleotide
ccgcacaaguccuagcaug

SEQ ID NO: 1742197 - RNA, 19 nt, Artificial Sequence
  Description of Artificial Sequence: Synthetic oligonucleotide
gagggcccuggcucauggg

SEQ ID NO: 1742198 - RNA, 19 nt, Artificial Sequence
  Description of Artificial Sequence: Synthetic oligonucleotide
aggccaaaauugaccagca

SEQ ID NO: 1742199 - RNA, 19 nt, Artificial Sequence
  Description of Artificial Sequence: Synthetic oligonucleotide
cuccacaaagggugcccac

SEQ ID NO: 1742200 - RNA, 19 nt, Artificial Sequence
  Description of Artificial Sequence: Synthetic oligonucleotide
agacugcuaggguggugcu

SEQ ID NO: 1742201 - RNA, 19 nt, Artificial Sequence
  Description of Artificial Sequence: Synthetic oligonucleotide
acgaaugguccagcagcag

SEQ ID NO: 1742202 - RNA, 19 nt, Artificial Sequence
  Description of Artificial Sequence: Synthetic oligonucleotide
uccaugcgauacugccuga

SEQ ID NO: 1742203 - RNA, 19 nt, Artificial Sequence
  Description of Artificial Sequence: Synthetic oligonucleotide
agagaaggcggcaccuagu

SEQ ID NO: 1742204 - RNA, 19 nt, Artificial Sequence
  Description of Artificial Sequence: Synthetic oligonucleotide
ggccaaaauugaccagcag

SEQ ID NO: 1742205 - RNA, 19 nt, Artificial Sequence
  Description of Artificial Sequence: Synthetic oligonucleotide
agcaaccuccggaaugaca

SEQ ID NO: 1742206 - RNA, 19 nt, Artificial Sequence
  Description of Artificial Sequence: Synthetic oligonucleotide
ucagagaaggcggcaccua

SEQ ID NO: 1742207 - RNA, 19 nt, Artificial Sequence
  Description of Artificial Sequence: Synthetic oligonucleotide
gaagccuaacaccggccgu

SEQ ID NO: 1742208 - RNA, 19 nt, Artificial Sequence
  Description of Artificial Sequence: Synthetic oligonucleotide
aguucauggggcagcucgu

SEQ ID NO: 1742209 - RNA, 19 nt, Artificial Sequence
  Description of Artificial Sequence: Synthetic oligonucleotide
cacccagggagugagggga

SEQ ID NO: 1742210 - RNA, 19 nt, Artificial Sequence
  Description of Artificial Sequence: Synthetic oligonucleotide
agaagacugcuaggguggu

SEQ ID NO: 1742211 - RNA, 19 nt, Artificial Sequence
  Description of Artificial Sequence: Synthetic oligonucleotide
cuccuugugcguggggcag

SEQ ID NO: 1742212 - RNA, 19 nt, Artificial Sequence
  Description of Artificial Sequence: Synthetic oligonucleotide
uguugcccuccuugugcgu

SEQ ID NO: 1742213 - RNA, 19 nt, Artificial Sequence
  Description of Artificial Sequence: Synthetic oligonucleotide
ggccguaacacacgagguc

SEQ ID NO: 1742214 - RNA, 19 nt, Artificial Sequence
  Description of Artificial Sequence: Synthetic oligonucleotide
cuccagcagggcuauagua

SEQ ID NO: 1742215 - RNA, 19 nt, Artificial Sequence
  Description of Artificial Sequence: Synthetic oligonucleotide
ggaggacgcagcaggacug

SEQ ID NO: 1742216 - RNA, 19 nt, Artificial Sequence
  Description of Artificial Sequence: Synthetic oligonucleotide
cauggcaaagucacccagu

SEQ ID NO: 1742217 - RNA, 19 nt, Artificial Sequence
  Description of Artificial Sequence: Synthetic oligonucleotide
gauagcccuggaccccaga

SEQ ID NO: 1742218 - RNA, 19 nt, Artificial Sequence
  Description of Artificial Sequence: Synthetic oligonucleotide
uaucucccaggagaaccau

SEQ ID NO: 1742219 - RNA, 19 nt, Artificial Sequence
  Description of Artificial Sequence: Synthetic oligonucleotide
ggcggcaccuagugcaagc

SEQ ID NO: 1742220 - RNA, 19 nt, Artificial Sequence
  Description of Artificial Sequence: Synthetic oligonucleotide
ccuccguuccugugguugg

SEQ ID NO: 1742221 - RNA, 19 nt, Artificial Sequence
  Description of Artificial Sequence: Synthetic oligonucleotide
ccagccgugaccccaaaca

SEQ ID NO: 1742222 - RNA, 19 nt, Artificial Sequence
  Description of Artificial Sequence: Synthetic oligonucleotide
ggcauuccugcccagacau

SEQ ID NO: 1742223 - RNA, 19 nt, Artificial Sequence
  Description of Artificial Sequence: Synthetic oligonucleotide
uauccacaagggccacaua

SEQ ID NO: 1742224 - RNA, 19 nt, Artificial Sequence
  Description of Artificial Sequence: Synthetic oligonucleotide
ugggaaccauucagacaau

SEQ ID NO: 1742225 - RNA, 19 nt, Artificial Sequence
  Description of Artificial Sequence: Synthetic oligonucleotide
cacuaugaagcagggcaga

SEQ ID NO: 1742226 - RNA, 19 nt, Artificial Sequence
  Description of Artificial Sequence: Synthetic oligonucleotide
cauccaugcgauacugccu

SEQ ID NO: 1742227 - RNA, 19 nt, Artificial Sequence
  Description of Artificial Sequence: Synthetic oligonucleotide
ccaagcugacgccccaccc

SEQ ID NO: 1742228 - RNA, 19 nt, Artificial Sequence
  Description of Artificial Sequence: Synthetic oligonucleotide
ggaaccauucagacaaucu

SEQ ID NO: 1742229 - RNA, 19 nt, Artificial Sequence
  Description of Artificial Sequence: Synthetic oligonucleotide
cuccguuccugugguuggg

SEQ ID NO: 1742230 - RNA, 19 nt, Artificial Sequence
  Description of Artificial Sequence: Synthetic oligonucleotide
gccccuaggaagccuaaca

SEQ ID NO: 1742231 - RNA, 19 nt, Artificial Sequence
  Description of Artificial Sequence: Synthetic oligonucleotide
ggggucagaggagcaacag

SEQ ID NO: 1742232 - RNA, 19 nt, Artificial Sequence
  Description of Artificial Sequence: Synthetic oligonucleotide
cagcuccgguuccuggggc

SEQ ID NO: 1742233 - RNA, 19 nt, Artificial Sequence
  Description of Artificial Sequence: Synthetic oligonucleotide
gcagcaaccuccggaauga

SEQ ID NO: 1742234 - RNA, 19 nt, Artificial Sequence
  Description of Artificial Sequence: Synthetic oligonucleotide
ugaugcagacacggcuguc

SEQ ID NO: 1742235 - RNA, 19 nt, Artificial Sequence
  Description of Artificial Sequence: Synthetic oligonucleotide
aucagcuaucaggaaccau

SEQ ID NO: 1742236 - RNA, 19 nt, Artificial Sequence
  Description of Artificial Sequence: Synthetic oligonucleotide
cuccaguucaccccagccu

SEQ ID NO: 1742237 - RNA, 19 nt, Artificial Sequence
  Description of Artificial Sequence: Synthetic oligonucleotide
cacccggagggcugccacc

SEQ ID NO: 1742238 - RNA, 19 nt, Artificial Sequence
  Description of Artificial Sequence: Synthetic oligonucleotide
ugcccuccuugugcguggg

SEQ ID NO: 1742239 - RNA, 19 nt, Artificial Sequence
  Description of Artificial Sequence: Synthetic oligonucleotide
aggcuaucucccaggagaa

SEQ ID NO: 1742240 - RNA, 19 nt, Artificial Sequence
  Description of Artificial Sequence: Synthetic oligonucleotide
ccguaacacacgagguccc

SEQ ID NO: 1742241 - RNA, 19 nt, Artificial Sequence
  Description of Artificial Sequence: Synthetic oligonucleotide
aaggcggcaccuagugcaa

SEQ ID NO: 1742242 - RNA, 19 nt, Artificial Sequence
  Description of Artificial Sequence: Synthetic oligonucleotide
gcugacgccccacccggag

SEQ ID NO: 1742243 - RNA, 19 nt, Artificial Sequence
  Description of Artificial Sequence: Synthetic oligonucleotide
ggucagccaacgaaugguc

SEQ ID NO: 1742244 - RNA, 19 nt, Artificial Sequence
  Description of Artificial Sequence: Synthetic oligonucleotide
gcagcagaagucugugaaa

SEQ ID NO: 1742245 - RNA, 19 nt, Artificial Sequence
  Description of Artificial Sequence: Synthetic oligonucleotide
caaggcuuagcagcagcaa

SEQ ID NO: 1742246 - RNA, 19 nt, Artificial Sequence
  Description of Artificial Sequence: Synthetic oligonucleotide
gccaacgaaugguccagca

SEQ ID NO: 1742247 - RNA, 19 nt, Artificial Sequence
  Description of Artificial Sequence: Synthetic oligonucleotide
cagggcagacaguacgucu

SEQ ID NO: 1742248 - RNA, 19 nt, Artificial Sequence
  Description of Artificial Sequence: Synthetic oligonucleotide
gccuccguuccugugguug

SEQ ID NO: 1742249 - RNA, 19 nt, Artificial Sequence
  Description of Artificial Sequence: Synthetic oligonucleotide
ggcugucaaucugguaaag

SEQ ID NO: 1742250 - RNA, 19 nt, Artificial Sequence
  Description of Artificial Sequence: Synthetic oligonucleotide
gagaaccauccaugcgaua

SEQ ID NO: 1742251 - RNA, 19 nt, Artificial Sequence
  Description of Artificial Sequence: Synthetic oligonucleotide
guacggguucuguuuaauu

SEQ ID NO: 1742252 - RNA, 19 nt, Artificial Sequence
  Description of Artificial Sequence: Synthetic oligonucleotide
ggggccuuugacuccucca

SEQ ID NO: 1742253 - RNA, 19 nt, Artificial Sequence
  Description of Artificial Sequence: Synthetic oligonucleotide
caucagcuaucaggaacca

SEQ ID NO: 1742254 - RNA, 19 nt, Artificial Sequence
  Description of Artificial Sequence: Synthetic oligonucleotide
cagcaggacugguagcaua

SEQ ID NO: 1742255 - RNA, 19 nt, Artificial Sequence
  Description of Artificial Sequence: Synthetic oligonucleotide
ggaagaccccagccgugac

SEQ ID NO: 1742256 - RNA, 19 nt, Artificial Sequence
  Description of Artificial Sequence: Synthetic oligonucleotide
caccggccguaacacacga

SEQ ID NO: 1742257 - RNA, 19 nt, Artificial Sequence
  Description of Artificial Sequence: Synthetic oligonucleotide
agccuaacaccggccguaa

SEQ ID NO: 1742258 - RNA, 19 nt, Artificial Sequence
  Description of Artificial Sequence: Synthetic oligonucleotide
ccaugcgauacugccugag

SEQ ID NO: 1742259 - RNA, 19 nt, Artificial Sequence
  Description of Artificial Sequence: Synthetic oligonucleotide
cuagcacgaagagcaggaa

SEQ ID NO: 1742260 - RNA, 19 nt, Artificial Sequence
  Description of Artificial Sequence: Synthetic oligonucleotide
gggcuauaguaagcaugag

SEQ ID NO: 1742261 - RNA, 19 nt, Artificial Sequence
  Description of Artificial Sequence: Synthetic oligonucleotide
cagguguagcaaugcgucu

SEQ ID NO: 1742262 - RNA, 19 nt, Artificial Sequence
  Description of Artificial Sequence: Synthetic oligonucleotide
aggcggcaccuagugcaag

SEQ ID NO: 1742263 - RNA, 19 nt, Artificial Sequence
  Description of Artificial Sequence: Synthetic oligonucleotide
aggacgcagcaggacuggu

SEQ ID NO: 1742264 - RNA, 19 nt, Artificial Sequence
  Description of Artificial Sequence: Synthetic oligonucleotide
gcggcaccuagugcaagcc

SEQ ID NO: 1742265 - RNA, 19 nt, Artificial Sequence
  Description of Artificial Sequence: Synthetic oligonucleotide
gugcguggggcagcaggug

SEQ ID NO: 1742266 - RNA, 19 nt, Artificial Sequence
  Description of Artificial Sequence: Synthetic oligonucleotide
ggucuaggccugagggccc

SEQ ID NO: 1742267 - RNA, 19 nt, Artificial Sequence
  Description of Artificial Sequence: Synthetic oligonucleotide
gcuuagcagcagcaaccuc

SEQ ID NO: 1742268 - RNA, 19 nt, Artificial Sequence
  Description of Artificial Sequence: Synthetic oligonucleotide
accggccguaacacacgag

SEQ ID NO: 1742269 - RNA, 19 nt, Artificial Sequence
  Description of Artificial Sequence: Synthetic oligonucleotide
guguagcaaugcgucucca

SEQ ID NO: 1742270 - RNA, 19 nt, Artificial Sequence
  Description of Artificial Sequence: Synthetic oligonucleotide
cagacacggcugucaaucu

SEQ ID NO: 1742271 - RNA, 19 nt, Artificial Sequence
  Description of Artificial Sequence: Synthetic oligonucleotide
cccaucagugaaguuguga

SEQ ID NO: 1742272 - RNA, 19 nt, Artificial Sequence
  Description of Artificial Sequence: Synthetic oligonucleotide
cccaaacacccagggagug

SEQ ID NO: 1742273 - RNA, 19 nt, Artificial Sequence
  Description of Artificial Sequence: Synthetic oligonucleotide
cuugugcguggggcagcag

SEQ ID NO: 1742274 - RNA, 19 nt, Artificial Sequence
  Description of Artificial Sequence: Synthetic oligonucleotide
cagcaaccuccggaaugac

SEQ ID NO: 1742275 - RNA, 19 nt, Artificial Sequence
  Description of Artificial Sequence: Synthetic oligonucleotide
gacgccccacccggagggc

SEQ ID NO: 1742276 - RNA, 19 nt, Artificial Sequence
  Description of Artificial Sequence: Synthetic oligonucleotide
gcgucuccacaaagggugc

SEQ ID NO: 1742277 - RNA, 19 nt, Artificial Sequence
  Description of Artificial Sequence: Synthetic oligonucleotide
ugaggggaacagggcccaa

SEQ ID NO: 1742278 - RNA, 19 nt, Artificial Sequence
  Description of Artificial Sequence: Synthetic oligonucleotide
gcagcucguggcagaagac

SEQ ID NO: 1742279 - RNA, 19 nt, Artificial Sequence
  Description of Artificial Sequence: Synthetic oligonucleotide
agggccccuaggaagccua

SEQ ID NO: 1742280 - RNA, 19 nt, Artificial Sequence
  Description of Artificial Sequence: Synthetic oligonucleotide
ccgucagagaaggcggcac

SEQ ID NO: 1742281 - RNA, 19 nt, Artificial Sequence
  Description of Artificial Sequence: Synthetic oligonucleotide
ggcuuagcagcagcaaccu

SEQ ID NO: 1742282 - RNA, 19 nt, Artificial Sequence
  Description of Artificial Sequence: Synthetic oligonucleotide
aggggcuccggaggacgca

SEQ ID NO: 1742283 - RNA, 19 nt, Artificial Sequence
  Description of Artificial Sequence: Synthetic oligonucleotide
uugcuccuacuggcccugu

SEQ ID NO: 1742284 - RNA, 19 nt, Artificial Sequence
  Description of Artificial Sequence: Synthetic oligonucleotide
cuccgguuccuggggccug

SEQ ID NO: 1742285 - RNA, 19 nt, Artificial Sequence
  Description of Artificial Sequence: Synthetic oligonucleotide
acgccccacccggagggcu

SEQ ID NO: 1742286 - RNA, 19 nt, Artificial Sequence
  Description of Artificial Sequence: Synthetic oligonucleotide
cacggcugucaaucuggua

SEQ ID NO: 1742287 - RNA, 19 nt, Artificial Sequence
  Description of Artificial Sequence: Synthetic oligonucleotide
ggguacggguucuguuuaa

SEQ ID NO: 1742288 - RNA, 19 nt, Artificial Sequence
  Description of Artificial Sequence: Synthetic oligonucleotide
caguucaccccagccugaa

SEQ ID NO: 1742289 - RNA, 19 nt, Artificial Sequence
  Description of Artificial Sequence: Synthetic oligonucleotide
gcauguuuucuagcacgaa

SEQ ID NO: 1742290 - RNA, 19 nt, Artificial Sequence
  Description of Artificial Sequence: Synthetic oligonucleotide
cugagccuucugugccgca

SEQ ID NO: 1742291 - RNA, 19 nt, Artificial Sequence
  Description of Artificial Sequence: Synthetic oligonucleotide
gggcccaagcugacgcccc

SEQ ID NO: 1742292 - RNA, 19 nt, Artificial Sequence
  Description of Artificial Sequence: Synthetic oligonucleotide
cggguucuguuuaauuaaa

SEQ ID NO: 1742293 - RNA, 19 nt, Artificial Sequence
  Description of Artificial Sequence: Synthetic oligonucleotide
gccuggauccuuugccacu

SEQ ID NO: 1742294 - RNA, 19 nt, Artificial Sequence
  Description of Artificial Sequence: Synthetic oligonucleotide
gccuaacaccggccguaac

SEQ ID NO: 1742295 - RNA, 19 nt, Artificial Sequence
  Description of Artificial Sequence: Synthetic oligonucleotide
acccagggagugaggggaa

SEQ ID NO: 1742296 - RNA, 19 nt, Artificial Sequence
  Description of Artificial Sequence: Synthetic oligonucleotide
cugugccgcacaaguccua

SEQ ID NO: 1742297 - RNA, 19 nt, Artificial Sequence
  Description of Artificial Sequence: Synthetic oligonucleotide
ccaguucaccccagccuga

SEQ ID NO: 1742298 - RNA, 19 nt, Artificial Sequence
  Description of Artificial Sequence: Synthetic oligonucleotide
gcccuccuugugcgugggg

SEQ ID NO: 1742299 - RNA, 19 nt, Artificial Sequence
  Description of Artificial Sequence: Synthetic oligonucleotide
cgucuccacaaagggugcc

SEQ ID NO: 1742300 - RNA, 19 nt, Artificial Sequence
  Description of Artificial Sequence: Synthetic oligonucleotide
cgcacaaguccuagcaugu

SEQ ID NO: 1742301 - RNA, 19 nt, Artificial Sequence
  Description of Artificial Sequence: Synthetic oligonucleotide
gguacggguucuguuuaau

SEQ ID NO: 1742302 - RNA, 19 nt, Artificial Sequence
  Description of Artificial Sequence: Synthetic oligonucleotide
gcuggacauagcagagcaa

SEQ ID NO: 1742303 - RNA, 19 nt, Artificial Sequence
  Description of Artificial Sequence: Synthetic oligonucleotide
agcugacgccccacccgga

SEQ ID NO: 1742304 - RNA, 19 nt, Artificial Sequence
  Description of Artificial Sequence: Synthetic oligonucleotide
ggacgcagcaggacuggua

SEQ ID NO: 1742305 - RNA, 19 nt, Artificial Sequence
  Description of Artificial Sequence: Synthetic oligonucleotide
ggccccuaggaagccuaac

SEQ ID NO: 1742306 - RNA, 19 nt, Artificial Sequence
  Description of Artificial Sequence: Synthetic oligonucleotide
cgauacugccugagccuuc

SEQ ID NO: 1742307 - RNA, 19 nt, Artificial Sequence
  Description of Artificial Sequence: Synthetic oligonucleotide
cggaaugacagcccugccu

SEQ ID NO: 1742308 - RNA, 19 nt, Artificial Sequence
  Description of Artificial Sequence: Synthetic oligonucleotide
ccggaggacgcagcaggac

SEQ ID NO: 1742309 - RNA, 19 nt, Artificial Sequence
  Description of Artificial Sequence: Synthetic oligonucleotide
cuuguguguugcccuccuu

SEQ ID NO: 1742310 - RNA, 19 nt, Artificial Sequence
  Description of Artificial Sequence: Synthetic oligonucleotide
ccccaaacacccagggagu

SEQ ID NO: 1742311 - RNA, 19 nt, Artificial Sequence
  Description of Artificial Sequence: Synthetic oligonucleotide
gucuaggccugagggcccu

SEQ ID NO: 1742312 - RNA, 19 nt, Artificial Sequence
  Description of Artificial Sequence: Synthetic oligonucleotide
cggcugucaaucugguaaa

SEQ ID NO: 1742313 - RNA, 19 nt, Artificial Sequence
  Description of Artificial Sequence: Synthetic oligonucleotide
ccuggggccugugugugaa

SEQ ID NO: 1742314 - RNA, 19 nt, Artificial Sequence
  Description of Artificial Sequence: Synthetic oligonucleotide
cguaacacacgagguccca

SEQ ID NO: 1742315 - RNA, 19 nt, Artificial Sequence
  Description of Artificial Sequence: Synthetic oligonucleotide
ccuugugcguggggcagca

SEQ ID NO: 1742316 - RNA, 19 nt, Artificial Sequence
  Description of Artificial Sequence: Synthetic oligonucleotide
gcgauacugccugagccuu

SEQ ID NO: 1742317 - RNA, 19 nt, Artificial Sequence
  Description of Artificial Sequence: Synthetic oligonucleotide
ccccaguccccaggacucc

SEQ ID NO: 1742318 - RNA, 19 nt, Artificial Sequence
  Description of Artificial Sequence: Synthetic oligonucleotide
gcccugugucccgccuccg

SEQ ID NO: 1742319 - RNA, 19 nt, Artificial Sequence
  Description of Artificial Sequence: Synthetic oligonucleotide
cggaggacgcagcaggacu

SEQ ID NO: 1742320 - RNA, 19 nt, Artificial Sequence
  Description of Artificial Sequence: Synthetic oligonucleotide
ccuccagcagggcuauagu

SEQ ID NO: 1742321 - RNA, 19 nt, Artificial Sequence
  Description of Artificial Sequence: Synthetic oligonucleotide
ccccaucagcuaucaggaa

SEQ ID NO: 1742322 - RNA, 19 nt, Artificial Sequence
  Description of Artificial Sequence: Synthetic oligonucleotide
cggccguaacacacgaggu

SEQ ID NO: 1742323 - RNA, 19 nt, Artificial Sequence
  Description of Artificial Sequence: Synthetic oligonucleotide
ccgugaccccaaacaccca

SEQ ID NO: 1742324 - RNA, 19 nt, Artificial Sequence
  Description of Artificial Sequence: Synthetic oligonucleotide
gcuccgguuccuggggccu

SEQ ID NO: 1742325 - RNA, 19 nt, Artificial Sequence
  Description of Artificial Sequence: Synthetic oligonucleotide
cagggccccuaggaagccu

SEQ ID NO: 1742326 - RNA, 19 nt, Artificial Sequence
  Description of Artificial Sequence: Synthetic oligonucleotide
cgaggggucagaggagcaa

SEQ ID NO: 1742327 - RNA, 19 nt, Artificial Sequence
  Description of Artificial Sequence: Synthetic oligonucleotide
gggccccuaggaagccuaa

SEQ ID NO: 1742328 - RNA, 19 nt, Artificial Sequence
  Description of Artificial Sequence: Synthetic oligonucleotide
ccgccuccguuccuguggu

SEQ ID NO: 1742329 - RNA, 19 nt, Artificial Sequence
  Description of Artificial Sequence: Synthetic oligonucleotide
ccgguuccuggggccugug

SEQ ID NO: 1742330 - RNA, 19 nt, Artificial Sequence
  Description of Artificial Sequence: Synthetic oligonucleotide
ccccacccggagggcugcc

SEQ ID NO: 1742331 - RNA, 19 nt, Artificial Sequence
  Description of Artificial Sequence: Synthetic oligonucleotide
cgguuccuggggccugugu

SEQ ID NO: 1742332 - RNA, 19 nt, Artificial Sequence
  Description of Artificial Sequence: Synthetic oligonucleotide
ccccagccgugaccccaaa

SEQ ID NO: 1742333 - RNA, 19 nt, Artificial Sequence
  Description of Artificial Sequence: Synthetic oligonucleotide
aauacaaaagaugugaggg

SEQ ID NO: 1742334 - RNA, 19 nt, Artificial Sequence
  Description of Artificial Sequence: Synthetic oligonucleotide
aaagcaaugucauuagugg

SEQ ID NO: 1742335 - RNA, 19 nt, Artificial Sequence
  Description of Artificial Sequence: Synthetic oligonucleotide
uuuauuuguauuuuggucc

SEQ ID NO: 1742336 - RNA, 19 nt, Artificial Sequence
  Description of Artificial Sequence: Synthetic oligonucleotide
ugcauaauuagccagaagc

SEQ ID NO: 1742337 - RNA, 19 nt, Artificial Sequence
  Description of Artificial Sequence: Synthetic oligonucleotide
aucagaucuacacaaaucc

SEQ ID NO: 1742338 - RNA, 19 nt, Artificial Sequence
  Description of Artificial Sequence: Synthetic oligonucleotide
aaagcuuuaggacaggguc

SEQ ID NO: 1742339 - RNA, 19 nt, Artificial Sequence
  Description of Artificial Sequence: Synthetic oligonucleotide
auuauuugcauaauuagcc

SEQ ID NO: 1742340 - RNA, 19 nt, Artificial Sequence
  Description of Artificial Sequence: Synthetic oligonucleotide
acuaccgucccacagaggc

SEQ ID NO: 1742341 - RNA, 19 nt, Artificial Sequence
  Description of Artificial Sequence: Synthetic oligonucleotide
ugucccauaauaauaaggc

SEQ ID NO: 1742342 - RNA, 19 nt, Artificial Sequence
  Description of Artificial Sequence: Synthetic oligonucleotide
aauuaucagaucuacacaa

SEQ ID NO: 1742343 - RNA, 19 nt, Artificial Sequence
  Description of Artificial Sequence: Synthetic oligonucleotide
aaggauagcgccugcauac

SEQ ID NO: 1742344 - RNA, 19 nt, Artificial Sequence
  Description of Artificial Sequence: Synthetic oligonucleotide
aauggaacuuuucuguaag

SEQ ID NO: 1742345 - RNA, 19 nt, Artificial Sequence
  Description of Artificial Sequence: Synthetic oligonucleotide
ucugccaauuaucagaucu

SEQ ID NO: 1742346 - RNA, 19 nt, Artificial Sequence
  Description of Artificial Sequence: Synthetic oligonucleotide
auuaaugcaaaccuuuaug

SEQ ID NO: 1742347 - RNA, 19 nt, Artificial Sequence
  Description of Artificial Sequence: Synthetic oligonucleotide
ugggcaauacaaaagaugu

SEQ ID NO: 1742348 - RNA, 19 nt, Artificial Sequence
  Description of Artificial Sequence: Synthetic oligonucleotide
ucugacaaaagcuuggacu

SEQ ID NO: 1742349 - RNA, 19 nt, Artificial Sequence
  Description of Artificial Sequence: Synthetic oligonucleotide
ucuacacaaauccuuaaca

SEQ ID NO: 1742350 - RNA, 19 nt, Artificial Sequence
  Description of Artificial Sequence: Synthetic oligonucleotide
aacgggguccagcugaagc

SEQ ID NO: 1742351 - RNA, 19 nt, Artificial Sequence
  Description of Artificial Sequence: Synthetic oligonucleotide
uccucauuaaugcaaaccu

SEQ ID NO: 1742352 - RNA, 19 nt, Artificial Sequence
  Description of Artificial Sequence: Synthetic oligonucleotide
ugaaccucgaacauacuug

SEQ ID NO: 1742353 - RNA, 19 nt, Artificial Sequence
  Description of Artificial Sequence: Synthetic oligonucleotide
aauguucccguugucgucc

SEQ ID NO: 1742354 - RNA, 19 nt, Artificial Sequence
  Description of Artificial Sequence: Synthetic oligonucleotide
acagacuucaaggauagcg

SEQ ID NO: 1742355 - RNA, 19 nt, Artificial Sequence
  Description of Artificial Sequence: Synthetic oligonucleotide
gaagcuauuauuugcauaa

SEQ ID NO: 1742356 - RNA, 19 nt, Artificial Sequence
  Description of Artificial Sequence: Synthetic oligonucleotide
cuuucaaaggagcacacag

SEQ ID NO: 1742357 - RNA, 19 nt, Artificial Sequence
  Description of Artificial Sequence: Synthetic oligonucleotide
ugaacauucuuaaauggaa

SEQ ID NO: 1742358 - RNA, 19 nt, Artificial Sequence
  Description of Artificial Sequence: Synthetic oligonucleotide
gaacaguuugggcuuaucg

SEQ ID NO: 1742359 - RNA, 19 nt, Artificial Sequence
  Description of Artificial Sequence: Synthetic oligonucleotide
aaagccgucggguucuuuc

SEQ ID NO: 1742360 - RNA, 19 nt, Artificial Sequence
  Description of Artificial Sequence: Synthetic oligonucleotide
aaacgcagucgccagcagc

SEQ ID NO: 1742361 - RNA, 19 nt, Artificial Sequence
  Description of Artificial Sequence: Synthetic oligonucleotide
agacuucaaggauagcgcc

SEQ ID NO: 1742362 - RNA, 19 nt, Artificial Sequence
  Description of Artificial Sequence: Synthetic oligonucleotide
ucguccaaaagcuuuagga

SEQ ID NO: 1742363 - RNA, 19 nt, Artificial Sequence
  Description of Artificial Sequence: Synthetic oligonucleotide
accgccccaauuuucaucc

SEQ ID NO: 1742364 - RNA, 19 nt, Artificial Sequence
  Description of Artificial Sequence: Synthetic oligonucleotide
caaagcaaugucauuagug

SEQ ID NO: 1742365 - RNA, 19 nt, Artificial Sequence
  Description of Artificial Sequence: Synthetic oligonucleotide
uaucgcuucugacaaaagc

SEQ ID NO: 1742366 - RNA, 19 nt, Artificial Sequence
  Description of Artificial Sequence: Synthetic oligonucleotide
ucccauaauaauaaggcua

SEQ ID NO: 1742367 - RNA, 19 nt, Artificial Sequence
  Description of Artificial Sequence: Synthetic oligonucleotide
aucuacacaaauccuuaac

SEQ ID NO: 1742368 - RNA, 19 nt, Artificial Sequence
  Description of Artificial Sequence: Synthetic oligonucleotide
cauaauuagccagaagccg

SEQ ID NO: 1742369 - RNA, 19 nt, Artificial Sequence
  Description of Artificial Sequence: Synthetic oligonucleotide
acacaaauccuuaacaaag

SEQ ID NO: 1742370 - RNA, 19 nt, Artificial Sequence
  Description of Artificial Sequence: Synthetic oligonucleotide
auuaucagaagcuauuauu

SEQ ID NO: 1742371 - RNA, 19 nt, Artificial Sequence
  Description of Artificial Sequence: Synthetic oligonucleotide
aauuaucagaagcuauuau

SEQ ID NO: 1742372 - RNA, 19 nt, Artificial Sequence
  Description of Artificial Sequence: Synthetic oligonucleotide
uuagugguaucaacaagug

SEQ ID NO: 1742373 - RNA, 19 nt, Artificial Sequence
  Description of Artificial Sequence: Synthetic oligonucleotide
uaaaacugggccaauuauc

SEQ ID NO: 1742374 - RNA, 19 nt, Artificial Sequence
  Description of Artificial Sequence: Synthetic oligonucleotide
uucaaaucaggcauuuccu

SEQ ID NO: 1742375 - RNA, 19 nt, Artificial Sequence
  Description of Artificial Sequence: Synthetic oligonucleotide
cacaaauccuuaacaaagg

SEQ ID NO: 1742376 - RNA, 19 nt, Artificial Sequence
  Description of Artificial Sequence: Synthetic oligonucleotide
aagauucuguuguuuauaa

SEQ ID NO: 1742377 - RNA, 19 nt, Artificial Sequence
  Description of Artificial Sequence: Synthetic oligonucleotide
accucgaacauacuugauc

SEQ ID NO: 1742378 - RNA, 19 nt, Artificial Sequence
  Description of Artificial Sequence: Synthetic oligonucleotide
auuagugguaucaacaagu

SEQ ID NO: 1742379 - RNA, 19 nt, Artificial Sequence
  Description of Artificial Sequence: Synthetic oligonucleotide
uauaaaacugggccaauua

SEQ ID NO: 1742380 - RNA, 19 nt, Artificial Sequence
  Description of Artificial Sequence: Synthetic oligonucleotide
cugucccauaauaauaagg

SEQ ID NO: 1742381 - RNA, 19 nt, Artificial Sequence
  Description of Artificial Sequence: Synthetic oligonucleotide
uuauuuguauuuugguccu

SEQ ID NO: 1742382 - RNA, 19 nt, Artificial Sequence
  Description of Artificial Sequence: Synthetic oligonucleotide
uuauaugcguugcagcuuc

SEQ ID NO: 1742383 - RNA, 19 nt, Artificial Sequence
  Description of Artificial Sequence: Synthetic oligonucleotide
ucaggcgaccauaggagcg

SEQ ID NO: 1742384 - RNA, 19 nt, Artificial Sequence
  Description of Artificial Sequence: Synthetic oligonucleotide
uccgaggagaucacaagag

SEQ ID NO: 1742385 - RNA, 19 nt, Artificial Sequence
  Description of Artificial Sequence: Synthetic oligonucleotide
uuaucagaucuacacaaau

SEQ ID NO: 1742386 - RNA, 19 nt, Artificial Sequence
  Description of Artificial Sequence: Synthetic oligonucleotide
uucggagauucaaaucagg

SEQ ID NO: 1742387 - RNA, 19 nt, Artificial Sequence
  Description of Artificial Sequence: Synthetic oligonucleotide
uaucagaucuacacaaauc

SEQ ID NO: 1742388 - RNA, 19 nt, Artificial Sequence
  Description of Artificial Sequence: Synthetic oligonucleotide
ccaauuaucagaucuacac

SEQ ID NO: 1742389 - RNA, 19 nt, Artificial Sequence
  Description of Artificial Sequence: Synthetic oligonucleotide
acaguuugggcuuaucgcu

SEQ ID NO: 1742390 - RNA, 19 nt, Artificial Sequence
  Description of Artificial Sequence: Synthetic oligonucleotide
uguaauccucauuaaugca

SEQ ID NO: 1742391 - RNA, 19 nt, Artificial Sequence
  Description of Artificial Sequence: Synthetic oligonucleotide
cagacuucaaggauagcgc

SEQ ID NO: 1742392 - RNA, 19 nt, Artificial Sequence
  Description of Artificial Sequence: Synthetic oligonucleotide
ucuuauugaagauucuguu

SEQ ID NO: 1742393 - RNA, 19 nt, Artificial Sequence
  Description of Artificial Sequence: Synthetic oligonucleotide
gaccauaggagcgucagag

SEQ ID NO: 1742394 - RNA, 19 nt, Artificial Sequence
  Description of Artificial Sequence: Synthetic oligonucleotide
ugagguccaaucaucuuac

SEQ ID NO: 1742395 - RNA, 19 nt, Artificial Sequence
  Description of Artificial Sequence: Synthetic oligonucleotide
ucuuacuguauauuuucaa

SEQ ID NO: 1742396 - RNA, 19 nt, Artificial Sequence
  Description of Artificial Sequence: Synthetic oligonucleotide
uucuuacuguauauuuuca

SEQ ID NO: 1742397 - RNA, 19 nt, Artificial Sequence
  Description of Artificial Sequence: Synthetic oligonucleotide
agcccaacucucugcaugc

SEQ ID NO: 1742398 - RNA, 19 nt, Artificial Sequence
  Description of Artificial Sequence: Synthetic oligonucleotide
aggugucuccuuuauuaac

SEQ ID NO: 1742399 - RNA, 19 nt, Artificial Sequence
  Description of Artificial Sequence: Synthetic oligonucleotide
uuagccagaagccgauuac

SEQ ID NO: 1742400 - RNA, 19 nt, Artificial Sequence
  Description of Artificial Sequence: Synthetic oligonucleotide
aagccgucggguucuuucg

SEQ ID NO: 1742401 - RNA, 19 nt, Artificial Sequence
  Description of Artificial Sequence: Synthetic oligonucleotide
uuaugaguuuacauucuua

SEQ ID NO: 1742402 - RNA, 19 nt, Artificial Sequence
  Description of Artificial Sequence: Synthetic oligonucleotide
aagcaagcuuuauaugcgu

SEQ ID NO: 1742403 - RNA, 19 nt, Artificial Sequence
  Description of Artificial Sequence: Synthetic oligonucleotide
aaccgccccaauuuucauc

SEQ ID NO: 1742404 - RNA, 19 nt, Artificial Sequence
  Description of Artificial Sequence: Synthetic oligonucleotide
accauaggagcgucagagc

SEQ ID NO: 1742405 - RNA, 19 nt, Artificial Sequence
  Description of Artificial Sequence: Synthetic oligonucleotide
aaaccuuuaugaguuuaca

SEQ ID NO: 1742406 - RNA, 19 nt, Artificial Sequence
  Description of Artificial Sequence: Synthetic oligonucleotide
aggcucguugcugaggucc

SEQ ID NO: 1742407 - RNA, 19 nt, Artificial Sequence
  Description of Artificial Sequence: Synthetic oligonucleotide
aagccgauuacaaagcaau

SEQ ID NO: 1742408 - RNA, 19 nt, Artificial Sequence
  Description of Artificial Sequence: Synthetic oligonucleotide
ucgaacauacuugaucugu

SEQ ID NO: 1742409 - RNA, 19 nt, Artificial Sequence
  Description of Artificial Sequence: Synthetic oligonucleotide
auaauuagccagaagccga

SEQ ID NO: 1742410 - RNA, 19 nt, Artificial Sequence
  Description of Artificial Sequence: Synthetic oligonucleotide
gcagacaccgcuugaaacg

SEQ ID NO: 1742411 - RNA, 19 nt, Artificial Sequence
  Description of Artificial Sequence: Synthetic oligonucleotide
cuugaaacgcagucgccag

SEQ ID NO: 1742412 - RNA, 19 nt, Artificial Sequence
  Description of Artificial Sequence: Synthetic oligonucleotide
ccuuuaugaguuuacauuc

SEQ ID NO: 1742413 - RNA, 19 nt, Artificial Sequence
  Description of Artificial Sequence: Synthetic oligonucleotide
augaguuuacauucuuacu

SEQ ID NO: 1742414 - RNA, 19 nt, Artificial Sequence
  Description of Artificial Sequence: Synthetic oligonucleotide
gaaccucgaacauacuuga

SEQ ID NO: 1742415 - RNA, 19 nt, Artificial Sequence
  Description of Artificial Sequence: Synthetic oligonucleotide
caagcuuuauaugcguugc

SEQ ID NO: 1742416 - RNA, 19 nt, Artificial Sequence
  Description of Artificial Sequence: Synthetic oligonucleotide
auagcgccugcauacagcu

SEQ ID NO: 1742417 - RNA, 19 nt, Artificial Sequence
  Description of Artificial Sequence: Synthetic oligonucleotide
uccuuaacaaagguuuucu

SEQ ID NO: 1742418 - RNA, 19 nt, Artificial Sequence
  Description of Artificial Sequence: Synthetic oligonucleotide
agacuaccgucccacagag

SEQ ID NO: 1742419 - RNA, 19 nt, Artificial Sequence
  Description of Artificial Sequence: Synthetic oligonucleotide
gaucuguagaccccugaac

SEQ ID NO: 1742420 - RNA, 19 nt, Artificial Sequence
  Description of Artificial Sequence: Synthetic oligonucleotide
uguggcacaaauacuucua

SEQ ID NO: 1742421 - RNA, 19 nt, Artificial Sequence
  Description of Artificial Sequence: Synthetic oligonucleotide
ugagaaacucuuccacgcu

SEQ ID NO: 1742422 - RNA, 19 nt, Artificial Sequence
  Description of Artificial Sequence: Synthetic oligonucleotide
uguccgaggagaucacaag

SEQ ID NO: 1742423 - RNA, 19 nt, Artificial Sequence
  Description of Artificial Sequence: Synthetic oligonucleotide
ugaucuguagaccccugaa

SEQ ID NO: 1742424 - RNA, 19 nt, Artificial Sequence
  Description of Artificial Sequence: Synthetic oligonucleotide
gaggagaucacaagagcug

SEQ ID NO: 1742425 - RNA, 19 nt, Artificial Sequence
  Description of Artificial Sequence: Synthetic oligonucleotide
caaggagcaggcucguugc

SEQ ID NO: 1742426 - RNA, 19 nt, Artificial Sequence
  Description of Artificial Sequence: Synthetic oligonucleotide
guccccgucaaucuuccgg

SEQ ID NO: 1742427 - RNA, 19 nt, Artificial Sequence
  Description of Artificial Sequence: Synthetic oligonucleotide
gagaucacaagagcugcag

SEQ ID NO: 1742428 - RNA, 19 nt, Artificial Sequence
  Description of Artificial Sequence: Synthetic oligonucleotide
uugcauaauuagccagaag

SEQ ID NO: 1742429 - RNA, 19 nt, Artificial Sequence
  Description of Artificial Sequence: Synthetic oligonucleotide
uaauuagccagaagccgau

SEQ ID NO: 1742430 - RNA, 19 nt, Artificial Sequence
  Description of Artificial Sequence: Synthetic oligonucleotide
uuaucgcuucugacaaaag

SEQ ID NO: 1742431 - RNA, 19 nt, Artificial Sequence
  Description of Artificial Sequence: Synthetic oligonucleotide
ugaaacgcagucgccagca

SEQ ID NO: 1742432 - RNA, 19 nt, Artificial Sequence
  Description of Artificial Sequence: Synthetic oligonucleotide
agaagccgauuacaaagca

SEQ ID NO: 1742433 - RNA, 19 nt, Artificial Sequence
  Description of Artificial Sequence: Synthetic oligonucleotide
cccauaauaauaaggcuac

SEQ ID NO: 1742434 - RNA, 19 nt, Artificial Sequence
  Description of Artificial Sequence: Synthetic oligonucleotide
cuuuauaugcguugcagcu

SEQ ID NO: 1742435 - RNA, 19 nt, Artificial Sequence
  Description of Artificial Sequence: Synthetic oligonucleotide
cagguuaaacuguccgagg

SEQ ID NO: 1742436 - RNA, 19 nt, Artificial Sequence
  Description of Artificial Sequence: Synthetic oligonucleotide
aacgcagucgccagcagca

SEQ ID NO: 1742437 - RNA, 19 nt, Artificial Sequence
  Description of Artificial Sequence: Synthetic oligonucleotide
ccauaggagcgucagagcg

SEQ ID NO: 1742438 - RNA, 19 nt, Artificial Sequence
  Description of Artificial Sequence: Synthetic oligonucleotide
aggagcgucagagcggucg

SEQ ID NO: 1742439 - RNA, 19 nt, Artificial Sequence
  Description of Artificial Sequence: Synthetic oligonucleotide
auuacaaagcaaugucauu

SEQ ID NO: 1742440 - RNA, 19 nt, Artificial Sequence
  Description of Artificial Sequence: Synthetic oligonucleotide
aagcuuuaggacagggucu

SEQ ID NO: 1742441 - RNA, 19 nt, Artificial Sequence
  Description of Artificial Sequence: Synthetic oligonucleotide
gcauaauuagccagaagcc

SEQ ID NO: 1742442 - RNA, 19 nt, Artificial Sequence
  Description of Artificial Sequence: Synthetic oligonucleotide
guaauccucauuaaugcaa

SEQ ID NO: 1742443 - RNA, 19 nt, Artificial Sequence
  Description of Artificial Sequence: Synthetic oligonucleotide
gacuugagggaaccgcccc

SEQ ID NO: 1742444 - RNA, 19 nt, Artificial Sequence
  Description of Artificial Sequence: Synthetic oligonucleotide
uccuacaagugaacauucu

SEQ ID NO: 1742445 - RNA, 19 nt, Artificial Sequence
  Description of Artificial Sequence: Synthetic oligonucleotide
ugccaauuaucagaucuac

SEQ ID NO: 1742446 - RNA, 19 nt, Artificial Sequence
  Description of Artificial Sequence: Synthetic oligonucleotide
gauagcgccugcauacagc

SEQ ID NO: 1742447 - RNA, 19 nt, Artificial Sequence
  Description of Artificial Sequence: Synthetic oligonucleotide
ugguuucaaacugugcuuc

SEQ ID NO: 1742448 - RNA, 19 nt, Artificial Sequence
  Description of Artificial Sequence: Synthetic oligonucleotide
cuguauauuuucaaucugu

SEQ ID NO: 1742449 - RNA, 19 nt, Artificial Sequence
  Description of Artificial Sequence: Synthetic oligonucleotide
gguaucaacaagugcagaa

SEQ ID NO: 1742450 - RNA, 19 nt, Artificial Sequence
  Description of Artificial Sequence: Synthetic oligonucleotide
gaccccugaacaguuuggg

SEQ ID NO: 1742451 - RNA, 19 nt, Artificial Sequence
  Description of Artificial Sequence: Synthetic oligonucleotide
ucgcuucugacaaaagcuu

SEQ ID NO: 1742452 - RNA, 19 nt, Artificial Sequence
  Description of Artificial Sequence: Synthetic oligonucleotide
aaaggaggugucuccuuua

SEQ ID NO: 1742453 - RNA, 19 nt, Artificial Sequence
  Description of Artificial Sequence: Synthetic oligonucleotide
cucaggcgaccauaggagc

SEQ ID NO: 1742454 - RNA, 19 nt, Artificial Sequence
  Description of Artificial Sequence: Synthetic oligonucleotide
gugguaucaacaagugcag

SEQ ID NO: 1742455 - RNA, 19 nt, Artificial Sequence
  Description of Artificial Sequence: Synthetic oligonucleotide
gucguccaaaagcuuuagg

SEQ ID NO: 1742456 - RNA, 19 nt, Artificial Sequence
  Description of Artificial Sequence: Synthetic oligonucleotide
gcaagcuuuauaugcguug

SEQ ID NO: 1742457 - RNA, 19 nt, Artificial Sequence
  Description of Artificial Sequence: Synthetic oligonucleotide
agagcggucggguauuaaa

SEQ ID NO: 1742458 - RNA, 19 nt, Artificial Sequence
  Description of Artificial Sequence: Synthetic oligonucleotide
uuauaaaacugggccaauu

SEQ ID NO: 1742459 - RNA, 19 nt, Artificial Sequence
  Description of Artificial Sequence: Synthetic oligonucleotide
ucgcugagaaacucuucca

SEQ ID NO: 1742460 - RNA, 19 nt, Artificial Sequence
  Description of Artificial Sequence: Synthetic oligonucleotide
ugguccuacaagugaacau

SEQ ID NO: 1742461 - RNA, 19 nt, Artificial Sequence
  Description of Artificial Sequence: Synthetic oligonucleotide
uuuauaugcguugcagcuu

SEQ ID NO: 1742462 - RNA, 19 nt, Artificial Sequence
  Description of Artificial Sequence: Synthetic oligonucleotide
uauugaagauucuguuguu

SEQ ID NO: 1742463 - RNA, 19 nt, Artificial Sequence
  Description of Artificial Sequence: Synthetic oligonucleotide
gacaccgcuugaaacgcag

SEQ ID NO: 1742464 - RNA, 19 nt, Artificial Sequence
  Description of Artificial Sequence: Synthetic oligonucleotide
uucucgcugagaaacucuu

SEQ ID NO: 1742465 - RNA, 19 nt, Artificial Sequence
  Description of Artificial Sequence: Synthetic oligonucleotide
agaccugccgccagaggcc

SEQ ID NO: 1742466 - RNA, 19 nt, Artificial Sequence
  Description of Artificial Sequence: Synthetic oligonucleotide
acagaggcgacggucgcuc

SEQ ID NO: 1742467 - RNA, 19 nt, Artificial Sequence
  Description of Artificial Sequence: Synthetic oligonucleotide
ucccguugucguccaaaag

SEQ ID NO: 1742468 - RNA, 19 nt, Artificial Sequence
  Description of Artificial Sequence: Synthetic oligonucleotide
auggaacuuuucuguaaga

SEQ ID NO: 1742469 - RNA, 19 nt, Artificial Sequence
  Description of Artificial Sequence: Synthetic oligonucleotide
agauucuguuguuuauaaa

SEQ ID NO: 1742470 - RNA, 19 nt, Artificial Sequence
  Description of Artificial Sequence: Synthetic oligonucleotide
ugacgcgagaccugccgcc

SEQ ID NO: 1742471 - RNA, 19 nt, Artificial Sequence
  Description of Artificial Sequence: Synthetic oligonucleotide
auaggagcgucagagcggu

SEQ ID NO: 1742472 - RNA, 19 nt, Artificial Sequence
  Description of Artificial Sequence: Synthetic oligonucleotide
ugcaugccucugaugagaa

SEQ ID NO: 1742473 - RNA, 19 nt, Artificial Sequence
  Description of Artificial Sequence: Synthetic oligonucleotide
cuaccgucccacagaggcg

SEQ ID NO: 1742474 - RNA, 19 nt, Artificial Sequence
  Description of Artificial Sequence: Synthetic oligonucleotide
gucgccagcagcaagcgca

SEQ ID NO: 1742475 - RNA, 19 nt, Artificial Sequence
  Description of Artificial Sequence: Synthetic oligonucleotide
ugagggaaccgccccaauu

SEQ ID NO: 1742476 - RNA, 19 nt, Artificial Sequence
  Description of Artificial Sequence: Synthetic oligonucleotide
cagacaccgcuugaaacgc

SEQ ID NO: 1742477 - RNA, 19 nt, Artificial Sequence
  Description of Artificial Sequence: Synthetic oligonucleotide
aagagcugcagagcaaguu

SEQ ID NO: 1742478 - RNA, 19 nt, Artificial Sequence
  Description of Artificial Sequence: Synthetic oligonucleotide
ugucguccaaaagcuuuag

SEQ ID NO: 1742479 - RNA, 19 nt, Artificial Sequence
  Description of Artificial Sequence: Synthetic oligonucleotide
guccgaggagaucacaaga

SEQ ID NO: 1742480 - RNA, 19 nt, Artificial Sequence
  Description of Artificial Sequence: Synthetic oligonucleotide
uucaaggauagcgccugca

SEQ ID NO: 1742481 - RNA, 19 nt, Artificial Sequence
  Description of Artificial Sequence: Synthetic oligonucleotide
agaucuacacaaauccuua

SEQ ID NO: 1742482 - RNA, 19 nt, Artificial Sequence
  Description of Artificial Sequence: Synthetic oligonucleotide
ucaaucuuccggcgcccga

SEQ ID NO: 1742483 - RNA, 19 nt, Artificial Sequence
  Description of Artificial Sequence: Synthetic oligonucleotide
cucgaacauacuugaucug

SEQ ID NO: 1742484 - RNA, 19 nt, Artificial Sequence
  Description of Artificial Sequence: Synthetic oligonucleotide
cugagguccaaucaucuua

SEQ ID NO: 1742485 - RNA, 19 nt, Artificial Sequence
  Description of Artificial Sequence: Synthetic oligonucleotide
ccgauuacaaagcaauguc

SEQ ID NO: 1742486 - RNA, 19 nt, Artificial Sequence
  Description of Artificial Sequence: Synthetic oligonucleotide
cuuaucgcuucugacaaaa

SEQ ID NO: 1742487 - RNA, 19 nt, Artificial Sequence
  Description of Artificial Sequence: Synthetic oligonucleotide
accgccuccagacuaccgu

SEQ ID NO: 1742488 - RNA, 19 nt, Artificial Sequence
  Description of Artificial Sequence: Synthetic oligonucleotide
caaaagaugugagggucuc

SEQ ID NO: 1742489 - RNA, 19 nt, Artificial Sequence
  Description of Artificial Sequence: Synthetic oligonucleotide
gaggugucuccuuuauuaa

SEQ ID NO: 1742490 - RNA, 19 nt, Artificial Sequence
  Description of Artificial Sequence: Synthetic oligonucleotide
acuugagggaaccgcccca

SEQ ID NO: 1742491 - RNA, 19 nt, Artificial Sequence
  Description of Artificial Sequence: Synthetic oligonucleotide
aacuguccgaggagaucac

SEQ ID NO: 1742492 - RNA, 19 nt, Artificial Sequence
  Description of Artificial Sequence: Synthetic oligonucleotide
auaugcguugcagcuucuc

SEQ ID NO: 1742493 - RNA, 19 nt, Artificial Sequence
  Description of Artificial Sequence: Synthetic oligonucleotide
auuaucagaucuacacaaa

SEQ ID NO: 1742494 - RNA, 19 nt, Artificial Sequence
  Description of Artificial Sequence: Synthetic oligonucleotide
ucuuccggcgcccgaggac

SEQ ID NO: 1742495 - RNA, 19 nt, Artificial Sequence
  Description of Artificial Sequence: Synthetic oligonucleotide
aaggagcaggcucguugcu

SEQ ID NO: 1742496 - RNA, 19 nt, Artificial Sequence
  Description of Artificial Sequence: Synthetic oligonucleotide
uucccguugucguccaaaa

SEQ ID NO: 1742497 - RNA, 19 nt, Artificial Sequence
  Description of Artificial Sequence: Synthetic oligonucleotide
ccacagacuucaaggauag

SEQ ID NO: 1742498 - RNA, 19 nt, Artificial Sequence
  Description of Artificial Sequence: Synthetic oligonucleotide
aggcgacggucgcucaggc

SEQ ID NO: 1742499 - RNA, 19 nt, Artificial Sequence
  Description of Artificial Sequence: Synthetic oligonucleotide
gagcaaguugcuggagaag

SEQ ID NO: 1742500 - RNA, 19 nt, Artificial Sequence
  Description of Artificial Sequence: Synthetic oligonucleotide
gccccaagagcagacaccg

SEQ ID NO: 1742501 - RNA, 19 nt, Artificial Sequence
  Description of Artificial Sequence: Synthetic oligonucleotide
gaagccgauuacaaagcaa

SEQ ID NO: 1742502 - RNA, 19 nt, Artificial Sequence
  Description of Artificial Sequence: Synthetic oligonucleotide
uauaugcguugcagcuucu

SEQ ID NO: 1742503 - RNA, 19 nt, Artificial Sequence
  Description of Artificial Sequence: Synthetic oligonucleotide
gcaaacgggguccagcuga

SEQ ID NO: 1742504 - RNA, 19 nt, Artificial Sequence
  Description of Artificial Sequence: Synthetic oligonucleotide
caccgcuugaaacgcaguc

SEQ ID NO: 1742505 - RNA, 19 nt, Artificial Sequence
  Description of Artificial Sequence: Synthetic oligonucleotide
gaggcgacggucgcucagg

SEQ ID NO: 1742506 - RNA, 19 nt, Artificial Sequence
  Description of Artificial Sequence: Synthetic oligonucleotide
ucugaaccucgaacauacu

SEQ ID NO: 1742507 - RNA, 19 nt, Artificial Sequence
  Description of Artificial Sequence: Synthetic oligonucleotide
cugcauacagcuuucuggu

SEQ ID NO: 1742508 - RNA, 19 nt, Artificial Sequence
  Description of Artificial Sequence: Synthetic oligonucleotide
agaggcgacggucgcucag

SEQ ID NO: 1742509 - RNA, 19 nt, Artificial Sequence
  Description of Artificial Sequence: Synthetic oligonucleotide
ucgcucaggcgaccauagg

SEQ ID NO: 1742510 - RNA, 19 nt, Artificial Sequence
  Description of Artificial Sequence: Synthetic oligonucleotide
gggcuuaucgcuucugaca

SEQ ID NO: 1742511 - RNA, 19 nt, Artificial Sequence
  Description of Artificial Sequence: Synthetic oligonucleotide
auuucauguggcacaaaua

SEQ ID NO: 1742512 - RNA, 19 nt, Artificial Sequence
  Description of Artificial Sequence: Synthetic oligonucleotide
caaucuuccggcgcccgag

SEQ ID NO: 1742513 - RNA, 19 nt, Artificial Sequence
  Description of Artificial Sequence: Synthetic oligonucleotide
guugcugagguccaaucau

SEQ ID NO: 1742514 - RNA, 19 nt, Artificial Sequence
  Description of Artificial Sequence: Synthetic oligonucleotide
cagacuaccgucccacaga

SEQ ID NO: 1742515 - RNA, 19 nt, Artificial Sequence
  Description of Artificial Sequence: Synthetic oligonucleotide
caauuaucagaagcuauua

SEQ ID NO: 1742516 - RNA, 19 nt, Artificial Sequence
  Description of Artificial Sequence: Synthetic oligonucleotide
gcucaggcgaccauaggag

SEQ ID NO: 1742517 - RNA, 19 nt, Artificial Sequence
  Description of Artificial Sequence: Synthetic oligonucleotide
augucauuagugguaucaa

SEQ ID NO: 1742518 - RNA, 19 nt, Artificial Sequence
  Description of Artificial Sequence: Synthetic oligonucleotide
agagcagacaccgcuugaa

SEQ ID NO: 1742519 - RNA, 19 nt, Artificial Sequence
  Description of Artificial Sequence: Synthetic oligonucleotide
ggauagcgccugcauacag

SEQ ID NO: 1742520 - RNA, 19 nt, Artificial Sequence
  Description of Artificial Sequence: Synthetic oligonucleotide
ccaaggagcaggcucguug

SEQ ID NO: 1742521 - RNA, 19 nt, Artificial Sequence
  Description of Artificial Sequence: Synthetic oligonucleotide
cagaucuacacaaauccuu

SEQ ID NO: 1742522 - RNA, 19 nt, Artificial Sequence
  Description of Artificial Sequence: Synthetic oligonucleotide
cauuaaugcaaaccuuuau

SEQ ID NO: 1742523 - RNA, 19 nt, Artificial Sequence
  Description of Artificial Sequence: Synthetic oligonucleotide
gguucuuucggagauucaa

SEQ ID NO: 1742524 - RNA, 19 nt, Artificial Sequence
  Description of Artificial Sequence: Synthetic oligonucleotide
gagggaaccgccccaauuu

SEQ ID NO: 1742525 - RNA, 19 nt, Artificial Sequence
  Description of Artificial Sequence: Synthetic oligonucleotide
gcgacggucgcucaggcga

SEQ ID NO: 1742526 - RNA, 19 nt, Artificial Sequence
  Description of Artificial Sequence: Synthetic oligonucleotide
ccgcuugaaacgcagucgc

SEQ ID NO: 1742527 - RNA, 19 nt, Artificial Sequence
  Description of Artificial Sequence: Synthetic oligonucleotide
accgcagugccugacgcga

SEQ ID NO: 1742528 - RNA, 19 nt, Artificial Sequence
  Description of Artificial Sequence: Synthetic oligonucleotide
agccgauuacaaagcaaug

SEQ ID NO: 1742529 - RNA, 19 nt, Artificial Sequence
  Description of Artificial Sequence: Synthetic oligonucleotide
agcaggcucguugcugagg

SEQ ID NO: 1742530 - RNA, 19 nt, Artificial Sequence
  Description of Artificial Sequence: Synthetic oligonucleotide
ggagcgucagagcggucgg

SEQ ID NO: 1742531 - RNA, 19 nt, Artificial Sequence
  Description of Artificial Sequence: Synthetic oligonucleotide
cuguccgaggagaucacaa

SEQ ID NO: 1742532 - RNA, 19 nt, Artificial Sequence
  Description of Artificial Sequence: Synthetic oligonucleotide
guucuuucggagauucaaa

SEQ ID NO: 1742533 - RNA, 19 nt, Artificial Sequence
  Description of Artificial Sequence: Synthetic oligonucleotide
gagcggucggguauuaaaa

SEQ ID NO: 1742534 - RNA, 19 nt, Artificial Sequence
  Description of Artificial Sequence: Synthetic oligonucleotide
gucaaucuuccggcgcccg

SEQ ID NO: 1742535 - RNA, 19 nt, Artificial Sequence
  Description of Artificial Sequence: Synthetic oligonucleotide
aauuagccagaagccgauu

SEQ ID NO: 1742536 - RNA, 19 nt, Artificial Sequence
  Description of Artificial Sequence: Synthetic oligonucleotide
ccucgaacauacuugaucu

SEQ ID NO: 1742537 - RNA, 19 nt, Artificial Sequence
  Description of Artificial Sequence: Synthetic oligonucleotide
caccgcagugccugacgcg

SEQ ID NO: 1742538 - RNA, 19 nt, Artificial Sequence
  Description of Artificial Sequence: Synthetic oligonucleotide
ccgaggagaucacaagagc

SEQ ID NO: 1742539 - RNA, 19 nt, Artificial Sequence
  Description of Artificial Sequence: Synthetic oligonucleotide
gcuugaaacgcagucgcca

SEQ ID NO: 1742540 - RNA, 19 nt, Artificial Sequence
  Description of Artificial Sequence: Synthetic oligonucleotide
ugaacaguuugggcuuauc

SEQ ID NO: 1742541 - RNA, 19 nt, Artificial Sequence
  Description of Artificial Sequence: Synthetic oligonucleotide
aaacgggguccagcugaag

SEQ ID NO: 1742542 - RNA, 19 nt, Artificial Sequence
  Description of Artificial Sequence: Synthetic oligonucleotide
caaugucauuagugguauc

SEQ ID NO: 1742543 - RNA, 19 nt, Artificial Sequence
  Description of Artificial Sequence: Synthetic oligonucleotide
cugccaauuaucagaucua

SEQ ID NO: 1742544 - RNA, 19 nt, Artificial Sequence
  Description of Artificial Sequence: Synthetic oligonucleotide
agggaaccgccccaauuuu

SEQ ID NO: 1742545 - RNA, 19 nt, Artificial Sequence
  Description of Artificial Sequence: Synthetic oligonucleotide
ggugucuccuuuauuaacu

SEQ ID NO: 1742546 - RNA, 19 nt, Artificial Sequence
  Description of Artificial Sequence: Synthetic oligonucleotide
ccagacuaccgucccacag

SEQ ID NO: 1742547 - RNA, 19 nt, Artificial Sequence
  Description of Artificial Sequence: Synthetic oligonucleotide
cagucgccagcagcaagcg

SEQ ID NO: 1742548 - RNA, 19 nt, Artificial Sequence
  Description of Artificial Sequence: Synthetic oligonucleotide
aucuuccggcgcccgagga

SEQ ID NO: 1742549 - RNA, 19 nt, Artificial Sequence
  Description of Artificial Sequence: Synthetic oligonucleotide
gacuaccgucccacagagg

SEQ ID NO: 1742550 - RNA, 19 nt, Artificial Sequence
  Description of Artificial Sequence: Synthetic oligonucleotide
ccgucaaucuuccggcgcc

SEQ ID NO: 1742551 - RNA, 19 nt, Artificial Sequence
  Description of Artificial Sequence: Synthetic oligonucleotide
gaggaccccugccgcgggg

SEQ ID NO: 1742552 - RNA, 19 nt, Artificial Sequence
  Description of Artificial Sequence: Synthetic oligonucleotide
caccgccuccagacuaccg

SEQ ID NO: 1742553 - RNA, 19 nt, Artificial Sequence
  Description of Artificial Sequence: Synthetic oligonucleotide
cuguguuccacuugaggau

SEQ ID NO: 1742554 - RNA, 19 nt, Artificial Sequence
  Description of Artificial Sequence: Synthetic oligonucleotide
cugcaugccucugaugaga

SEQ ID NO: 1742555 - RNA, 19 nt, Artificial Sequence
  Description of Artificial Sequence: Synthetic oligonucleotide
agcgucagagcggucgggu

SEQ ID NO: 1742556 - RNA, 19 nt, Artificial Sequence
  Description of Artificial Sequence: Synthetic oligonucleotide
cugaaccucgaacauacuu

SEQ ID NO: 1742557 - RNA, 19 nt, Artificial Sequence
  Description of Artificial Sequence: Synthetic oligonucleotide
ggaaccgccccaauuuuca

SEQ ID NO: 1742558 - RNA, 19 nt, Artificial Sequence
  Description of Artificial Sequence: Synthetic oligonucleotide
gggcaauacaaaagaugug

SEQ ID NO: 1742559 - RNA, 19 nt, Artificial Sequence
  Description of Artificial Sequence: Synthetic oligonucleotide
cuuacuguuuugugguuuu

SEQ ID NO: 1742560 - RNA, 19 nt, Artificial Sequence
  Description of Artificial Sequence: Synthetic oligonucleotide
acuguccgaggagaucaca

SEQ ID NO: 1742561 - RNA, 19 nt, Artificial Sequence
  Description of Artificial Sequence: Synthetic oligonucleotide
gcgaccauaggagcgucag

SEQ ID NO: 1742562 - RNA, 19 nt, Artificial Sequence
  Description of Artificial Sequence: Synthetic oligonucleotide
agcaagcuuuauaugcguu

SEQ ID NO: 1742563 - RNA, 19 nt, Artificial Sequence
  Description of Artificial Sequence: Synthetic oligonucleotide
cuucucgcugagaaacucu

SEQ ID NO: 1742564 - RNA, 19 nt, Artificial Sequence
  Description of Artificial Sequence: Synthetic oligonucleotide
gagcgucagagcggucggg

SEQ ID NO: 1742565 - RNA, 19 nt, Artificial Sequence
  Description of Artificial Sequence: Synthetic oligonucleotide
aggaggugucuccuuuauu

SEQ ID NO: 1742566 - RNA, 19 nt, Artificial Sequence
  Description of Artificial Sequence: Synthetic oligonucleotide
aaccucgaacauacuugau

SEQ ID NO: 1742567 - RNA, 19 nt, Artificial Sequence
  Description of Artificial Sequence: Synthetic oligonucleotide
gccugcauacagcuuucug

SEQ ID NO: 1742568 - RNA, 19 nt, Artificial Sequence
  Description of Artificial Sequence: Synthetic oligonucleotide
gccgauuacaaagcaaugu

SEQ ID NO: 1742569 - RNA, 19 nt, Artificial Sequence
  Description of Artificial Sequence: Synthetic oligonucleotide
acgcgagaccugccgccag

SEQ ID NO: 1742570 - RNA, 19 nt, Artificial Sequence
  Description of Artificial Sequence: Synthetic oligonucleotide
aggcgaccauaggagcguc

SEQ ID NO: 1742571 - RNA, 19 nt, Artificial Sequence
  Description of Artificial Sequence: Synthetic oligonucleotide
ugccguccccgucaaucuu

SEQ ID NO: 1742572 - RNA, 19 nt, Artificial Sequence
  Description of Artificial Sequence: Synthetic oligonucleotide
ggcgacggucgcucaggcg

SEQ ID NO: 1742573 - RNA, 19 nt, Artificial Sequence
  Description of Artificial Sequence: Synthetic oligonucleotide
gccaauuaucagaucuaca

SEQ ID NO: 1742574 - RNA, 19 nt, Artificial Sequence
  Description of Artificial Sequence: Synthetic oligonucleotide
gacgcgagaccugccgcca

SEQ ID NO: 1742575 - RNA, 19 nt, Artificial Sequence
  Description of Artificial Sequence: Synthetic oligonucleotide
cugcaauguucccguuguc

SEQ ID NO: 1742576 - RNA, 19 nt, Artificial Sequence
  Description of Artificial Sequence: Synthetic oligonucleotide
gggccaauuaucagaagcu

SEQ ID NO: 1742577 - RNA, 19 nt, Artificial Sequence
  Description of Artificial Sequence: Synthetic oligonucleotide
cacagacuucaaggauagc

SEQ ID NO: 1742578 - RNA, 19 nt, Artificial Sequence
  Description of Artificial Sequence: Synthetic oligonucleotide
caaacgggguccagcugaa

SEQ ID NO: 1742579 - RNA, 19 nt, Artificial Sequence
  Description of Artificial Sequence: Synthetic oligonucleotide
gguccuacaagugaacauu

SEQ ID NO: 1742580 - RNA, 19 nt, Artificial Sequence
  Description of Artificial Sequence: Synthetic oligonucleotide
ccaccgcagugccugacgc

SEQ ID NO: 1742581 - RNA, 19 nt, Artificial Sequence
  Description of Artificial Sequence: Synthetic oligonucleotide
gugucuccuuuauuaacuu

SEQ ID NO: 1742582 - RNA, 19 nt, Artificial Sequence
  Description of Artificial Sequence: Synthetic oligonucleotide
aaaagccgucggguucuuu

SEQ ID NO: 1742583 - RNA, 19 nt, Artificial Sequence
  Description of Artificial Sequence: Synthetic oligonucleotide
gcuucucgcugagaaacuc

SEQ ID NO: 1742584 - RNA, 19 nt, Artificial Sequence
  Description of Artificial Sequence: Synthetic oligonucleotide
gcaaaccuuuaugaguuua

SEQ ID NO: 1742585 - RNA, 19 nt, Artificial Sequence
  Description of Artificial Sequence: Synthetic oligonucleotide
ccgucggguucuuucggag

SEQ ID NO: 1742586 - RNA, 19 nt, Artificial Sequence
  Description of Artificial Sequence: Synthetic oligonucleotide
gcaggcucguugcugaggu

SEQ ID NO: 1742587 - RNA, 19 nt, Artificial Sequence
  Description of Artificial Sequence: Synthetic oligonucleotide
ggccaauuaucagaagcua

SEQ ID NO: 1742588 - RNA, 19 nt, Artificial Sequence
  Description of Artificial Sequence: Synthetic oligonucleotide
gagguccaaucaucuuacu

SEQ ID NO: 1742589 - RNA, 19 nt, Artificial Sequence
  Description of Artificial Sequence: Synthetic oligonucleotide
agacaccgcuugaaacgca

SEQ ID NO: 1742590 - RNA, 19 nt, Artificial Sequence
  Description of Artificial Sequence: Synthetic oligonucleotide
acaccgcuugaaacgcagu

SEQ ID NO: 1742591 - RNA, 19 nt, Artificial Sequence
  Description of Artificial Sequence: Synthetic oligonucleotide
gacggucgcucaggcgacc

SEQ ID NO: 1742592 - RNA, 19 nt, Artificial Sequence
  Description of Artificial Sequence: Synthetic oligonucleotide
cgaggagaucacaagagcu

SEQ ID NO: 1742593 - RNA, 19 nt, Artificial Sequence
  Description of Artificial Sequence: Synthetic oligonucleotide
cgucccacagaggcgacgg

SEQ ID NO: 1742594 - RNA, 19 nt, Artificial Sequence
  Description of Artificial Sequence: Synthetic oligonucleotide
cccaccgcagugccugacg

SEQ ID NO: 1742595 - RNA, 19 nt, Artificial Sequence
  Description of Artificial Sequence: Synthetic oligonucleotide
ccguugucguccaaaagcu

SEQ ID NO: 1742596 - RNA, 19 nt, Artificial Sequence
  Description of Artificial Sequence: Synthetic oligonucleotide
ucagagcggucggguauua

SEQ ID NO: 1742597 - RNA, 19 nt, Artificial Sequence
  Description of Artificial Sequence: Synthetic oligonucleotide
acggucgcucaggcgacca

SEQ ID NO: 1742598 - RNA, 19 nt, Artificial Sequence
  Description of Artificial Sequence: Synthetic oligonucleotide
cccaagagcagacaccgcu

SEQ ID NO: 1742599 - RNA, 19 nt, Artificial Sequence
  Description of Artificial Sequence: Synthetic oligonucleotide
gaaccgccccaauuuucau

SEQ ID NO: 1742600 - RNA, 19 nt, Artificial Sequence
  Description of Artificial Sequence: Synthetic oligonucleotide
ccguccccgucaaucuucc

SEQ ID NO: 1742601 - RNA, 19 nt, Artificial Sequence
  Description of Artificial Sequence: Synthetic oligonucleotide
caggcucguugcugagguc

SEQ ID NO: 1742602 - RNA, 19 nt, Artificial Sequence
  Description of Artificial Sequence: Synthetic oligonucleotide
gggaaccgccccaauuuuc

SEQ ID NO: 1742603 - RNA, 19 nt, Artificial Sequence
  Description of Artificial Sequence: Synthetic oligonucleotide
cccgaggaccccugccgcg

SEQ ID NO: 1742604 - RNA, 19 nt, Artificial Sequence
  Description of Artificial Sequence: Synthetic oligonucleotide
cgcuugaaacgcagucgcc

SEQ ID NO: 1742605 - RNA, 19 nt, Artificial Sequence
  Description of Artificial Sequence: Synthetic oligonucleotide
uaggagcgucagagcgguc

SEQ ID NO: 1742606 - RNA, 19 nt, Artificial Sequence
  Description of Artificial Sequence: Synthetic oligonucleotide
gccgucggguucuuucgga

SEQ ID NO: 1742607 - RNA, 19 nt, Artificial Sequence
  Description of Artificial Sequence: Synthetic oligonucleotide
gcuuaucgcuucugacaaa

SEQ ID NO: 1742608 - RNA, 19 nt, Artificial Sequence
  Description of Artificial Sequence: Synthetic oligonucleotide
gggucugaaccucgaacau

SEQ ID NO: 1742609 - RNA, 19 nt, Artificial Sequence
  Description of Artificial Sequence: Synthetic oligonucleotide
ccauaauaauaaggcuaca

SEQ ID NO: 1742610 - RNA, 19 nt, Artificial Sequence
  Description of Artificial Sequence: Synthetic oligonucleotide
ccgaggaccccugccgcgg

SEQ ID NO: 1742611 - RNA, 19 nt, Artificial Sequence
  Description of Artificial Sequence: Synthetic oligonucleotide
caggcgaccauaggagcgu

SEQ ID NO: 1742612 - RNA, 19 nt, Artificial Sequence
  Description of Artificial Sequence: Synthetic oligonucleotide
ggccaccgccuccagacua

SEQ ID NO: 1742613 - RNA, 19 nt, Artificial Sequence
  Description of Artificial Sequence: Synthetic oligonucleotide
gccguccccgucaaucuuc

SEQ ID NO: 1742614 - RNA, 19 nt, Artificial Sequence
  Description of Artificial Sequence: Synthetic oligonucleotide
ccggggccucucauucacg

SEQ ID NO: 1742615 - RNA, 19 nt, Artificial Sequence
  Description of Artificial Sequence: Synthetic oligonucleotide
ccccaagagcagacaccgc

SEQ ID NO: 1742616 - RNA, 19 nt, Artificial Sequence
  Description of Artificial Sequence: Synthetic oligonucleotide
ggucgcucaggcgaccaua

SEQ ID NO: 1742617 - RNA, 19 nt, Artificial Sequence
  Description of Artificial Sequence: Synthetic oligonucleotide
gccaccgccuccagacuac

SEQ ID NO: 1742618 - RNA, 19 nt, Artificial Sequence
  Description of Artificial Sequence: Synthetic oligonucleotide
cgagaccugccgccagagg

SEQ ID NO: 1742619 - RNA, 19 nt, Artificial Sequence
  Description of Artificial Sequence: Synthetic oligonucleotide
cgucaaucuuccggcgccc

SEQ ID NO: 1742620 - RNA, 19 nt, Artificial Sequence
  Description of Artificial Sequence: Synthetic oligonucleotide
gucagagcggucggguauu

SEQ ID NO: 1742621 - RNA, 19 nt, Artificial Sequence
  Description of Artificial Sequence: Synthetic oligonucleotide
ccgcagugccugacgcgag

SEQ ID NO: 1742622 - RNA, 19 nt, Artificial Sequence
  Description of Artificial Sequence: Synthetic oligonucleotide
cucguugcugagguccaau

SEQ ID NO: 1742623 - RNA, 19 nt, Artificial Sequence
  Description of Artificial Sequence: Synthetic oligonucleotide
cgucggguucuuucggaga

SEQ ID NO: 1742624 - RNA, 19 nt, Artificial Sequence
  Description of Artificial Sequence: Synthetic oligonucleotide
ccgucccacagaggcgacg

SEQ ID NO: 1742625 - RNA, 19 nt, Artificial Sequence
  Description of Artificial Sequence: Synthetic oligonucleotide
ggcgaccauaggagcguca

SEQ ID NO: 1742626 - RNA, 19 nt, Artificial Sequence
  Description of Artificial Sequence: Synthetic oligonucleotide
cgacggucgcucaggcgac

SEQ ID NO: 1742627 - RNA, 19 nt, Artificial Sequence
  Description of Artificial Sequence: Synthetic oligonucleotide
gcgucagagcggucgggua

SEQ ID NO: 1742628 - RNA, 19 nt, Artificial Sequence
  Description of Artificial Sequence: Synthetic oligonucleotide
cagagcggucggguauuaa

SEQ ID NO: 1742629 - RNA, 19 nt, Artificial Sequence
  Description of Artificial Sequence: Synthetic oligonucleotide
cgaggaccccugccgcggg

SEQ ID NO: 1742630 - RNA, 19 nt, Artificial Sequence
  Description of Artificial Sequence: Synthetic oligonucleotide
cugcccggccgccaucccu

SEQ ID NO: 1742631 - RNA, 19 nt, Artificial Sequence
  Description of Artificial Sequence: Synthetic oligonucleotide
gcgccugcauacagcuuuc

SEQ ID NO: 1742632 - RNA, 19 nt, Artificial Sequence
  Description of Artificial Sequence: Synthetic oligonucleotide
cgcagcccgagagcgggcc

SEQ ID NO: 1742633 - RNA, 19 nt, Artificial Sequence
  Description of Artificial Sequence: Synthetic oligonucleotide
cguccccgucaaucuuccg

SEQ ID NO: 1742634 - RNA, 19 nt, Artificial Sequence
  Description of Artificial Sequence: Synthetic oligonucleotide
cgaccauaggagcgucaga

SEQ ID NO: 1742635 - RNA, 19 nt, Artificial Sequence
  Description of Artificial Sequence: Synthetic oligonucleotide
cccacaccggggccucuca

SEQ ID NO: 1742636 - RNA, 19 nt, Artificial Sequence
  Description of Artificial Sequence: Synthetic oligonucleotide
gcucguugcugagguccaa

SEQ ID NO: 1742637 - RNA, 19 nt, Artificial Sequence
  Description of Artificial Sequence: Synthetic oligonucleotide
ccgccccaauuuucaucca

SEQ ID NO: 1742638 - RNA, 19 nt, Artificial Sequence
  Description of Artificial Sequence: Synthetic oligonucleotide
cgagagcgggccgcagcca

SEQ ID NO: 1742639 - RNA, 19 nt, Artificial Sequence
  Description of Artificial Sequence: Synthetic oligonucleotide
ccacaccggggccucucau

SEQ ID NO: 1742640 - RNA, 19 nt, Artificial Sequence
  Description of Artificial Sequence: Synthetic oligonucleotide
cgcccaccgcagugccuga

SEQ ID NO: 1742641 - RNA, 19 nt, Artificial Sequence
  Description of Artificial Sequence: Synthetic oligonucleotide
cgccugcauacagcuuucu

SEQ ID NO: 1742642 - RNA, 19 nt, Artificial Sequence
  Description of Artificial Sequence: Synthetic oligonucleotide
ccggcgcccgaggaccccu

SEQ ID NO: 1742643 - RNA, 19 nt, Artificial Sequence
  Description of Artificial Sequence: Synthetic oligonucleotide
cggucgcucaggcgaccau

SEQ ID NO: 1742644 - RNA, 19 nt, Artificial Sequence
  Description of Artificial Sequence: Synthetic oligonucleotide
cccugccguccccgucaau

SEQ ID NO: 1742645 - RNA, 19 nt, Artificial Sequence
  Description of Artificial Sequence: Synthetic oligonucleotide
aaaucugcucuuuaaaagc

SEQ ID NO: 1742646 - RNA, 19 nt, Artificial Sequence
  Description of Artificial Sequence: Synthetic oligonucleotide
uuuauuuuagugaacacag

SEQ ID NO: 1742647 - RNA, 19 nt, Artificial Sequence
  Description of Artificial Sequence: Synthetic oligonucleotide
aaacauauccaguugaguc

SEQ ID NO: 1742648 - RNA, 19 nt, Artificial Sequence
  Description of Artificial Sequence: Synthetic oligonucleotide
augacgguaaaacauaucc

SEQ ID NO: 1742649 - RNA, 19 nt, Artificial Sequence
  Description of Artificial Sequence: Synthetic oligonucleotide
auaugaaacacuuugaugu

SEQ ID NO: 1742650 - RNA, 19 nt, Artificial Sequence
  Description of Artificial Sequence: Synthetic oligonucleotide
aacauauccaguugagucc

SEQ ID NO: 1742651 - RNA, 19 nt, Artificial Sequence
  Description of Artificial Sequence: Synthetic oligonucleotide
aauaugugaaaaugcuugc

SEQ ID NO: 1742652 - RNA, 19 nt, Artificial Sequence
  Description of Artificial Sequence: Synthetic oligonucleotide
aacguguuuccuuauaaac

SEQ ID NO: 1742653 - RNA, 19 nt, Artificial Sequence
  Description of Artificial Sequence: Synthetic oligonucleotide
cuaucaauuacaauucugg

SEQ ID NO: 1742654 - RNA, 19 nt, Artificial Sequence
  Description of Artificial Sequence: Synthetic oligonucleotide
aaaugaaggauccucaggu

SEQ ID NO: 1742655 - RNA, 19 nt, Artificial Sequence
  Description of Artificial Sequence: Synthetic oligonucleotide
aauuugaccacauccagca

SEQ ID NO: 1742656 - RNA, 19 nt, Artificial Sequence
  Description of Artificial Sequence: Synthetic oligonucleotide
gaagacaugcacuacaacc

SEQ ID NO: 1742657 - RNA, 19 nt, Artificial Sequence
  Description of Artificial Sequence: Synthetic oligonucleotide
auaaaccuggccuauauuc

SEQ ID NO: 1742658 - RNA, 19 nt, Artificial Sequence
  Description of Artificial Sequence: Synthetic oligonucleotide
uaagaaguaaacauauuca

SEQ ID NO: 1742659 - RNA, 19 nt, Artificial Sequence
  Description of Artificial Sequence: Synthetic oligonucleotide
aucaauuacaauucuggac

SEQ ID NO: 1742660 - RNA, 19 nt, Artificial Sequence
  Description of Artificial Sequence: Synthetic oligonucleotide
uuucaaugcccaaugacgg

SEQ ID NO: 1742661 - RNA, 19 nt, Artificial Sequence
  Description of Artificial Sequence: Synthetic oligonucleotide
augaugguaacuuagcauc

SEQ ID NO: 1742662 - RNA, 19 nt, Artificial Sequence
  Description of Artificial Sequence: Synthetic oligonucleotide
cuuucaaugcccaaugacg

SEQ ID NO: 1742663 - RNA, 19 nt, Artificial Sequence
  Description of Artificial Sequence: Synthetic oligonucleotide
ucuaucaugacuugguacc

SEQ ID NO: 1742664 - RNA, 19 nt, Artificial Sequence
  Description of Artificial Sequence: Synthetic oligonucleotide
ucgaauaagaauuucuucu

SEQ ID NO: 1742665 - RNA, 19 nt, Artificial Sequence
  Description of Artificial Sequence: Synthetic oligonucleotide
gaugucuagauccaucagg

SEQ ID NO: 1742666 - RNA, 19 nt, Artificial Sequence
  Description of Artificial Sequence: Synthetic oligonucleotide
ugcacuacaaccauauagc

SEQ ID NO: 1742667 - RNA, 19 nt, Artificial Sequence
  Description of Artificial Sequence: Synthetic oligonucleotide
aaaucacugaaguuaagga

SEQ ID NO: 1742668 - RNA, 19 nt, Artificial Sequence
  Description of Artificial Sequence: Synthetic oligonucleotide
gacgguaaaacauauccag

SEQ ID NO: 1742669 - RNA, 19 nt, Artificial Sequence
  Description of Artificial Sequence: Synthetic oligonucleotide
uacaauucuggacaguaag

SEQ ID NO: 1742670 - RNA, 19 nt, Artificial Sequence
  Description of Artificial Sequence: Synthetic oligonucleotide
ucaaguuuaauggagauau

SEQ ID NO: 1742671 - RNA, 19 nt, Artificial Sequence
  Description of Artificial Sequence: Synthetic oligonucleotide
gauucaacgagucuuuggc

SEQ ID NO: 1742672 - RNA, 19 nt, Artificial Sequence
  Description of Artificial Sequence: Synthetic oligonucleotide
acgaauguuauuccaaggg

SEQ ID NO: 1742673 - RNA, 19 nt, Artificial Sequence
  Description of Artificial Sequence: Synthetic oligonucleotide
guaagaaguaaacauauuc

SEQ ID NO: 1742674 - RNA, 19 nt, Artificial Sequence
  Description of Artificial Sequence: Synthetic oligonucleotide
guuuaauggagauauagca

SEQ ID NO: 1742675 - RNA, 19 nt, Artificial Sequence
  Description of Artificial Sequence: Synthetic oligonucleotide
uggaauugaaccacgaccu

SEQ ID NO: 1742676 - RNA, 19 nt, Artificial Sequence
  Description of Artificial Sequence: Synthetic oligonucleotide
auggagauauagcaaauuc

SEQ ID NO: 1742677 - RNA, 19 nt, Artificial Sequence
  Description of Artificial Sequence: Synthetic oligonucleotide
uugggauagggauucaacg

SEQ ID NO: 1742678 - RNA, 19 nt, Artificial Sequence
  Description of Artificial Sequence: Synthetic oligonucleotide
ugugagauguugaaguuga

SEQ ID NO: 1742679 - RNA, 19 nt, Artificial Sequence
  Description of Artificial Sequence: Synthetic oligonucleotide
ugaaguucuuugcagacga

SEQ ID NO: 1742680 - RNA, 19 nt, Artificial Sequence
  Description of Artificial Sequence: Synthetic oligonucleotide
ucuaucaauuacaauucug

SEQ ID NO: 1742681 - RNA, 19 nt, Artificial Sequence
  Description of Artificial Sequence: Synthetic oligonucleotide
aaccauauagcagauucuc

SEQ ID NO: 1742682 - RNA, 19 nt, Artificial Sequence
  Description of Artificial Sequence: Synthetic oligonucleotide
aagaauucuggaauugaac

SEQ ID NO: 1742683 - RNA, 19 nt, Artificial Sequence
  Description of Artificial Sequence: Synthetic oligonucleotide
aacuuagcaucuuaauaug

SEQ ID NO: 1742684 - RNA, 19 nt, Artificial Sequence
  Description of Artificial Sequence: Synthetic oligonucleotide
ugaaccacgaccuggaaaa

SEQ ID NO: 1742685 - RNA, 19 nt, Artificial Sequence
  Description of Artificial Sequence: Synthetic oligonucleotide
uucauuauaucaauaccaa

SEQ ID NO: 1742686 - RNA, 19 nt, Artificial Sequence
  Description of Artificial Sequence: Synthetic oligonucleotide
uggagauauagcaaauuca

SEQ ID NO: 1742687 - RNA, 19 nt, Artificial Sequence
  Description of Artificial Sequence: Synthetic oligonucleotide
aacuaacuuccuuaucauc

SEQ ID NO: 1742688 - RNA, 19 nt, Artificial Sequence
  Description of Artificial Sequence: Synthetic oligonucleotide
uucaagucgaugcauuuca

SEQ ID NO: 1742689 - RNA, 19 nt, Artificial Sequence
  Description of Artificial Sequence: Synthetic oligonucleotide
aagucgaugcauuucaaau

SEQ ID NO: 1742690 - RNA, 19 nt, Artificial Sequence
  Description of Artificial Sequence: Synthetic oligonucleotide
aaguuaaggauggugaacu

SEQ ID NO: 1742691 - RNA, 19 nt, Artificial Sequence
  Description of Artificial Sequence: Synthetic oligonucleotide
caauaugaugguaacuuag

SEQ ID NO: 1742692 - RNA, 19 nt, Artificial Sequence
  Description of Artificial Sequence: Synthetic oligonucleotide
uuagugaacacagaagacu

SEQ ID NO: 1742693 - RNA, 19 nt, Artificial Sequence
  Description of Artificial Sequence: Synthetic oligonucleotide
agucgaugcauuucaaauc

SEQ ID NO: 1742694 - RNA, 19 nt, Artificial Sequence
  Description of Artificial Sequence: Synthetic oligonucleotide
aacuagucuucauuauauc

SEQ ID NO: 1742695 - RNA, 19 nt, Artificial Sequence
  Description of Artificial Sequence: Synthetic oligonucleotide
gucgaugcauuucaaaucc

SEQ ID NO: 1742696 - RNA, 19 nt, Artificial Sequence
  Description of Artificial Sequence: Synthetic oligonucleotide
uccauggucggcacgaugc

SEQ ID NO: 1742697 - RNA, 19 nt, Artificial Sequence
  Description of Artificial Sequence: Synthetic oligonucleotide
auaugugaaaaugcuugcc

SEQ ID NO: 1742698 - RNA, 19 nt, Artificial Sequence
  Description of Artificial Sequence: Synthetic oligonucleotide
ggauauuuaauuucucugc

SEQ ID NO: 1742699 - RNA, 19 nt, Artificial Sequence
  Description of Artificial Sequence: Synthetic oligonucleotide
uaucaauuacaauucugga

SEQ ID NO: 1742700 - RNA, 19 nt, Artificial Sequence
  Description of Artificial Sequence: Synthetic oligonucleotide
cagacgaccagccagggcc

SEQ ID NO: 1742701 - RNA, 19 nt, Artificial Sequence
  Description of Artificial Sequence: Synthetic oligonucleotide
cauuauaucaauaccaacu

SEQ ID NO: 1742702 - RNA, 19 nt, Artificial Sequence
  Description of Artificial Sequence: Synthetic oligonucleotide
ucauaauaugaaagaauuc

SEQ ID NO: 1742703 - RNA, 19 nt, Artificial Sequence
  Description of Artificial Sequence: Synthetic oligonucleotide
auagcagauucucucauca

SEQ ID NO: 1742704 - RNA, 19 nt, Artificial Sequence
  Description of Artificial Sequence: Synthetic oligonucleotide
agcaagaacugcauagucc

SEQ ID NO: 1742705 - RNA, 19 nt, Artificial Sequence
  Description of Artificial Sequence: Synthetic oligonucleotide
gacgaauguuauuccaagg

SEQ ID NO: 1742706 - RNA, 19 nt, Artificial Sequence
  Description of Artificial Sequence: Synthetic oligonucleotide
gaauugaaccacgaccugg

SEQ ID NO: 1742707 - RNA, 19 nt, Artificial Sequence
  Description of Artificial Sequence: Synthetic oligonucleotide
uaaaccuggccuauauuca

SEQ ID NO: 1742708 - RNA, 19 nt, Artificial Sequence
  Description of Artificial Sequence: Synthetic oligonucleotide
acuaacuuccuuaucauca

SEQ ID NO: 1742709 - RNA, 19 nt, Artificial Sequence
  Description of Artificial Sequence: Synthetic oligonucleotide
uucgaauaagaauuucuuc

SEQ ID NO: 1742710 - RNA, 19 nt, Artificial Sequence
  Description of Artificial Sequence: Synthetic oligonucleotide
auaugaugguaacuuagca

SEQ ID NO: 1742711 - RNA, 19 nt, Artificial Sequence
  Description of Artificial Sequence: Synthetic oligonucleotide
agucccaaaaugaaggauc

SEQ ID NO: 1742712 - RNA, 19 nt, Artificial Sequence
  Description of Artificial Sequence: Synthetic oligonucleotide
aguugaaauugggauaggg

SEQ ID NO: 1742713 - RNA, 19 nt, Artificial Sequence
  Description of Artificial Sequence: Synthetic oligonucleotide
agacgaauguuauuccaag

SEQ ID NO: 1742714 - RNA, 19 nt, Artificial Sequence
  Description of Artificial Sequence: Synthetic oligonucleotide
cuugguaccauuucgaaua

SEQ ID NO: 1742715 - RNA, 19 nt, Artificial Sequence
  Description of Artificial Sequence: Synthetic oligonucleotide
auuuuagugaacacagaag

SEQ ID NO: 1742716 - RNA, 19 nt, Artificial Sequence
  Description of Artificial Sequence: Synthetic oligonucleotide
ucauuauaucaauaccaac

SEQ ID NO: 1742717 - RNA, 19 nt, Artificial Sequence
  Description of Artificial Sequence: Synthetic oligonucleotide
agccacugcaacaaaaugg

SEQ ID NO: 1742718 - RNA, 19 nt, Artificial Sequence
  Description of Artificial Sequence: Synthetic oligonucleotide
uuccuuaucaucagacgac

SEQ ID NO: 1742719 - RNA, 19 nt, Artificial Sequence
  Description of Artificial Sequence: Synthetic oligonucleotide
ugggauagggauucaacga

SEQ ID NO: 1742720 - RNA, 19 nt, Artificial Sequence
  Description of Artificial Sequence: Synthetic oligonucleotide
gaaauugggauagggauuc

SEQ ID NO: 1742721 - RNA, 19 nt, Artificial Sequence
  Description of Artificial Sequence: Synthetic oligonucleotide
uuagaaucaucuugauaug

SEQ ID NO: 1742722 - RNA, 19 nt, Artificial Sequence
  Description of Artificial Sequence: Synthetic oligonucleotide
ugacgguaaaacauaucca

SEQ ID NO: 1742723 - RNA, 19 nt, Artificial Sequence
  Description of Artificial Sequence: Synthetic oligonucleotide
uauucagggauucuaucau

SEQ ID NO: 1742724 - RNA, 19 nt, Artificial Sequence
  Description of Artificial Sequence: Synthetic oligonucleotide
ucaucaauaugaugguaac

SEQ ID NO: 1742725 - RNA, 19 nt, Artificial Sequence
  Description of Artificial Sequence: Synthetic oligonucleotide
caaaaugaaggauccucag

SEQ ID NO: 1742726 - RNA, 19 nt, Artificial Sequence
  Description of Artificial Sequence: Synthetic oligonucleotide
cugaaguuaaggaugguga

SEQ ID NO: 1742727 - RNA, 19 nt, Artificial Sequence
  Description of Artificial Sequence: Synthetic oligonucleotide
uggccuauauucaaguuua

SEQ ID NO: 1742728 - RNA, 19 nt, Artificial Sequence
  Description of Artificial Sequence: Synthetic oligonucleotide
uuauuuuagugaacacaga

SEQ ID NO: 1742729 - RNA, 19 nt, Artificial Sequence
  Description of Artificial Sequence: Synthetic oligonucleotide
uucaacgagucuuuggcaa

SEQ ID NO: 1742730 - RNA, 19 nt, Artificial Sequence
  Description of Artificial Sequence: Synthetic oligonucleotide
ucuauuuugcuuuccucaa

SEQ ID NO: 1742731 - RNA, 19 nt, Artificial Sequence
  Description of Artificial Sequence: Synthetic oligonucleotide
uggaaaacuagucuucauu

SEQ ID NO: 1742732 - RNA, 19 nt, Artificial Sequence
  Description of Artificial Sequence: Synthetic oligonucleotide
aauucaagucgaugcauuu

SEQ ID NO: 1742733 - RNA, 19 nt, Artificial Sequence
  Description of Artificial Sequence: Synthetic oligonucleotide
gcaagaacugcauaguccc

SEQ ID NO: 1742734 - RNA, 19 nt, Artificial Sequence
  Description of Artificial Sequence: Synthetic oligonucleotide
auggugcucaucuauuuug

SEQ ID NO: 1742735 - RNA, 19 nt, Artificial Sequence
  Description of Artificial Sequence: Synthetic oligonucleotide
agcgccagcagccauucgg

SEQ ID NO: 1742736 - RNA, 19 nt, Artificial Sequence
  Description of Artificial Sequence: Synthetic oligonucleotide
ugacuugguaccauuucga

SEQ ID NO: 1742737 - RNA, 19 nt, Artificial Sequence
  Description of Artificial Sequence: Synthetic oligonucleotide
aacugcauaguccccuuga

SEQ ID NO: 1742738 - RNA, 19 nt, Artificial Sequence
  Description of Artificial Sequence: Synthetic oligonucleotide
aacaccaauggcuuuuaua

SEQ ID NO: 1742739 - RNA, 19 nt, Artificial Sequence
  Description of Artificial Sequence: Synthetic oligonucleotide
auuucgaauaagaauuucu

SEQ ID NO: 1742740 - RNA, 19 nt, Artificial Sequence
  Description of Artificial Sequence: Synthetic oligonucleotide
ugugaaaaugcuugccuuc

SEQ ID NO: 1742741 - RNA, 19 nt, Artificial Sequence
  Description of Artificial Sequence: Synthetic oligonucleotide
ucugauuguuucccauucc

SEQ ID NO: 1742742 - RNA, 19 nt, Artificial Sequence
  Description of Artificial Sequence: Synthetic oligonucleotide
auuggaagauucugucauc

SEQ ID NO: 1742743 - RNA, 19 nt, Artificial Sequence
  Description of Artificial Sequence: Synthetic oligonucleotide
ugaugguaacuuagcaucu

SEQ ID NO: 1742744 - RNA, 19 nt, Artificial Sequence
  Description of Artificial Sequence: Synthetic oligonucleotide
aaugacgguaaaacauauc

SEQ ID NO: 1742745 - RNA, 19 nt, Artificial Sequence
  Description of Artificial Sequence: Synthetic oligonucleotide
gcaacuaacuuccuuauca

SEQ ID NO: 1742746 - RNA, 19 nt, Artificial Sequence
  Description of Artificial Sequence: Synthetic oligonucleotide
guuucccauuccuuguugg

SEQ ID NO: 1742747 - RNA, 19 nt, Artificial Sequence
  Description of Artificial Sequence: Synthetic oligonucleotide
aaauggugcucaucuauuu

SEQ ID NO: 1742748 - RNA, 19 nt, Artificial Sequence
  Description of Artificial Sequence: Synthetic oligonucleotide
aauugaaccacgaccugga

SEQ ID NO: 1742749 - RNA, 19 nt, Artificial Sequence
  Description of Artificial Sequence: Synthetic oligonucleotide
cuuccuuaucaucagacga

SEQ ID NO: 1742750 - RNA, 19 nt, Artificial Sequence
  Description of Artificial Sequence: Synthetic oligonucleotide
auucgguucgacugggcag

SEQ ID NO: 1742751 - RNA, 19 nt, Artificial Sequence
  Description of Artificial Sequence: Synthetic oligonucleotide
ucaacgagucuuuggcaag

SEQ ID NO: 1742752 - RNA, 19 nt, Artificial Sequence
  Description of Artificial Sequence: Synthetic oligonucleotide
caucagacgaccagccagg

SEQ ID NO: 1742753 - RNA, 19 nt, Artificial Sequence
  Description of Artificial Sequence: Synthetic oligonucleotide
uccaucagguuuccuaaga

SEQ ID NO: 1742754 - RNA, 19 nt, Artificial Sequence
  Description of Artificial Sequence: Synthetic oligonucleotide
gguaaaacauauccaguug

SEQ ID NO: 1742755 - RNA, 19 nt, Artificial Sequence
  Description of Artificial Sequence: Synthetic oligonucleotide
auucaaguuuaauggagau

SEQ ID NO: 1742756 - RNA, 19 nt, Artificial Sequence
  Description of Artificial Sequence: Synthetic oligonucleotide
auauuuaauuucucugcaa

SEQ ID NO: 1742757 - RNA, 19 nt, Artificial Sequence
  Description of Artificial Sequence: Synthetic oligonucleotide
cuagucuucauuauaucaa

SEQ ID NO: 1742758 - RNA, 19 nt, Artificial Sequence
  Description of Artificial Sequence: Synthetic oligonucleotide
ugcccaaugacgguaaaac

SEQ ID NO: 1742759 - RNA, 19 nt, Artificial Sequence
  Description of Artificial Sequence: Synthetic oligonucleotide
ugucauaggaauagccgau

SEQ ID NO: 1742760 - RNA, 19 nt, Artificial Sequence
  Description of Artificial Sequence: Synthetic oligonucleotide
uccaguugaguccauucau

SEQ ID NO: 1742761 - RNA, 19 nt, Artificial Sequence
  Description of Artificial Sequence: Synthetic oligonucleotide
agauccaucagguuuccua

SEQ ID NO: 1742762 - RNA, 19 nt, Artificial Sequence
  Description of Artificial Sequence: Synthetic oligonucleotide
aagggauauuuaauuucuc

SEQ ID NO: 1742763 - RNA, 19 nt, Artificial Sequence
  Description of Artificial Sequence: Synthetic oligonucleotide
uauccaguugaguccauuc

SEQ ID NO: 1742764 - RNA, 19 nt, Artificial Sequence
  Description of Artificial Sequence: Synthetic oligonucleotide
ugguaacuuagcaucuuaa

SEQ ID NO: 1742765 - RNA, 19 nt, Artificial Sequence
  Description of Artificial Sequence: Synthetic oligonucleotide
auucaagucgaugcauuuc

SEQ ID NO: 1742766 - RNA, 19 nt, Artificial Sequence
  Description of Artificial Sequence: Synthetic oligonucleotide
gaaguuaaggauggugaac

SEQ ID NO: 1742767 - RNA, 19 nt, Artificial Sequence
  Description of Artificial Sequence: Synthetic oligonucleotide
agccgaugcuaucaaauca

SEQ ID NO: 1742768 - RNA, 19 nt, Artificial Sequence
  Description of Artificial Sequence: Synthetic oligonucleotide
agauucugucaucauuucu

SEQ ID NO: 1742769 - RNA, 19 nt, Artificial Sequence
  Description of Artificial Sequence: Synthetic oligonucleotide
cagccauucgguucgacug

SEQ ID NO: 1742770 - RNA, 19 nt, Artificial Sequence
  Description of Artificial Sequence: Synthetic oligonucleotide
uccuuaucaucagacgacc

SEQ ID NO: 1742771 - RNA, 19 nt, Artificial Sequence
  Description of Artificial Sequence: Synthetic oligonucleotide
uuacaauucuggacaguaa

SEQ ID NO: 1742772 - RNA, 19 nt, Artificial Sequence
  Description of Artificial Sequence: Synthetic oligonucleotide
aggaauagccgaugcuauc

SEQ ID NO: 1742773 - RNA, 19 nt, Artificial Sequence
  Description of Artificial Sequence: Synthetic oligonucleotide
ugaagacaugcacuacaac

SEQ ID NO: 1742774 - RNA, 19 nt, Artificial Sequence
  Description of Artificial Sequence: Synthetic oligonucleotide
aauagccgaugcuaucaaa

SEQ ID NO: 1742775 - RNA, 19 nt, Artificial Sequence
  Description of Artificial Sequence: Synthetic oligonucleotide
caaaggagccacugaacug

SEQ ID NO: 1742776 - RNA, 19 nt, Artificial Sequence
  Description of Artificial Sequence: Synthetic oligonucleotide
uccuuauaaaccuggccua

SEQ ID NO: 1742777 - RNA, 19 nt, Artificial Sequence
  Description of Artificial Sequence: Synthetic oligonucleotide
gggauagggauucaacgag

SEQ ID NO: 1742778 - RNA, 19 nt, Artificial Sequence
  Description of Artificial Sequence: Synthetic oligonucleotide
auucaacgagucuuuggca

SEQ ID NO: 1742779 - RNA, 19 nt, Artificial Sequence
  Description of Artificial Sequence: Synthetic oligonucleotide
ggauucaacgagucuuugg

SEQ ID NO: 1742780 - RNA, 19 nt, Artificial Sequence
  Description of Artificial Sequence: Synthetic oligonucleotide
ggcaaacacgaacuggccg

SEQ ID NO: 1742781 - RNA, 19 nt, Artificial Sequence
  Description of Artificial Sequence: Synthetic oligonucleotide
gaacaaacguguuuccuua

SEQ ID NO: 1742782 - RNA, 19 nt, Artificial Sequence
  Description of Artificial Sequence: Synthetic oligonucleotide
guugaaauugggauaggga

SEQ ID NO: 1742783 - RNA, 19 nt, Artificial Sequence
  Description of Artificial Sequence: Synthetic oligonucleotide
aaguucuuugcagacgaau

SEQ ID NO: 1742784 - RNA, 19 nt, Artificial Sequence
  Description of Artificial Sequence: Synthetic oligonucleotide
uccccuugaugugagaugu

SEQ ID NO: 1742785 - RNA, 19 nt, Artificial Sequence
  Description of Artificial Sequence: Synthetic oligonucleotide
cagcgaacgcccuccaugg

SEQ ID NO: 1742786 - RNA, 19 nt, Artificial Sequence
  Description of Artificial Sequence: Synthetic oligonucleotide
aauuacaauucuggacagu

SEQ ID NO: 1742787 - RNA, 19 nt, Artificial Sequence
  Description of Artificial Sequence: Synthetic oligonucleotide
agccauucgguucgacugg

SEQ ID NO: 1742788 - RNA, 19 nt, Artificial Sequence
  Description of Artificial Sequence: Synthetic oligonucleotide
gagccacugcaacaaaaug

SEQ ID NO: 1742789 - RNA, 19 nt, Artificial Sequence
  Description of Artificial Sequence: Synthetic oligonucleotide
uauaaaccuggccuauauu

SEQ ID NO: 1742790 - RNA, 19 nt, Artificial Sequence
  Description of Artificial Sequence: Synthetic oligonucleotide
acgaccuggaaaacuaguc

SEQ ID NO: 1742791 - RNA, 19 nt, Artificial Sequence
  Description of Artificial Sequence: Synthetic oligonucleotide
ucgcgggcaaacacgaacu

SEQ ID NO: 1742792 - RNA, 19 nt, Artificial Sequence
  Description of Artificial Sequence: Synthetic oligonucleotide
uucgguucgacugggcagc

SEQ ID NO: 1742793 - RNA, 19 nt, Artificial Sequence
  Description of Artificial Sequence: Synthetic oligonucleotide
aaaauggugcucaucuauu

SEQ ID NO: 1742794 - RNA, 19 nt, Artificial Sequence
  Description of Artificial Sequence: Synthetic oligonucleotide
acuugguaccauuucgaau

SEQ ID NO: 1742795 - RNA, 19 nt, Artificial Sequence
  Description of Artificial Sequence: Synthetic oligonucleotide
aacaaacguguuuccuuau

SEQ ID NO: 1742796 - RNA, 19 nt, Artificial Sequence
  Description of Artificial Sequence: Synthetic oligonucleotide
gauucuaucaugacuuggu

SEQ ID NO: 1742797 - RNA, 19 nt, Artificial Sequence
  Description of Artificial Sequence: Synthetic oligonucleotide
uucaaugcccaaugacggu

SEQ ID NO: 1742798 - RNA, 19 nt, Artificial Sequence
  Description of Artificial Sequence: Synthetic oligonucleotide
uaaggauggugaacugccu

SEQ ID NO: 1742799 - RNA, 19 nt, Artificial Sequence
  Description of Artificial Sequence: Synthetic oligonucleotide
ggagauauagcaaauucaa

SEQ ID NO: 1742800 - RNA, 19 nt, Artificial Sequence
  Description of Artificial Sequence: Synthetic oligonucleotide
ccauauagcagauucucuc

SEQ ID NO: 1742801 - RNA, 19 nt, Artificial Sequence
  Description of Artificial Sequence: Synthetic oligonucleotide
guuuccuaagagccacugc

SEQ ID NO: 1742802 - RNA, 19 nt, Artificial Sequence
  Description of Artificial Sequence: Synthetic oligonucleotide
auucuggaauugaaccacg

SEQ ID NO: 1742803 - RNA, 19 nt, Artificial Sequence
  Description of Artificial Sequence: Synthetic oligonucleotide
auucuaucaugacuuggua

SEQ ID NO: 1742804 - RNA, 19 nt, Artificial Sequence
  Description of Artificial Sequence: Synthetic oligonucleotide
uucaaguuuaauggagaua

SEQ ID NO: 1742805 - RNA, 19 nt, Artificial Sequence
  Description of Artificial Sequence: Synthetic oligonucleotide
ggcuggaucgaccgcagcg

SEQ ID NO: 1742806 - RNA, 19 nt, Artificial Sequence
  Description of Artificial Sequence: Synthetic oligonucleotide
ucaaugcccaaugacggua

SEQ ID NO: 1742807 - RNA, 19 nt, Artificial Sequence
  Description of Artificial Sequence: Synthetic oligonucleotide
uuugcagacgaauguuauu

SEQ ID NO: 1742808 - RNA, 19 nt, Artificial Sequence
  Description of Artificial Sequence: Synthetic oligonucleotide
guuuagaaucaucuugaua

SEQ ID NO: 1742809 - RNA, 19 nt, Artificial Sequence
  Description of Artificial Sequence: Synthetic oligonucleotide
ugcaacuaacuuccuuauc

SEQ ID NO: 1742810 - RNA, 19 nt, Artificial Sequence
  Description of Artificial Sequence: Synthetic oligonucleotide
ucaagucgaugcauuucaa

SEQ ID NO: 1742811 - RNA, 19 nt, Artificial Sequence
  Description of Artificial Sequence: Synthetic oligonucleotide
accacauccagcauuuuau

SEQ ID NO: 1742812 - RNA, 19 nt, Artificial Sequence
  Description of Artificial Sequence: Synthetic oligonucleotide
augcguuccuucuccucgg

SEQ ID NO: 1742813 - RNA, 19 nt, Artificial Sequence
  Description of Artificial Sequence: Synthetic oligonucleotide
uuauuccaagggauauuua

SEQ ID NO: 1742814 - RNA, 19 nt, Artificial Sequence
  Description of Artificial Sequence: Synthetic oligonucleotide
ggauucuaucaugacuugg

SEQ ID NO: 1742815 - RNA, 19 nt, Artificial Sequence
  Description of Artificial Sequence: Synthetic oligonucleotide
aaccuggccuauauucaag

SEQ ID NO: 1742816 - RNA, 19 nt, Artificial Sequence
  Description of Artificial Sequence: Synthetic oligonucleotide
uugguaccauuucgaauaa

SEQ ID NO: 1742817 - RNA, 19 nt, Artificial Sequence
  Description of Artificial Sequence: Synthetic oligonucleotide
cauuucgaauaagaauuuc

SEQ ID NO: 1742818 - RNA, 19 nt, Artificial Sequence
  Description of Artificial Sequence: Synthetic oligonucleotide
gucgcgggcaaacacgaac

SEQ ID NO: 1742819 - RNA, 19 nt, Artificial Sequence
  Description of Artificial Sequence: Synthetic oligonucleotide
auccaucagguuuccuaag

SEQ ID NO: 1742820 - RNA, 19 nt, Artificial Sequence
  Description of Artificial Sequence: Synthetic oligonucleotide
ucagacgaccagccagggc

SEQ ID NO: 1742821 - RNA, 19 nt, Artificial Sequence
  Description of Artificial Sequence: Synthetic oligonucleotide
cagguuuccuaagagccac

SEQ ID NO: 1742822 - RNA, 19 nt, Artificial Sequence
  Description of Artificial Sequence: Synthetic oligonucleotide
augguaacuuagcaucuua

SEQ ID NO: 1742823 - RNA, 19 nt, Artificial Sequence
  Description of Artificial Sequence: Synthetic oligonucleotide
gagaaggcccagcgaacgc

SEQ ID NO: 1742824 - RNA, 19 nt, Artificial Sequence
  Description of Artificial Sequence: Synthetic oligonucleotide
gucuagauccaucagguuu

SEQ ID NO: 1742825 - RNA, 19 nt, Artificial Sequence
  Description of Artificial Sequence: Synthetic oligonucleotide
uuaaaagcauuugggucuu

SEQ ID NO: 1742826 - RNA, 19 nt, Artificial Sequence
  Description of Artificial Sequence: Synthetic oligonucleotide
acaaacguguuuccuuaua

SEQ ID NO: 1742827 - RNA, 19 nt, Artificial Sequence
  Description of Artificial Sequence: Synthetic oligonucleotide
uggucggcacgaugcacag

SEQ ID NO: 1742828 - RNA, 19 nt, Artificial Sequence
  Description of Artificial Sequence: Synthetic oligonucleotide
acaaaauggugcucaucua

SEQ ID NO: 1742829 - RNA, 19 nt, Artificial Sequence
  Description of Artificial Sequence: Synthetic oligonucleotide
cuggaaaucugcucuuuaa

SEQ ID NO: 1742830 - RNA, 19 nt, Artificial Sequence
  Description of Artificial Sequence: Synthetic oligonucleotide
gucauaggaauagccgaug

SEQ ID NO: 1742831 - RNA, 19 nt, Artificial Sequence
  Description of Artificial Sequence: Synthetic oligonucleotide
guaccauuucgaauaagaa

SEQ ID NO: 1742832 - RNA, 19 nt, Artificial Sequence
  Description of Artificial Sequence: Synthetic oligonucleotide
uguuauuccaagggauauu

SEQ ID NO: 1742833 - RNA, 19 nt, Artificial Sequence
  Description of Artificial Sequence: Synthetic oligonucleotide
cagacgaauguuauuccaa

SEQ ID NO: 1742834 - RNA, 19 nt, Artificial Sequence
  Description of Artificial Sequence: Synthetic oligonucleotide
cauucgguucgacugggca

SEQ ID NO: 1742835 - RNA, 19 nt, Artificial Sequence
  Description of Artificial Sequence: Synthetic oligonucleotide
aaugcccaaugacgguaaa

SEQ ID NO: 1742836 - RNA, 19 nt, Artificial Sequence
  Description of Artificial Sequence: Synthetic oligonucleotide
gaauagccgaugcuaucaa

SEQ ID NO: 1742837 - RNA, 19 nt, Artificial Sequence
  Description of Artificial Sequence: Synthetic oligonucleotide
ggaauagccgaugcuauca

SEQ ID NO: 1742838 - RNA, 19 nt, Artificial Sequence
  Description of Artificial Sequence: Synthetic oligonucleotide
cauccagcauuuuauuuua

SEQ ID NO: 1742839 - RNA, 19 nt, Artificial Sequence
  Description of Artificial Sequence: Synthetic oligonucleotide
accauauagcagauucucu

SEQ ID NO: 1742840 - RNA, 19 nt, Artificial Sequence
  Description of Artificial Sequence: Synthetic oligonucleotide
caaaauggugcucaucuau

SEQ ID NO: 1742841 - RNA, 19 nt, Artificial Sequence
  Description of Artificial Sequence: Synthetic oligonucleotide
cuggaucgaccgcagcgcc

SEQ ID NO: 1742842 - RNA, 19 nt, Artificial Sequence
  Description of Artificial Sequence: Synthetic oligonucleotide
guccccuugaugugagaug

SEQ ID NO: 1742843 - RNA, 19 nt, Artificial Sequence
  Description of Artificial Sequence: Synthetic oligonucleotide
gaccuggaaaacuagucuu

SEQ ID NO: 1742844 - RNA, 19 nt, Artificial Sequence
  Description of Artificial Sequence: Synthetic oligonucleotide
ucgggcuggaucgaccgca

SEQ ID NO: 1742845 - RNA, 19 nt, Artificial Sequence
  Description of Artificial Sequence: Synthetic oligonucleotide
uggccgaugcguuccuucu

SEQ ID NO: 1742846 - RNA, 19 nt, Artificial Sequence
  Description of Artificial Sequence: Synthetic oligonucleotide
caagucgaugcauuucaaa

SEQ ID NO: 1742847 - RNA, 19 nt, Artificial Sequence
  Description of Artificial Sequence: Synthetic oligonucleotide
uggaucgaccgcagcgcca

SEQ ID NO: 1742848 - RNA, 19 nt, Artificial Sequence
  Description of Artificial Sequence: Synthetic oligonucleotide
guuauuccaagggauauuu

SEQ ID NO: 1742849 - RNA, 19 nt, Artificial Sequence
  Description of Artificial Sequence: Synthetic oligonucleotide
ggaauugaaccacgaccug

SEQ ID NO: 1742850 - RNA, 19 nt, Artificial Sequence
  Description of Artificial Sequence: Synthetic oligonucleotide
cgggcaaacacgaacuggc

SEQ ID NO: 1742851 - RNA, 19 nt, Artificial Sequence
  Description of Artificial Sequence: Synthetic oligonucleotide
gaaggauccucagguguca

SEQ ID NO: 1742852 - RNA, 19 nt, Artificial Sequence
  Description of Artificial Sequence: Synthetic oligonucleotide
aguccccuugaugugagau

SEQ ID NO: 1742853 - RNA, 19 nt, Artificial Sequence
  Description of Artificial Sequence: Synthetic oligonucleotide
uaucaugacuugguaccau

SEQ ID NO: 1742854 - RNA, 19 nt, Artificial Sequence
  Description of Artificial Sequence: Synthetic oligonucleotide
auaguccccuugaugugag

SEQ ID NO: 1742855 - RNA, 19 nt, Artificial Sequence
  Description of Artificial Sequence: Synthetic oligonucleotide
aaauugggauagggauuca

SEQ ID NO: 1742856 - RNA, 19 nt, Artificial Sequence
  Description of Artificial Sequence: Synthetic oligonucleotide
gcacuacaaccauauagca

SEQ ID NO: 1742857 - RNA, 19 nt, Artificial Sequence
  Description of Artificial Sequence: Synthetic oligonucleotide
ugucuagauccaucagguu

SEQ ID NO: 1742858 - RNA, 19 nt, Artificial Sequence
  Description of Artificial Sequence: Synthetic oligonucleotide
cuucuccucgggcuggauc

SEQ ID NO: 1742859 - RNA, 19 nt, Artificial Sequence
  Description of Artificial Sequence: Synthetic oligonucleotide
uggcgucgcgggcaaacac

SEQ ID NO: 1742860 - RNA, 19 nt, Artificial Sequence
  Description of Artificial Sequence: Synthetic oligonucleotide
gaacgcccuccauggucgg

SEQ ID NO: 1742861 - RNA, 19 nt, Artificial Sequence
  Description of Artificial Sequence: Synthetic oligonucleotide
aacgagucuuuggcaagaa

SEQ ID NO: 1742862 - RNA, 19 nt, Artificial Sequence
  Description of Artificial Sequence: Synthetic oligonucleotide
cuauuuugcuuuccucaaa

SEQ ID NO: 1742863 - RNA, 19 nt, Artificial Sequence
  Description of Artificial Sequence: Synthetic oligonucleotide
auaccaacuugcagcucag

SEQ ID NO: 1742864 - RNA, 19 nt, Artificial Sequence
  Description of Artificial Sequence: Synthetic oligonucleotide
cuaucaugacuugguacca

SEQ ID NO: 1742865 - RNA, 19 nt, Artificial Sequence
  Description of Artificial Sequence: Synthetic oligonucleotide
accacgaccuggaaaacua

SEQ ID NO: 1742866 - RNA, 19 nt, Artificial Sequence
  Description of Artificial Sequence: Synthetic oligonucleotide
gccgaugcguuccuucucc

SEQ ID NO: 1742867 - RNA, 19 nt, Artificial Sequence
  Description of Artificial Sequence: Synthetic oligonucleotide
cuggccgaugcguuccuuc

SEQ ID NO: 1742868 - RNA, 19 nt, Artificial Sequence
  Description of Artificial Sequence: Synthetic oligonucleotide
cgaacgcccuccauggucg

SEQ ID NO: 1742869 - RNA, 19 nt, Artificial Sequence
  Description of Artificial Sequence: Synthetic oligonucleotide
gccgaugcuaucaaaucac

SEQ ID NO: 1742870 - RNA, 19 nt, Artificial Sequence
  Description of Artificial Sequence: Synthetic oligonucleotide
cuaucaaaucacugaaguu

SEQ ID NO: 1742871 - RNA, 19 nt, Artificial Sequence
  Description of Artificial Sequence: Synthetic oligonucleotide
ccaguugaguccauucauc

SEQ ID NO: 1742872 - RNA, 19 nt, Artificial Sequence
  Description of Artificial Sequence: Synthetic oligonucleotide
agacgaccagccagggccg

SEQ ID NO: 1742873 - RNA, 19 nt, Artificial Sequence
  Description of Artificial Sequence: Synthetic oligonucleotide
ggcgucgcgggcaaacacg

SEQ ID NO: 1742874 - RNA, 19 nt, Artificial Sequence
  Description of Artificial Sequence: Synthetic oligonucleotide
ggaucgaccgcagcgccag

SEQ ID NO: 1742875 - RNA, 19 nt, Artificial Sequence
  Description of Artificial Sequence: Synthetic oligonucleotide
caaugacgguaaaacauau

SEQ ID NO: 1742876 - RNA, 19 nt, Artificial Sequence
  Description of Artificial Sequence: Synthetic oligonucleotide
auccagcauuuuauuuuag

SEQ ID NO: 1742877 - RNA, 19 nt, Artificial Sequence
  Description of Artificial Sequence: Synthetic oligonucleotide
cauggucggcacgaugcac

SEQ ID NO: 1742878 - RNA, 19 nt, Artificial Sequence
  Description of Artificial Sequence: Synthetic oligonucleotide
caaugcccaaugacgguaa

SEQ ID NO: 1742879 - RNA, 19 nt, Artificial Sequence
  Description of Artificial Sequence: Synthetic oligonucleotide
ccucgggcuggaucgaccg

SEQ ID NO: 1742880 - RNA, 19 nt, Artificial Sequence
  Description of Artificial Sequence: Synthetic oligonucleotide
gcgggcaaacacgaacugg

SEQ ID NO: 1742881 - RNA, 19 nt, Artificial Sequence
  Description of Artificial Sequence: Synthetic oligonucleotide
cuggccuauauucaaguuu

SEQ ID NO: 1742882 - RNA, 19 nt, Artificial Sequence
  Description of Artificial Sequence: Synthetic oligonucleotide
cgaugcuaucaaaucacug

SEQ ID NO: 1742883 - RNA, 19 nt, Artificial Sequence
  Description of Artificial Sequence: Synthetic oligonucleotide
augcuugccuucagcaagu

SEQ ID NO: 1742884 - RNA, 19 nt, Artificial Sequence
  Description of Artificial Sequence: Synthetic oligonucleotide
gcccaaugacgguaaaaca

SEQ ID NO: 1742885 - RNA, 19 nt, Artificial Sequence
  Description of Artificial Sequence: Synthetic oligonucleotide
ccggcuuuccuuuugaagu

SEQ ID NO: 1742886 - RNA, 19 nt, Artificial Sequence
  Description of Artificial Sequence: Synthetic oligonucleotide
acgaccagccagggccgcc

SEQ ID NO: 1742887 - RNA, 19 nt, Artificial Sequence
  Description of Artificial Sequence: Synthetic oligonucleotide
uuggcgucgcgggcaaaca

SEQ ID NO: 1742888 - RNA, 19 nt, Artificial Sequence
  Description of Artificial Sequence: Synthetic oligonucleotide
cagccucuuggccgggagc

SEQ ID NO: 1742889 - RNA, 19 nt, Artificial Sequence
  Description of Artificial Sequence: Synthetic oligonucleotide
auauccaguugaguccauu

SEQ ID NO: 1742890 - RNA, 19 nt, Artificial Sequence
  Description of Artificial Sequence: Synthetic oligonucleotide
cccuugaugugagauguug

SEQ ID NO: 1742891 - RNA, 19 nt, Artificial Sequence
  Description of Artificial Sequence: Synthetic oligonucleotide
aucgaccgcagcgccagca

SEQ ID NO: 1742892 - RNA, 19 nt, Artificial Sequence
  Description of Artificial Sequence: Synthetic oligonucleotide
gacaugcacuacaaccaua

SEQ ID NO: 1742893 - RNA, 19 nt, Artificial Sequence
  Description of Artificial Sequence: Synthetic oligonucleotide
caaguuuaauggagauaua

SEQ ID NO: 1742894 - RNA, 19 nt, Artificial Sequence
  Description of Artificial Sequence: Synthetic oligonucleotide
caacgagucuuuggcaaga

SEQ ID NO: 1742895 - RNA, 19 nt, Artificial Sequence
  Description of Artificial Sequence: Synthetic oligonucleotide
augcccaaugacgguaaaa

SEQ ID NO: 1742896 - RNA, 19 nt, Artificial Sequence
  Description of Artificial Sequence: Synthetic oligonucleotide
cuuauaaaccuggccuaua

SEQ ID NO: 1742897 - RNA, 19 nt, Artificial Sequence
  Description of Artificial Sequence: Synthetic oligonucleotide
uaguccccuugaugugaga

SEQ ID NO: 1742898 - RNA, 19 nt, Artificial Sequence
  Description of Artificial Sequence: Synthetic oligonucleotide
gcgaacgcccuccaugguc

SEQ ID NO: 1742899 - RNA, 19 nt, Artificial Sequence
  Description of Artificial Sequence: Synthetic oligonucleotide
agcgaacgcccuccauggu

SEQ ID NO: 1742900 - RNA, 19 nt, Artificial Sequence
  Description of Artificial Sequence: Synthetic oligonucleotide
cacgaccuggaaaacuagu

SEQ ID NO: 1742901 - RNA, 19 nt, Artificial Sequence
  Description of Artificial Sequence: Synthetic oligonucleotide
gccauucgguucgacuggg

SEQ ID NO: 1742902 - RNA, 19 nt, Artificial Sequence
  Description of Artificial Sequence: Synthetic oligonucleotide
cugcaacaaaauggugcuc

SEQ ID NO: 1742903 - RNA, 19 nt, Artificial Sequence
  Description of Artificial Sequence: Synthetic oligonucleotide
ccacgaccuggaaaacuag

SEQ ID NO: 1742904 - RNA, 19 nt, Artificial Sequence
  Description of Artificial Sequence: Synthetic oligonucleotide
gaugguaacuuagcaucuu

SEQ ID NO: 1742905 - RNA, 19 nt, Artificial Sequence
  Description of Artificial Sequence: Synthetic oligonucleotide
gggcaaacacgaacuggcc

SEQ ID NO: 1742906 - RNA, 19 nt, Artificial Sequence
  Description of Artificial Sequence: Synthetic oligonucleotide
cugcaacuaacuuccuuau

SEQ ID NO: 1742907 - RNA, 19 nt, Artificial Sequence
  Description of Artificial Sequence: Synthetic oligonucleotide
gggauucaacgagucuuug

SEQ ID NO: 1742908 - RNA, 19 nt, Artificial Sequence
  Description of Artificial Sequence: Synthetic oligonucleotide
ucgguucgacugggcagcc

SEQ ID NO: 1742909 - RNA, 19 nt, Artificial Sequence
  Description of Artificial Sequence: Synthetic oligonucleotide
gaucgaccgcagcgccagc

SEQ ID NO: 1742910 - RNA, 19 nt, Artificial Sequence
  Description of Artificial Sequence: Synthetic oligonucleotide
gguuuagaaucaucuugau

SEQ ID NO: 1742911 - RNA, 19 nt, Artificial Sequence
  Description of Artificial Sequence: Synthetic oligonucleotide
acgaacuggccgaugcguu

SEQ ID NO: 1742912 - RNA, 19 nt, Artificial Sequence
  Description of Artificial Sequence: Synthetic oligonucleotide
cuggaaaacuagucuucau

SEQ ID NO: 1742913 - RNA, 19 nt, Artificial Sequence
  Description of Artificial Sequence: Synthetic oligonucleotide
ggugcucaucuauuuugcu

SEQ ID NO: 1742914 - RNA, 19 nt, Artificial Sequence
  Description of Artificial Sequence: Synthetic oligonucleotide
caugcacuacaaccauaua

SEQ ID NO: 1742915 - RNA, 19 nt, Artificial Sequence
  Description of Artificial Sequence: Synthetic oligonucleotide
gacgaccagccagggccgc

SEQ ID NO: 1742916 - RNA, 19 nt, Artificial Sequence
  Description of Artificial Sequence: Synthetic oligonucleotide
agguuuccuaagagccacu

SEQ ID NO: 1742917 - RNA, 19 nt, Artificial Sequence
  Description of Artificial Sequence: Synthetic oligonucleotide
uaaaagcauuugggucuuu

SEQ ID NO: 1742918 - RNA, 19 nt, Artificial Sequence
  Description of Artificial Sequence: Synthetic oligonucleotide
ggcccagcgaacgcccucc

SEQ ID NO: 1742919 - RNA, 19 nt, Artificial Sequence
  Description of Artificial Sequence: Synthetic oligonucleotide
ugcuugccuucagcaaguu

SEQ ID NO: 1742920 - RNA, 19 nt, Artificial Sequence
  Description of Artificial Sequence: Synthetic oligonucleotide
cgaacuggccgaugcguuc

SEQ ID NO: 1742921 - RNA, 19 nt, Artificial Sequence
  Description of Artificial Sequence: Synthetic oligonucleotide
ccauuucgaauaagaauuu

SEQ ID NO: 1742922 - RNA, 19 nt, Artificial Sequence
  Description of Artificial Sequence: Synthetic oligonucleotide
gggcuggaucgaccgcagc

SEQ ID NO: 1742923 - RNA, 19 nt, Artificial Sequence
  Description of Artificial Sequence: Synthetic oligonucleotide
gcgucgcgggcaaacacga

SEQ ID NO: 1742924 - RNA, 19 nt, Artificial Sequence
  Description of Artificial Sequence: Synthetic oligonucleotide
ccgaugcuaucaaaucacu

SEQ ID NO: 1742925 - RNA, 19 nt, Artificial Sequence
  Description of Artificial Sequence: Synthetic oligonucleotide
ccauggucggcacgaugca

SEQ ID NO: 1742926 - RNA, 19 nt, Artificial Sequence
  Description of Artificial Sequence: Synthetic oligonucleotide
cggcacgaugcacagccuc

SEQ ID NO: 1742927 - RNA, 19 nt, Artificial Sequence
  Description of Artificial Sequence: Synthetic oligonucleotide
ggccuauauucaaguuuaa

SEQ ID NO: 1742928 - RNA, 19 nt, Artificial Sequence
  Description of Artificial Sequence: Synthetic oligonucleotide
cgggcuggaucgaccgcag

SEQ ID NO: 1742929 - RNA, 19 nt, Artificial Sequence
  Description of Artificial Sequence: Synthetic oligonucleotide
ccgccuuggcgucgcgggc

SEQ ID NO: 1742930 - RNA, 19 nt, Artificial Sequence
  Description of Artificial Sequence: Synthetic oligonucleotide
cacugaaguuaaggauggu

SEQ ID NO: 1742931 - RNA, 19 nt, Artificial Sequence
  Description of Artificial Sequence: Synthetic oligonucleotide
gccuuggcgucgcgggcaa

SEQ ID NO: 1742932 - RNA, 19 nt, Artificial Sequence
  Description of Artificial Sequence: Synthetic oligonucleotide
gcccagcgaacgcccucca

SEQ ID NO: 1742933 - RNA, 19 nt, Artificial Sequence
  Description of Artificial Sequence: Synthetic oligonucleotide
ccgaugcguuccuucuccu

SEQ ID NO: 1742934 - RNA, 19 nt, Artificial Sequence
  Description of Artificial Sequence: Synthetic oligonucleotide
cgucgcgggcaaacacgaa

SEQ ID NO: 1742935 - RNA, 19 nt, Artificial Sequence
  Description of Artificial Sequence: Synthetic oligonucleotide
cccagcgaacgcccuccau

SEQ ID NO: 1742936 - RNA, 19 nt, Artificial Sequence
  Description of Artificial Sequence: Synthetic oligonucleotide
cgguucgacugggcagcca

SEQ ID NO: 1742937 - RNA, 19 nt, Artificial Sequence
  Description of Artificial Sequence: Synthetic oligonucleotide
ccuuggcgucgcgggcaaa

SEQ ID NO: 1742938 - RNA, 19 nt, Artificial Sequence
  Description of Artificial Sequence: Synthetic oligonucleotide
aaacagauggacuuuaucc

SEQ ID NO: 1742939 - RNA, 19 nt, Artificial Sequence
  Description of Artificial Sequence: Synthetic oligonucleotide
aaagcuauaacccgguaac

SEQ ID NO: 1742940 - RNA, 19 nt, Artificial Sequence
  Description of Artificial Sequence: Synthetic oligonucleotide
  modified_base (8)..(8): a, c, u, g, unknown or other
  modified_base (17)..(17): a, c, u, g, unknown or other
aacccaanaaccugganag

SEQ ID NO: 1742941 - RNA, 19 nt, Artificial Sequence
  Description of Artificial Sequence: Synthetic oligonucleotide
ugaauuuugacaauucaga

SEQ ID NO: 1742942 - RNA, 19 nt, Artificial Sequence
  Description of Artificial Sequence: Synthetic oligonucleotide
ucagaguuagucuugaagc

SEQ ID NO: 1742943 - RNA, 19 nt, Artificial Sequence
  Description of Artificial Sequence: Synthetic oligonucleotide
acagaauucaagauggucc

SEQ ID NO: 1742944 - RNA, 19 nt, Artificial Sequence
  Description of Artificial Sequence: Synthetic oligonucleotide
aacacaacaggggagaagg

SEQ ID NO: 1742945 - RNA, 19 nt, Artificial Sequence
  Description of Artificial Sequence: Synthetic oligonucleotide
auacugcaaagcuauaacc

SEQ ID NO: 1742946 - RNA, 19 nt, Artificial Sequence
  Description of Artificial Sequence: Synthetic oligonucleotide
  modified_base (3)..(3): a, c, u, g, unknown or other
ganagggacagucacacug

SEQ ID NO: 1742947 - RNA, 19 nt, Artificial Sequence
  Description of Artificial Sequence: Synthetic oligonucleotide
ucacaauucuuaaaauggg

SEQ ID NO: 1742948 - RNA, 19 nt, Artificial Sequence
  Description of Artificial Sequence: Synthetic oligonucleotide
uaaaagauugaccucugca

SEQ ID NO: 1742949 - RNA, 19 nt, Artificial Sequence
  Description of Artificial Sequence: Synthetic oligonucleotide
  modified_base (9)..(9): a, c, u, g, unknown or other
  modified_base (18)..(18): a, c, u, g, unknown or other
aaacccaanaaccuggana

SEQ ID NO: 1742950 - RNA, 19 nt, Artificial Sequence
  Description of Artificial Sequence: Synthetic oligonucleotide
ugacaaugcacucugguca

SEQ ID NO: 1742951 - RNA, 19 nt, Artificial Sequence
  Description of Artificial Sequence: Synthetic oligonucleotide
uacugcaaagcuauaaccc

SEQ ID NO: 1742952 - RNA, 19 nt, Artificial Sequence
  Description of Artificial Sequence: Synthetic oligonucleotide
aacuuguacuucuaaacca

SEQ ID NO: 1742953 - RNA, 19 nt, Artificial Sequence
  Description of Artificial Sequence: Synthetic oligonucleotide
aaagauugaccucugcacu

SEQ ID NO: 1742954 - RNA, 19 nt, Artificial Sequence
  Description of Artificial Sequence: Synthetic oligonucleotide
aguguauucagcaaauuuc

SEQ ID NO: 1742955 - RNA, 19 nt, Artificial Sequence
  Description of Artificial Sequence: Synthetic oligonucleotide
ugcacauaaaagauugacc

SEQ ID NO: 1742956 - RNA, 19 nt, Artificial Sequence
  Description of Artificial Sequence: Synthetic oligonucleotide
  modified_base (2)..(2): a, c, u, g, unknown or other
  modified_base (11)..(11): a, c, u, g, unknown or other
anaaccugganagggacag

SEQ ID NO: 1742957 - RNA, 19 nt, Artificial Sequence
  Description of Artificial Sequence: Synthetic oligonucleotide
aacugauuguacaagauga

SEQ ID NO: 1742958 - RNA, 19 nt, Artificial Sequence
  Description of Artificial Sequence: Synthetic oligonucleotide
uuaggguacaguuuguaca

SEQ ID NO: 1742959 - RNA, 19 nt, Artificial Sequence
  Description of Artificial Sequence: Synthetic oligonucleotide
aagauugaccucugcacuc

SEQ ID NO: 1742960 - RNA, 19 nt, Artificial Sequence
  Description of Artificial Sequence: Synthetic oligonucleotide
uuaaggugagcucuccggg

SEQ ID NO: 1742961 - RNA, 19 nt, Artificial Sequence
  Description of Artificial Sequence: Synthetic oligonucleotide
uuauccaacuguaaguggu

SEQ ID NO: 1742962 - RNA, 19 nt, Artificial Sequence
  Description of Artificial Sequence: Synthetic oligonucleotide
acuguaaguggucuaaaag

SEQ ID NO: 1742963 - RNA, 19 nt, Artificial Sequence
  Description of Artificial Sequence: Synthetic oligonucleotide
auuaggguacaguuuguac

SEQ ID NO: 1742964 - RNA, 19 nt, Artificial Sequence
  Description of Artificial Sequence: Synthetic oligonucleotide
aaacuggauacugcaaagc

SEQ ID NO: 1742965 - RNA, 19 nt, Artificial Sequence
  Description of Artificial Sequence: Synthetic oligonucleotide
uuccaaaacagugaggacc

SEQ ID NO: 1742966 - RNA, 19 nt, Artificial Sequence
  Description of Artificial Sequence: Synthetic oligonucleotide
ugcccgaugaaccugaacu

SEQ ID NO: 1742967 - RNA, 19 nt, Artificial Sequence
  Description of Artificial Sequence: Synthetic oligonucleotide
uuugacaauucagaguuag

SEQ ID NO: 1742968 - RNA, 19 nt, Artificial Sequence
  Description of Artificial Sequence: Synthetic oligonucleotide
aaaccucccaaagacgccc

SEQ ID NO: 1742969 - RNA, 19 nt, Artificial Sequence
  Description of Artificial Sequence: Synthetic oligonucleotide
aacuggauacugcaaagcu

SEQ ID NO: 1742970 - RNA, 19 nt, Artificial Sequence
  Description of Artificial Sequence: Synthetic oligonucleotide
uuuauccaacuguaagugg

SEQ ID NO: 1742971 - RNA, 19 nt, Artificial Sequence
  Description of Artificial Sequence: Synthetic oligonucleotide
aaguuguucaaauuacaaa

SEQ ID NO: 1742972 - RNA, 19 nt, Artificial Sequence
  Description of Artificial Sequence: Synthetic oligonucleotide
gauggucccaauaaacugg

SEQ ID NO: 1742973 - RNA, 19 nt, Artificial Sequence
  Description of Artificial Sequence: Synthetic oligonucleotide
auaaaagauugaccucugc

SEQ ID NO: 1742974 - RNA, 19 nt, Artificial Sequence
  Description of Artificial Sequence: Synthetic oligonucleotide
ugagguuccacauaugaau

SEQ ID NO: 1742975 - RNA, 19 nt, Artificial Sequence
  Description of Artificial Sequence: Synthetic oligonucleotide
cuuaaggugagcucuccgg

SEQ ID NO: 1742976 - RNA, 19 nt, Artificial Sequence
  Description of Artificial Sequence: Synthetic oligonucleotide
agacgccccaaacagaugg

SEQ ID NO: 1742977 - RNA, 19 nt, Artificial Sequence
  Description of Artificial Sequence: Synthetic oligonucleotide
uguaaguggucuaaaaguu

SEQ ID NO: 1742978 - RNA, 19 nt, Artificial Sequence
  Description of Artificial Sequence: Synthetic oligonucleotide
auuugguuccaugaucugc

SEQ ID NO: 1742979 - RNA, 19 nt, Artificial Sequence
  Description of Artificial Sequence: Synthetic oligonucleotide
ucgucaucuacgauuaucu

SEQ ID NO: 1742980 - RNA, 19 nt, Artificial Sequence
  Description of Artificial Sequence: Synthetic oligonucleotide
gaugucccgaauuuuauga

SEQ ID NO: 1742981 - RNA, 19 nt, Artificial Sequence
  Description of Artificial Sequence: Synthetic oligonucleotide
ugucccgaauuuuaugagg

SEQ ID NO: 1742982 - RNA, 19 nt, Artificial Sequence
  Description of Artificial Sequence: Synthetic oligonucleotide
ucgaaagcuccaucuaugg

SEQ ID NO: 1742983 - RNA, 19 nt, Artificial Sequence
  Description of Artificial Sequence: Synthetic oligonucleotide
ugcacuccugcauagguag

SEQ ID NO: 1742984 - RNA, 19 nt, Artificial Sequence
  Description of Artificial Sequence: Synthetic oligonucleotide
agcuauaacccgguaaccc

SEQ ID NO: 1742985 - RNA, 19 nt, Artificial Sequence
  Description of Artificial Sequence: Synthetic oligonucleotide
cacguuugguugaagauag

SEQ ID NO: 1742986 - RNA, 19 nt, Artificial Sequence
  Description of Artificial Sequence: Synthetic oligonucleotide
cacauaugaauuuugacaa

SEQ ID NO: 1742987 - RNA, 19 nt, Artificial Sequence
  Description of Artificial Sequence: Synthetic oligonucleotide
gaagauagaugugucacug

SEQ ID NO: 1742988 - RNA, 19 nt, Artificial Sequence
  Description of Artificial Sequence: Synthetic oligonucleotide
auaaacuggauacugcaaa

SEQ ID NO: 1742989 - RNA, 19 nt, Artificial Sequence
  Description of Artificial Sequence: Synthetic oligonucleotide
auggcagcguauuugguuc

SEQ ID NO: 1742990 - RNA, 19 nt, Artificial Sequence
  Description of Artificial Sequence: Synthetic oligonucleotide
uugaagauagaugugucac

SEQ ID NO: 1742991 - RNA, 19 nt, Artificial Sequence
  Description of Artificial Sequence: Synthetic oligonucleotide
  modified_base (4)..(4): a, c, u, g, unknown or other
  modified_base (13)..(13): a, c, u, g, unknown or other
caanaaccugganagggac

SEQ ID NO: 1742992 - RNA, 19 nt, Artificial Sequence
  Description of Artificial Sequence: Synthetic oligonucleotide
ugacaauucagaguuaguc

SEQ ID NO: 1742993 - RNA, 19 nt, Artificial Sequence
  Description of Artificial Sequence: Synthetic oligonucleotide
caagauggucccaauaaac

SEQ ID NO: 1742994 - RNA, 19 nt, Artificial Sequence
  Description of Artificial Sequence: Synthetic oligonucleotide
ucuuaaggugagcucuccg

SEQ ID NO: 1742995 - RNA, 19 nt, Artificial Sequence
  Description of Artificial Sequence: Synthetic oligonucleotide
cuuuauccaacuguaagug

SEQ ID NO: 1742996 - RNA, 19 nt, Artificial Sequence
  Description of Artificial Sequence: Synthetic oligonucleotide
  modified_base (2)..(2): a, c, u, g, unknown or other
anagggacagucacacugg

SEQ ID NO: 1742997 - RNA, 19 nt, Artificial Sequence
  Description of Artificial Sequence: Synthetic oligonucleotide
cauagguaggggaaauugc

SEQ ID NO: 1742998 - RNA, 19 nt, Artificial Sequence
  Description of Artificial Sequence: Synthetic oligonucleotide
aaaagcuguuugcagucca

SEQ ID NO: 1742999 - RNA, 19 nt, Artificial Sequence
  Description of Artificial Sequence: Synthetic oligonucleotide
aucuggagagacuuugauc

SEQ ID NO: 1743000 - RNA, 19 nt, Artificial Sequence
  Description of Artificial Sequence: Synthetic oligonucleotide
uaaguggucuaaaaguuuu

SEQ ID NO: 1743001 - RNA, 19 nt, Artificial Sequence
  Description of Artificial Sequence: Synthetic oligonucleotide
aaaguuguucaaauuacaa

SEQ ID NO: 1743002 - RNA, 19 nt, Artificial Sequence
  Description of Artificial Sequence: Synthetic oligonucleotide
aaaaccucccaaagacgcc

SEQ ID NO: 1743003 - RNA, 19 nt, Artificial Sequence
  Description of Artificial Sequence: Synthetic oligonucleotide
uuugacccaaacucucuag

SEQ ID NO: 1743004 - RNA, 19 nt, Artificial Sequence
  Description of Artificial Sequence: Synthetic oligonucleotide
  modified_base (9)..(9): a, c, u, g, unknown or other
aaccugganagggacaguc

SEQ ID NO: 1743005 - RNA, 19 nt, Artificial Sequence
  Description of Artificial Sequence: Synthetic oligonucleotide
cuacuuccaaaacagugag

SEQ ID NO: 1743006 - RNA, 19 nt, Artificial Sequence
  Description of Artificial Sequence: Synthetic oligonucleotide
aagcuauaacccgguaacc

SEQ ID NO: 1743007 - RNA, 19 nt, Artificial Sequence
  Description of Artificial Sequence: Synthetic oligonucleotide
ggaccagcgucauagagcg

SEQ ID NO: 1743008 - RNA, 19 nt, Artificial Sequence
  Description of Artificial Sequence: Synthetic oligonucleotide
gguagcaaaauuuucacaa

SEQ ID NO: 1743009 - RNA, 19 nt, Artificial Sequence
  Description of Artificial Sequence: Synthetic oligonucleotide
cagaguuagucuugaagcc

SEQ ID NO: 1743010 - RNA, 19 nt, Artificial Sequence
  Description of Artificial Sequence: Synthetic oligonucleotide
aagauggucccaauaaacu

SEQ ID NO: 1743011 - RNA, 19 nt, Artificial Sequence
  Description of Artificial Sequence: Synthetic oligonucleotide
aguccuacuuccaaaacag

SEQ ID NO: 1743012 - RNA, 19 nt, Artificial Sequence
  Description of Artificial Sequence: Synthetic oligonucleotide
uuccacauaugaauuuuga

SEQ ID NO: 1743013 - RNA, 19 nt, Artificial Sequence
  Description of Artificial Sequence: Synthetic oligonucleotide
aaggggaacuuguacuucu

SEQ ID NO: 1743014 - RNA, 19 nt, Artificial Sequence
  Description of Artificial Sequence: Synthetic oligonucleotide
aaaccaauuguaaucugga

SEQ ID NO: 1743015 - RNA, 19 nt, Artificial Sequence
  Description of Artificial Sequence: Synthetic oligonucleotide
agguaggggaaauugccuc

SEQ ID NO: 1743016 - RNA, 19 nt, Artificial Sequence
  Description of Artificial Sequence: Synthetic oligonucleotide
accagcgucauagagcgac

SEQ ID NO: 1743017 - RNA, 19 nt, Artificial Sequence
  Description of Artificial Sequence: Synthetic oligonucleotide
uccacauaugaauuuugac

SEQ ID NO: 1743018 - RNA, 19 nt, Artificial Sequence
  Description of Artificial Sequence: Synthetic oligonucleotide
auuuuaugagguuccacau

SEQ ID NO: 1743019 - RNA, 19 nt, Artificial Sequence
  Description of Artificial Sequence: Synthetic oligonucleotide
ggaacuuguacuucuaaac

SEQ ID NO: 1743020 - RNA, 19 nt, Artificial Sequence
  Description of Artificial Sequence: Synthetic oligonucleotide
ucagcgugucgaaagcucc

SEQ ID NO: 1743021 - RNA, 19 nt, Artificial Sequence
  Description of Artificial Sequence: Synthetic oligonucleotide
  modified_base (5)..(5): a, c, u, g, unknown or other
ugganagggacagucacac

SEQ ID NO: 1743022 - RNA, 19 nt, Artificial Sequence
  Description of Artificial Sequence: Synthetic oligonucleotide
cugcaaagcuauaacccgg

SEQ ID NO: 1743023 - RNA, 19 nt, Artificial Sequence
  Description of Artificial Sequence: Synthetic oligonucleotide
agggaguggacucuuggag

SEQ ID NO: 1743024 - RNA, 19 nt, Artificial Sequence
  Description of Artificial Sequence: Synthetic oligonucleotide
agcguauuugguuccauga

SEQ ID NO: 1743025 - RNA, 19 nt, Artificial Sequence
  Description of Artificial Sequence: Synthetic oligonucleotide
ggcauuaggguacaguuug

SEQ ID NO: 1743026 - RNA, 19 nt, Artificial Sequence
  Description of Artificial Sequence: Synthetic oligonucleotide
gaagucaauggcaucugcc

SEQ ID NO: 1743027 - RNA, 19 nt, Artificial Sequence
  Description of Artificial Sequence: Synthetic oligonucleotide
ugaagauagaugugucacu

SEQ ID NO: 1743028 - RNA, 19 nt, Artificial Sequence
  Description of Artificial Sequence: Synthetic oligonucleotide
gacucuuggagacuuguga

SEQ ID NO: 1743029 - RNA, 19 nt, Artificial Sequence
  Description of Artificial Sequence: Synthetic oligonucleotide
acuugugaguguauucagc

SEQ ID NO: 1743030 - RNA, 19 nt, Artificial Sequence
  Description of Artificial Sequence: Synthetic oligonucleotide
uuaaggggaacuuguacuu

SEQ ID NO: 1743031 - RNA, 19 nt, Artificial Sequence
  Description of Artificial Sequence: Synthetic oligonucleotide
  modified_base (3)..(3): a, c, u, g, unknown or other
  modified_base (12)..(12): a, c, u, g, unknown or other
aanaaccugganagggaca

SEQ ID NO: 1743032 - RNA, 19 nt, Artificial Sequence
  Description of Artificial Sequence: Synthetic oligonucleotide
aagauagaugugucacuga

SEQ ID NO: 1743033 - RNA, 19 nt, Artificial Sequence
  Description of Artificial Sequence: Synthetic oligonucleotide
uuuuaugagguuccacaua

SEQ ID NO: 1743034 - RNA, 19 nt, Artificial Sequence
  Description of Artificial Sequence: Synthetic oligonucleotide
agauugaccucugcacucc

SEQ ID NO: 1743035 - RNA, 19 nt, Artificial Sequence
  Description of Artificial Sequence: Synthetic oligonucleotide
uggaggugaacccugccgu

SEQ ID NO: 1743036 - RNA, 19 nt, Artificial Sequence
  Description of Artificial Sequence: Synthetic oligonucleotide
gacaauucagaguuagucu

SEQ ID NO: 1743037 - RNA, 19 nt, Artificial Sequence
  Description of Artificial Sequence: Synthetic oligonucleotide
uacaguuuguacauuucuu

SEQ ID NO: 1743038 - RNA, 19 nt, Artificial Sequence
  Description of Artificial Sequence: Synthetic oligonucleotide
guaaucuggagagacuuug

SEQ ID NO: 1743039 - RNA, 19 nt, Artificial Sequence
  Description of Artificial Sequence: Synthetic oligonucleotide
guuugguugaagauagaug

SEQ ID NO: 1743040 - RNA, 19 nt, Artificial Sequence
  Description of Artificial Sequence: Synthetic oligonucleotide
cagaggaaaaguucccaag

SEQ ID NO: 1743041 - RNA, 19 nt, Artificial Sequence
  Description of Artificial Sequence: Synthetic oligonucleotide
ucccaugaugagcagaaau

SEQ ID NO: 1743042 - RNA, 19 nt, Artificial Sequence
  Description of Artificial Sequence: Synthetic oligonucleotide
ucugccaucauugggucga

SEQ ID NO: 1743043 - RNA, 19 nt, Artificial Sequence
  Description of Artificial Sequence: Synthetic oligonucleotide
ugucgaaagcuccaucuau

SEQ ID NO: 1743044 - RNA, 19 nt, Artificial Sequence
  Description of Artificial Sequence: Synthetic oligonucleotide
gguaaccccauccagucag

SEQ ID NO: 1743045 - RNA, 19 nt, Artificial Sequence
  Description of Artificial Sequence: Synthetic oligonucleotide
agagcgaccagaucuuacu

SEQ ID NO: 1743046 - RNA, 19 nt, Artificial Sequence
  Description of Artificial Sequence: Synthetic oligonucleotide
gaccaucaguccuacuucc

SEQ ID NO: 1743047 - RNA, 19 nt, Artificial Sequence
  Description of Artificial Sequence: Synthetic oligonucleotide
ugcaaagcuauaacccggu

SEQ ID NO: 1743048 - RNA, 19 nt, Artificial Sequence
  Description of Artificial Sequence: Synthetic oligonucleotide
ugaaccugaacugauugua

SEQ ID NO: 1743049 - RNA, 19 nt, Artificial Sequence
  Description of Artificial Sequence: Synthetic oligonucleotide
ugggaccagcgucauagag

SEQ ID NO: 1743050 - RNA, 19 nt, Artificial Sequence
  Description of Artificial Sequence: Synthetic oligonucleotide
cauaaaagauugaccucug

SEQ ID NO: 1743051 - RNA, 19 nt, Artificial Sequence
  Description of Artificial Sequence: Synthetic oligonucleotide
ucauugggucgacugggcc

SEQ ID NO: 1743052 - RNA, 19 nt, Artificial Sequence
  Description of Artificial Sequence: Synthetic oligonucleotide
caucauugggucgacuggg

SEQ ID NO: 1743053 - RNA, 19 nt, Artificial Sequence
  Description of Artificial Sequence: Synthetic oligonucleotide
ucaugaggaccaucagucc

SEQ ID NO: 1743054 - RNA, 19 nt, Artificial Sequence
  Description of Artificial Sequence: Synthetic oligonucleotide
uguacaagaugacgcuggu

SEQ ID NO: 1743055 - RNA, 19 nt, Artificial Sequence
  Description of Artificial Sequence: Synthetic oligonucleotide
gauuguacaagaugacgcu

SEQ ID NO: 1743056 - RNA, 19 nt, Artificial Sequence
  Description of Artificial Sequence: Synthetic oligonucleotide
ccaaagacgccccaaacag

SEQ ID NO: 1743057 - RNA, 19 nt, Artificial Sequence
  Description of Artificial Sequence: Synthetic oligonucleotide
cuguaaguggucuaaaagu

SEQ ID NO: 1743058 - RNA, 19 nt, Artificial Sequence
  Description of Artificial Sequence: Synthetic oligonucleotide
aggugaacccugccguggc

SEQ ID NO: 1743059 - RNA, 19 nt, Artificial Sequence
  Description of Artificial Sequence: Synthetic oligonucleotide
aaguggucuaaaaguuuuc

SEQ ID NO: 1743060 - RNA, 19 nt, Artificial Sequence
  Description of Artificial Sequence: Synthetic oligonucleotide
uucagcgugucgaaagcuc

SEQ ID NO: 1743061 - RNA, 19 nt, Artificial Sequence
  Description of Artificial Sequence: Synthetic oligonucleotide
uuugcaguccacguuuggu

SEQ ID NO: 1743062 - RNA, 19 nt, Artificial Sequence
  Description of Artificial Sequence: Synthetic oligonucleotide
  modified_base (7)..(7): a, c, u, g, unknown or other
  modified_base (16)..(16): a, c, u, g, unknown or other
acccaanaaccugganagg

SEQ ID NO: 1743063 - RNA, 19 nt, Artificial Sequence
  Description of Artificial Sequence: Synthetic oligonucleotide
uugacaauucagaguuagu

SEQ ID NO: 1743064 - RNA, 19 nt, Artificial Sequence
  Description of Artificial Sequence: Synthetic oligonucleotide
aguuccgcugacaggaggg

SEQ ID NO: 1743065 - RNA, 19 nt, Artificial Sequence
  Description of Artificial Sequence: Synthetic oligonucleotide
caaacagauggacuuuauc

SEQ ID NO: 1743066 - RNA, 19 nt, Artificial Sequence
  Description of Artificial Sequence: Synthetic oligonucleotide
uuaugagguuccacauaug

SEQ ID NO: 1743067 - RNA, 19 nt, Artificial Sequence
  Description of Artificial Sequence: Synthetic oligonucleotide
uccacguuugguugaagau

SEQ ID NO: 1743068 - RNA, 19 nt, Artificial Sequence
  Description of Artificial Sequence: Synthetic oligonucleotide
uccaugaucugcacauaaa

SEQ ID NO: 1743069 - RNA, 19 nt, Artificial Sequence
  Description of Artificial Sequence: Synthetic oligonucleotide
uuucugaauccaucacaga

SEQ ID NO: 1743070 - RNA, 19 nt, Artificial Sequence
  Description of Artificial Sequence: Synthetic oligonucleotide
ccaauaaacuggauacugc

SEQ ID NO: 1743071 - RNA, 19 nt, Artificial Sequence
  Description of Artificial Sequence: Synthetic oligonucleotide
aaggcuuuugguagcaaaa

SEQ ID NO: 1743072 - RNA, 19 nt, Artificial Sequence
  Description of Artificial Sequence: Synthetic oligonucleotide
cuugagcauaaaugcuggc

SEQ ID NO: 1743073 - RNA, 19 nt, Artificial Sequence
  Description of Artificial Sequence: Synthetic oligonucleotide
caccugaugcuucugggac

SEQ ID NO: 1743074 - RNA, 19 nt, Artificial Sequence
  Description of Artificial Sequence: Synthetic oligonucleotide
ccgaauuuuaugagguucc

SEQ ID NO: 1743075 - RNA, 19 nt, Artificial Sequence
  Description of Artificial Sequence: Synthetic oligonucleotide
gaaggcuuuugguagcaaa

SEQ ID NO: 1743076 - RNA, 19 nt, Artificial Sequence
  Description of Artificial Sequence: Synthetic oligonucleotide
uccggucuuaaggugagcu

SEQ ID NO: 1743077 - RNA, 19 nt, Artificial Sequence
  Description of Artificial Sequence: Synthetic oligonucleotide
cagauggacuuuauccaac

SEQ ID NO: 1743078 - RNA, 19 nt, Artificial Sequence
  Description of Artificial Sequence: Synthetic oligonucleotide
agcgaccagaucuuacugu

SEQ ID NO: 1743079 - RNA, 19 nt, Artificial Sequence
  Description of Artificial Sequence: Synthetic oligonucleotide
  modified_base (6)..(6): a, c, u, g, unknown or other
  modified_base (15)..(15): a, c, u, g, unknown or other
cccaanaaccugganaggg

SEQ ID NO: 1743080 - RNA, 19 nt, Artificial Sequence
  Description of Artificial Sequence: Synthetic oligonucleotide
ugaauccaucacagaauuc

SEQ ID NO: 1743081 - RNA, 19 nt, Artificial Sequence
  Description of Artificial Sequence: Synthetic oligonucleotide
gagcgaccagaucuuacug

SEQ ID NO: 1743082 - RNA, 19 nt, Artificial Sequence
  Description of Artificial Sequence: Synthetic oligonucleotide
uaggggaaauugccuccgg

SEQ ID NO: 1743083 - RNA, 19 nt, Artificial Sequence
  Description of Artificial Sequence: Synthetic oligonucleotide
gaacacaacaggggagaag

SEQ ID NO: 1743084 - RNA, 19 nt, Artificial Sequence
  Description of Artificial Sequence: Synthetic oligonucleotide
acauaugaauuuugacaau

SEQ ID NO: 1743085 - RNA, 19 nt, Artificial Sequence
  Description of Artificial Sequence: Synthetic oligonucleotide
cuuccguugacaaugcacu

SEQ ID NO: 1743086 - RNA, 19 nt, Artificial Sequence
  Description of Artificial Sequence: Synthetic oligonucleotide
gaggugaacccugccgugg

SEQ ID NO: 1743087 - RNA, 19 nt, Artificial Sequence
  Description of Artificial Sequence: Synthetic oligonucleotide
caaagcuauaacccgguaa

SEQ ID NO: 1743088 - RNA, 19 nt, Artificial Sequence
  Description of Artificial Sequence: Synthetic oligonucleotide
gaaccugaacugauuguac

SEQ ID NO: 1743089 - RNA, 19 nt, Artificial Sequence
  Description of Artificial Sequence: Synthetic oligonucleotide
aucauugggucgacugggc

SEQ ID NO: 1743090 - RNA, 19 nt, Artificial Sequence
  Description of Artificial Sequence: Synthetic oligonucleotide
guaggggaaauugccuccg

SEQ ID NO: 1743091 - RNA, 19 nt, Artificial Sequence
  Description of Artificial Sequence: Synthetic oligonucleotide
guacauuucuuccuuggcu

SEQ ID NO: 1743092 - RNA, 19 nt, Artificial Sequence
  Description of Artificial Sequence: Synthetic oligonucleotide
aaccucccaaagacgcccc

SEQ ID NO: 1743093 - RNA, 19 nt, Artificial Sequence
  Description of Artificial Sequence: Synthetic oligonucleotide
gucgaaagcuccaucuaug

SEQ ID NO: 1743094 - RNA, 19 nt, Artificial Sequence
  Description of Artificial Sequence: Synthetic oligonucleotide
gagagacuuugaucucucc

SEQ ID NO: 1743095 - RNA, 19 nt, Artificial Sequence
  Description of Artificial Sequence: Synthetic oligonucleotide
gguaggggaaauugccucc

SEQ ID NO: 1743096 - RNA, 19 nt, Artificial Sequence
  Description of Artificial Sequence: Synthetic oligonucleotide
uugcaguccacguuugguu

SEQ ID NO: 1743097 - RNA, 19 nt, Artificial Sequence
  Description of Artificial Sequence: Synthetic oligonucleotide
gaguguauucagcaaauuu

SEQ ID NO: 1743098 - RNA, 19 nt, Artificial Sequence
  Description of Artificial Sequence: Synthetic oligonucleotide
  modified_base (7)..(7): a, c, u, g, unknown or other
ccugganagggacagucac

SEQ ID NO: 1743099 - RNA, 19 nt, Artificial Sequence
  Description of Artificial Sequence: Synthetic oligonucleotide
augggagucuuuaaaaguu

SEQ ID NO: 1743100 - RNA, 19 nt, Artificial Sequence
  Description of Artificial Sequence: Synthetic oligonucleotide
agcgucauagagcgaccag

SEQ ID NO: 1743101 - RNA, 19 nt, Artificial Sequence
  Description of Artificial Sequence: Synthetic oligonucleotide
guacaguuuguacauuucu

SEQ ID NO: 1743102 - RNA, 19 nt, Artificial Sequence
  Description of Artificial Sequence: Synthetic oligonucleotide
aacgccacaggagcccaag

SEQ ID NO: 1743103 - RNA, 19 nt, Artificial Sequence
  Description of Artificial Sequence: Synthetic oligonucleotide
ggaguggacucuuggagac

SEQ ID NO: 1743104 - RNA, 19 nt, Artificial Sequence
  Description of Artificial Sequence: Synthetic oligonucleotide
gccaucauugggucgacug

SEQ ID NO: 1743105 - RNA, 19 nt, Artificial Sequence
  Description of Artificial Sequence: Synthetic oligonucleotide
uauaacccgguaaccccau

SEQ ID NO: 1743106 - RNA, 19 nt, Artificial Sequence
  Description of Artificial Sequence: Synthetic oligonucleotide
ucccaauaaacuggauacu

SEQ ID NO: 1743107 - RNA, 19 nt, Artificial Sequence
  Description of Artificial Sequence: Synthetic oligonucleotide
gcauagguaggggaaauug

SEQ ID NO: 1743108 - RNA, 19 nt, Artificial Sequence
  Description of Artificial Sequence: Synthetic oligonucleotide
cauugggucgacugggcca

SEQ ID NO: 1743109 - RNA, 19 nt, Artificial Sequence
  Description of Artificial Sequence: Synthetic oligonucleotide
gagggaguggacucuugga

SEQ ID NO: 1743110 - RNA, 19 nt, Artificial Sequence
  Description of Artificial Sequence: Synthetic oligonucleotide
  modified_base (5)..(5): a, c, u, g, unknown or other
  modified_base (14)..(14): a, c, u, g, unknown or other
ccaanaaccugganaggga

SEQ ID NO: 1743111 - RNA, 19 nt, Artificial Sequence
  Description of Artificial Sequence: Synthetic oligonucleotide
caucugccaucauuggguc

SEQ ID NO: 1743112 - RNA, 19 nt, Artificial Sequence
  Description of Artificial Sequence: Synthetic oligonucleotide
ggagaaggcuuuugguagc

SEQ ID NO: 1743113 - RNA, 19 nt, Artificial Sequence
  Description of Artificial Sequence: Synthetic oligonucleotide
gacccaaacucucuagccu

SEQ ID NO: 1743114 - RNA, 19 nt, Artificial Sequence
  Description of Artificial Sequence: Synthetic oligonucleotide
ggaugucccgaauuuuaug

SEQ ID NO: 1743115 - RNA, 19 nt, Artificial Sequence
  Description of Artificial Sequence: Synthetic oligonucleotide
guuacagggaugucccgaa

SEQ ID NO: 1743116 - RNA, 19 nt, Artificial Sequence
  Description of Artificial Sequence: Synthetic oligonucleotide
auaacccgguaaccccauc

SEQ ID NO: 1743117 - RNA, 19 nt, Artificial Sequence
  Description of Artificial Sequence: Synthetic oligonucleotide
cagcguauuugguuccaug

SEQ ID NO: 1743118 - RNA, 19 nt, Artificial Sequence
  Description of Artificial Sequence: Synthetic oligonucleotide
guucacuuugacccaaacu

SEQ ID NO: 1743119 - RNA, 19 nt, Artificial Sequence
  Description of Artificial Sequence: Synthetic oligonucleotide
uaaggggaacuuguacuuc

SEQ ID NO: 1743120 - RNA, 19 nt, Artificial Sequence
  Description of Artificial Sequence: Synthetic oligonucleotide
acccgguaaccccauccag

SEQ ID NO: 1743121 - RNA, 19 nt, Artificial Sequence
  Description of Artificial Sequence: Synthetic oligonucleotide
agguuccacauaugaauuu

SEQ ID NO: 1743122 - RNA, 19 nt, Artificial Sequence
  Description of Artificial Sequence: Synthetic oligonucleotide
aaguucccaagaacuauuu

SEQ ID NO: 1743123 - RNA, 19 nt, Artificial Sequence
  Description of Artificial Sequence: Synthetic oligonucleotide
acgccccaaacagauggac

SEQ ID NO: 1743124 - RNA, 19 nt, Artificial Sequence
  Description of Artificial Sequence: Synthetic oligonucleotide
cccaauaaacuggauacug

SEQ ID NO: 1743125 - RNA, 19 nt, Artificial Sequence
  Description of Artificial Sequence: Synthetic oligonucleotide
ccagucagagccaagaucu

SEQ ID NO: 1743126 - RNA, 19 nt, Artificial Sequence
  Description of Artificial Sequence: Synthetic oligonucleotide
ccaucauugggucgacugg

SEQ ID NO: 1743127 - RNA, 19 nt, Artificial Sequence
  Description of Artificial Sequence: Synthetic oligonucleotide
acuuugacccaaacucucu

SEQ ID NO: 1743128 - RNA, 19 nt, Artificial Sequence
  Description of Artificial Sequence: Synthetic oligonucleotide
ccaucuauggcuccuccug

SEQ ID NO: 1743129 - RNA, 19 nt, Artificial Sequence
  Description of Artificial Sequence: Synthetic oligonucleotide
  modified_base (11)..(11): a, c, u, g, unknown or other
acaaacccaanaaccugga

SEQ ID NO: 1743130 - RNA, 19 nt, Artificial Sequence
  Description of Artificial Sequence: Synthetic oligonucleotide
acuggauacugcaaagcua

SEQ ID NO: 1743131 - RNA, 19 nt, Artificial Sequence
  Description of Artificial Sequence: Synthetic oligonucleotide
caaagacgccccaaacaga

SEQ ID NO: 1743132 - RNA, 19 nt, Artificial Sequence
  Description of Artificial Sequence: Synthetic oligonucleotide
agccuuccaaaugaacaca

SEQ ID NO: 1743133 - RNA, 19 nt, Artificial Sequence
  Description of Artificial Sequence: Synthetic oligonucleotide
ugaacacaacaggggagaa

SEQ ID NO: 1743134 - RNA, 19 nt, Artificial Sequence
  Description of Artificial Sequence: Synthetic oligonucleotide
aguggacucuuggagacuu

SEQ ID NO: 1743135 - RNA, 19 nt, Artificial Sequence
  Description of Artificial Sequence: Synthetic oligonucleotide
gggaccagcgucauagagc

SEQ ID NO: 1743136 - RNA, 19 nt, Artificial Sequence
  Description of Artificial Sequence: Synthetic oligonucleotide
ugaguguauucagcaaauu

SEQ ID NO: 1743137 - RNA, 19 nt, Artificial Sequence
  Description of Artificial Sequence: Synthetic oligonucleotide
  modified_base (10)..(10): a, c, u, g, unknown or other
  modified_base (19)..(19): a, c, u, g, unknown or other
caaacccaanaaccuggan

SEQ ID NO: 1743138 - RNA, 19 nt, Artificial Sequence
  Description of Artificial Sequence: Synthetic oligonucleotide
cugacgggucaauggcagc

SEQ ID NO: 1743139 - RNA, 19 nt, Artificial Sequence
  Description of Artificial Sequence: Synthetic oligonucleotide
caucaguccuacuuccaaa

SEQ ID NO: 1743140 - RNA, 19 nt, Artificial Sequence
  Description of Artificial Sequence: Synthetic oligonucleotide
ugacgcugguucagcgugu

SEQ ID NO: 1743141 - RNA, 19 nt, Artificial Sequence
  Description of Artificial Sequence: Synthetic oligonucleotide
ccacugacgggucaauggc

SEQ ID NO: 1743142 - RNA, 19 nt, Artificial Sequence
  Description of Artificial Sequence: Synthetic oligonucleotide
cuggagagacuuugaucuc

SEQ ID NO: 1743143 - RNA, 19 nt, Artificial Sequence
  Description of Artificial Sequence: Synthetic oligonucleotide
caaggcggccuuucugcac

SEQ ID NO: 1743144 - RNA, 19 nt, Artificial Sequence
  Description of Artificial Sequence: Synthetic oligonucleotide
gcgaccagaucuuacuguc

SEQ ID NO: 1743145 - RNA, 19 nt, Artificial Sequence
  Description of Artificial Sequence: Synthetic oligonucleotide
uggagacuugugaguguau

SEQ ID NO: 1743146 - RNA, 19 nt, Artificial Sequence
  Description of Artificial Sequence: Synthetic oligonucleotide
ggauacugcaaagcuauaa

SEQ ID NO: 1743147 - RNA, 19 nt, Artificial Sequence
  Description of Artificial Sequence: Synthetic oligonucleotide
cuuugacccaaacucucua

SEQ ID NO: 1743148 - RNA, 19 nt, Artificial Sequence
  Description of Artificial Sequence: Synthetic oligonucleotide
ucccgaauuuuaugagguu

SEQ ID NO: 1743149 - RNA, 19 nt, Artificial Sequence
  Description of Artificial Sequence: Synthetic oligonucleotide
gaaauugccuccggucuua

SEQ ID NO: 1743150 - RNA, 19 nt, Artificial Sequence
  Description of Artificial Sequence: Synthetic oligonucleotide
cccgaauuuuaugagguuc

SEQ ID NO: 1743151 - RNA, 19 nt, Artificial Sequence
  Description of Artificial Sequence: Synthetic oligonucleotide
agggaugucccgaauuuua

SEQ ID NO: 1743152 - RNA, 19 nt, Artificial Sequence
  Description of Artificial Sequence: Synthetic oligonucleotide
cagucagagccaagaucug

SEQ ID NO: 1743153 - RNA, 19 nt, Artificial Sequence
  Description of Artificial Sequence: Synthetic oligonucleotide
gggaaauugccuccggucu

SEQ ID NO: 1743154 - RNA, 19 nt, Artificial Sequence
  Description of Artificial Sequence: Synthetic oligonucleotide
cacugacgggucaauggca

SEQ ID NO: 1743155 - RNA, 19 nt, Artificial Sequence
  Description of Artificial Sequence: Synthetic oligonucleotide
gucccgaauuuuaugaggu

SEQ ID NO: 1743156 - RNA, 19 nt, Artificial Sequence
  Description of Artificial Sequence: Synthetic oligonucleotide
aagacgccccaaacagaug

SEQ ID NO: 1743157 - RNA, 19 nt, Artificial Sequence
  Description of Artificial Sequence: Synthetic oligonucleotide
cuccugcauagguagggga

SEQ ID NO: 1743158 - RNA, 19 nt, Artificial Sequence
  Description of Artificial Sequence: Synthetic oligonucleotide
ccguugacaaugcacucug

SEQ ID NO: 1743159 - RNA, 19 nt, Artificial Sequence
  Description of Artificial Sequence: Synthetic oligonucleotide
acgcugguucagcgugucg

SEQ ID NO: 1743160 - RNA, 19 nt, Artificial Sequence
  Description of Artificial Sequence: Synthetic oligonucleotide
aaauugccuccggucuuaa

SEQ ID NO: 1743161 - RNA, 19 nt, Artificial Sequence
  Description of Artificial Sequence: Synthetic oligonucleotide
ugggucgacugggccagag

SEQ ID NO: 1743162 - RNA, 19 nt, Artificial Sequence
  Description of Artificial Sequence: Synthetic oligonucleotide
ggaggugaacccugccgug

SEQ ID NO: 1743163 - RNA, 19 nt, Artificial Sequence
  Description of Artificial Sequence: Synthetic oligonucleotide
gguuacagggaugucccga

SEQ ID NO: 1743164 - RNA, 19 nt, Artificial Sequence
  Description of Artificial Sequence: Synthetic oligonucleotide
  modified_base (8)..(8): a, c, u, g, unknown or other
accugganagggacaguca

SEQ ID NO: 1743165 - RNA, 19 nt, Artificial Sequence
  Description of Artificial Sequence: Synthetic oligonucleotide
gagcccaagccuuccaaau

SEQ ID NO: 1743166 - RNA, 19 nt, Artificial Sequence
  Description of Artificial Sequence: Synthetic oligonucleotide
gagguuccacauaugaauu

SEQ ID NO: 1743167 - RNA, 19 nt, Artificial Sequence
  Description of Artificial Sequence: Synthetic oligonucleotide
gugucgaaagcuccaucua

SEQ ID NO: 1743168 - RNA, 19 nt, Artificial Sequence
  Description of Artificial Sequence: Synthetic oligonucleotide
gaucugcacauaaaagauu

SEQ ID NO: 1743169 - RNA, 19 nt, Artificial Sequence
  Description of Artificial Sequence: Synthetic oligonucleotide
caauuguaaucuggagaga

SEQ ID NO: 1743170 - RNA, 19 nt, Artificial Sequence
  Description of Artificial Sequence: Synthetic oligonucleotide
ccgguaaccccauccaguc

SEQ ID NO: 1743171 - RNA, 19 nt, Artificial Sequence
  Description of Artificial Sequence: Synthetic oligonucleotide
cauuaggguacaguuugua

SEQ ID NO: 1743172 - RNA, 19 nt, Artificial Sequence
  Description of Artificial Sequence: Synthetic oligonucleotide
uggucccaauaaacuggau

SEQ ID NO: 1743173 - RNA, 19 nt, Artificial Sequence
  Description of Artificial Sequence: Synthetic oligonucleotide
cgaaagcuccaucuauggc

SEQ ID NO: 1743174 - RNA, 19 nt, Artificial Sequence
  Description of Artificial Sequence: Synthetic oligonucleotide
ugugcccgaugaaccugaa

SEQ ID NO: 1743175 - RNA, 19 nt, Artificial Sequence
  Description of Artificial Sequence: Synthetic oligonucleotide
aacaggggagaaggcuuuu

SEQ ID NO: 1743176 - RNA, 19 nt, Artificial Sequence
  Description of Artificial Sequence: Synthetic oligonucleotide
ugaugguuacagggauguc

SEQ ID NO: 1743177 - RNA, 19 nt, Artificial Sequence
  Description of Artificial Sequence: Synthetic oligonucleotide
cacaacaggggagaaggcu

SEQ ID NO: 1743178 - RNA, 19 nt, Artificial Sequence
  Description of Artificial Sequence: Synthetic oligonucleotide
gggucgacugggccagagg

SEQ ID NO: 1743179 - RNA, 19 nt, Artificial Sequence
  Description of Artificial Sequence: Synthetic oligonucleotide
ggugaacccugccguggcc

SEQ ID NO: 1743180 - RNA, 19 nt, Artificial Sequence
  Description of Artificial Sequence: Synthetic oligonucleotide
cagcgugucgaaagcucca

SEQ ID NO: 1743181 - RNA, 19 nt, Artificial Sequence
  Description of Artificial Sequence: Synthetic oligonucleotide
gugaguguauucagcaaau

SEQ ID NO: 1743182 - RNA, 19 nt, Artificial Sequence
  Description of Artificial Sequence: Synthetic oligonucleotide
agcgugucgaaagcuccau

SEQ ID NO: 1743183 - RNA, 19 nt, Artificial Sequence
  Description of Artificial Sequence: Synthetic oligonucleotide
gacgcugguucagcguguc

SEQ ID NO: 1743184 - RNA, 19 nt, Artificial Sequence
  Description of Artificial Sequence: Synthetic oligonucleotide
aguccacguuugguugaag

SEQ ID NO: 1743185 - RNA, 19 nt, Artificial Sequence
  Description of Artificial Sequence: Synthetic oligonucleotide
gcgucauagagcgaccaga

SEQ ID NO: 1743186 - RNA, 19 nt, Artificial Sequence
  Description of Artificial Sequence: Synthetic oligonucleotide
ggagagacuuugaucucuc

SEQ ID NO: 1743187 - RNA, 19 nt, Artificial Sequence
  Description of Artificial Sequence: Synthetic oligonucleotide
ccuccggucuuaaggugag

SEQ ID NO: 1743188 - RNA, 19 nt, Artificial Sequence
  Description of Artificial Sequence: Synthetic oligonucleotide
cugcacuccugcauaggua

SEQ ID NO: 1743189 - RNA, 19 nt, Artificial Sequence
  Description of Artificial Sequence: Synthetic oligonucleotide
gugcccgaugaaccugaac

SEQ ID NO: 1743190 - RNA, 19 nt, Artificial Sequence
  Description of Artificial Sequence: Synthetic oligonucleotide
gagggcaaggcggccuuuc

SEQ ID NO: 1743191 - RNA, 19 nt, Artificial Sequence
  Description of Artificial Sequence: Synthetic oligonucleotide
cucucccaugaugagcaga

SEQ ID NO: 1743192 - RNA, 19 nt, Artificial Sequence
  Description of Artificial Sequence: Synthetic oligonucleotide
gacgccccaaacagaugga

SEQ ID NO: 1743193 - RNA, 19 nt, Artificial Sequence
  Description of Artificial Sequence: Synthetic oligonucleotide
gaacccugccguggccacc

SEQ ID NO: 1743194 - RNA, 19 nt, Artificial Sequence
  Description of Artificial Sequence: Synthetic oligonucleotide
gagccaagaucugcuggaa

SEQ ID NO: 1743195 - RNA, 19 nt, Artificial Sequence
  Description of Artificial Sequence: Synthetic oligonucleotide
gccaguucacuuugaccca

SEQ ID NO: 1743196 - RNA, 19 nt, Artificial Sequence
  Description of Artificial Sequence: Synthetic oligonucleotide
ugaccacugacgggucaau

SEQ ID NO: 1743197 - RNA, 19 nt, Artificial Sequence
  Description of Artificial Sequence: Synthetic oligonucleotide
cccgcgucccuuucucucc

SEQ ID NO: 1743198 - RNA, 19 nt, Artificial Sequence
  Description of Artificial Sequence: Synthetic oligonucleotide
cagaucuuacugucaucgu

SEQ ID NO: 1743199 - RNA, 19 nt, Artificial Sequence
  Description of Artificial Sequence: Synthetic oligonucleotide
gggagucuuuaaaaguugu

SEQ ID NO: 1743200 - RNA, 19 nt, Artificial Sequence
  Description of Artificial Sequence: Synthetic oligonucleotide
ccggucuuaaggugagcuc

SEQ ID NO: 1743201 - RNA, 19 nt, Artificial Sequence
  Description of Artificial Sequence: Synthetic oligonucleotide
cagcgucauagagcgacca

SEQ ID NO: 1743202 - RNA, 19 nt, Artificial Sequence
  Description of Artificial Sequence: Synthetic oligonucleotide
cugaccacugacgggucaa

SEQ ID NO: 1743203 - RNA, 19 nt, Artificial Sequence
  Description of Artificial Sequence: Synthetic oligonucleotide
acccugccguggccacccc

SEQ ID NO: 1743204 - RNA, 19 nt, Artificial Sequence
  Description of Artificial Sequence: Synthetic oligonucleotide
gguuccacauaugaauuuu

SEQ ID NO: 1743205 - RNA, 19 nt, Artificial Sequence
  Description of Artificial Sequence: Synthetic oligonucleotide
uccgggcauuaggguacag

SEQ ID NO: 1743206 - RNA, 19 nt, Artificial Sequence
  Description of Artificial Sequence: Synthetic oligonucleotide
cgugucgaaagcuccaucu

SEQ ID NO: 1743207 - RNA, 19 nt, Artificial Sequence
  Description of Artificial Sequence: Synthetic oligonucleotide
gcgucccuuucucuccagc

SEQ ID NO: 1743208 - RNA, 19 nt, Artificial Sequence
  Description of Artificial Sequence: Synthetic oligonucleotide
cuccggucuuaaggugagc

SEQ ID NO: 1743209 - RNA, 19 nt, Artificial Sequence
  Description of Artificial Sequence: Synthetic oligonucleotide
ggaaauugccuccggucuu

SEQ ID NO: 1743210 - RNA, 19 nt, Artificial Sequence
  Description of Artificial Sequence: Synthetic oligonucleotide
cugggaccagcgucauaga

SEQ ID NO: 1743211 - RNA, 19 nt, Artificial Sequence
  Description of Artificial Sequence: Synthetic oligonucleotide
acguuugguugaagauaga

SEQ ID NO: 1743212 - RNA, 19 nt, Artificial Sequence
  Description of Artificial Sequence: Synthetic oligonucleotide
aggggaacuuguacuucua

SEQ ID NO: 1743213 - RNA, 19 nt, Artificial Sequence
  Description of Artificial Sequence: Synthetic oligonucleotide
caacaggggagaaggcuuu

SEQ ID NO: 1743214 - RNA, 19 nt, Artificial Sequence
  Description of Artificial Sequence: Synthetic oligonucleotide
gccuguccaccaugaaguc

SEQ ID NO: 1743215 - RNA, 19 nt, Artificial Sequence
  Description of Artificial Sequence: Synthetic oligonucleotide
ccacguuugguugaagaua

SEQ ID NO: 1743216 - RNA, 19 nt, Artificial Sequence
  Description of Artificial Sequence: Synthetic oligonucleotide
  modified_base (4)..(4): a, c, u, g, unknown or other
gganagggacagucacacu

SEQ ID NO: 1743217 - RNA, 19 nt, Artificial Sequence
  Description of Artificial Sequence: Synthetic oligonucleotide
gcaaagcuauaacccggua

SEQ ID NO: 1743218 - RNA, 19 nt, Artificial Sequence
  Description of Artificial Sequence: Synthetic oligonucleotide
gcgugucgaaagcuccauc

SEQ ID NO: 1743219 - RNA, 19 nt, Artificial Sequence
  Description of Artificial Sequence: Synthetic oligonucleotide
gcaguuccgcugacaggag

SEQ ID NO: 1743220 - RNA, 19 nt, Artificial Sequence
  Description of Artificial Sequence: Synthetic oligonucleotide
cugaugcuucugggaccag

SEQ ID NO: 1743221 - RNA, 19 nt, Artificial Sequence
  Description of Artificial Sequence: Synthetic oligonucleotide
ccaugaugguuacagggau

SEQ ID NO: 1743222 - RNA, 19 nt, Artificial Sequence
  Description of Artificial Sequence: Synthetic oligonucleotide
ccccgcgucccuuucucuc

SEQ ID NO: 1743223 - RNA, 19 nt, Artificial Sequence
  Description of Artificial Sequence: Synthetic oligonucleotide
gggaugucccgaauuuuau

SEQ ID NO: 1743224 - RNA, 19 nt, Artificial Sequence
  Description of Artificial Sequence: Synthetic oligonucleotide
uugggucgacugggccaga

SEQ ID NO: 1743225 - RNA, 19 nt, Artificial Sequence
  Description of Artificial Sequence: Synthetic oligonucleotide
cccaagccuuccaaaugaa

SEQ ID NO: 1743226 - RNA, 19 nt, Artificial Sequence
  Description of Artificial Sequence: Synthetic oligonucleotide
cgaccagaucuuacuguca

SEQ ID NO: 1743227 - RNA, 19 nt, Artificial Sequence
  Description of Artificial Sequence: Synthetic oligonucleotide
cccaaacagauggacuuua

SEQ ID NO: 1743228 - RNA, 19 nt, Artificial Sequence
  Description of Artificial Sequence: Synthetic oligonucleotide
ccgaugaaccugaacugau

SEQ ID NO: 1743229 - RNA, 19 nt, Artificial Sequence
  Description of Artificial Sequence: Synthetic oligonucleotide
gaccagcgucauagagcga

SEQ ID NO: 1743230 - RNA, 19 nt, Artificial Sequence
  Description of Artificial Sequence: Synthetic oligonucleotide
cguuugguugaagauagau

SEQ ID NO: 1743231 - RNA, 19 nt, Artificial Sequence
  Description of Artificial Sequence: Synthetic oligonucleotide
cgggcauuaggguacaguu

SEQ ID NO: 1743232 - RNA, 19 nt, Artificial Sequence
  Description of Artificial Sequence: Synthetic oligonucleotide
cggucuuaaggugagcucu

SEQ ID NO: 1743233 - RNA, 19 nt, Artificial Sequence
  Description of Artificial Sequence: Synthetic oligonucleotide
ggcugagggcaaggcggcc

SEQ ID NO: 1743234 - RNA, 19 nt, Artificial Sequence
  Description of Artificial Sequence: Synthetic oligonucleotide
ccaguucacuuugacccaa

SEQ ID NO: 1743235 - RNA, 19 nt, Artificial Sequence
  Description of Artificial Sequence: Synthetic oligonucleotide
cuccgggcauuaggguaca

SEQ ID NO: 1743236 - RNA, 19 nt, Artificial Sequence
  Description of Artificial Sequence: Synthetic oligonucleotide
gcauuaggguacaguuugu

SEQ ID NO: 1743237 - RNA, 19 nt, Artificial Sequence
  Description of Artificial Sequence: Synthetic oligonucleotide
gggcauuaggguacaguuu

SEQ ID NO: 1743238 - RNA, 19 nt, Artificial Sequence
  Description of Artificial Sequence: Synthetic oligonucleotide
cagggaugucccgaauuuu

SEQ ID NO: 1743239 - RNA, 19 nt, Artificial Sequence
  Description of Artificial Sequence: Synthetic oligonucleotide
ccucgagcuccucugcacu

SEQ ID NO: 1743240 - RNA, 19 nt, Artificial Sequence
  Description of Artificial Sequence: Synthetic oligonucleotide
caucgucaucuacgauuau

SEQ ID NO: 1743241 - RNA, 19 nt, Artificial Sequence
  Description of Artificial Sequence: Synthetic oligonucleotide
cuucugggaccagcgucau

SEQ ID NO: 1743242 - RNA, 19 nt, Artificial Sequence
  Description of Artificial Sequence: Synthetic oligonucleotide
ccucccaaagacgccccaa

SEQ ID NO: 1743243 - RNA, 19 nt, Artificial Sequence
  Description of Artificial Sequence: Synthetic oligonucleotide
cgguaaccccauccaguca

SEQ ID NO: 1743244 - RNA, 19 nt, Artificial Sequence
  Description of Artificial Sequence: Synthetic oligonucleotide
ccgcgucccuuucucucca

SEQ ID NO: 1743245 - RNA, 19 nt, Artificial Sequence
  Description of Artificial Sequence: Synthetic oligonucleotide
ccgggcauuaggguacagu

SEQ ID NO: 1743246 - RNA, 19 nt, Artificial Sequence
  Description of Artificial Sequence: Synthetic oligonucleotide
gcagcguauuugguuccau

SEQ ID NO: 1743247 - RNA, 19 nt, Artificial Sequence
  Description of Artificial Sequence: Synthetic oligonucleotide
aaauacaagggacagcacg

SEQ ID NO: 1743248 - RNA, 19 nt, Artificial Sequence
  Description of Artificial Sequence: Synthetic oligonucleotide
uuaaaguaaauacaaggga

SEQ ID NO: 1743249 - RNA, 19 nt, Artificial Sequence
  Description of Artificial Sequence: Synthetic oligonucleotide
ucaacuaaugguuaaauuc

SEQ ID NO: 1743250 - RNA, 19 nt, Artificial Sequence
  Description of Artificial Sequence: Synthetic oligonucleotide
uacaagacgaaacucagug

SEQ ID NO: 1743251 - RNA, 19 nt, Artificial Sequence
  Description of Artificial Sequence: Synthetic oligonucleotide
auucccuaaacucaguaac

SEQ ID NO: 1743252 - RNA, 19 nt, Artificial Sequence
  Description of Artificial Sequence: Synthetic oligonucleotide
caucgauuaagccagagcc

SEQ ID NO: 1743253 - RNA, 19 nt, Artificial Sequence
  Description of Artificial Sequence: Synthetic oligonucleotide
aaggcugcgauccauagug

SEQ ID NO: 1743254 - RNA, 19 nt, Artificial Sequence
  Description of Artificial Sequence: Synthetic oligonucleotide
  modified_base (5)..(5): a, c, u, g, unknown or other
aauunaccccagcagacag

SEQ ID NO: 1743255 - RNA, 19 nt, Artificial Sequence
  Description of Artificial Sequence: Synthetic oligonucleotide
uguagaugugaguagauga

SEQ ID NO: 1743256 - RNA, 19 nt, Artificial Sequence
  Description of Artificial Sequence: Synthetic oligonucleotide
acuaaagaaaaguaaagaa

SEQ ID NO: 1743257 - RNA, 19 nt, Artificial Sequence
  Description of Artificial Sequence: Synthetic oligonucleotide
ugcauaauaauucagcauu

SEQ ID NO: 1743258 - RNA, 19 nt, Artificial Sequence
  Description of Artificial Sequence: Synthetic oligonucleotide
gcuuaaaguaaauacaagg

SEQ ID NO: 1743259 - RNA, 19 nt, Artificial Sequence
  Description of Artificial Sequence: Synthetic oligonucleotide
caacuaaugguuaaauucc

SEQ ID NO: 1743260 - RNA, 19 nt, Artificial Sequence
  Description of Artificial Sequence: Synthetic oligonucleotide
cuggucauaaauuagggug

SEQ ID NO: 1743261 - RNA, 19 nt, Artificial Sequence
  Description of Artificial Sequence: Synthetic oligonucleotide
aagaaaaguaaagaaacga

SEQ ID NO: 1743262 - RNA, 19 nt, Artificial Sequence
  Description of Artificial Sequence: Synthetic oligonucleotide
aauacaagggacagcacgg

SEQ ID NO: 1743263 - RNA, 19 nt, Artificial Sequence
  Description of Artificial Sequence: Synthetic oligonucleotide
cuaggaaucacccugaaca

SEQ ID NO: 1743264 - RNA, 19 nt, Artificial Sequence
  Description of Artificial Sequence: Synthetic oligonucleotide
ugggaaaccauaccgaaug

SEQ ID NO: 1743265 - RNA, 19 nt, Artificial Sequence
  Description of Artificial Sequence: Synthetic oligonucleotide
acccugaacaaauaauccc

SEQ ID NO: 1743266 - RNA, 19 nt, Artificial Sequence
  Description of Artificial Sequence: Synthetic oligonucleotide
ugaacaaauaaucccgaca

SEQ ID NO: 1743267 - RNA, 19 nt, Artificial Sequence
  Description of Artificial Sequence: Synthetic oligonucleotide
aauaacuugugcccuugag

SEQ ID NO: 1743268 - RNA, 19 nt, Artificial Sequence
  Description of Artificial Sequence: Synthetic oligonucleotide
uaacuugugcccuugagac

SEQ ID NO: 1743269 - RNA, 19 nt, Artificial Sequence
  Description of Artificial Sequence: Synthetic oligonucleotide
aacuaaugguuaaauuccc

SEQ ID NO: 1743270 - RNA, 19 nt, Artificial Sequence
  Description of Artificial Sequence: Synthetic oligonucleotide
ucuucugugaaauaacuua

SEQ ID NO: 1743271 - RNA, 19 nt, Artificial Sequence
  Description of Artificial Sequence: Synthetic oligonucleotide
caagacgaaacucaguggc

SEQ ID NO: 1743272 - RNA, 19 nt, Artificial Sequence
  Description of Artificial Sequence: Synthetic oligonucleotide
acaaguguaacaagcaugg

SEQ ID NO: 1743273 - RNA, 19 nt, Artificial Sequence
  Description of Artificial Sequence: Synthetic oligonucleotide
  modified_base (8)..(8): a, c, u, g, unknown or other
uggaauunaccccagcaga

SEQ ID NO: 1743274 - RNA, 19 nt, Artificial Sequence
  Description of Artificial Sequence: Synthetic oligonucleotide
gauuggaguaaguugugcc

SEQ ID NO: 1743275 - RNA, 19 nt, Artificial Sequence
  Description of Artificial Sequence: Synthetic oligonucleotide
ucagggauccccaaggugu

SEQ ID NO: 1743276 - RNA, 19 nt, Artificial Sequence
  Description of Artificial Sequence: Synthetic oligonucleotide
aaguaaauacaagggacag

SEQ ID NO: 1743277 - RNA, 19 nt, Artificial Sequence
  Description of Artificial Sequence: Synthetic oligonucleotide
uguggaucaucgauuaagc

SEQ ID NO: 1743278 - RNA, 19 nt, Artificial Sequence
  Description of Artificial Sequence: Synthetic oligonucleotide
cagugcuuaaaguaaauac

SEQ ID NO: 1743279 - RNA, 19 nt, Artificial Sequence
  Description of Artificial Sequence: Synthetic oligonucleotide
aagguguaaccgaugaugg

SEQ ID NO: 1743280 - RNA, 19 nt, Artificial Sequence
  Description of Artificial Sequence: Synthetic oligonucleotide
uguaggauccguaauccac

SEQ ID NO: 1743281 - RNA, 19 nt, Artificial Sequence
  Description of Artificial Sequence: Synthetic oligonucleotide
aaggugauccccaugauga

SEQ ID NO: 1743282 - RNA, 19 nt, Artificial Sequence
  Description of Artificial Sequence: Synthetic oligonucleotide
aacacauucugugguuucc

SEQ ID NO: 1743283 - RNA, 19 nt, Artificial Sequence
  Description of Artificial Sequence: Synthetic oligonucleotide
aauuagggugucuucugug

SEQ ID NO: 1743284 - RNA, 19 nt, Artificial Sequence
  Description of Artificial Sequence: Synthetic oligonucleotide
aaacaauucccuaaacuca

SEQ ID NO: 1743285 - RNA, 19 nt, Artificial Sequence
  Description of Artificial Sequence: Synthetic oligonucleotide
aaccauaccgaauggguga

SEQ ID NO: 1743286 - RNA, 19 nt, Artificial Sequence
  Description of Artificial Sequence: Synthetic oligonucleotide
uggaauuggaccacggcca

SEQ ID NO: 1743287 - RNA, 19 nt, Artificial Sequence
  Description of Artificial Sequence: Synthetic oligonucleotide
aauucauguagaugugagu

SEQ ID NO: 1743288 - RNA, 19 nt, Artificial Sequence
  Description of Artificial Sequence: Synthetic oligonucleotide
ucaaauggcguguaggguc

SEQ ID NO: 1743289 - RNA, 19 nt, Artificial Sequence
  Description of Artificial Sequence: Synthetic oligonucleotide
uaaccgaugauggugacca

SEQ ID NO: 1743290 - RNA, 19 nt, Artificial Sequence
  Description of Artificial Sequence: Synthetic oligonucleotide
ggauugggaaaccauaccg

SEQ ID NO: 1743291 - RNA, 19 nt, Artificial Sequence
  Description of Artificial Sequence: Synthetic oligonucleotide
aaaccauuucucccagcgg

SEQ ID NO: 1743292 - RNA, 19 nt, Artificial Sequence
  Description of Artificial Sequence: Synthetic oligonucleotide
caugcagucaggcacacug

SEQ ID NO: 1743293 - RNA, 19 nt, Artificial Sequence
  Description of Artificial Sequence: Synthetic oligonucleotide
aguuaacacauucuguggu

SEQ ID NO: 1743294 - RNA, 19 nt, Artificial Sequence
  Description of Artificial Sequence: Synthetic oligonucleotide
uuucacgauuuccaguuug

SEQ ID NO: 1743295 - RNA, 19 nt, Artificial Sequence
  Description of Artificial Sequence: Synthetic oligonucleotide
gaugugaguagaugagucc

SEQ ID NO: 1743296 - RNA, 19 nt, Artificial Sequence
  Description of Artificial Sequence: Synthetic oligonucleotide
augucaugcacuuauuccu

SEQ ID NO: 1743297 - RNA, 19 nt, Artificial Sequence
  Description of Artificial Sequence: Synthetic oligonucleotide
ugucaugucaugcacuuau

SEQ ID NO: 1743298 - RNA, 19 nt, Artificial Sequence
  Description of Artificial Sequence: Synthetic oligonucleotide
aguccucugcuguucagcc

SEQ ID NO: 1743299 - RNA, 19 nt, Artificial Sequence
  Description of Artificial Sequence: Synthetic oligonucleotide
aaugggugauaagugauca

SEQ ID NO: 1743300 - RNA, 19 nt, Artificial Sequence
  Description of Artificial Sequence: Synthetic oligonucleotide
aaguacaagacgaaacuca

SEQ ID NO: 1743301 - RNA, 19 nt, Artificial Sequence
  Description of Artificial Sequence: Synthetic oligonucleotide
gaauguaggauccguaauc

SEQ ID NO: 1743302 - RNA, 19 nt, Artificial Sequence
  Description of Artificial Sequence: Synthetic oligonucleotide
ggauccguaauccacagcc

SEQ ID NO: 1743303 - RNA, 19 nt, Artificial Sequence
  Description of Artificial Sequence: Synthetic oligonucleotide
aguaaauacaagggacagc

SEQ ID NO: 1743304 - RNA, 19 nt, Artificial Sequence
  Description of Artificial Sequence: Synthetic oligonucleotide
ucgucuacuaaagaaaagu

SEQ ID NO: 1743305 - RNA, 19 nt, Artificial Sequence
  Description of Artificial Sequence: Synthetic oligonucleotide
uguucaaaauggagcuugg

SEQ ID NO: 1743306 - RNA, 19 nt, Artificial Sequence
  Description of Artificial Sequence: Synthetic oligonucleotide
aaacucaguaaccuaggaa

SEQ ID NO: 1743307 - RNA, 19 nt, Artificial Sequence
  Description of Artificial Sequence: Synthetic oligonucleotide
ucugcaguuaacacauucu

SEQ ID NO: 1743308 - RNA, 19 nt, Artificial Sequence
  Description of Artificial Sequence: Synthetic oligonucleotide
gagggauuggaguaaguug

SEQ ID NO: 1743309 - RNA, 19 nt, Artificial Sequence
  Description of Artificial Sequence: Synthetic oligonucleotide
cuaaacucaguaaccuagg

SEQ ID NO: 1743310 - RNA, 19 nt, Artificial Sequence
  Description of Artificial Sequence: Synthetic oligonucleotide
aaauuagggugucuucugu

SEQ ID NO: 1743311 - RNA, 19 nt, Artificial Sequence
  Description of Artificial Sequence: Synthetic oligonucleotide
gaguagaugaguccucugc

SEQ ID NO: 1743312 - RNA, 19 nt, Artificial Sequence
  Description of Artificial Sequence: Synthetic oligonucleotide
aauucccuaaacucaguaa

SEQ ID NO: 1743313 - RNA, 19 nt, Artificial Sequence
  Description of Artificial Sequence: Synthetic oligonucleotide
uaaauuagggugucuucug

SEQ ID NO: 1743314 - RNA, 19 nt, Artificial Sequence
  Description of Artificial Sequence: Synthetic oligonucleotide
auaacuugugcccuugaga

SEQ ID NO: 1743315 - RNA, 19 nt, Artificial Sequence
  Description of Artificial Sequence: Synthetic oligonucleotide
ucaucgauuaagccagagc

SEQ ID NO: 1743316 - RNA, 19 nt, Artificial Sequence
  Description of Artificial Sequence: Synthetic oligonucleotide
agacaguacaaucugugga

SEQ ID NO: 1743317 - RNA, 19 nt, Artificial Sequence
  Description of Artificial Sequence: Synthetic oligonucleotide
ucagccgaauguaggaucc

SEQ ID NO: 1743318 - RNA, 19 nt, Artificial Sequence
  Description of Artificial Sequence: Synthetic oligonucleotide
agaaaaucuagcagggcgg

SEQ ID NO: 1743319 - RNA, 19 nt, Artificial Sequence
  Description of Artificial Sequence: Synthetic oligonucleotide
aacuugguggaguuauucu

SEQ ID NO: 1743320 - RNA, 19 nt, Artificial Sequence
  Description of Artificial Sequence: Synthetic oligonucleotide
acaagacgaaacucagugg

SEQ ID NO: 1743321 - RNA, 19 nt, Artificial Sequence
  Description of Artificial Sequence: Synthetic oligonucleotide
agugcuuaaaguaaauaca

SEQ ID NO: 1743322 - RNA, 19 nt, Artificial Sequence
  Description of Artificial Sequence: Synthetic oligonucleotide
uggugaaauguucacaaua

SEQ ID NO: 1743323 - RNA, 19 nt, Artificial Sequence
  Description of Artificial Sequence: Synthetic oligonucleotide
auaaauuagggugucuucu

SEQ ID NO: 1743324 - RNA, 19 nt, Artificial Sequence
  Description of Artificial Sequence: Synthetic oligonucleotide
aagacgaaacucaguggcc

SEQ ID NO: 1743325 - RNA, 19 nt, Artificial Sequence
  Description of Artificial Sequence: Synthetic oligonucleotide
cucccgauggaauuggacc

SEQ ID NO: 1743326 - RNA, 19 nt, Artificial Sequence
  Description of Artificial Sequence: Synthetic oligonucleotide
uucccuaaacucaguaacc

SEQ ID NO: 1743327 - RNA, 19 nt, Artificial Sequence
  Description of Artificial Sequence: Synthetic oligonucleotide
uuuguugcaauuggggaca

SEQ ID NO: 1743328 - RNA, 19 nt, Artificial Sequence
  Description of Artificial Sequence: Synthetic oligonucleotide
aguugugccuggcuugggc

SEQ ID NO: 1743329 - RNA, 19 nt, Artificial Sequence
  Description of Artificial Sequence: Synthetic oligonucleotide
  modified_base (9)..(9): a, c, u, g, unknown or other
cuggaauunaccccagcag

SEQ ID NO: 1743330 - RNA, 19 nt, Artificial Sequence
  Description of Artificial Sequence: Synthetic oligonucleotide
uaaacucaguaaccuagga

SEQ ID NO: 1743331 - RNA, 19 nt, Artificial Sequence
  Description of Artificial Sequence: Synthetic oligonucleotide
uucacgauuuccaguuugc

SEQ ID NO: 1743332 - RNA, 19 nt, Artificial Sequence
  Description of Artificial Sequence: Synthetic oligonucleotide
caagguguaaccgaugaug

SEQ ID NO: 1743333 - RNA, 19 nt, Artificial Sequence
  Description of Artificial Sequence: Synthetic oligonucleotide
cacccugaacaaauaaucc

SEQ ID NO: 1743334 - RNA, 19 nt, Artificial Sequence
  Description of Artificial Sequence: Synthetic oligonucleotide
ugucaugcacuuauuccug

SEQ ID NO: 1743335 - RNA, 19 nt, Artificial Sequence
  Description of Artificial Sequence: Synthetic oligonucleotide
agaugugaguagaugaguc

SEQ ID NO: 1743336 - RNA, 19 nt, Artificial Sequence
  Description of Artificial Sequence: Synthetic oligonucleotide
auguguacaagggauuggg

SEQ ID NO: 1743337 - RNA, 19 nt, Artificial Sequence
  Description of Artificial Sequence: Synthetic oligonucleotide
gauggaauuggaccacggc

SEQ ID NO: 1743338 - RNA, 19 nt, Artificial Sequence
  Description of Artificial Sequence: Synthetic oligonucleotide
ggaucaucgauuaagccag

SEQ ID NO: 1743339 - RNA, 19 nt, Artificial Sequence
  Description of Artificial Sequence: Synthetic oligonucleotide
aguagaugaguccucugcu

SEQ ID NO: 1743340 - RNA, 19 nt, Artificial Sequence
  Description of Artificial Sequence: Synthetic oligonucleotide
aaaccauaccgaaugggug

SEQ ID NO: 1743341 - RNA, 19 nt, Artificial Sequence
  Description of Artificial Sequence: Synthetic oligonucleotide
ugguuaaauucccaacagu

SEQ ID NO: 1743342 - RNA, 19 nt, Artificial Sequence
  Description of Artificial Sequence: Synthetic oligonucleotide
ucgauuaagccagagccca

SEQ ID NO: 1743343 - RNA, 19 nt, Artificial Sequence
  Description of Artificial Sequence: Synthetic oligonucleotide
ucauguagaugugaguaga

SEQ ID NO: 1743344 - RNA, 19 nt, Artificial Sequence
  Description of Artificial Sequence: Synthetic oligonucleotide
aucgauuaagccagagccc

SEQ ID NO: 1743345 - RNA, 19 nt, Artificial Sequence
  Description of Artificial Sequence: Synthetic oligonucleotide
augggugugucucaacuug

SEQ ID NO: 1743346 - RNA, 19 nt, Artificial Sequence
  Description of Artificial Sequence: Synthetic oligonucleotide
aauuggaccacggccauau

SEQ ID NO: 1743347 - RNA, 19 nt, Artificial Sequence
  Description of Artificial Sequence: Synthetic oligonucleotide
guagaagaagcaaauguca

SEQ ID NO: 1743348 - RNA, 19 nt, Artificial Sequence
  Description of Artificial Sequence: Synthetic oligonucleotide
uucccaacaguccuggaau

SEQ ID NO: 1743349 - RNA, 19 nt, Artificial Sequence
  Description of Artificial Sequence: Synthetic oligonucleotide
cauaaauuagggugucuuc

SEQ ID NO: 1743350 - RNA, 19 nt, Artificial Sequence
  Description of Artificial Sequence: Synthetic oligonucleotide
aguacaagacgaaacucag

SEQ ID NO: 1743351 - RNA, 19 nt, Artificial Sequence
  Description of Artificial Sequence: Synthetic oligonucleotide
aguaaguugugccuggcuu

SEQ ID NO: 1743352 - RNA, 19 nt, Artificial Sequence
  Description of Artificial Sequence: Synthetic oligonucleotide
ugggugugucucaacuugg

SEQ ID NO: 1743353 - RNA, 19 nt, Artificial Sequence
  Description of Artificial Sequence: Synthetic oligonucleotide
guaaguugugccuggcuug

SEQ ID NO: 1743354 - RNA, 19 nt, Artificial Sequence
  Description of Artificial Sequence: Synthetic oligonucleotide
uaaguugugccuggcuugg

SEQ ID NO: 1743355 - RNA, 19 nt, Artificial Sequence
  Description of Artificial Sequence: Synthetic oligonucleotide
agcacggcgggcaagaauc

SEQ ID NO: 1743356 - RNA, 19 nt, Artificial Sequence
  Description of Artificial Sequence: Synthetic oligonucleotide
cugcaguuaacacauucug

SEQ ID NO: 1743357 - RNA, 19 nt, Artificial Sequence
  Description of Artificial Sequence: Synthetic oligonucleotide
ugggugauaagugaucagu

SEQ ID NO: 1743358 - RNA, 19 nt, Artificial Sequence
  Description of Artificial Sequence: Synthetic oligonucleotide
agggauuggaguaaguugu

SEQ ID NO: 1743359 - RNA, 19 nt, Artificial Sequence
  Description of Artificial Sequence: Synthetic oligonucleotide
caaauggcguguagggucc

SEQ ID NO: 1743360 - RNA, 19 nt, Artificial Sequence
  Description of Artificial Sequence: Synthetic oligonucleotide
ucccgauggaauuggacca

SEQ ID NO: 1743361 - RNA, 19 nt, Artificial Sequence
  Description of Artificial Sequence: Synthetic oligonucleotide
cccugaacaaauaaucccg

SEQ ID NO: 1743362 - RNA, 19 nt, Artificial Sequence
  Description of Artificial Sequence: Synthetic oligonucleotide
ggugaaugcccauuucacg

SEQ ID NO: 1743363 - RNA, 19 nt, Artificial Sequence
  Description of Artificial Sequence: Synthetic oligonucleotide
ccucaaguaaaacaauucc

SEQ ID NO: 1743364 - RNA, 19 nt, Artificial Sequence
  Description of Artificial Sequence: Synthetic oligonucleotide
gauguguacaagggauugg

SEQ ID NO: 1743365 - RNA, 19 nt, Artificial Sequence
  Description of Artificial Sequence: Synthetic oligonucleotide
agcauucuagaaaaucuag

SEQ ID NO: 1743366 - RNA, 19 nt, Artificial Sequence
  Description of Artificial Sequence: Synthetic oligonucleotide
ugagacagucugcaguuaa

SEQ ID NO: 1743367 - RNA, 19 nt, Artificial Sequence
  Description of Artificial Sequence: Synthetic oligonucleotide
uucugugaaauaacuuaaa

SEQ ID NO: 1743368 - RNA, 19 nt, Artificial Sequence
  Description of Artificial Sequence: Synthetic oligonucleotide
auugucaugucaugcacuu

SEQ ID NO: 1743369 - RNA, 19 nt, Artificial Sequence
  Description of Artificial Sequence: Synthetic oligonucleotide
agggauugggaaaccauac

SEQ ID NO: 1743370 - RNA, 19 nt, Artificial Sequence
  Description of Artificial Sequence: Synthetic oligonucleotide
uuaagccagagcccaguga

SEQ ID NO: 1743371 - RNA, 19 nt, Artificial Sequence
  Description of Artificial Sequence: Synthetic oligonucleotide
gaaucucagucacuguuca

SEQ ID NO: 1743372 - RNA, 19 nt, Artificial Sequence
  Description of Artificial Sequence: Synthetic oligonucleotide
ggugauaagugaucagugc

SEQ ID NO: 1743373 - RNA, 19 nt, Artificial Sequence
  Description of Artificial Sequence: Synthetic oligonucleotide
gaaaaucuagcagggcggc

SEQ ID NO: 1743374 - RNA, 19 nt, Artificial Sequence
  Description of Artificial Sequence: Synthetic oligonucleotide
gacaucagggauccccaag

SEQ ID NO: 1743375 - RNA, 19 nt, Artificial Sequence
  Description of Artificial Sequence: Synthetic oligonucleotide
gaaguacaagacgaaacuc

SEQ ID NO: 1743376 - RNA, 19 nt, Artificial Sequence
  Description of Artificial Sequence: Synthetic oligonucleotide
uguguacaagggauuggga

SEQ ID NO: 1743377 - RNA, 19 nt, Artificial Sequence
  Description of Artificial Sequence: Synthetic oligonucleotide
gaaauucauguagauguga

SEQ ID NO: 1743378 - RNA, 19 nt, Artificial Sequence
  Description of Artificial Sequence: Synthetic oligonucleotide
aggugaaugcccauuucac

SEQ ID NO: 1743379 - RNA, 19 nt, Artificial Sequence
  Description of Artificial Sequence: Synthetic oligonucleotide
gacuccuucgucuacuaaa

SEQ ID NO: 1743380 - RNA, 19 nt, Artificial Sequence
  Description of Artificial Sequence: Synthetic oligonucleotide
gauccccaagguguaaccg

SEQ ID NO: 1743381 - RNA, 19 nt, Artificial Sequence
  Description of Artificial Sequence: Synthetic oligonucleotide
ucucagucacuguucaaaa

SEQ ID NO: 1743382 - RNA, 19 nt, Artificial Sequence
  Description of Artificial Sequence: Synthetic oligonucleotide
cagucaggcacacugguuc

SEQ ID NO: 1743383 - RNA, 19 nt, Artificial Sequence
  Description of Artificial Sequence: Synthetic oligonucleotide
aguguagaagaagcaaaug

SEQ ID NO: 1743384 - RNA, 19 nt, Artificial Sequence
  Description of Artificial Sequence: Synthetic oligonucleotide
acgauaaggcuggccaugc

SEQ ID NO: 1743385 - RNA, 19 nt, Artificial Sequence
  Description of Artificial Sequence: Synthetic oligonucleotide
aaucuagcagggcggcuga

SEQ ID NO: 1743386 - RNA, 19 nt, Artificial Sequence
  Description of Artificial Sequence: Synthetic oligonucleotide
gucaugcacuuauuccugg

SEQ ID NO: 1743387 - RNA, 19 nt, Artificial Sequence
  Description of Artificial Sequence: Synthetic oligonucleotide
cugaacaaauaaucccgac

SEQ ID NO: 1743388 - RNA, 19 nt, Artificial Sequence
  Description of Artificial Sequence: Synthetic oligonucleotide
gauugggaaaccauaccga

SEQ ID NO: 1743389 - RNA, 19 nt, Artificial Sequence
  Description of Artificial Sequence: Synthetic oligonucleotide
ugcacuuauuccugguggu

SEQ ID NO: 1743390 - RNA, 19 nt, Artificial Sequence
  Description of Artificial Sequence: Synthetic oligonucleotide
augugaguagaugaguccu

SEQ ID NO: 1743391 - RNA, 19 nt, Artificial Sequence
  Description of Artificial Sequence: Synthetic oligonucleotide
uaggaaucacccugaacaa

SEQ ID NO: 1743392 - RNA, 19 nt, Artificial Sequence
  Description of Artificial Sequence: Synthetic oligonucleotide
acucaguaaccuaggaauc

SEQ ID NO: 1743393 - RNA, 19 nt, Artificial Sequence
  Description of Artificial Sequence: Synthetic oligonucleotide
uucagccgaauguaggauc

SEQ ID NO: 1743394 - RNA, 19 nt, Artificial Sequence
  Description of Artificial Sequence: Synthetic oligonucleotide
aacuugugcccuugagaca

SEQ ID NO: 1743395 - RNA, 19 nt, Artificial Sequence
  Description of Artificial Sequence: Synthetic oligonucleotide
ucacaauaacuugugcccu

SEQ ID NO: 1743396 - RNA, 19 nt, Artificial Sequence
  Description of Artificial Sequence: Synthetic oligonucleotide
gguguaaccgaugauggug

SEQ ID NO: 1743397 - RNA, 19 nt, Artificial Sequence
  Description of Artificial Sequence: Synthetic oligonucleotide
ucccuaaacucaguaaccu

SEQ ID NO: 1743398 - RNA, 19 nt, Artificial Sequence
  Description of Artificial Sequence: Synthetic oligonucleotide
acaguacaaucuguggauc

SEQ ID NO: 1743399 - RNA, 19 nt, Artificial Sequence
  Description of Artificial Sequence: Synthetic oligonucleotide
ucaguaaccuaggaaucac

SEQ ID NO: 1743400 - RNA, 19 nt, Artificial Sequence
  Description of Artificial Sequence: Synthetic oligonucleotide
accgagcccaaucaagaug

SEQ ID NO: 1743401 - RNA, 19 nt, Artificial Sequence
  Description of Artificial Sequence: Synthetic oligonucleotide
  modified_base (3)..(3): a, c, u, g, unknown or other
uunaccccagcagacagua

SEQ ID NO: 1743402 - RNA, 19 nt, Artificial Sequence
  Description of Artificial Sequence: Synthetic oligonucleotide
gacgaaacucaguggccag

SEQ ID NO: 1743403 - RNA, 19 nt, Artificial Sequence
  Description of Artificial Sequence: Synthetic oligonucleotide
cuucgucuacuaaagaaaa

SEQ ID NO: 1743404 - RNA, 19 nt, Artificial Sequence
  Description of Artificial Sequence: Synthetic oligonucleotide
ucucaacuaaugguuaaau

SEQ ID NO: 1743405 - RNA, 19 nt, Artificial Sequence
  Description of Artificial Sequence: Synthetic oligonucleotide
ugugaguagaugaguccuc

SEQ ID NO: 1743406 - RNA, 19 nt, Artificial Sequence
  Description of Artificial Sequence: Synthetic oligonucleotide
ucaaagucucuggucauaa

SEQ ID NO: 1743407 - RNA, 19 nt, Artificial Sequence
  Description of Artificial Sequence: Synthetic oligonucleotide
ucagcggacccucuccugu

SEQ ID NO: 1743408 - RNA, 19 nt, Artificial Sequence
  Description of Artificial Sequence: Synthetic oligonucleotide
guugugccuggcuugggcc

SEQ ID NO: 1743409 - RNA, 19 nt, Artificial Sequence
  Description of Artificial Sequence: Synthetic oligonucleotide
aucagggauccccaaggug

SEQ ID NO: 1743410 - RNA, 19 nt, Artificial Sequence
  Description of Artificial Sequence: Synthetic oligonucleotide
aggauccguaauccacagc

SEQ ID NO: 1743411 - RNA, 19 nt, Artificial Sequence
  Description of Artificial Sequence: Synthetic oligonucleotide
aaucuguggaucaucgauu

SEQ ID NO: 1743412 - RNA, 19 nt, Artificial Sequence
  Description of Artificial Sequence: Synthetic oligonucleotide
  modified_base (7)..(7): a, c, u, g, unknown or other
ggaauunaccccagcagac

SEQ ID NO: 1743413 - RNA, 19 nt, Artificial Sequence
  Description of Artificial Sequence: Synthetic oligonucleotide
gguuuguugcaauugggga

SEQ ID NO: 1743414 - RNA, 19 nt, Artificial Sequence
  Description of Artificial Sequence: Synthetic oligonucleotide
gaaaccauaccgaaugggu

SEQ ID NO: 1743415 - RNA, 19 nt, Artificial Sequence
  Description of Artificial Sequence: Synthetic oligonucleotide
aucuguggaucaucgauua

SEQ ID NO: 1743416 - RNA, 19 nt, Artificial Sequence
  Description of Artificial Sequence: Synthetic oligonucleotide
ugguuggugaaauguucac

SEQ ID NO: 1743417 - RNA, 19 nt, Artificial Sequence
  Description of Artificial Sequence: Synthetic oligonucleotide
ugaguagaugaguccucug

SEQ ID NO: 1743418 - RNA, 19 nt, Artificial Sequence
  Description of Artificial Sequence: Synthetic oligonucleotide
auguagaugugaguagaug

SEQ ID NO: 1743419 - RNA, 19 nt, Artificial Sequence
  Description of Artificial Sequence: Synthetic oligonucleotide
agugaaguacaagacgaaa

SEQ ID NO: 1743420 - RNA, 19 nt, Artificial Sequence
  Description of Artificial Sequence: Synthetic oligonucleotide
gacaguacaaucuguggau

SEQ ID NO: 1743421 - RNA, 19 nt, Artificial Sequence
  Description of Artificial Sequence: Synthetic oligonucleotide
guacaagggauugggaaac

SEQ ID NO: 1743422 - RNA, 19 nt, Artificial Sequence
  Description of Artificial Sequence: Synthetic oligonucleotide
augggugauaagugaucag

SEQ ID NO: 1743423 - RNA, 19 nt, Artificial Sequence
  Description of Artificial Sequence: Synthetic oligonucleotide
ugcccauuucacgauuucc

SEQ ID NO: 1743424 - RNA, 19 nt, Artificial Sequence
  Description of Artificial Sequence: Synthetic oligonucleotide
ugaaugcccauuucacgau

SEQ ID NO: 1743425 - RNA, 19 nt, Artificial Sequence
  Description of Artificial Sequence: Synthetic oligonucleotide
acacaggugacuccuucgu

SEQ ID NO: 1743426 - RNA, 19 nt, Artificial Sequence
  Description of Artificial Sequence: Synthetic oligonucleotide
uuaacacauucugugguuu

SEQ ID NO: 1743427 - RNA, 19 nt, Artificial Sequence
  Description of Artificial Sequence: Synthetic oligonucleotide
cauaguguagaagaagcaa

SEQ ID NO: 1743428 - RNA, 19 nt, Artificial Sequence
  Description of Artificial Sequence: Synthetic oligonucleotide
ucacgauuuccaguuugcc

SEQ ID NO: 1743429 - RNA, 19 nt, Artificial Sequence
  Description of Artificial Sequence: Synthetic oligonucleotide
agacgaaacucaguggcca

SEQ ID NO: 1743430 - RNA, 19 nt, Artificial Sequence
  Description of Artificial Sequence: Synthetic oligonucleotide
  modified_base (6)..(6): a, c, u, g, unknown or other
gaauunaccccagcagaca

SEQ ID NO: 1743431 - RNA, 19 nt, Artificial Sequence
  Description of Artificial Sequence: Synthetic oligonucleotide
ugguggucuugcucagugg

SEQ ID NO: 1743432 - RNA, 19 nt, Artificial Sequence
  Description of Artificial Sequence: Synthetic oligonucleotide
gauaagugaucagugcuua

SEQ ID NO: 1743433 - RNA, 19 nt, Artificial Sequence
  Description of Artificial Sequence: Synthetic oligonucleotide
agacagucugcaguuaaca

SEQ ID NO: 1743434 - RNA, 19 nt, Artificial Sequence
  Description of Artificial Sequence: Synthetic oligonucleotide
cacgauuuccaguuugcca

SEQ ID NO: 1743435 - RNA, 19 nt, Artificial Sequence
  Description of Artificial Sequence: Synthetic oligonucleotide
gaaugggugauaagugauc

SEQ ID NO: 1743436 - RNA, 19 nt, Artificial Sequence
  Description of Artificial Sequence: Synthetic oligonucleotide
auccccaagguguaaccga

SEQ ID NO: 1743437 - RNA, 19 nt, Artificial Sequence
  Description of Artificial Sequence: Synthetic oligonucleotide
ugucucaacuugguggagu

SEQ ID NO: 1743438 - RNA, 19 nt, Artificial Sequence
  Description of Artificial Sequence: Synthetic oligonucleotide
acaauaacuugugcccuug

SEQ ID NO: 1743439 - RNA, 19 nt, Artificial Sequence
  Description of Artificial Sequence: Synthetic oligonucleotide
accgaaugggugauaagug

SEQ ID NO: 1743440 - RNA, 19 nt, Artificial Sequence
  Description of Artificial Sequence: Synthetic oligonucleotide
ggaguuauucugcauaaua

SEQ ID NO: 1743441 - RNA, 19 nt, Artificial Sequence
  Description of Artificial Sequence: Synthetic oligonucleotide
aaucucagucacuguucaa

SEQ ID NO: 1743442 - RNA, 19 nt, Artificial Sequence
  Description of Artificial Sequence: Synthetic oligonucleotide
acaaucuguggaucaucga

SEQ ID NO: 1743443 - RNA, 19 nt, Artificial Sequence
  Description of Artificial Sequence: Synthetic oligonucleotide
caggugaaugcccauuuca

SEQ ID NO: 1743444 - RNA, 19 nt, Artificial Sequence
  Description of Artificial Sequence: Synthetic oligonucleotide
  modified_base (11)..(11): a, c, u, g, unknown or other
uccuggaauunaccccagc

SEQ ID NO: 1743445 - RNA, 19 nt, Artificial Sequence
  Description of Artificial Sequence: Synthetic oligonucleotide
auguaggauccguaaucca

SEQ ID NO: 1743446 - RNA, 19 nt, Artificial Sequence
  Description of Artificial Sequence: Synthetic oligonucleotide
gauccccaugaugacauca

SEQ ID NO: 1743447 - RNA, 19 nt, Artificial Sequence
  Description of Artificial Sequence: Synthetic oligonucleotide
agcccaaucaagaugucaa

SEQ ID NO: 1743448 - RNA, 19 nt, Artificial Sequence
  Description of Artificial Sequence: Synthetic oligonucleotide
cauuucacgauuuccaguu

SEQ ID NO: 1743449 - RNA, 19 nt, Artificial Sequence
  Description of Artificial Sequence: Synthetic oligonucleotide
caguuagcagccaguuuug

SEQ ID NO: 1743450 - RNA, 19 nt, Artificial Sequence
  Description of Artificial Sequence: Synthetic oligonucleotide
aucaucgauuaagccagag

SEQ ID NO: 1743451 - RNA, 19 nt, Artificial Sequence
  Description of Artificial Sequence: Synthetic oligonucleotide
guggaguuauucugcauaa

SEQ ID NO: 1743452 - RNA, 19 nt, Artificial Sequence
  Description of Artificial Sequence: Synthetic oligonucleotide
uccccaagguguaaccgau

SEQ ID NO: 1743453 - RNA, 19 nt, Artificial Sequence
  Description of Artificial Sequence: Synthetic oligonucleotide
cgauccauaguguagaaga

SEQ ID NO: 1743454 - RNA, 19 nt, Artificial Sequence
  Description of Artificial Sequence: Synthetic oligonucleotide
uagggugucuucugugaaa

SEQ ID NO: 1743455 - RNA, 19 nt, Artificial Sequence
  Description of Artificial Sequence: Synthetic oligonucleotide
aaccuaggaaucacccuga

SEQ ID NO: 1743456 - RNA, 19 nt, Artificial Sequence
  Description of Artificial Sequence: Synthetic oligonucleotide
uguaaccgaugauggugac

SEQ ID NO: 1743457 - RNA, 19 nt, Artificial Sequence
  Description of Artificial Sequence: Synthetic oligonucleotide
caguacaaucuguggauca

SEQ ID NO: 1743458 - RNA, 19 nt, Artificial Sequence
  Description of Artificial Sequence: Synthetic oligonucleotide
guggcauugucaugucaug

SEQ ID NO: 1743459 - RNA, 19 nt, Artificial Sequence
  Description of Artificial Sequence: Synthetic oligonucleotide
gaagacacaggugacuccu

SEQ ID NO: 1743460 - RNA, 19 nt, Artificial Sequence
  Description of Artificial Sequence: Synthetic oligonucleotide
acgaaacucaguggccagg

SEQ ID NO: 1743461 - RNA, 19 nt, Artificial Sequence
  Description of Artificial Sequence: Synthetic oligonucleotide
auaagugaucagugcuuaa

SEQ ID NO: 1743462 - RNA, 19 nt, Artificial Sequence
  Description of Artificial Sequence: Synthetic oligonucleotide
aguacaaucuguggaucau

SEQ ID NO: 1743463 - RNA, 19 nt, Artificial Sequence
  Description of Artificial Sequence: Synthetic oligonucleotide
ucccagcgggguuuguugc

SEQ ID NO: 1743464 - RNA, 19 nt, Artificial Sequence
  Description of Artificial Sequence: Synthetic oligonucleotide
  modified_base (10)..(10): a, c, u, g, unknown or other
ccuggaauunaccccagca

SEQ ID NO: 1743465 - RNA, 19 nt, Artificial Sequence
  Description of Artificial Sequence: Synthetic oligonucleotide
gggauugggaaaccauacc

SEQ ID NO: 1743466 - RNA, 19 nt, Artificial Sequence
  Description of Artificial Sequence: Synthetic oligonucleotide
aggugacuccuucgucuac

SEQ ID NO: 1743467 - RNA, 19 nt, Artificial Sequence
  Description of Artificial Sequence: Synthetic oligonucleotide
ucuguggaucaucgauuaa

SEQ ID NO: 1743468 - RNA, 19 nt, Artificial Sequence
  Description of Artificial Sequence: Synthetic oligonucleotide
aaugcccauuucacgauuu

SEQ ID NO: 1743469 - RNA, 19 nt, Artificial Sequence
  Description of Artificial Sequence: Synthetic oligonucleotide
cucaguaaccuaggaauca

SEQ ID NO: 1743470 - RNA, 19 nt, Artificial Sequence
  Description of Artificial Sequence: Synthetic oligonucleotide
agguguaaccgaugauggu

SEQ ID NO: 1743471 - RNA, 19 nt, Artificial Sequence
  Description of Artificial Sequence: Synthetic oligonucleotide
accauuucucccagcgggg

SEQ ID NO: 1743472 - RNA, 19 nt, Artificial Sequence
  Description of Artificial Sequence: Synthetic oligonucleotide
agaccgagcccaaucaaga

SEQ ID NO: 1743473 - RNA, 19 nt, Artificial Sequence
  Description of Artificial Sequence: Synthetic oligonucleotide
acaagggauugggaaacca

SEQ ID NO: 1743474 - RNA, 19 nt, Artificial Sequence
  Description of Artificial Sequence: Synthetic oligonucleotide
cccucaaguaaaacaauuc

SEQ ID NO: 1743475 - RNA, 19 nt, Artificial Sequence
  Description of Artificial Sequence: Synthetic oligonucleotide
guaaccgaugauggugacc

SEQ ID NO: 1743476 - RNA, 19 nt, Artificial Sequence
  Description of Artificial Sequence: Synthetic oligonucleotide
gaagaccgagcccaaucaa

SEQ ID NO: 1743477 - RNA, 19 nt, Artificial Sequence
  Description of Artificial Sequence: Synthetic oligonucleotide
guguaaccgaugaugguga

SEQ ID NO: 1743478 - RNA, 19 nt, Artificial Sequence
  Description of Artificial Sequence: Synthetic oligonucleotide
gugguuggugaaauguuca

SEQ ID NO: 1743479 - RNA, 19 nt, Artificial Sequence
  Description of Artificial Sequence: Synthetic oligonucleotide
cucccagcgggguuuguug

SEQ ID NO: 1743480 - RNA, 19 nt, Artificial Sequence
  Description of Artificial Sequence: Synthetic oligonucleotide
cauaccgaaugggugauaa

SEQ ID NO: 1743481 - RNA, 19 nt, Artificial Sequence
  Description of Artificial Sequence: Synthetic oligonucleotide
acggcgggcaagaauccac

SEQ ID NO: 1743482 - RNA, 19 nt, Artificial Sequence
  Description of Artificial Sequence: Synthetic oligonucleotide
caaucuguggaucaucgau

SEQ ID NO: 1743483 - RNA, 19 nt, Artificial Sequence
  Description of Artificial Sequence: Synthetic oligonucleotide
gagacagucugcaguuaac

SEQ ID NO: 1743484 - RNA, 19 nt, Artificial Sequence
  Description of Artificial Sequence: Synthetic oligonucleotide
ggugugucucaacuuggug

SEQ ID NO: 1743485 - RNA, 19 nt, Artificial Sequence
  Description of Artificial Sequence: Synthetic oligonucleotide
gggugauaagugaucagug

SEQ ID NO: 1743486 - RNA, 19 nt, Artificial Sequence
  Description of Artificial Sequence: Synthetic oligonucleotide
caucccuccgggaggggag

SEQ ID NO: 1743487 - RNA, 19 nt, Artificial Sequence
  Description of Artificial Sequence: Synthetic oligonucleotide
acacauugcucccgaugga

SEQ ID NO: 1743488 - RNA, 19 nt, Artificial Sequence
  Description of Artificial Sequence: Synthetic oligonucleotide
cacgauaaggcuggccaug

SEQ ID NO: 1743489 - RNA, 19 nt, Artificial Sequence
  Description of Artificial Sequence: Synthetic oligonucleotide
uggcguguaggguccuuca

SEQ ID NO: 1743490 - RNA, 19 nt, Artificial Sequence
  Description of Artificial Sequence: Synthetic oligonucleotide
  modified_base (4)..(4): a, c, u, g, unknown or other
auunaccccagcagacagu

SEQ ID NO: 1743491 - RNA, 19 nt, Artificial Sequence
  Description of Artificial Sequence: Synthetic oligonucleotide
ugacuccuucgucuacuaa

SEQ ID NO: 1743492 - RNA, 19 nt, Artificial Sequence
  Description of Artificial Sequence: Synthetic oligonucleotide
caauucccuaaacucagua

SEQ ID NO: 1743493 - RNA, 19 nt, Artificial Sequence
  Description of Artificial Sequence: Synthetic oligonucleotide
ugcgauccauaguguagaa

SEQ ID NO: 1743494 - RNA, 19 nt, Artificial Sequence
  Description of Artificial Sequence: Synthetic oligonucleotide
auggcguguaggguccuuc

SEQ ID NO: 1743495 - RNA, 19 nt, Artificial Sequence
  Description of Artificial Sequence: Synthetic oligonucleotide
gagcccaaucaagauguca

SEQ ID NO: 1743496 - RNA, 19 nt, Artificial Sequence
  Description of Artificial Sequence: Synthetic oligonucleotide
gauccguaauccacagcca

SEQ ID NO: 1743497 - RNA, 19 nt, Artificial Sequence
  Description of Artificial Sequence: Synthetic oligonucleotide
gcugcgauccauaguguag

SEQ ID NO: 1743498 - RNA, 19 nt, Artificial Sequence
  Description of Artificial Sequence: Synthetic oligonucleotide
ggauuggaguaaguugugc

SEQ ID NO: 1743499 - RNA, 19 nt, Artificial Sequence
  Description of Artificial Sequence: Synthetic oligonucleotide
auuucacgauuuccaguuu

SEQ ID NO: 1743500 - RNA, 19 nt, Artificial Sequence
  Description of Artificial Sequence: Synthetic oligonucleotide
aucccgacacuuccugcca

SEQ ID NO: 1743501 - RNA, 19 nt, Artificial Sequence
  Description of Artificial Sequence: Synthetic oligonucleotide
caucccuugucuggccacg

SEQ ID NO: 1743502 - RNA, 19 nt, Artificial Sequence
  Description of Artificial Sequence: Synthetic oligonucleotide
ccuucgucuacuaaagaaa

SEQ ID NO: 1743503 - RNA, 19 nt, Artificial Sequence
  Description of Artificial Sequence: Synthetic oligonucleotide
ugacaucagggauccccaa

SEQ ID NO: 1743504 - RNA, 19 nt, Artificial Sequence
  Description of Artificial Sequence: Synthetic oligonucleotide
ugagcggugguuggugaaa

SEQ ID NO: 1743505 - RNA, 19 nt, Artificial Sequence
  Description of Artificial Sequence: Synthetic oligonucleotide
agcggugguuggugaaaug

SEQ ID NO: 1743506 - RNA, 19 nt, Artificial Sequence
  Description of Artificial Sequence: Synthetic oligonucleotide
aguuagcagccaguuuugu

SEQ ID NO: 1743507 - RNA, 19 nt, Artificial Sequence
  Description of Artificial Sequence: Synthetic oligonucleotide
gcaauuggggacagugaag

SEQ ID NO: 1743508 - RNA, 19 nt, Artificial Sequence
  Description of Artificial Sequence: Synthetic oligonucleotide
cacaggugacuccuucguc

SEQ ID NO: 1743509 - RNA, 19 nt, Artificial Sequence
  Description of Artificial Sequence: Synthetic oligonucleotide
cugcgauccauaguguaga

SEQ ID NO: 1743510 - RNA, 19 nt, Artificial Sequence
  Description of Artificial Sequence: Synthetic oligonucleotide
aggaaucacccugaacaaa

SEQ ID NO: 1743511 - RNA, 19 nt, Artificial Sequence
  Description of Artificial Sequence: Synthetic oligonucleotide
ggugguggcauugucaugu

SEQ ID NO: 1743512 - RNA, 19 nt, Artificial Sequence
  Description of Artificial Sequence: Synthetic oligonucleotide
aucagugcuuaaaguaaau

SEQ ID NO: 1743513 - RNA, 19 nt, Artificial Sequence
  Description of Artificial Sequence: Synthetic oligonucleotide
  modified_base (2)..(2): a, c, u, g, unknown or other
unaccccagcagacaguac

SEQ ID NO: 1743514 - RNA, 19 nt, Artificial Sequence
  Description of Artificial Sequence: Synthetic oligonucleotide
cucaacuaaugguuaaauu

SEQ ID NO: 1743515 - RNA, 19 nt, Artificial Sequence
  Description of Artificial Sequence: Synthetic oligonucleotide
ugcucccgauggaauugga

SEQ ID NO: 1743516 - RNA, 19 nt, Artificial Sequence
  Description of Artificial Sequence: Synthetic oligonucleotide
gaguaaguugugccuggcu

SEQ ID NO: 1743517 - RNA, 19 nt, Artificial Sequence
  Description of Artificial Sequence: Synthetic oligonucleotide
agccgaauguaggauccgu

SEQ ID NO: 1743518 - RNA, 19 nt, Artificial Sequence
  Description of Artificial Sequence: Synthetic oligonucleotide
cagugaaguacaagacgaa

SEQ ID NO: 1743519 - RNA, 19 nt, Artificial Sequence
  Description of Artificial Sequence: Synthetic oligonucleotide
gguuucucaacuaaugguu

SEQ ID NO: 1743520 - RNA, 19 nt, Artificial Sequence
  Description of Artificial Sequence: Synthetic oligonucleotide
ccugaacaaauaaucccga

SEQ ID NO: 1743521 - RNA, 19 nt, Artificial Sequence
  Description of Artificial Sequence: Synthetic oligonucleotide
cuccgggaggggaggagug

SEQ ID NO: 1743522 - RNA, 19 nt, Artificial Sequence
  Description of Artificial Sequence: Synthetic oligonucleotide
gguggucuugcucaguggu

SEQ ID NO: 1743523 - RNA, 19 nt, Artificial Sequence
  Description of Artificial Sequence: Synthetic oligonucleotide
caauaacuugugcccuuga

SEQ ID NO: 1743524 - RNA, 19 nt, Artificial Sequence
  Description of Artificial Sequence: Synthetic oligonucleotide
ucccgacacuuccugccau

SEQ ID NO: 1743525 - RNA, 19 nt, Artificial Sequence
  Description of Artificial Sequence: Synthetic oligonucleotide
cucaacuugguggaguuau

SEQ ID NO: 1743526 - RNA, 19 nt, Artificial Sequence
  Description of Artificial Sequence: Synthetic oligonucleotide
aaauggcguguaggguccu

SEQ ID NO: 1743527 - RNA, 19 nt, Artificial Sequence
  Description of Artificial Sequence: Synthetic oligonucleotide
aaccgaugauggugaccau

SEQ ID NO: 1743528 - RNA, 19 nt, Artificial Sequence
  Description of Artificial Sequence: Synthetic oligonucleotide
agcgggguuuguugcaauu

SEQ ID NO: 1743529 - RNA, 19 nt, Artificial Sequence
  Description of Artificial Sequence: Synthetic oligonucleotide
gcagccaguuuuguucuag

SEQ ID NO: 1743530 - RNA, 19 nt, Artificial Sequence
  Description of Artificial Sequence: Synthetic oligonucleotide
ccaucagcggacccucucc

SEQ ID NO: 1743531 - RNA, 19 nt, Artificial Sequence
  Description of Artificial Sequence: Synthetic oligonucleotide
cgggguuuguugcaauugg

SEQ ID NO: 1743532 - RNA, 19 nt, Artificial Sequence
  Description of Artificial Sequence: Synthetic oligonucleotide
ccgaaugggugauaaguga

SEQ ID NO: 1743533 - RNA, 19 nt, Artificial Sequence
  Description of Artificial Sequence: Synthetic oligonucleotide
accauaccgaaugggugau

SEQ ID NO: 1743534 - RNA, 19 nt, Artificial Sequence
  Description of Artificial Sequence: Synthetic oligonucleotide
ggcgggcaagaauccacag

SEQ ID NO: 1743535 - RNA, 19 nt, Artificial Sequence
  Description of Artificial Sequence: Synthetic oligonucleotide
gcccagugagagaagacac

SEQ ID NO: 1743536 - RNA, 19 nt, Artificial Sequence
  Description of Artificial Sequence: Synthetic oligonucleotide
ugauccccaugaugacauc

SEQ ID NO: 1743537 - RNA, 19 nt, Artificial Sequence
  Description of Artificial Sequence: Synthetic oligonucleotide
ucccuugucuggccacgau

SEQ ID NO: 1743538 - RNA, 19 nt, Artificial Sequence
  Description of Artificial Sequence: Synthetic oligonucleotide
cccaagguguaaccgauga

SEQ ID NO: 1743539 - RNA, 19 nt, Artificial Sequence
  Description of Artificial Sequence: Synthetic oligonucleotide
ucucaacuugguggaguua

SEQ ID NO: 1743540 - RNA, 19 nt, Artificial Sequence
  Description of Artificial Sequence: Synthetic oligonucleotide
gcguguaggguccuucauc

SEQ ID NO: 1743541 - RNA, 19 nt, Artificial Sequence
  Description of Artificial Sequence: Synthetic oligonucleotide
cagccgaauguaggauccg

SEQ ID NO: 1743542 - RNA, 19 nt, Artificial Sequence
  Description of Artificial Sequence: Synthetic oligonucleotide
gaaugcccauuucacgauu

SEQ ID NO: 1743543 - RNA, 19 nt, Artificial Sequence
  Description of Artificial Sequence: Synthetic oligonucleotide
gggauuggaguaaguugug

SEQ ID NO: 1743544 - RNA, 19 nt, Artificial Sequence
  Description of Artificial Sequence: Synthetic oligonucleotide
ggaguaaguugugccuggc

SEQ ID NO: 1743545 - RNA, 19 nt, Artificial Sequence
  Description of Artificial Sequence: Synthetic oligonucleotide
gucaaauggcguguagggu

SEQ ID NO: 1743546 - RNA, 19 nt, Artificial Sequence
  Description of Artificial Sequence: Synthetic oligonucleotide
gcgauccauaguguagaag

SEQ ID NO: 1743547 - RNA, 19 nt, Artificial Sequence
  Description of Artificial Sequence: Synthetic oligonucleotide
gcaugggugugucucaacu

SEQ ID NO: 1743548 - RNA, 19 nt, Artificial Sequence
  Description of Artificial Sequence: Synthetic oligonucleotide
ccgagcccaaucaagaugu

SEQ ID NO: 1743549 - RNA, 19 nt, Artificial Sequence
  Description of Artificial Sequence: Synthetic oligonucleotide
gaucaucgauuaagccaga

SEQ ID NO: 1743550 - RNA, 19 nt, Artificial Sequence
  Description of Artificial Sequence: Synthetic oligonucleotide
ucucccagcgggguuuguu

SEQ ID NO: 1743551 - RNA, 19 nt, Artificial Sequence
  Description of Artificial Sequence: Synthetic oligonucleotide
gucucaacuugguggaguu

SEQ ID NO: 1743552 - RNA, 19 nt, Artificial Sequence
  Description of Artificial Sequence: Synthetic oligonucleotide
gaccgagcccaaucaagau

SEQ ID NO: 1743553 - RNA, 19 nt, Artificial Sequence
  Description of Artificial Sequence: Synthetic oligonucleotide
ggugaccauccacaccauc

SEQ ID NO: 1743554 - RNA, 19 nt, Artificial Sequence
  Description of Artificial Sequence: Synthetic oligonucleotide
gguggcauugucaugucau

SEQ ID NO: 1743555 - RNA, 19 nt, Artificial Sequence
  Description of Artificial Sequence: Synthetic oligonucleotide
aagacacaggugacuccuu

SEQ ID NO: 1743556 - RNA, 19 nt, Artificial Sequence
  Description of Artificial Sequence: Synthetic oligonucleotide
caggugacuccuucgucua

SEQ ID NO: 1743557 - RNA, 19 nt, Artificial Sequence
  Description of Artificial Sequence: Synthetic oligonucleotide
cucagucacuguucaaaau

SEQ ID NO: 1743558 - RNA, 19 nt, Artificial Sequence
  Description of Artificial Sequence: Synthetic oligonucleotide
guacaagacgaaacucagu

SEQ ID NO: 1743559 - RNA, 19 nt, Artificial Sequence
  Description of Artificial Sequence: Synthetic oligonucleotide
cgucuacuaaagaaaagua

SEQ ID NO: 1743560 - RNA, 19 nt, Artificial Sequence
  Description of Artificial Sequence: Synthetic oligonucleotide
gugacuccuucgucuacua

SEQ ID NO: 1743561 - RNA, 19 nt, Artificial Sequence
  Description of Artificial Sequence: Synthetic oligonucleotide
cagggcggcugagcggugg

SEQ ID NO: 1743562 - RNA, 19 nt, Artificial Sequence
  Description of Artificial Sequence: Synthetic oligonucleotide
gucauaaauuagggugucu

SEQ ID NO: 1743563 - RNA, 19 nt, Artificial Sequence
  Description of Artificial Sequence: Synthetic oligonucleotide
ggccaucccuccgggaggg

SEQ ID NO: 1743564 - RNA, 19 nt, Artificial Sequence
  Description of Artificial Sequence: Synthetic oligonucleotide
gggauccccaagguguaac

SEQ ID NO: 1743565 - RNA, 19 nt, Artificial Sequence
  Description of Artificial Sequence: Synthetic oligonucleotide
cugagcggugguuggugaa

SEQ ID NO: 1743566 - RNA, 19 nt, Artificial Sequence
  Description of Artificial Sequence: Synthetic oligonucleotide
agggcggcugagcgguggu

SEQ ID NO: 1743567 - RNA, 19 nt, Artificial Sequence
  Description of Artificial Sequence: Synthetic oligonucleotide
ccgauggaauuggaccacg

SEQ ID NO: 1743568 - RNA, 19 nt, Artificial Sequence
  Description of Artificial Sequence: Synthetic oligonucleotide
agcggacccucuccuguuu

SEQ ID NO: 1743569 - RNA, 19 nt, Artificial Sequence
  Description of Artificial Sequence: Synthetic oligonucleotide
cagggauccccaaggugua

SEQ ID NO: 1743570 - RNA, 19 nt, Artificial Sequence
  Description of Artificial Sequence: Synthetic oligonucleotide
gcacuuauuccuggugguc

SEQ ID NO: 1743571 - RNA, 19 nt, Artificial Sequence
  Description of Artificial Sequence: Synthetic oligonucleotide
gcucccgauggaauuggac

SEQ ID NO: 1743572 - RNA, 19 nt, Artificial Sequence
  Description of Artificial Sequence: Synthetic oligonucleotide
ccaggugaaugcccauuuc

SEQ ID NO: 1743573 - RNA, 19 nt, Artificial Sequence
  Description of Artificial Sequence: Synthetic oligonucleotide
gaauuggaccacggccaua

SEQ ID NO: 1743574 - RNA, 19 nt, Artificial Sequence
  Description of Artificial Sequence: Synthetic oligonucleotide
caucagcggacccucuccu

SEQ ID NO: 1743575 - RNA, 19 nt, Artificial Sequence
  Description of Artificial Sequence: Synthetic oligonucleotide
gagugaaacuggccagcuu

SEQ ID NO: 1743576 - RNA, 19 nt, Artificial Sequence
  Description of Artificial Sequence: Synthetic oligonucleotide
cgauuaagccagagcccag

SEQ ID NO: 1743577 - RNA, 19 nt, Artificial Sequence
  Description of Artificial Sequence: Synthetic oligonucleotide
gccaucagcggacccucuc

SEQ ID NO: 1743578 - RNA, 19 nt, Artificial Sequence
  Description of Artificial Sequence: Synthetic oligonucleotide
ccauuucacgauuuccagu

SEQ ID NO: 1743579 - RNA, 19 nt, Artificial Sequence
  Description of Artificial Sequence: Synthetic oligonucleotide
gcggugguuggugaaaugu

SEQ ID NO: 1743580 - RNA, 19 nt, Artificial Sequence
  Description of Artificial Sequence: Synthetic oligonucleotide
ggaauuggaccacggccau

SEQ ID NO: 1743581 - RNA, 19 nt, Artificial Sequence
  Description of Artificial Sequence: Synthetic oligonucleotide
cccuaaacucaguaaccua

SEQ ID NO: 1743582 - RNA, 19 nt, Artificial Sequence
  Description of Artificial Sequence: Synthetic oligonucleotide
ggccacgauaaggcuggcc

SEQ ID NO: 1743583 - RNA, 19 nt, Artificial Sequence
  Description of Artificial Sequence: Synthetic oligonucleotide
cccgauggaauuggaccac

SEQ ID NO: 1743584 - RNA, 19 nt, Artificial Sequence
  Description of Artificial Sequence: Synthetic oligonucleotide
ccccaagguguaaccgaug

SEQ ID NO: 1743585 - RNA, 19 nt, Artificial Sequence
  Description of Artificial Sequence: Synthetic oligonucleotide
gcgggcaagaauccacagu

SEQ ID NO: 1743586 - RNA, 19 nt, Artificial Sequence
  Description of Artificial Sequence: Synthetic oligonucleotide
cggacccucuccuguuucc

SEQ ID NO: 1743587 - RNA, 19 nt, Artificial Sequence
  Description of Artificial Sequence: Synthetic oligonucleotide
cacggcgggcaagaaucca

SEQ ID NO: 1743588 - RNA, 19 nt, Artificial Sequence
  Description of Artificial Sequence: Synthetic oligonucleotide
cccgacacuuccugccauc

SEQ ID NO: 1743589 - RNA, 19 nt, Artificial Sequence
  Description of Artificial Sequence: Synthetic oligonucleotide
acagcacggcgggcaagaa

SEQ ID NO: 1743590 - RNA, 19 nt, Artificial Sequence
  Description of Artificial Sequence: Synthetic oligonucleotide
gcggacccucuccuguuuc

SEQ ID NO: 1743591 - RNA, 19 nt, Artificial Sequence
  Description of Artificial Sequence: Synthetic oligonucleotide
ccccucaaguaaaacaauu

SEQ ID NO: 1743592 - RNA, 19 nt, Artificial Sequence
  Description of Artificial Sequence: Synthetic oligonucleotide
gucaugucaugcacuuauu

SEQ ID NO: 1743593 - RNA, 19 nt, Artificial Sequence
  Description of Artificial Sequence: Synthetic oligonucleotide
agucugcaguuaacacauu

SEQ ID NO: 1743594 - RNA, 19 nt, Artificial Sequence
  Description of Artificial Sequence: Synthetic oligonucleotide
cccuugucuggccacgaua

SEQ ID NO: 1743595 - RNA, 19 nt, Artificial Sequence
  Description of Artificial Sequence: Synthetic oligonucleotide
cccagcgggguuuguugca

SEQ ID NO: 1743596 - RNA, 19 nt, Artificial Sequence
  Description of Artificial Sequence: Synthetic oligonucleotide
cagcacggcgggcaagaau

SEQ ID NO: 1743597 - RNA, 19 nt, Artificial Sequence
  Description of Artificial Sequence: Synthetic oligonucleotide
ggcguguaggguccuucau

SEQ ID NO: 1743598 - RNA, 19 nt, Artificial Sequence
  Description of Artificial Sequence: Synthetic oligonucleotide
ggacccucuccuguuuccu

SEQ ID NO: 1743599 - RNA, 19 nt, Artificial Sequence
  Description of Artificial Sequence: Synthetic oligonucleotide
ggccaguuagcagccaguu

SEQ ID NO: 1743600 - RNA, 19 nt, Artificial Sequence
  Description of Artificial Sequence: Synthetic oligonucleotide
ccaucccuccgggagggga

SEQ ID NO: 1743601 - RNA, 19 nt, Artificial Sequence
  Description of Artificial Sequence: Synthetic oligonucleotide
cggcgggcaagaauccaca

SEQ ID NO: 1743602 - RNA, 19 nt, Artificial Sequence
  Description of Artificial Sequence: Synthetic oligonucleotide
ccaagguguaaccgaugau

SEQ ID NO: 1743603 - RNA, 19 nt, Artificial Sequence
  Description of Artificial Sequence: Synthetic oligonucleotide
cagcgggguuuguugcaau

SEQ ID NO: 1743604 - RNA, 19 nt, Artificial Sequence
  Description of Artificial Sequence: Synthetic oligonucleotide
gccaucccuccgggagggg

SEQ ID NO: 1743605 - RNA, 19 nt, Artificial Sequence
  Description of Artificial Sequence: Synthetic oligonucleotide
cagcggacccucuccuguu

SEQ ID NO: 1743606 - RNA, 19 nt, Artificial Sequence
  Description of Artificial Sequence: Synthetic oligonucleotide
ccagcgggguuuguugcaa

SEQ ID NO: 1743607 - RNA, 19 nt, Artificial Sequence
  Description of Artificial Sequence: Synthetic oligonucleotide
ccuggccaucccuccggga

SEQ ID NO: 1743608 - RNA, 19 nt, Artificial Sequence
  Description of Artificial Sequence: Synthetic oligonucleotide
ccauaccgaaugggugaua

SEQ ID NO: 1743609 - RNA, 19 nt, Artificial Sequence
  Description of Artificial Sequence: Synthetic oligonucleotide
aacgcaauggcauagaggc

SEQ ID NO: 1743610 - RNA, 19 nt, Artificial Sequence
  Description of Artificial Sequence: Synthetic oligonucleotide
uucuguauagguaguaugg

SEQ ID NO: 1743611 - RNA, 19 nt, Artificial Sequence
  Description of Artificial Sequence: Synthetic oligonucleotide
gagauuguacggcagaucg

SEQ ID NO: 1743612 - RNA, 19 nt, Artificial Sequence
  Description of Artificial Sequence: Synthetic oligonucleotide
uguauagguaguauggugc

SEQ ID NO: 1743613 - RNA, 19 nt, Artificial Sequence
  Description of Artificial Sequence: Synthetic oligonucleotide
uguguuaucuuccagcuga

SEQ ID NO: 1743614 - RNA, 19 nt, Artificial Sequence
  Description of Artificial Sequence: Synthetic oligonucleotide
ugaccauucgcacagagug

SEQ ID NO: 1743615 - RNA, 19 nt, Artificial Sequence
  Description of Artificial Sequence: Synthetic oligonucleotide
aacagucacaaguguagcc

SEQ ID NO: 1743616 - RNA, 19 nt, Artificial Sequence
  Description of Artificial Sequence: Synthetic oligonucleotide
agcauuaacauauuugugu

SEQ ID NO: 1743617 - RNA, 19 nt, Artificial Sequence
  Description of Artificial Sequence: Synthetic oligonucleotide
guuaucuuccagcugaccg

SEQ ID NO: 1743618 - RNA, 19 nt, Artificial Sequence
  Description of Artificial Sequence: Synthetic oligonucleotide
uguguucacgcacucaccg

SEQ ID NO: 1743619 - RNA, 19 nt, Artificial Sequence
  Description of Artificial Sequence: Synthetic oligonucleotide
acaaguguagcccucccgc

SEQ ID NO: 1743620 - RNA, 19 nt, Artificial Sequence
  Description of Artificial Sequence: Synthetic oligonucleotide
uauuuguguugucugagcc

SEQ ID NO: 1743621 - RNA, 19 nt, Artificial Sequence
  Description of Artificial Sequence: Synthetic oligonucleotide
ugagcauagacuucggagc

SEQ ID NO: 1743622 - RNA, 19 nt, Artificial Sequence
  Description of Artificial Sequence: Synthetic oligonucleotide
acauuccgcagccugaagc

SEQ ID NO: 1743623 - RNA, 19 nt, Artificial Sequence
  Description of Artificial Sequence: Synthetic oligonucleotide
uuaucuuccagcugaccgg

SEQ ID NO: 1743624 - RNA, 19 nt, Artificial Sequence
  Description of Artificial Sequence: Synthetic oligonucleotide
gaacaguacacacucauca

SEQ ID NO: 1743625 - RNA, 19 nt, Artificial Sequence
  Description of Artificial Sequence: Synthetic oligonucleotide
auggcauagaggcagugac

SEQ ID NO: 1743626 - RNA, 19 nt, Artificial Sequence
  Description of Artificial Sequence: Synthetic oligonucleotide
acaaccagagcuaagcugg

SEQ ID NO: 1743627 - RNA, 19 nt, Artificial Sequence
  Description of Artificial Sequence: Synthetic oligonucleotide
acagucacaaguguagccc

SEQ ID NO: 1743628 - RNA, 19 nt, Artificial Sequence
  Description of Artificial Sequence: Synthetic oligonucleotide
cauacucauagccuggccg

SEQ ID NO: 1743629 - RNA, 19 nt, Artificial Sequence
  Description of Artificial Sequence: Synthetic oligonucleotide
uaaguucccagccuguggc

SEQ ID NO: 1743630 - RNA, 19 nt, Artificial Sequence
  Description of Artificial Sequence: Synthetic oligonucleotide
gauagaugcucacagugac

SEQ ID NO: 1743631 - RNA, 19 nt, Artificial Sequence
  Description of Artificial Sequence: Synthetic oligonucleotide
cuggaauccuucaaaacag

SEQ ID NO: 1743632 - RNA, 19 nt, Artificial Sequence
  Description of Artificial Sequence: Synthetic oligonucleotide
cuggcauucguugugaucc

SEQ ID NO: 1743633 - RNA, 19 nt, Artificial Sequence
  Description of Artificial Sequence: Synthetic oligonucleotide
ucuguguucacgcacucac

SEQ ID NO: 1743634 - RNA, 19 nt, Artificial Sequence
  Description of Artificial Sequence: Synthetic oligonucleotide
gauggcuagccacauagug

SEQ ID NO: 1743635 - RNA, 19 nt, Artificial Sequence
  Description of Artificial Sequence: Synthetic oligonucleotide
aaccguggggagcaguggc

SEQ ID NO: 1743636 - RNA, 19 nt, Artificial Sequence
  Description of Artificial Sequence: Synthetic oligonucleotide
caaucauaaguucccagcc

SEQ ID NO: 1743637 - RNA, 19 nt, Artificial Sequence
  Description of Artificial Sequence: Synthetic oligonucleotide
cugagcauagacuucggag

SEQ ID NO: 1743638 - RNA, 19 nt, Artificial Sequence
  Description of Artificial Sequence: Synthetic oligonucleotide
ugaggcaucggccauucug

SEQ ID NO: 1743639 - RNA, 19 nt, Artificial Sequence
  Description of Artificial Sequence: Synthetic oligonucleotide
uguugucugagccaacgca

SEQ ID NO: 1743640 - RNA, 19 nt, Artificial Sequence
  Description of Artificial Sequence: Synthetic oligonucleotide
cucaauccgagccacauug

SEQ ID NO: 1743641 - RNA, 19 nt, Artificial Sequence
  Description of Artificial Sequence: Synthetic oligonucleotide
auucuguauagguaguaug

SEQ ID NO: 1743642 - RNA, 19 nt, Artificial Sequence
  Description of Artificial Sequence: Synthetic oligonucleotide
uagaugcucacagugaccc

SEQ ID NO: 1743643 - RNA, 19 nt, Artificial Sequence
  Description of Artificial Sequence: Synthetic oligonucleotide
ugcacaggcaaauguagcc

SEQ ID NO: 1743644 - RNA, 19 nt, Artificial Sequence
  Description of Artificial Sequence: Synthetic oligonucleotide
cagcauucuguauagguag

SEQ ID NO: 1743645 - RNA, 19 nt, Artificial Sequence
  Description of Artificial Sequence: Synthetic oligonucleotide
aaguguagcccucccgcac

SEQ ID NO: 1743646 - RNA, 19 nt, Artificial Sequence
  Description of Artificial Sequence: Synthetic oligonucleotide
gugacggaagcucacaacc

SEQ ID NO: 1743647 - RNA, 19 nt, Artificial Sequence
  Description of Artificial Sequence: Synthetic oligonucleotide
uucgaaggcagccaggguc

SEQ ID NO: 1743648 - RNA, 19 nt, Artificial Sequence
  Description of Artificial Sequence: Synthetic oligonucleotide
ugagccaacgcaauggcau

SEQ ID NO: 1743649 - RNA, 19 nt, Artificial Sequence
  Description of Artificial Sequence: Synthetic oligonucleotide
gaagcucacaaccagagcu

SEQ ID NO: 1743650 - RNA, 19 nt, Artificial Sequence
  Description of Artificial Sequence: Synthetic oligonucleotide
uguacggcagaucgucugg

SEQ ID NO: 1743651 - RNA, 19 nt, Artificial Sequence
  Description of Artificial Sequence: Synthetic oligonucleotide
uguguugucugagccaacg

SEQ ID NO: 1743652 - RNA, 19 nt, Artificial Sequence
  Description of Artificial Sequence: Synthetic oligonucleotide
auaaguucccagccugugg

SEQ ID NO: 1743653 - RNA, 19 nt, Artificial Sequence
  Description of Artificial Sequence: Synthetic oligonucleotide
ucugccacguaaccguggg

SEQ ID NO: 1743654 - RNA, 19 nt, Artificial Sequence
  Description of Artificial Sequence: Synthetic oligonucleotide
ugacccuucacuucuacuc

SEQ ID NO: 1743655 - RNA, 19 nt, Artificial Sequence
  Description of Artificial Sequence: Synthetic oligonucleotide
uggccugaugucaucaugc

SEQ ID NO: 1743656 - RNA, 19 nt, Artificial Sequence
  Description of Artificial Sequence: Synthetic oligonucleotide
ucucacagugaccauucgc

SEQ ID NO: 1743657 - RNA, 19 nt, Artificial Sequence
  Description of Artificial Sequence: Synthetic oligonucleotide
gaggacagagagcacacug

SEQ ID NO: 1743658 - RNA, 19 nt, Artificial Sequence
  Description of Artificial Sequence: Synthetic oligonucleotide
agugacggaagcucacaac

SEQ ID NO: 1743659 - RNA, 19 nt, Artificial Sequence
  Description of Artificial Sequence: Synthetic oligonucleotide
uggcuagccacauagugcu

SEQ ID NO: 1743660 - RNA, 19 nt, Artificial Sequence
  Description of Artificial Sequence: Synthetic oligonucleotide
aauccgagccacauugcac

SEQ ID NO: 1743661 - RNA, 19 nt, Artificial Sequence
  Description of Artificial Sequence: Synthetic oligonucleotide
aguuguagaaaggggcccc

SEQ ID NO: 1743662 - RNA, 19 nt, Artificial Sequence
  Description of Artificial Sequence: Synthetic oligonucleotide
auggcuagccacauagugc

SEQ ID NO: 1743663 - RNA, 19 nt, Artificial Sequence
  Description of Artificial Sequence: Synthetic oligonucleotide
agcguugcccacuaagguc

SEQ ID NO: 1743664 - RNA, 19 nt, Artificial Sequence
  Description of Artificial Sequence: Synthetic oligonucleotide
guauagguaguauggugcc

SEQ ID NO: 1743665 - RNA, 19 nt, Artificial Sequence
  Description of Artificial Sequence: Synthetic oligonucleotide
aagcccuucgaaggcagcc

SEQ ID NO: 1743666 - RNA, 19 nt, Artificial Sequence
  Description of Artificial Sequence: Synthetic oligonucleotide
acucaccguucucacaggc

SEQ ID NO: 1743667 - RNA, 19 nt, Artificial Sequence
  Description of Artificial Sequence: Synthetic oligonucleotide
acggcagaucgucugggcc

SEQ ID NO: 1743668 - RNA, 19 nt, Artificial Sequence
  Description of Artificial Sequence: Synthetic oligonucleotide
cuguauagguaguauggug

SEQ ID NO: 1743669 - RNA, 19 nt, Artificial Sequence
  Description of Artificial Sequence: Synthetic oligonucleotide
ucaggaaccgcguccucgg

SEQ ID NO: 1743670 - RNA, 19 nt, Artificial Sequence
  Description of Artificial Sequence: Synthetic oligonucleotide
acagugacccuucacuucu

SEQ ID NO: 1743671 - RNA, 19 nt, Artificial Sequence
  Description of Artificial Sequence: Synthetic oligonucleotide
cauuccgcagccugaagcc

SEQ ID NO: 1743672 - RNA, 19 nt, Artificial Sequence
  Description of Artificial Sequence: Synthetic oligonucleotide
auggugcccacgcaagggc

SEQ ID NO: 1743673 - RNA, 19 nt, Artificial Sequence
  Description of Artificial Sequence: Synthetic oligonucleotide
agcaaucauaaguucccag

SEQ ID NO: 1743674 - RNA, 19 nt, Artificial Sequence
  Description of Artificial Sequence: Synthetic oligonucleotide
gacggaagcucacaaccag

SEQ ID NO: 1743675 - RNA, 19 nt, Artificial Sequence
  Description of Artificial Sequence: Synthetic oligonucleotide
auagagauuguacggcaga

SEQ ID NO: 1743676 - RNA, 19 nt, Artificial Sequence
  Description of Artificial Sequence: Synthetic oligonucleotide
cauuaacauauuuguguug

SEQ ID NO: 1743677 - RNA, 19 nt, Artificial Sequence
  Description of Artificial Sequence: Synthetic oligonucleotide
ucuuccgugcugcugguac

SEQ ID NO: 1743678 - RNA, 19 nt, Artificial Sequence
  Description of Artificial Sequence: Synthetic oligonucleotide
ucaucaugcugucuuccca

SEQ ID NO: 1743679 - RNA, 19 nt, Artificial Sequence
  Description of Artificial Sequence: Synthetic oligonucleotide
cauagagauuguacggcag

SEQ ID NO: 1743680 - RNA, 19 nt, Artificial Sequence
  Description of Artificial Sequence: Synthetic oligonucleotide
gauuguacggcagaucguc

SEQ ID NO: 1743681 - RNA, 19 nt, Artificial Sequence
  Description of Artificial Sequence: Synthetic oligonucleotide
ugcccacuaagguccaugg

SEQ ID NO: 1743682 - RNA, 19 nt, Artificial Sequence
  Description of Artificial Sequence: Synthetic oligonucleotide
auuuguguugucugagcca

SEQ ID NO: 1743683 - RNA, 19 nt, Artificial Sequence
  Description of Artificial Sequence: Synthetic oligonucleotide
gguaguauggugcccacgc

SEQ ID NO: 1743684 - RNA, 19 nt, Artificial Sequence
  Description of Artificial Sequence: Synthetic oligonucleotide
gcaaucauaaguucccagc

SEQ ID NO: 1743685 - RNA, 19 nt, Artificial Sequence
  Description of Artificial Sequence: Synthetic oligonucleotide
auugcacaggcaaauguag

SEQ ID NO: 1743686 - RNA, 19 nt, Artificial Sequence
  Description of Artificial Sequence: Synthetic oligonucleotide
auccgagccacauugcaca

SEQ ID NO: 1743687 - RNA, 19 nt, Artificial Sequence
  Description of Artificial Sequence: Synthetic oligonucleotide
gggccauagagauuguacg

SEQ ID NO: 1743688 - RNA, 19 nt, Artificial Sequence
  Description of Artificial Sequence: Synthetic oligonucleotide
aaggacugguguguuaucu

SEQ ID NO: 1743689 - RNA, 19 nt, Artificial Sequence
  Description of Artificial Sequence: Synthetic oligonucleotide
ugguacuguucacgcagcg

SEQ ID NO: 1743690 - RNA, 19 nt, Artificial Sequence
  Description of Artificial Sequence: Synthetic oligonucleotide
cacuucuacuccuuggcug

SEQ ID NO: 1743691 - RNA, 19 nt, Artificial Sequence
  Description of Artificial Sequence: Synthetic oligonucleotide
agaucgucugggccggggc

SEQ ID NO: 1743692 - RNA, 19 nt, Artificial Sequence
  Description of Artificial Sequence: Synthetic oligonucleotide
cauguccuggcauucguug

SEQ ID NO: 1743693 - RNA, 19 nt, Artificial Sequence
  Description of Artificial Sequence: Synthetic oligonucleotide
uaguauggugcccacgcaa

SEQ ID NO: 1743694 - RNA, 19 nt, Artificial Sequence
  Description of Artificial Sequence: Synthetic oligonucleotide
ggcauagaggcagugacgg

SEQ ID NO: 1743695 - RNA, 19 nt, Artificial Sequence
  Description of Artificial Sequence: Synthetic oligonucleotide
auagaugcucacagugacc

SEQ ID NO: 1743696 - RNA, 19 nt, Artificial Sequence
  Description of Artificial Sequence: Synthetic oligonucleotide
ucuguauagguaguauggu

SEQ ID NO: 1743697 - RNA, 19 nt, Artificial Sequence
  Description of Artificial Sequence: Synthetic oligonucleotide
acuguucacgcagcguugc

SEQ ID NO: 1743698 - RNA, 19 nt, Artificial Sequence
  Description of Artificial Sequence: Synthetic oligonucleotide
ugacggaagcucacaacca

SEQ ID NO: 1743699 - RNA, 19 nt, Artificial Sequence
  Description of Artificial Sequence: Synthetic oligonucleotide
aaguggaccccugcuuccc

SEQ ID NO: 1743700 - RNA, 19 nt, Artificial Sequence
  Description of Artificial Sequence: Synthetic oligonucleotide
uuguacggcagaucgucug

SEQ ID NO: 1743701 - RNA, 19 nt, Artificial Sequence
  Description of Artificial Sequence: Synthetic oligonucleotide
agugacccuucacuucuac

SEQ ID NO: 1743702 - RNA, 19 nt, Artificial Sequence
  Description of Artificial Sequence: Synthetic oligonucleotide
auaugggcugcauccaacu

SEQ ID NO: 1743703 - RNA, 19 nt, Artificial Sequence
  Description of Artificial Sequence: Synthetic oligonucleotide
aggcccgaacaguacacac

SEQ ID NO: 1743704 - RNA, 19 nt, Artificial Sequence
  Description of Artificial Sequence: Synthetic oligonucleotide
uggucagggaagucuuccg

SEQ ID NO: 1743705 - RNA, 19 nt, Artificial Sequence
  Description of Artificial Sequence: Synthetic oligonucleotide
ugacugaagcauuaacaua

SEQ ID NO: 1743706 - RNA, 19 nt, Artificial Sequence
  Description of Artificial Sequence: Synthetic oligonucleotide
auagguaguauggugccca

SEQ ID NO: 1743707 - RNA, 19 nt, Artificial Sequence
  Description of Artificial Sequence: Synthetic oligonucleotide
ucacuucuacuccuuggcu

SEQ ID NO: 1743708 - RNA, 19 nt, Artificial Sequence
  Description of Artificial Sequence: Synthetic oligonucleotide
uguuggagaagggaggcuc

SEQ ID NO: 1743709 - RNA, 19 nt, Artificial Sequence
  Description of Artificial Sequence: Synthetic oligonucleotide
uggaauccuucaaaacagu

SEQ ID NO: 1743710 - RNA, 19 nt, Artificial Sequence
  Description of Artificial Sequence: Synthetic oligonucleotide
cauucguugugauccuggc

SEQ ID NO: 1743711 - RNA, 19 nt, Artificial Sequence
  Description of Artificial Sequence: Synthetic oligonucleotide
uguucacgcacucaccguu

SEQ ID NO: 1743712 - RNA, 19 nt, Artificial Sequence
  Description of Artificial Sequence: Synthetic oligonucleotide
agguaguuguagaaagggg

SEQ ID NO: 1743713 - RNA, 19 nt, Artificial Sequence
  Description of Artificial Sequence: Synthetic oligonucleotide
ucaauccgagccacauugc

SEQ ID NO: 1743714 - RNA, 19 nt, Artificial Sequence
  Description of Artificial Sequence: Synthetic oligonucleotide
agccugaagcccuucgaag

SEQ ID NO: 1743715 - RNA, 19 nt, Artificial Sequence
  Description of Artificial Sequence: Synthetic oligonucleotide
caguacacacucaucagca

SEQ ID NO: 1743716 - RNA, 19 nt, Artificial Sequence
  Description of Artificial Sequence: Synthetic oligonucleotide
agcccucccgcacacguac

SEQ ID NO: 1743717 - RNA, 19 nt, Artificial Sequence
  Description of Artificial Sequence: Synthetic oligonucleotide
acacaggccauaugggcug

SEQ ID NO: 1743718 - RNA, 19 nt, Artificial Sequence
  Description of Artificial Sequence: Synthetic oligonucleotide
gaaguggaccccugcuucc

SEQ ID NO: 1743719 - RNA, 19 nt, Artificial Sequence
  Description of Artificial Sequence: Synthetic oligonucleotide
uccaacuggaauccuucaa

SEQ ID NO: 1743720 - RNA, 19 nt, Artificial Sequence
  Description of Artificial Sequence: Synthetic oligonucleotide
cagcugagcauagacuucg

SEQ ID NO: 1743721 - RNA, 19 nt, Artificial Sequence
  Description of Artificial Sequence: Synthetic oligonucleotide
cuucggagcuccugggagg

SEQ ID NO: 1743722 - RNA, 19 nt, Artificial Sequence
  Description of Artificial Sequence: Synthetic oligonucleotide
caaggcuggcagaaccugg

SEQ ID NO: 1743723 - RNA, 19 nt, Artificial Sequence
  Description of Artificial Sequence: Synthetic oligonucleotide
uuaacauauuuguguuguc

SEQ ID NO: 1743724 - RNA, 19 nt, Artificial Sequence
  Description of Artificial Sequence: Synthetic oligonucleotide
guacacacucaucagcauc

SEQ ID NO: 1743725 - RNA, 19 nt, Artificial Sequence
  Description of Artificial Sequence: Synthetic oligonucleotide
gcaucggccauucuggcag

SEQ ID NO: 1743726 - RNA, 19 nt, Artificial Sequence
  Description of Artificial Sequence: Synthetic oligonucleotide
uauagguaguauggugccc

SEQ ID NO: 1743727 - RNA, 19 nt, Artificial Sequence
  Description of Artificial Sequence: Synthetic oligonucleotide
guauggugcccacgcaagg

SEQ ID NO: 1743728 - RNA, 19 nt, Artificial Sequence
  Description of Artificial Sequence: Synthetic oligonucleotide
cacauugcacagcugagca

SEQ ID NO: 1743729 - RNA, 19 nt, Artificial Sequence
  Description of Artificial Sequence: Synthetic oligonucleotide
uguucacgcagcguugccc

SEQ ID NO: 1743730 - RNA, 19 nt, Artificial Sequence
  Description of Artificial Sequence: Synthetic oligonucleotide
ggagcaaucauaaguuccc

SEQ ID NO: 1743731 - RNA, 19 nt, Artificial Sequence
  Description of Artificial Sequence: Synthetic oligonucleotide
cuaagcuggaagaaaugaa

SEQ ID NO: 1743732 - RNA, 19 nt, Artificial Sequence
  Description of Artificial Sequence: Synthetic oligonucleotide
auucuggcagagagcaggc

SEQ ID NO: 1743733 - RNA, 19 nt, Artificial Sequence
  Description of Artificial Sequence: Synthetic oligonucleotide
gccugaagcccuucgaagg

SEQ ID NO: 1743734 - RNA, 19 nt, Artificial Sequence
  Description of Artificial Sequence: Synthetic oligonucleotide
aagggaggcucaggaaccg

SEQ ID NO: 1743735 - RNA, 19 nt, Artificial Sequence
  Description of Artificial Sequence: Synthetic oligonucleotide
gucaucaugcugucuuccc

SEQ ID NO: 1743736 - RNA, 19 nt, Artificial Sequence
  Description of Artificial Sequence: Synthetic oligonucleotide
auagccuggccggaagugg

SEQ ID NO: 1743737 - RNA, 19 nt, Artificial Sequence
  Description of Artificial Sequence: Synthetic oligonucleotide
aguauggugcccacgcaag

SEQ ID NO: 1743738 - RNA, 19 nt, Artificial Sequence
  Description of Artificial Sequence: Synthetic oligonucleotide
auucguugugauccuggca

SEQ ID NO: 1743739 - RNA, 19 nt, Artificial Sequence
  Description of Artificial Sequence: Synthetic oligonucleotide
guccucggggcccagguag

SEQ ID NO: 1743740 - RNA, 19 nt, Artificial Sequence
  Description of Artificial Sequence: Synthetic oligonucleotide
agauagaugcucacaguga

SEQ ID NO: 1743741 - RNA, 19 nt, Artificial Sequence
  Description of Artificial Sequence: Synthetic oligonucleotide
gaaaggggccccgucuggg

SEQ ID NO: 1743742 - RNA, 19 nt, Artificial Sequence
  Description of Artificial Sequence: Synthetic oligonucleotide
aggcaucggccauucuggc

SEQ ID NO: 1743743 - RNA, 19 nt, Artificial Sequence
  Description of Artificial Sequence: Synthetic oligonucleotide
cucaccguucucacaggcc

SEQ ID NO: 1743744 - RNA, 19 nt, Artificial Sequence
  Description of Artificial Sequence: Synthetic oligonucleotide
aggccauaugggcugcauc

SEQ ID NO: 1743745 - RNA, 19 nt, Artificial Sequence
  Description of Artificial Sequence: Synthetic oligonucleotide
gucucauggccagugacug

SEQ ID NO: 1743746 - RNA, 19 nt, Artificial Sequence
  Description of Artificial Sequence: Synthetic oligonucleotide
gggagcaaucauaaguucc

SEQ ID NO: 1743747 - RNA, 19 nt, Artificial Sequence
  Description of Artificial Sequence: Synthetic oligonucleotide
uggcucugccacguaaccg

SEQ ID NO: 1743748 - RNA, 19 nt, Artificial Sequence
  Description of Artificial Sequence: Synthetic oligonucleotide
cagcugaccggccauguug

SEQ ID NO: 1743749 - RNA, 19 nt, Artificial Sequence
  Description of Artificial Sequence: Synthetic oligonucleotide
gaucgucugggccggggcc

SEQ ID NO: 1743750 - RNA, 19 nt, Artificial Sequence
  Description of Artificial Sequence: Synthetic oligonucleotide
gaggcaucguagugguagc

SEQ ID NO: 1743751 - RNA, 19 nt, Artificial Sequence
  Description of Artificial Sequence: Synthetic oligonucleotide
ugugauccuggcacuuccu

SEQ ID NO: 1743752 - RNA, 19 nt, Artificial Sequence
  Description of Artificial Sequence: Synthetic oligonucleotide
uggccagugacugaagcau

SEQ ID NO: 1743753 - RNA, 19 nt, Artificial Sequence
  Description of Artificial Sequence: Synthetic oligonucleotide
ugggccggggccauacuca

SEQ ID NO: 1743754 - RNA, 19 nt, Artificial Sequence
  Description of Artificial Sequence: Synthetic oligonucleotide
cugcauccaacuggaaucc

SEQ ID NO: 1743755 - RNA, 19 nt, Artificial Sequence
  Description of Artificial Sequence: Synthetic oligonucleotide
ugcacacgucauuggagac

SEQ ID NO: 1743756 - RNA, 19 nt, Artificial Sequence
  Description of Artificial Sequence: Synthetic oligonucleotide
guuguagaaaggggccccg

SEQ ID NO: 1743757 - RNA, 19 nt, Artificial Sequence
  Description of Artificial Sequence: Synthetic oligonucleotide
ggggacugcagaaacagug

SEQ ID NO: 1743758 - RNA, 19 nt, Artificial Sequence
  Description of Artificial Sequence: Synthetic oligonucleotide
acgcacucaccguucucac

SEQ ID NO: 1743759 - RNA, 19 nt, Artificial Sequence
  Description of Artificial Sequence: Synthetic oligonucleotide
ugauggcuagccacauagu

SEQ ID NO: 1743760 - RNA, 19 nt, Artificial Sequence
  Description of Artificial Sequence: Synthetic oligonucleotide
cuguguucacgcacucacc

SEQ ID NO: 1743761 - RNA, 19 nt, Artificial Sequence
  Description of Artificial Sequence: Synthetic oligonucleotide
agcaggcccgaacaguaca

SEQ ID NO: 1743762 - RNA, 19 nt, Artificial Sequence
  Description of Artificial Sequence: Synthetic oligonucleotide
agcugaccggccauguugg

SEQ ID NO: 1743763 - RNA, 19 nt, Artificial Sequence
  Description of Artificial Sequence: Synthetic oligonucleotide
uuccgcagccugaagcccu

SEQ ID NO: 1743764 - RNA, 19 nt, Artificial Sequence
  Description of Artificial Sequence: Synthetic oligonucleotide
cauuuccagauagaugcuc

SEQ ID NO: 1743765 - RNA, 19 nt, Artificial Sequence
  Description of Artificial Sequence: Synthetic oligonucleotide
ggccucgccaucuuggcag

SEQ ID NO: 1743766 - RNA, 19 nt, Artificial Sequence
  Description of Artificial Sequence: Synthetic oligonucleotide
agagcuaagcuggaagaaa

SEQ ID NO: 1743767 - RNA, 19 nt, Artificial Sequence
  Description of Artificial Sequence: Synthetic oligonucleotide
cugcacacgucauuggaga

SEQ ID NO: 1743768 - RNA, 19 nt, Artificial Sequence
  Description of Artificial Sequence: Synthetic oligonucleotide
uaaccguggggagcagugg

SEQ ID NO: 1743769 - RNA, 19 nt, Artificial Sequence
  Description of Artificial Sequence: Synthetic oligonucleotide
cugguacuguucacgcagc

SEQ ID NO: 1743770 - RNA, 19 nt, Artificial Sequence
  Description of Artificial Sequence: Synthetic oligonucleotide
aguggaccccugcuucccg

SEQ ID NO: 1743771 - RNA, 19 nt, Artificial Sequence
  Description of Artificial Sequence: Synthetic oligonucleotide
cauaaguucccagccugug

SEQ ID NO: 1743772 - RNA, 19 nt, Artificial Sequence
  Description of Artificial Sequence: Synthetic oligonucleotide
aguacacacucaucagcau

SEQ ID NO: 1743773 - RNA, 19 nt, Artificial Sequence
  Description of Artificial Sequence: Synthetic oligonucleotide
gccggggccauacucauag

SEQ ID NO: 1743774 - RNA, 19 nt, Artificial Sequence
  Description of Artificial Sequence: Synthetic oligonucleotide
guaaccguggggagcagug

SEQ ID NO: 1743775 - RNA, 19 nt, Artificial Sequence
  Description of Artificial Sequence: Synthetic oligonucleotide
caaauguagccaggcacug

SEQ ID NO: 1743776 - RNA, 19 nt, Artificial Sequence
  Description of Artificial Sequence: Synthetic oligonucleotide
aggcaucguagugguagcc

SEQ ID NO: 1743777 - RNA, 19 nt, Artificial Sequence
  Description of Artificial Sequence: Synthetic oligonucleotide
uggcugcacacgucauugg

SEQ ID NO: 1743778 - RNA, 19 nt, Artificial Sequence
  Description of Artificial Sequence: Synthetic oligonucleotide
uacggcagaucgucugggc

SEQ ID NO: 1743779 - RNA, 19 nt, Artificial Sequence
  Description of Artificial Sequence: Synthetic oligonucleotide
ucggggcccagguaguugu

SEQ ID NO: 1743780 - RNA, 19 nt, Artificial Sequence
  Description of Artificial Sequence: Synthetic oligonucleotide
caggggagcaaucauaagu

SEQ ID NO: 1743781 - RNA, 19 nt, Artificial Sequence
  Description of Artificial Sequence: Synthetic oligonucleotide
gaccauucgcacagagugc

SEQ ID NO: 1743782 - RNA, 19 nt, Artificial Sequence
  Description of Artificial Sequence: Synthetic oligonucleotide
aggggagcaaucauaaguu

SEQ ID NO: 1743783 - RNA, 19 nt, Artificial Sequence
  Description of Artificial Sequence: Synthetic oligonucleotide
gggacugcagaaacagugg

SEQ ID NO: 1743784 - RNA, 19 nt, Artificial Sequence
  Description of Artificial Sequence: Synthetic oligonucleotide
guugucugagccaacgcaa

SEQ ID NO: 1743785 - RNA, 19 nt, Artificial Sequence
  Description of Artificial Sequence: Synthetic oligonucleotide
gggccauacucauagccug

SEQ ID NO: 1743786 - RNA, 19 nt, Artificial Sequence
  Description of Artificial Sequence: Synthetic oligonucleotide
gcuggcagaaccuggcuac

SEQ ID NO: 1743787 - RNA, 19 nt, Artificial Sequence
  Description of Artificial Sequence: Synthetic oligonucleotide
ccugaugucaucaugcugu

SEQ ID NO: 1743788 - RNA, 19 nt, Artificial Sequence
  Description of Artificial Sequence: Synthetic oligonucleotide
cucugccacguaaccgugg

SEQ ID NO: 1743789 - RNA, 19 nt, Artificial Sequence
  Description of Artificial Sequence: Synthetic oligonucleotide
acaggcaaauguagccagg

SEQ ID NO: 1743790 - RNA, 19 nt, Artificial Sequence
  Description of Artificial Sequence: Synthetic oligonucleotide
cugguguguuaucuuccag

SEQ ID NO: 1743791 - RNA, 19 nt, Artificial Sequence
  Description of Artificial Sequence: Synthetic oligonucleotide
ucguugugauccuggcacu

SEQ ID NO: 1743792 - RNA, 19 nt, Artificial Sequence
  Description of Artificial Sequence: Synthetic oligonucleotide
gucacaaguguagcccucc

SEQ ID NO: 1743793 - RNA, 19 nt, Artificial Sequence
  Description of Artificial Sequence: Synthetic oligonucleotide
guguguuaucuuccagcug

SEQ ID NO: 1743794 - RNA, 19 nt, Artificial Sequence
  Description of Artificial Sequence: Synthetic oligonucleotide
uugcccacuaagguccaug

SEQ ID NO: 1743795 - RNA, 19 nt, Artificial Sequence
  Description of Artificial Sequence: Synthetic oligonucleotide
ggaaccgcguccucggggc

SEQ ID NO: 1743796 - RNA, 19 nt, Artificial Sequence
  Description of Artificial Sequence: Synthetic oligonucleotide
cuggccugaugucaucaug

SEQ ID NO: 1743797 - RNA, 19 nt, Artificial Sequence
  Description of Artificial Sequence: Synthetic oligonucleotide
agcauagacuucggagcuc

SEQ ID NO: 1743798 - RNA, 19 nt, Artificial Sequence
  Description of Artificial Sequence: Synthetic oligonucleotide
gcagcguugcccacuaagg

SEQ ID NO: 1743799 - RNA, 19 nt, Artificial Sequence
  Description of Artificial Sequence: Synthetic oligonucleotide
caauccgagccacauugca

SEQ ID NO: 1743800 - RNA, 19 nt, Artificial Sequence
  Description of Artificial Sequence: Synthetic oligonucleotide
gccauagagauuguacggc

SEQ ID NO: 1743801 - RNA, 19 nt, Artificial Sequence
  Description of Artificial Sequence: Synthetic oligonucleotide
uucggagcuccugggagga

SEQ ID NO: 1743802 - RNA, 19 nt, Artificial Sequence
  Description of Artificial Sequence: Synthetic oligonucleotide
gaaccuggcuacagagccc

SEQ ID NO: 1743803 - RNA, 19 nt, Artificial Sequence
  Description of Artificial Sequence: Synthetic oligonucleotide
aggauugcacaggcaaaug

SEQ ID NO: 1743804 - RNA, 19 nt, Artificial Sequence
  Description of Artificial Sequence: Synthetic oligonucleotide
aagcucacaaccagagcua

SEQ ID NO: 1743805 - RNA, 19 nt, Artificial Sequence
  Description of Artificial Sequence: Synthetic oligonucleotide
guacggcagaucgucuggg

SEQ ID NO: 1743806 - RNA, 19 nt, Artificial Sequence
  Description of Artificial Sequence: Synthetic oligonucleotide
gcauucguugugauccugg

SEQ ID NO: 1743807 - RNA, 19 nt, Artificial Sequence
  Description of Artificial Sequence: Synthetic oligonucleotide
agccaacgcaauggcauag

SEQ ID NO: 1743808 - RNA, 19 nt, Artificial Sequence
  Description of Artificial Sequence: Synthetic oligonucleotide
guacuguucacgcagcguu

SEQ ID NO: 1743809 - RNA, 19 nt, Artificial Sequence
  Description of Artificial Sequence: Synthetic oligonucleotide
gcauagacuucggagcucc

SEQ ID NO: 1743810 - RNA, 19 nt, Artificial Sequence
  Description of Artificial Sequence: Synthetic oligonucleotide
gagaagggaggcucaggaa

SEQ ID NO: 1743811 - RNA, 19 nt, Artificial Sequence
  Description of Artificial Sequence: Synthetic oligonucleotide
agguaguauggugcccacg

SEQ ID NO: 1743812 - RNA, 19 nt, Artificial Sequence
  Description of Artificial Sequence: Synthetic oligonucleotide
uagguaguauggugcccac

SEQ ID NO: 1743813 - RNA, 19 nt, Artificial Sequence
  Description of Artificial Sequence: Synthetic oligonucleotide
uggcagaaccuggcuacag

SEQ ID NO: 1743814 - RNA, 19 nt, Artificial Sequence
  Description of Artificial Sequence: Synthetic oligonucleotide
cccgcacacguacacagcg

SEQ ID NO: 1743815 - RNA, 19 nt, Artificial Sequence
  Description of Artificial Sequence: Synthetic oligonucleotide
ccacauagugcugcaaagg

SEQ ID NO: 1743816 - RNA, 19 nt, Artificial Sequence
  Description of Artificial Sequence: Synthetic oligonucleotide
ccggccauguuggagaagg

SEQ ID NO: 1743817 - RNA, 19 nt, Artificial Sequence
  Description of Artificial Sequence: Synthetic oligonucleotide
cacucaccguucucacagg

SEQ ID NO: 1743818 - RNA, 19 nt, Artificial Sequence
  Description of Artificial Sequence: Synthetic oligonucleotide
ggaagcucacaaccagagc

SEQ ID NO: 1743819 - RNA, 19 nt, Artificial Sequence
  Description of Artificial Sequence: Synthetic oligonucleotide
gcuagccacauagugcugc

SEQ ID NO: 1743820 - RNA, 19 nt, Artificial Sequence
  Description of Artificial Sequence: Synthetic oligonucleotide
ccuucgaaggcagccaggg

SEQ ID NO: 1743821 - RNA, 19 nt, Artificial Sequence
  Description of Artificial Sequence: Synthetic oligonucleotide
cccguucaagucuucacac

SEQ ID NO: 1743822 - RNA, 19 nt, Artificial Sequence
  Description of Artificial Sequence: Synthetic oligonucleotide
agggaggcucaggaaccgc

SEQ ID NO: 1743823 - RNA, 19 nt, Artificial Sequence
  Description of Artificial Sequence: Synthetic oligonucleotide
ggaugccacauuccgcagc

SEQ ID NO: 1743824 - RNA, 19 nt, Artificial Sequence
  Description of Artificial Sequence: Synthetic oligonucleotide
gacugcagaaacaguggaa

SEQ ID NO: 1743825 - RNA, 19 nt, Artificial Sequence
  Description of Artificial Sequence: Synthetic oligonucleotide
gagcaaucauaaguuccca

SEQ ID NO: 1743826 - RNA, 19 nt, Artificial Sequence
  Description of Artificial Sequence: Synthetic oligonucleotide
guaguauggugcccacgca

SEQ ID NO: 1743827 - RNA, 19 nt, Artificial Sequence
  Description of Artificial Sequence: Synthetic oligonucleotide
cugaccggccauguuggag

SEQ ID NO: 1743828 - RNA, 19 nt, Artificial Sequence
  Description of Artificial Sequence: Synthetic oligonucleotide
ggacugcagaaacagugga

SEQ ID NO: 1743829 - RNA, 19 nt, Artificial Sequence
  Description of Artificial Sequence: Synthetic oligonucleotide
ccaugugaaugucaugguc

SEQ ID NO: 1743830 - RNA, 19 nt, Artificial Sequence
  Description of Artificial Sequence: Synthetic oligonucleotide
caaguguagcccucccgca

SEQ ID NO: 1743831 - RNA, 19 nt, Artificial Sequence
  Description of Artificial Sequence: Synthetic oligonucleotide
agaugcucacagugacccu

SEQ ID NO: 1743832 - RNA, 19 nt, Artificial Sequence
  Description of Artificial Sequence: Synthetic oligonucleotide
uacucauagccuggccgga

SEQ ID NO: 1743833 - RNA, 19 nt, Artificial Sequence
  Description of Artificial Sequence: Synthetic oligonucleotide
cuguucacgcagcguugcc

SEQ ID NO: 1743834 - RNA, 19 nt, Artificial Sequence
  Description of Artificial Sequence: Synthetic oligonucleotide
cucauggccagugacugaa

SEQ ID NO: 1743835 - RNA, 19 nt, Artificial Sequence
  Description of Artificial Sequence: Synthetic oligonucleotide
uggcauucguugugauccu

SEQ ID NO: 1743836 - RNA, 19 nt, Artificial Sequence
  Description of Artificial Sequence: Synthetic oligonucleotide
agggucugauggcuagcca

SEQ ID NO: 1743837 - RNA, 19 nt, Artificial Sequence
  Description of Artificial Sequence: Synthetic oligonucleotide
acauccacacaggccauau

SEQ ID NO: 1743838 - RNA, 19 nt, Artificial Sequence
  Description of Artificial Sequence: Synthetic oligonucleotide
auuguacggcagaucgucu

SEQ ID NO: 1743839 - RNA, 19 nt, Artificial Sequence
  Description of Artificial Sequence: Synthetic oligonucleotide
agauuguacggcagaucgu

SEQ ID NO: 1743840 - RNA, 19 nt, Artificial Sequence
  Description of Artificial Sequence: Synthetic oligonucleotide
gcugcacacgucauuggag

SEQ ID NO: 1743841 - RNA, 19 nt, Artificial Sequence
  Description of Artificial Sequence: Synthetic oligonucleotide
uguagcccucccgcacacg

SEQ ID NO: 1743842 - RNA, 19 nt, Artificial Sequence
  Description of Artificial Sequence: Synthetic oligonucleotide
ggauugcacaggcaaaugu

SEQ ID NO: 1743843 - RNA, 19 nt, Artificial Sequence
  Description of Artificial Sequence: Synthetic oligonucleotide
cacguaaccguggggagca

SEQ ID NO: 1743844 - RNA, 19 nt, Artificial Sequence
  Description of Artificial Sequence: Synthetic oligonucleotide
gcauuaacauauuuguguu

SEQ ID NO: 1743845 - RNA, 19 nt, Artificial Sequence
  Description of Artificial Sequence: Synthetic oligonucleotide
gggaggcucaggaaccgcg

SEQ ID NO: 1743846 - RNA, 19 nt, Artificial Sequence
  Description of Artificial Sequence: Synthetic oligonucleotide
uuguagaaaggggccccgu

SEQ ID NO: 1743847 - RNA, 19 nt, Artificial Sequence
  Description of Artificial Sequence: Synthetic oligonucleotide
cacuguguugaggcaucgg

SEQ ID NO: 1743848 - RNA, 19 nt, Artificial Sequence
  Description of Artificial Sequence: Synthetic oligonucleotide
guuggagaagggaggcuca

SEQ ID NO: 1743849 - RNA, 19 nt, Artificial Sequence
  Description of Artificial Sequence: Synthetic oligonucleotide
cugagccaacgcaauggca

SEQ ID NO: 1743850 - RNA, 19 nt, Artificial Sequence
  Description of Artificial Sequence: Synthetic oligonucleotide
cacgcacucaccguucuca

SEQ ID NO: 1743851 - RNA, 19 nt, Artificial Sequence
  Description of Artificial Sequence: Synthetic oligonucleotide
guugugauccuggcacuuc

SEQ ID NO: 1743852 - RNA, 19 nt, Artificial Sequence
  Description of Artificial Sequence: Synthetic oligonucleotide
agggagcucaaggacuggu

SEQ ID NO: 1743853 - RNA, 19 nt, Artificial Sequence
  Description of Artificial Sequence: Synthetic oligonucleotide
gagcaguggcagcgauagg

SEQ ID NO: 1743854 - RNA, 19 nt, Artificial Sequence
  Description of Artificial Sequence: Synthetic oligonucleotide
cacauuccgcagccugaag

SEQ ID NO: 1743855 - RNA, 19 nt, Artificial Sequence
  Description of Artificial Sequence: Synthetic oligonucleotide
ccauagagauuguacggca

SEQ ID NO: 1743856 - RNA, 19 nt, Artificial Sequence
  Description of Artificial Sequence: Synthetic oligonucleotide
acggaagcucacaaccaga

SEQ ID NO: 1743857 - RNA, 19 nt, Artificial Sequence
  Description of Artificial Sequence: Synthetic oligonucleotide
ugccucaauccgagccaca

SEQ ID NO: 1743858 - RNA, 19 nt, Artificial Sequence
  Description of Artificial Sequence: Synthetic oligonucleotide
accguucucacaggccaug

SEQ ID NO: 1743859 - RNA, 19 nt, Artificial Sequence
  Description of Artificial Sequence: Synthetic oligonucleotide
gccugaugucaucaugcug

SEQ ID NO: 1743860 - RNA, 19 nt, Artificial Sequence
  Description of Artificial Sequence: Synthetic oligonucleotide
ugccgcaggcccguucaag

SEQ ID NO: 1743861 - RNA, 19 nt, Artificial Sequence
  Description of Artificial Sequence: Synthetic oligonucleotide
ggggagcaaucauaaguuc

SEQ ID NO: 1743862 - RNA, 19 nt, Artificial Sequence
  Description of Artificial Sequence: Synthetic oligonucleotide
cugccacguaaccgugggg

SEQ ID NO: 1743863 - RNA, 19 nt, Artificial Sequence
  Description of Artificial Sequence: Synthetic oligonucleotide
ggccauacucauagccugg

SEQ ID NO: 1743864 - RNA, 19 nt, Artificial Sequence
  Description of Artificial Sequence: Synthetic oligonucleotide
gagccaacgcaauggcaua

SEQ ID NO: 1743865 - RNA, 19 nt, Artificial Sequence
  Description of Artificial Sequence: Synthetic oligonucleotide
ccaacuggaauccuucaaa

SEQ ID NO: 1743866 - RNA, 19 nt, Artificial Sequence
  Description of Artificial Sequence: Synthetic oligonucleotide
gaugcucacagugacccuu

SEQ ID NO: 1743867 - RNA, 19 nt, Artificial Sequence
  Description of Artificial Sequence: Synthetic oligonucleotide
ugcauccaacuggaauccu

SEQ ID NO: 1743868 - RNA, 19 nt, Artificial Sequence
  Description of Artificial Sequence: Synthetic oligonucleotide
ccagcagauguccauguga

SEQ ID NO: 1743869 - RNA, 19 nt, Artificial Sequence
  Description of Artificial Sequence: Synthetic oligonucleotide
ucguagugguagccaggau

SEQ ID NO: 1743870 - RNA, 19 nt, Artificial Sequence
  Description of Artificial Sequence: Synthetic oligonucleotide
ucuucccagccacgauguc

SEQ ID NO: 1743871 - RNA, 19 nt, Artificial Sequence
  Description of Artificial Sequence: Synthetic oligonucleotide
cugggccggggccauacuc

SEQ ID NO: 1743872 - RNA, 19 nt, Artificial Sequence
  Description of Artificial Sequence: Synthetic oligonucleotide
cagaucgucugggccgggg

SEQ ID NO: 1743873 - RNA, 19 nt, Artificial Sequence
  Description of Artificial Sequence: Synthetic oligonucleotide
uucacgcagcguugcccac

SEQ ID NO: 1743874 - RNA, 19 nt, Artificial Sequence
  Description of Artificial Sequence: Synthetic oligonucleotide
gccacguaaccguggggag

SEQ ID NO: 1743875 - RNA, 19 nt, Artificial Sequence
  Description of Artificial Sequence: Synthetic oligonucleotide
gcccguucaagucuucaca

SEQ ID NO: 1743876 - RNA, 19 nt, Artificial Sequence
  Description of Artificial Sequence: Synthetic oligonucleotide
aggccucgccaucuuggca

SEQ ID NO: 1743877 - RNA, 19 nt, Artificial Sequence
  Description of Artificial Sequence: Synthetic oligonucleotide
ggcagaucgucugggccgg

SEQ ID NO: 1743878 - RNA, 19 nt, Artificial Sequence
  Description of Artificial Sequence: Synthetic oligonucleotide
caggaaccgcguccucggg

SEQ ID NO: 1743879 - RNA, 19 nt, Artificial Sequence
  Description of Artificial Sequence: Synthetic oligonucleotide
cggcagaucgucugggccg

SEQ ID NO: 1743880 - RNA, 19 nt, Artificial Sequence
  Description of Artificial Sequence: Synthetic oligonucleotide
uccuggcauucguugugau

SEQ ID NO: 1743881 - RNA, 19 nt, Artificial Sequence
  Description of Artificial Sequence: Synthetic oligonucleotide
ggcucugccacguaaccgu

SEQ ID NO: 1743882 - RNA, 19 nt, Artificial Sequence
  Description of Artificial Sequence: Synthetic oligonucleotide
ccccgucugggccauagag

SEQ ID NO: 1743883 - RNA, 19 nt, Artificial Sequence
  Description of Artificial Sequence: Synthetic oligonucleotide
aucgucugggccggggcca

SEQ ID NO: 1743884 - RNA, 19 nt, Artificial Sequence
  Description of Artificial Sequence: Synthetic oligonucleotide
aggcagugacggaagcuca

SEQ ID NO: 1743885 - RNA, 19 nt, Artificial Sequence
  Description of Artificial Sequence: Synthetic oligonucleotide
cagagcuaagcuggaagaa

SEQ ID NO: 1743886 - RNA, 19 nt, Artificial Sequence
  Description of Artificial Sequence: Synthetic oligonucleotide
cagccugaagcccuucgaa

SEQ ID NO: 1743887 - RNA, 19 nt, Artificial Sequence
  Description of Artificial Sequence: Synthetic oligonucleotide
ccuggcucugccacguaac

SEQ ID NO: 1743888 - RNA, 19 nt, Artificial Sequence
  Description of Artificial Sequence: Synthetic oligonucleotide
cgcacacguacacagcggc

SEQ ID NO: 1743889 - RNA, 19 nt, Artificial Sequence
  Description of Artificial Sequence: Synthetic oligonucleotide
cagugacggaagcucacaa

SEQ ID NO: 1743890 - RNA, 19 nt, Artificial Sequence
  Description of Artificial Sequence: Synthetic oligonucleotide
ggcccguucaagucuucac

SEQ ID NO: 1743891 - RNA, 19 nt, Artificial Sequence
  Description of Artificial Sequence: Synthetic oligonucleotide
gcccuucgaaggcagccag

SEQ ID NO: 1743892 - RNA, 19 nt, Artificial Sequence
  Description of Artificial Sequence: Synthetic oligonucleotide
uugaggcaucggccauucu

SEQ ID NO: 1743893 - RNA, 19 nt, Artificial Sequence
  Description of Artificial Sequence: Synthetic oligonucleotide
gcagcauucuguauaggua

SEQ ID NO: 1743894 - RNA, 19 nt, Artificial Sequence
  Description of Artificial Sequence: Synthetic oligonucleotide
ggucugauggcuagccaca

SEQ ID NO: 1743895 - RNA, 19 nt, Artificial Sequence
  Description of Artificial Sequence: Synthetic oligonucleotide
gagagcaggcccgaacagu

SEQ ID NO: 1743896 - RNA, 19 nt, Artificial Sequence
  Description of Artificial Sequence: Synthetic oligonucleotide
cuggccggaaguggacccc

SEQ ID NO: 1743897 - RNA, 19 nt, Artificial Sequence
  Description of Artificial Sequence: Synthetic oligonucleotide
gagcaggcccgaacaguac

SEQ ID NO: 1743898 - RNA, 19 nt, Artificial Sequence
  Description of Artificial Sequence: Synthetic oligonucleotide
gccauacucauagccuggc

SEQ ID NO: 1743899 - RNA, 19 nt, Artificial Sequence
  Description of Artificial Sequence: Synthetic oligonucleotide
gggaggacagagagcacac

SEQ ID NO: 1743900 - RNA, 19 nt, Artificial Sequence
  Description of Artificial Sequence: Synthetic oligonucleotide
gaccggccauguuggagaa

SEQ ID NO: 1743901 - RNA, 19 nt, Artificial Sequence
  Description of Artificial Sequence: Synthetic oligonucleotide
cacaggccauaugggcugc

SEQ ID NO: 1743902 - RNA, 19 nt, Artificial Sequence
  Description of Artificial Sequence: Synthetic oligonucleotide
auguagccaggcacugugu

SEQ ID NO: 1743903 - RNA, 19 nt, Artificial Sequence
  Description of Artificial Sequence: Synthetic oligonucleotide
ggcaucguagugguagcca

SEQ ID NO: 1743904 - RNA, 19 nt, Artificial Sequence
  Description of Artificial Sequence: Synthetic oligonucleotide
cgcagcguugcccacuaag

SEQ ID NO: 1743905 - RNA, 19 nt, Artificial Sequence
  Description of Artificial Sequence: Synthetic oligonucleotide
ccgcacacguacacagcgg

SEQ ID NO: 1743906 - RNA, 19 nt, Artificial Sequence
  Description of Artificial Sequence: Synthetic oligonucleotide
agccaggggagcaaucaua

SEQ ID NO: 1743907 - RNA, 19 nt, Artificial Sequence
  Description of Artificial Sequence: Synthetic oligonucleotide
uagcccucccgcacacgua

SEQ ID NO: 1743908 - RNA, 19 nt, Artificial Sequence
  Description of Artificial Sequence: Synthetic oligonucleotide
gcucacagugacccuucac

SEQ ID NO: 1743909 - RNA, 19 nt, Artificial Sequence
  Description of Artificial Sequence: Synthetic oligonucleotide
aggcccguucaagucuuca

SEQ ID NO: 1743910 - RNA, 19 nt, Artificial Sequence
  Description of Artificial Sequence: Synthetic oligonucleotide
cgcucugccucaauccgag

SEQ ID NO: 1743911 - RNA, 19 nt, Artificial Sequence
  Description of Artificial Sequence: Synthetic oligonucleotide
guguucacgcacucaccgu

SEQ ID NO: 1743912 - RNA, 19 nt, Artificial Sequence
  Description of Artificial Sequence: Synthetic oligonucleotide
gccaggggagcaaucauaa

SEQ ID NO: 1743913 - RNA, 19 nt, Artificial Sequence
  Description of Artificial Sequence: Synthetic oligonucleotide
gagugccgcaggcccguuc

SEQ ID NO: 1743914 - RNA, 19 nt, Artificial Sequence
  Description of Artificial Sequence: Synthetic oligonucleotide
ccaggggagcaaucauaag

SEQ ID NO: 1743915 - RNA, 19 nt, Artificial Sequence
  Description of Artificial Sequence: Synthetic oligonucleotide
acgcaauggcauagaggca

SEQ ID NO: 1743916 - RNA, 19 nt, Artificial Sequence
  Description of Artificial Sequence: Synthetic oligonucleotide
cccuucgaaggcagccagg

SEQ ID NO: 1743917 - RNA, 19 nt, Artificial Sequence
  Description of Artificial Sequence: Synthetic oligonucleotide
gucugggccggggccauac

SEQ ID NO: 1743918 - RNA, 19 nt, Artificial Sequence
  Description of Artificial Sequence: Synthetic oligonucleotide
gccggaaguggaccccugc

SEQ ID NO: 1743919 - RNA, 19 nt, Artificial Sequence
  Description of Artificial Sequence: Synthetic oligonucleotide
ccacguaaccguggggagc

SEQ ID NO: 1743920 - RNA, 19 nt, Artificial Sequence
  Description of Artificial Sequence: Synthetic oligonucleotide
ggcauucguugugauccug

SEQ ID NO: 1743921 - RNA, 19 nt, Artificial Sequence
  Description of Artificial Sequence: Synthetic oligonucleotide
cacacgucauuggagacuu

SEQ ID NO: 1743922 - RNA, 19 nt, Artificial Sequence
  Description of Artificial Sequence: Synthetic oligonucleotide
cuacagagcccuggccuga

SEQ ID NO: 1743923 - RNA, 19 nt, Artificial Sequence
  Description of Artificial Sequence: Synthetic oligonucleotide
ggggcccagguaguuguag

SEQ ID NO: 1743924 - RNA, 19 nt, Artificial Sequence
  Description of Artificial Sequence: Synthetic oligonucleotide
gcucacaaccagagcuaag

SEQ ID NO: 1743925 - RNA, 19 nt, Artificial Sequence
  Description of Artificial Sequence: Synthetic oligonucleotide
gcacacguacacagcggcc

SEQ ID NO: 1743926 - RNA, 19 nt, Artificial Sequence
  Description of Artificial Sequence: Synthetic oligonucleotide
gcaggcccgaacaguacac

SEQ ID NO: 1743927 - RNA, 19 nt, Artificial Sequence
  Description of Artificial Sequence: Synthetic oligonucleotide
cugcuggaggcaucguagu

SEQ ID NO: 1743928 - RNA, 19 nt, Artificial Sequence
  Description of Artificial Sequence: Synthetic oligonucleotide
cacgucauuggagacuuuu

SEQ ID NO: 1743929 - RNA, 19 nt, Artificial Sequence
  Description of Artificial Sequence: Synthetic oligonucleotide
ccuuggcugcacaguguug

SEQ ID NO: 1743930 - RNA, 19 nt, Artificial Sequence
  Description of Artificial Sequence: Synthetic oligonucleotide
gcagugacggaagcucaca

SEQ ID NO: 1743931 - RNA, 19 nt, Artificial Sequence
  Description of Artificial Sequence: Synthetic oligonucleotide
cagggaagucuuccgugcu

SEQ ID NO: 1743932 - RNA, 19 nt, Artificial Sequence
  Description of Artificial Sequence: Synthetic oligonucleotide
caggcccgaacaguacaca

SEQ ID NO: 1743933 - RNA, 19 nt, Artificial Sequence
  Description of Artificial Sequence: Synthetic oligonucleotide
gccauaugggcugcaucca

SEQ ID NO: 1743934 - RNA, 19 nt, Artificial Sequence
  Description of Artificial Sequence: Synthetic oligonucleotide
gguacuguucacgcagcgu

SEQ ID NO: 1743935 - RNA, 19 nt, Artificial Sequence
  Description of Artificial Sequence: Synthetic oligonucleotide
gccacauuccgcagccuga

SEQ ID NO: 1743936 - RNA, 19 nt, Artificial Sequence
  Description of Artificial Sequence: Synthetic oligonucleotide
gccucgccaucuuggcagc

SEQ ID NO: 1743937 - RNA, 19 nt, Artificial Sequence
  Description of Artificial Sequence: Synthetic oligonucleotide
acaggccauaugggcugca

SEQ ID NO: 1743938 - RNA, 19 nt, Artificial Sequence
  Description of Artificial Sequence: Synthetic oligonucleotide
cacgcagcguugcccacua

SEQ ID NO: 1743939 - RNA, 19 nt, Artificial Sequence
  Description of Artificial Sequence: Synthetic oligonucleotide
ccgaacaguacacacucau

SEQ ID NO: 1743940 - RNA, 19 nt, Artificial Sequence
  Description of Artificial Sequence: Synthetic oligonucleotide
acguaaccguggggagcag

SEQ ID NO: 1743941 - RNA, 19 nt, Artificial Sequence
  Description of Artificial Sequence: Synthetic oligonucleotide
gcucugccacguaaccgug

SEQ ID NO: 1743942 - RNA, 19 nt, Artificial Sequence
  Description of Artificial Sequence: Synthetic oligonucleotide
ccguggggagcaguggcag

SEQ ID NO: 1743943 - RNA, 19 nt, Artificial Sequence
  Description of Artificial Sequence: Synthetic oligonucleotide
ggccccgucugggccauag

SEQ ID NO: 1743944 - RNA, 19 nt, Artificial Sequence
  Description of Artificial Sequence: Synthetic oligonucleotide
ucggagcuccugggaggac

SEQ ID NO: 1743945 - RNA, 19 nt, Artificial Sequence
  Description of Artificial Sequence: Synthetic oligonucleotide
ccauaugggcugcauccaa

SEQ ID NO: 1743946 - RNA, 19 nt, Artificial Sequence
  Description of Artificial Sequence: Synthetic oligonucleotide
caggcccguucaagucuuc

SEQ ID NO: 1743947 - RNA, 19 nt, Artificial Sequence
  Description of Artificial Sequence: Synthetic oligonucleotide
cauagacuucggagcuccu

SEQ ID NO: 1743948 - RNA, 19 nt, Artificial Sequence
  Description of Artificial Sequence: Synthetic oligonucleotide
cguagugguagccaggauu

SEQ ID NO: 1743949 - RNA, 19 nt, Artificial Sequence
  Description of Artificial Sequence: Synthetic oligonucleotide
gccgcaggcccguucaagu

SEQ ID NO: 1743950 - RNA, 19 nt, Artificial Sequence
  Description of Artificial Sequence: Synthetic oligonucleotide
ucgucugggccggggccau

SEQ ID NO: 1743951 - RNA, 19 nt, Artificial Sequence
  Description of Artificial Sequence: Synthetic oligonucleotide
ccgcaggcccguucaaguc

SEQ ID NO: 1743952 - RNA, 19 nt, Artificial Sequence
  Description of Artificial Sequence: Synthetic oligonucleotide
gccuggcucugccacguaa

SEQ ID NO: 1743953 - RNA, 19 nt, Artificial Sequence
  Description of Artificial Sequence: Synthetic oligonucleotide
gcacacgucauuggagacu

SEQ ID NO: 1743954 - RNA, 19 nt, Artificial Sequence
  Description of Artificial Sequence: Synthetic oligonucleotide
ccgagccacauugcacagc

SEQ ID NO: 1743955 - RNA, 19 nt, Artificial Sequence
  Description of Artificial Sequence: Synthetic oligonucleotide
ggcuagccacauagugcug

SEQ ID NO: 1743956 - RNA, 19 nt, Artificial Sequence
  Description of Artificial Sequence: Synthetic oligonucleotide
gucugauggcuagccacau

SEQ ID NO: 1743957 - RNA, 19 nt, Artificial Sequence
  Description of Artificial Sequence: Synthetic oligonucleotide
ggcccgaacaguacacacu

SEQ ID NO: 1743958 - RNA, 19 nt, Artificial Sequence
  Description of Artificial Sequence: Synthetic oligonucleotide
cagccagggucugauggcu

SEQ ID NO: 1743959 - RNA, 19 nt, Artificial Sequence
  Description of Artificial Sequence: Synthetic oligonucleotide
gcugaccggccauguugga

SEQ ID NO: 1743960 - RNA, 19 nt, Artificial Sequence
  Description of Artificial Sequence: Synthetic oligonucleotide
ccguucaagucuucacacu

SEQ ID NO: 1743961 - RNA, 19 nt, Artificial Sequence
  Description of Artificial Sequence: Synthetic oligonucleotide
ccggggccauacucauagc

SEQ ID NO: 1743962 - RNA, 19 nt, Artificial Sequence
  Description of Artificial Sequence: Synthetic oligonucleotide
caccguucucacaggccau

SEQ ID NO: 1743963 - RNA, 19 nt, Artificial Sequence
  Description of Artificial Sequence: Synthetic oligonucleotide
gcauccaacuggaauccuu

SEQ ID NO: 1743964 - RNA, 19 nt, Artificial Sequence
  Description of Artificial Sequence: Synthetic oligonucleotide
acgcagcguugcccacuaa

SEQ ID NO: 1743965 - RNA, 19 nt, Artificial Sequence
  Description of Artificial Sequence: Synthetic oligonucleotide
gcagaucgucugggccggg

SEQ ID NO: 1743966 - RNA, 19 nt, Artificial Sequence
  Description of Artificial Sequence: Synthetic oligonucleotide
cagagugccgcaggcccgu

SEQ ID NO: 1743967 - RNA, 19 nt, Artificial Sequence
  Description of Artificial Sequence: Synthetic oligonucleotide
gcccacuaagguccauggu

SEQ ID NO: 1743968 - RNA, 19 nt, Artificial Sequence
  Description of Artificial Sequence: Synthetic oligonucleotide
gcuggcugcacacgucauu

SEQ ID NO: 1743969 - RNA, 19 nt, Artificial Sequence
  Description of Artificial Sequence: Synthetic oligonucleotide
gugccgcaggcccguucaa

SEQ ID NO: 1743970 - RNA, 19 nt, Artificial Sequence
  Description of Artificial Sequence: Synthetic oligonucleotide
ggccggaaguggaccccug

SEQ ID NO: 1743971 - RNA, 19 nt, Artificial Sequence
  Description of Artificial Sequence: Synthetic oligonucleotide
ccggaaguggaccccugcu

SEQ ID NO: 1743972 - RNA, 19 nt, Artificial Sequence
  Description of Artificial Sequence: Synthetic oligonucleotide
acacgucauuggagacuuu

SEQ ID NO: 1743973 - RNA, 19 nt, Artificial Sequence
  Description of Artificial Sequence: Synthetic oligonucleotide
caggccauaugggcugcau

SEQ ID NO: 1743974 - RNA, 19 nt, Artificial Sequence
  Description of Artificial Sequence: Synthetic oligonucleotide
agagugccgcaggcccguu

SEQ ID NO: 1743975 - RNA, 19 nt, Artificial Sequence
  Description of Artificial Sequence: Synthetic oligonucleotide
ggggagcaguggcagcgau

SEQ ID NO: 1743976 - RNA, 19 nt, Artificial Sequence
  Description of Artificial Sequence: Synthetic oligonucleotide
gggccggggccauacucau

SEQ ID NO: 1743977 - RNA, 19 nt, Artificial Sequence
  Description of Artificial Sequence: Synthetic oligonucleotide
cgcaggcccguucaagucu

SEQ ID NO: 1743978 - RNA, 19 nt, Artificial Sequence
  Description of Artificial Sequence: Synthetic oligonucleotide
gggccuggcucugccacgu

SEQ ID NO: 1743979 - RNA, 19 nt, Artificial Sequence
  Description of Artificial Sequence: Synthetic oligonucleotide
cuucccgcucugccucaau

SEQ ID NO: 1743980 - RNA, 19 nt, Artificial Sequence
  Description of Artificial Sequence: Synthetic oligonucleotide
gccccgucugggccauaga

SEQ ID NO: 1743981 - RNA, 19 nt, Artificial Sequence
  Description of Artificial Sequence: Synthetic oligonucleotide
gcucaaggacugguguguu

SEQ ID NO: 1743982 - RNA, 19 nt, Artificial Sequence
  Description of Artificial Sequence: Synthetic oligonucleotide
gcaggcccguucaagucuu

SEQ ID NO: 1743983 - RNA, 19 nt, Artificial Sequence
  Description of Artificial Sequence: Synthetic oligonucleotide
cacguacacagcggccauu

SEQ ID NO: 1743984 - RNA, 19 nt, Artificial Sequence
  Description of Artificial Sequence: Synthetic oligonucleotide
ccguucucacaggccaugu

SEQ ID NO: 1743985 - RNA, 19 nt, Artificial Sequence
  Description of Artificial Sequence: Synthetic oligonucleotide
ccucgccaucuuggcagca

SEQ ID NO: 1743986 - RNA, 19 nt, Artificial Sequence
  Description of Artificial Sequence: Synthetic oligonucleotide
cguacacagcggccauucu

SEQ ID NO: 1743987 - RNA, 19 nt, Artificial Sequence
  Description of Artificial Sequence: Synthetic oligonucleotide
ggccuggcucugccacgua

SEQ ID NO: 1743988 - RNA, 19 nt, Artificial Sequence
  Description of Artificial Sequence: Synthetic oligonucleotide
cguaaccguggggagcagu

SEQ ID NO: 1743989 - RNA, 19 nt, Artificial Sequence
  Description of Artificial Sequence: Synthetic oligonucleotide
ggccggggccauacucaua

SEQ ID NO: 1743990 - RNA, 19 nt, Artificial Sequence
  Description of Artificial Sequence: Synthetic oligonucleotide
ccagcugaccggccauguu

SEQ ID NO: 1743991 - RNA, 19 nt, Artificial Sequence
  Description of Artificial Sequence: Synthetic oligonucleotide
cguugugauccuggcacuu

SEQ ID NO: 1743992 - RNA, 19 nt, Artificial Sequence
  Description of Artificial Sequence: Synthetic oligonucleotide
cgucugggccauagagauu

SEQ ID NO: 1743993 - RNA, 19 nt, Artificial Sequence
  Description of Artificial Sequence: Synthetic oligonucleotide
cggggcccagguaguugua

SEQ ID NO: 1743994 - RNA, 19 nt, Artificial Sequence
  Description of Artificial Sequence: Synthetic oligonucleotide
ccucggggcccagguaguu

SEQ ID NO: 1743995 - RNA, 19 nt, Artificial Sequence
  Description of Artificial Sequence: Synthetic oligonucleotide
cgucugggccggggccaua

SEQ ID NO: 1743996 - RNA, 19 nt, Artificial Sequence
  Description of Artificial Sequence: Synthetic oligonucleotide
gggccccgucugggccaua

SEQ ID NO: 1743997 - RNA, 19 nt, Artificial Sequence
  Description of Artificial Sequence: Synthetic oligonucleotide
agagcggucaucuaugucc

SEQ ID NO: 1743998 - RNA, 19 nt, Artificial Sequence
  Description of Artificial Sequence: Synthetic oligonucleotide
gauaucacgacguacuugc

SEQ ID NO: 1743999 - RNA, 19 nt, Artificial Sequence
  Description of Artificial Sequence: Synthetic oligonucleotide
auagauacggguuaggaca

SEQ ID NO: 1744000 - RNA, 19 nt, Artificial Sequence
  Description of Artificial Sequence: Synthetic oligonucleotide
auugauggagguuacgacg

SEQ ID NO: 1744001 - RNA, 19 nt, Artificial Sequence
  Description of Artificial Sequence: Synthetic oligonucleotide
ucuauaaggagggagggcg

SEQ ID NO: 1744002 - RNA, 19 nt, Artificial Sequence
  Description of Artificial Sequence: Synthetic oligonucleotide
uuuaugucaagguugcuga

SEQ ID NO: 1744003 - RNA, 19 nt, Artificial Sequence
  Description of Artificial Sequence: Synthetic oligonucleotide
auaaaugaagaugauagug

SEQ ID NO: 1744004 - RNA, 19 nt, Artificial Sequence
  Description of Artificial Sequence: Synthetic oligonucleotide
gaggucuuaaaccaggacc

SEQ ID NO: 1744005 - RNA, 19 nt, Artificial Sequence
  Description of Artificial Sequence: Synthetic oligonucleotide
uguucaaagagcagguaag

SEQ ID NO: 1744006 - RNA, 19 nt, Artificial Sequence
  Description of Artificial Sequence: Synthetic oligonucleotide
ucucuguauagaaaccucg

SEQ ID NO: 1744007 - RNA, 19 nt, Artificial Sequence
  Description of Artificial Sequence: Synthetic oligonucleotide
aucgaaaacaacagaaacc

SEQ ID NO: 1744008 - RNA, 19 nt, Artificial Sequence
  Description of Artificial Sequence: Synthetic oligonucleotide
uccacaacgauguugcucc

SEQ ID NO: 1744009 - RNA, 19 nt, Artificial Sequence
  Description of Artificial Sequence: Synthetic oligonucleotide
uuaaacuagaaacgggugu

SEQ ID NO: 1744010 - RNA, 19 nt, Artificial Sequence
  Description of Artificial Sequence: Synthetic oligonucleotide
uuuaaacuagaaacgggug

SEQ ID NO: 1744011 - RNA, 19 nt, Artificial Sequence
  Description of Artificial Sequence: Synthetic oligonucleotide
cuauuuaugucaagguugc

SEQ ID NO: 1744012 - RNA, 19 nt, Artificial Sequence
  Description of Artificial Sequence: Synthetic oligonucleotide
uaaggugugucuuggagcc

SEQ ID NO: 1744013 - RNA, 19 nt, Artificial Sequence
  Description of Artificial Sequence: Synthetic oligonucleotide
acaacgauguugcuccugc

SEQ ID NO: 1744014 - RNA, 19 nt, Artificial Sequence
  Description of Artificial Sequence: Synthetic oligonucleotide
ucguuuaaacuagaaacgg

SEQ ID NO: 1744015 - RNA, 19 nt, Artificial Sequence
  Description of Artificial Sequence: Synthetic oligonucleotide
acuauuuaugucaagguug

SEQ ID NO: 1744016 - RNA, 19 nt, Artificial Sequence
  Description of Artificial Sequence: Synthetic oligonucleotide
aacagaaaccccuaaugaa

SEQ ID NO: 1744017 - RNA, 19 nt, Artificial Sequence
  Description of Artificial Sequence: Synthetic oligonucleotide
ucagacuugcagaucagcc

SEQ ID NO: 1744018 - RNA, 19 nt, Artificial Sequence
  Description of Artificial Sequence: Synthetic oligonucleotide
uaaugaacgaauucucugu

SEQ ID NO: 1744019 - RNA, 19 nt, Artificial Sequence
  Description of Artificial Sequence: Synthetic oligonucleotide
aacuagaaacggguguugc

SEQ ID NO: 1744020 - RNA, 19 nt, Artificial Sequence
  Description of Artificial Sequence: Synthetic oligonucleotide
augaugucgacaccacugc

SEQ ID NO: 1744021 - RNA, 19 nt, Artificial Sequence
  Description of Artificial Sequence: Synthetic oligonucleotide
ucuuaaaccaggaccacuc

SEQ ID NO: 1744022 - RNA, 19 nt, Artificial Sequence
  Description of Artificial Sequence: Synthetic oligonucleotide
gaacgaauucucuguauag

SEQ ID NO: 1744023 - RNA, 19 nt, Artificial Sequence
  Description of Artificial Sequence: Synthetic oligonucleotide
uuaaaccaggaccacucag

SEQ ID NO: 1744024 - RNA, 19 nt, Artificial Sequence
  Description of Artificial Sequence: Synthetic oligonucleotide
guuaggacaggauaggaca

SEQ ID NO: 1744025 - RNA, 19 nt, Artificial Sequence
  Description of Artificial Sequence: Synthetic oligonucleotide
gauagauacggguuaggac

SEQ ID NO: 1744026 - RNA, 19 nt, Artificial Sequence
  Description of Artificial Sequence: Synthetic oligonucleotide
ccucguuuaaacuagaaac

SEQ ID NO: 1744027 - RNA, 19 nt, Artificial Sequence
  Description of Artificial Sequence: Synthetic oligonucleotide
ucaucuauguccaccgugu

SEQ ID NO: 1744028 - RNA, 19 nt, Artificial Sequence
  Description of Artificial Sequence: Synthetic oligonucleotide
gaaaccucguuuaaacuag

SEQ ID NO: 1744029 - RNA, 19 nt, Artificial Sequence
  Description of Artificial Sequence: Synthetic oligonucleotide
cagaaaccccuaaugaacg

SEQ ID NO: 1744030 - RNA, 19 nt, Artificial Sequence
  Description of Artificial Sequence: Synthetic oligonucleotide
agaucagccucacauuuuc

SEQ ID NO: 1744031 - RNA, 19 nt, Artificial Sequence
  Description of Artificial Sequence: Synthetic oligonucleotide
gaugacucagacuugcaga

SEQ ID NO: 1744032 - RNA, 19 nt, Artificial Sequence
  Description of Artificial Sequence: Synthetic oligonucleotide
agaugauagugaccaacac

SEQ ID NO: 1744033 - RNA, 19 nt, Artificial Sequence
  Description of Artificial Sequence: Synthetic oligonucleotide
gagguuacgacggugcccg

SEQ ID NO: 1744034 - RNA, 19 nt, Artificial Sequence
  Description of Artificial Sequence: Synthetic oligonucleotide
acuagaaacggguguugcg

SEQ ID NO: 1744035 - RNA, 19 nt, Artificial Sequence
  Description of Artificial Sequence: Synthetic oligonucleotide
agaaaccucguuuaaacua

SEQ ID NO: 1744036 - RNA, 19 nt, Artificial Sequence
  Description of Artificial Sequence: Synthetic oligonucleotide
ugggauaggagguuggggu

SEQ ID NO: 1744037 - RNA, 19 nt, Artificial Sequence
  Description of Artificial Sequence: Synthetic oligonucleotide
aucagccucacauuuucuc

SEQ ID NO: 1744038 - RNA, 19 nt, Artificial Sequence
  Description of Artificial Sequence: Synthetic oligonucleotide
cuagaaacggguguugcgg

SEQ ID NO: 1744039 - RNA, 19 nt, Artificial Sequence
  Description of Artificial Sequence: Synthetic oligonucleotide
cuggcguacauucuugucc

SEQ ID NO: 1744040 - RNA, 19 nt, Artificial Sequence
  Description of Artificial Sequence: Synthetic oligonucleotide
guaaggugugucuuggagc

SEQ ID NO: 1744041 - RNA, 19 nt, Artificial Sequence
  Description of Artificial Sequence: Synthetic oligonucleotide
aucuauguccaccguguac

SEQ ID NO: 1744042 - RNA, 19 nt, Artificial Sequence
  Description of Artificial Sequence: Synthetic oligonucleotide
uuauuuguggagucccagc

SEQ ID NO: 1744043 - RNA, 19 nt, Artificial Sequence
  Description of Artificial Sequence: Synthetic oligonucleotide
ugugucuuggagccgacgu

SEQ ID NO: 1744044 - RNA, 19 nt, Artificial Sequence
  Description of Artificial Sequence: Synthetic oligonucleotide
ucauugauggagguuacga

SEQ ID NO: 1744045 - RNA, 19 nt, Artificial Sequence
  Description of Artificial Sequence: Synthetic oligonucleotide
aaugaacgaauucucugua

SEQ ID NO: 1744046 - RNA, 19 nt, Artificial Sequence
  Description of Artificial Sequence: Synthetic oligonucleotide
uagauacggguuaggacag

SEQ ID NO: 1744047 - RNA, 19 nt, Artificial Sequence
  Description of Artificial Sequence: Synthetic oligonucleotide
gaagaugauagugaccaac

SEQ ID NO: 1744048 - RNA, 19 nt, Artificial Sequence
  Description of Artificial Sequence: Synthetic oligonucleotide
ugagaugacucagacuugc

SEQ ID NO: 1744049 - RNA, 19 nt, Artificial Sequence
  Description of Artificial Sequence: Synthetic oligonucleotide
agaggucuuaaaccaggac

SEQ ID NO: 1744050 - RNA, 19 nt, Artificial Sequence
  Description of Artificial Sequence: Synthetic oligonucleotide
uuaggcgcccagauuaccc

SEQ ID NO: 1744051 - RNA, 19 nt, Artificial Sequence
  Description of Artificial Sequence: Synthetic oligonucleotide
cuugccaccucucauccag

SEQ ID NO: 1744052 - RNA, 19 nt, Artificial Sequence
  Description of Artificial Sequence: Synthetic oligonucleotide
ugggguaggucuuuauuug

SEQ ID NO: 1744053 - RNA, 19 nt, Artificial Sequence
  Description of Artificial Sequence: Synthetic oligonucleotide
acacauguagguaccaggg

SEQ ID NO: 1744054 - RNA, 19 nt, Artificial Sequence
  Description of Artificial Sequence: Synthetic oligonucleotide
aaacggguguugcgggugg

SEQ ID NO: 1744055 - RNA, 19 nt, Artificial Sequence
  Description of Artificial Sequence: Synthetic oligonucleotide
accccuaaugaacgaauuc

SEQ ID NO: 1744056 - RNA, 19 nt, Artificial Sequence
  Description of Artificial Sequence: Synthetic oligonucleotide
ugaucugucagcuguggau

SEQ ID NO: 1744057 - RNA, 19 nt, Artificial Sequence
  Description of Artificial Sequence: Synthetic oligonucleotide
gguggcguuacacauguag

SEQ ID NO: 1744058 - RNA, 19 nt, Artificial Sequence
  Description of Artificial Sequence: Synthetic oligonucleotide
aaggaagaugcaggcauag

SEQ ID NO: 1744059 - RNA, 19 nt, Artificial Sequence
  Description of Artificial Sequence: Synthetic oligonucleotide
acgaauucucuguauagaa

SEQ ID NO: 1744060 - RNA, 19 nt, Artificial Sequence
  Description of Artificial Sequence: Synthetic oligonucleotide
aggagcgcgaagccgaggg

SEQ ID NO: 1744061 - RNA, 19 nt, Artificial Sequence
  Description of Artificial Sequence: Synthetic oligonucleotide
uagaaaccucguuuaaacu

SEQ ID NO: 1744062 - RNA, 19 nt, Artificial Sequence
  Description of Artificial Sequence: Synthetic oligonucleotide
auggagguuacgacggugc

SEQ ID NO: 1744063 - RNA, 19 nt, Artificial Sequence
  Description of Artificial Sequence: Synthetic oligonucleotide
aguaugggaguggagguag

SEQ ID NO: 1744064 - RNA, 19 nt, Artificial Sequence
  Description of Artificial Sequence: Synthetic oligonucleotide
cauugauggagguuacgac

SEQ ID NO: 1744065 - RNA, 19 nt, Artificial Sequence
  Description of Artificial Sequence: Synthetic oligonucleotide
gcuguuggugaucagcugg

SEQ ID NO: 1744066 - RNA, 19 nt, Artificial Sequence
  Description of Artificial Sequence: Synthetic oligonucleotide
uacggguuaggacaggaua

SEQ ID NO: 1744067 - RNA, 19 nt, Artificial Sequence
  Description of Artificial Sequence: Synthetic oligonucleotide
uucucuguauagaaaccuc

SEQ ID NO: 1744068 - RNA, 19 nt, Artificial Sequence
  Description of Artificial Sequence: Synthetic oligonucleotide
uucccgaccuugauccugg

SEQ ID NO: 1744069 - RNA, 19 nt, Artificial Sequence
  Description of Artificial Sequence: Synthetic oligonucleotide
uggcguuacacauguaggu

SEQ ID NO: 1744070 - RNA, 19 nt, Artificial Sequence
  Description of Artificial Sequence: Synthetic oligonucleotide
acucaaguggcguuccucu

SEQ ID NO: 1744071 - RNA, 19 nt, Artificial Sequence
  Description of Artificial Sequence: Synthetic oligonucleotide
uaugucaagguugcugaug

SEQ ID NO: 1744072 - RNA, 19 nt, Artificial Sequence
  Description of Artificial Sequence: Synthetic oligonucleotide
guuacgacggugcccgccg

SEQ ID NO: 1744073 - RNA, 19 nt, Artificial Sequence
  Description of Artificial Sequence: Synthetic oligonucleotide
uaaacuagaaacggguguu

SEQ ID NO: 1744074 - RNA, 19 nt, Artificial Sequence
  Description of Artificial Sequence: Synthetic oligonucleotide
aaggcgaggcucugucuuc

SEQ ID NO: 1744075 - RNA, 19 nt, Artificial Sequence
  Description of Artificial Sequence: Synthetic oligonucleotide
aggucuuaaaccaggacca

SEQ ID NO: 1744076 - RNA, 19 nt, Artificial Sequence
  Description of Artificial Sequence: Synthetic oligonucleotide
aaacuagaaacggguguug

SEQ ID NO: 1744077 - RNA, 19 nt, Artificial Sequence
  Description of Artificial Sequence: Synthetic oligonucleotide
ggugagaugacucagacuu

SEQ ID NO: 1744078 - RNA, 19 nt, Artificial Sequence
  Description of Artificial Sequence: Synthetic oligonucleotide
augacucagacuugcagau

SEQ ID NO: 1744079 - RNA, 19 nt, Artificial Sequence
  Description of Artificial Sequence: Synthetic oligonucleotide
guccuugucguucauguga

SEQ ID NO: 1744080 - RNA, 19 nt, Artificial Sequence
  Description of Artificial Sequence: Synthetic oligonucleotide
uguggauaucacgacguac

SEQ ID NO: 1744081 - RNA, 19 nt, Artificial Sequence
  Description of Artificial Sequence: Synthetic oligonucleotide
uguugcuccugcccacggg

SEQ ID NO: 1744082 - RNA, 19 nt, Artificial Sequence
  Description of Artificial Sequence: Synthetic oligonucleotide
guggcguuacacauguagg

SEQ ID NO: 1744083 - RNA, 19 nt, Artificial Sequence
  Description of Artificial Sequence: Synthetic oligonucleotide
cuauaaggagggagggcgc

SEQ ID NO: 1744084 - RNA, 19 nt, Artificial Sequence
  Description of Artificial Sequence: Synthetic oligonucleotide
gcugcggcgcucuauaagg

SEQ ID NO: 1744085 - RNA, 19 nt, Artificial Sequence
  Description of Artificial Sequence: Synthetic oligonucleotide
gauaggacaguaugggagu

SEQ ID NO: 1744086 - RNA, 19 nt, Artificial Sequence
  Description of Artificial Sequence: Synthetic oligonucleotide
ugucgccucguccaagcgc

SEQ ID NO: 1744087 - RNA, 19 nt, Artificial Sequence
  Description of Artificial Sequence: Synthetic oligonucleotide
accucguuuaaacuagaaa

SEQ ID NO: 1744088 - RNA, 19 nt, Artificial Sequence
  Description of Artificial Sequence: Synthetic oligonucleotide
uauaaggagggagggcgcc

SEQ ID NO: 1744089 - RNA, 19 nt, Artificial Sequence
  Description of Artificial Sequence: Synthetic oligonucleotide
uccgucgcuucucauaaau

SEQ ID NO: 1744090 - RNA, 19 nt, Artificial Sequence
  Description of Artificial Sequence: Synthetic oligonucleotide
aguggcguuccucuggcgu

SEQ ID NO: 1744091 - RNA, 19 nt, Artificial Sequence
  Description of Artificial Sequence: Synthetic oligonucleotide
acggguuaggacaggauag

SEQ ID NO: 1744092 - RNA, 19 nt, Artificial Sequence
  Description of Artificial Sequence: Synthetic oligonucleotide
cagccucacauuuucuccc

SEQ ID NO: 1744093 - RNA, 19 nt, Artificial Sequence
  Description of Artificial Sequence: Synthetic oligonucleotide
uaggcggcuucgcacacgc

SEQ ID NO: 1744094 - RNA, 19 nt, Artificial Sequence
  Description of Artificial Sequence: Synthetic oligonucleotide
cuugucguucaugugauga

SEQ ID NO: 1744095 - RNA, 19 nt, Artificial Sequence
  Description of Artificial Sequence: Synthetic oligonucleotide
cauuaucuccuggacacug

SEQ ID NO: 1744096 - RNA, 19 nt, Artificial Sequence
  Description of Artificial Sequence: Synthetic oligonucleotide
ugggcuuacucugcaaggc

SEQ ID NO: 1744097 - RNA, 19 nt, Artificial Sequence
  Description of Artificial Sequence: Synthetic oligonucleotide
cacgggcucaggaaggaag

SEQ ID NO: 1744098 - RNA, 19 nt, Artificial Sequence
  Description of Artificial Sequence: Synthetic oligonucleotide
uggagguuacgacggugcc

SEQ ID NO: 1744099 - RNA, 19 nt, Artificial Sequence
  Description of Artificial Sequence: Synthetic oligonucleotide
uccuugucguucaugugau

SEQ ID NO: 1744100 - RNA, 19 nt, Artificial Sequence
  Description of Artificial Sequence: Synthetic oligonucleotide
gucgccucguccaagcgcg

SEQ ID NO: 1744101 - RNA, 19 nt, Artificial Sequence
  Description of Artificial Sequence: Synthetic oligonucleotide
ugaugucgacaccacugcu

SEQ ID NO: 1744102 - RNA, 19 nt, Artificial Sequence
  Description of Artificial Sequence: Synthetic oligonucleotide
uggauagauacggguuagg

SEQ ID NO: 1744103 - RNA, 19 nt, Artificial Sequence
  Description of Artificial Sequence: Synthetic oligonucleotide
ugcggcgcucuauaaggag

SEQ ID NO: 1744104 - RNA, 19 nt, Artificial Sequence
  Description of Artificial Sequence: Synthetic oligonucleotide
ugcuaggcggcuucgcaca

SEQ ID NO: 1744105 - RNA, 19 nt, Artificial Sequence
  Description of Artificial Sequence: Synthetic oligonucleotide
agaaaccccuaaugaacga

SEQ ID NO: 1744106 - RNA, 19 nt, Artificial Sequence
  Description of Artificial Sequence: Synthetic oligonucleotide
ugguuccccagagucagag

SEQ ID NO: 1744107 - RNA, 19 nt, Artificial Sequence
  Description of Artificial Sequence: Synthetic oligonucleotide
cguuuaaacuagaaacggg

SEQ ID NO: 1744108 - RNA, 19 nt, Artificial Sequence
  Description of Artificial Sequence: Synthetic oligonucleotide
acgucauugauggagguua

SEQ ID NO: 1744109 - RNA, 19 nt, Artificial Sequence
  Description of Artificial Sequence: Synthetic oligonucleotide
guugggauaggagguuggg

SEQ ID NO: 1744110 - RNA, 19 nt, Artificial Sequence
  Description of Artificial Sequence: Synthetic oligonucleotide
aaaccccuaaugaacgaau

SEQ ID NO: 1744111 - RNA, 19 nt, Artificial Sequence
  Description of Artificial Sequence: Synthetic oligonucleotide
cagguaaggugugucuugg

SEQ ID NO: 1744112 - RNA, 19 nt, Artificial Sequence
  Description of Artificial Sequence: Synthetic oligonucleotide
gauggagguuacgacggug

SEQ ID NO: 1744113 - RNA, 19 nt, Artificial Sequence
  Description of Artificial Sequence: Synthetic oligonucleotide
cacgcagugucauuaucuc

SEQ ID NO: 1744114 - RNA, 19 nt, Artificial Sequence
  Description of Artificial Sequence: Synthetic oligonucleotide
caaguggcguuccucuggc

SEQ ID NO: 1744115 - RNA, 19 nt, Artificial Sequence
  Description of Artificial Sequence: Synthetic oligonucleotide
uccaccguguacugcgucu

SEQ ID NO: 1744116 - RNA, 19 nt, Artificial Sequence
  Description of Artificial Sequence: Synthetic oligonucleotide
acgacguacuugcucucag

SEQ ID NO: 1744117 - RNA, 19 nt, Artificial Sequence
  Description of Artificial Sequence: Synthetic oligonucleotide
uguccuugucguucaugug

SEQ ID NO: 1744118 - RNA, 19 nt, Artificial Sequence
  Description of Artificial Sequence: Synthetic oligonucleotide
ggaauguucugacuucuuc

SEQ ID NO: 1744119 - RNA, 19 nt, Artificial Sequence
  Description of Artificial Sequence: Synthetic oligonucleotide
gaaacggguguugcgggug

SEQ ID NO: 1744120 - RNA, 19 nt, Artificial Sequence
  Description of Artificial Sequence: Synthetic oligonucleotide
guugcggguggcuugcuuc

SEQ ID NO: 1744121 - RNA, 19 nt, Artificial Sequence
  Description of Artificial Sequence: Synthetic oligonucleotide
gauacggguuaggacagga

SEQ ID NO: 1744122 - RNA, 19 nt, Artificial Sequence
  Description of Artificial Sequence: Synthetic oligonucleotide
guggauagauacggguuag

SEQ ID NO: 1744123 - RNA, 19 nt, Artificial Sequence
  Description of Artificial Sequence: Synthetic oligonucleotide
cucuauaaggagggagggc

SEQ ID NO: 1744124 - RNA, 19 nt, Artificial Sequence
  Description of Artificial Sequence: Synthetic oligonucleotide
cucagacuugcagaucagc

SEQ ID NO: 1744125 - RNA, 19 nt, Artificial Sequence
  Description of Artificial Sequence: Synthetic oligonucleotide
ccgaccuugauccugggug

SEQ ID NO: 1744126 - RNA, 19 nt, Artificial Sequence
  Description of Artificial Sequence: Synthetic oligonucleotide
aggaccacucagugacagg

SEQ ID NO: 1744127 - RNA, 19 nt, Artificial Sequence
  Description of Artificial Sequence: Synthetic oligonucleotide
guauagaaaccucguuuaa

SEQ ID NO: 1744128 - RNA, 19 nt, Artificial Sequence
  Description of Artificial Sequence: Synthetic oligonucleotide
ugcgucugcaggucaggca

SEQ ID NO: 1744129 - RNA, 19 nt, Artificial Sequence
  Description of Artificial Sequence: Synthetic oligonucleotide
cuugauccuggguggcccc

SEQ ID NO: 1744130 - RNA, 19 nt, Artificial Sequence
  Description of Artificial Sequence: Synthetic oligonucleotide
ucguucaugugaugaccac

SEQ ID NO: 1744131 - RNA, 19 nt, Artificial Sequence
  Description of Artificial Sequence: Synthetic oligonucleotide
uuaugucaagguugcugau

SEQ ID NO: 1744132 - RNA, 19 nt, Artificial Sequence
  Description of Artificial Sequence: Synthetic oligonucleotide
gcguuacacauguagguac

SEQ ID NO: 1744133 - RNA, 19 nt, Artificial Sequence
  Description of Artificial Sequence: Synthetic oligonucleotide
gucagaggucuuaaaccag

SEQ ID NO: 1744134 - RNA, 19 nt, Artificial Sequence
  Description of Artificial Sequence: Synthetic oligonucleotide
aacggguguugcggguggc

SEQ ID NO: 1744135 - RNA, 19 nt, Artificial Sequence
  Description of Artificial Sequence: Synthetic oligonucleotide
accuugauccuggguggcc

SEQ ID NO: 1744136 - RNA, 19 nt, Artificial Sequence
  Description of Artificial Sequence: Synthetic oligonucleotide
ggcggcuucgcacacgcag

SEQ ID NO: 1744137 - RNA, 19 nt, Artificial Sequence
  Description of Artificial Sequence: Synthetic oligonucleotide
auaggacaguaugggagug

SEQ ID NO: 1744138 - RNA, 19 nt, Artificial Sequence
  Description of Artificial Sequence: Synthetic oligonucleotide
cacaggagcgcgaagccga

SEQ ID NO: 1744139 - RNA, 19 nt, Artificial Sequence
  Description of Artificial Sequence: Synthetic oligonucleotide
gaaaccccuaaugaacgaa

SEQ ID NO: 1744140 - RNA, 19 nt, Artificial Sequence
  Description of Artificial Sequence: Synthetic oligonucleotide
aggacaguaugggagugga

SEQ ID NO: 1744141 - RNA, 19 nt, Artificial Sequence
  Description of Artificial Sequence: Synthetic oligonucleotide
gggcuuacucugcaaggcg

SEQ ID NO: 1744142 - RNA, 19 nt, Artificial Sequence
  Description of Artificial Sequence: Synthetic oligonucleotide
gccgacgucauugauggag

SEQ ID NO: 1744143 - RNA, 19 nt, Artificial Sequence
  Description of Artificial Sequence: Synthetic oligonucleotide
ggauaggagguuggggugg

SEQ ID NO: 1744144 - RNA, 19 nt, Artificial Sequence
  Description of Artificial Sequence: Synthetic oligonucleotide
gucgacaccacugcuguuc

SEQ ID NO: 1744145 - RNA, 19 nt, Artificial Sequence
  Description of Artificial Sequence: Synthetic oligonucleotide
uuggagccgacgucauuga

SEQ ID NO: 1744146 - RNA, 19 nt, Artificial Sequence
  Description of Artificial Sequence: Synthetic oligonucleotide
cuuccgucgcuucucauaa

SEQ ID NO: 1744147 - RNA, 19 nt, Artificial Sequence
  Description of Artificial Sequence: Synthetic oligonucleotide
augucgccucguccaagcg

SEQ ID NO: 1744148 - RNA, 19 nt, Artificial Sequence
  Description of Artificial Sequence: Synthetic oligonucleotide
aaaccucguuuaaacuaga

SEQ ID NO: 1744149 - RNA, 19 nt, Artificial Sequence
  Description of Artificial Sequence: Synthetic oligonucleotide
cuuaaaccaggaccacuca

SEQ ID NO: 1744150 - RNA, 19 nt, Artificial Sequence
  Description of Artificial Sequence: Synthetic oligonucleotide
uggccccuccacaacgaug

SEQ ID NO: 1744151 - RNA, 19 nt, Artificial Sequence
  Description of Artificial Sequence: Synthetic oligonucleotide
cugcuaggcggcuucgcac

SEQ ID NO: 1744152 - RNA, 19 nt, Artificial Sequence
  Description of Artificial Sequence: Synthetic oligonucleotide
gguuaggacaggauaggac

SEQ ID NO: 1744153 - RNA, 19 nt, Artificial Sequence
  Description of Artificial Sequence: Synthetic oligonucleotide
ggguuaggcgcccagauua

SEQ ID NO: 1744154 - RNA, 19 nt, Artificial Sequence
  Description of Artificial Sequence: Synthetic oligonucleotide
cuccacaacgauguugcuc

SEQ ID NO: 1744155 - RNA, 19 nt, Artificial Sequence
  Description of Artificial Sequence: Synthetic oligonucleotide
cucaaguggcguuccucug

SEQ ID NO: 1744156 - RNA, 19 nt, Artificial Sequence
  Description of Artificial Sequence: Synthetic oligonucleotide
uugcggguggcuugcuucu

SEQ ID NO: 1744157 - RNA, 19 nt, Artificial Sequence
  Description of Artificial Sequence: Synthetic oligonucleotide
gucguucaugugaugacca

SEQ ID NO: 1744158 - RNA, 19 nt, Artificial Sequence
  Description of Artificial Sequence: Synthetic oligonucleotide
agccucacauuuucucccu

SEQ ID NO: 1744159 - RNA, 19 nt, Artificial Sequence
  Description of Artificial Sequence: Synthetic oligonucleotide
gggauaggagguuggggug

SEQ ID NO: 1744160 - RNA, 19 nt, Artificial Sequence
  Description of Artificial Sequence: Synthetic oligonucleotide
aaccucguuuaaacuagaa

SEQ ID NO: 1744161 - RNA, 19 nt, Artificial Sequence
  Description of Artificial Sequence: Synthetic oligonucleotide
ccgacgucauugauggagg

SEQ ID NO: 1744162 - RNA, 19 nt, Artificial Sequence
  Description of Artificial Sequence: Synthetic oligonucleotide
aaccccuaaugaacgaauu

SEQ ID NO: 1744163 - RNA, 19 nt, Artificial Sequence
  Description of Artificial Sequence: Synthetic oligonucleotide
cccuaaugaacgaauucuc

SEQ ID NO: 1744164 - RNA, 19 nt, Artificial Sequence
  Description of Artificial Sequence: Synthetic oligonucleotide
gguggauagauacggguua

SEQ ID NO: 1744165 - RNA, 19 nt, Artificial Sequence
  Description of Artificial Sequence: Synthetic oligonucleotide
uugccaccucucauccagc

SEQ ID NO: 1744166 - RNA, 19 nt, Artificial Sequence
  Description of Artificial Sequence: Synthetic oligonucleotide
aguggggcggcaccagggu

SEQ ID NO: 1744167 - RNA, 19 nt, Artificial Sequence
  Description of Artificial Sequence: Synthetic oligonucleotide
uacgacggugcccgccgcc

SEQ ID NO: 1744168 - RNA, 19 nt, Artificial Sequence
  Description of Artificial Sequence: Synthetic oligonucleotide
ggggugagaugacucagac

SEQ ID NO: 1744169 - RNA, 19 nt, Artificial Sequence
  Description of Artificial Sequence: Synthetic oligonucleotide
ugucuucacccagguuggg

SEQ ID NO: 1744170 - RNA, 19 nt, Artificial Sequence
  Description of Artificial Sequence: Synthetic oligonucleotide
cucuguauagaaaccucgu

SEQ ID NO: 1744171 - RNA, 19 nt, Artificial Sequence
  Description of Artificial Sequence: Synthetic oligonucleotide
ggagccgacgucauugaug

SEQ ID NO: 1744172 - RNA, 19 nt, Artificial Sequence
  Description of Artificial Sequence: Synthetic oligonucleotide
ggcauaguccccagagcgg

SEQ ID NO: 1744173 - RNA, 19 nt, Artificial Sequence
  Description of Artificial Sequence: Synthetic oligonucleotide
agcggucaucuauguccac

SEQ ID NO: 1744174 - RNA, 19 nt, Artificial Sequence
  Description of Artificial Sequence: Synthetic oligonucleotide
uucgcacacgcagugucau

SEQ ID NO: 1744175 - RNA, 19 nt, Artificial Sequence
  Description of Artificial Sequence: Synthetic oligonucleotide
cguuacacauguagguacc

SEQ ID NO: 1744176 - RNA, 19 nt, Artificial Sequence
  Description of Artificial Sequence: Synthetic oligonucleotide
cucugccacucaaguggcg

SEQ ID NO: 1744177 - RNA, 19 nt, Artificial Sequence
  Description of Artificial Sequence: Synthetic oligonucleotide
guuaggcgcccagauuacc

SEQ ID NO: 1744178 - RNA, 19 nt, Artificial Sequence
  Description of Artificial Sequence: Synthetic oligonucleotide
gagcggucaucuaugucca

SEQ ID NO: 1744179 - RNA, 19 nt, Artificial Sequence
  Description of Artificial Sequence: Synthetic oligonucleotide
cuucccgaccuugauccug

SEQ ID NO: 1744180 - RNA, 19 nt, Artificial Sequence
  Description of Artificial Sequence: Synthetic oligonucleotide
agauacggguuaggacagg

SEQ ID NO: 1744181 - RNA, 19 nt, Artificial Sequence
  Description of Artificial Sequence: Synthetic oligonucleotide
uuacgacggugcccgccgc

SEQ ID NO: 1744182 - RNA, 19 nt, Artificial Sequence
  Description of Artificial Sequence: Synthetic oligonucleotide
ggucacuauuuaugucaag

SEQ ID NO: 1744183 - RNA, 19 nt, Artificial Sequence
  Description of Artificial Sequence: Synthetic oligonucleotide
gucgcuucucauaaaugaa

SEQ ID NO: 1744184 - RNA, 19 nt, Artificial Sequence
  Description of Artificial Sequence: Synthetic oligonucleotide
cacacgcagugucauuauc

SEQ ID NO: 1744185 - RNA, 19 nt, Artificial Sequence
  Description of Artificial Sequence: Synthetic oligonucleotide
accucucauccagcggugg

SEQ ID NO: 1744186 - RNA, 19 nt, Artificial Sequence
  Description of Artificial Sequence: Synthetic oligonucleotide
cuucgcacacgcaguguca

SEQ ID NO: 1744187 - RNA, 19 nt, Artificial Sequence
  Description of Artificial Sequence: Synthetic oligonucleotide
uccaagcgcggccccgcug

SEQ ID NO: 1744188 - RNA, 19 nt, Artificial Sequence
  Description of Artificial Sequence: Synthetic oligonucleotide
acucuacagggcaguagug

SEQ ID NO: 1744189 - RNA, 19 nt, Artificial Sequence
  Description of Artificial Sequence: Synthetic oligonucleotide
aggacaggauaggacagua

SEQ ID NO: 1744190 - RNA, 19 nt, Artificial Sequence
  Description of Artificial Sequence: Synthetic oligonucleotide
gaccuugauccuggguggc

SEQ ID NO: 1744191 - RNA, 19 nt, Artificial Sequence
  Description of Artificial Sequence: Synthetic oligonucleotide
ucuucccgaccuugauccu

SEQ ID NO: 1744192 - RNA, 19 nt, Artificial Sequence
  Description of Artificial Sequence: Synthetic oligonucleotide
ugccacucaaguggcguuc

SEQ ID NO: 1744193 - RNA, 19 nt, Artificial Sequence
  Description of Artificial Sequence: Synthetic oligonucleotide
ugcuccugcccacgggcuc

SEQ ID NO: 1744194 - RNA, 19 nt, Artificial Sequence
  Description of Artificial Sequence: Synthetic oligonucleotide
gcuuacucugcaaggcgag

SEQ ID NO: 1744195 - RNA, 19 nt, Artificial Sequence
  Description of Artificial Sequence: Synthetic oligonucleotide
gcuucgcacacgcaguguc

SEQ ID NO: 1744196 - RNA, 19 nt, Artificial Sequence
  Description of Artificial Sequence: Synthetic oligonucleotide
gcggcgcucuauaaggagg

SEQ ID NO: 1744197 - RNA, 19 nt, Artificial Sequence
  Description of Artificial Sequence: Synthetic oligonucleotide
ucguccaagcgcggccccg

SEQ ID NO: 1744198 - RNA, 19 nt, Artificial Sequence
  Description of Artificial Sequence: Synthetic oligonucleotide
ugacucagacuugcagauc

SEQ ID NO: 1744199 - RNA, 19 nt, Artificial Sequence
  Description of Artificial Sequence: Synthetic oligonucleotide
agguuacgacggugcccgc

SEQ ID NO: 1744200 - RNA, 19 nt, Artificial Sequence
  Description of Artificial Sequence: Synthetic oligonucleotide
cacucaaguggcguuccuc

SEQ ID NO: 1744201 - RNA, 19 nt, Artificial Sequence
  Description of Artificial Sequence: Synthetic oligonucleotide
acucagacuugcagaucag

SEQ ID NO: 1744202 - RNA, 19 nt, Artificial Sequence
  Description of Artificial Sequence: Synthetic oligonucleotide
uguugcggguggcuugcuu

SEQ ID NO: 1744203 - RNA, 19 nt, Artificial Sequence
  Description of Artificial Sequence: Synthetic oligonucleotide
ucacgacguacuugcucuc

SEQ ID NO: 1744204 - RNA, 19 nt, Artificial Sequence
  Description of Artificial Sequence: Synthetic oligonucleotide
ggagguuacgacggugccc

SEQ ID NO: 1744205 - RNA, 19 nt, Artificial Sequence
  Description of Artificial Sequence: Synthetic oligonucleotide
ucuuggagccgacgucauu

SEQ ID NO: 1744206 - RNA, 19 nt, Artificial Sequence
  Description of Artificial Sequence: Synthetic oligonucleotide
ugcugauggucagcucuga

SEQ ID NO: 1744207 - RNA, 19 nt, Artificial Sequence
  Description of Artificial Sequence: Synthetic oligonucleotide
gugugucuuggagccgacg

SEQ ID NO: 1744208 - RNA, 19 nt, Artificial Sequence
  Description of Artificial Sequence: Synthetic oligonucleotide
cugaucugucagcugugga

SEQ ID NO: 1744209 - RNA, 19 nt, Artificial Sequence
  Description of Artificial Sequence: Synthetic oligonucleotide
guguacugcgucugcaggu

SEQ ID NO: 1744210 - RNA, 19 nt, Artificial Sequence
  Description of Artificial Sequence: Synthetic oligonucleotide
acgggcucaggaaggaaga

SEQ ID NO: 1744211 - RNA, 19 nt, Artificial Sequence
  Description of Artificial Sequence: Synthetic oligonucleotide
cccagagcggucaucuaug

SEQ ID NO: 1744212 - RNA, 19 nt, Artificial Sequence
  Description of Artificial Sequence: Synthetic oligonucleotide
acacugcccuggguguugg

SEQ ID NO: 1744213 - RNA, 19 nt, Artificial Sequence
  Description of Artificial Sequence: Synthetic oligonucleotide
cagagcggucaucuauguc

SEQ ID NO: 1744214 - RNA, 19 nt, Artificial Sequence
  Description of Artificial Sequence: Synthetic oligonucleotide
cuaggcggcuucgcacacg

SEQ ID NO: 1744215 - RNA, 19 nt, Artificial Sequence
  Description of Artificial Sequence: Synthetic oligonucleotide
ucccgaccuugauccuggg

SEQ ID NO: 1744216 - RNA, 19 nt, Artificial Sequence
  Description of Artificial Sequence: Synthetic oligonucleotide
accguguacugcgucugca

SEQ ID NO: 1744217 - RNA, 19 nt, Artificial Sequence
  Description of Artificial Sequence: Synthetic oligonucleotide
gagguugggguggauagau

SEQ ID NO: 1744218 - RNA, 19 nt, Artificial Sequence
  Description of Artificial Sequence: Synthetic oligonucleotide
caccguguacugcgucugc

SEQ ID NO: 1744219 - RNA, 19 nt, Artificial Sequence
  Description of Artificial Sequence: Synthetic oligonucleotide
gcguacauucuuguccuug

SEQ ID NO: 1744220 - RNA, 19 nt, Artificial Sequence
  Description of Artificial Sequence: Synthetic oligonucleotide
ucgccucguccaagcgcgg

SEQ ID NO: 1744221 - RNA, 19 nt, Artificial Sequence
  Description of Artificial Sequence: Synthetic oligonucleotide
ccuuggccgcacaggagcg

SEQ ID NO: 1744222 - RNA, 19 nt, Artificial Sequence
  Description of Artificial Sequence: Synthetic oligonucleotide
ccuaaugaacgaauucucu

SEQ ID NO: 1744223 - RNA, 19 nt, Artificial Sequence
  Description of Artificial Sequence: Synthetic oligonucleotide
guacugcgucugcagguca

SEQ ID NO: 1744224 - RNA, 19 nt, Artificial Sequence
  Description of Artificial Sequence: Synthetic oligonucleotide
gguguugcggguggcuugc

SEQ ID NO: 1744225 - RNA, 19 nt, Artificial Sequence
  Description of Artificial Sequence: Synthetic oligonucleotide
agaugcugggcugggguua

SEQ ID NO: 1744226 - RNA, 19 nt, Artificial Sequence
  Description of Artificial Sequence: Synthetic oligonucleotide
cuuggccgcacaggagcgc

SEQ ID NO: 1744227 - RNA, 19 nt, Artificial Sequence
  Description of Artificial Sequence: Synthetic oligonucleotide
caguguguccuccugcagu

SEQ ID NO: 1744228 - RNA, 19 nt, Artificial Sequence
  Description of Artificial Sequence: Synthetic oligonucleotide
ggguguugcggguggcuug

SEQ ID NO: 1744229 - RNA, 19 nt, Artificial Sequence
  Description of Artificial Sequence: Synthetic oligonucleotide
gucuuaaaccaggaccacu

SEQ ID NO: 1744230 - RNA, 19 nt, Artificial Sequence
  Description of Artificial Sequence: Synthetic oligonucleotide
uugauccuggguggccccu

SEQ ID NO: 1744231 - RNA, 19 nt, Artificial Sequence
  Description of Artificial Sequence: Synthetic oligonucleotide
auaucacgacguacuugcu

SEQ ID NO: 1744232 - RNA, 19 nt, Artificial Sequence
  Description of Artificial Sequence: Synthetic oligonucleotide
ccucuggcguacauucuug

SEQ ID NO: 1744233 - RNA, 19 nt, Artificial Sequence
  Description of Artificial Sequence: Synthetic oligonucleotide
gguuacgacggugcccgcc

SEQ ID NO: 1744234 - RNA, 19 nt, Artificial Sequence
  Description of Artificial Sequence: Synthetic oligonucleotide
cucguccaagcgcggcccc

SEQ ID NO: 1744235 - RNA, 19 nt, Artificial Sequence
  Description of Artificial Sequence: Synthetic oligonucleotide
cggcgcucuauaaggaggg

SEQ ID NO: 1744236 - RNA, 19 nt, Artificial Sequence
  Description of Artificial Sequence: Synthetic oligonucleotide
ccguguacugcgucugcag

SEQ ID NO: 1744237 - RNA, 19 nt, Artificial Sequence
  Description of Artificial Sequence: Synthetic oligonucleotide
cagagucagaggucuuaaa

SEQ ID NO: 1744238 - RNA, 19 nt, Artificial Sequence
  Description of Artificial Sequence: Synthetic oligonucleotide
gccucauggacaaggacaa

SEQ ID NO: 1744239 - RNA, 19 nt, Artificial Sequence
  Description of Artificial Sequence: Synthetic oligonucleotide
uuccgucgcuucucauaaa

SEQ ID NO: 1744240 - RNA, 19 nt, Artificial Sequence
  Description of Artificial Sequence: Synthetic oligonucleotide
ggcaguagugacacuacua

SEQ ID NO: 1744241 - RNA, 19 nt, Artificial Sequence
  Description of Artificial Sequence: Synthetic oligonucleotide
cugcggcgcucuauaagga

SEQ ID NO: 1744242 - RNA, 19 nt, Artificial Sequence
  Description of Artificial Sequence: Synthetic oligonucleotide
guggcguuccucuggcgua

SEQ ID NO: 1744243 - RNA, 19 nt, Artificial Sequence
  Description of Artificial Sequence: Synthetic oligonucleotide
ggcgccuuggccgcacagg

SEQ ID NO: 1744244 - RNA, 19 nt, Artificial Sequence
  Description of Artificial Sequence: Synthetic oligonucleotide
ggucuuaaaccaggaccac

SEQ ID NO: 1744245 - RNA, 19 nt, Artificial Sequence
  Description of Artificial Sequence: Synthetic oligonucleotide
ccgucgcuucucauaaaug

SEQ ID NO: 1744246 - RNA, 19 nt, Artificial Sequence
  Description of Artificial Sequence: Synthetic oligonucleotide
ggguuaggacaggauagga

SEQ ID NO: 1744247 - RNA, 19 nt, Artificial Sequence
  Description of Artificial Sequence: Synthetic oligonucleotide
ggcguuacacauguaggua

SEQ ID NO: 1744248 - RNA, 19 nt, Artificial Sequence
  Description of Artificial Sequence: Synthetic oligonucleotide
gcuuccgucgcuucucaua

SEQ ID NO: 1744249 - RNA, 19 nt, Artificial Sequence
  Description of Artificial Sequence: Synthetic oligonucleotide
gguuaggcgcccagauuac

SEQ ID NO: 1744250 - RNA, 19 nt, Artificial Sequence
  Description of Artificial Sequence: Synthetic oligonucleotide
ugucgacaccacugcuguu

SEQ ID NO: 1744251 - RNA, 19 nt, Artificial Sequence
  Description of Artificial Sequence: Synthetic oligonucleotide
caucuauguccaccgugua

SEQ ID NO: 1744252 - RNA, 19 nt, Artificial Sequence
  Description of Artificial Sequence: Synthetic oligonucleotide
cugcccacgggcucaggaa

SEQ ID NO: 1744253 - RNA, 19 nt, Artificial Sequence
  Description of Artificial Sequence: Synthetic oligonucleotide
cacgacguacuugcucuca

SEQ ID NO: 1744254 - RNA, 19 nt, Artificial Sequence
  Description of Artificial Sequence: Synthetic oligonucleotide
ggacaguaugggaguggag

SEQ ID NO: 1744255 - RNA, 19 nt, Artificial Sequence
  Description of Artificial Sequence: Synthetic oligonucleotide
cuguggauaucacgacgua

SEQ ID NO: 1744256 - RNA, 19 nt, Artificial Sequence
  Description of Artificial Sequence: Synthetic oligonucleotide
gccuacucugccacucaag

SEQ ID NO: 1744257 - RNA, 19 nt, Artificial Sequence
  Description of Artificial Sequence: Synthetic oligonucleotide
cucuggcguacauucuugu

SEQ ID NO: 1744258 - RNA, 19 nt, Artificial Sequence
  Description of Artificial Sequence: Synthetic oligonucleotide
guaugggaguggagguaga

SEQ ID NO: 1744259 - RNA, 19 nt, Artificial Sequence
  Description of Artificial Sequence: Synthetic oligonucleotide
gggucacuauuuaugucaa

SEQ ID NO: 1744260 - RNA, 19 nt, Artificial Sequence
  Description of Artificial Sequence: Synthetic oligonucleotide
acggguguugcggguggcu

SEQ ID NO: 1744261 - RNA, 19 nt, Artificial Sequence
  Description of Artificial Sequence: Synthetic oligonucleotide
ucgcacacgcagugucauu

SEQ ID NO: 1744262 - RNA, 19 nt, Artificial Sequence
  Description of Artificial Sequence: Synthetic oligonucleotide
cggguuaggacaggauagg

SEQ ID NO: 1744263 - RNA, 19 nt, Artificial Sequence
  Description of Artificial Sequence: Synthetic oligonucleotide
ccccuaaugaacgaauucu

SEQ ID NO: 1744264 - RNA, 19 nt, Artificial Sequence
  Description of Artificial Sequence: Synthetic oligonucleotide
ccacucuacagggcaguag

SEQ ID NO: 1744265 - RNA, 19 nt, Artificial Sequence
  Description of Artificial Sequence: Synthetic oligonucleotide
gccacucaaguggcguucc

SEQ ID NO: 1744266 - RNA, 19 nt, Artificial Sequence
  Description of Artificial Sequence: Synthetic oligonucleotide
caccccgccuacucugcca

SEQ ID NO: 1744267 - RNA, 19 nt, Artificial Sequence
  Description of Artificial Sequence: Synthetic oligonucleotide
gcuaggcggcuucgcacac

SEQ ID NO: 1744268 - RNA, 19 nt, Artificial Sequence
  Description of Artificial Sequence: Synthetic oligonucleotide
ccgccaugucgccucgucc

SEQ ID NO: 1744269 - RNA, 19 nt, Artificial Sequence
  Description of Artificial Sequence: Synthetic oligonucleotide
gggugagaugacucagacu

SEQ ID NO: 1744270 - RNA, 19 nt, Artificial Sequence
  Description of Artificial Sequence: Synthetic oligonucleotide
ccuugucguucaugugaug

SEQ ID NO: 1744271 - RNA, 19 nt, Artificial Sequence
  Description of Artificial Sequence: Synthetic oligonucleotide
cugggguuaggcgcccaga

SEQ ID NO: 1744272 - RNA, 19 nt, Artificial Sequence
  Description of Artificial Sequence: Synthetic oligonucleotide
agccgacgucauugaugga

SEQ ID NO: 1744273 - RNA, 19 nt, Artificial Sequence
  Description of Artificial Sequence: Synthetic oligonucleotide
ugguggcguuacacaugua

SEQ ID NO: 1744274 - RNA, 19 nt, Artificial Sequence
  Description of Artificial Sequence: Synthetic oligonucleotide
ccccaccccgccuacucug

SEQ ID NO: 1744275 - RNA, 19 nt, Artificial Sequence
  Description of Artificial Sequence: Synthetic oligonucleotide
ccaccguguacugcgucug

SEQ ID NO: 1744276 - RNA, 19 nt, Artificial Sequence
  Description of Artificial Sequence: Synthetic oligonucleotide
cccaccccgccuacucugc

SEQ ID NO: 1744277 - RNA, 19 nt, Artificial Sequence
  Description of Artificial Sequence: Synthetic oligonucleotide
gguggccccuccacaacga

SEQ ID NO: 1744278 - RNA, 19 nt, Artificial Sequence
  Description of Artificial Sequence: Synthetic oligonucleotide
ggguggauagauacggguu

SEQ ID NO: 1744279 - RNA, 19 nt, Artificial Sequence
  Description of Artificial Sequence: Synthetic oligonucleotide
cguacauucuuguccuugu

SEQ ID NO: 1744280 - RNA, 19 nt, Artificial Sequence
  Description of Artificial Sequence: Synthetic oligonucleotide
gccgccaugucgccucguc

SEQ ID NO: 1744281 - RNA, 19 nt, Artificial Sequence
  Description of Artificial Sequence: Synthetic oligonucleotide
ccugcccacgggcucagga

SEQ ID NO: 1744282 - RNA, 19 nt, Artificial Sequence
  Description of Artificial Sequence: Synthetic oligonucleotide
ggcugcuaggcggcuucgc

SEQ ID NO: 1744283 - RNA, 19 nt, Artificial Sequence
  Description of Artificial Sequence: Synthetic oligonucleotide
ggugugucuuggagccgac

SEQ ID NO: 1744284 - RNA, 19 nt, Artificial Sequence
  Description of Artificial Sequence: Synthetic oligonucleotide
gggcugcuaggcggcuucg

SEQ ID NO: 1744285 - RNA, 19 nt, Artificial Sequence
  Description of Artificial Sequence: Synthetic oligonucleotide
cccgccuacucugccacuc

SEQ ID NO: 1744286 - RNA, 19 nt, Artificial Sequence
  Description of Artificial Sequence: Synthetic oligonucleotide
gcaaggcgaggcucugucu

SEQ ID NO: 1744287 - RNA, 19 nt, Artificial Sequence
  Description of Artificial Sequence: Synthetic oligonucleotide
ccaccccgccuacucugcc

SEQ ID NO: 1744288 - RNA, 19 nt, Artificial Sequence
  Description of Artificial Sequence: Synthetic oligonucleotide
cugccacucaaguggcguu

SEQ ID NO: 1744289 - RNA, 19 nt, Artificial Sequence
  Description of Artificial Sequence: Synthetic oligonucleotide
cggcuucgcacacgcagug

SEQ ID NO: 1744290 - RNA, 19 nt, Artificial Sequence
  Description of Artificial Sequence: Synthetic oligonucleotide
ggcgcucuauaaggaggga

SEQ ID NO: 1744291 - RNA, 19 nt, Artificial Sequence
  Description of Artificial Sequence: Synthetic oligonucleotide
ggacaggauaggacaguau

SEQ ID NO: 1744292 - RNA, 19 nt, Artificial Sequence
  Description of Artificial Sequence: Synthetic oligonucleotide
gaagggccagagggcugcu

SEQ ID NO: 1744293 - RNA, 19 nt, Artificial Sequence
  Description of Artificial Sequence: Synthetic oligonucleotide
gggguuaggcgcccagauu

SEQ ID NO: 1744294 - RNA, 19 nt, Artificial Sequence
  Description of Artificial Sequence: Synthetic oligonucleotide
gccgcgcaggcgccuuggc

SEQ ID NO: 1744295 - RNA, 19 nt, Artificial Sequence
  Description of Artificial Sequence: Synthetic oligonucleotide
guccaagcgcggccccgcu

SEQ ID NO: 1744296 - RNA, 19 nt, Artificial Sequence
  Description of Artificial Sequence: Synthetic oligonucleotide
cguccaagcgcggccccgc

SEQ ID NO: 1744297 - RNA, 19 nt, Artificial Sequence
  Description of Artificial Sequence: Synthetic oligonucleotide
gcggcuucgcacacgcagu

SEQ ID NO: 1744298 - RNA, 19 nt, Artificial Sequence
  Description of Artificial Sequence: Synthetic oligonucleotide
cguccagggucugguccgg

SEQ ID NO: 1744299 - RNA, 19 nt, Artificial Sequence
  Description of Artificial Sequence: Synthetic oligonucleotide
aggcggcuucgcacacgca

SEQ ID NO: 1744300 - RNA, 19 nt, Artificial Sequence
  Description of Artificial Sequence: Synthetic oligonucleotide
cccgcugcggcgcucuaua

SEQ ID NO: 1744301 - RNA, 19 nt, Artificial Sequence
  Description of Artificial Sequence: Synthetic oligonucleotide
gcaggcgccuuggccgcac

SEQ ID NO: 1744302 - RNA, 19 nt, Artificial Sequence
  Description of Artificial Sequence: Synthetic oligonucleotide
ggcuucgcacacgcagugu

SEQ ID NO: 1744303 - RNA, 19 nt, Artificial Sequence
  Description of Artificial Sequence: Synthetic oligonucleotide
ggcguacauucuuguccuu

SEQ ID NO: 1744304 - RNA, 19 nt, Artificial Sequence
  Description of Artificial Sequence: Synthetic oligonucleotide
ggcuuccgucgcuucucau

SEQ ID NO: 1744305 - RNA, 19 nt, Artificial Sequence
  Description of Artificial Sequence: Synthetic oligonucleotide
gcggcaccagggucauccu

SEQ ID NO: 1744306 - RNA, 19 nt, Artificial Sequence
  Description of Artificial Sequence: Synthetic oligonucleotide
cccacucuacagggcagua

SEQ ID NO: 1744307 - RNA, 19 nt, Artificial Sequence
  Description of Artificial Sequence: Synthetic oligonucleotide
ccacaacgauguugcuccu

SEQ ID NO: 1744308 - RNA, 19 nt, Artificial Sequence
  Description of Artificial Sequence: Synthetic oligonucleotide
gcguuccucuggcguacau

SEQ ID NO: 1744309 - RNA, 19 nt, Artificial Sequence
  Description of Artificial Sequence: Synthetic oligonucleotide
ccacucaaguggcguuccu

SEQ ID NO: 1744310 - RNA, 19 nt, Artificial Sequence
  Description of Artificial Sequence: Synthetic oligonucleotide
ccgcugcggcgcucuauaa

SEQ ID NO: 1744311 - RNA, 19 nt, Artificial Sequence
  Description of Artificial Sequence: Synthetic oligonucleotide
ccgccgcgcaggcgccuug

SEQ ID NO: 1744312 - RNA, 19 nt, Artificial Sequence
  Description of Artificial Sequence: Synthetic oligonucleotide
ccccgccuacucugccacu

SEQ ID NO: 1744313 - RNA, 19 nt, Artificial Sequence
  Description of Artificial Sequence: Synthetic oligonucleotide
cggguguugcggguggcuu

SEQ ID NO: 1744314 - RNA, 19 nt, Artificial Sequence
  Description of Artificial Sequence: Synthetic oligonucleotide
aaugacuugccaugagugg

SEQ ID NO: 1744315 - RNA, 19 nt, Artificial Sequence
  Description of Artificial Sequence: Synthetic oligonucleotide
  modified_base (4)..(4): a, c, u, g, unknown or other
aacnccacagcuccaauga

SEQ ID NO: 1744316 - RNA, 19 nt, Artificial Sequence
  Description of Artificial Sequence: Synthetic oligonucleotide
uuggaaauaccgcagcgag

SEQ ID NO: 1744317 - RNA, 19 nt, Artificial Sequence
  Description of Artificial Sequence: Synthetic oligonucleotide
agagcagacaaugacuugc

SEQ ID NO: 1744318 - RNA, 19 nt, Artificial Sequence
  Description of Artificial Sequence: Synthetic oligonucleotide
auggaagggaacgacaggc

SEQ ID NO: 1744319 - RNA, 19 nt, Artificial Sequence
  Description of Artificial Sequence: Synthetic oligonucleotide
  modified_base (5)..(5): a, c, u, g, unknown or other
aaacnccacagcuccaaug

SEQ ID NO: 1744320 - RNA, 19 nt, Artificial Sequence
  Description of Artificial Sequence: Synthetic oligonucleotide
  modified_base (2)..(2): a, c, u, g, unknown or other
unaugguacacauggcaug

SEQ ID NO: 1744321 - RNA, 19 nt, Artificial Sequence
  Description of Artificial Sequence: Synthetic oligonucleotide
guuuggaaauaccgcagcg

SEQ ID NO: 1744322 - RNA, 19 nt, Artificial Sequence
  Description of Artificial Sequence: Synthetic oligonucleotide
aacgacaggcagugcaggg

SEQ ID NO: 1744323 - RNA, 19 nt, Artificial Sequence
  Description of Artificial Sequence: Synthetic oligonucleotide
cagacaaugacuugccaug

SEQ ID NO: 1744324 - RNA, 19 nt, Artificial Sequence
  Description of Artificial Sequence: Synthetic oligonucleotide
ugguuuggaaauaccgcag

SEQ ID NO: 1744325 - RNA, 19 nt, Artificial Sequence
  Description of Artificial Sequence: Synthetic oligonucleotide
ugacuugccaugagugggg

SEQ ID NO: 1744326 - RNA, 19 nt, Artificial Sequence
  Description of Artificial Sequence: Synthetic oligonucleotide
acccagagcagacaaugac

SEQ ID NO: 1744327 - RNA, 19 nt, Artificial Sequence
  Description of Artificial Sequence: Synthetic oligonucleotide
uggacugaggaggaggagg

SEQ ID NO: 1744328 - RNA, 19 nt, Artificial Sequence
  Description of Artificial Sequence: Synthetic oligonucleotide
augacuugccaugaguggg

SEQ ID NO: 1744329 - RNA, 19 nt, Artificial Sequence
  Description of Artificial Sequence: Synthetic oligonucleotide
acuucacagccgaacaucc

SEQ ID NO: 1744330 - RNA, 19 nt, Artificial Sequence
  Description of Artificial Sequence: Synthetic oligonucleotide
uccaaugaggacccagagc

SEQ ID NO: 1744331 - RNA, 19 nt, Artificial Sequence
  Description of Artificial Sequence: Synthetic oligonucleotide
acaggaguggagauguccc

SEQ ID NO: 1744332 - RNA, 19 nt, Artificial Sequence
  Description of Artificial Sequence: Synthetic oligonucleotide
aagggaacgacaggcagug

SEQ ID NO: 1744333 - RNA, 19 nt, Artificial Sequence
  Description of Artificial Sequence: Synthetic oligonucleotide
aaugaggacccagagcaga

SEQ ID NO: 1744334 - RNA, 19 nt, Artificial Sequence
  Description of Artificial Sequence: Synthetic oligonucleotide
aagcccugcgucugucugc

SEQ ID NO: 1744335 - RNA, 19 nt, Artificial Sequence
  Description of Artificial Sequence: Synthetic oligonucleotide
uuuggaaauaccgcagcga

SEQ ID NO: 1744336 - RNA, 19 nt, Artificial Sequence
  Description of Artificial Sequence: Synthetic oligonucleotide
uucacagccgaacauccuc

SEQ ID NO: 1744337 - RNA, 19 nt, Artificial Sequence
  Description of Artificial Sequence: Synthetic oligonucleotide
  modified_base (6)..(6): a, c, u, g, unknown or other
ccccunaugguacacaugg

SEQ ID NO: 1744338 - RNA, 19 nt, Artificial Sequence
  Description of Artificial Sequence: Synthetic oligonucleotide
gugguuuggaaauaccgca

SEQ ID NO: 1744339 - RNA, 19 nt, Artificial Sequence
  Description of Artificial Sequence: Synthetic oligonucleotide
ucaagcuggaggccuggag

SEQ ID NO: 1744340 - RNA, 19 nt, Artificial Sequence
  Description of Artificial Sequence: Synthetic oligonucleotide
agggcgagcauggaggugg

SEQ ID NO: 1744341 - RNA, 19 nt, Artificial Sequence
  Description of Artificial Sequence: Synthetic oligonucleotide
gucagggcgagcauggagg

SEQ ID NO: 1744342 - RNA, 19 nt, Artificial Sequence
  Description of Artificial Sequence: Synthetic oligonucleotide
uggacaggaguggagaugu

SEQ ID NO: 1744343 - RNA, 19 nt, Artificial Sequence
  Description of Artificial Sequence: Synthetic oligonucleotide
uaggcguccugacuguacc

SEQ ID NO: 1744344 - RNA, 19 nt, Artificial Sequence
  Description of Artificial Sequence: Synthetic oligonucleotide
uccagguaagcccugcguc

SEQ ID NO: 1744345 - RNA, 19 nt, Artificial Sequence
  Description of Artificial Sequence: Synthetic oligonucleotide
ugcgucugucugcaaaacc

SEQ ID NO: 1744346 - RNA, 19 nt, Artificial Sequence
  Description of Artificial Sequence: Synthetic oligonucleotide
gacaaugacuugccaugag

SEQ ID NO: 1744347 - RNA, 19 nt, Artificial Sequence
  Description of Artificial Sequence: Synthetic oligonucleotide
gacaggaguggagaugucc

SEQ ID NO: 1744348 - RNA, 19 nt, Artificial Sequence
  Description of Artificial Sequence: Synthetic oligonucleotide
uaagcccugcgucugucug

SEQ ID NO: 1744349 - RNA, 19 nt, Artificial Sequence
  Description of Artificial Sequence: Synthetic oligonucleotide
ugaguggggacaguggacu

SEQ ID NO: 1744350 - RNA, 19 nt, Artificial Sequence
  Description of Artificial Sequence: Synthetic oligonucleotide
ucacagccgaacauccucu

SEQ ID NO: 1744351 - RNA, 19 nt, Artificial Sequence
  Description of Artificial Sequence: Synthetic oligonucleotide
ucuucaagcuggaggccug

SEQ ID NO: 1744352 - RNA, 19 nt, Artificial Sequence
  Description of Artificial Sequence: Synthetic oligonucleotide
  modified_base (6)..(6): a, c, u, g, unknown or other
aaaacnccacagcuccaau

SEQ ID NO: 1744353 - RNA, 19 nt, Artificial Sequence
  Description of Artificial Sequence: Synthetic oligonucleotide
cauggaagggaacgacagg

SEQ ID NO: 1744354 - RNA, 19 nt, Artificial Sequence
  Description of Artificial Sequence: Synthetic oligonucleotide
uggaagggaacgacaggca

SEQ ID NO: 1744355 - RNA, 19 nt, Artificial Sequence
  Description of Artificial Sequence: Synthetic oligonucleotide
gaggccuggagcuggagca

SEQ ID NO: 1744356 - RNA, 19 nt, Artificial Sequence
  Description of Artificial Sequence: Synthetic oligonucleotide
guucacucggucauucugc

SEQ ID NO: 1744357 - RNA, 19 nt, Artificial Sequence
  Description of Artificial Sequence: Synthetic oligonucleotide
uggaaauaccgcagcgagu

SEQ ID NO: 1744358 - RNA, 19 nt, Artificial Sequence
  Description of Artificial Sequence: Synthetic oligonucleotide
ggaagggaacgacaggcag

SEQ ID NO: 1744359 - RNA, 19 nt, Artificial Sequence
  Description of Artificial Sequence: Synthetic oligonucleotide
gaacgacaggcagugcagg

SEQ ID NO: 1744360 - RNA, 19 nt, Artificial Sequence
  Description of Artificial Sequence: Synthetic oligonucleotide
ggugguuuggaaauaccgc

SEQ ID NO: 1744361 - RNA, 19 nt, Artificial Sequence
  Description of Artificial Sequence: Synthetic oligonucleotide
aggcguccugacuguaccc

SEQ ID NO: 1744362 - RNA, 19 nt, Artificial Sequence
  Description of Artificial Sequence: Synthetic oligonucleotide
agcgagugagagcccgcgc

SEQ ID NO: 1744363 - RNA, 19 nt, Artificial Sequence
  Description of Artificial Sequence: Synthetic oligonucleotide
  modified_base (2)..(2): a, c, u, g, unknown or other
cnccacagcuccaaugauc

SEQ ID NO: 1744364 - RNA, 19 nt, Artificial Sequence
  Description of Artificial Sequence: Synthetic oligonucleotide
cuccaaugaggacccagag

SEQ ID NO: 1744365 - RNA, 19 nt, Artificial Sequence
  Description of Artificial Sequence: Synthetic oligonucleotide
caugaguggggacagugga

SEQ ID NO: 1744366 - RNA, 19 nt, Artificial Sequence
  Description of Artificial Sequence: Synthetic oligonucleotide
auggagguggacaggagug

SEQ ID NO: 1744367 - RNA, 19 nt, Artificial Sequence
  Description of Artificial Sequence: Synthetic oligonucleotide
cuugccaugaguggggaca

SEQ ID NO: 1744368 - RNA, 19 nt, Artificial Sequence
  Description of Artificial Sequence: Synthetic oligonucleotide
gguucacucggucauucug

SEQ ID NO: 1744369 - RNA, 19 nt, Artificial Sequence
  Description of Artificial Sequence: Synthetic oligonucleotide
  modified_base (4)..(4): a, c, u, g, unknown or other
ccunaugguacacauggca

SEQ ID NO: 1744370 - RNA, 19 nt, Artificial Sequence
  Description of Artificial Sequence: Synthetic oligonucleotide
acuugccaugaguggggac

SEQ ID NO: 1744371 - RNA, 19 nt, Artificial Sequence
  Description of Artificial Sequence: Synthetic oligonucleotide
ccauggaagggaacgacag

SEQ ID NO: 1744372 - RNA, 19 nt, Artificial Sequence
  Description of Artificial Sequence: Synthetic oligonucleotide
gagcagacaaugacuugcc

SEQ ID NO: 1744373 - RNA, 19 nt, Artificial Sequence
  Description of Artificial Sequence: Synthetic oligonucleotide
augaggacccagagcagac

SEQ ID NO: 1744374 - RNA, 19 nt, Artificial Sequence
  Description of Artificial Sequence: Synthetic oligonucleotide
gagacggugguuuggaaau

SEQ ID NO: 1744375 - RNA, 19 nt, Artificial Sequence
  Description of Artificial Sequence: Synthetic oligonucleotide
  modified_base (3)..(3): a, c, u, g, unknown or other
cunaugguacacauggcau

SEQ ID NO: 1744376 - RNA, 19 nt, Artificial Sequence
  Description of Artificial Sequence: Synthetic oligonucleotide
augaguggggacaguggac

SEQ ID NO: 1744377 - RNA, 19 nt, Artificial Sequence
  Description of Artificial Sequence: Synthetic oligonucleotide
acggugguuuggaaauacc

SEQ ID NO: 1744378 - RNA, 19 nt, Artificial Sequence
  Description of Artificial Sequence: Synthetic oligonucleotide
caggaguggagaugucccc

SEQ ID NO: 1744379 - RNA, 19 nt, Artificial Sequence
  Description of Artificial Sequence: Synthetic oligonucleotide
gaguggagauguccccucc

SEQ ID NO: 1744380 - RNA, 19 nt, Artificial Sequence
  Description of Artificial Sequence: Synthetic oligonucleotide
ucagggcgagcauggaggu

SEQ ID NO: 1744381 - RNA, 19 nt, Artificial Sequence
  Description of Artificial Sequence: Synthetic oligonucleotide
caaugaggacccagagcag

SEQ ID NO: 1744382 - RNA, 19 nt, Artificial Sequence
  Description of Artificial Sequence: Synthetic oligonucleotide
gacggugguuuggaaauac

SEQ ID NO: 1744383 - RNA, 19 nt, Artificial Sequence
  Description of Artificial Sequence: Synthetic oligonucleotide
gaggacccagagcagacaa

SEQ ID NO: 1744384 - RNA, 19 nt, Artificial Sequence
  Description of Artificial Sequence: Synthetic oligonucleotide
gaccccacuucacagccga

SEQ ID NO: 1744385 - RNA, 19 nt, Artificial Sequence
  Description of Artificial Sequence: Synthetic oligonucleotide
agacaaugacuugccauga

SEQ ID NO: 1744386 - RNA, 19 nt, Artificial Sequence
  Description of Artificial Sequence: Synthetic oligonucleotide
ugcgccgcaguguccgccg

SEQ ID NO: 1744387 - RNA, 19 nt, Artificial Sequence
  Description of Artificial Sequence: Synthetic oligonucleotide
  modified_base (8)..(8): a, c, u, g, unknown or other
agccccunaugguacacau

SEQ ID NO: 1744388 - RNA, 19 nt, Artificial Sequence
  Description of Artificial Sequence: Synthetic oligonucleotide
aguggagauguccccuccu

SEQ ID NO: 1744389 - RNA, 19 nt, Artificial Sequence
  Description of Artificial Sequence: Synthetic oligonucleotide
gcgagugagagcccgcgcg

SEQ ID NO: 1744390 - RNA, 19 nt, Artificial Sequence
  Description of Artificial Sequence: Synthetic oligonucleotide
cacuucacagccgaacauc

SEQ ID NO: 1744391 - RNA, 19 nt, Artificial Sequence
  Description of Artificial Sequence: Synthetic oligonucleotide
agcagacaaugacuugcca

SEQ ID NO: 1744392 - RNA, 19 nt, Artificial Sequence
  Description of Artificial Sequence: Synthetic oligonucleotide
guccugacuguacccgcgg

SEQ ID NO: 1744393 - RNA, 19 nt, Artificial Sequence
  Description of Artificial Sequence: Synthetic oligonucleotide
cggugguuuggaaauaccg

SEQ ID NO: 1744394 - RNA, 19 nt, Artificial Sequence
  Description of Artificial Sequence: Synthetic oligonucleotide
gggaacgacaggcagugca

SEQ ID NO: 1744395 - RNA, 19 nt, Artificial Sequence
  Description of Artificial Sequence: Synthetic oligonucleotide
ggacccagagcagacaaug

SEQ ID NO: 1744396 - RNA, 19 nt, Artificial Sequence
  Description of Artificial Sequence: Synthetic oligonucleotide
ugucuucaagcuggaggcc

SEQ ID NO: 1744397 - RNA, 19 nt, Artificial Sequence
  Description of Artificial Sequence: Synthetic oligonucleotide
aggagacgcccguccgacc

SEQ ID NO: 1744398 - RNA, 19 nt, Artificial Sequence
  Description of Artificial Sequence: Synthetic oligonucleotide
agcuccaaugaggacccag

SEQ ID NO: 1744399 - RNA, 19 nt, Artificial Sequence
  Description of Artificial Sequence: Synthetic oligonucleotide
ggagacgcccguccgaccc

SEQ ID NO: 1744400 - RNA, 19 nt, Artificial Sequence
  Description of Artificial Sequence: Synthetic oligonucleotide
gaguggggacaguggacug

SEQ ID NO: 1744401 - RNA, 19 nt, Artificial Sequence
  Description of Artificial Sequence: Synthetic oligonucleotide
ugagagcccgcgcgggucu

SEQ ID NO: 1744402 - RNA, 19 nt, Artificial Sequence
  Description of Artificial Sequence: Synthetic oligonucleotide
cagagcagacaaugacuug

SEQ ID NO: 1744403 - RNA, 19 nt, Artificial Sequence
  Description of Artificial Sequence: Synthetic oligonucleotide
agguggacaggaguggaga

SEQ ID NO: 1744404 - RNA, 19 nt, Artificial Sequence
  Description of Artificial Sequence: Synthetic oligonucleotide
uccugacuguacccgcgga

SEQ ID NO: 1744405 - RNA, 19 nt, Artificial Sequence
  Description of Artificial Sequence: Synthetic oligonucleotide
gagugagagcccgcgcggg

SEQ ID NO: 1744406 - RNA, 19 nt, Artificial Sequence
  Description of Artificial Sequence: Synthetic oligonucleotide
gagguggacaggaguggag

SEQ ID NO: 1744407 - RNA, 19 nt, Artificial Sequence
  Description of Artificial Sequence: Synthetic oligonucleotide
ggaacgacaggcagugcag

SEQ ID NO: 1744408 - RNA, 19 nt, Artificial Sequence
  Description of Artificial Sequence: Synthetic oligonucleotide
ugaggacccagagcagaca

SEQ ID NO: 1744409 - RNA, 19 nt, Artificial Sequence
  Description of Artificial Sequence: Synthetic oligonucleotide
aggaguggagauguccccu

SEQ ID NO: 1744410 - RNA, 19 nt, Artificial Sequence
  Description of Artificial Sequence: Synthetic oligonucleotide
cuucaagcuggaggccugg

SEQ ID NO: 1744411 - RNA, 19 nt, Artificial Sequence
  Description of Artificial Sequence: Synthetic oligonucleotide
ccaugaguggggacagugg

SEQ ID NO: 1744412 - RNA, 19 nt, Artificial Sequence
  Description of Artificial Sequence: Synthetic oligonucleotide
gaggagacgcccguccgac

SEQ ID NO: 1744413 - RNA, 19 nt, Artificial Sequence
  Description of Artificial Sequence: Synthetic oligonucleotide
ggacugaggaggaggaggc

SEQ ID NO: 1744414 - RNA, 19 nt, Artificial Sequence
  Description of Artificial Sequence: Synthetic oligonucleotide
gagcauggagguggacagg

SEQ ID NO: 1744415 - RNA, 19 nt, Artificial Sequence
  Description of Artificial Sequence: Synthetic oligonucleotide
agugagagcccgcgcgggu

SEQ ID NO: 1744416 - RNA, 19 nt, Artificial Sequence
  Description of Artificial Sequence: Synthetic oligonucleotide
guggacaggaguggagaug

SEQ ID NO: 1744417 - RNA, 19 nt, Artificial Sequence
  Description of Artificial Sequence: Synthetic oligonucleotide
  modified_base (3)..(3): a, c, u, g, unknown or other
acnccacagcuccaaugau

SEQ ID NO: 1744418 - RNA, 19 nt, Artificial Sequence
  Description of Artificial Sequence: Synthetic oligonucleotide
agguucacucggucauucu

SEQ ID NO: 1744419 - RNA, 19 nt, Artificial Sequence
  Description of Artificial Sequence: Synthetic oligonucleotide
cgagcauggagguggacag

SEQ ID NO: 1744420 - RNA, 19 nt, Artificial Sequence
  Description of Artificial Sequence: Synthetic oligonucleotide
ggagacggugguuuggaaa

SEQ ID NO: 1744421 - RNA, 19 nt, Artificial Sequence
  Description of Artificial Sequence: Synthetic oligonucleotide
aguggggacaguggacuga

SEQ ID NO: 1744422 - RNA, 19 nt, Artificial Sequence
  Description of Artificial Sequence: Synthetic oligonucleotide
gaagggaacgacaggcagu

SEQ ID NO: 1744423 - RNA, 19 nt, Artificial Sequence
  Description of Artificial Sequence: Synthetic oligonucleotide
gcgucugucugcaaaacca

SEQ ID NO: 1744424 - RNA, 19 nt, Artificial Sequence
  Description of Artificial Sequence: Synthetic oligonucleotide
ggcguccugacuguacccg

SEQ ID NO: 1744425 - RNA, 19 nt, Artificial Sequence
  Description of Artificial Sequence: Synthetic oligonucleotide
acgacaggcagugcaggga

SEQ ID NO: 1744426 - RNA, 19 nt, Artificial Sequence
  Description of Artificial Sequence: Synthetic oligonucleotide
ggaggccuggagcuggagc

SEQ ID NO: 1744427 - RNA, 19 nt, Artificial Sequence
  Description of Artificial Sequence: Synthetic oligonucleotide
ugaggaggaggaggcuccc

SEQ ID NO: 1744428 - RNA, 19 nt, Artificial Sequence
  Description of Artificial Sequence: Synthetic oligonucleotide
cagcgagugagagcccgcg

SEQ ID NO: 1744429 - RNA, 19 nt, Artificial Sequence
  Description of Artificial Sequence: Synthetic oligonucleotide
cagguaagcccugcgucug

SEQ ID NO: 1744430 - RNA, 19 nt, Artificial Sequence
  Description of Artificial Sequence: Synthetic oligonucleotide
cauggagguggacaggagu

SEQ ID NO: 1744431 - RNA, 19 nt, Artificial Sequence
  Description of Artificial Sequence: Synthetic oligonucleotide
cagguucacucggucauuc

SEQ ID NO: 1744432 - RNA, 19 nt, Artificial Sequence
  Description of Artificial Sequence: Synthetic oligonucleotide
gagacgcccguccgacccc

SEQ ID NO: 1744433 - RNA, 19 nt, Artificial Sequence
  Description of Artificial Sequence: Synthetic oligonucleotide
gacccagagcagacaauga

SEQ ID NO: 1744434 - RNA, 19 nt, Artificial Sequence
  Description of Artificial Sequence: Synthetic oligonucleotide
uucaagcuggaggccugga

SEQ ID NO: 1744435 - RNA, 19 nt, Artificial Sequence
  Description of Artificial Sequence: Synthetic oligonucleotide
gcuggaggccuggagcugg

SEQ ID NO: 1744436 - RNA, 19 nt, Artificial Sequence
  Description of Artificial Sequence: Synthetic oligonucleotide
guaggcguccugacuguac

SEQ ID NO: 1744437 - RNA, 19 nt, Artificial Sequence
  Description of Artificial Sequence: Synthetic oligonucleotide
agguaagcccugcgucugu

SEQ ID NO: 1744438 - RNA, 19 nt, Artificial Sequence
  Description of Artificial Sequence: Synthetic oligonucleotide
gucgccgucguaggcgucc

SEQ ID NO: 1744439 - RNA, 19 nt, Artificial Sequence
  Description of Artificial Sequence: Synthetic oligonucleotide
gccaugaguggggacagug

SEQ ID NO: 1744440 - RNA, 19 nt, Artificial Sequence
  Description of Artificial Sequence: Synthetic oligonucleotide
agggaacgacaggcagugc

SEQ ID NO: 1744441 - RNA, 19 nt, Artificial Sequence
  Description of Artificial Sequence: Synthetic oligonucleotide
gcagacaaugacuugccau

SEQ ID NO: 1744442 - RNA, 19 nt, Artificial Sequence
  Description of Artificial Sequence: Synthetic oligonucleotide
  modified_base (5)..(5): a, c, u, g, unknown or other
cccunaugguacacauggc

SEQ ID NO: 1744443 - RNA, 19 nt, Artificial Sequence
  Description of Artificial Sequence: Synthetic oligonucleotide
gacuugccaugagugggga

SEQ ID NO: 1744444 - RNA, 19 nt, Artificial Sequence
  Description of Artificial Sequence: Synthetic oligonucleotide
cugcgucugucugcaaaac

SEQ ID NO: 1744445 - RNA, 19 nt, Artificial Sequence
  Description of Artificial Sequence: Synthetic oligonucleotide
agcccugcgucugucugca

SEQ ID NO: 1744446 - RNA, 19 nt, Artificial Sequence
  Description of Artificial Sequence: Synthetic oligonucleotide
gucuucaagcuggaggccu

SEQ ID NO: 1744447 - RNA, 19 nt, Artificial Sequence
  Description of Artificial Sequence: Synthetic oligonucleotide
ucagguucacucggucauu

SEQ ID NO: 1744448 - RNA, 19 nt, Artificial Sequence
  Description of Artificial Sequence: Synthetic oligonucleotide
gcgagcauggagguggaca

SEQ ID NO: 1744449 - RNA, 19 nt, Artificial Sequence
  Description of Artificial Sequence: Synthetic oligonucleotide
gcaguguccgccgccgucc

SEQ ID NO: 1744450 - RNA, 19 nt, Artificial Sequence
  Description of Artificial Sequence: Synthetic oligonucleotide
cccacuucacagccgaaca

SEQ ID NO: 1744451 - RNA, 19 nt, Artificial Sequence
  Description of Artificial Sequence: Synthetic oligonucleotide
gcuccaaugaggacccaga

SEQ ID NO: 1744452 - RNA, 19 nt, Artificial Sequence
  Description of Artificial Sequence: Synthetic oligonucleotide
gcguccugacuguacccgc

SEQ ID NO: 1744453 - RNA, 19 nt, Artificial Sequence
  Description of Artificial Sequence: Synthetic oligonucleotide
cguccugacuguacccgcg

SEQ ID NO: 1744454 - RNA, 19 nt, Artificial Sequence
  Description of Artificial Sequence: Synthetic oligonucleotide
ccuccagguaagcccugcg

SEQ ID NO: 1744455 - RNA, 19 nt, Artificial Sequence
  Description of Artificial Sequence: Synthetic oligonucleotide
ggccauggaagggaacgac

SEQ ID NO: 1744456 - RNA, 19 nt, Artificial Sequence
  Description of Artificial Sequence: Synthetic oligonucleotide
cgagugagagcccgcgcgg

SEQ ID NO: 1744457 - RNA, 19 nt, Artificial Sequence
  Description of Artificial Sequence: Synthetic oligonucleotide
cuucacagccgaacauccu

SEQ ID NO: 1744458 - RNA, 19 nt, Artificial Sequence
  Description of Artificial Sequence: Synthetic oligonucleotide
gccauggaagggaacgaca

SEQ ID NO: 1744459 - RNA, 19 nt, Artificial Sequence
  Description of Artificial Sequence: Synthetic oligonucleotide
ggaggagacgcccguccga

SEQ ID NO: 1744460 - RNA, 19 nt, Artificial Sequence
  Description of Artificial Sequence: Synthetic oligonucleotide
guaagcccugcgucugucu

SEQ ID NO: 1744461 - RNA, 19 nt, Artificial Sequence
  Description of Artificial Sequence: Synthetic oligonucleotide
ggagguggacaggagugga

SEQ ID NO: 1744462 - RNA, 19 nt, Artificial Sequence
  Description of Artificial Sequence: Synthetic oligonucleotide
cgacaggcagugcagggac

SEQ ID NO: 1744463 - RNA, 19 nt, Artificial Sequence
  Description of Artificial Sequence: Synthetic oligonucleotide
gagcccgcgcgggucuggg

SEQ ID NO: 1744464 - RNA, 19 nt, Artificial Sequence
  Description of Artificial Sequence: Synthetic oligonucleotide
  modified_base (7)..(7): a, c, u, g, unknown or other
gccccunaugguacacaug

SEQ ID NO: 1744465 - RNA, 19 nt, Artificial Sequence
  Description of Artificial Sequence: Synthetic oligonucleotide
gugagagcccgcgcggguc

SEQ ID NO: 1744466 - RNA, 19 nt, Artificial Sequence
  Description of Artificial Sequence: Synthetic oligonucleotide
cccagagcagacaaugacu

SEQ ID NO: 1744467 - RNA, 19 nt, Artificial Sequence
  Description of Artificial Sequence: Synthetic oligonucleotide
agagcccgcgcgggucugg

SEQ ID NO: 1744468 - RNA, 19 nt, Artificial Sequence
  Description of Artificial Sequence: Synthetic oligonucleotide
ccagagcagacaaugacuu

SEQ ID NO: 1744469 - RNA, 19 nt, Artificial Sequence
  Description of Artificial Sequence: Synthetic oligonucleotide
agacggugguuuggaaaua

SEQ ID NO: 1744470 - RNA, 19 nt, Artificial Sequence
  Description of Artificial Sequence: Synthetic oligonucleotide
gccgcaguguccgccgccg

SEQ ID NO: 1744471 - RNA, 19 nt, Artificial Sequence
  Description of Artificial Sequence: Synthetic oligonucleotide
ccugcgucugucugcaaaa

SEQ ID NO: 1744472 - RNA, 19 nt, Artificial Sequence
  Description of Artificial Sequence: Synthetic oligonucleotide
gguaagcccugcgucuguc

SEQ ID NO: 1744473 - RNA, 19 nt, Artificial Sequence
  Description of Artificial Sequence: Synthetic oligonucleotide
ugccaugaguggggacagu

SEQ ID NO: 1744474 - RNA, 19 nt, Artificial Sequence
  Description of Artificial Sequence: Synthetic oligonucleotide
agacgcccguccgacccca

SEQ ID NO: 1744475 - RNA, 19 nt, Artificial Sequence
  Description of Artificial Sequence: Synthetic oligonucleotide
aggacccagagcagacaau

SEQ ID NO: 1744476 - RNA, 19 nt, Artificial Sequence
  Description of Artificial Sequence: Synthetic oligonucleotide
ccccacuucacagccgaac

SEQ ID NO: 1744477 - RNA, 19 nt, Artificial Sequence
  Description of Artificial Sequence: Synthetic oligonucleotide
gguggacaggaguggagau

SEQ ID NO: 1744478 - RNA, 19 nt, Artificial Sequence
  Description of Artificial Sequence: Synthetic oligonucleotide
  modified_base (9)..(9): a, c, u, g, unknown or other
cagccccunaugguacaca

SEQ ID NO: 1744479 - RNA, 19 nt, Artificial Sequence
  Description of Artificial Sequence: Synthetic oligonucleotide
gccgggagacggugguuug

SEQ ID NO: 1744480 - RNA, 19 nt, Artificial Sequence
  Description of Artificial Sequence: Synthetic oligonucleotide
ucgccgucguaggcguccu

SEQ ID NO: 1744481 - RNA, 19 nt, Artificial Sequence
  Description of Artificial Sequence: Synthetic oligonucleotide
cagggcgagcauggaggug

SEQ ID NO: 1744482 - RNA, 19 nt, Artificial Sequence
  Description of Artificial Sequence: Synthetic oligonucleotide
ccagguaagcccugcgucu

SEQ ID NO: 1744483 - RNA, 19 nt, Artificial Sequence
  Description of Artificial Sequence: Synthetic oligonucleotide
gagagcccgcgcgggucug

SEQ ID NO: 1744484 - RNA, 19 nt, Artificial Sequence
  Description of Artificial Sequence: Synthetic oligonucleotide
cggaggagacgcccguccg

SEQ ID NO: 1744485 - RNA, 19 nt, Artificial Sequence
  Description of Artificial Sequence: Synthetic oligonucleotide
aggccuggagcuggagcau

SEQ ID NO: 1744486 - RNA, 19 nt, Artificial Sequence
  Description of Artificial Sequence: Synthetic oligonucleotide
ccgggagacggugguuugg

SEQ ID NO: 1744487 - RNA, 19 nt, Artificial Sequence
  Description of Artificial Sequence: Synthetic oligonucleotide
gcccgcgcgggucuggguc

SEQ ID NO: 1744488 - RNA, 19 nt, Artificial Sequence
  Description of Artificial Sequence: Synthetic oligonucleotide
gggagacggugguuuggaa

SEQ ID NO: 1744489 - RNA, 19 nt, Artificial Sequence
  Description of Artificial Sequence: Synthetic oligonucleotide
caguguccgccgccgucca

SEQ ID NO: 1744490 - RNA, 19 nt, Artificial Sequence
  Description of Artificial Sequence: Synthetic oligonucleotide
agcccgcgcgggucugggu

SEQ ID NO: 1744491 - RNA, 19 nt, Artificial Sequence
  Description of Artificial Sequence: Synthetic oligonucleotide
cccugcgucugucugcaaa

SEQ ID NO: 1744492 - RNA, 19 nt, Artificial Sequence
  Description of Artificial Sequence: Synthetic oligonucleotide
gcccguccgaccccacuuc

SEQ ID NO: 1744493 - RNA, 19 nt, Artificial Sequence
  Description of Artificial Sequence: Synthetic oligonucleotide
cgcgggucugggucggggc

SEQ ID NO: 1744494 - RNA, 19 nt, Artificial Sequence
  Description of Artificial Sequence: Synthetic oligonucleotide
ggacaggaguggagauguc

SEQ ID NO: 1744495 - RNA, 19 nt, Artificial Sequence
  Description of Artificial Sequence: Synthetic oligonucleotide
gacgcccguccgaccccac

SEQ ID NO: 1744496 - RNA, 19 nt, Artificial Sequence
  Description of Artificial Sequence: Synthetic oligonucleotide
ccacuucacagccgaacau

SEQ ID NO: 1744497 - RNA, 19 nt, Artificial Sequence
  Description of Artificial Sequence: Synthetic oligonucleotide
cgcaguguccgccgccguc

SEQ ID NO: 1744498 - RNA, 19 nt, Artificial Sequence
  Description of Artificial Sequence: Synthetic oligonucleotide
cccguccgaccccacuuca

SEQ ID NO: 1744499 - RNA, 19 nt, Artificial Sequence
  Description of Artificial Sequence: Synthetic oligonucleotide
accccacuucacagccgaa

SEQ ID NO: 1744500 - RNA, 19 nt, Artificial Sequence
  Description of Artificial Sequence: Synthetic oligonucleotide
ggcgagcauggagguggac

SEQ ID NO: 1744501 - RNA, 19 nt, Artificial Sequence
  Description of Artificial Sequence: Synthetic oligonucleotide
gcgccgcaguguccgccgc

SEQ ID NO: 1744502 - RNA, 19 nt, Artificial Sequence
  Description of Artificial Sequence: Synthetic oligonucleotide
ccgcagcgagugagagccc

SEQ ID NO: 1744503 - RNA, 19 nt, Artificial Sequence
  Description of Artificial Sequence: Synthetic oligonucleotide
ggccgggagacggugguuu

SEQ ID NO: 1744504 - RNA, 19 nt, Artificial Sequence
  Description of Artificial Sequence: Synthetic oligonucleotide
cgggagacggugguuugga

SEQ ID NO: 1744505 - RNA, 19 nt, Artificial Sequence
  Description of Artificial Sequence: Synthetic oligonucleotide
gggcgagcauggaggugga

SEQ ID NO: 1744506 - RNA, 19 nt, Artificial Sequence
  Description of Artificial Sequence: Synthetic oligonucleotide
cgccgcaguguccgccgcc

SEQ ID NO: 1744507 - RNA, 19 nt, Artificial Sequence
  Description of Artificial Sequence: Synthetic oligonucleotide
cagcuccaaugaggaccca

SEQ ID NO: 1744508 - RNA, 19 nt, Artificial Sequence
  Description of Artificial Sequence: Synthetic oligonucleotide
ccgcgcgggucugggucgg

SEQ ID NO: 1744509 - RNA, 19 nt, Artificial Sequence
  Description of Artificial Sequence: Synthetic oligonucleotide
gcccugcgucugucugcaa

SEQ ID NO: 1744510 - RNA, 19 nt, Artificial Sequence
  Description of Artificial Sequence: Synthetic oligonucleotide
ccgcaguguccgccgccgu

SEQ ID NO: 1744511 - RNA, 19 nt, Artificial Sequence
  Description of Artificial Sequence: Synthetic oligonucleotide
aaauauaacaccaagcaac

SEQ ID NO: 1744512 - RNA, 19 nt, Artificial Sequence
  Description of Artificial Sequence: Synthetic oligonucleotide
agaaaauuagcuccgauac

SEQ ID NO: 1744513 - RNA, 19 nt, Artificial Sequence
  Description of Artificial Sequence: Synthetic oligonucleotide
uauuuauguacauaguugg

SEQ ID NO: 1744514 - RNA, 19 nt, Artificial Sequence
  Description of Artificial Sequence: Synthetic oligonucleotide
aauuuugugagaaaauagc

SEQ ID NO: 1744515 - RNA, 19 nt, Artificial Sequence
  Description of Artificial Sequence: Synthetic oligonucleotide
aaaauuagcuccgauacac

SEQ ID NO: 1744516 - RNA, 19 nt, Artificial Sequence
  Description of Artificial Sequence: Synthetic oligonucleotide
aagaauuccaugugugucc

SEQ ID NO: 1744517 - RNA, 19 nt, Artificial Sequence
  Description of Artificial Sequence: Synthetic oligonucleotide
auuagaguaagcuaggucu

SEQ ID NO: 1744518 - RNA, 19 nt, Artificial Sequence
  Description of Artificial Sequence: Synthetic oligonucleotide
aaauagcaaaccuugucac

SEQ ID NO: 1744519 - RNA, 19 nt, Artificial Sequence
  Description of Artificial Sequence: Synthetic oligonucleotide
aaaauuagcaacauucguc

SEQ ID NO: 1744520 - RNA, 19 nt, Artificial Sequence
  Description of Artificial Sequence: Synthetic oligonucleotide
uuacuuuccauccagacac

SEQ ID NO: 1744521 - RNA, 19 nt, Artificial Sequence
  Description of Artificial Sequence: Synthetic oligonucleotide
aaauuagcaacauucgucu

SEQ ID NO: 1744522 - RNA, 19 nt, Artificial Sequence
  Description of Artificial Sequence: Synthetic oligonucleotide
acuugguaaauauaacacc

SEQ ID NO: 1744523 - RNA, 19 nt, Artificial Sequence
  Description of Artificial Sequence: Synthetic oligonucleotide
uuuagauuugaaaagcacu

SEQ ID NO: 1744524 - RNA, 19 nt, Artificial Sequence
  Description of Artificial Sequence: Synthetic oligonucleotide
aaaagcacuacucuuuaug

SEQ ID NO: 1744525 - RNA, 19 nt, Artificial Sequence
  Description of Artificial Sequence: Synthetic oligonucleotide
uauucuaaacugaagguca

SEQ ID NO: 1744526 - RNA, 19 nt, Artificial Sequence
  Description of Artificial Sequence: Synthetic oligonucleotide
uucgucuucacuuugaggu

SEQ ID NO: 1744527 - RNA, 19 nt, Artificial Sequence
  Description of Artificial Sequence: Synthetic oligonucleotide
aauuacaugaaaggcuccc

SEQ ID NO: 1744528 - RNA, 19 nt, Artificial Sequence
  Description of Artificial Sequence: Synthetic oligonucleotide
uauaacaccaagcaacugu

SEQ ID NO: 1744529 - RNA, 19 nt, Artificial Sequence
  Description of Artificial Sequence: Synthetic oligonucleotide
aucuguaccuggcagaagc

SEQ ID NO: 1744530 - RNA, 19 nt, Artificial Sequence
  Description of Artificial Sequence: Synthetic oligonucleotide
ugguauaucaucuuuggga

SEQ ID NO: 1744531 - RNA, 19 nt, Artificial Sequence
  Description of Artificial Sequence: Synthetic oligonucleotide
uuuaccacugucuaaguca

SEQ ID NO: 1744532 - RNA, 19 nt, Artificial Sequence
  Description of Artificial Sequence: Synthetic oligonucleotide
uucuggucgacauuaaggg

SEQ ID NO: 1744533 - RNA, 19 nt, Artificial Sequence
  Description of Artificial Sequence: Synthetic oligonucleotide
ucuagguuggauuccaagg

SEQ ID NO: 1744534 - RNA, 19 nt, Artificial Sequence
  Description of Artificial Sequence: Synthetic oligonucleotide
ugacugaaaagaaaauuag

SEQ ID NO: 1744535 - RNA, 19 nt, Artificial Sequence
  Description of Artificial Sequence: Synthetic oligonucleotide
uucacuuugaggugggugg

SEQ ID NO: 1744536 - RNA, 19 nt, Artificial Sequence
  Description of Artificial Sequence: Synthetic oligonucleotide
aacucaacaugguauauca

SEQ ID NO: 1744537 - RNA, 19 nt, Artificial Sequence
  Description of Artificial Sequence: Synthetic oligonucleotide
aaagaauuccauguguguc

SEQ ID NO: 1744538 - RNA, 19 nt, Artificial Sequence
  Description of Artificial Sequence: Synthetic oligonucleotide
gaaguuuugacugaaaaga

SEQ ID NO: 1744539 - RNA, 19 nt, Artificial Sequence
  Description of Artificial Sequence: Synthetic oligonucleotide
ucaagcaaagccuaaucag

SEQ ID NO: 1744540 - RNA, 19 nt, Artificial Sequence
  Description of Artificial Sequence: Synthetic oligonucleotide
uuucacgaaguuuugacug

SEQ ID NO: 1744541 - RNA, 19 nt, Artificial Sequence
  Description of Artificial Sequence: Synthetic oligonucleotide
uuuaucuuguuccaggguc

SEQ ID NO: 1744542 - RNA, 19 nt, Artificial Sequence
  Description of Artificial Sequence: Synthetic oligonucleotide
uuagcuccgauacacaucu

SEQ ID NO: 1744543 - RNA, 19 nt, Artificial Sequence
  Description of Artificial Sequence: Synthetic oligonucleotide
uaagcuaggucucucagca

SEQ ID NO: 1744544 - RNA, 19 nt, Artificial Sequence
  Description of Artificial Sequence: Synthetic oligonucleotide
aaagcacuacucuuuaugu

SEQ ID NO: 1744545 - RNA, 19 nt, Artificial Sequence
  Description of Artificial Sequence: Synthetic oligonucleotide
ugguuauugagcaaaagau

SEQ ID NO: 1744546 - RNA, 19 nt, Artificial Sequence
  Description of Artificial Sequence: Synthetic oligonucleotide
agccuaaucagcuagaaaa

SEQ ID NO: 1744547 - RNA, 19 nt, Artificial Sequence
  Description of Artificial Sequence: Synthetic oligonucleotide
uggucuaucugcuagaaaa

SEQ ID NO: 1744548 - RNA, 19 nt, Artificial Sequence
  Description of Artificial Sequence: Synthetic oligonucleotide
ugucacuugguaaauauaa

SEQ ID NO: 1744549 - RNA, 19 nt, Artificial Sequence
  Description of Artificial Sequence: Synthetic oligonucleotide
ucacuugguaaauauaaca

SEQ ID NO: 1744550 - RNA, 19 nt, Artificial Sequence
  Description of Artificial Sequence: Synthetic oligonucleotide
aagaauuacaugaaaggcu

SEQ ID NO: 1744551 - RNA, 19 nt, Artificial Sequence
  Description of Artificial Sequence: Synthetic oligonucleotide
agaauuacaugaaaggcuc

SEQ ID NO: 1744552 - RNA, 19 nt, Artificial Sequence
  Description of Artificial Sequence: Synthetic oligonucleotide
uuuugugagaaaauagcaa

SEQ ID NO: 1744553 - RNA, 19 nt, Artificial Sequence
  Description of Artificial Sequence: Synthetic oligonucleotide
aaaucgagcauacuuuuau

SEQ ID NO: 1744554 - RNA, 19 nt, Artificial Sequence
  Description of Artificial Sequence: Synthetic oligonucleotide
ucugcuagaaaauuagcaa

SEQ ID NO: 1744555 - RNA, 19 nt, Artificial Sequence
  Description of Artificial Sequence: Synthetic oligonucleotide
gucuaagucaccuaaauaa

SEQ ID NO: 1744556 - RNA, 19 nt, Artificial Sequence
  Description of Artificial Sequence: Synthetic oligonucleotide
ggagcuauggcuuauuucc

SEQ ID NO: 1744557 - RNA, 19 nt, Artificial Sequence
  Description of Artificial Sequence: Synthetic oligonucleotide
uguuuagauuugaaaagca

SEQ ID NO: 1744558 - RNA, 19 nt, Artificial Sequence
  Description of Artificial Sequence: Synthetic oligonucleotide
caugguauaucaucuuugg

SEQ ID NO: 1744559 - RNA, 19 nt, Artificial Sequence
  Description of Artificial Sequence: Synthetic oligonucleotide
uguccauauauauauauuu

SEQ ID NO: 1744560 - RNA, 19 nt, Artificial Sequence
  Description of Artificial Sequence: Synthetic oligonucleotide
aagaaaauuagcuccgaua

SEQ ID NO: 1744561 - RNA, 19 nt, Artificial Sequence
  Description of Artificial Sequence: Synthetic oligonucleotide
uuugauaagccauuuuauc

SEQ ID NO: 1744562 - RNA, 19 nt, Artificial Sequence
  Description of Artificial Sequence: Synthetic oligonucleotide
auauauauauauuuaugua

SEQ ID NO: 1744563 - RNA, 19 nt, Artificial Sequence
  Description of Artificial Sequence: Synthetic oligonucleotide
uguacuuuagacaguuugu

SEQ ID NO: 1744564 - RNA, 19 nt, Artificial Sequence
  Description of Artificial Sequence: Synthetic oligonucleotide
ugugagaaaauagcaaacc

SEQ ID NO: 1744565 - RNA, 19 nt, Artificial Sequence
  Description of Artificial Sequence: Synthetic oligonucleotide
gauuucacgaaguuuugac

SEQ ID NO: 1744566 - RNA, 19 nt, Artificial Sequence
  Description of Artificial Sequence: Synthetic oligonucleotide
agaaaauuagcaacauucg

SEQ ID NO: 1744567 - RNA, 19 nt, Artificial Sequence
  Description of Artificial Sequence: Synthetic oligonucleotide
aagucaucucuguuguagg

SEQ ID NO: 1744568 - RNA, 19 nt, Artificial Sequence
  Description of Artificial Sequence: Synthetic oligonucleotide
gaaaauagcaaaccuuguc

SEQ ID NO: 1744569 - RNA, 19 nt, Artificial Sequence
  Description of Artificial Sequence: Synthetic oligonucleotide
uuuugauaagccauuuuau

SEQ ID NO: 1744570 - RNA, 19 nt, Artificial Sequence
  Description of Artificial Sequence: Synthetic oligonucleotide
aauauaacaccaagcaacu

SEQ ID NO: 1744571 - RNA, 19 nt, Artificial Sequence
  Description of Artificial Sequence: Synthetic oligonucleotide
auauuuauguacauaguug

SEQ ID NO: 1744572 - RNA, 19 nt, Artificial Sequence
  Description of Artificial Sequence: Synthetic oligonucleotide
uccauauauauauauuuau

SEQ ID NO: 1744573 - RNA, 19 nt, Artificial Sequence
  Description of Artificial Sequence: Synthetic oligonucleotide
uaagcuaucuguaccuggc

SEQ ID NO: 1744574 - RNA, 19 nt, Artificial Sequence
  Description of Artificial Sequence: Synthetic oligonucleotide
uucacaguuggccagcgca

SEQ ID NO: 1744575 - RNA, 19 nt, Artificial Sequence
  Description of Artificial Sequence: Synthetic oligonucleotide
ugagaaaauagcaaaccuu

SEQ ID NO: 1744576 - RNA, 19 nt, Artificial Sequence
  Description of Artificial Sequence: Synthetic oligonucleotide
ugucuuugaggccugauau

SEQ ID NO: 1744577 - RNA, 19 nt, Artificial Sequence
  Description of Artificial Sequence: Synthetic oligonucleotide
aagcacuacucuuuauguc

SEQ ID NO: 1744578 - RNA, 19 nt, Artificial Sequence
  Description of Artificial Sequence: Synthetic oligonucleotide
uauguccauauauauauau

SEQ ID NO: 1744579 - RNA, 19 nt, Artificial Sequence
  Description of Artificial Sequence: Synthetic oligonucleotide
uauugagcaaaagauaaaa

SEQ ID NO: 1744580 - RNA, 19 nt, Artificial Sequence
  Description of Artificial Sequence: Synthetic oligonucleotide
guucgaauaucaaugcugg

SEQ ID NO: 1744581 - RNA, 19 nt, Artificial Sequence
  Description of Artificial Sequence: Synthetic oligonucleotide
aauagcaaaccuugucacu

SEQ ID NO: 1744582 - RNA, 19 nt, Artificial Sequence
  Description of Artificial Sequence: Synthetic oligonucleotide
ucagcagcgauucacaguu

SEQ ID NO: 1744583 - RNA, 19 nt, Artificial Sequence
  Description of Artificial Sequence: Synthetic oligonucleotide
auuucccuauucuaaacug

SEQ ID NO: 1744584 - RNA, 19 nt, Artificial Sequence
  Description of Artificial Sequence: Synthetic oligonucleotide
cauauauauauauuuaugu

SEQ ID NO: 1744585 - RNA, 19 nt, Artificial Sequence
  Description of Artificial Sequence: Synthetic oligonucleotide
aucuuugggaaaucgagca

SEQ ID NO: 1744586 - RNA, 19 nt, Artificial Sequence
  Description of Artificial Sequence: Synthetic oligonucleotide
uuaucuuguuccagggucc

SEQ ID NO: 1744587 - RNA, 19 nt, Artificial Sequence
  Description of Artificial Sequence: Synthetic oligonucleotide
gauaagccauuuuaucuug

SEQ ID NO: 1744588 - RNA, 19 nt, Artificial Sequence
  Description of Artificial Sequence: Synthetic oligonucleotide
guguacuuuagacaguuug

SEQ ID NO: 1744589 - RNA, 19 nt, Artificial Sequence
  Description of Artificial Sequence: Synthetic oligonucleotide
gaguccaaauacaaaauug

SEQ ID NO: 1744590 - RNA, 19 nt, Artificial Sequence
  Description of Artificial Sequence: Synthetic oligonucleotide
ggucacaagaauuacauga

SEQ ID NO: 1744591 - RNA, 19 nt, Artificial Sequence
  Description of Artificial Sequence: Synthetic oligonucleotide
cucaacaugguauaucauc

SEQ ID NO: 1744592 - RNA, 19 nt, Artificial Sequence
  Description of Artificial Sequence: Synthetic oligonucleotide
agaaugcaugcacacuccc

SEQ ID NO: 1744593 - RNA, 19 nt, Artificial Sequence
  Description of Artificial Sequence: Synthetic oligonucleotide
ucauaagcuaucuguaccu

SEQ ID NO: 1744594 - RNA, 19 nt, Artificial Sequence
  Description of Artificial Sequence: Synthetic oligonucleotide
ugaacuaggaaaguuacuu

SEQ ID NO: 1744595 - RNA, 19 nt, Artificial Sequence
  Description of Artificial Sequence: Synthetic oligonucleotide
guucuaaauuuucacauga

SEQ ID NO: 1744596 - RNA, 19 nt, Artificial Sequence
  Description of Artificial Sequence: Synthetic oligonucleotide
ucuaucugcuagaaaauua

SEQ ID NO: 1744597 - RNA, 19 nt, Artificial Sequence
  Description of Artificial Sequence: Synthetic oligonucleotide
aaaccuugucacuugguaa

SEQ ID NO: 1744598 - RNA, 19 nt, Artificial Sequence
  Description of Artificial Sequence: Synthetic oligonucleotide
gcaaauagcuacuacagac

SEQ ID NO: 1744599 - RNA, 19 nt, Artificial Sequence
  Description of Artificial Sequence: Synthetic oligonucleotide
gauaucucacuucaacuuc

SEQ ID NO: 1744600 - RNA, 19 nt, Artificial Sequence
  Description of Artificial Sequence: Synthetic oligonucleotide
aaagcaacucaacauggua

SEQ ID NO: 1744601 - RNA, 19 nt, Artificial Sequence
  Description of Artificial Sequence: Synthetic oligonucleotide
ugggaaaucgagcauacuu

SEQ ID NO: 1744602 - RNA, 19 nt, Artificial Sequence
  Description of Artificial Sequence: Synthetic oligonucleotide
aguucuaaauuuucacaug

SEQ ID NO: 1744603 - RNA, 19 nt, Artificial Sequence
  Description of Artificial Sequence: Synthetic oligonucleotide
uaagggagcucucugcuga

SEQ ID NO: 1744604 - RNA, 19 nt, Artificial Sequence
  Description of Artificial Sequence: Synthetic oligonucleotide
uguaccuggcagaagccag

SEQ ID NO: 1744605 - RNA, 19 nt, Artificial Sequence
  Description of Artificial Sequence: Synthetic oligonucleotide
aaccuugucacuugguaaa

SEQ ID NO: 1744606 - RNA, 19 nt, Artificial Sequence
  Description of Artificial Sequence: Synthetic oligonucleotide
aaagaaaauuagcuccgau

SEQ ID NO: 1744607 - RNA, 19 nt, Artificial Sequence
  Description of Artificial Sequence: Synthetic oligonucleotide
ggaaaguuacuuuccaucc

SEQ ID NO: 1744608 - RNA, 19 nt, Artificial Sequence
  Description of Artificial Sequence: Synthetic oligonucleotide
aacaugguauaucaucuuu

SEQ ID NO: 1744609 - RNA, 19 nt, Artificial Sequence
  Description of Artificial Sequence: Synthetic oligonucleotide
uguuguagggacugaacgu

SEQ ID NO: 1744610 - RNA, 19 nt, Artificial Sequence
  Description of Artificial Sequence: Synthetic oligonucleotide
uauaucaucuuugggaaau

SEQ ID NO: 1744611 - RNA, 19 nt, Artificial Sequence
  Description of Artificial Sequence: Synthetic oligonucleotide
aguucgaauaucaaugcug

SEQ ID NO: 1744612 - RNA, 19 nt, Artificial Sequence
  Description of Artificial Sequence: Synthetic oligonucleotide
ucgacauuaagggagcucu

SEQ ID NO: 1744613 - RNA, 19 nt, Artificial Sequence
  Description of Artificial Sequence: Synthetic oligonucleotide
aggauaucucacuucaacu

SEQ ID NO: 1744614 - RNA, 19 nt, Artificial Sequence
  Description of Artificial Sequence: Synthetic oligonucleotide
augguauaucaucuuuggg

SEQ ID NO: 1744615 - RNA, 19 nt, Artificial Sequence
  Description of Artificial Sequence: Synthetic oligonucleotide
cauuaagggagcucucugc

SEQ ID NO: 1744616 - RNA, 19 nt, Artificial Sequence
  Description of Artificial Sequence: Synthetic oligonucleotide
auuaagggagcucucugcu

SEQ ID NO: 1744617 - RNA, 19 nt, Artificial Sequence
  Description of Artificial Sequence: Synthetic oligonucleotide
aacauucgucuucacuuug

SEQ ID NO: 1744618 - RNA, 19 nt, Artificial Sequence
  Description of Artificial Sequence: Synthetic oligonucleotide
cugaacgugaacuaggaaa

SEQ ID NO: 1744619 - RNA, 19 nt, Artificial Sequence
  Description of Artificial Sequence: Synthetic oligonucleotide
ucgaauaucaaugcugguc

SEQ ID NO: 1744620 - RNA, 19 nt, Artificial Sequence
  Description of Artificial Sequence: Synthetic oligonucleotide
aguaagcuaggucucucag

SEQ ID NO: 1744621 - RNA, 19 nt, Artificial Sequence
  Description of Artificial Sequence: Synthetic oligonucleotide
uguuugguuauugagcaaa

SEQ ID NO: 1744622 - RNA, 19 nt, Artificial Sequence
  Description of Artificial Sequence: Synthetic oligonucleotide
ugucauuauuagaguaagc

SEQ ID NO: 1744623 - RNA, 19 nt, Artificial Sequence
  Description of Artificial Sequence: Synthetic oligonucleotide
acaugaaaggcucccauaa

SEQ ID NO: 1744624 - RNA, 19 nt, Artificial Sequence
  Description of Artificial Sequence: Synthetic oligonucleotide
ugaggagagcuacaucacc

SEQ ID NO: 1744625 - RNA, 19 nt, Artificial Sequence
  Description of Artificial Sequence: Synthetic oligonucleotide
uuauugagcaaaagauaaa

SEQ ID NO: 1744626 - RNA, 19 nt, Artificial Sequence
  Description of Artificial Sequence: Synthetic oligonucleotide
cuguuuaccacugucuaag

SEQ ID NO: 1744627 - RNA, 19 nt, Artificial Sequence
  Description of Artificial Sequence: Synthetic oligonucleotide
uuagaguaagcuaggucuc

SEQ ID NO: 1744628 - RNA, 19 nt, Artificial Sequence
  Description of Artificial Sequence: Synthetic oligonucleotide
ucuaaacugaaggucacaa

SEQ ID NO: 1744629 - RNA, 19 nt, Artificial Sequence
  Description of Artificial Sequence: Synthetic oligonucleotide
ucuacuguuuagauuugaa

SEQ ID NO: 1744630 - RNA, 19 nt, Artificial Sequence
  Description of Artificial Sequence: Synthetic oligonucleotide
cuggauuuuagcaugagcu

SEQ ID NO: 1744631 - RNA, 19 nt, Artificial Sequence
  Description of Artificial Sequence: Synthetic oligonucleotide
ugaacuggguuagagaaau

SEQ ID NO: 1744632 - RNA, 19 nt, Artificial Sequence
  Description of Artificial Sequence: Synthetic oligonucleotide
uacacaucuacuguuuaga

SEQ ID NO: 1744633 - RNA, 19 nt, Artificial Sequence
  Description of Artificial Sequence: Synthetic oligonucleotide
ucucucuagucaaaagagu

SEQ ID NO: 1744634 - RNA, 19 nt, Artificial Sequence
  Description of Artificial Sequence: Synthetic oligonucleotide
aucaaugcuggucuaucug

SEQ ID NO: 1744635 - RNA, 19 nt, Artificial Sequence
  Description of Artificial Sequence: Synthetic oligonucleotide
caggguccggauuaaagcc

SEQ ID NO: 1744636 - RNA, 19 nt, Artificial Sequence
  Description of Artificial Sequence: Synthetic oligonucleotide
ucgagcauacuuuuauuuc

SEQ ID NO: 1744637 - RNA, 19 nt, Artificial Sequence
  Description of Artificial Sequence: Synthetic oligonucleotide
ugaaaagcacuacucuuua

SEQ ID NO: 1744638 - RNA, 19 nt, Artificial Sequence
  Description of Artificial Sequence: Synthetic oligonucleotide
uaggugucccaccagauuu

SEQ ID NO: 1744639 - RNA, 19 nt, Artificial Sequence
  Description of Artificial Sequence: Synthetic oligonucleotide
gaaaauuagcaacauucgu

SEQ ID NO: 1744640 - RNA, 19 nt, Artificial Sequence
  Description of Artificial Sequence: Synthetic oligonucleotide
auggcuuaggaguggagug

SEQ ID NO: 1744641 - RNA, 19 nt, Artificial Sequence
  Description of Artificial Sequence: Synthetic oligonucleotide
uuuuggucucucuagucaa

SEQ ID NO: 1744642 - RNA, 19 nt, Artificial Sequence
  Description of Artificial Sequence: Synthetic oligonucleotide
aaggcucccauaaauuuug

SEQ ID NO: 1744643 - RNA, 19 nt, Artificial Sequence
  Description of Artificial Sequence: Synthetic oligonucleotide
uucccuauucuaaacugaa

SEQ ID NO: 1744644 - RNA, 19 nt, Artificial Sequence
  Description of Artificial Sequence: Synthetic oligonucleotide
uuagacaguuuguuccuga

SEQ ID NO: 1744645 - RNA, 19 nt, Artificial Sequence
  Description of Artificial Sequence: Synthetic oligonucleotide
uguguccaaaaggauaucu

SEQ ID NO: 1744646 - RNA, 19 nt, Artificial Sequence
  Description of Artificial Sequence: Synthetic oligonucleotide
acgaaguuuugacugaaaa

SEQ ID NO: 1744647 - RNA, 19 nt, Artificial Sequence
  Description of Artificial Sequence: Synthetic oligonucleotide
uacuuuagacaguuuguuc

SEQ ID NO: 1744648 - RNA, 19 nt, Artificial Sequence
  Description of Artificial Sequence: Synthetic oligonucleotide
guuuagauuugaaaagcac

SEQ ID NO: 1744649 - RNA, 19 nt, Artificial Sequence
  Description of Artificial Sequence: Synthetic oligonucleotide
uggguuagagaaauuucuc

SEQ ID NO: 1744650 - RNA, 19 nt, Artificial Sequence
  Description of Artificial Sequence: Synthetic oligonucleotide
ugucuaagucaccuaaaua

SEQ ID NO: 1744651 - RNA, 19 nt, Artificial Sequence
  Description of Artificial Sequence: Synthetic oligonucleotide
aacuggguuagagaaauuu

SEQ ID NO: 1744652 - RNA, 19 nt, Artificial Sequence
  Description of Artificial Sequence: Synthetic oligonucleotide
aagcaaagccuaaucagcu

SEQ ID NO: 1744653 - RNA, 19 nt, Artificial Sequence
  Description of Artificial Sequence: Synthetic oligonucleotide
uacagacaauuuaggagcu

SEQ ID NO: 1744654 - RNA, 19 nt, Artificial Sequence
  Description of Artificial Sequence: Synthetic oligonucleotide
uuacaugaaaggcucccau

SEQ ID NO: 1744655 - RNA, 19 nt, Artificial Sequence
  Description of Artificial Sequence: Synthetic oligonucleotide
uuuaggagcuuaguugugu

SEQ ID NO: 1744656 - RNA, 19 nt, Artificial Sequence
  Description of Artificial Sequence: Synthetic oligonucleotide
ucuagucaaaagaguuucu

SEQ ID NO: 1744657 - RNA, 19 nt, Artificial Sequence
  Description of Artificial Sequence: Synthetic oligonucleotide
cuccgauacacaucuacug

SEQ ID NO: 1744658 - RNA, 19 nt, Artificial Sequence
  Description of Artificial Sequence: Synthetic oligonucleotide
aggcaaauagcuacuacag

SEQ ID NO: 1744659 - RNA, 19 nt, Artificial Sequence
  Description of Artificial Sequence: Synthetic oligonucleotide
ccauauauauauauuuaug

SEQ ID NO: 1744660 - RNA, 19 nt, Artificial Sequence
  Description of Artificial Sequence: Synthetic oligonucleotide
gaaaauuagcuccgauaca

SEQ ID NO: 1744661 - RNA, 19 nt, Artificial Sequence
  Description of Artificial Sequence: Synthetic oligonucleotide
acauuaagggagcucucug

SEQ ID NO: 1744662 - RNA, 19 nt, Artificial Sequence
  Description of Artificial Sequence: Synthetic oligonucleotide
acuggguuagagaaauuuc

SEQ ID NO: 1744663 - RNA, 19 nt, Artificial Sequence
  Description of Artificial Sequence: Synthetic oligonucleotide
caaauagcuacuacagaca

SEQ ID NO: 1744664 - RNA, 19 nt, Artificial Sequence
  Description of Artificial Sequence: Synthetic oligonucleotide
ucccuauucuaaacugaag

SEQ ID NO: 1744665 - RNA, 19 nt, Artificial Sequence
  Description of Artificial Sequence: Synthetic oligonucleotide
uucacgaaguuuugacuga

SEQ ID NO: 1744666 - RNA, 19 nt, Artificial Sequence
  Description of Artificial Sequence: Synthetic oligonucleotide
aauaucaaugcuggucuau

SEQ ID NO: 1744667 - RNA, 19 nt, Artificial Sequence
  Description of Artificial Sequence: Synthetic oligonucleotide
cucuagucaaaagaguuuc

SEQ ID NO: 1744668 - RNA, 19 nt, Artificial Sequence
  Description of Artificial Sequence: Synthetic oligonucleotide
caggaguccaaauacaaaa

SEQ ID NO: 1744669 - RNA, 19 nt, Artificial Sequence
  Description of Artificial Sequence: Synthetic oligonucleotide
ucucuagucaaaagaguuu

SEQ ID NO: 1744670 - RNA, 19 nt, Artificial Sequence
  Description of Artificial Sequence: Synthetic oligonucleotide
agcgauucacaguuggcca

SEQ ID NO: 1744671 - RNA, 19 nt, Artificial Sequence
  Description of Artificial Sequence: Synthetic oligonucleotide
aucgagcauacuuuuauuu

SEQ ID NO: 1744672 - RNA, 19 nt, Artificial Sequence
  Description of Artificial Sequence: Synthetic oligonucleotide
gguauaucaucuuugggaa

SEQ ID NO: 1744673 - RNA, 19 nt, Artificial Sequence
  Description of Artificial Sequence: Synthetic oligonucleotide
ucuuugaggccugauauuu

SEQ ID NO: 1744674 - RNA, 19 nt, Artificial Sequence
  Description of Artificial Sequence: Synthetic oligonucleotide
aaucgagcauacuuuuauu

SEQ ID NO: 1744675 - RNA, 19 nt, Artificial Sequence
  Description of Artificial Sequence: Synthetic oligonucleotide
ucuguaccuggcagaagcc

SEQ ID NO: 1744676 - RNA, 19 nt, Artificial Sequence
  Description of Artificial Sequence: Synthetic oligonucleotide
aucaccuacugauggucuc

SEQ ID NO: 1744677 - RNA, 19 nt, Artificial Sequence
  Description of Artificial Sequence: Synthetic oligonucleotide
guaagcuaggucucucagc

SEQ ID NO: 1744678 - RNA, 19 nt, Artificial Sequence
  Description of Artificial Sequence: Synthetic oligonucleotide
gcaaagccuaaucagcuag

SEQ ID NO: 1744679 - RNA, 19 nt, Artificial Sequence
  Description of Artificial Sequence: Synthetic oligonucleotide
aaauccagucuggaugucu

SEQ ID NO: 1744680 - RNA, 19 nt, Artificial Sequence
  Description of Artificial Sequence: Synthetic oligonucleotide
agcuacuacagacaauuua

SEQ ID NO: 1744681 - RNA, 19 nt, Artificial Sequence
  Description of Artificial Sequence: Synthetic oligonucleotide
uuaagggagcucucugcug

SEQ ID NO: 1744682 - RNA, 19 nt, Artificial Sequence
  Description of Artificial Sequence: Synthetic oligonucleotide
ucccauaaauuuugugaga

SEQ ID NO: 1744683 - RNA, 19 nt, Artificial Sequence
  Description of Artificial Sequence: Synthetic oligonucleotide
cucaagcaaagccuaauca

SEQ ID NO: 1744684 - RNA, 19 nt, Artificial Sequence
  Description of Artificial Sequence: Synthetic oligonucleotide
auucuuggguguuugguua

SEQ ID NO: 1744685 - RNA, 19 nt, Artificial Sequence
  Description of Artificial Sequence: Synthetic oligonucleotide
uggucgacauuaagggagc

SEQ ID NO: 1744686 - RNA, 19 nt, Artificial Sequence
  Description of Artificial Sequence: Synthetic oligonucleotide
cagaaugcaugcacacucc

SEQ ID NO: 1744687 - RNA, 19 nt, Artificial Sequence
  Description of Artificial Sequence: Synthetic oligonucleotide
uaucuuguuccaggguccg

SEQ ID NO: 1744688 - RNA, 19 nt, Artificial Sequence
  Description of Artificial Sequence: Synthetic oligonucleotide
auuagcuccgauacacauc

SEQ ID NO: 1744689 - RNA, 19 nt, Artificial Sequence
  Description of Artificial Sequence: Synthetic oligonucleotide
uguucugaggagagcuaca

SEQ ID NO: 1744690 - RNA, 19 nt, Artificial Sequence
  Description of Artificial Sequence: Synthetic oligonucleotide
aagaguuucuagguuggau

SEQ ID NO: 1744691 - RNA, 19 nt, Artificial Sequence
  Description of Artificial Sequence: Synthetic oligonucleotide
uuaggagcuuaguuguguc

SEQ ID NO: 1744692 - RNA, 19 nt, Artificial Sequence
  Description of Artificial Sequence: Synthetic oligonucleotide
aaaaugauucuuggguguu

SEQ ID NO: 1744693 - RNA, 19 nt, Artificial Sequence
  Description of Artificial Sequence: Synthetic oligonucleotide
uggucucucuagucaaaag

SEQ ID NO: 1744694 - RNA, 19 nt, Artificial Sequence
  Description of Artificial Sequence: Synthetic oligonucleotide
auagcaaaccuugucacuu

SEQ ID NO: 1744695 - RNA, 19 nt, Artificial Sequence
  Description of Artificial Sequence: Synthetic oligonucleotide
aacgugaacuaggaaaguu

SEQ ID NO: 1744696 - RNA, 19 nt, Artificial Sequence
  Description of Artificial Sequence: Synthetic oligonucleotide
aaagccuaaucagcuagaa

SEQ ID NO: 1744697 - RNA, 19 nt, Artificial Sequence
  Description of Artificial Sequence: Synthetic oligonucleotide
aagcuaucuguaccuggca

SEQ ID NO: 1744698 - RNA, 19 nt, Artificial Sequence
  Description of Artificial Sequence: Synthetic oligonucleotide
cauucgucuucacuuugag

SEQ ID NO: 1744699 - RNA, 19 nt, Artificial Sequence
  Description of Artificial Sequence: Synthetic oligonucleotide
uacaucaccuacugauggu

SEQ ID NO: 1744700 - RNA, 19 nt, Artificial Sequence
  Description of Artificial Sequence: Synthetic oligonucleotide
cagcgauucacaguuggcc

SEQ ID NO: 1744701 - RNA, 19 nt, Artificial Sequence
  Description of Artificial Sequence: Synthetic oligonucleotide
aagccuaaucagcuagaaa

SEQ ID NO: 1744702 - RNA, 19 nt, Artificial Sequence
  Description of Artificial Sequence: Synthetic oligonucleotide
gccugauauuuccaguucg

SEQ ID NO: 1744703 - RNA, 19 nt, Artificial Sequence
  Description of Artificial Sequence: Synthetic oligonucleotide
gaauuacaugaaaggcucc

SEQ ID NO: 1744704 - RNA, 19 nt, Artificial Sequence
  Description of Artificial Sequence: Synthetic oligonucleotide
uuuagacaguuuguuccug

SEQ ID NO: 1744705 - RNA, 19 nt, Artificial Sequence
  Description of Artificial Sequence: Synthetic oligonucleotide
uggagcuauggcuuauuuc

SEQ ID NO: 1744706 - RNA, 19 nt, Artificial Sequence
  Description of Artificial Sequence: Synthetic oligonucleotide
ggucucucuagucaaaaga

SEQ ID NO: 1744707 - RNA, 19 nt, Artificial Sequence
  Description of Artificial Sequence: Synthetic oligonucleotide
guuuaccacugucuaaguc

SEQ ID NO: 1744708 - RNA, 19 nt, Artificial Sequence
  Description of Artificial Sequence: Synthetic oligonucleotide
uguagggacugaacgugaa

SEQ ID NO: 1744709 - RNA, 19 nt, Artificial Sequence
  Description of Artificial Sequence: Synthetic oligonucleotide
gugagaaaauagcaaaccu

SEQ ID NO: 1744710 - RNA, 19 nt, Artificial Sequence
  Description of Artificial Sequence: Synthetic oligonucleotide
uaggaguggaguguucuga

SEQ ID NO: 1744711 - RNA, 19 nt, Artificial Sequence
  Description of Artificial Sequence: Synthetic oligonucleotide
acacaucuacuguuuagau

SEQ ID NO: 1744712 - RNA, 19 nt, Artificial Sequence
  Description of Artificial Sequence: Synthetic oligonucleotide
uugucacuugguaaauaua

SEQ ID NO: 1744713 - RNA, 19 nt, Artificial Sequence
  Description of Artificial Sequence: Synthetic oligonucleotide
cuaggaaaguuacuuucca

SEQ ID NO: 1744714 - RNA, 19 nt, Artificial Sequence
  Description of Artificial Sequence: Synthetic oligonucleotide
uccgcugguagcagcuucc

SEQ ID NO: 1744715 - RNA, 19 nt, Artificial Sequence
  Description of Artificial Sequence: Synthetic oligonucleotide
uacaugaaaggcucccaua

SEQ ID NO: 1744716 - RNA, 19 nt, Artificial Sequence
  Description of Artificial Sequence: Synthetic oligonucleotide
acuguuuaccacugucuaa

SEQ ID NO: 1744717 - RNA, 19 nt, Artificial Sequence
  Description of Artificial Sequence: Synthetic oligonucleotide
agcauacuuuuauuucccu

SEQ ID NO: 1744718 - RNA, 19 nt, Artificial Sequence
  Description of Artificial Sequence: Synthetic oligonucleotide
gcuuaguugugucuuugag

SEQ ID NO: 1744719 - RNA, 19 nt, Artificial Sequence
  Description of Artificial Sequence: Synthetic oligonucleotide
uagcaaaccuugucacuug

SEQ ID NO: 1744720 - RNA, 19 nt, Artificial Sequence
  Description of Artificial Sequence: Synthetic oligonucleotide
aagcuaggucucucagcag

SEQ ID NO: 1744721 - RNA, 19 nt, Artificial Sequence
  Description of Artificial Sequence: Synthetic oligonucleotide
aggucacaagaauuacaug

SEQ ID NO: 1744722 - RNA, 19 nt, Artificial Sequence
  Description of Artificial Sequence: Synthetic oligonucleotide
cacaccaguaguagguguc

SEQ ID NO: 1744723 - RNA, 19 nt, Artificial Sequence
  Description of Artificial Sequence: Synthetic oligonucleotide
cgagcauacuuuuauuucc

SEQ ID NO: 1744724 - RNA, 19 nt, Artificial Sequence
  Description of Artificial Sequence: Synthetic oligonucleotide
ucaccuacugauggucucc

SEQ ID NO: 1744725 - RNA, 19 nt, Artificial Sequence
  Description of Artificial Sequence: Synthetic oligonucleotide
auuuuagcaugagcuaccu

SEQ ID NO: 1744726 - RNA, 19 nt, Artificial Sequence
  Description of Artificial Sequence: Synthetic oligonucleotide
cuucacuuugaggugggug

SEQ ID NO: 1744727 - RNA, 19 nt, Artificial Sequence
  Description of Artificial Sequence: Synthetic oligonucleotide
cugaggagagcuacaucac

SEQ ID NO: 1744728 - RNA, 19 nt, Artificial Sequence
  Description of Artificial Sequence: Synthetic oligonucleotide
agacaauuuaggagcuuag

SEQ ID NO: 1744729 - RNA, 19 nt, Artificial Sequence
  Description of Artificial Sequence: Synthetic oligonucleotide
cccaccagauuucuggucg

SEQ ID NO: 1744730 - RNA, 19 nt, Artificial Sequence
  Description of Artificial Sequence: Synthetic oligonucleotide
uucgaauaucaaugcuggu

SEQ ID NO: 1744731 - RNA, 19 nt, Artificial Sequence
  Description of Artificial Sequence: Synthetic oligonucleotide
uccggauuaaagccuucau

SEQ ID NO: 1744732 - RNA, 19 nt, Artificial Sequence
  Description of Artificial Sequence: Synthetic oligonucleotide
cuggguuagagaaauuucu

SEQ ID NO: 1744733 - RNA, 19 nt, Artificial Sequence
  Description of Artificial Sequence: Synthetic oligonucleotide
auacuuuuauuucccuauu

SEQ ID NO: 1744734 - RNA, 19 nt, Artificial Sequence
  Description of Artificial Sequence: Synthetic oligonucleotide
uugucaagucaucucuguu

SEQ ID NO: 1744735 - RNA, 19 nt, Artificial Sequence
  Description of Artificial Sequence: Synthetic oligonucleotide
gaguaagcuaggucucuca

SEQ ID NO: 1744736 - RNA, 19 nt, Artificial Sequence
  Description of Artificial Sequence: Synthetic oligonucleotide
auccgcugguagcagcuuc

SEQ ID NO: 1744737 - RNA, 19 nt, Artificial Sequence
  Description of Artificial Sequence: Synthetic oligonucleotide
cuuugaggccugauauuuc

SEQ ID NO: 1744738 - RNA, 19 nt, Artificial Sequence
  Description of Artificial Sequence: Synthetic oligonucleotide
uacuuuccauccagacacc

SEQ ID NO: 1744739 - RNA, 19 nt, Artificial Sequence
  Description of Artificial Sequence: Synthetic oligonucleotide
gguuugaacuggguuagag

SEQ ID NO: 1744740 - RNA, 19 nt, Artificial Sequence
  Description of Artificial Sequence: Synthetic oligonucleotide
agaauuccaugugugucca

SEQ ID NO: 1744741 - RNA, 19 nt, Artificial Sequence
  Description of Artificial Sequence: Synthetic oligonucleotide
caguucuaaauuuucacau

SEQ ID NO: 1744742 - RNA, 19 nt, Artificial Sequence
  Description of Artificial Sequence: Synthetic oligonucleotide
agcuuaguugugucuuuga

SEQ ID NO: 1744743 - RNA, 19 nt, Artificial Sequence
  Description of Artificial Sequence: Synthetic oligonucleotide
ugucucaagcaaagccuaa

SEQ ID NO: 1744744 - RNA, 19 nt, Artificial Sequence
  Description of Artificial Sequence: Synthetic oligonucleotide
uaguugugucuuugaggcc

SEQ ID NO: 1744745 - RNA, 19 nt, Artificial Sequence
  Description of Artificial Sequence: Synthetic oligonucleotide
gucacuugguaaauauaac

SEQ ID NO: 1744746 - RNA, 19 nt, Artificial Sequence
  Description of Artificial Sequence: Synthetic oligonucleotide
ggacugaacgugaacuagg

SEQ ID NO: 1744747 - RNA, 19 nt, Artificial Sequence
  Description of Artificial Sequence: Synthetic oligonucleotide
gacugaacgugaacuagga

SEQ ID NO: 1744748 - RNA, 19 nt, Artificial Sequence
  Description of Artificial Sequence: Synthetic oligonucleotide
aucaucuuugggaaaucga

SEQ ID NO: 1744749 - RNA, 19 nt, Artificial Sequence
  Description of Artificial Sequence: Synthetic oligonucleotide
uucugaggagagcuacauc

SEQ ID NO: 1744750 - RNA, 19 nt, Artificial Sequence
  Description of Artificial Sequence: Synthetic oligonucleotide
ggcuuauuuccugucuugg

SEQ ID NO: 1744751 - RNA, 19 nt, Artificial Sequence
  Description of Artificial Sequence: Synthetic oligonucleotide
ugcuggucuaucugcuaga

SEQ ID NO: 1744752 - RNA, 19 nt, Artificial Sequence
  Description of Artificial Sequence: Synthetic oligonucleotide
uagaguaagcuaggucucu

SEQ ID NO: 1744753 - RNA, 19 nt, Artificial Sequence
  Description of Artificial Sequence: Synthetic oligonucleotide
cuugucacuugguaaauau

SEQ ID NO: 1744754 - RNA, 19 nt, Artificial Sequence
  Description of Artificial Sequence: Synthetic oligonucleotide
aaaugauucuuggguguuu

SEQ ID NO: 1744755 - RNA, 19 nt, Artificial Sequence
  Description of Artificial Sequence: Synthetic oligonucleotide
gucacaagaauuacaugaa

SEQ ID NO: 1744756 - RNA, 19 nt, Artificial Sequence
  Description of Artificial Sequence: Synthetic oligonucleotide
gcaacuguuuaccacuguc

SEQ ID NO: 1744757 - RNA, 19 nt, Artificial Sequence
  Description of Artificial Sequence: Synthetic oligonucleotide
augaaaggggaaaaugauu

SEQ ID NO: 1744758 - RNA, 19 nt, Artificial Sequence
  Description of Artificial Sequence: Synthetic oligonucleotide
ggaguggaguguucugagg

SEQ ID NO: 1744759 - RNA, 19 nt, Artificial Sequence
  Description of Artificial Sequence: Synthetic oligonucleotide
guccauauauauauauuua

SEQ ID NO: 1744760 - RNA, 19 nt, Artificial Sequence
  Description of Artificial Sequence: Synthetic oligonucleotide
gauggcuuaggaguggagu

SEQ ID NO: 1744761 - RNA, 19 nt, Artificial Sequence
  Description of Artificial Sequence: Synthetic oligonucleotide
gagcuuaguugugucuuug

SEQ ID NO: 1744762 - RNA, 19 nt, Artificial Sequence
  Description of Artificial Sequence: Synthetic oligonucleotide
acugaacgugaacuaggaa

SEQ ID NO: 1744763 - RNA, 19 nt, Artificial Sequence
  Description of Artificial Sequence: Synthetic oligonucleotide
cucucuagucaaaagaguu

SEQ ID NO: 1744764 - RNA, 19 nt, Artificial Sequence
  Description of Artificial Sequence: Synthetic oligonucleotide
aaaggauaucucacuucaa

SEQ ID NO: 1744765 - RNA, 19 nt, Artificial Sequence
  Description of Artificial Sequence: Synthetic oligonucleotide
cacugucuaagucaccuaa

SEQ ID NO: 1744766 - RNA, 19 nt, Artificial Sequence
  Description of Artificial Sequence: Synthetic oligonucleotide
acuuugagguggguggacu

SEQ ID NO: 1744767 - RNA, 19 nt, Artificial Sequence
  Description of Artificial Sequence: Synthetic oligonucleotide
gcaacauucgucuucacuu

SEQ ID NO: 1744768 - RNA, 19 nt, Artificial Sequence
  Description of Artificial Sequence: Synthetic oligonucleotide
uggcuuaggaguggagugu

SEQ ID NO: 1744769 - RNA, 19 nt, Artificial Sequence
  Description of Artificial Sequence: Synthetic oligonucleotide
ccuggauuuuagcaugagc

SEQ ID NO: 1744770 - RNA, 19 nt, Artificial Sequence
  Description of Artificial Sequence: Synthetic oligonucleotide
gguuauugagcaaaagaua

SEQ ID NO: 1744771 - RNA, 19 nt, Artificial Sequence
  Description of Artificial Sequence: Synthetic oligonucleotide
gaauaucaaugcuggucua

SEQ ID NO: 1744772 - RNA, 19 nt, Artificial Sequence
  Description of Artificial Sequence: Synthetic oligonucleotide
aggaguccaaauacaaaau

SEQ ID NO: 1744773 - RNA, 19 nt, Artificial Sequence
  Description of Artificial Sequence: Synthetic oligonucleotide
caaagccuaaucagcuaga

SEQ ID NO: 1744774 - RNA, 19 nt, Artificial Sequence
  Description of Artificial Sequence: Synthetic oligonucleotide
gaggagagcuacaucaccu

SEQ ID NO: 1744775 - RNA, 19 nt, Artificial Sequence
  Description of Artificial Sequence: Synthetic oligonucleotide
auguccauauauauauauu

SEQ ID NO: 1744776 - RNA, 19 nt, Artificial Sequence
  Description of Artificial Sequence: Synthetic oligonucleotide
guugucaagucaucucugu

SEQ ID NO: 1744777 - RNA, 19 nt, Artificial Sequence
  Description of Artificial Sequence: Synthetic oligonucleotide
agguuggauuccaaggccu

SEQ ID NO: 1744778 - RNA, 19 nt, Artificial Sequence
  Description of Artificial Sequence: Synthetic oligonucleotide
caacuguuuaccacugucu

SEQ ID NO: 1744779 - RNA, 19 nt, Artificial Sequence
  Description of Artificial Sequence: Synthetic oligonucleotide
agcgcauccgcugguagca

SEQ ID NO: 1744780 - RNA, 19 nt, Artificial Sequence
  Description of Artificial Sequence: Synthetic oligonucleotide
gcgauucacaguuggccag

SEQ ID NO: 1744781 - RNA, 19 nt, Artificial Sequence
  Description of Artificial Sequence: Synthetic oligonucleotide
gguggacucagccacaggu

SEQ ID NO: 1744782 - RNA, 19 nt, Artificial Sequence
  Description of Artificial Sequence: Synthetic oligonucleotide
acgugaacuaggaaaguua

SEQ ID NO: 1744783 - RNA, 19 nt, Artificial Sequence
  Description of Artificial Sequence: Synthetic oligonucleotide
ggcaaauagcuacuacaga

SEQ ID NO: 1744784 - RNA, 19 nt, Artificial Sequence
  Description of Artificial Sequence: Synthetic oligonucleotide
cagcgcauccgcugguagc

SEQ ID NO: 1744785 - RNA, 19 nt, Artificial Sequence
  Description of Artificial Sequence: Synthetic oligonucleotide
gacauuaagggagcucucu

SEQ ID NO: 1744786 - RNA, 19 nt, Artificial Sequence
  Description of Artificial Sequence: Synthetic oligonucleotide
gcuaucuguaccuggcaga

SEQ ID NO: 1744787 - RNA, 19 nt, Artificial Sequence
  Description of Artificial Sequence: Synthetic oligonucleotide
acauucgucuucacuuuga

SEQ ID NO: 1744788 - RNA, 19 nt, Artificial Sequence
  Description of Artificial Sequence: Synthetic oligonucleotide
ggguuagagaaauuucucu

SEQ ID NO: 1744789 - RNA, 19 nt, Artificial Sequence
  Description of Artificial Sequence: Synthetic oligonucleotide
ggauaucucacuucaacuu

SEQ ID NO: 1744790 - RNA, 19 nt, Artificial Sequence
  Description of Artificial Sequence: Synthetic oligonucleotide
cuaucuguaccuggcagaa

SEQ ID NO: 1744791 - RNA, 19 nt, Artificial Sequence
  Description of Artificial Sequence: Synthetic oligonucleotide
gcuaggucucucagcagcg

SEQ ID NO: 1744792 - RNA, 19 nt, Artificial Sequence
  Description of Artificial Sequence: Synthetic oligonucleotide
gugucuuugaggccugaua

SEQ ID NO: 1744793 - RNA, 19 nt, Artificial Sequence
  Description of Artificial Sequence: Synthetic oligonucleotide
ggcucccauaaauuuugug

SEQ ID NO: 1744794 - RNA, 19 nt, Artificial Sequence
  Description of Artificial Sequence: Synthetic oligonucleotide
gccuaaucagcuagaaaac

SEQ ID NO: 1744795 - RNA, 19 nt, Artificial Sequence
  Description of Artificial Sequence: Synthetic oligonucleotide
uggcaacaaccagaggaaa

SEQ ID NO: 1744796 - RNA, 19 nt, Artificial Sequence
  Description of Artificial Sequence: Synthetic oligonucleotide
aggguccggauuaaagccu

SEQ ID NO: 1744797 - RNA, 19 nt, Artificial Sequence
  Description of Artificial Sequence: Synthetic oligonucleotide
gagagcuacaucaccuacu

SEQ ID NO: 1744798 - RNA, 19 nt, Artificial Sequence
  Description of Artificial Sequence: Synthetic oligonucleotide
ccagguuugaacuggguua

SEQ ID NO: 1744799 - RNA, 19 nt, Artificial Sequence
  Description of Artificial Sequence: Synthetic oligonucleotide
uugggaaaucgagcauacu

SEQ ID NO: 1744800 - RNA, 19 nt, Artificial Sequence
  Description of Artificial Sequence: Synthetic oligonucleotide
cacacucccucauaagcua

SEQ ID NO: 1744801 - RNA, 19 nt, Artificial Sequence
  Description of Artificial Sequence: Synthetic oligonucleotide
acugucuaagucaccuaaa

SEQ ID NO: 1744802 - RNA, 19 nt, Artificial Sequence
  Description of Artificial Sequence: Synthetic oligonucleotide
gucgacauuaagggagcuc

SEQ ID NO: 1744803 - RNA, 19 nt, Artificial Sequence
  Description of Artificial Sequence: Synthetic oligonucleotide
gagcuacaucaccuacuga

SEQ ID NO: 1744804 - RNA, 19 nt, Artificial Sequence
  Description of Artificial Sequence: Synthetic oligonucleotide
cugucuaagucaccuaaau

SEQ ID NO: 1744805 - RNA, 19 nt, Artificial Sequence
  Description of Artificial Sequence: Synthetic oligonucleotide
ccugauauuuccaguucga

SEQ ID NO: 1744806 - RNA, 19 nt, Artificial Sequence
  Description of Artificial Sequence: Synthetic oligonucleotide
ccuaaucagcuagaaaaca

SEQ ID NO: 1744807 - RNA, 19 nt, Artificial Sequence
  Description of Artificial Sequence: Synthetic oligonucleotide
ggaaaucgagcauacuuuu

SEQ ID NO: 1744808 - RNA, 19 nt, Artificial Sequence
  Description of Artificial Sequence: Synthetic oligonucleotide
ggauuucacgaaguuuuga

SEQ ID NO: 1744809 - RNA, 19 nt, Artificial Sequence
  Description of Artificial Sequence: Synthetic oligonucleotide
guccggauuaaagccuuca

SEQ ID NO: 1744810 - RNA, 19 nt, Artificial Sequence
  Description of Artificial Sequence: Synthetic oligonucleotide
cgaauaucaaugcuggucu

SEQ ID NO: 1744811 - RNA, 19 nt, Artificial Sequence
  Description of Artificial Sequence: Synthetic oligonucleotide
cuguaccuggcagaagcca

SEQ ID NO: 1744812 - RNA, 19 nt, Artificial Sequence
  Description of Artificial Sequence: Synthetic oligonucleotide
caucaccuacugauggucu

SEQ ID NO: 1744813 - RNA, 19 nt, Artificial Sequence
  Description of Artificial Sequence: Synthetic oligonucleotide
acucaacaugguauaucau

SEQ ID NO: 1744814 - RNA, 19 nt, Artificial Sequence
  Description of Artificial Sequence: Synthetic oligonucleotide
caguucgaauaucaaugcu

SEQ ID NO: 1744815 - RNA, 19 nt, Artificial Sequence
  Description of Artificial Sequence: Synthetic oligonucleotide
cacuuugagguggguggac

SEQ ID NO: 1744816 - RNA, 19 nt, Artificial Sequence
  Description of Artificial Sequence: Synthetic oligonucleotide
cucagcagcgauucacagu

SEQ ID NO: 1744817 - RNA, 19 nt, Artificial Sequence
  Description of Artificial Sequence: Synthetic oligonucleotide
uagcaacauucgucuucac

SEQ ID NO: 1744818 - RNA, 19 nt, Artificial Sequence
  Description of Artificial Sequence: Synthetic oligonucleotide
gguauggauuucacgaagu

SEQ ID NO: 1744819 - RNA, 19 nt, Artificial Sequence
  Description of Artificial Sequence: Synthetic oligonucleotide
ggcaacaaccagaggaaaa

SEQ ID NO: 1744820 - RNA, 19 nt, Artificial Sequence
  Description of Artificial Sequence: Synthetic oligonucleotide
uugucccugugugucucaa

SEQ ID NO: 1744821 - RNA, 19 nt, Artificial Sequence
  Description of Artificial Sequence: Synthetic oligonucleotide
caccagauuucuggucgac

SEQ ID NO: 1744822 - RNA, 19 nt, Artificial Sequence
  Description of Artificial Sequence: Synthetic oligonucleotide
gaacgugaacuaggaaagu

SEQ ID NO: 1744823 - RNA, 19 nt, Artificial Sequence
  Description of Artificial Sequence: Synthetic oligonucleotide
acagacaauuuaggagcuu

SEQ ID NO: 1744824 - RNA, 19 nt, Artificial Sequence
  Description of Artificial Sequence: Synthetic oligonucleotide
gcaugagcuaccuggaguu

SEQ ID NO: 1744825 - RNA, 19 nt, Artificial Sequence
  Description of Artificial Sequence: Synthetic oligonucleotide
gucuaucugcuagaaaauu

SEQ ID NO: 1744826 - RNA, 19 nt, Artificial Sequence
  Description of Artificial Sequence: Synthetic oligonucleotide
cacuguugucaagucaucu

SEQ ID NO: 1744827 - RNA, 19 nt, Artificial Sequence
  Description of Artificial Sequence: Synthetic oligonucleotide
gggaaaucgagcauacuuu

SEQ ID NO: 1744828 - RNA, 19 nt, Artificial Sequence
  Description of Artificial Sequence: Synthetic oligonucleotide
cagcagcgauucacaguug

SEQ ID NO: 1744829 - RNA, 19 nt, Artificial Sequence
  Description of Artificial Sequence: Synthetic oligonucleotide
cuggucuaucugcuagaaa

SEQ ID NO: 1744830 - RNA, 19 nt, Artificial Sequence
  Description of Artificial Sequence: Synthetic oligonucleotide
aguguacuuuagacaguuu

SEQ ID NO: 1744831 - RNA, 19 nt, Artificial Sequence
  Description of Artificial Sequence: Synthetic oligonucleotide
gucuuugaggccugauauu

SEQ ID NO: 1744832 - RNA, 19 nt, Artificial Sequence
  Description of Artificial Sequence: Synthetic oligonucleotide
agguuugaacuggguuaga

SEQ ID NO: 1744833 - RNA, 19 nt, Artificial Sequence
  Description of Artificial Sequence: Synthetic oligonucleotide
gucucaagcaaagccuaau

SEQ ID NO: 1744834 - RNA, 19 nt, Artificial Sequence
  Description of Artificial Sequence: Synthetic oligonucleotide
caucucuguuguagggacu

SEQ ID NO: 1744835 - RNA, 19 nt, Artificial Sequence
  Description of Artificial Sequence: Synthetic oligonucleotide
gugucccaccagauuucug

SEQ ID NO: 1744836 - RNA, 19 nt, Artificial Sequence
  Description of Artificial Sequence: Synthetic oligonucleotide
caccuacugauggucucca

SEQ ID NO: 1744837 - RNA, 19 nt, Artificial Sequence
  Description of Artificial Sequence: Synthetic oligonucleotide
cccugugugucucaagcaa

SEQ ID NO: 1744838 - RNA, 19 nt, Artificial Sequence
  Description of Artificial Sequence: Synthetic oligonucleotide
aggcucccauaaauuuugu

SEQ ID NO: 1744839 - RNA, 19 nt, Artificial Sequence
  Description of Artificial Sequence: Synthetic oligonucleotide
gccuggauuuuagcaugag

SEQ ID NO: 1744840 - RNA, 19 nt, Artificial Sequence
  Description of Artificial Sequence: Synthetic oligonucleotide
cgauucacaguuggccagc

SEQ ID NO: 1744841 - RNA, 19 nt, Artificial Sequence
  Description of Artificial Sequence: Synthetic oligonucleotide
gcuccgauacacaucuacu

SEQ ID NO: 1744842 - RNA, 19 nt, Artificial Sequence
  Description of Artificial Sequence: Synthetic oligonucleotide
cgcauccgcugguagcagc

SEQ ID NO: 1744843 - RNA, 19 nt, Artificial Sequence
  Description of Artificial Sequence: Synthetic oligonucleotide
gcuuaggaguggaguguuc

SEQ ID NO: 1744844 - RNA, 19 nt, Artificial Sequence
  Description of Artificial Sequence: Synthetic oligonucleotide
ggagcuuaguugugucuuu

SEQ ID NO: 1744845 - RNA, 19 nt, Artificial Sequence
  Description of Artificial Sequence: Synthetic oligonucleotide
ccaccagauuucuggucga

SEQ ID NO: 1744846 - RNA, 19 nt, Artificial Sequence
  Description of Artificial Sequence: Synthetic oligonucleotide
gguccggauuaaagccuuc

SEQ ID NO: 1744847 - RNA, 19 nt, Artificial Sequence
  Description of Artificial Sequence: Synthetic oligonucleotide
ccaguguacuuuagacagu

SEQ ID NO: 1744848 - RNA, 19 nt, Artificial Sequence
  Description of Artificial Sequence: Synthetic oligonucleotide
ggcuuaggaguggaguguu

SEQ ID NO: 1744849 - RNA, 19 nt, Artificial Sequence
  Description of Artificial Sequence: Synthetic oligonucleotide
ccuugucacuugguaaaua

SEQ ID NO: 1744850 - RNA, 19 nt, Artificial Sequence
  Description of Artificial Sequence: Synthetic oligonucleotide
gcgcauccgcugguagcag

SEQ ID NO: 1744851 - RNA, 19 nt, Artificial Sequence
  Description of Artificial Sequence: Synthetic oligonucleotide
ggucgacauuaagggagcu

SEQ ID NO: 1744852 - RNA, 19 nt, Artificial Sequence
  Description of Artificial Sequence: Synthetic oligonucleotide
gccagcgcauccgcuggua

SEQ ID NO: 1744853 - RNA, 19 nt, Artificial Sequence
  Description of Artificial Sequence: Synthetic oligonucleotide
cauccgcugguagcagcuu

SEQ ID NO: 1744854 - RNA, 19 nt, Artificial Sequence
  Description of Artificial Sequence: Synthetic oligonucleotide
agauuuauugaauucaaac

SEQ ID NO: 1744855 - RNA, 19 nt, Artificial Sequence
  Description of Artificial Sequence: Synthetic oligonucleotide
aaggaugugacucuguacg

SEQ ID NO: 1744856 - RNA, 19 nt, Artificial Sequence
  Description of Artificial Sequence: Synthetic oligonucleotide
agaaagaaaaccaagggcc

SEQ ID NO: 1744857 - RNA, 19 nt, Artificial Sequence
  Description of Artificial Sequence: Synthetic oligonucleotide
uuuauugaauucaaacugg

SEQ ID NO: 1744858 - RNA, 19 nt, Artificial Sequence
  Description of Artificial Sequence: Synthetic oligonucleotide
uguuaaaacauucacuccc

SEQ ID NO: 1744859 - RNA, 19 nt, Artificial Sequence
  Description of Artificial Sequence: Synthetic oligonucleotide
ucuuuagacaaccuagagg

SEQ ID NO: 1744860 - RNA, 19 nt, Artificial Sequence
  Description of Artificial Sequence: Synthetic oligonucleotide
ucgucaaugggaaaggagg

SEQ ID NO: 1744861 - RNA, 19 nt, Artificial Sequence
  Description of Artificial Sequence: Synthetic oligonucleotide
uugaccauggcaaaguaag

SEQ ID NO: 1744862 - RNA, 19 nt, Artificial Sequence
  Description of Artificial Sequence: Synthetic oligonucleotide
uuauugaauucaaacuggg

SEQ ID NO: 1744863 - RNA, 19 nt, Artificial Sequence
  Description of Artificial Sequence: Synthetic oligonucleotide
agucacauggaccagauca

SEQ ID NO: 1744864 - RNA, 19 nt, Artificial Sequence
  Description of Artificial Sequence: Synthetic oligonucleotide
auugaauucaaacugggaa

SEQ ID NO: 1744865 - RNA, 19 nt, Artificial Sequence
  Description of Artificial Sequence: Synthetic oligonucleotide
agugaggcagaccucaacc

SEQ ID NO: 1744866 - RNA, 19 nt, Artificial Sequence
  Description of Artificial Sequence: Synthetic oligonucleotide
auagcagugaggcagaccu

SEQ ID NO: 1744867 - RNA, 19 nt, Artificial Sequence
  Description of Artificial Sequence: Synthetic oligonucleotide
uuggaaaccuccaaucuag

SEQ ID NO: 1744868 - RNA, 19 nt, Artificial Sequence
  Description of Artificial Sequence: Synthetic oligonucleotide
aagggauuuagggaggugg

SEQ ID NO: 1744869 - RNA, 19 nt, Artificial Sequence
  Description of Artificial Sequence: Synthetic oligonucleotide
aaacaggacucugagaaag

SEQ ID NO: 1744870 - RNA, 19 nt, Artificial Sequence
  Description of Artificial Sequence: Synthetic oligonucleotide
aaagccaccacuggccucc

SEQ ID NO: 1744871 - RNA, 19 nt, Artificial Sequence
  Description of Artificial Sequence: Synthetic oligonucleotide
gauuuagggagguggaaag

SEQ ID NO: 1744872 - RNA, 19 nt, Artificial Sequence
  Description of Artificial Sequence: Synthetic oligonucleotide
aaagaccugguugggaggc

SEQ ID NO: 1744873 - RNA, 19 nt, Artificial Sequence
  Description of Artificial Sequence: Synthetic oligonucleotide
gaggcaauagcagugaggc

SEQ ID NO: 1744874 - RNA, 19 nt, Artificial Sequence
  Description of Artificial Sequence: Synthetic oligonucleotide
uuagacaaccuagaggugc

SEQ ID NO: 1744875 - RNA, 19 nt, Artificial Sequence
  Description of Artificial Sequence: Synthetic oligonucleotide
uuugugggagccuaggcug

SEQ ID NO: 1744876 - RNA, 19 nt, Artificial Sequence
  Description of Artificial Sequence: Synthetic oligonucleotide
auuuugugggagccuaggc

SEQ ID NO: 1744877 - RNA, 19 nt, Artificial Sequence
  Description of Artificial Sequence: Synthetic oligonucleotide
uuccuagucacauggacca

SEQ ID NO: 1744878 - RNA, 19 nt, Artificial Sequence
  Description of Artificial Sequence: Synthetic oligonucleotide
cauucacucccacaaaagg

SEQ ID NO: 1744879 - RNA, 19 nt, Artificial Sequence
  Description of Artificial Sequence: Synthetic oligonucleotide
aacauucacucccacaaaa

SEQ ID NO: 1744880 - RNA, 19 nt, Artificial Sequence
  Description of Artificial Sequence: Synthetic oligonucleotide
uuuugugggagccuaggcu

SEQ ID NO: 1744881 - RNA, 19 nt, Artificial Sequence
  Description of Artificial Sequence: Synthetic oligonucleotide
cuaaguuacacugugcuuc

SEQ ID NO: 1744882 - RNA, 19 nt, Artificial Sequence
  Description of Artificial Sequence: Synthetic oligonucleotide
ugagcccagggacuaaugg

SEQ ID NO: 1744883 - RNA, 19 nt, Artificial Sequence
  Description of Artificial Sequence: Synthetic oligonucleotide
gcuguuaaaacauucacuc

SEQ ID NO: 1744884 - RNA, 19 nt, Artificial Sequence
  Description of Artificial Sequence: Synthetic oligonucleotide
aauuuugugggagccuagg

SEQ ID NO: 1744885 - RNA, 19 nt, Artificial Sequence
  Description of Artificial Sequence: Synthetic oligonucleotide
aagaccccgaacucccgcc

SEQ ID NO: 1744886 - RNA, 19 nt, Artificial Sequence
  Description of Artificial Sequence: Synthetic oligonucleotide
acacugugcuucuuuagac

SEQ ID NO: 1744887 - RNA, 19 nt, Artificial Sequence
  Description of Artificial Sequence: Synthetic oligonucleotide
gaccagaucauguuccaag

SEQ ID NO: 1744888 - RNA, 19 nt, Artificial Sequence
  Description of Artificial Sequence: Synthetic oligonucleotide
aggaaauggagaguugggc

SEQ ID NO: 1744889 - RNA, 19 nt, Artificial Sequence
  Description of Artificial Sequence: Synthetic oligonucleotide
gaaauggagaguugggcac

SEQ ID NO: 1744890 - RNA, 19 nt, Artificial Sequence
  Description of Artificial Sequence: Synthetic oligonucleotide
agauauguccagcagcuca

SEQ ID NO: 1744891 - RNA, 19 nt, Artificial Sequence
  Description of Artificial Sequence: Synthetic oligonucleotide
uauugaauucaaacuggga

SEQ ID NO: 1744892 - RNA, 19 nt, Artificial Sequence
  Description of Artificial Sequence: Synthetic oligonucleotide
gagaguugggcacugggcc

SEQ ID NO: 1744893 - RNA, 19 nt, Artificial Sequence
  Description of Artificial Sequence: Synthetic oligonucleotide
uuuggcuguuaaaacauuc

SEQ ID NO: 1744894 - RNA, 19 nt, Artificial Sequence
  Description of Artificial Sequence: Synthetic oligonucleotide
cuuccuagucacauggacc

SEQ ID NO: 1744895 - RNA, 19 nt, Artificial Sequence
  Description of Artificial Sequence: Synthetic oligonucleotide
gaaaccuccaaucuagaaa

SEQ ID NO: 1744896 - RNA, 19 nt, Artificial Sequence
  Description of Artificial Sequence: Synthetic oligonucleotide
auucacucccacaaaaggg

SEQ ID NO: 1744897 - RNA, 19 nt, Artificial Sequence
  Description of Artificial Sequence: Synthetic oligonucleotide
uaccucuugaccauggcaa

SEQ ID NO: 1744898 - RNA, 19 nt, Artificial Sequence
  Description of Artificial Sequence: Synthetic oligonucleotide
ucaaugggaaaggagguca

SEQ ID NO: 1744899 - RNA, 19 nt, Artificial Sequence
  Description of Artificial Sequence: Synthetic oligonucleotide
acuaauggggaggaaacag

SEQ ID NO: 1744900 - RNA, 19 nt, Artificial Sequence
  Description of Artificial Sequence: Synthetic oligonucleotide
ucuuccuagucacauggac

SEQ ID NO: 1744901 - RNA, 19 nt, Artificial Sequence
  Description of Artificial Sequence: Synthetic oligonucleotide
ggcaaaguaagccauggcc

SEQ ID NO: 1744902 - RNA, 19 nt, Artificial Sequence
  Description of Artificial Sequence: Synthetic oligonucleotide
aaaccaagggccaaagacu

SEQ ID NO: 1744903 - RNA, 19 nt, Artificial Sequence
  Description of Artificial Sequence: Synthetic oligonucleotide
ggaaacaggacucugagaa

SEQ ID NO: 1744904 - RNA, 19 nt, Artificial Sequence
  Description of Artificial Sequence: Synthetic oligonucleotide
agcagcucagcuuuggugu

SEQ ID NO: 1744905 - RNA, 19 nt, Artificial Sequence
  Description of Artificial Sequence: Synthetic oligonucleotide
cacagauauguccagcagc

SEQ ID NO: 1744906 - RNA, 19 nt, Artificial Sequence
  Description of Artificial Sequence: Synthetic oligonucleotide
ggaguggacagauuuauug

SEQ ID NO: 1744907 - RNA, 19 nt, Artificial Sequence
  Description of Artificial Sequence: Synthetic oligonucleotide
uccaagugaaggaugugac

SEQ ID NO: 1744908 - RNA, 19 nt, Artificial Sequence
  Description of Artificial Sequence: Synthetic oligonucleotide
aggaugugacucuguacgc

SEQ ID NO: 1744909 - RNA, 19 nt, Artificial Sequence
  Description of Artificial Sequence: Synthetic oligonucleotide
uuuagggagguggaaagca

SEQ ID NO: 1744910 - RNA, 19 nt, Artificial Sequence
  Description of Artificial Sequence: Synthetic oligonucleotide
uggagaguugggcacuggg

SEQ ID NO: 1744911 - RNA, 19 nt, Artificial Sequence
  Description of Artificial Sequence: Synthetic oligonucleotide
cuguuaaaacauucacucc

SEQ ID NO: 1744912 - RNA, 19 nt, Artificial Sequence
  Description of Artificial Sequence: Synthetic oligonucleotide
uggcuguuaaaacauucac

SEQ ID NO: 1744913 - RNA, 19 nt, Artificial Sequence
  Description of Artificial Sequence: Synthetic oligonucleotide
uacgcggucgucaauggga

SEQ ID NO: 1744914 - RNA, 19 nt, Artificial Sequence
  Description of Artificial Sequence: Synthetic oligonucleotide
aaguaagccauggccuccc

SEQ ID NO: 1744915 - RNA, 19 nt, Artificial Sequence
  Description of Artificial Sequence: Synthetic oligonucleotide
uccaagaccccgaacuccc

SEQ ID NO: 1744916 - RNA, 19 nt, Artificial Sequence
  Description of Artificial Sequence: Synthetic oligonucleotide
aaucuagaaagaaaaccaa

SEQ ID NO: 1744917 - RNA, 19 nt, Artificial Sequence
  Description of Artificial Sequence: Synthetic oligonucleotide
gaccauggcaaaguaagcc

SEQ ID NO: 1744918 - RNA, 19 nt, Artificial Sequence
  Description of Artificial Sequence: Synthetic oligonucleotide
aagugaaggaugugacucu

SEQ ID NO: 1744919 - RNA, 19 nt, Artificial Sequence
  Description of Artificial Sequence: Synthetic oligonucleotide
auuuagggagguggaaagc

SEQ ID NO: 1744920 - RNA, 19 nt, Artificial Sequence
  Description of Artificial Sequence: Synthetic oligonucleotide
auuggaagugccugcuguc

SEQ ID NO: 1744921 - RNA, 19 nt, Artificial Sequence
  Description of Artificial Sequence: Synthetic oligonucleotide
aaccaagggccaaagacug

SEQ ID NO: 1744922 - RNA, 19 nt, Artificial Sequence
  Description of Artificial Sequence: Synthetic oligonucleotide
gguagcaccggacagcucc

SEQ ID NO: 1744923 - RNA, 19 nt, Artificial Sequence
  Description of Artificial Sequence: Synthetic oligonucleotide
aagaggcaauagcagugag

SEQ ID NO: 1744924 - RNA, 19 nt, Artificial Sequence
  Description of Artificial Sequence: Synthetic oligonucleotide
ugcccuaaguuacacugug

SEQ ID NO: 1744925 - RNA, 19 nt, Artificial Sequence
  Description of Artificial Sequence: Synthetic oligonucleotide
uuacacugugcuucuuuag

SEQ ID NO: 1744926 - RNA, 19 nt, Artificial Sequence
  Description of Artificial Sequence: Synthetic oligonucleotide
ggggcugcuaauuuugugg

SEQ ID NO: 1744927 - RNA, 19 nt, Artificial Sequence
  Description of Artificial Sequence: Synthetic oligonucleotide
agccucuaagcccucagag

SEQ ID NO: 1744928 - RNA, 19 nt, Artificial Sequence
  Description of Artificial Sequence: Synthetic oligonucleotide
aaagaggcaauagcaguga

SEQ ID NO: 1744929 - RNA, 19 nt, Artificial Sequence
  Description of Artificial Sequence: Synthetic oligonucleotide
uaauuuugugggagccuag

SEQ ID NO: 1744930 - RNA, 19 nt, Artificial Sequence
  Description of Artificial Sequence: Synthetic oligonucleotide
acaaccuagaggugcagga

SEQ ID NO: 1744931 - RNA, 19 nt, Artificial Sequence
  Description of Artificial Sequence: Synthetic oligonucleotide
gaauucaaacugggaaggg

SEQ ID NO: 1744932 - RNA, 19 nt, Artificial Sequence
  Description of Artificial Sequence: Synthetic oligonucleotide
uuccaagugaaggauguga

SEQ ID NO: 1744933 - RNA, 19 nt, Artificial Sequence
  Description of Artificial Sequence: Synthetic oligonucleotide
ccaaucuagaaagaaaacc

SEQ ID NO: 1744934 - RNA, 19 nt, Artificial Sequence
  Description of Artificial Sequence: Synthetic oligonucleotide
gaguggacagauuuauuga

SEQ ID NO: 1744935 - RNA, 19 nt, Artificial Sequence
  Description of Artificial Sequence: Synthetic oligonucleotide
aguggacagauuuauugaa

SEQ ID NO: 1744936 - RNA, 19 nt, Artificial Sequence
  Description of Artificial Sequence: Synthetic oligonucleotide
auggcuggacucugggccc

SEQ ID NO: 1744937 - RNA, 19 nt, Artificial Sequence
  Description of Artificial Sequence: Synthetic oligonucleotide
ugcuaauuuugugggagcc

SEQ ID NO: 1744938 - RNA, 19 nt, Artificial Sequence
  Description of Artificial Sequence: Synthetic oligonucleotide
uagacaaccuagaggugca

SEQ ID NO: 1744939 - RNA, 19 nt, Artificial Sequence
  Description of Artificial Sequence: Synthetic oligonucleotide
gaaggaugugacucuguac

SEQ ID NO: 1744940 - RNA, 19 nt, Artificial Sequence
  Description of Artificial Sequence: Synthetic oligonucleotide
uguacgcggucgucaaugg

SEQ ID NO: 1744941 - RNA, 19 nt, Artificial Sequence
  Description of Artificial Sequence: Synthetic oligonucleotide
caggacucugagaaagagg

SEQ ID NO: 1744942 - RNA, 19 nt, Artificial Sequence
  Description of Artificial Sequence: Synthetic oligonucleotide
ugcuucuuuagacaaccua

SEQ ID NO: 1744943 - RNA, 19 nt, Artificial Sequence
  Description of Artificial Sequence: Synthetic oligonucleotide
aggucagguaccucuugac

SEQ ID NO: 1744944 - RNA, 19 nt, Artificial Sequence
  Description of Artificial Sequence: Synthetic oligonucleotide
uguggucuagcccacugau

SEQ ID NO: 1744945 - RNA, 19 nt, Artificial Sequence
  Description of Artificial Sequence: Synthetic oligonucleotide
ucuaagcccucagaggagc

SEQ ID NO: 1744946 - RNA, 19 nt, Artificial Sequence
  Description of Artificial Sequence: Synthetic oligonucleotide
ugaccauggcaaaguaagc

SEQ ID NO: 1744947 - RNA, 19 nt, Artificial Sequence
  Description of Artificial Sequence: Synthetic oligonucleotide
cuuccuggacacuguaacc

SEQ ID NO: 1744948 - RNA, 19 nt, Artificial Sequence
  Description of Artificial Sequence: Synthetic oligonucleotide
uggccaagagcuuccagga

SEQ ID NO: 1744949 - RNA, 19 nt, Artificial Sequence
  Description of Artificial Sequence: Synthetic oligonucleotide
ucacuccccaagaaggccu

SEQ ID NO: 1744950 - RNA, 19 nt, Artificial Sequence
  Description of Artificial Sequence: Synthetic oligonucleotide
caaagacugggccagagaa

SEQ ID NO: 1744951 - RNA, 19 nt, Artificial Sequence
  Description of Artificial Sequence: Synthetic oligonucleotide
auugcugaaggcccuggga

SEQ ID NO: 1744952 - RNA, 19 nt, Artificial Sequence
  Description of Artificial Sequence: Synthetic oligonucleotide
gacucugagaaagaggcaa

SEQ ID NO: 1744953 - RNA, 19 nt, Artificial Sequence
  Description of Artificial Sequence: Synthetic oligonucleotide
ugugguagcaccggacagc

SEQ ID NO: 1744954 - RNA, 19 nt, Artificial Sequence
  Description of Artificial Sequence: Synthetic oligonucleotide
ggaaauggagaguugggca

SEQ ID NO: 1744955 - RNA, 19 nt, Artificial Sequence
  Description of Artificial Sequence: Synthetic oligonucleotide
aaauggagaguugggcacu

SEQ ID NO: 1744956 - RNA, 19 nt, Artificial Sequence
  Description of Artificial Sequence: Synthetic oligonucleotide
uauguccagcagcucagcu

SEQ ID NO: 1744957 - RNA, 19 nt, Artificial Sequence
  Description of Artificial Sequence: Synthetic oligonucleotide
cagaccucaaccccugggc

SEQ ID NO: 1744958 - RNA, 19 nt, Artificial Sequence
  Description of Artificial Sequence: Synthetic oligonucleotide
agaggcaauagcagugagg

SEQ ID NO: 1744959 - RNA, 19 nt, Artificial Sequence
  Description of Artificial Sequence: Synthetic oligonucleotide
cauggaccagaucauguuc

SEQ ID NO: 1744960 - RNA, 19 nt, Artificial Sequence
  Description of Artificial Sequence: Synthetic oligonucleotide
acaggacucugagaaagag

SEQ ID NO: 1744961 - RNA, 19 nt, Artificial Sequence
  Description of Artificial Sequence: Synthetic oligonucleotide
gugaggcagaccucaaccc

SEQ ID NO: 1744962 - RNA, 19 nt, Artificial Sequence
  Description of Artificial Sequence: Synthetic oligonucleotide
ucucuggccaagagcuucc

SEQ ID NO: 1744963 - RNA, 19 nt, Artificial Sequence
  Description of Artificial Sequence: Synthetic oligonucleotide
uguccaagaccccgaacuc

SEQ ID NO: 1744964 - RNA, 19 nt, Artificial Sequence
  Description of Artificial Sequence: Synthetic oligonucleotide
uggagcccuuccagaaugg

SEQ ID NO: 1744965 - RNA, 19 nt, Artificial Sequence
  Description of Artificial Sequence: Synthetic oligonucleotide
cugcuaauuuugugggagc

SEQ ID NO: 1744966 - RNA, 19 nt, Artificial Sequence
  Description of Artificial Sequence: Synthetic oligonucleotide
gauuggaagugccugcugu

SEQ ID NO: 1744967 - RNA, 19 nt, Artificial Sequence
  Description of Artificial Sequence: Synthetic oligonucleotide
caaugggaaaggaggucag

SEQ ID NO: 1744968 - RNA, 19 nt, Artificial Sequence
  Description of Artificial Sequence: Synthetic oligonucleotide
gggcugcuaauuuuguggg

SEQ ID NO: 1744969 - RNA, 19 nt, Artificial Sequence
  Description of Artificial Sequence: Synthetic oligonucleotide
gcugcuguggucuagccca

SEQ ID NO: 1744970 - RNA, 19 nt, Artificial Sequence
  Description of Artificial Sequence: Synthetic oligonucleotide
ccugcccuaaguuacacug

SEQ ID NO: 1744971 - RNA, 19 nt, Artificial Sequence
  Description of Artificial Sequence: Synthetic oligonucleotide
ugcccaucugggcuggagc

SEQ ID NO: 1744972 - RNA, 19 nt, Artificial Sequence
  Description of Artificial Sequence: Synthetic oligonucleotide
ugauggcauggugugguag

SEQ ID NO: 1744973 - RNA, 19 nt, Artificial Sequence
  Description of Artificial Sequence: Synthetic oligonucleotide
ucuugaccauggcaaagua

SEQ ID NO: 1744974 - RNA, 19 nt, Artificial Sequence
  Description of Artificial Sequence: Synthetic oligonucleotide
agggccaaagacugggcca

SEQ ID NO: 1744975 - RNA, 19 nt, Artificial Sequence
  Description of Artificial Sequence: Synthetic oligonucleotide
ccaaagaccugguugggag

SEQ ID NO: 1744976 - RNA, 19 nt, Artificial Sequence
  Description of Artificial Sequence: Synthetic oligonucleotide
aguaagccauggccucccc

SEQ ID NO: 1744977 - RNA, 19 nt, Artificial Sequence
  Description of Artificial Sequence: Synthetic oligonucleotide
gcugcuaauuuugugggag

SEQ ID NO: 1744978 - RNA, 19 nt, Artificial Sequence
  Description of Artificial Sequence: Synthetic oligonucleotide
uguccuggcaaagcauugc

SEQ ID NO: 1744979 - RNA, 19 nt, Artificial Sequence
  Description of Artificial Sequence: Synthetic oligonucleotide
ugggagccuaggcuggacc

SEQ ID NO: 1744980 - RNA, 19 nt, Artificial Sequence
  Description of Artificial Sequence: Synthetic oligonucleotide
gucgucaaugggaaaggag

SEQ ID NO: 1744981 - RNA, 19 nt, Artificial Sequence
  Description of Artificial Sequence: Synthetic oligonucleotide
guguccaagaccccgaacu

SEQ ID NO: 1744982 - RNA, 19 nt, Artificial Sequence
  Description of Artificial Sequence: Synthetic oligonucleotide
ucacauggaccagaucaug

SEQ ID NO: 1744983 - RNA, 19 nt, Artificial Sequence
  Description of Artificial Sequence: Synthetic oligonucleotide
accuagaggugcaggaggg

SEQ ID NO: 1744984 - RNA, 19 nt, Artificial Sequence
  Description of Artificial Sequence: Synthetic oligonucleotide
gugacucuguacgcggucg

SEQ ID NO: 1744985 - RNA, 19 nt, Artificial Sequence
  Description of Artificial Sequence: Synthetic oligonucleotide
aggccucuuggaaaccucc

SEQ ID NO: 1744986 - RNA, 19 nt, Artificial Sequence
  Description of Artificial Sequence: Synthetic oligonucleotide
acauggaccagaucauguu

SEQ ID NO: 1744987 - RNA, 19 nt, Artificial Sequence
  Description of Artificial Sequence: Synthetic oligonucleotide
uucaggagccugcccuaag

SEQ ID NO: 1744988 - RNA, 19 nt, Artificial Sequence
  Description of Artificial Sequence: Synthetic oligonucleotide
guaccucuugaccauggca

SEQ ID NO: 1744989 - RNA, 19 nt, Artificial Sequence
  Description of Artificial Sequence: Synthetic oligonucleotide
uggaccagaucauguucca

SEQ ID NO: 1744990 - RNA, 19 nt, Artificial Sequence
  Description of Artificial Sequence: Synthetic oligonucleotide
cucuaagcccucagaggag

SEQ ID NO: 1744991 - RNA, 19 nt, Artificial Sequence
  Description of Artificial Sequence: Synthetic oligonucleotide
agauuggaagugccugcug

SEQ ID NO: 1744992 - RNA, 19 nt, Artificial Sequence
  Description of Artificial Sequence: Synthetic oligonucleotide
gaggucagguaccucuuga

SEQ ID NO: 1744993 - RNA, 19 nt, Artificial Sequence
  Description of Artificial Sequence: Synthetic oligonucleotide
cuggaccuuccucuggagc

SEQ ID NO: 1744994 - RNA, 19 nt, Artificial Sequence
  Description of Artificial Sequence: Synthetic oligonucleotide
gaaacaggacucugagaaa

SEQ ID NO: 1744995 - RNA, 19 nt, Artificial Sequence
  Description of Artificial Sequence: Synthetic oligonucleotide
aaggccucuuggaaaccuc

SEQ ID NO: 1744996 - RNA, 19 nt, Artificial Sequence
  Description of Artificial Sequence: Synthetic oligonucleotide
agcugcccggaguucuccc

SEQ ID NO: 1744997 - RNA, 19 nt, Artificial Sequence
  Description of Artificial Sequence: Synthetic oligonucleotide
ggaugugacucuguacgcg

SEQ ID NO: 1744998 - RNA, 19 nt, Artificial Sequence
  Description of Artificial Sequence: Synthetic oligonucleotide
ugguucuuccuagucacau

SEQ ID NO: 1744999 - RNA, 19 nt, Artificial Sequence
  Description of Artificial Sequence: Synthetic oligonucleotide
ggaagggagcaccuggaug

SEQ ID NO: 1745000 - RNA, 19 nt, Artificial Sequence
  Description of Artificial Sequence: Synthetic oligonucleotide
cuuggaaaccuccaaucua

SEQ ID NO: 1745001 - RNA, 19 nt, Artificial Sequence
  Description of Artificial Sequence: Synthetic oligonucleotide
gccucuaagcccucagagg

SEQ ID NO: 1745002 - RNA, 19 nt, Artificial Sequence
  Description of Artificial Sequence: Synthetic oligonucleotide
cuguacgcggucgucaaug

SEQ ID NO: 1745003 - RNA, 19 nt, Artificial Sequence
  Description of Artificial Sequence: Synthetic oligonucleotide
caagaccccgaacucccgc

SEQ ID NO: 1745004 - RNA, 19 nt, Artificial Sequence
  Description of Artificial Sequence: Synthetic oligonucleotide
caaccuagaggugcaggag

SEQ ID NO: 1745005 - RNA, 19 nt, Artificial Sequence
  Description of Artificial Sequence: Synthetic oligonucleotide
guacgcggucgucaauggg

SEQ ID NO: 1745006 - RNA, 19 nt, Artificial Sequence
  Description of Artificial Sequence: Synthetic oligonucleotide
acucccacaaaaggggagu

SEQ ID NO: 1745007 - RNA, 19 nt, Artificial Sequence
  Description of Artificial Sequence: Synthetic oligonucleotide
cuguccuggcaaagcauug

SEQ ID NO: 1745008 - RNA, 19 nt, Artificial Sequence
  Description of Artificial Sequence: Synthetic oligonucleotide
gugcccugagcccagggac

SEQ ID NO: 1745009 - RNA, 19 nt, Artificial Sequence
  Description of Artificial Sequence: Synthetic oligonucleotide
ugggacuucuccagcuguc

SEQ ID NO: 1745010 - RNA, 19 nt, Artificial Sequence
  Description of Artificial Sequence: Synthetic oligonucleotide
aggacccgucccuggcugc

SEQ ID NO: 1745011 - RNA, 19 nt, Artificial Sequence
  Description of Artificial Sequence: Synthetic oligonucleotide
cuuugguguccaagacccc

SEQ ID NO: 1745012 - RNA, 19 nt, Artificial Sequence
  Description of Artificial Sequence: Synthetic oligonucleotide
gacuaauggggaggaaaca

SEQ ID NO: 1745013 - RNA, 19 nt, Artificial Sequence
  Description of Artificial Sequence: Synthetic oligonucleotide
cugugcuucuuuagacaac

SEQ ID NO: 1745014 - RNA, 19 nt, Artificial Sequence
  Description of Artificial Sequence: Synthetic oligonucleotide
ggacuaauggggaggaaac

SEQ ID NO: 1745015 - RNA, 19 nt, Artificial Sequence
  Description of Artificial Sequence: Synthetic oligonucleotide
cacaaggccugcagcugcc

SEQ ID NO: 1745016 - RNA, 19 nt, Artificial Sequence
  Description of Artificial Sequence: Synthetic oligonucleotide
ccagauuggaagugccugc

SEQ ID NO: 1745017 - RNA, 19 nt, Artificial Sequence
  Description of Artificial Sequence: Synthetic oligonucleotide
ugggccagagaaagggauu

SEQ ID NO: 1745018 - RNA, 19 nt, Artificial Sequence
  Description of Artificial Sequence: Synthetic oligonucleotide
aggagccugcccuaaguua

SEQ ID NO: 1745019 - RNA, 19 nt, Artificial Sequence
  Description of Artificial Sequence: Synthetic oligonucleotide
ggaccugcagaggaugagg

SEQ ID NO: 1745020 - RNA, 19 nt, Artificial Sequence
  Description of Artificial Sequence: Synthetic oligonucleotide
gcagaccucaaccccuggg

SEQ ID NO: 1745021 - RNA, 19 nt, Artificial Sequence
  Description of Artificial Sequence: Synthetic oligonucleotide
ggagcacagauauguccag

SEQ ID NO: 1745022 - RNA, 19 nt, Artificial Sequence
  Description of Artificial Sequence: Synthetic oligonucleotide
uggggaccugcagaggaug

SEQ ID NO: 1745023 - RNA, 19 nt, Artificial Sequence
  Description of Artificial Sequence: Synthetic oligonucleotide
ggugugguagcaccggaca

SEQ ID NO: 1745024 - RNA, 19 nt, Artificial Sequence
  Description of Artificial Sequence: Synthetic oligonucleotide
ggagccugcccuaaguuac

SEQ ID NO: 1745025 - RNA, 19 nt, Artificial Sequence
  Description of Artificial Sequence: Synthetic oligonucleotide
gcacagauauguccagcag

SEQ ID NO: 1745026 - RNA, 19 nt, Artificial Sequence
  Description of Artificial Sequence: Synthetic oligonucleotide
gaugaggcacaaggccugc

SEQ ID NO: 1745027 - RNA, 19 nt, Artificial Sequence
  Description of Artificial Sequence: Synthetic oligonucleotide
acucuguacgcggucguca

SEQ ID NO: 1745028 - RNA, 19 nt, Artificial Sequence
  Description of Artificial Sequence: Synthetic oligonucleotide
agguaccucuugaccaugg

SEQ ID NO: 1745029 - RNA, 19 nt, Artificial Sequence
  Description of Artificial Sequence: Synthetic oligonucleotide
gagcuuccaggacccgucc

SEQ ID NO: 1745030 - RNA, 19 nt, Artificial Sequence
  Description of Artificial Sequence: Synthetic oligonucleotide
caccggacagcuccccucc

SEQ ID NO: 1745031 - RNA, 19 nt, Artificial Sequence
  Description of Artificial Sequence: Synthetic oligonucleotide
gccagagaaagggauuuag

SEQ ID NO: 1745032 - RNA, 19 nt, Artificial Sequence
  Description of Artificial Sequence: Synthetic oligonucleotide
ucucccugccuugggcagg

SEQ ID NO: 1745033 - RNA, 19 nt, Artificial Sequence
  Description of Artificial Sequence: Synthetic oligonucleotide
agaccugguugggaggcag

SEQ ID NO: 1745034 - RNA, 19 nt, Artificial Sequence
  Description of Artificial Sequence: Synthetic oligonucleotide
gucuagcccacugauggca

SEQ ID NO: 1745035 - RNA, 19 nt, Artificial Sequence
  Description of Artificial Sequence: Synthetic oligonucleotide
gucaaugggaaaggagguc

SEQ ID NO: 1745036 - RNA, 19 nt, Artificial Sequence
  Description of Artificial Sequence: Synthetic oligonucleotide
accucuugaccauggcaaa

SEQ ID NO: 1745037 - RNA, 19 nt, Artificial Sequence
  Description of Artificial Sequence: Synthetic oligonucleotide
agaggcacucucuggccaa

SEQ ID NO: 1745038 - RNA, 19 nt, Artificial Sequence
  Description of Artificial Sequence: Synthetic oligonucleotide
agggauuuagggaggugga

SEQ ID NO: 1745039 - RNA, 19 nt, Artificial Sequence
  Description of Artificial Sequence: Synthetic oligonucleotide
accggacagcuccccuccc

SEQ ID NO: 1745040 - RNA, 19 nt, Artificial Sequence
  Description of Artificial Sequence: Synthetic oligonucleotide
uccuagucacauggaccag

SEQ ID NO: 1745041 - RNA, 19 nt, Artificial Sequence
  Description of Artificial Sequence: Synthetic oligonucleotide
ugguguccaagaccccgaa

SEQ ID NO: 1745042 - RNA, 19 nt, Artificial Sequence
  Description of Artificial Sequence: Synthetic oligonucleotide
ggaaaccuccaaucuagaa

SEQ ID NO: 1745043 - RNA, 19 nt, Artificial Sequence
  Description of Artificial Sequence: Synthetic oligonucleotide
cuccccaccuuccaggaaa

SEQ ID NO: 1745044 - RNA, 19 nt, Artificial Sequence
  Description of Artificial Sequence: Synthetic oligonucleotide
aaccuccaaucuagaaaga

SEQ ID NO: 1745045 - RNA, 19 nt, Artificial Sequence
  Description of Artificial Sequence: Synthetic oligonucleotide
caccaaagaccugguuggg

SEQ ID NO: 1745046 - RNA, 19 nt, Artificial Sequence
  Description of Artificial Sequence: Synthetic oligonucleotide
gguaccucuugaccauggc

SEQ ID NO: 1745047 - RNA, 19 nt, Artificial Sequence
  Description of Artificial Sequence: Synthetic oligonucleotide
gaccugguugggaggcagg

SEQ ID NO: 1745048 - RNA, 19 nt, Artificial Sequence
  Description of Artificial Sequence: Synthetic oligonucleotide
ggauuuagggagguggaaa

SEQ ID NO: 1745049 - RNA, 19 nt, Artificial Sequence
  Description of Artificial Sequence: Synthetic oligonucleotide
gcaaagcauugcugaaggc

SEQ ID NO: 1745050 - RNA, 19 nt, Artificial Sequence
  Description of Artificial Sequence: Synthetic oligonucleotide
ggcacucucuggccaagag

SEQ ID NO: 1745051 - RNA, 19 nt, Artificial Sequence
  Description of Artificial Sequence: Synthetic oligonucleotide
ucuguacgcggucgucaau

SEQ ID NO: 1745052 - RNA, 19 nt, Artificial Sequence
  Description of Artificial Sequence: Synthetic oligonucleotide
accuggauggcuggacucu

SEQ ID NO: 1745053 - RNA, 19 nt, Artificial Sequence
  Description of Artificial Sequence: Synthetic oligonucleotide
gaaagggauuuagggaggu

SEQ ID NO: 1745054 - RNA, 19 nt, Artificial Sequence
  Description of Artificial Sequence: Synthetic oligonucleotide
ugggccuguccuggcaaag

SEQ ID NO: 1745055 - RNA, 19 nt, Artificial Sequence
  Description of Artificial Sequence: Synthetic oligonucleotide
accucaaccccugggccug

SEQ ID NO: 1745056 - RNA, 19 nt, Artificial Sequence
  Description of Artificial Sequence: Synthetic oligonucleotide
ggcaugguucuuccuaguc

SEQ ID NO: 1745057 - RNA, 19 nt, Artificial Sequence
  Description of Artificial Sequence: Synthetic oligonucleotide
gaccccgaacucccgccug

SEQ ID NO: 1745058 - RNA, 19 nt, Artificial Sequence
  Description of Artificial Sequence: Synthetic oligonucleotide
aagaccugguugggaggca

SEQ ID NO: 1745059 - RNA, 19 nt, Artificial Sequence
  Description of Artificial Sequence: Synthetic oligonucleotide
gcuguggucuagcccacug

SEQ ID NO: 1745060 - RNA, 19 nt, Artificial Sequence
  Description of Artificial Sequence: Synthetic oligonucleotide
uccccaccuuccaggaaau

SEQ ID NO: 1745061 - RNA, 19 nt, Artificial Sequence
  Description of Artificial Sequence: Synthetic oligonucleotide
cucccacaaaaggggagug

SEQ ID NO: 1745062 - RNA, 19 nt, Artificial Sequence
  Description of Artificial Sequence: Synthetic oligonucleotide
uagcagugaggcagaccuc

SEQ ID NO: 1745063 - RNA, 19 nt, Artificial Sequence
  Description of Artificial Sequence: Synthetic oligonucleotide
agcaccggacagcuccccu

SEQ ID NO: 1745064 - RNA, 19 nt, Artificial Sequence
  Description of Artificial Sequence: Synthetic oligonucleotide
acucugagaaagaggcaau

SEQ ID NO: 1745065 - RNA, 19 nt, Artificial Sequence
  Description of Artificial Sequence: Synthetic oligonucleotide
gaccucaaccccugggccu

SEQ ID NO: 1745066 - RNA, 19 nt, Artificial Sequence
  Description of Artificial Sequence: Synthetic oligonucleotide
guggucuagcccacugaug

SEQ ID NO: 1745067 - RNA, 19 nt, Artificial Sequence
  Description of Artificial Sequence: Synthetic oligonucleotide
gggacuaauggggaggaaa

SEQ ID NO: 1745068 - RNA, 19 nt, Artificial Sequence
  Description of Artificial Sequence: Synthetic oligonucleotide
cccagauuggaagugccug

SEQ ID NO: 1745069 - RNA, 19 nt, Artificial Sequence
  Description of Artificial Sequence: Synthetic oligonucleotide
gagccuaggcuggaccuuc

SEQ ID NO: 1745070 - RNA, 19 nt, Artificial Sequence
  Description of Artificial Sequence: Synthetic oligonucleotide
ccuccaaucuagaaagaaa

SEQ ID NO: 1745071 - RNA, 19 nt, Artificial Sequence
  Description of Artificial Sequence: Synthetic oligonucleotide
guagcaccggacagcuccc

SEQ ID NO: 1745072 - RNA, 19 nt, Artificial Sequence
  Description of Artificial Sequence: Synthetic oligonucleotide
cugcccggaguucucccug

SEQ ID NO: 1745073 - RNA, 19 nt, Artificial Sequence
  Description of Artificial Sequence: Synthetic oligonucleotide
ccccaaagccaccacuggc

SEQ ID NO: 1745074 - RNA, 19 nt, Artificial Sequence
  Description of Artificial Sequence: Synthetic oligonucleotide
cuagucacauggaccagau

SEQ ID NO: 1745075 - RNA, 19 nt, Artificial Sequence
  Description of Artificial Sequence: Synthetic oligonucleotide
gaggcagaccucaaccccu

SEQ ID NO: 1745076 - RNA, 19 nt, Artificial Sequence
  Description of Artificial Sequence: Synthetic oligonucleotide
cucuguacgcggucgucaa

SEQ ID NO: 1745077 - RNA, 19 nt, Artificial Sequence
  Description of Artificial Sequence: Synthetic oligonucleotide
guccuggcaaagcauugcu

SEQ ID NO: 1745078 - RNA, 19 nt, Artificial Sequence
  Description of Artificial Sequence: Synthetic oligonucleotide
uaagcccucagaggagcuu

SEQ ID NO: 1745079 - RNA, 19 nt, Artificial Sequence
  Description of Artificial Sequence: Synthetic oligonucleotide
gacucuguacgcggucguc

SEQ ID NO: 1745080 - RNA, 19 nt, Artificial Sequence
  Description of Artificial Sequence: Synthetic oligonucleotide
caccacuggccuccacuac

SEQ ID NO: 1745081 - RNA, 19 nt, Artificial Sequence
  Description of Artificial Sequence: Synthetic oligonucleotide
acuacucccugugcccagu

SEQ ID NO: 1745082 - RNA, 19 nt, Artificial Sequence
  Description of Artificial Sequence: Synthetic oligonucleotide
augugacucuguacgcggu

SEQ ID NO: 1745083 - RNA, 19 nt, Artificial Sequence
  Description of Artificial Sequence: Synthetic oligonucleotide
cgaacucccgccugccugg

SEQ ID NO: 1745084 - RNA, 19 nt, Artificial Sequence
  Description of Artificial Sequence: Synthetic oligonucleotide
cagauauguccagcagcuc

SEQ ID NO: 1745085 - RNA, 19 nt, Artificial Sequence
  Description of Artificial Sequence: Synthetic oligonucleotide
cucuugaccauggcaaagu

SEQ ID NO: 1745086 - RNA, 19 nt, Artificial Sequence
  Description of Artificial Sequence: Synthetic oligonucleotide
gggaggaaacaggacucug

SEQ ID NO: 1745087 - RNA, 19 nt, Artificial Sequence
  Description of Artificial Sequence: Synthetic oligonucleotide
cagggaccucaucaccauc

SEQ ID NO: 1745088 - RNA, 19 nt, Artificial Sequence
  Description of Artificial Sequence: Synthetic oligonucleotide
gguguccaagaccccgaac

SEQ ID NO: 1745089 - RNA, 19 nt, Artificial Sequence
  Description of Artificial Sequence: Synthetic oligonucleotide
gccaaagacugggccagag

SEQ ID NO: 1745090 - RNA, 19 nt, Artificial Sequence
  Description of Artificial Sequence: Synthetic oligonucleotide
cccuaaguuacacugugcu

SEQ ID NO: 1745091 - RNA, 19 nt, Artificial Sequence
  Description of Artificial Sequence: Synthetic oligonucleotide
guggacagauuuauugaau

SEQ ID NO: 1745092 - RNA, 19 nt, Artificial Sequence
  Description of Artificial Sequence: Synthetic oligonucleotide
cugggccagagaaagggau

SEQ ID NO: 1745093 - RNA, 19 nt, Artificial Sequence
  Description of Artificial Sequence: Synthetic oligonucleotide
ggaccuuccucuggagccc

SEQ ID NO: 1745094 - RNA, 19 nt, Artificial Sequence
  Description of Artificial Sequence: Synthetic oligonucleotide
gugguagcaccggacagcu

SEQ ID NO: 1745095 - RNA, 19 nt, Artificial Sequence
  Description of Artificial Sequence: Synthetic oligonucleotide
uagcaccggacagcucccc

SEQ ID NO: 1745096 - RNA, 19 nt, Artificial Sequence
  Description of Artificial Sequence: Synthetic oligonucleotide
ccgaacucccgccugccug

SEQ ID NO: 1745097 - RNA, 19 nt, Artificial Sequence
  Description of Artificial Sequence: Synthetic oligonucleotide
ggcugcuaauuuuguggga

SEQ ID NO: 1745098 - RNA, 19 nt, Artificial Sequence
  Description of Artificial Sequence: Synthetic oligonucleotide
aggcagaccucaaccccug

SEQ ID NO: 1745099 - RNA, 19 nt, Artificial Sequence
  Description of Artificial Sequence: Synthetic oligonucleotide
ccucuugaccauggcaaag

SEQ ID NO: 1745100 - RNA, 19 nt, Artificial Sequence
  Description of Artificial Sequence: Synthetic oligonucleotide
ggcagaccucaaccccugg

SEQ ID NO: 1745101 - RNA, 19 nt, Artificial Sequence
  Description of Artificial Sequence: Synthetic oligonucleotide
ccaagaccccgaacucccg

SEQ ID NO: 1745102 - RNA, 19 nt, Artificial Sequence
  Description of Artificial Sequence: Synthetic oligonucleotide
ggagcccuuccagaauggc

SEQ ID NO: 1745103 - RNA, 19 nt, Artificial Sequence
  Description of Artificial Sequence: Synthetic oligonucleotide
cccacaaaaggggagugga

SEQ ID NO: 1745104 - RNA, 19 nt, Artificial Sequence
  Description of Artificial Sequence: Synthetic oligonucleotide
gcaauagcagugaggcaga

SEQ ID NO: 1745105 - RNA, 19 nt, Artificial Sequence
  Description of Artificial Sequence: Synthetic oligonucleotide
ccgagucagaguccucccc

SEQ ID NO: 1745106 - RNA, 19 nt, Artificial Sequence
  Description of Artificial Sequence: Synthetic oligonucleotide
cugggcuggagcacagaua

SEQ ID NO: 1745107 - RNA, 19 nt, Artificial Sequence
  Description of Artificial Sequence: Synthetic oligonucleotide
ccuaggcuggaccuuccuc

SEQ ID NO: 1745108 - RNA, 19 nt, Artificial Sequence
  Description of Artificial Sequence: Synthetic oligonucleotide
gagccugcccuaaguuaca

SEQ ID NO: 1745109 - RNA, 19 nt, Artificial Sequence
  Description of Artificial Sequence: Synthetic oligonucleotide
acgcggucgucaaugggaa

SEQ ID NO: 1745110 - RNA, 19 nt, Artificial Sequence
  Description of Artificial Sequence: Synthetic oligonucleotide
ugguagcaccggacagcuc

SEQ ID NO: 1745111 - RNA, 19 nt, Artificial Sequence
  Description of Artificial Sequence: Synthetic oligonucleotide
ccuagaggugcaggagggg

SEQ ID NO: 1745112 - RNA, 19 nt, Artificial Sequence
  Description of Artificial Sequence: Synthetic oligonucleotide
cugggacuucuccagcugu

SEQ ID NO: 1745113 - RNA, 19 nt, Artificial Sequence
  Description of Artificial Sequence: Synthetic oligonucleotide
gaacucccgccugccuggc

SEQ ID NO: 1745114 - RNA, 19 nt, Artificial Sequence
  Description of Artificial Sequence: Synthetic oligonucleotide
cugcccuaaguuacacugu

SEQ ID NO: 1745115 - RNA, 19 nt, Artificial Sequence
  Description of Artificial Sequence: Synthetic oligonucleotide
gcccuaaguuacacugugc

SEQ ID NO: 1745116 - RNA, 19 nt, Artificial Sequence
  Description of Artificial Sequence: Synthetic oligonucleotide
ccacuggccuccacuacuc

SEQ ID NO: 1745117 - RNA, 19 nt, Artificial Sequence
  Description of Artificial Sequence: Synthetic oligonucleotide
ccuccccaaagcugggcac

SEQ ID NO: 1745118 - RNA, 19 nt, Artificial Sequence
  Description of Artificial Sequence: Synthetic oligonucleotide
cuaagcccucagaggagcu

SEQ ID NO: 1745119 - RNA, 19 nt, Artificial Sequence
  Description of Artificial Sequence: Synthetic oligonucleotide
cagauuggaagugccugcu

SEQ ID NO: 1745120 - RNA, 19 nt, Artificial Sequence
  Description of Artificial Sequence: Synthetic oligonucleotide
cucccgccugccuggcaug

SEQ ID NO: 1745121 - RNA, 19 nt, Artificial Sequence
  Description of Artificial Sequence: Synthetic oligonucleotide
ggucgucaaugggaaagga

SEQ ID NO: 1745122 - RNA, 19 nt, Artificial Sequence
  Description of Artificial Sequence: Synthetic oligonucleotide
ggaagugccugcugucacu

SEQ ID NO: 1745123 - RNA, 19 nt, Artificial Sequence
  Description of Artificial Sequence: Synthetic oligonucleotide
gguucaggagccugcccua

SEQ ID NO: 1745124 - RNA, 19 nt, Artificial Sequence
  Description of Artificial Sequence: Synthetic oligonucleotide
ggcaggugcugcccaucug

SEQ ID NO: 1745125 - RNA, 19 nt, Artificial Sequence
  Description of Artificial Sequence: Synthetic oligonucleotide
gcuaauuuugugggagccu

SEQ ID NO: 1745126 - RNA, 19 nt, Artificial Sequence
  Description of Artificial Sequence: Synthetic oligonucleotide
gcaccggacagcuccccuc

SEQ ID NO: 1745127 - RNA, 19 nt, Artificial Sequence
  Description of Artificial Sequence: Synthetic oligonucleotide
ccaaagacugggccagaga

SEQ ID NO: 1745128 - RNA, 19 nt, Artificial Sequence
  Description of Artificial Sequence: Synthetic oligonucleotide
cuguccgagucagaguccu

SEQ ID NO: 1745129 - RNA, 19 nt, Artificial Sequence
  Description of Artificial Sequence: Synthetic oligonucleotide
gggagccuaggcuggaccu

SEQ ID NO: 1745130 - RNA, 19 nt, Artificial Sequence
  Description of Artificial Sequence: Synthetic oligonucleotide
guucaggagccugcccuaa

SEQ ID NO: 1745131 - RNA, 19 nt, Artificial Sequence
  Description of Artificial Sequence: Synthetic oligonucleotide
gggauuuagggagguggaa

SEQ ID NO: 1745132 - RNA, 19 nt, Artificial Sequence
  Description of Artificial Sequence: Synthetic oligonucleotide
aggcacucucuggccaaga

SEQ ID NO: 1745133 - RNA, 19 nt, Artificial Sequence
  Description of Artificial Sequence: Synthetic oligonucleotide
acuccccaagaaggccucu

SEQ ID NO: 1745134 - RNA, 19 nt, Artificial Sequence
  Description of Artificial Sequence: Synthetic oligonucleotide
cggucgucaaugggaaagg

SEQ ID NO: 1745135 - RNA, 19 nt, Artificial Sequence
  Description of Artificial Sequence: Synthetic oligonucleotide
ccaagugaaggaugugacu

SEQ ID NO: 1745136 - RNA, 19 nt, Artificial Sequence
  Description of Artificial Sequence: Synthetic oligonucleotide
gcagaggaugaggcacaag

SEQ ID NO: 1745137 - RNA, 19 nt, Artificial Sequence
  Description of Artificial Sequence: Synthetic oligonucleotide
ggggaguggacagauuuau

SEQ ID NO: 1745138 - RNA, 19 nt, Artificial Sequence
  Description of Artificial Sequence: Synthetic oligonucleotide
gcccugggacuucuccagc

SEQ ID NO: 1745139 - RNA, 19 nt, Artificial Sequence
  Description of Artificial Sequence: Synthetic oligonucleotide
cugggccuguccuggcaaa

SEQ ID NO: 1745140 - RNA, 19 nt, Artificial Sequence
  Description of Artificial Sequence: Synthetic oligonucleotide
agggacuaauggggaggaa

SEQ ID NO: 1745141 - RNA, 19 nt, Artificial Sequence
  Description of Artificial Sequence: Synthetic oligonucleotide
cggaguucucccugccuug

SEQ ID NO: 1745142 - RNA, 19 nt, Artificial Sequence
  Description of Artificial Sequence: Synthetic oligonucleotide
gcugggcacagggaccuca

SEQ ID NO: 1745143 - RNA, 19 nt, Artificial Sequence
  Description of Artificial Sequence: Synthetic oligonucleotide
aggccccucugcccaggau

SEQ ID NO: 1745144 - RNA, 19 nt, Artificial Sequence
  Description of Artificial Sequence: Synthetic oligonucleotide
cgucaaugggaaaggaggu

SEQ ID NO: 1745145 - RNA, 19 nt, Artificial Sequence
  Description of Artificial Sequence: Synthetic oligonucleotide
acucucuggccaagagcuu

SEQ ID NO: 1745146 - RNA, 19 nt, Artificial Sequence
  Description of Artificial Sequence: Synthetic oligonucleotide
ggaccagaucauguuccaa

SEQ ID NO: 1745147 - RNA, 19 nt, Artificial Sequence
  Description of Artificial Sequence: Synthetic oligonucleotide
caggagccugcccuaaguu

SEQ ID NO: 1745148 - RNA, 19 nt, Artificial Sequence
  Description of Artificial Sequence: Synthetic oligonucleotide
cucccacccagugcccuga

SEQ ID NO: 1745149 - RNA, 19 nt, Artificial Sequence
  Description of Artificial Sequence: Synthetic oligonucleotide
ccuaaguuacacugugcuu

SEQ ID NO: 1745150 - RNA, 19 nt, Artificial Sequence
  Description of Artificial Sequence: Synthetic oligonucleotide
gcccggaguucucccugcc

SEQ ID NO: 1745151 - RNA, 19 nt, Artificial Sequence
  Description of Artificial Sequence: Synthetic oligonucleotide
gaccuuccucuggagcccu

SEQ ID NO: 1745152 - RNA, 19 nt, Artificial Sequence
  Description of Artificial Sequence: Synthetic oligonucleotide
ccucuuggaaaccuccaau

SEQ ID NO: 1745153 - RNA, 19 nt, Artificial Sequence
  Description of Artificial Sequence: Synthetic oligonucleotide
cggacagcuccccucccac

SEQ ID NO: 1745154 - RNA, 19 nt, Artificial Sequence
  Description of Artificial Sequence: Synthetic oligonucleotide
ccaccacuggccuccacua

SEQ ID NO: 1745155 - RNA, 19 nt, Artificial Sequence
  Description of Artificial Sequence: Synthetic oligonucleotide
gggaagggagcaccuggau

SEQ ID NO: 1745156 - RNA, 19 nt, Artificial Sequence
  Description of Artificial Sequence: Synthetic oligonucleotide
ccacuacucccugugccca

SEQ ID NO: 1745157 - RNA, 19 nt, Artificial Sequence
  Description of Artificial Sequence: Synthetic oligonucleotide
gggccagagaaagggauuu

SEQ ID NO: 1745158 - RNA, 19 nt, Artificial Sequence
  Description of Artificial Sequence: Synthetic oligonucleotide
ggggaggaaacaggacucu

SEQ ID NO: 1745159 - RNA, 19 nt, Artificial Sequence
  Description of Artificial Sequence: Synthetic oligonucleotide
gggcaggugcugcccaucu

SEQ ID NO: 1745160 - RNA, 19 nt, Artificial Sequence
  Description of Artificial Sequence: Synthetic oligonucleotide
gcugcccggaguucucccu

SEQ ID NO: 1745161 - RNA, 19 nt, Artificial Sequence
  Description of Artificial Sequence: Synthetic oligonucleotide
ggccagagaaagggauuua

SEQ ID NO: 1745162 - RNA, 19 nt, Artificial Sequence
  Description of Artificial Sequence: Synthetic oligonucleotide
ccggacagcuccccuccca

SEQ ID NO: 1745163 - RNA, 19 nt, Artificial Sequence
  Description of Artificial Sequence: Synthetic oligonucleotide
ccggaguucucccugccuu

SEQ ID NO: 1745164 - RNA, 19 nt, Artificial Sequence
  Description of Artificial Sequence: Synthetic oligonucleotide
ccgucccuggcugcugcug

SEQ ID NO: 1745165 - RNA, 19 nt, Artificial Sequence
  Description of Artificial Sequence: Synthetic oligonucleotide
gccuaggcuggaccuuccu

SEQ ID NO: 1745166 - RNA, 19 nt, Artificial Sequence
  Description of Artificial Sequence: Synthetic oligonucleotide
gggaguggacagauuuauu

SEQ ID NO: 1745167 - RNA, 19 nt, Artificial Sequence
  Description of Artificial Sequence: Synthetic oligonucleotide
cuccccaagaaggccucuu

SEQ ID NO: 1745168 - RNA, 19 nt, Artificial Sequence
  Description of Artificial Sequence: Synthetic oligonucleotide
gcccuuccagaauggcuuu

SEQ ID NO: 1745169 - RNA, 19 nt, Artificial Sequence
  Description of Artificial Sequence: Synthetic oligonucleotide
cccagucuucagccucuaa

SEQ ID NO: 1745170 - RNA, 19 nt, Artificial Sequence
  Description of Artificial Sequence: Synthetic oligonucleotide
gccugcagcugcccagauu

SEQ ID NO: 1745171 - RNA, 19 nt, Artificial Sequence
  Description of Artificial Sequence: Synthetic oligonucleotide
cccggaguucucccugccu

SEQ ID NO: 1745172 - RNA, 19 nt, Artificial Sequence
  Description of Artificial Sequence: Synthetic oligonucleotide
ccugagcccagggacuaau

SEQ ID NO: 1745173 - RNA, 19 nt, Artificial Sequence
  Description of Artificial Sequence: Synthetic oligonucleotide
cccgaacucccgccugccu

SEQ ID NO: 1745174 - RNA, 19 nt, Artificial Sequence
  Description of Artificial Sequence: Synthetic oligonucleotide
cgcggucgucaaugggaaa

SEQ ID NO: 1745175 - RNA, 19 nt, Artificial Sequence
  Description of Artificial Sequence: Synthetic oligonucleotide
ccgccugccuggcaugguu

SEQ ID NO: 1745176 - RNA, 19 nt, Artificial Sequence
  Description of Artificial Sequence: Synthetic oligonucleotide
ggcccagccccaggccccu

SEQ ID NO: 1745177 - RNA, 19 nt, Artificial Sequence
  Description of Artificial Sequence: Synthetic oligonucleotide
cccgucccuggcugcugcu

SEQ ID NO: 1745178 - RNA, 19 nt, Artificial Sequence
  Description of Artificial Sequence: Synthetic oligonucleotide
cccgccugccuggcauggu

SEQ ID NO: 1745179 - RNA, 19 nt, Artificial Sequence
  Description of Artificial Sequence: Synthetic oligonucleotide
cauaguaucaccaagauuc

SEQ ID NO: 1745180 - RNA, 19 nt, Artificial Sequence
  Description of Artificial Sequence: Synthetic oligonucleotide
uagaauaacagcucgaugg

SEQ ID NO: 1745181 - RNA, 19 nt, Artificial Sequence
  Description of Artificial Sequence: Synthetic oligonucleotide
aaaucuucagcacucgagc

SEQ ID NO: 1745182 - RNA, 19 nt, Artificial Sequence
  Description of Artificial Sequence: Synthetic oligonucleotide
aaacaguugggcuaauggc

SEQ ID NO: 1745183 - RNA, 19 nt, Artificial Sequence
  Description of Artificial Sequence: Synthetic oligonucleotide
auaguuuccccaaagaugc

SEQ ID NO: 1745184 - RNA, 19 nt, Artificial Sequence
  Description of Artificial Sequence: Synthetic oligonucleotide
aaacgauccagacaauuuc

SEQ ID NO: 1745185 - RNA, 19 nt, Artificial Sequence
  Description of Artificial Sequence: Synthetic oligonucleotide
aaaucaccugaguauuucc

SEQ ID NO: 1745186 - RNA, 19 nt, Artificial Sequence
  Description of Artificial Sequence: Synthetic oligonucleotide
agcaaugcaaucaaugucc

SEQ ID NO: 1745187 - RNA, 19 nt, Artificial Sequence
  Description of Artificial Sequence: Synthetic oligonucleotide
agcaaaacgauccagacaa

SEQ ID NO: 1745188 - RNA, 19 nt, Artificial Sequence
  Description of Artificial Sequence: Synthetic oligonucleotide
agcaauaucaauaguuucc

SEQ ID NO: 1745189 - RNA, 19 nt, Artificial Sequence
  Description of Artificial Sequence: Synthetic oligonucleotide
ugaaacaucucccaaccug

SEQ ID NO: 1745190 - RNA, 19 nt, Artificial Sequence
  Description of Artificial Sequence: Synthetic oligonucleotide
uaggucuagaauaacagcu

SEQ ID NO: 1745191 - RNA, 19 nt, Artificial Sequence
  Description of Artificial Sequence: Synthetic oligonucleotide
aguacauuccccuguggcc

SEQ ID NO: 1745192 - RNA, 19 nt, Artificial Sequence
  Description of Artificial Sequence: Synthetic oligonucleotide
ucacguuacauccaacucc

SEQ ID NO: 1745193 - RNA, 19 nt, Artificial Sequence
  Description of Artificial Sequence: Synthetic oligonucleotide
aauguuguagccuggacuu

SEQ ID NO: 1745194 - RNA, 19 nt, Artificial Sequence
  Description of Artificial Sequence: Synthetic oligonucleotide
ucagcacucgagcaaaacg

SEQ ID NO: 1745195 - RNA, 19 nt, Artificial Sequence
  Description of Artificial Sequence: Synthetic oligonucleotide
agaaucucucaucuguggc

SEQ ID NO: 1745196 - RNA, 19 nt, Artificial Sequence
  Description of Artificial Sequence: Synthetic oligonucleotide
uguuguuagucccuccacg

SEQ ID NO: 1745197 - RNA, 19 nt, Artificial Sequence
  Description of Artificial Sequence: Synthetic oligonucleotide
gaaugagacauccaucccc

SEQ ID NO: 1745198 - RNA, 19 nt, Artificial Sequence
  Description of Artificial Sequence: Synthetic oligonucleotide
ucgaugaaagacagaaucc

SEQ ID NO: 1745199 - RNA, 19 nt, Artificial Sequence
  Description of Artificial Sequence: Synthetic oligonucleotide
agucguaaccggcaguacc

SEQ ID NO: 1745200 - RNA, 19 nt, Artificial Sequence
  Description of Artificial Sequence: Synthetic oligonucleotide
caaucaauguccugggagg

SEQ ID NO: 1745201 - RNA, 19 nt, Artificial Sequence
  Description of Artificial Sequence: Synthetic oligonucleotide
acaacugggccacaguacg

SEQ ID NO: 1745202 - RNA, 19 nt, Artificial Sequence
  Description of Artificial Sequence: Synthetic oligonucleotide
aacccuaagccuugugugg

SEQ ID NO: 1745203 - RNA, 19 nt, Artificial Sequence
  Description of Artificial Sequence: Synthetic oligonucleotide
agcuacagaagccaauggg

SEQ ID NO: 1745204 - RNA, 19 nt, Artificial Sequence
  Description of Artificial Sequence: Synthetic oligonucleotide
cacucgagcaaaacgaucc

SEQ ID NO: 1745205 - RNA, 19 nt, Artificial Sequence
  Description of Artificial Sequence: Synthetic oligonucleotide
aaagaugcgguaacgaugu

SEQ ID NO: 1745206 - RNA, 19 nt, Artificial Sequence
  Description of Artificial Sequence: Synthetic oligonucleotide
uggcaagcuauucuggucc

SEQ ID NO: 1745207 - RNA, 19 nt, Artificial Sequence
  Description of Artificial Sequence: Synthetic oligonucleotide
uguuagucccuccacguca

SEQ ID NO: 1745208 - RNA, 19 nt, Artificial Sequence
  Description of Artificial Sequence: Synthetic oligonucleotide
ugcgcuacauccucgauga

SEQ ID NO: 1745209 - RNA, 19 nt, Artificial Sequence
  Description of Artificial Sequence: Synthetic oligonucleotide
aacgacagcuacagaagcc

SEQ ID NO: 1745210 - RNA, 19 nt, Artificial Sequence
  Description of Artificial Sequence: Synthetic oligonucleotide
aacacaggucuucaggagu

SEQ ID NO: 1745211 - RNA, 19 nt, Artificial Sequence
  Description of Artificial Sequence: Synthetic oligonucleotide
uaggaaaucaccugaguau

SEQ ID NO: 1745212 - RNA, 19 nt, Artificial Sequence
  Description of Artificial Sequence: Synthetic oligonucleotide
ugcucaauguuguagccug

SEQ ID NO: 1745213 - RNA, 19 nt, Artificial Sequence
  Description of Artificial Sequence: Synthetic oligonucleotide
auuuucagagucaucuugg

SEQ ID NO: 1745214 - RNA, 19 nt, Artificial Sequence
  Description of Artificial Sequence: Synthetic oligonucleotide
guaacgauguucugaguag

SEQ ID NO: 1745215 - RNA, 19 nt, Artificial Sequence
  Description of Artificial Sequence: Synthetic oligonucleotide
caaagaugcgguaacgaug

SEQ ID NO: 1745216 - RNA, 19 nt, Artificial Sequence
  Description of Artificial Sequence: Synthetic oligonucleotide
aguaggucuagaauaacag

SEQ ID NO: 1745217 - RNA, 19 nt, Artificial Sequence
  Description of Artificial Sequence: Synthetic oligonucleotide
gaacccuaagccuugugug

SEQ ID NO: 1745218 - RNA, 19 nt, Artificial Sequence
  Description of Artificial Sequence: Synthetic oligonucleotide
ugugucaccuggaaggaac

SEQ ID NO: 1745219 - RNA, 19 nt, Artificial Sequence
  Description of Artificial Sequence: Synthetic oligonucleotide
aacaguugggcuaauggcu

SEQ ID NO: 1745220 - RNA, 19 nt, Artificial Sequence
  Description of Artificial Sequence: Synthetic oligonucleotide
cuuauuccacaacugggcc

SEQ ID NO: 1745221 - RNA, 19 nt, Artificial Sequence
  Description of Artificial Sequence: Synthetic oligonucleotide
gaguacauuccccuguggc

SEQ ID NO: 1745222 - RNA, 19 nt, Artificial Sequence
  Description of Artificial Sequence: Synthetic oligonucleotide
ucucacguuacauccaacu

SEQ ID NO: 1745223 - RNA, 19 nt, Artificial Sequence
  Description of Artificial Sequence: Synthetic oligonucleotide
ugguucacaccuaccaaag

SEQ ID NO: 1745224 - RNA, 19 nt, Artificial Sequence
  Description of Artificial Sequence: Synthetic oligonucleotide
aauuccagacucucugaga

SEQ ID NO: 1745225 - RNA, 19 nt, Artificial Sequence
  Description of Artificial Sequence: Synthetic oligonucleotide
uguucugaguaggaaauca

SEQ ID NO: 1745226 - RNA, 19 nt, Artificial Sequence
  Description of Artificial Sequence: Synthetic oligonucleotide
ucaauguggccuaugcagu

SEQ ID NO: 1745227 - RNA, 19 nt, Artificial Sequence
  Description of Artificial Sequence: Synthetic oligonucleotide
aucaccugaguauuuccuc

SEQ ID NO: 1745228 - RNA, 19 nt, Artificial Sequence
  Description of Artificial Sequence: Synthetic oligonucleotide
aguccauaguaucaccaag

SEQ ID NO: 1745229 - RNA, 19 nt, Artificial Sequence
  Description of Artificial Sequence: Synthetic oligonucleotide
aacuccuccuacgaugagg

SEQ ID NO: 1745230 - RNA, 19 nt, Artificial Sequence
  Description of Artificial Sequence: Synthetic oligonucleotide
gaaagacagaaucccugag

SEQ ID NO: 1745231 - RNA, 19 nt, Artificial Sequence
  Description of Artificial Sequence: Synthetic oligonucleotide
uucaggaguacauuccccu

SEQ ID NO: 1745232 - RNA, 19 nt, Artificial Sequence
  Description of Artificial Sequence: Synthetic oligonucleotide
guaggucuagaauaacagc

SEQ ID NO: 1745233 - RNA, 19 nt, Artificial Sequence
  Description of Artificial Sequence: Synthetic oligonucleotide
agaauaacagcucgauggu

SEQ ID NO: 1745234 - RNA, 19 nt, Artificial Sequence
  Description of Artificial Sequence: Synthetic oligonucleotide
uguuguagccuggacuugg

SEQ ID NO: 1745235 - RNA, 19 nt, Artificial Sequence
  Description of Artificial Sequence: Synthetic oligonucleotide
acgccgaucuuguuggcgc

SEQ ID NO: 1745236 - RNA, 19 nt, Artificial Sequence
  Description of Artificial Sequence: Synthetic oligonucleotide
cauacacuagccagagagg

SEQ ID NO: 1745237 - RNA, 19 nt, Artificial Sequence
  Description of Artificial Sequence: Synthetic oligonucleotide
ugcaguaggucuagaauaa

SEQ ID NO: 1745238 - RNA, 19 nt, Artificial Sequence
  Description of Artificial Sequence: Synthetic oligonucleotide
uaacgauguucugaguagg

SEQ ID NO: 1745239 - RNA, 19 nt, Artificial Sequence
  Description of Artificial Sequence: Synthetic oligonucleotide
aguacgggcaacgacagcu

SEQ ID NO: 1745240 - RNA, 19 nt, Artificial Sequence
  Description of Artificial Sequence: Synthetic oligonucleotide
uauucugguccuguuagug

SEQ ID NO: 1745241 - RNA, 19 nt, Artificial Sequence
  Description of Artificial Sequence: Synthetic oligonucleotide
accuaccaaaggcuuauuc

SEQ ID NO: 1745242 - RNA, 19 nt, Artificial Sequence
  Description of Artificial Sequence: Synthetic oligonucleotide
aauguggccuaugcagugg

SEQ ID NO: 1745243 - RNA, 19 nt, Artificial Sequence
  Description of Artificial Sequence: Synthetic oligonucleotide
uuuucugcgcuacauccuc

SEQ ID NO: 1745244 - RNA, 19 nt, Artificial Sequence
  Description of Artificial Sequence: Synthetic oligonucleotide
cuaccaaaggcuuauucca

SEQ ID NO: 1745245 - RNA, 19 nt, Artificial Sequence
  Description of Artificial Sequence: Synthetic oligonucleotide
ucuagaauaacagcucgau

SEQ ID NO: 1745246 - RNA, 19 nt, Artificial Sequence
  Description of Artificial Sequence: Synthetic oligonucleotide
ugggucauuggaaaucuuc

SEQ ID NO: 1745247 - RNA, 19 nt, Artificial Sequence
  Description of Artificial Sequence: Synthetic oligonucleotide
guaucaccaagauucacuc

SEQ ID NO: 1745248 - RNA, 19 nt, Artificial Sequence
  Description of Artificial Sequence: Synthetic oligonucleotide
uggacuugggucauuggaa

SEQ ID NO: 1745249 - RNA, 19 nt, Artificial Sequence
  Description of Artificial Sequence: Synthetic oligonucleotide
aguguuguuagucccucca

SEQ ID NO: 1745250 - RNA, 19 nt, Artificial Sequence
  Description of Artificial Sequence: Synthetic oligonucleotide
aggacuagucguaaccggc

SEQ ID NO: 1745251 - RNA, 19 nt, Artificial Sequence
  Description of Artificial Sequence: Synthetic oligonucleotide
aguaucaccaagauucacu

SEQ ID NO: 1745252 - RNA, 19 nt, Artificial Sequence
  Description of Artificial Sequence: Synthetic oligonucleotide
cuugccgucgcgcaccacg

SEQ ID NO: 1745253 - RNA, 19 nt, Artificial Sequence
  Description of Artificial Sequence: Synthetic oligonucleotide
aaaacgauccagacaauuu

SEQ ID NO: 1745254 - RNA, 19 nt, Artificial Sequence
  Description of Artificial Sequence: Synthetic oligonucleotide
uacacuagccagagaggag

SEQ ID NO: 1745255 - RNA, 19 nt, Artificial Sequence
  Description of Artificial Sequence: Synthetic oligonucleotide
aguguauggcagcucaacu

SEQ ID NO: 1745256 - RNA, 19 nt, Artificial Sequence
  Description of Artificial Sequence: Synthetic oligonucleotide
gcuacagaagccaaugggg

SEQ ID NO: 1745257 - RNA, 19 nt, Artificial Sequence
  Description of Artificial Sequence: Synthetic oligonucleotide
aaucccugagaaugagaca

SEQ ID NO: 1745258 - RNA, 19 nt, Artificial Sequence
  Description of Artificial Sequence: Synthetic oligonucleotide
aguuuccccaaagaugcgg

SEQ ID NO: 1745259 - RNA, 19 nt, Artificial Sequence
  Description of Artificial Sequence: Synthetic oligonucleotide
gcagucucacguuacaucc

SEQ ID NO: 1745260 - RNA, 19 nt, Artificial Sequence
  Description of Artificial Sequence: Synthetic oligonucleotide
cuagaauaacagcucgaug

SEQ ID NO: 1745261 - RNA, 19 nt, Artificial Sequence
  Description of Artificial Sequence: Synthetic oligonucleotide
auguccugggagguuaacc

SEQ ID NO: 1745262 - RNA, 19 nt, Artificial Sequence
  Description of Artificial Sequence: Synthetic oligonucleotide
gaggcggcccauuucaaug

SEQ ID NO: 1745263 - RNA, 19 nt, Artificial Sequence
  Description of Artificial Sequence: Synthetic oligonucleotide
ccacgaacagcccagaacc

SEQ ID NO: 1745264 - RNA, 19 nt, Artificial Sequence
  Description of Artificial Sequence: Synthetic oligonucleotide
agaugcgguaacgauguuc

SEQ ID NO: 1745265 - RNA, 19 nt, Artificial Sequence
  Description of Artificial Sequence: Synthetic oligonucleotide
aaucaccugaguauuuccu

SEQ ID NO: 1745266 - RNA, 19 nt, Artificial Sequence
  Description of Artificial Sequence: Synthetic oligonucleotide
augaaagacagaaucccug

SEQ ID NO: 1745267 - RNA, 19 nt, Artificial Sequence
  Description of Artificial Sequence: Synthetic oligonucleotide
accugaguauuuccuccgc

SEQ ID NO: 1745268 - RNA, 19 nt, Artificial Sequence
  Description of Artificial Sequence: Synthetic oligonucleotide
uacaaaacaguugggcuaa

SEQ ID NO: 1745269 - RNA, 19 nt, Artificial Sequence
  Description of Artificial Sequence: Synthetic oligonucleotide
cacaguacgggcaacgaca

SEQ ID NO: 1745270 - RNA, 19 nt, Artificial Sequence
  Description of Artificial Sequence: Synthetic oligonucleotide
aaucaauguccugggaggu

SEQ ID NO: 1745271 - RNA, 19 nt, Artificial Sequence
  Description of Artificial Sequence: Synthetic oligonucleotide
agucccuccacgucacuuc

SEQ ID NO: 1745272 - RNA, 19 nt, Artificial Sequence
  Description of Artificial Sequence: Synthetic oligonucleotide
uaccaaaggcuuauuccac

SEQ ID NO: 1745273 - RNA, 19 nt, Artificial Sequence
  Description of Artificial Sequence: Synthetic oligonucleotide
ugcgguaacgauguucuga

SEQ ID NO: 1745274 - RNA, 19 nt, Artificial Sequence
  Description of Artificial Sequence: Synthetic oligonucleotide
ucuccacuagcauugcaaa

SEQ ID NO: 1745275 - RNA, 19 nt, Artificial Sequence
  Description of Artificial Sequence: Synthetic oligonucleotide
gcuacauccucgaugaaag

SEQ ID NO: 1745276 - RNA, 19 nt, Artificial Sequence
  Description of Artificial Sequence: Synthetic oligonucleotide
aaccggcaguaccacgaac

SEQ ID NO: 1745277 - RNA, 19 nt, Artificial Sequence
  Description of Artificial Sequence: Synthetic oligonucleotide
gacguaagugcgccgcggg

SEQ ID NO: 1745278 - RNA, 19 nt, Artificial Sequence
  Description of Artificial Sequence: Synthetic oligonucleotide
guagccuggacuuggguca

SEQ ID NO: 1745279 - RNA, 19 nt, Artificial Sequence
  Description of Artificial Sequence: Synthetic oligonucleotide
uguaagcaaugcaaucaau

SEQ ID NO: 1745280 - RNA, 19 nt, Artificial Sequence
  Description of Artificial Sequence: Synthetic oligonucleotide
auccagacaauuucccaca

SEQ ID NO: 1745281 - RNA, 19 nt, Artificial Sequence
  Description of Artificial Sequence: Synthetic oligonucleotide
uucgaaccccagcaccgcg

SEQ ID NO: 1745282 - RNA, 19 nt, Artificial Sequence
  Description of Artificial Sequence: Synthetic oligonucleotide
uaucaccaagauucacucc

SEQ ID NO: 1745283 - RNA, 19 nt, Artificial Sequence
  Description of Artificial Sequence: Synthetic oligonucleotide
gacuagucguaaccggcag

SEQ ID NO: 1745284 - RNA, 19 nt, Artificial Sequence
  Description of Artificial Sequence: Synthetic oligonucleotide
ggguccauacacuagccag

SEQ ID NO: 1745285 - RNA, 19 nt, Artificial Sequence
  Description of Artificial Sequence: Synthetic oligonucleotide
caggacuagucguaaccgg

SEQ ID NO: 1745286 - RNA, 19 nt, Artificial Sequence
  Description of Artificial Sequence: Synthetic oligonucleotide
aggucuagaauaacagcuc

SEQ ID NO: 1745287 - RNA, 19 nt, Artificial Sequence
  Description of Artificial Sequence: Synthetic oligonucleotide
uuggcgcugccuucgaacc

SEQ ID NO: 1745288 - RNA, 19 nt, Artificial Sequence
  Description of Artificial Sequence: Synthetic oligonucleotide
ugcagucucacguuacauc

SEQ ID NO: 1745289 - RNA, 19 nt, Artificial Sequence
  Description of Artificial Sequence: Synthetic oligonucleotide
uaagccuuguguggggucc

SEQ ID NO: 1745290 - RNA, 19 nt, Artificial Sequence
  Description of Artificial Sequence: Synthetic oligonucleotide
ucaggaguacauuccccug

SEQ ID NO: 1745291 - RNA, 19 nt, Artificial Sequence
  Description of Artificial Sequence: Synthetic oligonucleotide
uccuccuacgaugagggcu

SEQ ID NO: 1745292 - RNA, 19 nt, Artificial Sequence
  Description of Artificial Sequence: Synthetic oligonucleotide
auucugguccuguuagugu

SEQ ID NO: 1745293 - RNA, 19 nt, Artificial Sequence
  Description of Artificial Sequence: Synthetic oligonucleotide
aguaccacgaacagcccag

SEQ ID NO: 1745294 - RNA, 19 nt, Artificial Sequence
  Description of Artificial Sequence: Synthetic oligonucleotide
cuaugcagugguucacacc

SEQ ID NO: 1745295 - RNA, 19 nt, Artificial Sequence
  Description of Artificial Sequence: Synthetic oligonucleotide
ugguguaagcaaugcaauc

SEQ ID NO: 1745296 - RNA, 19 nt, Artificial Sequence
  Description of Artificial Sequence: Synthetic oligonucleotide
gaauaacagcucgauggug

SEQ ID NO: 1745297 - RNA, 19 nt, Artificial Sequence
  Description of Artificial Sequence: Synthetic oligonucleotide
gaguaggaaaucaccugag

SEQ ID NO: 1745298 - RNA, 19 nt, Artificial Sequence
  Description of Artificial Sequence: Synthetic oligonucleotide
gcaauaucaauaguuuccc

SEQ ID NO: 1745299 - RNA, 19 nt, Artificial Sequence
  Description of Artificial Sequence: Synthetic oligonucleotide
uccacgucacuucuacuuc

SEQ ID NO: 1745300 - RNA, 19 nt, Artificial Sequence
  Description of Artificial Sequence: Synthetic oligonucleotide
cauggugcaccccggcucg

SEQ ID NO: 1745301 - RNA, 19 nt, Artificial Sequence
  Description of Artificial Sequence: Synthetic oligonucleotide
gaugcgguaacgauguucu

SEQ ID NO: 1745302 - RNA, 19 nt, Artificial Sequence
  Description of Artificial Sequence: Synthetic oligonucleotide
gauggugccgggcuguguc

SEQ ID NO: 1745303 - RNA, 19 nt, Artificial Sequence
  Description of Artificial Sequence: Synthetic oligonucleotide
cagcacucgagcaaaacga

SEQ ID NO: 1745304 - RNA, 19 nt, Artificial Sequence
  Description of Artificial Sequence: Synthetic oligonucleotide
caaagagcugggcuccccg

SEQ ID NO: 1745305 - RNA, 19 nt, Artificial Sequence
  Description of Artificial Sequence: Synthetic oligonucleotide
caccugaguauuuccuccg

SEQ ID NO: 1745306 - RNA, 19 nt, Artificial Sequence
  Description of Artificial Sequence: Synthetic oligonucleotide
cucacguuacauccaacuc

SEQ ID NO: 1745307 - RNA, 19 nt, Artificial Sequence
  Description of Artificial Sequence: Synthetic oligonucleotide
aagccaauggggcucccau

SEQ ID NO: 1745308 - RNA, 19 nt, Artificial Sequence
  Description of Artificial Sequence: Synthetic oligonucleotide
ucugguccuguuaguguug

SEQ ID NO: 1745309 - RNA, 19 nt, Artificial Sequence
  Description of Artificial Sequence: Synthetic oligonucleotide
uaguuuccccaaagaugcg

SEQ ID NO: 1745310 - RNA, 19 nt, Artificial Sequence
  Description of Artificial Sequence: Synthetic oligonucleotide
cacaacugggccacaguac

SEQ ID NO: 1745311 - RNA, 19 nt, Artificial Sequence
  Description of Artificial Sequence: Synthetic oligonucleotide
gguguaagcaaugcaauca

SEQ ID NO: 1745312 - RNA, 19 nt, Artificial Sequence
  Description of Artificial Sequence: Synthetic oligonucleotide
uucugguccuguuaguguu

SEQ ID NO: 1745313 - RNA, 19 nt, Artificial Sequence
  Description of Artificial Sequence: Synthetic oligonucleotide
gguaacgauguucugagua

SEQ ID NO: 1745314 - RNA, 19 nt, Artificial Sequence
  Description of Artificial Sequence: Synthetic oligonucleotide
cuugggcuaucauggcucc

SEQ ID NO: 1745315 - RNA, 19 nt, Artificial Sequence
  Description of Artificial Sequence: Synthetic oligonucleotide
caauguggccuaugcagug

SEQ ID NO: 1745316 - RNA, 19 nt, Artificial Sequence
  Description of Artificial Sequence: Synthetic oligonucleotide
uggaaggaacccugugccc

SEQ ID NO: 1745317 - RNA, 19 nt, Artificial Sequence
  Description of Artificial Sequence: Synthetic oligonucleotide
agguuaacccagcuucugu

SEQ ID NO: 1745318 - RNA, 19 nt, Artificial Sequence
  Description of Artificial Sequence: Synthetic oligonucleotide
gacucucugagaggggucc

SEQ ID NO: 1745319 - RNA, 19 nt, Artificial Sequence
  Description of Artificial Sequence: Synthetic oligonucleotide
uggccuaugcagugguuca

SEQ ID NO: 1745320 - RNA, 19 nt, Artificial Sequence
  Description of Artificial Sequence: Synthetic oligonucleotide
ucaauguccugggagguua

SEQ ID NO: 1745321 - RNA, 19 nt, Artificial Sequence
  Description of Artificial Sequence: Synthetic oligonucleotide
gcuugaaacaucucccaac

SEQ ID NO: 1745322 - RNA, 19 nt, Artificial Sequence
  Description of Artificial Sequence: Synthetic oligonucleotide
ggggccgugacguaagugc

SEQ ID NO: 1745323 - RNA, 19 nt, Artificial Sequence
  Description of Artificial Sequence: Synthetic oligonucleotide
uuguuagucccuccacguc

SEQ ID NO: 1745324 - RNA, 19 nt, Artificial Sequence
  Description of Artificial Sequence: Synthetic oligonucleotide
guuggcgcugccuucgaac

SEQ ID NO: 1745325 - RNA, 19 nt, Artificial Sequence
  Description of Artificial Sequence: Synthetic oligonucleotide
agucucacguuacauccaa

SEQ ID NO: 1745326 - RNA, 19 nt, Artificial Sequence
  Description of Artificial Sequence: Synthetic oligonucleotide
gagacauccauccccuuua

SEQ ID NO: 1745327 - RNA, 19 nt, Artificial Sequence
  Description of Artificial Sequence: Synthetic oligonucleotide
uuaguguuguuagucccuc

SEQ ID NO: 1745328 - RNA, 19 nt, Artificial Sequence
  Description of Artificial Sequence: Synthetic oligonucleotide
ucacaccuaccaaaggcuu

SEQ ID NO: 1745329 - RNA, 19 nt, Artificial Sequence
  Description of Artificial Sequence: Synthetic oligonucleotide
gcgguaacgauguucugag

SEQ ID NO: 1745330 - RNA, 19 nt, Artificial Sequence
  Description of Artificial Sequence: Synthetic oligonucleotide
cuauguccagcuugaaaca

SEQ ID NO: 1745331 - RNA, 19 nt, Artificial Sequence
  Description of Artificial Sequence: Synthetic oligonucleotide
acccuaagccuuguguggg

SEQ ID NO: 1745332 - RNA, 19 nt, Artificial Sequence
  Description of Artificial Sequence: Synthetic oligonucleotide
uauguccagcuugaaacau

SEQ ID NO: 1745333 - RNA, 19 nt, Artificial Sequence
  Description of Artificial Sequence: Synthetic oligonucleotide
cuuugguguaagcaaugca

SEQ ID NO: 1745334 - RNA, 19 nt, Artificial Sequence
  Description of Artificial Sequence: Synthetic oligonucleotide
gaguccauaguaucaccaa

SEQ ID NO: 1745335 - RNA, 19 nt, Artificial Sequence
  Description of Artificial Sequence: Synthetic oligonucleotide
cucgcuuugccaucugcuc

SEQ ID NO: 1745336 - RNA, 19 nt, Artificial Sequence
  Description of Artificial Sequence: Synthetic oligonucleotide
acuagucguaaccggcagu

SEQ ID NO: 1745337 - RNA, 19 nt, Artificial Sequence
  Description of Artificial Sequence: Synthetic oligonucleotide
uucugcgcuacauccucga

SEQ ID NO: 1745338 - RNA, 19 nt, Artificial Sequence
  Description of Artificial Sequence: Synthetic oligonucleotide
auguucugaguaggaaauc

SEQ ID NO: 1745339 - RNA, 19 nt, Artificial Sequence
  Description of Artificial Sequence: Synthetic oligonucleotide
cuggacuugggucauugga

SEQ ID NO: 1745340 - RNA, 19 nt, Artificial Sequence
  Description of Artificial Sequence: Synthetic oligonucleotide
cugcgcuacauccucgaug

SEQ ID NO: 1745341 - RNA, 19 nt, Artificial Sequence
  Description of Artificial Sequence: Synthetic oligonucleotide
agcuugaaacaucucccaa

SEQ ID NO: 1745342 - RNA, 19 nt, Artificial Sequence
  Description of Artificial Sequence: Synthetic oligonucleotide
cuccacuagcauugcaaac

SEQ ID NO: 1745343 - RNA, 19 nt, Artificial Sequence
  Description of Artificial Sequence: Synthetic oligonucleotide
guccauacacuagccagag

SEQ ID NO: 1745344 - RNA, 19 nt, Artificial Sequence
  Description of Artificial Sequence: Synthetic oligonucleotide
gguucacaccuaccaaagg

SEQ ID NO: 1745345 - RNA, 19 nt, Artificial Sequence
  Description of Artificial Sequence: Synthetic oligonucleotide
uaguguuguuagucccucc

SEQ ID NO: 1745346 - RNA, 19 nt, Artificial Sequence
  Description of Artificial Sequence: Synthetic oligonucleotide
acaguacgggcaacgacag

SEQ ID NO: 1745347 - RNA, 19 nt, Artificial Sequence
  Description of Artificial Sequence: Synthetic oligonucleotide
caauguuguagccuggacu

SEQ ID NO: 1745348 - RNA, 19 nt, Artificial Sequence
  Description of Artificial Sequence: Synthetic oligonucleotide
caauggggcucccauacca

SEQ ID NO: 1745349 - RNA, 19 nt, Artificial Sequence
  Description of Artificial Sequence: Synthetic oligonucleotide
ccuucgaaccccagcaccg

SEQ ID NO: 1745350 - RNA, 19 nt, Artificial Sequence
  Description of Artificial Sequence: Synthetic oligonucleotide
guuguuagucccuccacgu

SEQ ID NO: 1745351 - RNA, 19 nt, Artificial Sequence
  Description of Artificial Sequence: Synthetic oligonucleotide
uacgggcaacgacagcuac

SEQ ID NO: 1745352 - RNA, 19 nt, Artificial Sequence
  Description of Artificial Sequence: Synthetic oligonucleotide
acgucacuucuacuucauc

SEQ ID NO: 1745353 - RNA, 19 nt, Artificial Sequence
  Description of Artificial Sequence: Synthetic oligonucleotide
gguuaacccagcuucuguc

SEQ ID NO: 1745354 - RNA, 19 nt, Artificial Sequence
  Description of Artificial Sequence: Synthetic oligonucleotide
auguccagcuugaaacauc

SEQ ID NO: 1745355 - RNA, 19 nt, Artificial Sequence
  Description of Artificial Sequence: Synthetic oligonucleotide
auaguaucaccaagauuca

SEQ ID NO: 1745356 - RNA, 19 nt, Artificial Sequence
  Description of Artificial Sequence: Synthetic oligonucleotide
gugacguaagugcgccgcg

SEQ ID NO: 1745357 - RNA, 19 nt, Artificial Sequence
  Description of Artificial Sequence: Synthetic oligonucleotide
accggcaguaccacgaaca

SEQ ID NO: 1745358 - RNA, 19 nt, Artificial Sequence
  Description of Artificial Sequence: Synthetic oligonucleotide
gagguuaacccagcuucug

SEQ ID NO: 1745359 - RNA, 19 nt, Artificial Sequence
  Description of Artificial Sequence: Synthetic oligonucleotide
uccuccgcugacauacaaa

SEQ ID NO: 1745360 - RNA, 19 nt, Artificial Sequence
  Description of Artificial Sequence: Synthetic oligonucleotide
ugcgccgcggguucgccag

SEQ ID NO: 1745361 - RNA, 19 nt, Artificial Sequence
  Description of Artificial Sequence: Synthetic oligonucleotide
uucagcacucgagcaaaac

SEQ ID NO: 1745362 - RNA, 19 nt, Artificial Sequence
  Description of Artificial Sequence: Synthetic oligonucleotide
cugccuucgaaccccagca

SEQ ID NO: 1745363 - RNA, 19 nt, Artificial Sequence
  Description of Artificial Sequence: Synthetic oligonucleotide
ugggagguuaacccagcuu

SEQ ID NO: 1745364 - RNA, 19 nt, Artificial Sequence
  Description of Artificial Sequence: Synthetic oligonucleotide
ugucaccuggaaggaaccc

SEQ ID NO: 1745365 - RNA, 19 nt, Artificial Sequence
  Description of Artificial Sequence: Synthetic oligonucleotide
uccauccccuuuacagugu

SEQ ID NO: 1745366 - RNA, 19 nt, Artificial Sequence
  Description of Artificial Sequence: Synthetic oligonucleotide
caaaacaguugggcuaaug

SEQ ID NO: 1745367 - RNA, 19 nt, Artificial Sequence
  Description of Artificial Sequence: Synthetic oligonucleotide
guuguagccuggacuuggg

SEQ ID NO: 1745368 - RNA, 19 nt, Artificial Sequence
  Description of Artificial Sequence: Synthetic oligonucleotide
guguuguuagucccuccac

SEQ ID NO: 1745369 - RNA, 19 nt, Artificial Sequence
  Description of Artificial Sequence: Synthetic oligonucleotide
cacguuacauccaacuccu

SEQ ID NO: 1745370 - RNA, 19 nt, Artificial Sequence
  Description of Artificial Sequence: Synthetic oligonucleotide
agauucacucccacaucag

SEQ ID NO: 1745371 - RNA, 19 nt, Artificial Sequence
  Description of Artificial Sequence: Synthetic oligonucleotide
gucguaaccggcaguacca

SEQ ID NO: 1745372 - RNA, 19 nt, Artificial Sequence
  Description of Artificial Sequence: Synthetic oligonucleotide
aagcuauucugguccuguu

SEQ ID NO: 1745373 - RNA, 19 nt, Artificial Sequence
  Description of Artificial Sequence: Synthetic oligonucleotide
uugggcuaauggcuccagu

SEQ ID NO: 1745374 - RNA, 19 nt, Artificial Sequence
  Description of Artificial Sequence: Synthetic oligonucleotide
gccaauggggcucccauac

SEQ ID NO: 1745375 - RNA, 19 nt, Artificial Sequence
  Description of Artificial Sequence: Synthetic oligonucleotide
uccauacacuagccagaga

SEQ ID NO: 1745376 - RNA, 19 nt, Artificial Sequence
  Description of Artificial Sequence: Synthetic oligonucleotide
guaagugcgccgcggguuc

SEQ ID NO: 1745377 - RNA, 19 nt, Artificial Sequence
  Description of Artificial Sequence: Synthetic oligonucleotide
caguguauggcagcucaac

SEQ ID NO: 1745378 - RNA, 19 nt, Artificial Sequence
  Description of Artificial Sequence: Synthetic oligonucleotide
ccuugugugggguccauac

SEQ ID NO: 1745379 - RNA, 19 nt, Artificial Sequence
  Description of Artificial Sequence: Synthetic oligonucleotide
ucgggaucugcggauggca

SEQ ID NO: 1745380 - RNA, 19 nt, Artificial Sequence
  Description of Artificial Sequence: Synthetic oligonucleotide
ccuguuaguguuguuaguc

SEQ ID NO: 1745381 - RNA, 19 nt, Artificial Sequence
  Description of Artificial Sequence: Synthetic oligonucleotide
aggcggcccauuucaaugu

SEQ ID NO: 1745382 - RNA, 19 nt, Artificial Sequence
  Description of Artificial Sequence: Synthetic oligonucleotide
ugggcuaucauggcuccau

SEQ ID NO: 1745383 - RNA, 19 nt, Artificial Sequence
  Description of Artificial Sequence: Synthetic oligonucleotide
cuguaccucuguguaauuc

SEQ ID NO: 1745384 - RNA, 19 nt, Artificial Sequence
  Description of Artificial Sequence: Synthetic oligonucleotide
uuccuccgcugacauacaa

SEQ ID NO: 1745385 - RNA, 19 nt, Artificial Sequence
  Description of Artificial Sequence: Synthetic oligonucleotide
ggcuaucauggcuccauug

SEQ ID NO: 1745386 - RNA, 19 nt, Artificial Sequence
  Description of Artificial Sequence: Synthetic oligonucleotide
uaaccggcaguaccacgaa

SEQ ID NO: 1745387 - RNA, 19 nt, Artificial Sequence
  Description of Artificial Sequence: Synthetic oligonucleotide
cuccgcugacauacaaaac

SEQ ID NO: 1745388 - RNA, 19 nt, Artificial Sequence
  Description of Artificial Sequence: Synthetic oligonucleotide
cagcuugaaacaucuccca

SEQ ID NO: 1745389 - RNA, 19 nt, Artificial Sequence
  Description of Artificial Sequence: Synthetic oligonucleotide
ugccuucgaaccccagcac

SEQ ID NO: 1745390 - RNA, 19 nt, Artificial Sequence
  Description of Artificial Sequence: Synthetic oligonucleotide
acaccuaccaaaggcuuau

SEQ ID NO: 1745391 - RNA, 19 nt, Artificial Sequence
  Description of Artificial Sequence: Synthetic oligonucleotide
cagcucaacuagcuucuug

SEQ ID NO: 1745392 - RNA, 19 nt, Artificial Sequence
  Description of Artificial Sequence: Synthetic oligonucleotide
uuuccuccgcugacauaca

SEQ ID NO: 1745393 - RNA, 19 nt, Artificial Sequence
  Description of Artificial Sequence: Synthetic oligonucleotide
uggcgcugccuucgaaccc

SEQ ID NO: 1745394 - RNA, 19 nt, Artificial Sequence
  Description of Artificial Sequence: Synthetic oligonucleotide
gcucaacuagcuucuugcc

SEQ ID NO: 1745395 - RNA, 19 nt, Artificial Sequence
  Description of Artificial Sequence: Synthetic oligonucleotide
guuagucccuccacgucac

SEQ ID NO: 1745396 - RNA, 19 nt, Artificial Sequence
  Description of Artificial Sequence: Synthetic oligonucleotide
cacgccgaucuuguuggcg

SEQ ID NO: 1745397 - RNA, 19 nt, Artificial Sequence
  Description of Artificial Sequence: Synthetic oligonucleotide
ucccugagaaugagacauc

SEQ ID NO: 1745398 - RNA, 19 nt, Artificial Sequence
  Description of Artificial Sequence: Synthetic oligonucleotide
guauggcagcucaacuagc

SEQ ID NO: 1745399 - RNA, 19 nt, Artificial Sequence
  Description of Artificial Sequence: Synthetic oligonucleotide
guggccuaugcagugguuc

SEQ ID NO: 1745400 - RNA, 19 nt, Artificial Sequence
  Description of Artificial Sequence: Synthetic oligonucleotide
caucuccugcagucucacg

SEQ ID NO: 1745401 - RNA, 19 nt, Artificial Sequence
  Description of Artificial Sequence: Synthetic oligonucleotide
uaagugcgccgcggguucg

SEQ ID NO: 1745402 - RNA, 19 nt, Artificial Sequence
  Description of Artificial Sequence: Synthetic oligonucleotide
acgauguucugaguaggaa

SEQ ID NO: 1745403 - RNA, 19 nt, Artificial Sequence
  Description of Artificial Sequence: Synthetic oligonucleotide
gccuucgaaccccagcacc

SEQ ID NO: 1745404 - RNA, 19 nt, Artificial Sequence
  Description of Artificial Sequence: Synthetic oligonucleotide
gagaggagaagaguccaua

SEQ ID NO: 1745405 - RNA, 19 nt, Artificial Sequence
  Description of Artificial Sequence: Synthetic oligonucleotide
aggaacccuaagccuugug

SEQ ID NO: 1745406 - RNA, 19 nt, Artificial Sequence
  Description of Artificial Sequence: Synthetic oligonucleotide
agacucucugagagggguc

SEQ ID NO: 1745407 - RNA, 19 nt, Artificial Sequence
  Description of Artificial Sequence: Synthetic oligonucleotide
cuagucguaaccggcagua

SEQ ID NO: 1745408 - RNA, 19 nt, Artificial Sequence
  Description of Artificial Sequence: Synthetic oligonucleotide
ggaaaucuucagcacucga

SEQ ID NO: 1745409 - RNA, 19 nt, Artificial Sequence
  Description of Artificial Sequence: Synthetic oligonucleotide
ucugcgcuacauccucgau

SEQ ID NO: 1745410 - RNA, 19 nt, Artificial Sequence
  Description of Artificial Sequence: Synthetic oligonucleotide
caguaccacgaacagccca

SEQ ID NO: 1745411 - RNA, 19 nt, Artificial Sequence
  Description of Artificial Sequence: Synthetic oligonucleotide
caggaccuuugguguaagc

SEQ ID NO: 1745412 - RNA, 19 nt, Artificial Sequence
  Description of Artificial Sequence: Synthetic oligonucleotide
acguaagugcgccgcgggu

SEQ ID NO: 1745413 - RNA, 19 nt, Artificial Sequence
  Description of Artificial Sequence: Synthetic oligonucleotide
gcuaucauggcuccauugu

SEQ ID NO: 1745414 - RNA, 19 nt, Artificial Sequence
  Description of Artificial Sequence: Synthetic oligonucleotide
cucaacuagcuucuugccu

SEQ ID NO: 1745415 - RNA, 19 nt, Artificial Sequence
  Description of Artificial Sequence: Synthetic oligonucleotide
ggaacccuaagccuugugu

SEQ ID NO: 1745416 - RNA, 19 nt, Artificial Sequence
  Description of Artificial Sequence: Synthetic oligonucleotide
ugcaccccggcucgggauc

SEQ ID NO: 1745417 - RNA, 19 nt, Artificial Sequence
  Description of Artificial Sequence: Synthetic oligonucleotide
cucccaaccugcuugggcu

SEQ ID NO: 1745418 - RNA, 19 nt, Artificial Sequence
  Description of Artificial Sequence: Synthetic oligonucleotide
uuacaguguauggcagcuc

SEQ ID NO: 1745419 - RNA, 19 nt, Artificial Sequence
  Description of Artificial Sequence: Synthetic oligonucleotide
acgaacagcccagaaccaa

SEQ ID NO: 1745420 - RNA, 19 nt, Artificial Sequence
  Description of Artificial Sequence: Synthetic oligonucleotide
uguuggcgcugccuucgaa

SEQ ID NO: 1745421 - RNA, 19 nt, Artificial Sequence
  Description of Artificial Sequence: Synthetic oligonucleotide
ccacuagcauugcaaacac

SEQ ID NO: 1745422 - RNA, 19 nt, Artificial Sequence
  Description of Artificial Sequence: Synthetic oligonucleotide
cccugagaaugagacaucc

SEQ ID NO: 1745423 - RNA, 19 nt, Artificial Sequence
  Description of Artificial Sequence: Synthetic oligonucleotide
cuccuggcacauugcugcc

SEQ ID NO: 1745424 - RNA, 19 nt, Artificial Sequence
  Description of Artificial Sequence: Synthetic oligonucleotide
ucguaaccggcaguaccac

SEQ ID NO: 1745425 - RNA, 19 nt, Artificial Sequence
  Description of Artificial Sequence: Synthetic oligonucleotide
aaccugcuugggcuaucau

SEQ ID NO: 1745426 - RNA, 19 nt, Artificial Sequence
  Description of Artificial Sequence: Synthetic oligonucleotide
agcacucgagcaaaacgau

SEQ ID NO: 1745427 - RNA, 19 nt, Artificial Sequence
  Description of Artificial Sequence: Synthetic oligonucleotide
acacaggucuucaggagua

SEQ ID NO: 1745428 - RNA, 19 nt, Artificial Sequence
  Description of Artificial Sequence: Synthetic oligonucleotide
ucauggcuccauugucaau

SEQ ID NO: 1745429 - RNA, 19 nt, Artificial Sequence
  Description of Artificial Sequence: Synthetic oligonucleotide
caccuugccgucgcgcacc

SEQ ID NO: 1745430 - RNA, 19 nt, Artificial Sequence
  Description of Artificial Sequence: Synthetic oligonucleotide
auguuguagccuggacuug

SEQ ID NO: 1745431 - RNA, 19 nt, Artificial Sequence
  Description of Artificial Sequence: Synthetic oligonucleotide
gcuaauggcuccagugaug

SEQ ID NO: 1745432 - RNA, 19 nt, Artificial Sequence
  Description of Artificial Sequence: Synthetic oligonucleotide
cacaggaacccuaagccuu

SEQ ID NO: 1745433 - RNA, 19 nt, Artificial Sequence
  Description of Artificial Sequence: Synthetic oligonucleotide
cuacauccucgaugaaaga

SEQ ID NO: 1745434 - RNA, 19 nt, Artificial Sequence
  Description of Artificial Sequence: Synthetic oligonucleotide
ccuaugcagugguucacac

SEQ ID NO: 1745435 - RNA, 19 nt, Artificial Sequence
  Description of Artificial Sequence: Synthetic oligonucleotide
guugggcuaauggcuccag

SEQ ID NO: 1745436 - RNA, 19 nt, Artificial Sequence
  Description of Artificial Sequence: Synthetic oligonucleotide
ggaacccugugcccggggc

SEQ ID NO: 1745437 - RNA, 19 nt, Artificial Sequence
  Description of Artificial Sequence: Synthetic oligonucleotide
uagucguaaccggcaguac

SEQ ID NO: 1745438 - RNA, 19 nt, Artificial Sequence
  Description of Artificial Sequence: Synthetic oligonucleotide
agugcgccgcggguucgcc

SEQ ID NO: 1745439 - RNA, 19 nt, Artificial Sequence
  Description of Artificial Sequence: Synthetic oligonucleotide
gggccgugacguaagugcg

SEQ ID NO: 1745440 - RNA, 19 nt, Artificial Sequence
  Description of Artificial Sequence: Synthetic oligonucleotide
augcgguaacgauguucug

SEQ ID NO: 1745441 - RNA, 19 nt, Artificial Sequence
  Description of Artificial Sequence: Synthetic oligonucleotide
ggcccauuucaauguggcc

SEQ ID NO: 1745442 - RNA, 19 nt, Artificial Sequence
  Description of Artificial Sequence: Synthetic oligonucleotide
cuccacgucacuucuacuu

SEQ ID NO: 1745443 - RNA, 19 nt, Artificial Sequence
  Description of Artificial Sequence: Synthetic oligonucleotide
uccuacgaugagggcuucc

SEQ ID NO: 1745444 - RNA, 19 nt, Artificial Sequence
  Description of Artificial Sequence: Synthetic oligonucleotide
ccuccgcugacauacaaaa

SEQ ID NO: 1745445 - RNA, 19 nt, Artificial Sequence
  Description of Artificial Sequence: Synthetic oligonucleotide
uguggccuaugcagugguu

SEQ ID NO: 1745446 - RNA, 19 nt, Artificial Sequence
  Description of Artificial Sequence: Synthetic oligonucleotide
ugcggauggcaggacuagu

SEQ ID NO: 1745447 - RNA, 19 nt, Artificial Sequence
  Description of Artificial Sequence: Synthetic oligonucleotide
gacuugggucauuggaaau

SEQ ID NO: 1745448 - RNA, 19 nt, Artificial Sequence
  Description of Artificial Sequence: Synthetic oligonucleotide
accaagcgaugggaccuuc

SEQ ID NO: 1745449 - RNA, 19 nt, Artificial Sequence
  Description of Artificial Sequence: Synthetic oligonucleotide
gguccauacacuagccaga

SEQ ID NO: 1745450 - RNA, 19 nt, Artificial Sequence
  Description of Artificial Sequence: Synthetic oligonucleotide
uagucccuccacgucacuu

SEQ ID NO: 1745451 - RNA, 19 nt, Artificial Sequence
  Description of Artificial Sequence: Synthetic oligonucleotide
cuccuccuacgaugagggc

SEQ ID NO: 1745452 - RNA, 19 nt, Artificial Sequence
  Description of Artificial Sequence: Synthetic oligonucleotide
gcccauuucaauguggccu

SEQ ID NO: 1745453 - RNA, 19 nt, Artificial Sequence
  Description of Artificial Sequence: Synthetic oligonucleotide
cacaccuaccaaaggcuua

SEQ ID NO: 1745454 - RNA, 19 nt, Artificial Sequence
  Description of Artificial Sequence: Synthetic oligonucleotide
ucccaaccugcuugggcua

SEQ ID NO: 1745455 - RNA, 19 nt, Artificial Sequence
  Description of Artificial Sequence: Synthetic oligonucleotide
ggaucugcggauggcagga

SEQ ID NO: 1745456 - RNA, 19 nt, Artificial Sequence
  Description of Artificial Sequence: Synthetic oligonucleotide
guuuccccaaagaugcggu

SEQ ID NO: 1745457 - RNA, 19 nt, Artificial Sequence
  Description of Artificial Sequence: Synthetic oligonucleotide
caguacgggcaacgacagc

SEQ ID NO: 1745458 - RNA, 19 nt, Artificial Sequence
  Description of Artificial Sequence: Synthetic oligonucleotide
caaaacgauccagacaauu

SEQ ID NO: 1745459 - RNA, 19 nt, Artificial Sequence
  Description of Artificial Sequence: Synthetic oligonucleotide
agccaauggggcucccaua

SEQ ID NO: 1745460 - RNA, 19 nt, Artificial Sequence
  Description of Artificial Sequence: Synthetic oligonucleotide
cacaggucuucaggaguac

SEQ ID NO: 1745461 - RNA, 19 nt, Artificial Sequence
  Description of Artificial Sequence: Synthetic oligonucleotide
gccgugacguaagugcgcc

SEQ ID NO: 1745462 - RNA, 19 nt, Artificial Sequence
  Description of Artificial Sequence: Synthetic oligonucleotide
ggacuagucguaaccggca

SEQ ID NO: 1745463 - RNA, 19 nt, Artificial Sequence
  Description of Artificial Sequence: Synthetic oligonucleotide
aaccaagcgaugggaccuu

SEQ ID NO: 1745464 - RNA, 19 nt, Artificial Sequence
  Description of Artificial Sequence: Synthetic oligonucleotide
ggcgcugccuucgaacccc

SEQ ID NO: 1745465 - RNA, 19 nt, Artificial Sequence
  Description of Artificial Sequence: Synthetic oligonucleotide
ccuggacuugggucauugg

SEQ ID NO: 1745466 - RNA, 19 nt, Artificial Sequence
  Description of Artificial Sequence: Synthetic oligonucleotide
uugggcuaucauggcucca

SEQ ID NO: 1745467 - RNA, 19 nt, Artificial Sequence
  Description of Artificial Sequence: Synthetic oligonucleotide
cgugacguaagugcgccgc

SEQ ID NO: 1745468 - RNA, 19 nt, Artificial Sequence
  Description of Artificial Sequence: Synthetic oligonucleotide
ucgccagcaccuugccguc

SEQ ID NO: 1745469 - RNA, 19 nt, Artificial Sequence
  Description of Artificial Sequence: Synthetic oligonucleotide
acgggcaacgacagcuaca

SEQ ID NO: 1745470 - RNA, 19 nt, Artificial Sequence
  Description of Artificial Sequence: Synthetic oligonucleotide
ccggcaguaccacgaacag

SEQ ID NO: 1745471 - RNA, 19 nt, Artificial Sequence
  Description of Artificial Sequence: Synthetic oligonucleotide
ccacaguacgggcaacgac

SEQ ID NO: 1745472 - RNA, 19 nt, Artificial Sequence
  Description of Artificial Sequence: Synthetic oligonucleotide
cguaaccggcaguaccacg

SEQ ID NO: 1745473 - RNA, 19 nt, Artificial Sequence
  Description of Artificial Sequence: Synthetic oligonucleotide
cccuaagccuugugugggg

SEQ ID NO: 1745474 - RNA, 19 nt, Artificial Sequence
  Description of Artificial Sequence: Synthetic oligonucleotide
cccauaccaggaccuuugg

SEQ ID NO: 1745475 - RNA, 19 nt, Artificial Sequence
  Description of Artificial Sequence: Synthetic oligonucleotide
cgggcaacgacagcuacag

SEQ ID NO: 1745476 - RNA, 19 nt, Artificial Sequence
  Description of Artificial Sequence: Synthetic oligonucleotide
cuauucugguccuguuagu

SEQ ID NO: 1745477 - RNA, 19 nt, Artificial Sequence
  Description of Artificial Sequence: Synthetic oligonucleotide
gccgucgcgcaccacgccc

SEQ ID NO: 1745478 - RNA, 19 nt, Artificial Sequence
  Description of Artificial Sequence: Synthetic oligonucleotide
cgucacuucuacuucaucu

SEQ ID NO: 1745479 - RNA, 19 nt, Artificial Sequence
  Description of Artificial Sequence: Synthetic oligonucleotide
acguuacauccaacuccuc

SEQ ID NO: 1745480 - RNA, 19 nt, Artificial Sequence
  Description of Artificial Sequence: Synthetic oligonucleotide
gucucacguuacauccaac

SEQ ID NO: 1745481 - RNA, 19 nt, Artificial Sequence
  Description of Artificial Sequence: Synthetic oligonucleotide
cagacucucugagaggggu

SEQ ID NO: 1745482 - RNA, 19 nt, Artificial Sequence
  Description of Artificial Sequence: Synthetic oligonucleotide
acaguguauggcagcucaa

SEQ ID NO: 1745483 - RNA, 19 nt, Artificial Sequence
  Description of Artificial Sequence: Synthetic oligonucleotide
cuagcuucuugccucgcuu

SEQ ID NO: 1745484 - RNA, 19 nt, Artificial Sequence
  Description of Artificial Sequence: Synthetic oligonucleotide
gcaguaggucuagaauaac

SEQ ID NO: 1745485 - RNA, 19 nt, Artificial Sequence
  Description of Artificial Sequence: Synthetic oligonucleotide
ccccaaagaugcgguaacg

SEQ ID NO: 1745486 - RNA, 19 nt, Artificial Sequence
  Description of Artificial Sequence: Synthetic oligonucleotide
cacuccacuuggcaagcua

SEQ ID NO: 1745487 - RNA, 19 nt, Artificial Sequence
  Description of Artificial Sequence: Synthetic oligonucleotide
gccuggacuugggucauug

SEQ ID NO: 1745488 - RNA, 19 nt, Artificial Sequence
  Description of Artificial Sequence: Synthetic oligonucleotide
ccagaaccaagcgauggga

SEQ ID NO: 1745489 - RNA, 19 nt, Artificial Sequence
  Description of Artificial Sequence: Synthetic oligonucleotide
cccggcucgggaucugcgg

SEQ ID NO: 1745490 - RNA, 19 nt, Artificial Sequence
  Description of Artificial Sequence: Synthetic oligonucleotide
cagcauuuucugcgcuaca

SEQ ID NO: 1745491 - RNA, 19 nt, Artificial Sequence
  Description of Artificial Sequence: Synthetic oligonucleotide
cccauuucaauguggccua

SEQ ID NO: 1745492 - RNA, 19 nt, Artificial Sequence
  Description of Artificial Sequence: Synthetic oligonucleotide
acaaaacaguugggcuaau

SEQ ID NO: 1745493 - RNA, 19 nt, Artificial Sequence
  Description of Artificial Sequence: Synthetic oligonucleotide
gcacucgagcaaaacgauc

SEQ ID NO: 1745494 - RNA, 19 nt, Artificial Sequence
  Description of Artificial Sequence: Synthetic oligonucleotide
cccaaagaugcgguaacga

SEQ ID NO: 1745495 - RNA, 19 nt, Artificial Sequence
  Description of Artificial Sequence: Synthetic oligonucleotide
guaccacgaacagcccaga

SEQ ID NO: 1745496 - RNA, 19 nt, Artificial Sequence
  Description of Artificial Sequence: Synthetic oligonucleotide
cgauccagacaauuuccca

SEQ ID NO: 1745497 - RNA, 19 nt, Artificial Sequence
  Description of Artificial Sequence: Synthetic oligonucleotide
ccucuugcaguaggucuag

SEQ ID NO: 1745498 - RNA, 19 nt, Artificial Sequence
  Description of Artificial Sequence: Synthetic oligonucleotide
ggccgugacguaagugcgc

SEQ ID NO: 1745499 - RNA, 19 nt, Artificial Sequence
  Description of Artificial Sequence: Synthetic oligonucleotide
gucgcgcaccacgcccacg

SEQ ID NO: 1745500 - RNA, 19 nt, Artificial Sequence
  Description of Artificial Sequence: Synthetic oligonucleotide
gcaguaccacgaacagccc

SEQ ID NO: 1745501 - RNA, 19 nt, Artificial Sequence
  Description of Artificial Sequence: Synthetic oligonucleotide
cauuccccuguggccagca

SEQ ID NO: 1745502 - RNA, 19 nt, Artificial Sequence
  Description of Artificial Sequence: Synthetic oligonucleotide
ggcaagcuauucugguccu

SEQ ID NO: 1745503 - RNA, 19 nt, Artificial Sequence
  Description of Artificial Sequence: Synthetic oligonucleotide
ccgcggguucgccagcacc

SEQ ID NO: 1745504 - RNA, 19 nt, Artificial Sequence
  Description of Artificial Sequence: Synthetic oligonucleotide
augaggcggcccauuucaa

SEQ ID NO: 1745505 - RNA, 19 nt, Artificial Sequence
  Description of Artificial Sequence: Synthetic oligonucleotide
ggccuaugcagugguucac

SEQ ID NO: 1745506 - RNA, 19 nt, Artificial Sequence
  Description of Artificial Sequence: Synthetic oligonucleotide
cccgcuccuggcacauugc

SEQ ID NO: 1745507 - RNA, 19 nt, Artificial Sequence
  Description of Artificial Sequence: Synthetic oligonucleotide
ggugcaccccggcucggga

SEQ ID NO: 1745508 - RNA, 19 nt, Artificial Sequence
  Description of Artificial Sequence: Synthetic oligonucleotide
ccgugacguaagugcgccg

SEQ ID NO: 1745509 - RNA, 19 nt, Artificial Sequence
  Description of Artificial Sequence: Synthetic oligonucleotide
gugcccggggccgugacgu

SEQ ID NO: 1745510 - RNA, 19 nt, Artificial Sequence
  Description of Artificial Sequence: Synthetic oligonucleotide
ccacaggaacccuaagccu

SEQ ID NO: 1745511 - RNA, 19 nt, Artificial Sequence
  Description of Artificial Sequence: Synthetic oligonucleotide
cccggggccgugacguaag

SEQ ID NO: 1745512 - RNA, 19 nt, Artificial Sequence
  Description of Artificial Sequence: Synthetic oligonucleotide
gccgaucuuguuggcgcug

SEQ ID NO: 1745513 - RNA, 19 nt, Artificial Sequence
  Description of Artificial Sequence: Synthetic oligonucleotide
ccaggaccuuugguguaag

SEQ ID NO: 1745514 - RNA, 19 nt, Artificial Sequence
  Description of Artificial Sequence: Synthetic oligonucleotide
cugcagucucacguuacau

SEQ ID NO: 1745515 - RNA, 19 nt, Artificial Sequence
  Description of Artificial Sequence: Synthetic oligonucleotide
cuccuacgaugagggcuuc

SEQ ID NO: 1745516 - RNA, 19 nt, Artificial Sequence
  Description of Artificial Sequence: Synthetic oligonucleotide
augcagugguucacaccua

SEQ ID NO: 1745517 - RNA, 19 nt, Artificial Sequence
  Description of Artificial Sequence: Synthetic oligonucleotide
cgggcauggugcaccccgg

SEQ ID NO: 1745518 - RNA, 19 nt, Artificial Sequence
  Description of Artificial Sequence: Synthetic oligonucleotide
ccauaguaucaccaagauu

SEQ ID NO: 1745519 - RNA, 19 nt, Artificial Sequence
  Description of Artificial Sequence: Synthetic oligonucleotide
guccuauguccagcuugaa

SEQ ID NO: 1745520 - RNA, 19 nt, Artificial Sequence
  Description of Artificial Sequence: Synthetic oligonucleotide
cggcaguaccacgaacagc

SEQ ID NO: 1745521 - RNA, 19 nt, Artificial Sequence
  Description of Artificial Sequence: Synthetic oligonucleotide
cgcuuugccaucugcucaa

SEQ ID NO: 1745522 - RNA, 19 nt, Artificial Sequence
  Description of Artificial Sequence: Synthetic oligonucleotide
ccuccuacgaugagggcuu

SEQ ID NO: 1745523 - RNA, 19 nt, Artificial Sequence
  Description of Artificial Sequence: Synthetic oligonucleotide
ccuacgaugagggcuuccu

SEQ ID NO: 1745524 - RNA, 19 nt, Artificial Sequence
  Description of Artificial Sequence: Synthetic oligonucleotide
ccacgccgaucuuguuggc

SEQ ID NO: 1745525 - RNA, 19 nt, Artificial Sequence
  Description of Artificial Sequence: Synthetic oligonucleotide
ccggcucgggaucugcgga

SEQ ID NO: 1745526 - RNA, 19 nt, Artificial Sequence
  Description of Artificial Sequence: Synthetic oligonucleotide
ugcccggggccgugacgua

SEQ ID NO: 1745527 - RNA, 19 nt, Artificial Sequence
  Description of Artificial Sequence: Synthetic oligonucleotide
gugcaccccggcucgggau

SEQ ID NO: 1745528 - RNA, 19 nt, Artificial Sequence
  Description of Artificial Sequence: Synthetic oligonucleotide
gcaccgcgggcauggugca

SEQ ID NO: 1745529 - RNA, 19 nt, Artificial Sequence
  Description of Artificial Sequence: Synthetic oligonucleotide
gggcaacgacagcuacaga

SEQ ID NO: 1745530 - RNA, 19 nt, Artificial Sequence
  Description of Artificial Sequence: Synthetic oligonucleotide
ccauccccuuuacagugua

SEQ ID NO: 1745531 - RNA, 19 nt, Artificial Sequence
  Description of Artificial Sequence: Synthetic oligonucleotide
cgcugacauacaaaacagu

SEQ ID NO: 1745532 - RNA, 19 nt, Artificial Sequence
  Description of Artificial Sequence: Synthetic oligonucleotide
ccgucgcgcaccacgccca

SEQ ID NO: 1745533 - RNA, 19 nt, Artificial Sequence
  Description of Artificial Sequence: Synthetic oligonucleotide
cggguucgccagcaccuug

SEQ ID NO: 1745534 - RNA, 19 nt, Artificial Sequence
  Description of Artificial Sequence: Synthetic oligonucleotide
caggaacccuaagccuugu

SEQ ID NO: 1745535 - RNA, 19 nt, Artificial Sequence
  Description of Artificial Sequence: Synthetic oligonucleotide
ccuaagccuuguguggggu

SEQ ID NO: 1745536 - RNA, 19 nt, Artificial Sequence
  Description of Artificial Sequence: Synthetic oligonucleotide
caccccggcucgggaucug

SEQ ID NO: 1745537 - RNA, 19 nt, Artificial Sequence
  Description of Artificial Sequence: Synthetic oligonucleotide
cgcggguucgccagcaccu

SEQ ID NO: 1745538 - RNA, 19 nt, Artificial Sequence
  Description of Artificial Sequence: Synthetic oligonucleotide
agccuggacuugggucauu

SEQ ID NO: 1745539 - RNA, 19 nt, Artificial Sequence
  Description of Artificial Sequence: Synthetic oligonucleotide
gccgcggguucgccagcac

SEQ ID NO: 1745540 - RNA, 19 nt, Artificial Sequence
  Description of Artificial Sequence: Synthetic oligonucleotide
gggcuaucauggcuccauu

SEQ ID NO: 1745541 - RNA, 19 nt, Artificial Sequence
  Description of Artificial Sequence: Synthetic oligonucleotide
gcaaaacgauccagacaau

SEQ ID NO: 1745542 - RNA, 19 nt, Artificial Sequence
  Description of Artificial Sequence: Synthetic oligonucleotide
cgcgcaccacgcccacgcc

SEQ ID NO: 1745543 - RNA, 19 nt, Artificial Sequence
  Description of Artificial Sequence: Synthetic oligonucleotide
ccgcuccuggcacauugcu

SEQ ID NO: 1745544 - RNA, 19 nt, Artificial Sequence
  Description of Artificial Sequence: Synthetic oligonucleotide
gcgcuacauccucgaugaa

SEQ ID NO: 1745545 - RNA, 19 nt, Artificial Sequence
  Description of Artificial Sequence: Synthetic oligonucleotide
cgucgcgcaccacgcccac

SEQ ID NO: 1745546 - RNA, 19 nt, Artificial Sequence
  Description of Artificial Sequence: Synthetic oligonucleotide
ccuguaccucuguguaauu

SEQ ID NO: 1745547 - RNA, 19 nt, Artificial Sequence
  Description of Artificial Sequence: Synthetic oligonucleotide
cguaagugcgccgcggguu

SEQ ID NO: 1745548 - RNA, 19 nt, Artificial Sequence
  Description of Artificial Sequence: Synthetic oligonucleotide
caccuaccaaaggcuuauu

SEQ ID NO: 1745549 - RNA, 19 nt, Artificial Sequence
  Description of Artificial Sequence: Synthetic oligonucleotide
gcaccccggcucgggaucu

SEQ ID NO: 1745550 - RNA, 19 nt, Artificial Sequence
  Description of Artificial Sequence: Synthetic oligonucleotide
cgguaacgauguucugagu

SEQ ID NO: 1745551 - RNA, 19 nt, Artificial Sequence
  Description of Artificial Sequence: Synthetic oligonucleotide
ccauuucaauguggccuau

SEQ ID NO: 1745552 - RNA, 19 nt, Artificial Sequence
  Description of Artificial Sequence: Synthetic oligonucleotide
cgccgaucuuguuggcgcu

SEQ ID NO: 1745553 - RNA, 19 nt, Artificial Sequence
  Description of Artificial Sequence: Synthetic oligonucleotide
cgcgggcauggugcacccc

SEQ ID NO: 1745554 - RNA, 19 nt, Artificial Sequence
  Description of Artificial Sequence: Synthetic oligonucleotide
ccccagcaccgcgggcaug

SEQ ID NO: 1745555 - RNA, 19 nt, Artificial Sequence
  Description of Artificial Sequence: Synthetic oligonucleotide
cccaaccugcuugggcuau

SEQ ID NO: 1745556 - RNA, 19 nt, Artificial Sequence
  Description of Artificial Sequence: Synthetic oligonucleotide
gcggguucgccagcaccuu

SEQ ID NO: 1745557 - RNA, 19 nt, Artificial Sequence
  Description of Artificial Sequence: Synthetic oligonucleotide
ccggggccgugacguaagu

SEQ ID NO: 1745558 - RNA, 19 nt, Artificial Sequence
  Description of Artificial Sequence: Synthetic oligonucleotide
cgccgcggguucgccagca

SEQ ID NO: 1745559 - RNA, 19 nt, Artificial Sequence
  Description of Artificial Sequence: Synthetic oligonucleotide
aaagcuuucauauagagau

SEQ ID NO: 1745560 - RNA, 19 nt, Artificial Sequence
  Description of Artificial Sequence: Synthetic oligonucleotide
uucguuucagccuugaugg

SEQ ID NO: 1745561 - RNA, 19 nt, Artificial Sequence
  Description of Artificial Sequence: Synthetic oligonucleotide
acuuuugaagguuuaaccc

SEQ ID NO: 1745562 - RNA, 19 nt, Artificial Sequence
  Description of Artificial Sequence: Synthetic oligonucleotide
gaagguuuaaccccgaucc

SEQ ID NO: 1745563 - RNA, 19 nt, Artificial Sequence
  Description of Artificial Sequence: Synthetic oligonucleotide
uuuacugagaccagcuugg

SEQ ID NO: 1745564 - RNA, 19 nt, Artificial Sequence
  Description of Artificial Sequence: Synthetic oligonucleotide
uuuccaaagggagagaagg

SEQ ID NO: 1745565 - RNA, 19 nt, Artificial Sequence
  Description of Artificial Sequence: Synthetic oligonucleotide
uuuugaagguuuaaccccg

SEQ ID NO: 1745566 - RNA, 19 nt, Artificial Sequence
  Description of Artificial Sequence: Synthetic oligonucleotide
aucgcuagaagacacaaag

SEQ ID NO: 1745567 - RNA, 19 nt, Artificial Sequence
  Description of Artificial Sequence: Synthetic oligonucleotide
auagagauuuccuuugggg

SEQ ID NO: 1745568 - RNA, 19 nt, Artificial Sequence
  Description of Artificial Sequence: Synthetic oligonucleotide
aguguugaaagacuagagg

SEQ ID NO: 1745569 - RNA, 19 nt, Artificial Sequence
  Description of Artificial Sequence: Synthetic oligonucleotide
agcuucguguccuaaaagc

SEQ ID NO: 1745570 - RNA, 19 nt, Artificial Sequence
  Description of Artificial Sequence: Synthetic oligonucleotide
acggauuccaccugggucc

SEQ ID NO: 1745571 - RNA, 19 nt, Artificial Sequence
  Description of Artificial Sequence: Synthetic oligonucleotide
aaggaauccagcuucgugu

SEQ ID NO: 1745572 - RNA, 19 nt, Artificial Sequence
  Description of Artificial Sequence: Synthetic oligonucleotide
acacaaagcuuucauauag

SEQ ID NO: 1745573 - RNA, 19 nt, Artificial Sequence
  Description of Artificial Sequence: Synthetic oligonucleotide
agacagauuugccaguagc

SEQ ID NO: 1745574 - RNA, 19 nt, Artificial Sequence
  Description of Artificial Sequence: Synthetic oligonucleotide
uuugacgccacccuggcug

SEQ ID NO: 1745575 - RNA, 19 nt, Artificial Sequence
  Description of Artificial Sequence: Synthetic oligonucleotide
uauagagauuuccuuuggg

SEQ ID NO: 1745576 - RNA, 19 nt, Artificial Sequence
  Description of Artificial Sequence: Synthetic oligonucleotide
uuucauauagagauuuccu

SEQ ID NO: 1745577 - RNA, 19 nt, Artificial Sequence
  Description of Artificial Sequence: Synthetic oligonucleotide
ucacuguacacaaucuggg

SEQ ID NO: 1745578 - RNA, 19 nt, Artificial Sequence
  Description of Artificial Sequence: Synthetic oligonucleotide
gauguuuccaaagggagag

SEQ ID NO: 1745579 - RNA, 19 nt, Artificial Sequence
  Description of Artificial Sequence: Synthetic oligonucleotide
uguccuaaaagccauccac

SEQ ID NO: 1745580 - RNA, 19 nt, Artificial Sequence
  Description of Artificial Sequence: Synthetic oligonucleotide
acuguacacaaucuggguc

SEQ ID NO: 1745581 - RNA, 19 nt, Artificial Sequence
  Description of Artificial Sequence: Synthetic oligonucleotide
gacagugagcguuugacgc

SEQ ID NO: 1745582 - RNA, 19 nt, Artificial Sequence
  Description of Artificial Sequence: Synthetic oligonucleotide
auacacauaaaguguguuc

SEQ ID NO: 1745583 - RNA, 19 nt, Artificial Sequence
  Description of Artificial Sequence: Synthetic oligonucleotide
uccaucuuuucauagguga

SEQ ID NO: 1745584 - RNA, 19 nt, Artificial Sequence
  Description of Artificial Sequence: Synthetic oligonucleotide
aaugagucugaccugcgga

SEQ ID NO: 1745585 - RNA, 19 nt, Artificial Sequence
  Description of Artificial Sequence: Synthetic oligonucleotide
aagguuuaaccccgauccc

SEQ ID NO: 1745586 - RNA, 19 nt, Artificial Sequence
  Description of Artificial Sequence: Synthetic oligonucleotide
gauacgcuccucuggaacg

SEQ ID NO: 1745587 - RNA, 19 nt, Artificial Sequence
  Description of Artificial Sequence: Synthetic oligonucleotide
uauguugacuuugagcugc

SEQ ID NO: 1745588 - RNA, 19 nt, Artificial Sequence
  Description of Artificial Sequence: Synthetic oligonucleotide
uagagauuuccuuugggga

SEQ ID NO: 1745589 - RNA, 19 nt, Artificial Sequence
  Description of Artificial Sequence: Synthetic oligonucleotide
aacggccugaucugcagac

SEQ ID NO: 1745590 - RNA, 19 nt, Artificial Sequence
  Description of Artificial Sequence: Synthetic oligonucleotide
uguguuccccuuccgaggg

SEQ ID NO: 1745591 - RNA, 19 nt, Artificial Sequence
  Description of Artificial Sequence: Synthetic oligonucleotide
uccuaaaagccauccacag

SEQ ID NO: 1745592 - RNA, 19 nt, Artificial Sequence
  Description of Artificial Sequence: Synthetic oligonucleotide
auauagagauuuccuuugg

SEQ ID NO: 1745593 - RNA, 19 nt, Artificial Sequence
  Description of Artificial Sequence: Synthetic oligonucleotide
ugaguucuucguuucagcc

SEQ ID NO: 1745594 - RNA, 19 nt, Artificial Sequence
  Description of Artificial Sequence: Synthetic oligonucleotide
ucauauagagauuuccuuu

SEQ ID NO: 1745595 - RNA, 19 nt, Artificial Sequence
  Description of Artificial Sequence: Synthetic oligonucleotide
cuuuucauaggugacgaag

SEQ ID NO: 1745596 - RNA, 19 nt, Artificial Sequence
  Description of Artificial Sequence: Synthetic oligonucleotide
agauacgcuccucuggaac

SEQ ID NO: 1745597 - RNA, 19 nt, Artificial Sequence
  Description of Artificial Sequence: Synthetic oligonucleotide
uuaaccccgaucccaagug

SEQ ID NO: 1745598 - RNA, 19 nt, Artificial Sequence
  Description of Artificial Sequence: Synthetic oligonucleotide
uacagaucgucacuguaca

SEQ ID NO: 1745599 - RNA, 19 nt, Artificial Sequence
  Description of Artificial Sequence: Synthetic oligonucleotide
cuucguuucagccuugaug

SEQ ID NO: 1745600 - RNA, 19 nt, Artificial Sequence
  Description of Artificial Sequence: Synthetic oligonucleotide
acagugagcguuugacgcc

SEQ ID NO: 1745601 - RNA, 19 nt, Artificial Sequence
  Description of Artificial Sequence: Synthetic oligonucleotide
gucacuguacacaaucugg

SEQ ID NO: 1745602 - RNA, 19 nt, Artificial Sequence
  Description of Artificial Sequence: Synthetic oligonucleotide
uuugcuucuugagagcgag

SEQ ID NO: 1745603 - RNA, 19 nt, Artificial Sequence
  Description of Artificial Sequence: Synthetic oligonucleotide
aguguguuccccuuccgag

SEQ ID NO: 1745604 - RNA, 19 nt, Artificial Sequence
  Description of Artificial Sequence: Synthetic oligonucleotide
uucauauagagauuuccuu

SEQ ID NO: 1745605 - RNA, 19 nt, Artificial Sequence
  Description of Artificial Sequence: Synthetic oligonucleotide
cugaccugcggaaagggcc

SEQ ID NO: 1745606 - RNA, 19 nt, Artificial Sequence
  Description of Artificial Sequence: Synthetic oligonucleotide
agcagauacgcuccucugg

SEQ ID NO: 1745607 - RNA, 19 nt, Artificial Sequence
  Description of Artificial Sequence: Synthetic oligonucleotide
uuuaaccccgaucccaagu

SEQ ID NO: 1745608 - RNA, 19 nt, Artificial Sequence
  Description of Artificial Sequence: Synthetic oligonucleotide
uggaacggcuggaaagugg

SEQ ID NO: 1745609 - RNA, 19 nt, Artificial Sequence
  Description of Artificial Sequence: Synthetic oligonucleotide
gcuauguugacuuugagcu

SEQ ID NO: 1745610 - RNA, 19 nt, Artificial Sequence
  Description of Artificial Sequence: Synthetic oligonucleotide
agcguuugaagccugaguu

SEQ ID NO: 1745611 - RNA, 19 nt, Artificial Sequence
  Description of Artificial Sequence: Synthetic oligonucleotide
aaaaccucggggugggcca

SEQ ID NO: 1745612 - RNA, 19 nt, Artificial Sequence
  Description of Artificial Sequence: Synthetic oligonucleotide
gaaugagucugaccugcgg

SEQ ID NO: 1745613 - RNA, 19 nt, Artificial Sequence
  Description of Artificial Sequence: Synthetic oligonucleotide
uuuccuuuggggacgucug

SEQ ID NO: 1745614 - RNA, 19 nt, Artificial Sequence
  Description of Artificial Sequence: Synthetic oligonucleotide
cagauuugccaguagcagc

SEQ ID NO: 1745615 - RNA, 19 nt, Artificial Sequence
  Description of Artificial Sequence: Synthetic oligonucleotide
cuacagaucgucacuguac

SEQ ID NO: 1745616 - RNA, 19 nt, Artificial Sequence
  Description of Artificial Sequence: Synthetic oligonucleotide
ugaagguuuaaccccgauc

SEQ ID NO: 1745617 - RNA, 19 nt, Artificial Sequence
  Description of Artificial Sequence: Synthetic oligonucleotide
uuuccuacagaucgucacu

SEQ ID NO: 1745618 - RNA, 19 nt, Artificial Sequence
  Description of Artificial Sequence: Synthetic oligonucleotide
cuguuugcgggcuauguug

SEQ ID NO: 1745619 - RNA, 19 nt, Artificial Sequence
  Description of Artificial Sequence: Synthetic oligonucleotide
ccucucaugacuucggucg

SEQ ID NO: 1745620 - RNA, 19 nt, Artificial Sequence
  Description of Artificial Sequence: Synthetic oligonucleotide
gggcauacgaggcacaagg

SEQ ID NO: 1745621 - RNA, 19 nt, Artificial Sequence
  Description of Artificial Sequence: Synthetic oligonucleotide
caucuuuucauaggugacg

SEQ ID NO: 1745622 - RNA, 19 nt, Artificial Sequence
  Description of Artificial Sequence: Synthetic oligonucleotide
caaccgaucgcuagaagac

SEQ ID NO: 1745623 - RNA, 19 nt, Artificial Sequence
  Description of Artificial Sequence: Synthetic oligonucleotide
gagauuuccuuuggggacg

SEQ ID NO: 1745624 - RNA, 19 nt, Artificial Sequence
  Description of Artificial Sequence: Synthetic oligonucleotide
uugagagcgagcaaugcuu

SEQ ID NO: 1745625 - RNA, 19 nt, Artificial Sequence
  Description of Artificial Sequence: Synthetic oligonucleotide
aggaauccagcuucguguc

SEQ ID NO: 1745626 - RNA, 19 nt, Artificial Sequence
  Description of Artificial Sequence: Synthetic oligonucleotide
cucuggaacggcuggaaag

SEQ ID NO: 1745627 - RNA, 19 nt, Artificial Sequence
  Description of Artificial Sequence: Synthetic oligonucleotide
guuuccuacagaucgucac

SEQ ID NO: 1745628 - RNA, 19 nt, Artificial Sequence
  Description of Artificial Sequence: Synthetic oligonucleotide
uuagggcuguucuggacag

SEQ ID NO: 1745629 - RNA, 19 nt, Artificial Sequence
  Description of Artificial Sequence: Synthetic oligonucleotide
uguucuggacagcaaggga

SEQ ID NO: 1745630 - RNA, 19 nt, Artificial Sequence
  Description of Artificial Sequence: Synthetic oligonucleotide
acagauuugccaguagcag

SEQ ID NO: 1745631 - RNA, 19 nt, Artificial Sequence
  Description of Artificial Sequence: Synthetic oligonucleotide
cuuuaacuuccccucuagg

SEQ ID NO: 1745632 - RNA, 19 nt, Artificial Sequence
  Description of Artificial Sequence: Synthetic oligonucleotide
ucgcuagaagacacaaagc

SEQ ID NO: 1745633 - RNA, 19 nt, Artificial Sequence
  Description of Artificial Sequence: Synthetic oligonucleotide
aguucuucguuucagccuu

SEQ ID NO: 1745634 - RNA, 19 nt, Artificial Sequence
  Description of Artificial Sequence: Synthetic oligonucleotide
ugcggaaagggcccucgcg

SEQ ID NO: 1745635 - RNA, 19 nt, Artificial Sequence
  Description of Artificial Sequence: Synthetic oligonucleotide
aaguguguuccccuuccga

SEQ ID NO: 1745636 - RNA, 19 nt, Artificial Sequence
  Description of Artificial Sequence: Synthetic oligonucleotide
gauggcuccugacuuuacc

SEQ ID NO: 1745637 - RNA, 19 nt, Artificial Sequence
  Description of Artificial Sequence: Synthetic oligonucleotide
auacgaggcacaaggaauc

SEQ ID NO: 1745638 - RNA, 19 nt, Artificial Sequence
  Description of Artificial Sequence: Synthetic oligonucleotide
aagggaaccccagacagau

SEQ ID NO: 1745639 - RNA, 19 nt, Artificial Sequence
  Description of Artificial Sequence: Synthetic oligonucleotide
uucguguccuaaaagccau

SEQ ID NO: 1745640 - RNA, 19 nt, Artificial Sequence
  Description of Artificial Sequence: Synthetic oligonucleotide
ugaccugcggaaagggccc

SEQ ID NO: 1745641 - RNA, 19 nt, Artificial Sequence
  Description of Artificial Sequence: Synthetic oligonucleotide
gguccuuuugucccggugg

SEQ ID NO: 1745642 - RNA, 19 nt, Artificial Sequence
  Description of Artificial Sequence: Synthetic oligonucleotide
uccuuucggggaaugaguc

SEQ ID NO: 1745643 - RNA, 19 nt, Artificial Sequence
  Description of Artificial Sequence: Synthetic oligonucleotide
agauuugccaguagcagca

SEQ ID NO: 1745644 - RNA, 19 nt, Artificial Sequence
  Description of Artificial Sequence: Synthetic oligonucleotide
acagaucgucacuguacac

SEQ ID NO: 1745645 - RNA, 19 nt, Artificial Sequence
  Description of Artificial Sequence: Synthetic oligonucleotide
uaacuuccccucuaggguc

SEQ ID NO: 1745646 - RNA, 19 nt, Artificial Sequence
  Description of Artificial Sequence: Synthetic oligonucleotide
ggcuauguugacuuugagc

SEQ ID NO: 1745647 - RNA, 19 nt, Artificial Sequence
  Description of Artificial Sequence: Synthetic oligonucleotide
cguagcuccagucaaaacc

SEQ ID NO: 1745648 - RNA, 19 nt, Artificial Sequence
  Description of Artificial Sequence: Synthetic oligonucleotide
gagucugaccugcggaaag

SEQ ID NO: 1745649 - RNA, 19 nt, Artificial Sequence
  Description of Artificial Sequence: Synthetic oligonucleotide
aaccccagacagauuugcc

SEQ ID NO: 1745650 - RNA, 19 nt, Artificial Sequence
  Description of Artificial Sequence: Synthetic oligonucleotide
cugaguucuucguuucagc

SEQ ID NO: 1745651 - RNA, 19 nt, Artificial Sequence
  Description of Artificial Sequence: Synthetic oligonucleotide
auuugccaguagcagcauc

SEQ ID NO: 1745652 - RNA, 19 nt, Artificial Sequence
  Description of Artificial Sequence: Synthetic oligonucleotide
ucugaccugcggaaagggc

SEQ ID NO: 1745653 - RNA, 19 nt, Artificial Sequence
  Description of Artificial Sequence: Synthetic oligonucleotide
ucggggugggccaucacca

SEQ ID NO: 1745654 - RNA, 19 nt, Artificial Sequence
  Description of Artificial Sequence: Synthetic oligonucleotide
gacagauuugccaguagca

SEQ ID NO: 1745655 - RNA, 19 nt, Artificial Sequence
  Description of Artificial Sequence: Synthetic oligonucleotide
aucuuuucauaggugacga

SEQ ID NO: 1745656 - RNA, 19 nt, Artificial Sequence
  Description of Artificial Sequence: Synthetic oligonucleotide
ugagcguuugacgccaccc

SEQ ID NO: 1745657 - RNA, 19 nt, Artificial Sequence
  Description of Artificial Sequence: Synthetic oligonucleotide
caaggaauccagcuucgug

SEQ ID NO: 1745658 - RNA, 19 nt, Artificial Sequence
  Description of Artificial Sequence: Synthetic oligonucleotide
aagccugaguucuucguuu

SEQ ID NO: 1745659 - RNA, 19 nt, Artificial Sequence
  Description of Artificial Sequence: Synthetic oligonucleotide
uuugaagguuuaaccccga

SEQ ID NO: 1745660 - RNA, 19 nt, Artificial Sequence
  Description of Artificial Sequence: Synthetic oligonucleotide
acugacagccacuuuugaa

SEQ ID NO: 1745661 - RNA, 19 nt, Artificial Sequence
  Description of Artificial Sequence: Synthetic oligonucleotide
aguucccgcaaccgaucgc

SEQ ID NO: 1745662 - RNA, 19 nt, Artificial Sequence
  Description of Artificial Sequence: Synthetic oligonucleotide
ucgucacuguacacaaucu

SEQ ID NO: 1745663 - RNA, 19 nt, Artificial Sequence
  Description of Artificial Sequence: Synthetic oligonucleotide
uuccuacagaucgucacug

SEQ ID NO: 1745664 - RNA, 19 nt, Artificial Sequence
  Description of Artificial Sequence: Synthetic oligonucleotide
accauguucuucguagcuc

SEQ ID NO: 1745665 - RNA, 19 nt, Artificial Sequence
  Description of Artificial Sequence: Synthetic oligonucleotide
ugaagccugaguucuucgu

SEQ ID NO: 1745666 - RNA, 19 nt, Artificial Sequence
  Description of Artificial Sequence: Synthetic oligonucleotide
auaggugacgaaggcacag

SEQ ID NO: 1745667 - RNA, 19 nt, Artificial Sequence
  Description of Artificial Sequence: Synthetic oligonucleotide
cuucguguccuaaaagcca

SEQ ID NO: 1745668 - RNA, 19 nt, Artificial Sequence
  Description of Artificial Sequence: Synthetic oligonucleotide
cuucucaggguccuuuaac

SEQ ID NO: 1745669 - RNA, 19 nt, Artificial Sequence
  Description of Artificial Sequence: Synthetic oligonucleotide
aucucggcuccucucauga

SEQ ID NO: 1745670 - RNA, 19 nt, Artificial Sequence
  Description of Artificial Sequence: Synthetic oligonucleotide
guuucagccuugauggcgc

SEQ ID NO: 1745671 - RNA, 19 nt, Artificial Sequence
  Description of Artificial Sequence: Synthetic oligonucleotide
accgaucgcuagaagacac

SEQ ID NO: 1745672 - RNA, 19 nt, Artificial Sequence
  Description of Artificial Sequence: Synthetic oligonucleotide
agccugaguucuucguuuc

SEQ ID NO: 1745673 - RNA, 19 nt, Artificial Sequence
  Description of Artificial Sequence: Synthetic oligonucleotide
ucugacagugagcguuuga

SEQ ID NO: 1745674 - RNA, 19 nt, Artificial Sequence
  Description of Artificial Sequence: Synthetic oligonucleotide
gaaccccagacagauuugc

SEQ ID NO: 1745675 - RNA, 19 nt, Artificial Sequence
  Description of Artificial Sequence: Synthetic oligonucleotide
ugagcugcacggauuccac

SEQ ID NO: 1745676 - RNA, 19 nt, Artificial Sequence
  Description of Artificial Sequence: Synthetic oligonucleotide
ugcucugacagugagcguu

SEQ ID NO: 1745677 - RNA, 19 nt, Artificial Sequence
  Description of Artificial Sequence: Synthetic oligonucleotide
cuccagucaaaaccucggg

SEQ ID NO: 1745678 - RNA, 19 nt, Artificial Sequence
  Description of Artificial Sequence: Synthetic oligonucleotide
ggaacggcuggaaaguggg

SEQ ID NO: 1745679 - RNA, 19 nt, Artificial Sequence
  Description of Artificial Sequence: Synthetic oligonucleotide
uugacgccacccuggcugg

SEQ ID NO: 1745680 - RNA, 19 nt, Artificial Sequence
  Description of Artificial Sequence: Synthetic oligonucleotide
cacggauuccaccuggguc

SEQ ID NO: 1745681 - RNA, 19 nt, Artificial Sequence
  Description of Artificial Sequence: Synthetic oligonucleotide
gugagggaacuucugcccc

SEQ ID NO: 1745682 - RNA, 19 nt, Artificial Sequence
  Description of Artificial Sequence: Synthetic oligonucleotide
uuuugucccgguggcagcc

SEQ ID NO: 1745683 - RNA, 19 nt, Artificial Sequence
  Description of Artificial Sequence: Synthetic oligonucleotide
gauuuuacugagaccagcu

SEQ ID NO: 1745684 - RNA, 19 nt, Artificial Sequence
  Description of Artificial Sequence: Synthetic oligonucleotide
gagaaggccccucggagga

SEQ ID NO: 1745685 - RNA, 19 nt, Artificial Sequence
  Description of Artificial Sequence: Synthetic oligonucleotide
ccauguucuucguagcucc

SEQ ID NO: 1745686 - RNA, 19 nt, Artificial Sequence
  Description of Artificial Sequence: Synthetic oligonucleotide
ucucaugacuucggucgcg

SEQ ID NO: 1745687 - RNA, 19 nt, Artificial Sequence
  Description of Artificial Sequence: Synthetic oligonucleotide
cuuuggggacgucuggaug

SEQ ID NO: 1745688 - RNA, 19 nt, Artificial Sequence
  Description of Artificial Sequence: Synthetic oligonucleotide
cauugagcucagcaacggc

SEQ ID NO: 1745689 - RNA, 19 nt, Artificial Sequence
  Description of Artificial Sequence: Synthetic oligonucleotide
agcguuugacgccacccug

SEQ ID NO: 1745690 - RNA, 19 nt, Artificial Sequence
  Description of Artificial Sequence: Synthetic oligonucleotide
agcuccagucaaaaccucg

SEQ ID NO: 1745691 - RNA, 19 nt, Artificial Sequence
  Description of Artificial Sequence: Synthetic oligonucleotide
uuacugagaccagcuuggg

SEQ ID NO: 1745692 - RNA, 19 nt, Artificial Sequence
  Description of Artificial Sequence: Synthetic oligonucleotide
ugagagcgagcaaugcuuu

SEQ ID NO: 1745693 - RNA, 19 nt, Artificial Sequence
  Description of Artificial Sequence: Synthetic oligonucleotide
augagucugaccugcggaa

SEQ ID NO: 1745694 - RNA, 19 nt, Artificial Sequence
  Description of Artificial Sequence: Synthetic oligonucleotide
augacuucggucgcggcug

SEQ ID NO: 1745695 - RNA, 19 nt, Artificial Sequence
  Description of Artificial Sequence: Synthetic oligonucleotide
cuuuugucccgguggcagc

SEQ ID NO: 1745696 - RNA, 19 nt, Artificial Sequence
  Description of Artificial Sequence: Synthetic oligonucleotide
aaccgaucgcuagaagaca

SEQ ID NO: 1745697 - RNA, 19 nt, Artificial Sequence
  Description of Artificial Sequence: Synthetic oligonucleotide
gcaaccgaucgcuagaaga

SEQ ID NO: 1745698 - RNA, 19 nt, Artificial Sequence
  Description of Artificial Sequence: Synthetic oligonucleotide
uaaccccgaucccaagugu

SEQ ID NO: 1745699 - RNA, 19 nt, Artificial Sequence
  Description of Artificial Sequence: Synthetic oligonucleotide
uuucggggaaugagucuga

SEQ ID NO: 1745700 - RNA, 19 nt, Artificial Sequence
  Description of Artificial Sequence: Synthetic oligonucleotide
cuccauacacauaaagugu

SEQ ID NO: 1745701 - RNA, 19 nt, Artificial Sequence
  Description of Artificial Sequence: Synthetic oligonucleotide
gaaggcacaguuucugggu

SEQ ID NO: 1745702 - RNA, 19 nt, Artificial Sequence
  Description of Artificial Sequence: Synthetic oligonucleotide
uugcgggcuauguugacuu

SEQ ID NO: 1745703 - RNA, 19 nt, Artificial Sequence
  Description of Artificial Sequence: Synthetic oligonucleotide
cuccaucuuuucauaggug

SEQ ID NO: 1745704 - RNA, 19 nt, Artificial Sequence
  Description of Artificial Sequence: Synthetic oligonucleotide
ucggggaaugagucugacc

SEQ ID NO: 1745705 - RNA, 19 nt, Artificial Sequence
  Description of Artificial Sequence: Synthetic oligonucleotide
uccucucaugacuucgguc

SEQ ID NO: 1745706 - RNA, 19 nt, Artificial Sequence
  Description of Artificial Sequence: Synthetic oligonucleotide
auacgcuccucuggaacgg

SEQ ID NO: 1745707 - RNA, 19 nt, Artificial Sequence
  Description of Artificial Sequence: Synthetic oligonucleotide
cucaugacuucggucgcgg

SEQ ID NO: 1745708 - RNA, 19 nt, Artificial Sequence
  Description of Artificial Sequence: Synthetic oligonucleotide
uucguagcuccagucaaaa

SEQ ID NO: 1745709 - RNA, 19 nt, Artificial Sequence
  Description of Artificial Sequence: Synthetic oligonucleotide
uacgaggcacaaggaaucc

SEQ ID NO: 1745710 - RNA, 19 nt, Artificial Sequence
  Description of Artificial Sequence: Synthetic oligonucleotide
caguucccgcaaccgaucg

SEQ ID NO: 1745711 - RNA, 19 nt, Artificial Sequence
  Description of Artificial Sequence: Synthetic oligonucleotide
uguuccccuuccgaggggc

SEQ ID NO: 1745712 - RNA, 19 nt, Artificial Sequence
  Description of Artificial Sequence: Synthetic oligonucleotide
gguccgagagcguuugaag

SEQ ID NO: 1745713 - RNA, 19 nt, Artificial Sequence
  Description of Artificial Sequence: Synthetic oligonucleotide
cacaaagcuuucauauaga

SEQ ID NO: 1745714 - RNA, 19 nt, Artificial Sequence
  Description of Artificial Sequence: Synthetic oligonucleotide
gaaggccccucggaggagg

SEQ ID NO: 1745715 - RNA, 19 nt, Artificial Sequence
  Description of Artificial Sequence: Synthetic oligonucleotide
ugggcgucauguccucucc

SEQ ID NO: 1745716 - RNA, 19 nt, Artificial Sequence
  Description of Artificial Sequence: Synthetic oligonucleotide
ggauuuuacugagaccagc

SEQ ID NO: 1745717 - RNA, 19 nt, Artificial Sequence
  Description of Artificial Sequence: Synthetic oligonucleotide
ucuggacagcaagggaacc

SEQ ID NO: 1745718 - RNA, 19 nt, Artificial Sequence
  Description of Artificial Sequence: Synthetic oligonucleotide
guuuaaccccgaucccaag

SEQ ID NO: 1745719 - RNA, 19 nt, Artificial Sequence
  Description of Artificial Sequence: Synthetic oligonucleotide
cugccccaggauuuuacug

SEQ ID NO: 1745720 - RNA, 19 nt, Artificial Sequence
  Description of Artificial Sequence: Synthetic oligonucleotide
uaucucggcuccucucaug

SEQ ID NO: 1745721 - RNA, 19 nt, Artificial Sequence
  Description of Artificial Sequence: Synthetic oligonucleotide
uugaagguuuaaccccgau

SEQ ID NO: 1745722 - RNA, 19 nt, Artificial Sequence
  Description of Artificial Sequence: Synthetic oligonucleotide
cucucaugacuucggucgc

SEQ ID NO: 1745723 - RNA, 19 nt, Artificial Sequence
  Description of Artificial Sequence: Synthetic oligonucleotide
cauacgaggcacaaggaau

SEQ ID NO: 1745724 - RNA, 19 nt, Artificial Sequence
  Description of Artificial Sequence: Synthetic oligonucleotide
cagcaugggcuguuugcgg

SEQ ID NO: 1745725 - RNA, 19 nt, Artificial Sequence
  Description of Artificial Sequence: Synthetic oligonucleotide
gggugagggaacuucugcc

SEQ ID NO: 1745726 - RNA, 19 nt, Artificial Sequence
  Description of Artificial Sequence: Synthetic oligonucleotide
ucuuuucauaggugacgaa

SEQ ID NO: 1745727 - RNA, 19 nt, Artificial Sequence
  Description of Artificial Sequence: Synthetic oligonucleotide
cagaucgucacuguacaca

SEQ ID NO: 1745728 - RNA, 19 nt, Artificial Sequence
  Description of Artificial Sequence: Synthetic oligonucleotide
uccuacagaucgucacugu

SEQ ID NO: 1745729 - RNA, 19 nt, Artificial Sequence
  Description of Artificial Sequence: Synthetic oligonucleotide
gggaaugagucugaccugc

SEQ ID NO: 1745730 - RNA, 19 nt, Artificial Sequence
  Description of Artificial Sequence: Synthetic oligonucleotide
ucuaggguccgagagcguu

SEQ ID NO: 1745731 - RNA, 19 nt, Artificial Sequence
  Description of Artificial Sequence: Synthetic oligonucleotide
cacaguuucuggguggguc

SEQ ID NO: 1745732 - RNA, 19 nt, Artificial Sequence
  Description of Artificial Sequence: Synthetic oligonucleotide
guccuaaaagccauccaca

SEQ ID NO: 1745733 - RNA, 19 nt, Artificial Sequence
  Description of Artificial Sequence: Synthetic oligonucleotide
gucugaccugcggaaaggg

SEQ ID NO: 1745734 - RNA, 19 nt, Artificial Sequence
  Description of Artificial Sequence: Synthetic oligonucleotide
ugacuuugagcugcacgga

SEQ ID NO: 1745735 - RNA, 19 nt, Artificial Sequence
  Description of Artificial Sequence: Synthetic oligonucleotide
cagcuucguguccuaaaag

SEQ ID NO: 1745736 - RNA, 19 nt, Artificial Sequence
  Description of Artificial Sequence: Synthetic oligonucleotide
ucggcuccucucaugacuu

SEQ ID NO: 1745737 - RNA, 19 nt, Artificial Sequence
  Description of Artificial Sequence: Synthetic oligonucleotide
ucuuugucucggucuuugu

SEQ ID NO: 1745738 - RNA, 19 nt, Artificial Sequence
  Description of Artificial Sequence: Synthetic oligonucleotide
uguacacaaucuggguccu

SEQ ID NO: 1745739 - RNA, 19 nt, Artificial Sequence
  Description of Artificial Sequence: Synthetic oligonucleotide
cucgcucaguccuggcggg

SEQ ID NO: 1745740 - RNA, 19 nt, Artificial Sequence
  Description of Artificial Sequence: Synthetic oligonucleotide
agagcguuugaagccugag

SEQ ID NO: 1745741 - RNA, 19 nt, Artificial Sequence
  Description of Artificial Sequence: Synthetic oligonucleotide
auguucuucguagcuccag

SEQ ID NO: 1745742 - RNA, 19 nt, Artificial Sequence
  Description of Artificial Sequence: Synthetic oligonucleotide
ccaaguguugaaagacuag

SEQ ID NO: 1745743 - RNA, 19 nt, Artificial Sequence
  Description of Artificial Sequence: Synthetic oligonucleotide
ucguuucagccuugauggc

SEQ ID NO: 1745744 - RNA, 19 nt, Artificial Sequence
  Description of Artificial Sequence: Synthetic oligonucleotide
guagcuccagucaaaaccu

SEQ ID NO: 1745745 - RNA, 19 nt, Artificial Sequence
  Description of Artificial Sequence: Synthetic oligonucleotide
ccucuccauacacauaaag

SEQ ID NO: 1745746 - RNA, 19 nt, Artificial Sequence
  Description of Artificial Sequence: Synthetic oligonucleotide
cugguggugccgcugcuac

SEQ ID NO: 1745747 - RNA, 19 nt, Artificial Sequence
  Description of Artificial Sequence: Synthetic oligonucleotide
ucaugacuucggucgcggc

SEQ ID NO: 1745748 - RNA, 19 nt, Artificial Sequence
  Description of Artificial Sequence: Synthetic oligonucleotide
cagacagauuugccaguag

SEQ ID NO: 1745749 - RNA, 19 nt, Artificial Sequence
  Description of Artificial Sequence: Synthetic oligonucleotide
aggauuuuacugagaccag

SEQ ID NO: 1745750 - RNA, 19 nt, Artificial Sequence
  Description of Artificial Sequence: Synthetic oligonucleotide
acuucggucgcggcugcgg

SEQ ID NO: 1745751 - RNA, 19 nt, Artificial Sequence
  Description of Artificial Sequence: Synthetic oligonucleotide
ccucuaggguccgagagcg

SEQ ID NO: 1745752 - RNA, 19 nt, Artificial Sequence
  Description of Artificial Sequence: Synthetic oligonucleotide
ucuucguuucagccuugau

SEQ ID NO: 1745753 - RNA, 19 nt, Artificial Sequence
  Description of Artificial Sequence: Synthetic oligonucleotide
ucguagcuccagucaaaac

SEQ ID NO: 1745754 - RNA, 19 nt, Artificial Sequence
  Description of Artificial Sequence: Synthetic oligonucleotide
gagcugcacggauuccacc

SEQ ID NO: 1745755 - RNA, 19 nt, Artificial Sequence
  Description of Artificial Sequence: Synthetic oligonucleotide
agcccuuagggcuguucug

SEQ ID NO: 1745756 - RNA, 19 nt, Artificial Sequence
  Description of Artificial Sequence: Synthetic oligonucleotide
uggcuguguccaccacugg

SEQ ID NO: 1745757 - RNA, 19 nt, Artificial Sequence
  Description of Artificial Sequence: Synthetic oligonucleotide
aaagggcccucgcgcucuc

SEQ ID NO: 1745758 - RNA, 19 nt, Artificial Sequence
  Description of Artificial Sequence: Synthetic oligonucleotide
aguccuggcgggaucacca

SEQ ID NO: 1745759 - RNA, 19 nt, Artificial Sequence
  Description of Artificial Sequence: Synthetic oligonucleotide
ccaucuuuucauaggugac

SEQ ID NO: 1745760 - RNA, 19 nt, Artificial Sequence
  Description of Artificial Sequence: Synthetic oligonucleotide
uaggguccgagagcguuug

SEQ ID NO: 1745761 - RNA, 19 nt, Artificial Sequence
  Description of Artificial Sequence: Synthetic oligonucleotide
gcagauacgcuccucugga

SEQ ID NO: 1745762 - RNA, 19 nt, Artificial Sequence
  Description of Artificial Sequence: Synthetic oligonucleotide
aggggcccuccuuucgggg

SEQ ID NO: 1745763 - RNA, 19 nt, Artificial Sequence
  Description of Artificial Sequence: Synthetic oligonucleotide
cuugagagcgagcaaugcu

SEQ ID NO: 1745764 - RNA, 19 nt, Artificial Sequence
  Description of Artificial Sequence: Synthetic oligonucleotide
cagcagauacgcuccucug

SEQ ID NO: 1745765 - RNA, 19 nt, Artificial Sequence
  Description of Artificial Sequence: Synthetic oligonucleotide
ugucucgaucccggucucg

SEQ ID NO: 1745766 - RNA, 19 nt, Artificial Sequence
  Description of Artificial Sequence: Synthetic oligonucleotide
cuucggucgcggcugcggc

SEQ ID NO: 1745767 - RNA, 19 nt, Artificial Sequence
  Description of Artificial Sequence: Synthetic oligonucleotide
ugauggcuccugacuuuac

SEQ ID NO: 1745768 - RNA, 19 nt, Artificial Sequence
  Description of Artificial Sequence: Synthetic oligonucleotide
ucuuugucccggucccuau

SEQ ID NO: 1745769 - RNA, 19 nt, Artificial Sequence
  Description of Artificial Sequence: Synthetic oligonucleotide
ucccuaucucggcuccucu

SEQ ID NO: 1745770 - RNA, 19 nt, Artificial Sequence
  Description of Artificial Sequence: Synthetic oligonucleotide
gcggaaagggcccucgcgc

SEQ ID NO: 1745771 - RNA, 19 nt, Artificial Sequence
  Description of Artificial Sequence: Synthetic oligonucleotide
acgccacccuggcuggugg

SEQ ID NO: 1745772 - RNA, 19 nt, Artificial Sequence
  Description of Artificial Sequence: Synthetic oligonucleotide
gagggaacuucugccccag

SEQ ID NO: 1745773 - RNA, 19 nt, Artificial Sequence
  Description of Artificial Sequence: Synthetic oligonucleotide
ccuuuaacuuccccucuag

SEQ ID NO: 1745774 - RNA, 19 nt, Artificial Sequence
  Description of Artificial Sequence: Synthetic oligonucleotide
acagccacuuuugaagguu

SEQ ID NO: 1745775 - RNA, 19 nt, Artificial Sequence
  Description of Artificial Sequence: Synthetic oligonucleotide
uucuucguuucagccuuga

SEQ ID NO: 1745776 - RNA, 19 nt, Artificial Sequence
  Description of Artificial Sequence: Synthetic oligonucleotide
uccuggcgggaucaccaac

SEQ ID NO: 1745777 - RNA, 19 nt, Artificial Sequence
  Description of Artificial Sequence: Synthetic oligonucleotide
guucgcggucucugucucg

SEQ ID NO: 1745778 - RNA, 19 nt, Artificial Sequence
  Description of Artificial Sequence: Synthetic oligonucleotide
gacgucuggaugacuccug

SEQ ID NO: 1745779 - RNA, 19 nt, Artificial Sequence
  Description of Artificial Sequence: Synthetic oligonucleotide
ccucgcucaguccuggcgg

SEQ ID NO: 1745780 - RNA, 19 nt, Artificial Sequence
  Description of Artificial Sequence: Synthetic oligonucleotide
ccgguggcagcccuuaggg

SEQ ID NO: 1745781 - RNA, 19 nt, Artificial Sequence
  Description of Artificial Sequence: Synthetic oligonucleotide
guguccuaaaagccaucca

SEQ ID NO: 1745782 - RNA, 19 nt, Artificial Sequence
  Description of Artificial Sequence: Synthetic oligonucleotide
uuccgaggggcccuccuuu

SEQ ID NO: 1745783 - RNA, 19 nt, Artificial Sequence
  Description of Artificial Sequence: Synthetic oligonucleotide
uagcuccagucaaaaccuc

SEQ ID NO: 1745784 - RNA, 19 nt, Artificial Sequence
  Description of Artificial Sequence: Synthetic oligonucleotide
cgucauguccucuccauac

SEQ ID NO: 1745785 - RNA, 19 nt, Artificial Sequence
  Description of Artificial Sequence: Synthetic oligonucleotide
cuuugucccggucccuauc

SEQ ID NO: 1745786 - RNA, 19 nt, Artificial Sequence
  Description of Artificial Sequence: Synthetic oligonucleotide
gcauacgaggcacaaggaa

SEQ ID NO: 1745787 - RNA, 19 nt, Artificial Sequence
  Description of Artificial Sequence: Synthetic oligonucleotide
ggcacaguuucuggguggg

SEQ ID NO: 1745788 - RNA, 19 nt, Artificial Sequence
  Description of Artificial Sequence: Synthetic oligonucleotide
gagcguuugaagccugagu

SEQ ID NO: 1745789 - RNA, 19 nt, Artificial Sequence
  Description of Artificial Sequence: Synthetic oligonucleotide
ccuuuugucccgguggcag

SEQ ID NO: 1745790 - RNA, 19 nt, Artificial Sequence
  Description of Artificial Sequence: Synthetic oligonucleotide
aaccccgaucccaaguguu

SEQ ID NO: 1745791 - RNA, 19 nt, Artificial Sequence
  Description of Artificial Sequence: Synthetic oligonucleotide
ggagagaaggccccucgga

SEQ ID NO: 1745792 - RNA, 19 nt, Artificial Sequence
  Description of Artificial Sequence: Synthetic oligonucleotide
ggaaugagucugaccugcg

SEQ ID NO: 1745793 - RNA, 19 nt, Artificial Sequence
  Description of Artificial Sequence: Synthetic oligonucleotide
gacuuugagcugcacggau

SEQ ID NO: 1745794 - RNA, 19 nt, Artificial Sequence
  Description of Artificial Sequence: Synthetic oligonucleotide
acaaggaauccagcuucgu

SEQ ID NO: 1745795 - RNA, 19 nt, Artificial Sequence
  Description of Artificial Sequence: Synthetic oligonucleotide
ggucccaguucccgcaacc

SEQ ID NO: 1745796 - RNA, 19 nt, Artificial Sequence
  Description of Artificial Sequence: Synthetic oligonucleotide
ggaauccagcuucgugucc

SEQ ID NO: 1745797 - RNA, 19 nt, Artificial Sequence
  Description of Artificial Sequence: Synthetic oligonucleotide
uucggggaaugagucugac

SEQ ID NO: 1745798 - RNA, 19 nt, Artificial Sequence
  Description of Artificial Sequence: Synthetic oligonucleotide
cguuucagccuugauggcg

SEQ ID NO: 1745799 - RNA, 19 nt, Artificial Sequence
  Description of Artificial Sequence: Synthetic oligonucleotide
guuugcgggcuauguugac

SEQ ID NO: 1745800 - RNA, 19 nt, Artificial Sequence
  Description of Artificial Sequence: Synthetic oligonucleotide
cuggaugacuccugcaggu

SEQ ID NO: 1745801 - RNA, 19 nt, Artificial Sequence
  Description of Artificial Sequence: Synthetic oligonucleotide
uuugucccgguggcagccc

SEQ ID NO: 1745802 - RNA, 19 nt, Artificial Sequence
  Description of Artificial Sequence: Synthetic oligonucleotide
ccauugagcucagcaacgg

SEQ ID NO: 1745803 - RNA, 19 nt, Artificial Sequence
  Description of Artificial Sequence: Synthetic oligonucleotide
gaucgcuagaagacacaaa

SEQ ID NO: 1745804 - RNA, 19 nt, Artificial Sequence
  Description of Artificial Sequence: Synthetic oligonucleotide
ucucggcuccucucaugac

SEQ ID NO: 1745805 - RNA, 19 nt, Artificial Sequence
  Description of Artificial Sequence: Synthetic oligonucleotide
ggggaaugagucugaccug

SEQ ID NO: 1745806 - RNA, 19 nt, Artificial Sequence
  Description of Artificial Sequence: Synthetic oligonucleotide
gugggcgucauguccucuc

SEQ ID NO: 1745807 - RNA, 19 nt, Artificial Sequence
  Description of Artificial Sequence: Synthetic oligonucleotide
gcguuugacgccacccugg

SEQ ID NO: 1745808 - RNA, 19 nt, Artificial Sequence
  Description of Artificial Sequence: Synthetic oligonucleotide
gugagcguuugacgccacc

SEQ ID NO: 1745809 - RNA, 19 nt, Artificial Sequence
  Description of Artificial Sequence: Synthetic oligonucleotide
cuucguagcuccagucaaa

SEQ ID NO: 1745810 - RNA, 19 nt, Artificial Sequence
  Description of Artificial Sequence: Synthetic oligonucleotide
cuggaacggcuggaaagug

SEQ ID NO: 1745811 - RNA, 19 nt, Artificial Sequence
  Description of Artificial Sequence: Synthetic oligonucleotide
gggacgucuggaugacucc

SEQ ID NO: 1745812 - RNA, 19 nt, Artificial Sequence
  Description of Artificial Sequence: Synthetic oligonucleotide
uguugacuuugagcugcac

SEQ ID NO: 1745813 - RNA, 19 nt, Artificial Sequence
  Description of Artificial Sequence: Synthetic oligonucleotide
uucggucgcggcugcggcu

SEQ ID NO: 1745814 - RNA, 19 nt, Artificial Sequence
  Description of Artificial Sequence: Synthetic oligonucleotide
gacagccacuuuugaaggu

SEQ ID NO: 1745815 - RNA, 19 nt, Artificial Sequence
  Description of Artificial Sequence: Synthetic oligonucleotide
agauuuccuuuggggacgu

SEQ ID NO: 1745816 - RNA, 19 nt, Artificial Sequence
  Description of Artificial Sequence: Synthetic oligonucleotide
cauguucuucguagcucca

SEQ ID NO: 1745817 - RNA, 19 nt, Artificial Sequence
  Description of Artificial Sequence: Synthetic oligonucleotide
guguuccccuuccgagggg

SEQ ID NO: 1745818 - RNA, 19 nt, Artificial Sequence
  Description of Artificial Sequence: Synthetic oligonucleotide
uggucccaguucccgcaac

SEQ ID NO: 1745819 - RNA, 19 nt, Artificial Sequence
  Description of Artificial Sequence: Synthetic oligonucleotide
gagcguuugacgccacccu

SEQ ID NO: 1745820 - RNA, 19 nt, Artificial Sequence
  Description of Artificial Sequence: Synthetic oligonucleotide
ccaccauguucuucguagc

SEQ ID NO: 1745821 - RNA, 19 nt, Artificial Sequence
  Description of Artificial Sequence: Synthetic oligonucleotide
caugacuucggucgcggcu

SEQ ID NO: 1745822 - RNA, 19 nt, Artificial Sequence
  Description of Artificial Sequence: Synthetic oligonucleotide
uuggggacgucuggaugac

SEQ ID NO: 1745823 - RNA, 19 nt, Artificial Sequence
  Description of Artificial Sequence: Synthetic oligonucleotide
gcguuugaagccugaguuc

SEQ ID NO: 1745824 - RNA, 19 nt, Artificial Sequence
  Description of Artificial Sequence: Synthetic oligonucleotide
gggaaccccagacagauuu

SEQ ID NO: 1745825 - RNA, 19 nt, Artificial Sequence
  Description of Artificial Sequence: Synthetic oligonucleotide
cauaaaguguguuccccuu

SEQ ID NO: 1745826 - RNA, 19 nt, Artificial Sequence
  Description of Artificial Sequence: Synthetic oligonucleotide
uccgaggggcccuccuuuc

SEQ ID NO: 1745827 - RNA, 19 nt, Artificial Sequence
  Description of Artificial Sequence: Synthetic oligonucleotide
ggagaggucaaugauguuu

SEQ ID NO: 1745828 - RNA, 19 nt, Artificial Sequence
  Description of Artificial Sequence: Synthetic oligonucleotide
cugcuacuuugcuucuuga

SEQ ID NO: 1745829 - RNA, 19 nt, Artificial Sequence
  Description of Artificial Sequence: Synthetic oligonucleotide
ccagucaaaaccucggggu

SEQ ID NO: 1745830 - RNA, 19 nt, Artificial Sequence
  Description of Artificial Sequence: Synthetic oligonucleotide
accccgaucccaaguguug

SEQ ID NO: 1745831 - RNA, 19 nt, Artificial Sequence
  Description of Artificial Sequence: Synthetic oligonucleotide
ggugccgcugcuacuuugc

SEQ ID NO: 1745832 - RNA, 19 nt, Artificial Sequence
  Description of Artificial Sequence: Synthetic oligonucleotide
cguguccuaaaagccaucc

SEQ ID NO: 1745833 - RNA, 19 nt, Artificial Sequence
  Description of Artificial Sequence: Synthetic oligonucleotide
ucccguucgcggucucugu

SEQ ID NO: 1745834 - RNA, 19 nt, Artificial Sequence
  Description of Artificial Sequence: Synthetic oligonucleotide
ccucggaggagggugggcg

SEQ ID NO: 1745835 - RNA, 19 nt, Artificial Sequence
  Description of Artificial Sequence: Synthetic oligonucleotide
ggggacgucuggaugacuc

SEQ ID NO: 1745836 - RNA, 19 nt, Artificial Sequence
  Description of Artificial Sequence: Synthetic oligonucleotide
agugagcguuugacgccac

SEQ ID NO: 1745837 - RNA, 19 nt, Artificial Sequence
  Description of Artificial Sequence: Synthetic oligonucleotide
ggggacgcugaggagcggg

SEQ ID NO: 1745838 - RNA, 19 nt, Artificial Sequence
  Description of Artificial Sequence: Synthetic oligonucleotide
cugcggaaagggcccucgc

SEQ ID NO: 1745839 - RNA, 19 nt, Artificial Sequence
  Description of Artificial Sequence: Synthetic oligonucleotide
gacgccacccuggcuggug

SEQ ID NO: 1745840 - RNA, 19 nt, Artificial Sequence
  Description of Artificial Sequence: Synthetic oligonucleotide
gguuuaaccccgaucccaa

SEQ ID NO: 1745841 - RNA, 19 nt, Artificial Sequence
  Description of Artificial Sequence: Synthetic oligonucleotide
cucggcuccucucaugacu

SEQ ID NO: 1745842 - RNA, 19 nt, Artificial Sequence
  Description of Artificial Sequence: Synthetic oligonucleotide
ucccgguggcagcccuuag

SEQ ID NO: 1745843 - RNA, 19 nt, Artificial Sequence
  Description of Artificial Sequence: Synthetic oligonucleotide
agcaacggccugaucugca

SEQ ID NO: 1745844 - RNA, 19 nt, Artificial Sequence
  Description of Artificial Sequence: Synthetic oligonucleotide
cagugagcguuugacgcca

SEQ ID NO: 1745845 - RNA, 19 nt, Artificial Sequence
  Description of Artificial Sequence: Synthetic oligonucleotide
cucaguccuggcgggauca

SEQ ID NO: 1745846 - RNA, 19 nt, Artificial Sequence
  Description of Artificial Sequence: Synthetic oligonucleotide
ugggcuguuugcgggcuau

SEQ ID NO: 1745847 - RNA, 19 nt, Artificial Sequence
  Description of Artificial Sequence: Synthetic oligonucleotide
ugguggugccgcugcuacu

SEQ ID NO: 1745848 - RNA, 19 nt, Artificial Sequence
  Description of Artificial Sequence: Synthetic oligonucleotide
gagagcguuugaagccuga

SEQ ID NO: 1745849 - RNA, 19 nt, Artificial Sequence
  Description of Artificial Sequence: Synthetic oligonucleotide
aaaccucggggugggccau

SEQ ID NO: 1745850 - RNA, 19 nt, Artificial Sequence
  Description of Artificial Sequence: Synthetic oligonucleotide
gcuuucauauagagauuuc

SEQ ID NO: 1745851 - RNA, 19 nt, Artificial Sequence
  Description of Artificial Sequence: Synthetic oligonucleotide
ggguccuuuugucccggug

SEQ ID NO: 1745852 - RNA, 19 nt, Artificial Sequence
  Description of Artificial Sequence: Synthetic oligonucleotide
gaaagggcccucgcgcucu

SEQ ID NO: 1745853 - RNA, 19 nt, Artificial Sequence
  Description of Artificial Sequence: Synthetic oligonucleotide
gacuucggucgcggcugcg

SEQ ID NO: 1745854 - RNA, 19 nt, Artificial Sequence
  Description of Artificial Sequence: Synthetic oligonucleotide
ggcgcugauggcuccugac

SEQ ID NO: 1745855 - RNA, 19 nt, Artificial Sequence
  Description of Artificial Sequence: Synthetic oligonucleotide
agaaggccccucggaggag

SEQ ID NO: 1745856 - RNA, 19 nt, Artificial Sequence
  Description of Artificial Sequence: Synthetic oligonucleotide
uccccuuccgaggggcccu

SEQ ID NO: 1745857 - RNA, 19 nt, Artificial Sequence
  Description of Artificial Sequence: Synthetic oligonucleotide
caccauguucuucguagcu

SEQ ID NO: 1745858 - RNA, 19 nt, Artificial Sequence
  Description of Artificial Sequence: Synthetic oligonucleotide
agccccggggcccucugau

SEQ ID NO: 1745859 - RNA, 19 nt, Artificial Sequence
  Description of Artificial Sequence: Synthetic oligonucleotide
cucugacagugagcguuug

SEQ ID NO: 1745860 - RNA, 19 nt, Artificial Sequence
  Description of Artificial Sequence: Synthetic oligonucleotide
gcgggcuauguugacuuug

SEQ ID NO: 1745861 - RNA, 19 nt, Artificial Sequence
  Description of Artificial Sequence: Synthetic oligonucleotide
guucuucguuucagccuug

SEQ ID NO: 1745862 - RNA, 19 nt, Artificial Sequence
  Description of Artificial Sequence: Synthetic oligonucleotide
cccgguggcagcccuuagg

SEQ ID NO: 1745863 - RNA, 19 nt, Artificial Sequence
  Description of Artificial Sequence: Synthetic oligonucleotide
cagauacgcuccucuggaa

SEQ ID NO: 1745864 - RNA, 19 nt, Artificial Sequence
  Description of Artificial Sequence: Synthetic oligonucleotide
ucaguccuggcgggaucac

SEQ ID NO: 1745865 - RNA, 19 nt, Artificial Sequence
  Description of Artificial Sequence: Synthetic oligonucleotide
ggaaagggcccucgcgcuc

SEQ ID NO: 1745866 - RNA, 19 nt, Artificial Sequence
  Description of Artificial Sequence: Synthetic oligonucleotide
ggccugaucugcagacucc

SEQ ID NO: 1745867 - RNA, 19 nt, Artificial Sequence
  Description of Artificial Sequence: Synthetic oligonucleotide
cagcccuuagggcuguucu

SEQ ID NO: 1745868 - RNA, 19 nt, Artificial Sequence
  Description of Artificial Sequence: Synthetic oligonucleotide
gauuccaccugggucccau

SEQ ID NO: 1745869 - RNA, 19 nt, Artificial Sequence
  Description of Artificial Sequence: Synthetic oligonucleotide
ugcgggcuauguugacuuu

SEQ ID NO: 1745870 - RNA, 19 nt, Artificial Sequence
  Description of Artificial Sequence: Synthetic oligonucleotide
cuguggcuguguccaccac

SEQ ID NO: 1745871 - RNA, 19 nt, Artificial Sequence
  Description of Artificial Sequence: Synthetic oligonucleotide
ggagcgggcaccaccaugu

SEQ ID NO: 1745872 - RNA, 19 nt, Artificial Sequence
  Description of Artificial Sequence: Synthetic oligonucleotide
accugcggaaagggcccuc

SEQ ID NO: 1745873 - RNA, 19 nt, Artificial Sequence
  Description of Artificial Sequence: Synthetic oligonucleotide
cagguuuccuacagaucgu

SEQ ID NO: 1745874 - RNA, 19 nt, Artificial Sequence
  Description of Artificial Sequence: Synthetic oligonucleotide
cguuugacgccacccuggc

SEQ ID NO: 1745875 - RNA, 19 nt, Artificial Sequence
  Description of Artificial Sequence: Synthetic oligonucleotide
ccagcuucguguccuaaaa

SEQ ID NO: 1745876 - RNA, 19 nt, Artificial Sequence
  Description of Artificial Sequence: Synthetic oligonucleotide
ccugcggaaagggcccucg

SEQ ID NO: 1745877 - RNA, 19 nt, Artificial Sequence
  Description of Artificial Sequence: Synthetic oligonucleotide
gcccucgcgcucucggucc

SEQ ID NO: 1745878 - RNA, 19 nt, Artificial Sequence
  Description of Artificial Sequence: Synthetic oligonucleotide
ggguggguccauggagagg

SEQ ID NO: 1745879 - RNA, 19 nt, Artificial Sequence
  Description of Artificial Sequence: Synthetic oligonucleotide
ugucccgguggcagcccuu

SEQ ID NO: 1745880 - RNA, 19 nt, Artificial Sequence
  Description of Artificial Sequence: Synthetic oligonucleotide
ggggcauacgaggcacaag

SEQ ID NO: 1745881 - RNA, 19 nt, Artificial Sequence
  Description of Artificial Sequence: Synthetic oligonucleotide
ucgcucaguccuggcggga

SEQ ID NO: 1745882 - RNA, 19 nt, Artificial Sequence
  Description of Artificial Sequence: Synthetic oligonucleotide
uggggacgucuggaugacu

SEQ ID NO: 1745883 - RNA, 19 nt, Artificial Sequence
  Description of Artificial Sequence: Synthetic oligonucleotide
ccuacagaucgucacugua

SEQ ID NO: 1745884 - RNA, 19 nt, Artificial Sequence
  Description of Artificial Sequence: Synthetic oligonucleotide
agccacuuuugaagguuua

SEQ ID NO: 1745885 - RNA, 19 nt, Artificial Sequence
  Description of Artificial Sequence: Synthetic oligonucleotide
aggguccgagagcguuuga

SEQ ID NO: 1745886 - RNA, 19 nt, Artificial Sequence
  Description of Artificial Sequence: Synthetic oligonucleotide
gagagcgagcaaugcuuuu

SEQ ID NO: 1745887 - RNA, 19 nt, Artificial Sequence
  Description of Artificial Sequence: Synthetic oligonucleotide
gauuuccuuuggggacguc

SEQ ID NO: 1745888 - RNA, 19 nt, Artificial Sequence
  Description of Artificial Sequence: Synthetic oligonucleotide
cgaggggcccuccuuucgg

SEQ ID NO: 1745889 - RNA, 19 nt, Artificial Sequence
  Description of Artificial Sequence: Synthetic oligonucleotide
ccgaggggcccuccuuucg

SEQ ID NO: 1745890 - RNA, 19 nt, Artificial Sequence
  Description of Artificial Sequence: Synthetic oligonucleotide
ccauacacauaaagugugu

SEQ ID NO: 1745891 - RNA, 19 nt, Artificial Sequence
  Description of Artificial Sequence: Synthetic oligonucleotide
gccugaguucuucguuuca

SEQ ID NO: 1745892 - RNA, 19 nt, Artificial Sequence
  Description of Artificial Sequence: Synthetic oligonucleotide
auccagcuucguguccuaa

SEQ ID NO: 1745893 - RNA, 19 nt, Artificial Sequence
  Description of Artificial Sequence: Synthetic oligonucleotide
ccccggggcccucugauuc

SEQ ID NO: 1745894 - RNA, 19 nt, Artificial Sequence
  Description of Artificial Sequence: Synthetic oligonucleotide
gauuugccaguagcagcau

SEQ ID NO: 1745895 - RNA, 19 nt, Artificial Sequence
  Description of Artificial Sequence: Synthetic oligonucleotide
aggggacgcugaggagcgg

SEQ ID NO: 1745896 - RNA, 19 nt, Artificial Sequence
  Description of Artificial Sequence: Synthetic oligonucleotide
cuaucucggcuccucucau

SEQ ID NO: 1745897 - RNA, 19 nt, Artificial Sequence
  Description of Artificial Sequence: Synthetic oligonucleotide
cuaggguccgagagcguuu

SEQ ID NO: 1745898 - RNA, 19 nt, Artificial Sequence
  Description of Artificial Sequence: Synthetic oligonucleotide
cggccugaucugcagacuc

SEQ ID NO: 1745899 - RNA, 19 nt, Artificial Sequence
  Description of Artificial Sequence: Synthetic oligonucleotide
ggcgucauguccucuccau

SEQ ID NO: 1745900 - RNA, 19 nt, Artificial Sequence
  Description of Artificial Sequence: Synthetic oligonucleotide
gcucaguccuggcgggauc

SEQ ID NO: 1745901 - RNA, 19 nt, Artificial Sequence
  Description of Artificial Sequence: Synthetic oligonucleotide
ccggucccuaucucggcuc

SEQ ID NO: 1745902 - RNA, 19 nt, Artificial Sequence
  Description of Artificial Sequence: Synthetic oligonucleotide
gccccucggaggagggugg

SEQ ID NO: 1745903 - RNA, 19 nt, Artificial Sequence
  Description of Artificial Sequence: Synthetic oligonucleotide
ccgaucgcuagaagacaca

SEQ ID NO: 1745904 - RNA, 19 nt, Artificial Sequence
  Description of Artificial Sequence: Synthetic oligonucleotide
caccaccauguucuucgua

SEQ ID NO: 1745905 - RNA, 19 nt, Artificial Sequence
  Description of Artificial Sequence: Synthetic oligonucleotide
ggacgucuggaugacuccu

SEQ ID NO: 1745906 - RNA, 19 nt, Artificial Sequence
  Description of Artificial Sequence: Synthetic oligonucleotide
gcgcugauggcuccugacu

SEQ ID NO: 1745907 - RNA, 19 nt, Artificial Sequence
  Description of Artificial Sequence: Synthetic oligonucleotide
gggcgucauguccucucca

SEQ ID NO: 1745908 - RNA, 19 nt, Artificial Sequence
  Description of Artificial Sequence: Synthetic oligonucleotide
ugacgccacccuggcuggu

SEQ ID NO: 1745909 - RNA, 19 nt, Artificial Sequence
  Description of Artificial Sequence: Synthetic oligonucleotide
cgagagcguuugaagccug

SEQ ID NO: 1745910 - RNA, 19 nt, Artificial Sequence
  Description of Artificial Sequence: Synthetic oligonucleotide
cucggaggagggugggcgu

SEQ ID NO: 1745911 - RNA, 19 nt, Artificial Sequence
  Description of Artificial Sequence: Synthetic oligonucleotide
gcggcuucggggaggggac

SEQ ID NO: 1745912 - RNA, 19 nt, Artificial Sequence
  Description of Artificial Sequence: Synthetic oligonucleotide
cccguucgcggucucuguc

SEQ ID NO: 1745913 - RNA, 19 nt, Artificial Sequence
  Description of Artificial Sequence: Synthetic oligonucleotide
gcgucauguccucuccaua

SEQ ID NO: 1745914 - RNA, 19 nt, Artificial Sequence
  Description of Artificial Sequence: Synthetic oligonucleotide
ggcuguuugcgggcuaugu

SEQ ID NO: 1745915 - RNA, 19 nt, Artificial Sequence
  Description of Artificial Sequence: Synthetic oligonucleotide
ccagacagauuugccagua

SEQ ID NO: 1745916 - RNA, 19 nt, Artificial Sequence
  Description of Artificial Sequence: Synthetic oligonucleotide
ggugacgaaggcacaguuu

SEQ ID NO: 1745917 - RNA, 19 nt, Artificial Sequence
  Description of Artificial Sequence: Synthetic oligonucleotide
gccacccuggcugguggug

SEQ ID NO: 1745918 - RNA, 19 nt, Artificial Sequence
  Description of Artificial Sequence: Synthetic oligonucleotide
cggucccuaucucggcucc

SEQ ID NO: 1745919 - RNA, 19 nt, Artificial Sequence
  Description of Artificial Sequence: Synthetic oligonucleotide
cgcaaccgaucgcuagaag

SEQ ID NO: 1745920 - RNA, 19 nt, Artificial Sequence
  Description of Artificial Sequence: Synthetic oligonucleotide
cgaucgcuagaagacacaa

SEQ ID NO: 1745921 - RNA, 19 nt, Artificial Sequence
  Description of Artificial Sequence: Synthetic oligonucleotide
cuucugccccaggauuuua

SEQ ID NO: 1745922 - RNA, 19 nt, Artificial Sequence
  Description of Artificial Sequence: Synthetic oligonucleotide
cguucgcggucucugucuc

SEQ ID NO: 1745923 - RNA, 19 nt, Artificial Sequence
  Description of Artificial Sequence: Synthetic oligonucleotide
gggcccuccuuucggggaa

SEQ ID NO: 1745924 - RNA, 19 nt, Artificial Sequence
  Description of Artificial Sequence: Synthetic oligonucleotide
ccucuggaacggcuggaaa

SEQ ID NO: 1745925 - RNA, 19 nt, Artificial Sequence
  Description of Artificial Sequence: Synthetic oligonucleotide
gcagcccuuagggcuguuc

SEQ ID NO: 1745926 - RNA, 19 nt, Artificial Sequence
  Description of Artificial Sequence: Synthetic oligonucleotide
gucccgguggcagcccuua

SEQ ID NO: 1745927 - RNA, 19 nt, Artificial Sequence
  Description of Artificial Sequence: Synthetic oligonucleotide
agggaaccccagacagauu

SEQ ID NO: 1745928 - RNA, 19 nt, Artificial Sequence
  Description of Artificial Sequence: Synthetic oligonucleotide
gaggagcgggcaccaccau

SEQ ID NO: 1745929 - RNA, 19 nt, Artificial Sequence
  Description of Artificial Sequence: Synthetic oligonucleotide
ucgcgcucucggucccguu

SEQ ID NO: 1745930 - RNA, 19 nt, Artificial Sequence
  Description of Artificial Sequence: Synthetic oligonucleotide
cuuccgaggggcccuccuu

SEQ ID NO: 1745931 - RNA, 19 nt, Artificial Sequence
  Description of Artificial Sequence: Synthetic oligonucleotide
gggcuguuugcgggcuaug

SEQ ID NO: 1745932 - RNA, 19 nt, Artificial Sequence
  Description of Artificial Sequence: Synthetic oligonucleotide
ccccgaucccaaguguuga

SEQ ID NO: 1745933 - RNA, 19 nt, Artificial Sequence
  Description of Artificial Sequence: Synthetic oligonucleotide
gaccugcggaaagggcccu

SEQ ID NO: 1745934 - RNA, 19 nt, Artificial Sequence
  Description of Artificial Sequence: Synthetic oligonucleotide
cucuaggguccgagagcgu

SEQ ID NO: 1745935 - RNA, 19 nt, Artificial Sequence
  Description of Artificial Sequence: Synthetic oligonucleotide
ccccaggauuuuacugaga

SEQ ID NO: 1745936 - RNA, 19 nt, Artificial Sequence
  Description of Artificial Sequence: Synthetic oligonucleotide
cugcucugacagugagcgu

SEQ ID NO: 1745937 - RNA, 19 nt, Artificial Sequence
  Description of Artificial Sequence: Synthetic oligonucleotide
cccucgcgcucucgguccc

SEQ ID NO: 1745938 - RNA, 19 nt, Artificial Sequence
  Description of Artificial Sequence: Synthetic oligonucleotide
cccagacagauuugccagu

SEQ ID NO: 1745939 - RNA, 19 nt, Artificial Sequence
  Description of Artificial Sequence: Synthetic oligonucleotide
ccguucgcggucucugucu

SEQ ID NO: 1745940 - RNA, 19 nt, Artificial Sequence
  Description of Artificial Sequence: Synthetic oligonucleotide
ccgagagcguuugaagccu

SEQ ID NO: 1745941 - RNA, 19 nt, Artificial Sequence
  Description of Artificial Sequence: Synthetic oligonucleotide
gcccuccuuucggggaaug

SEQ ID NO: 1745942 - RNA, 19 nt, Artificial Sequence
  Description of Artificial Sequence: Synthetic oligonucleotide
gcaccaccauguucuucgu

SEQ ID NO: 1745943 - RNA, 19 nt, Artificial Sequence
  Description of Artificial Sequence: Synthetic oligonucleotide
ccgcaaccgaucgcuagaa

SEQ ID NO: 1745944 - RNA, 19 nt, Artificial Sequence
  Description of Artificial Sequence: Synthetic oligonucleotide
guacacaaucuggguccuu

SEQ ID NO: 1745945 - RNA, 19 nt, Artificial Sequence
  Description of Artificial Sequence: Synthetic oligonucleotide
gcucugacagugagcguuu

SEQ ID NO: 1745946 - RNA, 19 nt, Artificial Sequence
  Description of Artificial Sequence: Synthetic oligonucleotide
cggaaagggcccucgcgcu

SEQ ID NO: 1745947 - RNA, 19 nt, Artificial Sequence
  Description of Artificial Sequence: Synthetic oligonucleotide
cucgcgcucucggucccgu

SEQ ID NO: 1745948 - RNA, 19 nt, Artificial Sequence
  Description of Artificial Sequence: Synthetic oligonucleotide
gggcccucgcgcucucggu

SEQ ID NO: 1745949 - RNA, 19 nt, Artificial Sequence
  Description of Artificial Sequence: Synthetic oligonucleotide
ggucccguucgcggucucu

SEQ ID NO: 1745950 - RNA, 19 nt, Artificial Sequence
  Description of Artificial Sequence: Synthetic oligonucleotide
gcacaguuucugggugggu

SEQ ID NO: 1745951 - RNA, 19 nt, Artificial Sequence
  Description of Artificial Sequence: Synthetic oligonucleotide
cccuuccgaggggcccucc

SEQ ID NO: 1745952 - RNA, 19 nt, Artificial Sequence
  Description of Artificial Sequence: Synthetic oligonucleotide
ccgcugcuacuuugcuucu

SEQ ID NO: 1745953 - RNA, 19 nt, Artificial Sequence
  Description of Artificial Sequence: Synthetic oligonucleotide
ccccuuccgaggggcccuc

SEQ ID NO: 1745954 - RNA, 19 nt, Artificial Sequence
  Description of Artificial Sequence: Synthetic oligonucleotide
gccccggggcccucugauu

SEQ ID NO: 1745955 - RNA, 19 nt, Artificial Sequence
  Description of Artificial Sequence: Synthetic oligonucleotide
ggcccuccuuucggggaau

SEQ ID NO: 1745956 - RNA, 19 nt, Artificial Sequence
  Description of Artificial Sequence: Synthetic oligonucleotide
cggucccguucgcggucuc

SEQ ID NO: 1745957 - RNA, 19 nt, Artificial Sequence
  Description of Artificial Sequence: Synthetic oligonucleotide
cgcugcuacuuugcuucuu

SEQ ID NO: 1745958 - RNA, 19 nt, Artificial Sequence
  Description of Artificial Sequence: Synthetic oligonucleotide
ggcagcccuuagggcuguu

SEQ ID NO: 1745959 - RNA, 19 nt, Artificial Sequence
  Description of Artificial Sequence: Synthetic oligonucleotide
aguaaauaaagcuagaacu

SEQ ID NO: 1745960 - RNA, 19 nt, Artificial Sequence
  Description of Artificial Sequence: Synthetic oligonucleotide
aacgauagaaugcauuugc

SEQ ID NO: 1745961 - RNA, 19 nt, Artificial Sequence
  Description of Artificial Sequence: Synthetic oligonucleotide
uauaauaacgauagaaugc

SEQ ID NO: 1745962 - RNA, 19 nt, Artificial Sequence
  Description of Artificial Sequence: Synthetic oligonucleotide
ucuaggaacauaaacauca

SEQ ID NO: 1745963 - RNA, 19 nt, Artificial Sequence
  Description of Artificial Sequence: Synthetic oligonucleotide
ucucuauagaauuuuagcg

SEQ ID NO: 1745964 - RNA, 19 nt, Artificial Sequence
  Description of Artificial Sequence: Synthetic oligonucleotide
uaauaauagacauuuauac

SEQ ID NO: 1745965 - RNA, 19 nt, Artificial Sequence
  Description of Artificial Sequence: Synthetic oligonucleotide
uagaauuuuagcgauaugg

SEQ ID NO: 1745966 - RNA, 19 nt, Artificial Sequence
  Description of Artificial Sequence: Synthetic oligonucleotide
uugaaguaaauaaagcuag

SEQ ID NO: 1745967 - RNA, 19 nt, Artificial Sequence
  Description of Artificial Sequence: Synthetic oligonucleotide
uuauaauaacgauagaaug

SEQ ID NO: 1745968 - RNA, 19 nt, Artificial Sequence
  Description of Artificial Sequence: Synthetic oligonucleotide
uguauaaacaaaccuauac

SEQ ID NO: 1745969 - RNA, 19 nt, Artificial Sequence
  Description of Artificial Sequence: Synthetic oligonucleotide
aaugcauuugcuuaaacaa

SEQ ID NO: 1745970 - RNA, 19 nt, Artificial Sequence
  Description of Artificial Sequence: Synthetic oligonucleotide
uuaauuaaaccacuaauuc

SEQ ID NO: 1745971 - RNA, 19 nt, Artificial Sequence
  Description of Artificial Sequence: Synthetic oligonucleotide
aauccaaacaaugucuccc

SEQ ID NO: 1745972 - RNA, 19 nt, Artificial Sequence
  Description of Artificial Sequence: Synthetic oligonucleotide
aaagucagaacaaaccagc

SEQ ID NO: 1745973 - RNA, 19 nt, Artificial Sequence
  Description of Artificial Sequence: Synthetic oligonucleotide
uguggaagggaguaaaugg

SEQ ID NO: 1745974 - RNA, 19 nt, Artificial Sequence
  Description of Artificial Sequence: Synthetic oligonucleotide
aauuaaaccacuaauucca

SEQ ID NO: 1745975 - RNA, 19 nt, Artificial Sequence
  Description of Artificial Sequence: Synthetic oligonucleotide
uacagauuuguacuuauag

SEQ ID NO: 1745976 - RNA, 19 nt, Artificial Sequence
  Description of Artificial Sequence: Synthetic oligonucleotide
uucucuaggaacauaaaca

SEQ ID NO: 1745977 - RNA, 19 nt, Artificial Sequence
  Description of Artificial Sequence: Synthetic oligonucleotide
uaacuucacaguauaaagg

SEQ ID NO: 1745978 - RNA, 19 nt, Artificial Sequence
  Description of Artificial Sequence: Synthetic oligonucleotide
uuuaaaucagcccuuuagc

SEQ ID NO: 1745979 - RNA, 19 nt, Artificial Sequence
  Description of Artificial Sequence: Synthetic oligonucleotide
uauaaaggaaauccaaaca

SEQ ID NO: 1745980 - RNA, 19 nt, Artificial Sequence
  Description of Artificial Sequence: Synthetic oligonucleotide
uuuuagucaggcaagcaag

SEQ ID NO: 1745981 - RNA, 19 nt, Artificial Sequence
  Description of Artificial Sequence: Synthetic oligonucleotide
auuaaauuggcugugagcu

SEQ ID NO: 1745982 - RNA, 19 nt, Artificial Sequence
  Description of Artificial Sequence: Synthetic oligonucleotide
acaaaagucagaacaaacc

SEQ ID NO: 1745983 - RNA, 19 nt, Artificial Sequence
  Description of Artificial Sequence: Synthetic oligonucleotide
agugaggacaaucucaauc

SEQ ID NO: 1745984 - RNA, 19 nt, Artificial Sequence
  Description of Artificial Sequence: Synthetic oligonucleotide
aaagcuagaacuaacauuu

SEQ ID NO: 1745985 - RNA, 19 nt, Artificial Sequence
  Description of Artificial Sequence: Synthetic oligonucleotide
gaaaacacggcuuugccug

SEQ ID NO: 1745986 - RNA, 19 nt, Artificial Sequence
  Description of Artificial Sequence: Synthetic oligonucleotide
auucucuaggaacauaaac

SEQ ID NO: 1745987 - RNA, 19 nt, Artificial Sequence
  Description of Artificial Sequence: Synthetic oligonucleotide
uauguauaaacaaaccuau

SEQ ID NO: 1745988 - RNA, 19 nt, Artificial Sequence
  Description of Artificial Sequence: Synthetic oligonucleotide
aaauuaaauuggcugugag

SEQ ID NO: 1745989 - RNA, 19 nt, Artificial Sequence
  Description of Artificial Sequence: Synthetic oligonucleotide
acagcuuuuauucucuagg

SEQ ID NO: 1745990 - RNA, 19 nt, Artificial Sequence
  Description of Artificial Sequence: Synthetic oligonucleotide
aggauauggaaauucaaag

SEQ ID NO: 1745991 - RNA, 19 nt, Artificial Sequence
  Description of Artificial Sequence: Synthetic oligonucleotide
acgaaaauaaucuuucugu

SEQ ID NO: 1745992 - RNA, 19 nt, Artificial Sequence
  Description of Artificial Sequence: Synthetic oligonucleotide
aaaucaggccuguacuccc

SEQ ID NO: 1745993 - RNA, 19 nt, Artificial Sequence
  Description of Artificial Sequence: Synthetic oligonucleotide
uccauauguauaaacaaac

SEQ ID NO: 1745994 - RNA, 19 nt, Artificial Sequence
  Description of Artificial Sequence: Synthetic oligonucleotide
guaacuucacaguauaaag

SEQ ID NO: 1745995 - RNA, 19 nt, Artificial Sequence
  Description of Artificial Sequence: Synthetic oligonucleotide
uuuuaugcauguaacuuca

SEQ ID NO: 1745996 - RNA, 19 nt, Artificial Sequence
  Description of Artificial Sequence: Synthetic oligonucleotide
auuuauaauaacgauagaa

SEQ ID NO: 1745997 - RNA, 19 nt, Artificial Sequence
  Description of Artificial Sequence: Synthetic oligonucleotide
ugggagaucuuacagagga

SEQ ID NO: 1745998 - RNA, 19 nt, Artificial Sequence
  Description of Artificial Sequence: Synthetic oligonucleotide
aauuccauauguauaaaca

SEQ ID NO: 1745999 - RNA, 19 nt, Artificial Sequence
  Description of Artificial Sequence: Synthetic oligonucleotide
agaauuuuagcgauauggc

SEQ ID NO: 1746000 - RNA, 19 nt, Artificial Sequence
  Description of Artificial Sequence: Synthetic oligonucleotide
uuuauucugauuuaagauu

SEQ ID NO: 1746001 - RNA, 19 nt, Artificial Sequence
  Description of Artificial Sequence: Synthetic oligonucleotide
acuaauuccauauguauaa

SEQ ID NO: 1746002 - RNA, 19 nt, Artificial Sequence
  Description of Artificial Sequence: Synthetic oligonucleotide
accuauacuauucucaaca

SEQ ID NO: 1746003 - RNA, 19 nt, Artificial Sequence
  Description of Artificial Sequence: Synthetic oligonucleotide
aaaucagcccuuuagcuaa

SEQ ID NO: 1746004 - RNA, 19 nt, Artificial Sequence
  Description of Artificial Sequence: Synthetic oligonucleotide
cauuccacagcuuuuauuc

SEQ ID NO: 1746005 - RNA, 19 nt, Artificial Sequence
  Description of Artificial Sequence: Synthetic oligonucleotide
uuagcuaaccugcaugccc

SEQ ID NO: 1746006 - RNA, 19 nt, Artificial Sequence
  Description of Artificial Sequence: Synthetic oligonucleotide
auuuucacuugucuguccg

SEQ ID NO: 1746007 - RNA, 19 nt, Artificial Sequence
  Description of Artificial Sequence: Synthetic oligonucleotide
agauuugaaguaaauaaag

SEQ ID NO: 1746008 - RNA, 19 nt, Artificial Sequence
  Description of Artificial Sequence: Synthetic oligonucleotide
auaauaacgauagaaugca

SEQ ID NO: 1746009 - RNA, 19 nt, Artificial Sequence
  Description of Artificial Sequence: Synthetic oligonucleotide
ucuauagaauuuuagcgau

SEQ ID NO: 1746010 - RNA, 19 nt, Artificial Sequence
  Description of Artificial Sequence: Synthetic oligonucleotide
ucaaagguaaaugaagggu

SEQ ID NO: 1746011 - RNA, 19 nt, Artificial Sequence
  Description of Artificial Sequence: Synthetic oligonucleotide
ggauauggaaauucaaagg

SEQ ID NO: 1746012 - RNA, 19 nt, Artificial Sequence
  Description of Artificial Sequence: Synthetic oligonucleotide
uaggcaaacgggaagagaa

SEQ ID NO: 1746013 - RNA, 19 nt, Artificial Sequence
  Description of Artificial Sequence: Synthetic oligonucleotide
aagaccuuaggcaaacggg

SEQ ID NO: 1746014 - RNA, 19 nt, Artificial Sequence
  Description of Artificial Sequence: Synthetic oligonucleotide
uacuauucucaacagccag

SEQ ID NO: 1746015 - RNA, 19 nt, Artificial Sequence
  Description of Artificial Sequence: Synthetic oligonucleotide
uggaagggaguaaaugggg

SEQ ID NO: 1746016 - RNA, 19 nt, Artificial Sequence
  Description of Artificial Sequence: Synthetic oligonucleotide
cuuuagcuaaccugcaugc

SEQ ID NO: 1746017 - RNA, 19 nt, Artificial Sequence
  Description of Artificial Sequence: Synthetic oligonucleotide
aaaccuauacuauucucaa

SEQ ID NO: 1746018 - RNA, 19 nt, Artificial Sequence
  Description of Artificial Sequence: Synthetic oligonucleotide
agaagguuucuucucuugg

SEQ ID NO: 1746019 - RNA, 19 nt, Artificial Sequence
  Description of Artificial Sequence: Synthetic oligonucleotide
uuuaagauuugaaguaaau

SEQ ID NO: 1746020 - RNA, 19 nt, Artificial Sequence
  Description of Artificial Sequence: Synthetic oligonucleotide
uaaauuggcugugagcucc

SEQ ID NO: 1746021 - RNA, 19 nt, Artificial Sequence
  Description of Artificial Sequence: Synthetic oligonucleotide
gaaacggccugggagaugg

SEQ ID NO: 1746022 - RNA, 19 nt, Artificial Sequence
  Description of Artificial Sequence: Synthetic oligonucleotide
auaacgauagaaugcauuu

SEQ ID NO: 1746023 - RNA, 19 nt, Artificial Sequence
  Description of Artificial Sequence: Synthetic oligonucleotide
uguacucccugauuaaaca

SEQ ID NO: 1746024 - RNA, 19 nt, Artificial Sequence
  Description of Artificial Sequence: Synthetic oligonucleotide
cuagaacuaacauuuauaa

SEQ ID NO: 1746025 - RNA, 19 nt, Artificial Sequence
  Description of Artificial Sequence: Synthetic oligonucleotide
aaaagagaaaucaggccug

SEQ ID NO: 1746026 - RNA, 19 nt, Artificial Sequence
  Description of Artificial Sequence: Synthetic oligonucleotide
acagcccagaacuccaggc

SEQ ID NO: 1746027 - RNA, 19 nt, Artificial Sequence
  Description of Artificial Sequence: Synthetic oligonucleotide
uguaacuucacaguauaaa

SEQ ID NO: 1746028 - RNA, 19 nt, Artificial Sequence
  Description of Artificial Sequence: Synthetic oligonucleotide
uauagaauuuuagcgauau

SEQ ID NO: 1746029 - RNA, 19 nt, Artificial Sequence
  Description of Artificial Sequence: Synthetic oligonucleotide
agcccuuuagcuaaccugc

SEQ ID NO: 1746030 - RNA, 19 nt, Artificial Sequence
  Description of Artificial Sequence: Synthetic oligonucleotide
caaaagucagaacaaacca

SEQ ID NO: 1746031 - RNA, 19 nt, Artificial Sequence
  Description of Artificial Sequence: Synthetic oligonucleotide
cucuauagaauuuuagcga

SEQ ID NO: 1746032 - RNA, 19 nt, Artificial Sequence
  Description of Artificial Sequence: Synthetic oligonucleotide
uggaaguuucaucaggaaa

SEQ ID NO: 1746033 - RNA, 19 nt, Artificial Sequence
  Description of Artificial Sequence: Synthetic oligonucleotide
uuuagucaggcaagcaaga

SEQ ID NO: 1746034 - RNA, 19 nt, Artificial Sequence
  Description of Artificial Sequence: Synthetic oligonucleotide
ucauugaacugggagaucu

SEQ ID NO: 1746035 - RNA, 19 nt, Artificial Sequence
  Description of Artificial Sequence: Synthetic oligonucleotide
uagucaggcaagcaagacc

SEQ ID NO: 1746036 - RNA, 19 nt, Artificial Sequence
  Description of Artificial Sequence: Synthetic oligonucleotide
acaggugcgaguucugggg

SEQ ID NO: 1746037 - RNA, 19 nt, Artificial Sequence
  Description of Artificial Sequence: Synthetic oligonucleotide
uucacaguauaaaggaaau

SEQ ID NO: 1746038 - RNA, 19 nt, Artificial Sequence
  Description of Artificial Sequence: Synthetic oligonucleotide
caagaccuuaggcaaacgg

SEQ ID NO: 1746039 - RNA, 19 nt, Artificial Sequence
  Description of Artificial Sequence: Synthetic oligonucleotide
auaaagcuagaacuaacau

SEQ ID NO: 1746040 - RNA, 19 nt, Artificial Sequence
  Description of Artificial Sequence: Synthetic oligonucleotide
cuaaguuuacccagggcug

SEQ ID NO: 1746041 - RNA, 19 nt, Artificial Sequence
  Description of Artificial Sequence: Synthetic oligonucleotide
aggacgaaaauaaucuuuc

SEQ ID NO: 1746042 - RNA, 19 nt, Artificial Sequence
  Description of Artificial Sequence: Synthetic oligonucleotide
aaaacacggcuuugccugg

SEQ ID NO: 1746043 - RNA, 19 nt, Artificial Sequence
  Description of Artificial Sequence: Synthetic oligonucleotide
aggaaggacgaaaauaauc

SEQ ID NO: 1746044 - RNA, 19 nt, Artificial Sequence
  Description of Artificial Sequence: Synthetic oligonucleotide
aagggaguaaauggggcuc

SEQ ID NO: 1746045 - RNA, 19 nt, Artificial Sequence
  Description of Artificial Sequence: Synthetic oligonucleotide
caaaccuauacuauucuca

SEQ ID NO: 1746046 - RNA, 19 nt, Artificial Sequence
  Description of Artificial Sequence: Synthetic oligonucleotide
aauaacgauagaaugcauu

SEQ ID NO: 1746047 - RNA, 19 nt, Artificial Sequence
  Description of Artificial Sequence: Synthetic oligonucleotide
cuuccggcuaaguuuaccc

SEQ ID NO: 1746048 - RNA, 19 nt, Artificial Sequence
  Description of Artificial Sequence: Synthetic oligonucleotide
gcuuuuauucucuaggaac

SEQ ID NO: 1746049 - RNA, 19 nt, Artificial Sequence
  Description of Artificial Sequence: Synthetic oligonucleotide
uacucccugauuaaacaca

SEQ ID NO: 1746050 - RNA, 19 nt, Artificial Sequence
  Description of Artificial Sequence: Synthetic oligonucleotide
ugaacugggagaucuuaca

SEQ ID NO: 1746051 - RNA, 19 nt, Artificial Sequence
  Description of Artificial Sequence: Synthetic oligonucleotide
agaaugcauuugcuuaaac

SEQ ID NO: 1746052 - RNA, 19 nt, Artificial Sequence
  Description of Artificial Sequence: Synthetic oligonucleotide
ugggagauggcgagugugg

SEQ ID NO: 1746053 - RNA, 19 nt, Artificial Sequence
  Description of Artificial Sequence: Synthetic oligonucleotide
caauauuaauuuauucuga

SEQ ID NO: 1746054 - RNA, 19 nt, Artificial Sequence
  Description of Artificial Sequence: Synthetic oligonucleotide
gagaucuuacagaggaagg

SEQ ID NO: 1746055 - RNA, 19 nt, Artificial Sequence
  Description of Artificial Sequence: Synthetic oligonucleotide
gaacaaaccagcccugcac

SEQ ID NO: 1746056 - RNA, 19 nt, Artificial Sequence
  Description of Artificial Sequence: Synthetic oligonucleotide
aacgggaagagaagguuuc

SEQ ID NO: 1746057 - RNA, 19 nt, Artificial Sequence
  Description of Artificial Sequence: Synthetic oligonucleotide
agcgaaaacacggcuuugc

SEQ ID NO: 1746058 - RNA, 19 nt, Artificial Sequence
  Description of Artificial Sequence: Synthetic oligonucleotide
aaccagauccauguaggag

SEQ ID NO: 1746059 - RNA, 19 nt, Artificial Sequence
  Description of Artificial Sequence: Synthetic oligonucleotide
ucccgguucauuuucuuca

SEQ ID NO: 1746060 - RNA, 19 nt, Artificial Sequence
  Description of Artificial Sequence: Synthetic oligonucleotide
guauaaacaaaccuauacu

SEQ ID NO: 1746061 - RNA, 19 nt, Artificial Sequence
  Description of Artificial Sequence: Synthetic oligonucleotide
agucaggcaagcaagaccu

SEQ ID NO: 1746062 - RNA, 19 nt, Artificial Sequence
  Description of Artificial Sequence: Synthetic oligonucleotide
aaaccagauccauguagga

SEQ ID NO: 1746063 - RNA, 19 nt, Artificial Sequence
  Description of Artificial Sequence: Synthetic oligonucleotide
aggccagacaccucagcgc

SEQ ID NO: 1746064 - RNA, 19 nt, Artificial Sequence
  Description of Artificial Sequence: Synthetic oligonucleotide
uuugacccuuuuaugcaug

SEQ ID NO: 1746065 - RNA, 19 nt, Artificial Sequence
  Description of Artificial Sequence: Synthetic oligonucleotide
cauauguauaaacaaaccu

SEQ ID NO: 1746066 - RNA, 19 nt, Artificial Sequence
  Description of Artificial Sequence: Synthetic oligonucleotide
auauuaauuuauucugauu

SEQ ID NO: 1746067 - RNA, 19 nt, Artificial Sequence
  Description of Artificial Sequence: Synthetic oligonucleotide
ucagcgccgacaauggaac

SEQ ID NO: 1746068 - RNA, 19 nt, Artificial Sequence
  Description of Artificial Sequence: Synthetic oligonucleotide
uagcuaaccugcaugccca

SEQ ID NO: 1746069 - RNA, 19 nt, Artificial Sequence
  Description of Artificial Sequence: Synthetic oligonucleotide
auuuuagcgauauggcuuu

SEQ ID NO: 1746070 - RNA, 19 nt, Artificial Sequence
  Description of Artificial Sequence: Synthetic oligonucleotide
cauaauaauagacauuuau

SEQ ID NO: 1746071 - RNA, 19 nt, Artificial Sequence
  Description of Artificial Sequence: Synthetic oligonucleotide
ugcaccuacagguuuugac

SEQ ID NO: 1746072 - RNA, 19 nt, Artificial Sequence
  Description of Artificial Sequence: Synthetic oligonucleotide
ugcacagacgaaacggccu

SEQ ID NO: 1746073 - RNA, 19 nt, Artificial Sequence
  Description of Artificial Sequence: Synthetic oligonucleotide
guaaauggggcuccggcac

SEQ ID NO: 1746074 - RNA, 19 nt, Artificial Sequence
  Description of Artificial Sequence: Synthetic oligonucleotide
guuuugacccuuuuaugca

SEQ ID NO: 1746075 - RNA, 19 nt, Artificial Sequence
  Description of Artificial Sequence: Synthetic oligonucleotide
caacaccaagcaaacagac

SEQ ID NO: 1746076 - RNA, 19 nt, Artificial Sequence
  Description of Artificial Sequence: Synthetic oligonucleotide
auaaacaaaccuauacuau

SEQ ID NO: 1746077 - RNA, 19 nt, Artificial Sequence
  Description of Artificial Sequence: Synthetic oligonucleotide
gcuuaaacaagauuggcaa

SEQ ID NO: 1746078 - RNA, 19 nt, Artificial Sequence
  Description of Artificial Sequence: Synthetic oligonucleotide
acuauucucaacagccagg

SEQ ID NO: 1746079 - RNA, 19 nt, Artificial Sequence
  Description of Artificial Sequence: Synthetic oligonucleotide
aguauaaaggaaauccaaa

SEQ ID NO: 1746080 - RNA, 19 nt, Artificial Sequence
  Description of Artificial Sequence: Synthetic oligonucleotide
uugcuuaaacaagauuggc

SEQ ID NO: 1746081 - RNA, 19 nt, Artificial Sequence
  Description of Artificial Sequence: Synthetic oligonucleotide
gacgaaacggccugggaga

SEQ ID NO: 1746082 - RNA, 19 nt, Artificial Sequence
  Description of Artificial Sequence: Synthetic oligonucleotide
caagcaagaccuuaggcaa

SEQ ID NO: 1746083 - RNA, 19 nt, Artificial Sequence
  Description of Artificial Sequence: Synthetic oligonucleotide
gacagugaggacaaucuca

SEQ ID NO: 1746084 - RNA, 19 nt, Artificial Sequence
  Description of Artificial Sequence: Synthetic oligonucleotide
uaacgauagaaugcauuug

SEQ ID NO: 1746085 - RNA, 19 nt, Artificial Sequence
  Description of Artificial Sequence: Synthetic oligonucleotide
auccauguaggaguacugg

SEQ ID NO: 1746086 - RNA, 19 nt, Artificial Sequence
  Description of Artificial Sequence: Synthetic oligonucleotide
accuuaggcaaacgggaag

SEQ ID NO: 1746087 - RNA, 19 nt, Artificial Sequence
  Description of Artificial Sequence: Synthetic oligonucleotide
augcauuugcuuaaacaag

SEQ ID NO: 1746088 - RNA, 19 nt, Artificial Sequence
  Description of Artificial Sequence: Synthetic oligonucleotide
gacauuuauacagauuugu

SEQ ID NO: 1746089 - RNA, 19 nt, Artificial Sequence
  Description of Artificial Sequence: Synthetic oligonucleotide
uggaaccuagggcuuccgg

SEQ ID NO: 1746090 - RNA, 19 nt, Artificial Sequence
  Description of Artificial Sequence: Synthetic oligonucleotide
agcaagaccuuaggcaaac

SEQ ID NO: 1746091 - RNA, 19 nt, Artificial Sequence
  Description of Artificial Sequence: Synthetic oligonucleotide
aaagguaaaugaaggguuu

SEQ ID NO: 1746092 - RNA, 19 nt, Artificial Sequence
  Description of Artificial Sequence: Synthetic oligonucleotide
cuguacucccugauuaaac

SEQ ID NO: 1746093 - RNA, 19 nt, Artificial Sequence
  Description of Artificial Sequence: Synthetic oligonucleotide
gagaaaucaggccuguacu

SEQ ID NO: 1746094 - RNA, 19 nt, Artificial Sequence
  Description of Artificial Sequence: Synthetic oligonucleotide
uauucucuaggaacauaaa

SEQ ID NO: 1746095 - RNA, 19 nt, Artificial Sequence
  Description of Artificial Sequence: Synthetic oligonucleotide
uaaacacagcccagaacuc

SEQ ID NO: 1746096 - RNA, 19 nt, Artificial Sequence
  Description of Artificial Sequence: Synthetic oligonucleotide
gguaaaugaaggguuuuag

SEQ ID NO: 1746097 - RNA, 19 nt, Artificial Sequence
  Description of Artificial Sequence: Synthetic oligonucleotide
uuuagcuaaccugcaugcc

SEQ ID NO: 1746098 - RNA, 19 nt, Artificial Sequence
  Description of Artificial Sequence: Synthetic oligonucleotide
agccaggauauggaaauuc

SEQ ID NO: 1746099 - RNA, 19 nt, Artificial Sequence
  Description of Artificial Sequence: Synthetic oligonucleotide
uuaaauuggcugugagcuc

SEQ ID NO: 1746100 - RNA, 19 nt, Artificial Sequence
  Description of Artificial Sequence: Synthetic oligonucleotide
aaagagaaaucaggccugu

SEQ ID NO: 1746101 - RNA, 19 nt, Artificial Sequence
  Description of Artificial Sequence: Synthetic oligonucleotide
auagaauuuuagcgauaug

SEQ ID NO: 1746102 - RNA, 19 nt, Artificial Sequence
  Description of Artificial Sequence: Synthetic oligonucleotide
ucauaauaauagacauuua

SEQ ID NO: 1746103 - RNA, 19 nt, Artificial Sequence
  Description of Artificial Sequence: Synthetic oligonucleotide
aggacuugacagugaggac

SEQ ID NO: 1746104 - RNA, 19 nt, Artificial Sequence
  Description of Artificial Sequence: Synthetic oligonucleotide
gauucgguuuucccgguuc

SEQ ID NO: 1746105 - RNA, 19 nt, Artificial Sequence
  Description of Artificial Sequence: Synthetic oligonucleotide
caggauauggaaauucaaa

SEQ ID NO: 1746106 - RNA, 19 nt, Artificial Sequence
  Description of Artificial Sequence: Synthetic oligonucleotide
aacggccugggagauggcg

SEQ ID NO: 1746107 - RNA, 19 nt, Artificial Sequence
  Description of Artificial Sequence: Synthetic oligonucleotide
agcuuuuauucucuaggaa

SEQ ID NO: 1746108 - RNA, 19 nt, Artificial Sequence
  Description of Artificial Sequence: Synthetic oligonucleotide
uaauaacgauagaaugcau

SEQ ID NO: 1746109 - RNA, 19 nt, Artificial Sequence
  Description of Artificial Sequence: Synthetic oligonucleotide
caggcaagcaagaccuuag

SEQ ID NO: 1746110 - RNA, 19 nt, Artificial Sequence
  Description of Artificial Sequence: Synthetic oligonucleotide
aggcaagcaagaccuuagg

SEQ ID NO: 1746111 - RNA, 19 nt, Artificial Sequence
  Description of Artificial Sequence: Synthetic oligonucleotide
guacucccugauuaaacac

SEQ ID NO: 1746112 - RNA, 19 nt, Artificial Sequence
  Description of Artificial Sequence: Synthetic oligonucleotide
uuauacagauuuguacuua

SEQ ID NO: 1746113 - RNA, 19 nt, Artificial Sequence
  Description of Artificial Sequence: Synthetic oligonucleotide
uuaaaccacuaauuccaua

SEQ ID NO: 1746114 - RNA, 19 nt, Artificial Sequence
  Description of Artificial Sequence: Synthetic oligonucleotide
cugcacagacgaaacggcc

SEQ ID NO: 1746115 - RNA, 19 nt, Artificial Sequence
  Description of Artificial Sequence: Synthetic oligonucleotide
ccgacaauggaaccuaggg

SEQ ID NO: 1746116 - RNA, 19 nt, Artificial Sequence
  Description of Artificial Sequence: Synthetic oligonucleotide
ugaggacaaucucaaucuc

SEQ ID NO: 1746117 - RNA, 19 nt, Artificial Sequence
  Description of Artificial Sequence: Synthetic oligonucleotide
agauggcgaguguggaagg

SEQ ID NO: 1746118 - RNA, 19 nt, Artificial Sequence
  Description of Artificial Sequence: Synthetic oligonucleotide
cagcccuuuagcuaaccug

SEQ ID NO: 1746119 - RNA, 19 nt, Artificial Sequence
  Description of Artificial Sequence: Synthetic oligonucleotide
cucuaggaacauaaacauc

SEQ ID NO: 1746120 - RNA, 19 nt, Artificial Sequence
  Description of Artificial Sequence: Synthetic oligonucleotide
gaacauaaacaucaucuuu

SEQ ID NO: 1746121 - RNA, 19 nt, Artificial Sequence
  Description of Artificial Sequence: Synthetic oligonucleotide
aaguuuacccagggcuggg

SEQ ID NO: 1746122 - RNA, 19 nt, Artificial Sequence
  Description of Artificial Sequence: Synthetic oligonucleotide
uaaauggggcuccggcaca

SEQ ID NO: 1746123 - RNA, 19 nt, Artificial Sequence
  Description of Artificial Sequence: Synthetic oligonucleotide
uuaggcaaacgggaagaga

SEQ ID NO: 1746124 - RNA, 19 nt, Artificial Sequence
  Description of Artificial Sequence: Synthetic oligonucleotide
ggcaaacgggaagagaagg

SEQ ID NO: 1746125 - RNA, 19 nt, Artificial Sequence
  Description of Artificial Sequence: Synthetic oligonucleotide
uuagucaggcaagcaagac

SEQ ID NO: 1746126 - RNA, 19 nt, Artificial Sequence
  Description of Artificial Sequence: Synthetic oligonucleotide
guacaggcgcucuggaagc

SEQ ID NO: 1746127 - RNA, 19 nt, Artificial Sequence
  Description of Artificial Sequence: Synthetic oligonucleotide
agcccagaacuccaggcug

SEQ ID NO: 1746128 - RNA, 19 nt, Artificial Sequence
  Description of Artificial Sequence: Synthetic oligonucleotide
ggaaccuagggcuuccggc

SEQ ID NO: 1746129 - RNA, 19 nt, Artificial Sequence
  Description of Artificial Sequence: Synthetic oligonucleotide
acuccaggcuggcgaaccc

SEQ ID NO: 1746130 - RNA, 19 nt, Artificial Sequence
  Description of Artificial Sequence: Synthetic oligonucleotide
cauguaacuucacaguaua

SEQ ID NO: 1746131 - RNA, 19 nt, Artificial Sequence
  Description of Artificial Sequence: Synthetic oligonucleotide
uuccggcuaaguuuaccca

SEQ ID NO: 1746132 - RNA, 19 nt, Artificial Sequence
  Description of Artificial Sequence: Synthetic oligonucleotide
uuucugcaccuacagguuu

SEQ ID NO: 1746133 - RNA, 19 nt, Artificial Sequence
  Description of Artificial Sequence: Synthetic oligonucleotide
gauccauguaggaguacug

SEQ ID NO: 1746134 - RNA, 19 nt, Artificial Sequence
  Description of Artificial Sequence: Synthetic oligonucleotide
aguuuacccagggcugggc

SEQ ID NO: 1746135 - RNA, 19 nt, Artificial Sequence
  Description of Artificial Sequence: Synthetic oligonucleotide
cacuaauuccauauguaua

SEQ ID NO: 1746136 - RNA, 19 nt, Artificial Sequence
  Description of Artificial Sequence: Synthetic oligonucleotide
ccauguuucgauacucugc

SEQ ID NO: 1746137 - RNA, 19 nt, Artificial Sequence
  Description of Artificial Sequence: Synthetic oligonucleotide
aaauggggcuccggcacag

SEQ ID NO: 1746138 - RNA, 19 nt, Artificial Sequence
  Description of Artificial Sequence: Synthetic oligonucleotide
auugaccucaggccagaca

SEQ ID NO: 1746139 - RNA, 19 nt, Artificial Sequence
  Description of Artificial Sequence: Synthetic oligonucleotide
uuucgauacucugcucuug

SEQ ID NO: 1746140 - RNA, 19 nt, Artificial Sequence
  Description of Artificial Sequence: Synthetic oligonucleotide
gaagggaguaaauggggcu

SEQ ID NO: 1746141 - RNA, 19 nt, Artificial Sequence
  Description of Artificial Sequence: Synthetic oligonucleotide
cauguuucgauacucugcu

SEQ ID NO: 1746142 - RNA, 19 nt, Artificial Sequence
  Description of Artificial Sequence: Synthetic oligonucleotide
ucgauacucugcucuuggc

SEQ ID NO: 1746143 - RNA, 19 nt, Artificial Sequence
  Description of Artificial Sequence: Synthetic oligonucleotide
auguuucgauacucugcuc

SEQ ID NO: 1746144 - RNA, 19 nt, Artificial Sequence
  Description of Artificial Sequence: Synthetic oligonucleotide
auucgguuuucccgguuca

SEQ ID NO: 1746145 - RNA, 19 nt, Artificial Sequence
  Description of Artificial Sequence: Synthetic oligonucleotide
cuauucucaacagccagga

SEQ ID NO: 1746146 - RNA, 19 nt, Artificial Sequence
  Description of Artificial Sequence: Synthetic oligonucleotide
ccuauacuauucucaacag

SEQ ID NO: 1746147 - RNA, 19 nt, Artificial Sequence
  Description of Artificial Sequence: Synthetic oligonucleotide
ggcaagcaagaccuuaggc

SEQ ID NO: 1746148 - RNA, 19 nt, Artificial Sequence
  Description of Artificial Sequence: Synthetic oligonucleotide
gacaccucagcgccgacaa

SEQ ID NO: 1746149 - RNA, 19 nt, Artificial Sequence
  Description of Artificial Sequence: Synthetic oligonucleotide
aauuggcugugagcucccg

SEQ ID NO: 1746150 - RNA, 19 nt, Artificial Sequence
  Description of Artificial Sequence: Synthetic oligonucleotide
gaaggguuuuagucaggca

SEQ ID NO: 1746151 - RNA, 19 nt, Artificial Sequence
  Description of Artificial Sequence: Synthetic oligonucleotide
ucuguccgugagguggacg

SEQ ID NO: 1746152 - RNA, 19 nt, Artificial Sequence
  Description of Artificial Sequence: Synthetic oligonucleotide
cuuaggcaaacgggaagag

SEQ ID NO: 1746153 - RNA, 19 nt, Artificial Sequence
  Description of Artificial Sequence: Synthetic oligonucleotide
ugaccucaggccagacacc

SEQ ID NO: 1746154 - RNA, 19 nt, Artificial Sequence
  Description of Artificial Sequence: Synthetic oligonucleotide
gaagcgaaaacacggcuuu

SEQ ID NO: 1746155 - RNA, 19 nt, Artificial Sequence
  Description of Artificial Sequence: Synthetic oligonucleotide
uucugcaccuacagguuuu

SEQ ID NO: 1746156 - RNA, 19 nt, Artificial Sequence
  Description of Artificial Sequence: Synthetic oligonucleotide
gcuccuugcaccauugacc

SEQ ID NO: 1746157 - RNA, 19 nt, Artificial Sequence
  Description of Artificial Sequence: Synthetic oligonucleotide
acgcacagcagcaauacaa

SEQ ID NO: 1746158 - RNA, 19 nt, Artificial Sequence
  Description of Artificial Sequence: Synthetic oligonucleotide
ccggauucgguuuucccgg

SEQ ID NO: 1746159 - RNA, 19 nt, Artificial Sequence
  Description of Artificial Sequence: Synthetic oligonucleotide
caccucagcgccgacaaug

SEQ ID NO: 1746160 - RNA, 19 nt, Artificial Sequence
  Description of Artificial Sequence: Synthetic oligonucleotide
cccggauucgguuuucccg

SEQ ID NO: 1746161 - RNA, 19 nt, Artificial Sequence
  Description of Artificial Sequence: Synthetic oligonucleotide
aaccugcaugcccauguuu

SEQ ID NO: 1746162 - RNA, 19 nt, Artificial Sequence
  Description of Artificial Sequence: Synthetic oligonucleotide
ggaagggaguaaauggggc

SEQ ID NO: 1746163 - RNA, 19 nt, Artificial Sequence
  Description of Artificial Sequence: Synthetic oligonucleotide
agagaagguuucuucucuu

SEQ ID NO: 1746164 - RNA, 19 nt, Artificial Sequence
  Description of Artificial Sequence: Synthetic oligonucleotide
ugagcucccggauucgguu

SEQ ID NO: 1746165 - RNA, 19 nt, Artificial Sequence
  Description of Artificial Sequence: Synthetic oligonucleotide
uccacgcacagcagcaaua

SEQ ID NO: 1746166 - RNA, 19 nt, Artificial Sequence
  Description of Artificial Sequence: Synthetic oligonucleotide
ucaggcaagcaagaccuua

SEQ ID NO: 1746167 - RNA, 19 nt, Artificial Sequence
  Description of Artificial Sequence: Synthetic oligonucleotide
acacggcuuugccuggaag

SEQ ID NO: 1746168 - RNA, 19 nt, Artificial Sequence
  Description of Artificial Sequence: Synthetic oligonucleotide
cauuuauaauaacgauaga

SEQ ID NO: 1746169 - RNA, 19 nt, Artificial Sequence
  Description of Artificial Sequence: Synthetic oligonucleotide
aagcgaaaacacggcuuug

SEQ ID NO: 1746170 - RNA, 19 nt, Artificial Sequence
  Description of Artificial Sequence: Synthetic oligonucleotide
ucccuucucucaucaaaau

SEQ ID NO: 1746171 - RNA, 19 nt, Artificial Sequence
  Description of Artificial Sequence: Synthetic oligonucleotide
cagguuuugacccuuuuau

SEQ ID NO: 1746172 - RNA, 19 nt, Artificial Sequence
  Description of Artificial Sequence: Synthetic oligonucleotide
acgauagaaugcauuugcu

SEQ ID NO: 1746173 - RNA, 19 nt, Artificial Sequence
  Description of Artificial Sequence: Synthetic oligonucleotide
caggugcgaguucuggggc

SEQ ID NO: 1746174 - RNA, 19 nt, Artificial Sequence
  Description of Artificial Sequence: Synthetic oligonucleotide
uccaaacaaugucucccuu

SEQ ID NO: 1746175 - RNA, 19 nt, Artificial Sequence
  Description of Artificial Sequence: Synthetic oligonucleotide
uauucucaacagccaggau

SEQ ID NO: 1746176 - RNA, 19 nt, Artificial Sequence
  Description of Artificial Sequence: Synthetic oligonucleotide
agcccugcacagacgaaac

SEQ ID NO: 1746177 - RNA, 19 nt, Artificial Sequence
  Description of Artificial Sequence: Synthetic oligonucleotide
guuuacccagggcugggca

SEQ ID NO: 1746178 - RNA, 19 nt, Artificial Sequence
  Description of Artificial Sequence: Synthetic oligonucleotide
cucagcgccgacaauggaa

SEQ ID NO: 1746179 - RNA, 19 nt, Artificial Sequence
  Description of Artificial Sequence: Synthetic oligonucleotide
uuccacgcacagcagcaau

SEQ ID NO: 1746180 - RNA, 19 nt, Artificial Sequence
  Description of Artificial Sequence: Synthetic oligonucleotide
acaaguaaaccaacaccaa

SEQ ID NO: 1746181 - RNA, 19 nt, Artificial Sequence
  Description of Artificial Sequence: Synthetic oligonucleotide
auuaaaccacuaauuccau

SEQ ID NO: 1746182 - RNA, 19 nt, Artificial Sequence
  Description of Artificial Sequence: Synthetic oligonucleotide
uacaggcgcucuggaagcg

SEQ ID NO: 1746183 - RNA, 19 nt, Artificial Sequence
  Description of Artificial Sequence: Synthetic oligonucleotide
ccugcacagacgaaacggc

SEQ ID NO: 1746184 - RNA, 19 nt, Artificial Sequence
  Description of Artificial Sequence: Synthetic oligonucleotide
cucccugauuaaacacagc

SEQ ID NO: 1746185 - RNA, 19 nt, Artificial Sequence
  Description of Artificial Sequence: Synthetic oligonucleotide
gaaggacgaaaauaaucuu

SEQ ID NO: 1746186 - RNA, 19 nt, Artificial Sequence
  Description of Artificial Sequence: Synthetic oligonucleotide
gcgaaaacacggcuuugcc

SEQ ID NO: 1746187 - RNA, 19 nt, Artificial Sequence
  Description of Artificial Sequence: Synthetic oligonucleotide
aaucaggccuguacucccu

SEQ ID NO: 1746188 - RNA, 19 nt, Artificial Sequence
  Description of Artificial Sequence: Synthetic oligonucleotide
ggggcuccggcacaggugc

SEQ ID NO: 1746189 - RNA, 19 nt, Artificial Sequence
  Description of Artificial Sequence: Synthetic oligonucleotide
cucccuucucucaucaaaa

SEQ ID NO: 1746190 - RNA, 19 nt, Artificial Sequence
  Description of Artificial Sequence: Synthetic oligonucleotide
ugcccauguuucgauacuc

SEQ ID NO: 1746191 - RNA, 19 nt, Artificial Sequence
  Description of Artificial Sequence: Synthetic oligonucleotide
cccugcacagacgaaacgg

SEQ ID NO: 1746192 - RNA, 19 nt, Artificial Sequence
  Description of Artificial Sequence: Synthetic oligonucleotide
agcgccgacaauggaaccu

SEQ ID NO: 1746193 - RNA, 19 nt, Artificial Sequence
  Description of Artificial Sequence: Synthetic oligonucleotide
cuauagaauuuuagcgaua

SEQ ID NO: 1746194 - RNA, 19 nt, Artificial Sequence
  Description of Artificial Sequence: Synthetic oligonucleotide
aaccuagggcuuccggcua

SEQ ID NO: 1746195 - RNA, 19 nt, Artificial Sequence
  Description of Artificial Sequence: Synthetic oligonucleotide
cuugcaccauugaccucag

SEQ ID NO: 1746196 - RNA, 19 nt, Artificial Sequence
  Description of Artificial Sequence: Synthetic oligonucleotide
gcuagaacuaacauuuaua

SEQ ID NO: 1746197 - RNA, 19 nt, Artificial Sequence
  Description of Artificial Sequence: Synthetic oligonucleotide
gcugugagcucccggauuc

SEQ ID NO: 1746198 - RNA, 19 nt, Artificial Sequence
  Description of Artificial Sequence: Synthetic oligonucleotide
uuucccgguucauuuucuu

SEQ ID NO: 1746199 - RNA, 19 nt, Artificial Sequence
  Description of Artificial Sequence: Synthetic oligonucleotide
uaaccugcaugcccauguu

SEQ ID NO: 1746200 - RNA, 19 nt, Artificial Sequence
  Description of Artificial Sequence: Synthetic oligonucleotide
gcacagacgaaacggccug

SEQ ID NO: 1746201 - RNA, 19 nt, Artificial Sequence
  Description of Artificial Sequence: Synthetic oligonucleotide
ccugcaugcccauguuucg

SEQ ID NO: 1746202 - RNA, 19 nt, Artificial Sequence
  Description of Artificial Sequence: Synthetic oligonucleotide
uccggcacaggugcgaguu

SEQ ID NO: 1746203 - RNA, 19 nt, Artificial Sequence
  Description of Artificial Sequence: Synthetic oligonucleotide
aaacacggcuuugccugga

SEQ ID NO: 1746204 - RNA, 19 nt, Artificial Sequence
  Description of Artificial Sequence: Synthetic oligonucleotide
auguauaaacaaaccuaua

SEQ ID NO: 1746205 - RNA, 19 nt, Artificial Sequence
  Description of Artificial Sequence: Synthetic oligonucleotide
ccggcuaaguuuacccagg

SEQ ID NO: 1746206 - RNA, 19 nt, Artificial Sequence
  Description of Artificial Sequence: Synthetic oligonucleotide
aaccagcccugcacagacg

SEQ ID NO: 1746207 - RNA, 19 nt, Artificial Sequence
  Description of Artificial Sequence: Synthetic oligonucleotide
cucaggccagacaccucag

SEQ ID NO: 1746208 - RNA, 19 nt, Artificial Sequence
  Description of Artificial Sequence: Synthetic oligonucleotide
cuccaggcuggcgaacccg

SEQ ID NO: 1746209 - RNA, 19 nt, Artificial Sequence
  Description of Artificial Sequence: Synthetic oligonucleotide
uggcgaacccgguggcggc

SEQ ID NO: 1746210 - RNA, 19 nt, Artificial Sequence
  Description of Artificial Sequence: Synthetic oligonucleotide
ggggcagcgaacccagccc

SEQ ID NO: 1746211 - RNA, 19 nt, Artificial Sequence
  Description of Artificial Sequence: Synthetic oligonucleotide
ggaguaaauggggcuccgg

SEQ ID NO: 1746212 - RNA, 19 nt, Artificial Sequence
  Description of Artificial Sequence: Synthetic oligonucleotide
caacagccaggauauggaa

SEQ ID NO: 1746213 - RNA, 19 nt, Artificial Sequence
  Description of Artificial Sequence: Synthetic oligonucleotide
uuuccacgcacagcagcaa

SEQ ID NO: 1746214 - RNA, 19 nt, Artificial Sequence
  Description of Artificial Sequence: Synthetic oligonucleotide
aaacggccugggagauggc

SEQ ID NO: 1746215 - RNA, 19 nt, Artificial Sequence
  Description of Artificial Sequence: Synthetic oligonucleotide
ggguuuuagucaggcaagc

SEQ ID NO: 1746216 - RNA, 19 nt, Artificial Sequence
  Description of Artificial Sequence: Synthetic oligonucleotide
aagagaaaucaggccugua

SEQ ID NO: 1746217 - RNA, 19 nt, Artificial Sequence
  Description of Artificial Sequence: Synthetic oligonucleotide
caggcuggcgaacccggug

SEQ ID NO: 1746218 - RNA, 19 nt, Artificial Sequence
  Description of Artificial Sequence: Synthetic oligonucleotide
cucaaucucuauagaauuu

SEQ ID NO: 1746219 - RNA, 19 nt, Artificial Sequence
  Description of Artificial Sequence: Synthetic oligonucleotide
auguaacuucacaguauaa

SEQ ID NO: 1746220 - RNA, 19 nt, Artificial Sequence
  Description of Artificial Sequence: Synthetic oligonucleotide
cacggcuuugccuggaagu

SEQ ID NO: 1746221 - RNA, 19 nt, Artificial Sequence
  Description of Artificial Sequence: Synthetic oligonucleotide
ggccuguacucccugauua

SEQ ID NO: 1746222 - RNA, 19 nt, Artificial Sequence
  Description of Artificial Sequence: Synthetic oligonucleotide
aagcuagaacuaacauuua

SEQ ID NO: 1746223 - RNA, 19 nt, Artificial Sequence
  Description of Artificial Sequence: Synthetic oligonucleotide
caccaagcaaacagacaaa

SEQ ID NO: 1746224 - RNA, 19 nt, Artificial Sequence
  Description of Artificial Sequence: Synthetic oligonucleotide
acgggaagagaagguuucu

SEQ ID NO: 1746225 - RNA, 19 nt, Artificial Sequence
  Description of Artificial Sequence: Synthetic oligonucleotide
agacaccucagcgccgaca

SEQ ID NO: 1746226 - RNA, 19 nt, Artificial Sequence
  Description of Artificial Sequence: Synthetic oligonucleotide
cagcgccgacaauggaacc

SEQ ID NO: 1746227 - RNA, 19 nt, Artificial Sequence
  Description of Artificial Sequence: Synthetic oligonucleotide
gguuuuagucaggcaagca

SEQ ID NO: 1746228 - RNA, 19 nt, Artificial Sequence
  Description of Artificial Sequence: Synthetic oligonucleotide
uucgguuuucccgguucau

SEQ ID NO: 1746229 - RNA, 19 nt, Artificial Sequence
  Description of Artificial Sequence: Synthetic oligonucleotide
cagcgaacccagcccaguc

SEQ ID NO: 1746230 - RNA, 19 nt, Artificial Sequence
  Description of Artificial Sequence: Synthetic oligonucleotide
accuagggcuuccggcuaa

SEQ ID NO: 1746231 - RNA, 19 nt, Artificial Sequence
  Description of Artificial Sequence: Synthetic oligonucleotide
guggcggcuccuugcacca

SEQ ID NO: 1746232 - RNA, 19 nt, Artificial Sequence
  Description of Artificial Sequence: Synthetic oligonucleotide
guuucgauacucugcucuu

SEQ ID NO: 1746233 - RNA, 19 nt, Artificial Sequence
  Description of Artificial Sequence: Synthetic oligonucleotide
gccgacaauggaaccuagg

SEQ ID NO: 1746234 - RNA, 19 nt, Artificial Sequence
  Description of Artificial Sequence: Synthetic oligonucleotide
ggugcgaguucuggggcag

SEQ ID NO: 1746235 - RNA, 19 nt, Artificial Sequence
  Description of Artificial Sequence: Synthetic oligonucleotide
ggacgaaaauaaucuuucu

SEQ ID NO: 1746236 - RNA, 19 nt, Artificial Sequence
  Description of Artificial Sequence: Synthetic oligonucleotide
agcucccggauucgguuuu

SEQ ID NO: 1746237 - RNA, 19 nt, Artificial Sequence
  Description of Artificial Sequence: Synthetic oligonucleotide
agcuaaccugcaugcccau

SEQ ID NO: 1746238 - RNA, 19 nt, Artificial Sequence
  Description of Artificial Sequence: Synthetic oligonucleotide
ccaggauauggaaauucaa

SEQ ID NO: 1746239 - RNA, 19 nt, Artificial Sequence
  Description of Artificial Sequence: Synthetic oligonucleotide
acgaaacggccugggagau

SEQ ID NO: 1746240 - RNA, 19 nt, Artificial Sequence
  Description of Artificial Sequence: Synthetic oligonucleotide
cagacgaaacggccuggga

SEQ ID NO: 1746241 - RNA, 19 nt, Artificial Sequence
  Description of Artificial Sequence: Synthetic oligonucleotide
gcaagaccuuaggcaaacg

SEQ ID NO: 1746242 - RNA, 19 nt, Artificial Sequence
  Description of Artificial Sequence: Synthetic oligonucleotide
ccacuaauuccauauguau

SEQ ID NO: 1746243 - RNA, 19 nt, Artificial Sequence
  Description of Artificial Sequence: Synthetic oligonucleotide
uuuuagcgauauggcuuuu

SEQ ID NO: 1746244 - RNA, 19 nt, Artificial Sequence
  Description of Artificial Sequence: Synthetic oligonucleotide
cauugaccucaggccagac

SEQ ID NO: 1746245 - RNA, 19 nt, Artificial Sequence
  Description of Artificial Sequence: Synthetic oligonucleotide
gcuuccggcuaaguuuacc

SEQ ID NO: 1746246 - RNA, 19 nt, Artificial Sequence
  Description of Artificial Sequence: Synthetic oligonucleotide
caaacgggaagagaagguu

SEQ ID NO: 1746247 - RNA, 19 nt, Artificial Sequence
  Description of Artificial Sequence: Synthetic oligonucleotide
cacgcacagcagcaauaca

SEQ ID NO: 1746248 - RNA, 19 nt, Artificial Sequence
  Description of Artificial Sequence: Synthetic oligonucleotide
cagcccagaacuccaggcu

SEQ ID NO: 1746249 - RNA, 19 nt, Artificial Sequence
  Description of Artificial Sequence: Synthetic oligonucleotide
cggcuaaguuuacccaggg

SEQ ID NO: 1746250 - RNA, 19 nt, Artificial Sequence
  Description of Artificial Sequence: Synthetic oligonucleotide
gcgaguucuggggcagagg

SEQ ID NO: 1746251 - RNA, 19 nt, Artificial Sequence
  Description of Artificial Sequence: Synthetic oligonucleotide
ggcuggcgaacccgguggc

SEQ ID NO: 1746252 - RNA, 19 nt, Artificial Sequence
  Description of Artificial Sequence: Synthetic oligonucleotide
gcgcucuggaagcgaaaac

SEQ ID NO: 1746253 - RNA, 19 nt, Artificial Sequence
  Description of Artificial Sequence: Synthetic oligonucleotide
ggaagcgaaaacacggcuu

SEQ ID NO: 1746254 - RNA, 19 nt, Artificial Sequence
  Description of Artificial Sequence: Synthetic oligonucleotide
gcgaguguggaagggagua

SEQ ID NO: 1746255 - RNA, 19 nt, Artificial Sequence
  Description of Artificial Sequence: Synthetic oligonucleotide
gccuguacucccugauuaa

SEQ ID NO: 1746256 - RNA, 19 nt, Artificial Sequence
  Description of Artificial Sequence: Synthetic oligonucleotide
gcaaacgggaagagaaggu

SEQ ID NO: 1746257 - RNA, 19 nt, Artificial Sequence
  Description of Artificial Sequence: Synthetic oligonucleotide
ggcgcucuggaagcgaaaa

SEQ ID NO: 1746258 - RNA, 19 nt, Artificial Sequence
  Description of Artificial Sequence: Synthetic oligonucleotide
gcuaaccugcaugcccaug

SEQ ID NO: 1746259 - RNA, 19 nt, Artificial Sequence
  Description of Artificial Sequence: Synthetic oligonucleotide
cgaaaauaaucuuucuguu

SEQ ID NO: 1746260 - RNA, 19 nt, Artificial Sequence
  Description of Artificial Sequence: Synthetic oligonucleotide
ccagauccauguaggagua

SEQ ID NO: 1746261 - RNA, 19 nt, Artificial Sequence
  Description of Artificial Sequence: Synthetic oligonucleotide
gggcuuccggcuaaguuua

SEQ ID NO: 1746262 - RNA, 19 nt, Artificial Sequence
  Description of Artificial Sequence: Synthetic oligonucleotide
cauugaacugggagaucuu

SEQ ID NO: 1746263 - RNA, 19 nt, Artificial Sequence
  Description of Artificial Sequence: Synthetic oligonucleotide
gagcucccggauucgguuu

SEQ ID NO: 1746264 - RNA, 19 nt, Artificial Sequence
  Description of Artificial Sequence: Synthetic oligonucleotide
gggguacaggcgcucugga

SEQ ID NO: 1746265 - RNA, 19 nt, Artificial Sequence
  Description of Artificial Sequence: Synthetic oligonucleotide
ccagucaggacuugacagu

SEQ ID NO: 1746266 - RNA, 19 nt, Artificial Sequence
  Description of Artificial Sequence: Synthetic oligonucleotide
cagacaccucagcgccgac

SEQ ID NO: 1746267 - RNA, 19 nt, Artificial Sequence
  Description of Artificial Sequence: Synthetic oligonucleotide
gcuccggcacaggugcgag

SEQ ID NO: 1746268 - RNA, 19 nt, Artificial Sequence
  Description of Artificial Sequence: Synthetic oligonucleotide
cgaaaacacggcuuugccu

SEQ ID NO: 1746269 - RNA, 19 nt, Artificial Sequence
  Description of Artificial Sequence: Synthetic oligonucleotide
gcauuugcuuaaacaagau

SEQ ID NO: 1746270 - RNA, 19 nt, Artificial Sequence
  Description of Artificial Sequence: Synthetic oligonucleotide
gggagaucuuacagaggaa

SEQ ID NO: 1746271 - RNA, 19 nt, Artificial Sequence
  Description of Artificial Sequence: Synthetic oligonucleotide
cccagaacuccaggcuggc

SEQ ID NO: 1746272 - RNA, 19 nt, Artificial Sequence
  Description of Artificial Sequence: Synthetic oligonucleotide
gucuguccgugagguggac

SEQ ID NO: 1746273 - RNA, 19 nt, Artificial Sequence
  Description of Artificial Sequence: Synthetic oligonucleotide
ccuguacucccugauuaaa

SEQ ID NO: 1746274 - RNA, 19 nt, Artificial Sequence
  Description of Artificial Sequence: Synthetic oligonucleotide
cgauagaaugcauuugcuu

SEQ ID NO: 1746275 - RNA, 19 nt, Artificial Sequence
  Description of Artificial Sequence: Synthetic oligonucleotide
cugcaccuacagguuuuga

SEQ ID NO: 1746276 - RNA, 19 nt, Artificial Sequence
  Description of Artificial Sequence: Synthetic oligonucleotide
ggcaggaaaccagauccau

SEQ ID NO: 1746277 - RNA, 19 nt, Artificial Sequence
  Description of Artificial Sequence: Synthetic oligonucleotide
caggccuguacucccugau

SEQ ID NO: 1746278 - RNA, 19 nt, Artificial Sequence
  Description of Artificial Sequence: Synthetic oligonucleotide
ccagacaccucagcgccga

SEQ ID NO: 1746279 - RNA, 19 nt, Artificial Sequence
  Description of Artificial Sequence: Synthetic oligonucleotide
gcccuuuagcuaaccugca

SEQ ID NO: 1746280 - RNA, 19 nt, Artificial Sequence
  Description of Artificial Sequence: Synthetic oligonucleotide
ccuagggcuuccggcuaag

SEQ ID NO: 1746281 - RNA, 19 nt, Artificial Sequence
  Description of Artificial Sequence: Synthetic oligonucleotide
cagugaggacaaucucaau

SEQ ID NO: 1746282 - RNA, 19 nt, Artificial Sequence
  Description of Artificial Sequence: Synthetic oligonucleotide
gcccauguuucgauacucu

SEQ ID NO: 1746283 - RNA, 19 nt, Artificial Sequence
  Description of Artificial Sequence: Synthetic oligonucleotide
cgccgacaauggaaccuag

SEQ ID NO: 1746284 - RNA, 19 nt, Artificial Sequence
  Description of Artificial Sequence: Synthetic oligonucleotide
gugcgaguucuggggcaga

SEQ ID NO: 1746285 - RNA, 19 nt, Artificial Sequence
  Description of Artificial Sequence: Synthetic oligonucleotide
gcgccgacaauggaaccua

SEQ ID NO: 1746286 - RNA, 19 nt, Artificial Sequence
  Description of Artificial Sequence: Synthetic oligonucleotide
uggcggcuccuugcaccau

SEQ ID NO: 1746287 - RNA, 19 nt, Artificial Sequence
  Description of Artificial Sequence: Synthetic oligonucleotide
cuagggcuuccggcuaagu

SEQ ID NO: 1746288 - RNA, 19 nt, Artificial Sequence
  Description of Artificial Sequence: Synthetic oligonucleotide
ggcgaguguggaagggagu

SEQ ID NO: 1746289 - RNA, 19 nt, Artificial Sequence
  Description of Artificial Sequence: Synthetic oligonucleotide
ggauucgguuuucccgguu

SEQ ID NO: 1746290 - RNA, 19 nt, Artificial Sequence
  Description of Artificial Sequence: Synthetic oligonucleotide
gaacccgguggcggcuccu

SEQ ID NO: 1746291 - RNA, 19 nt, Artificial Sequence
  Description of Artificial Sequence: Synthetic oligonucleotide
ccucagcgccgacaaugga

SEQ ID NO: 1746292 - RNA, 19 nt, Artificial Sequence
  Description of Artificial Sequence: Synthetic oligonucleotide
cgaacccgguggcggcucc

SEQ ID NO: 1746293 - RNA, 19 nt, Artificial Sequence
  Description of Artificial Sequence: Synthetic oligonucleotide
cuccggcacaggugcgagu

SEQ ID NO: 1746294 - RNA, 19 nt, Artificial Sequence
  Description of Artificial Sequence: Synthetic oligonucleotide
ccggcacaggugcgaguuc

SEQ ID NO: 1746295 - RNA, 19 nt, Artificial Sequence
  Description of Artificial Sequence: Synthetic oligonucleotide
gcagcgaacccagcccagu

SEQ ID NO: 1746296 - RNA, 19 nt, Artificial Sequence
  Description of Artificial Sequence: Synthetic oligonucleotide
gcucccggauucgguuuuc

SEQ ID NO: 1746297 - RNA, 19 nt, Artificial Sequence
  Description of Artificial Sequence: Synthetic oligonucleotide
ggcggcuccuugcaccauu

SEQ ID NO: 1746298 - RNA, 19 nt, Artificial Sequence
  Description of Artificial Sequence: Synthetic oligonucleotide
gcgaacccgguggcggcuc

SEQ ID NO: 1746299 - RNA, 19 nt, Artificial Sequence
  Description of Artificial Sequence: Synthetic oligonucleotide
ccuacagguuuugacccuu

SEQ ID NO: 1746300 - RNA, 19 nt, Artificial Sequence
  Description of Artificial Sequence: Synthetic oligonucleotide
ggcgaacccgguggcggcu

SEQ ID NO: 1746301 - RNA, 19 nt, Artificial Sequence
  Description of Artificial Sequence: Synthetic oligonucleotide
ggccugggagauggcgagu

SEQ ID NO: 1746302 - RNA, 19 nt, Artificial Sequence
  Description of Artificial Sequence: Synthetic oligonucleotide
cggauucgguuuucccggu

SEQ ID NO: 1746303 - RNA, 19 nt, Artificial Sequence
  Description of Artificial Sequence: Synthetic oligonucleotide
cggcuccuugcaccauuga

SEQ ID NO: 1746304 - RNA, 19 nt, Artificial Sequence
  Description of Artificial Sequence: Synthetic oligonucleotide
cggcuuugccuggaaguuu

SEQ ID NO: 1746305 - RNA, 19 nt, Artificial Sequence
  Description of Artificial Sequence: Synthetic oligonucleotide
agauaaauuaaucaguugg

SEQ ID NO: 1746306 - RNA, 19 nt, Artificial Sequence
  Description of Artificial Sequence: Synthetic oligonucleotide
aauaaucuaccaucuaucc

SEQ ID NO: 1746307 - RNA, 19 nt, Artificial Sequence
  Description of Artificial Sequence: Synthetic oligonucleotide
uuaggauuuaagaauacag

SEQ ID NO: 1746308 - RNA, 19 nt, Artificial Sequence
  Description of Artificial Sequence: Synthetic oligonucleotide
aaucuuaacaagguaacac

SEQ ID NO: 1746309 - RNA, 19 nt, Artificial Sequence
  Description of Artificial Sequence: Synthetic oligonucleotide
cuugcugcaacaaacaccc

SEQ ID NO: 1746310 - RNA, 19 nt, Artificial Sequence
  Description of Artificial Sequence: Synthetic oligonucleotide
ucgacaucgaauauugacg

SEQ ID NO: 1746311 - RNA, 19 nt, Artificial Sequence
  Description of Artificial Sequence: Synthetic oligonucleotide
aacacugauaaccauacau

SEQ ID NO: 1746312 - RNA, 19 nt, Artificial Sequence
  Description of Artificial Sequence: Synthetic oligonucleotide
aucaauugaacacugauaa

SEQ ID NO: 1746313 - RNA, 19 nt, Artificial Sequence
  Description of Artificial Sequence: Synthetic oligonucleotide
ucuguaaaguugaauauga

SEQ ID NO: 1746314 - RNA, 19 nt, Artificial Sequence
  Description of Artificial Sequence: Synthetic oligonucleotide
auuccgacaucauauacac

SEQ ID NO: 1746315 - RNA, 19 nt, Artificial Sequence
  Description of Artificial Sequence: Synthetic oligonucleotide
uaagcuaagccuuugaauc

SEQ ID NO: 1746316 - RNA, 19 nt, Artificial Sequence
  Description of Artificial Sequence: Synthetic oligonucleotide
aagccuuugaaucauauua

SEQ ID NO: 1746317 - RNA, 19 nt, Artificial Sequence
  Description of Artificial Sequence: Synthetic oligonucleotide
aacaagguaacacuguuaa

SEQ ID NO: 1746318 - RNA, 19 nt, Artificial Sequence
  Description of Artificial Sequence: Synthetic oligonucleotide
ugauacuaaauaaucuacc

SEQ ID NO: 1746319 - RNA, 19 nt, Artificial Sequence
  Description of Artificial Sequence: Synthetic oligonucleotide
caauugaacacugauaacc

SEQ ID NO: 1746320 - RNA, 19 nt, Artificial Sequence
  Description of Artificial Sequence: Synthetic oligonucleotide
uaggauuuaagaauacagc

SEQ ID NO: 1746321 - RNA, 19 nt, Artificial Sequence
  Description of Artificial Sequence: Synthetic oligonucleotide
auaaccauacauuaauaug

SEQ ID NO: 1746322 - RNA, 19 nt, Artificial Sequence
  Description of Artificial Sequence: Synthetic oligonucleotide
uaccaucuauccuagaagg

SEQ ID NO: 1746323 - RNA, 19 nt, Artificial Sequence
  Description of Artificial Sequence: Synthetic oligonucleotide
ugccauauugcacagauaa

SEQ ID NO: 1746324 - RNA, 19 nt, Artificial Sequence
  Description of Artificial Sequence: Synthetic oligonucleotide
aggauuuaagaauacagcu

SEQ ID NO: 1746325 - RNA, 19 nt, Artificial Sequence
  Description of Artificial Sequence: Synthetic oligonucleotide
gaaucauauuaucaaauac

SEQ ID NO: 1746326 - RNA, 19 nt, Artificial Sequence
  Description of Artificial Sequence: Synthetic oligonucleotide
uaucuuauuuccuuuggcc

SEQ ID NO: 1746327 - RNA, 19 nt, Artificial Sequence
  Description of Artificial Sequence: Synthetic oligonucleotide
uaagaauacagcuuuaauu

SEQ ID NO: 1746328 - RNA, 19 nt, Artificial Sequence
  Description of Artificial Sequence: Synthetic oligonucleotide
aaaggugcgggaucagagc

SEQ ID NO: 1746329 - RNA, 19 nt, Artificial Sequence
  Description of Artificial Sequence: Synthetic oligonucleotide
cauacauuaauaugcuugc

SEQ ID NO: 1746330 - RNA, 19 nt, Artificial Sequence
  Description of Artificial Sequence: Synthetic oligonucleotide
aaacugaaucacuucacug

SEQ ID NO: 1746331 - RNA, 19 nt, Artificial Sequence
  Description of Artificial Sequence: Synthetic oligonucleotide
ugagaaacuaucuuauuuc

SEQ ID NO: 1746332 - RNA, 19 nt, Artificial Sequence
  Description of Artificial Sequence: Synthetic oligonucleotide
acuguuaggauuuaagaau

SEQ ID NO: 1746333 - RNA, 19 nt, Artificial Sequence
  Description of Artificial Sequence: Synthetic oligonucleotide
uucacuguuaggauuuaag

SEQ ID NO: 1746334 - RNA, 19 nt, Artificial Sequence
  Description of Artificial Sequence: Synthetic oligonucleotide
acauuaauaugcuugcugu

SEQ ID NO: 1746335 - RNA, 19 nt, Artificial Sequence
  Description of Artificial Sequence: Synthetic oligonucleotide
uguuaacuguaauaaagac

SEQ ID NO: 1746336 - RNA, 19 nt, Artificial Sequence
  Description of Artificial Sequence: Synthetic oligonucleotide
aaucuguaaaguugaauau

SEQ ID NO: 1746337 - RNA, 19 nt, Artificial Sequence
  Description of Artificial Sequence: Synthetic oligonucleotide
gagaaacuaucuuauuucc

SEQ ID NO: 1746338 - RNA, 19 nt, Artificial Sequence
  Description of Artificial Sequence: Synthetic oligonucleotide
uguaaaguugaauaugaua

SEQ ID NO: 1746339 - RNA, 19 nt, Artificial Sequence
  Description of Artificial Sequence: Synthetic oligonucleotide
aaacuuuuaacaguucaca

SEQ ID NO: 1746340 - RNA, 19 nt, Artificial Sequence
  Description of Artificial Sequence: Synthetic oligonucleotide
ucaaaacuggaagacacag

SEQ ID NO: 1746341 - RNA, 19 nt, Artificial Sequence
  Description of Artificial Sequence: Synthetic oligonucleotide
agagcggggacgcugaugg

SEQ ID NO: 1746342 - RNA, 19 nt, Artificial Sequence
  Description of Artificial Sequence: Synthetic oligonucleotide
augauacuaaauaaucuac

SEQ ID NO: 1746343 - RNA, 19 nt, Artificial Sequence
  Description of Artificial Sequence: Synthetic oligonucleotide
ucgaauauugacgauguca

SEQ ID NO: 1746344 - RNA, 19 nt, Artificial Sequence
  Description of Artificial Sequence: Synthetic oligonucleotide
guuaacuguaauaaagacc

SEQ ID NO: 1746345 - RNA, 19 nt, Artificial Sequence
  Description of Artificial Sequence: Synthetic oligonucleotide
uaaaggugcgggaucagag

SEQ ID NO: 1746346 - RNA, 19 nt, Artificial Sequence
  Description of Artificial Sequence: Synthetic oligonucleotide
uugaaucauauuaucaaau

SEQ ID NO: 1746347 - RNA, 19 nt, Artificial Sequence
  Description of Artificial Sequence: Synthetic oligonucleotide
ucacauuccgacaucauau

SEQ ID NO: 1746348 - RNA, 19 nt, Artificial Sequence
  Description of Artificial Sequence: Synthetic oligonucleotide
aucucuuaacauucggaac

SEQ ID NO: 1746349 - RNA, 19 nt, Artificial Sequence
  Description of Artificial Sequence: Synthetic oligonucleotide
uugagaaacuaucuuauuu

SEQ ID NO: 1746350 - RNA, 19 nt, Artificial Sequence
  Description of Artificial Sequence: Synthetic oligonucleotide
uaacauucggaacaagagu

SEQ ID NO: 1746351 - RNA, 19 nt, Artificial Sequence
  Description of Artificial Sequence: Synthetic oligonucleotide
ucuaccaucuauccuagaa

SEQ ID NO: 1746352 - RNA, 19 nt, Artificial Sequence
  Description of Artificial Sequence: Synthetic oligonucleotide
ucuugagaaacuaucuuau

SEQ ID NO: 1746353 - RNA, 19 nt, Artificial Sequence
  Description of Artificial Sequence: Synthetic oligonucleotide
ggaacaagagucuuacugg

SEQ ID NO: 1746354 - RNA, 19 nt, Artificial Sequence
  Description of Artificial Sequence: Synthetic oligonucleotide
ucacuguuaggauuuaaga

SEQ ID NO: 1746355 - RNA, 19 nt, Artificial Sequence
  Description of Artificial Sequence: Synthetic oligonucleotide
aagagucuuacuggagucc

SEQ ID NO: 1746356 - RNA, 19 nt, Artificial Sequence
  Description of Artificial Sequence: Synthetic oligonucleotide
uacaacuucaaaacuugcu

SEQ ID NO: 1746357 - RNA, 19 nt, Artificial Sequence
  Description of Artificial Sequence: Synthetic oligonucleotide
uuuaauugaugugcuauca

SEQ ID NO: 1746358 - RNA, 19 nt, Artificial Sequence
  Description of Artificial Sequence: Synthetic oligonucleotide
gaugucaagucguuugcag

SEQ ID NO: 1746359 - RNA, 19 nt, Artificial Sequence
  Description of Artificial Sequence: Synthetic oligonucleotide
uuaacaguucacauuccga

SEQ ID NO: 1746360 - RNA, 19 nt, Artificial Sequence
  Description of Artificial Sequence: Synthetic oligonucleotide
auaaaucuuaacaagguaa

SEQ ID NO: 1746361 - RNA, 19 nt, Artificial Sequence
  Description of Artificial Sequence: Synthetic oligonucleotide
uggccuacaaucuguaaag

SEQ ID NO: 1746362 - RNA, 19 nt, Artificial Sequence
  Description of Artificial Sequence: Synthetic oligonucleotide
aucuuaacaagguaacacu

SEQ ID NO: 1746363 - RNA, 19 nt, Artificial Sequence
  Description of Artificial Sequence: Synthetic oligonucleotide
uuuggcgugaauccgcggc

SEQ ID NO: 1746364 - RNA, 19 nt, Artificial Sequence
  Description of Artificial Sequence: Synthetic oligonucleotide
aauugaacacugauaacca

SEQ ID NO: 1746365 - RNA, 19 nt, Artificial Sequence
  Description of Artificial Sequence: Synthetic oligonucleotide
aacgccucgagcuugucga

SEQ ID NO: 1746366 - RNA, 19 nt, Artificial Sequence
  Description of Artificial Sequence: Synthetic oligonucleotide
uaaaguugaauaugauacu

SEQ ID NO: 1746367 - RNA, 19 nt, Artificial Sequence
  Description of Artificial Sequence: Synthetic oligonucleotide
ugaugugcuaucaauugaa

SEQ ID NO: 1746368 - RNA, 19 nt, Artificial Sequence
  Description of Artificial Sequence: Synthetic oligonucleotide
cucgacaucgaauauugac

SEQ ID NO: 1746369 - RNA, 19 nt, Artificial Sequence
  Description of Artificial Sequence: Synthetic oligonucleotide
uuuagcaggaucucuuaac

SEQ ID NO: 1746370 - RNA, 19 nt, Artificial Sequence
  Description of Artificial Sequence: Synthetic oligonucleotide
aacuuucggaucaaaacug

SEQ ID NO: 1746371 - RNA, 19 nt, Artificial Sequence
  Description of Artificial Sequence: Synthetic oligonucleotide
uuaagaauacagcuuuaau

SEQ ID NO: 1746372 - RNA, 19 nt, Artificial Sequence
  Description of Artificial Sequence: Synthetic oligonucleotide
gaaggugcggaccugaaga

SEQ ID NO: 1746373 - RNA, 19 nt, Artificial Sequence
  Description of Artificial Sequence: Synthetic oligonucleotide
aauaaacuuuuaacaguuc

SEQ ID NO: 1746374 - RNA, 19 nt, Artificial Sequence
  Description of Artificial Sequence: Synthetic oligonucleotide
guagaugcgucucaucucc

SEQ ID NO: 1746375 - RNA, 19 nt, Artificial Sequence
  Description of Artificial Sequence: Synthetic oligonucleotide
uaucaauugaacacugaua

SEQ ID NO: 1746376 - RNA, 19 nt, Artificial Sequence
  Description of Artificial Sequence: Synthetic oligonucleotide
aaaguugaauaugauacua

SEQ ID NO: 1746377 - RNA, 19 nt, Artificial Sequence
  Description of Artificial Sequence: Synthetic oligonucleotide
acgaugucaagucguuugc

SEQ ID NO: 1746378 - RNA, 19 nt, Artificial Sequence
  Description of Artificial Sequence: Synthetic oligonucleotide
uaauugaugugcuaucaau

SEQ ID NO: 1746379 - RNA, 19 nt, Artificial Sequence
  Description of Artificial Sequence: Synthetic oligonucleotide
uauccuagaaggcuacaga

SEQ ID NO: 1746380 - RNA, 19 nt, Artificial Sequence
  Description of Artificial Sequence: Synthetic oligonucleotide
uuggccuacaaucuguaaa

SEQ ID NO: 1746381 - RNA, 19 nt, Artificial Sequence
  Description of Artificial Sequence: Synthetic oligonucleotide
acaagagucuuacuggagu

SEQ ID NO: 1746382 - RNA, 19 nt, Artificial Sequence
  Description of Artificial Sequence: Synthetic oligonucleotide
uuaacaagguaacacuguu

SEQ ID NO: 1746383 - RNA, 19 nt, Artificial Sequence
  Description of Artificial Sequence: Synthetic oligonucleotide
auaaauuaaucaguuggcu

SEQ ID NO: 1746384 - RNA, 19 nt, Artificial Sequence
  Description of Artificial Sequence: Synthetic oligonucleotide
aagcuaagccuuugaauca

SEQ ID NO: 1746385 - RNA, 19 nt, Artificial Sequence
  Description of Artificial Sequence: Synthetic oligonucleotide
uuggcucugcgauacgugg

SEQ ID NO: 1746386 - RNA, 19 nt, Artificial Sequence
  Description of Artificial Sequence: Synthetic oligonucleotide
auauaaaucuuaacaaggu

SEQ ID NO: 1746387 - RNA, 19 nt, Artificial Sequence
  Description of Artificial Sequence: Synthetic oligonucleotide
ucgauccugccguagaugc

SEQ ID NO: 1746388 - RNA, 19 nt, Artificial Sequence
  Description of Artificial Sequence: Synthetic oligonucleotide
aaggugcgggaucagagcu

SEQ ID NO: 1746389 - RNA, 19 nt, Artificial Sequence
  Description of Artificial Sequence: Synthetic oligonucleotide
auaugauacuaaauaaucu

SEQ ID NO: 1746390 - RNA, 19 nt, Artificial Sequence
  Description of Artificial Sequence: Synthetic oligonucleotide
acuaaauaaucuaccaucu

SEQ ID NO: 1746391 - RNA, 19 nt, Artificial Sequence
  Description of Artificial Sequence: Synthetic oligonucleotide
auaaucuaccaucuauccu

SEQ ID NO: 1746392 - RNA, 19 nt, Artificial Sequence
  Description of Artificial Sequence: Synthetic oligonucleotide
uuaauugaugugcuaucaa

SEQ ID NO: 1746393 - RNA, 19 nt, Artificial Sequence
  Description of Artificial Sequence: Synthetic oligonucleotide
cucucgacaucgaauauug

SEQ ID NO: 1746394 - RNA, 19 nt, Artificial Sequence
  Description of Artificial Sequence: Synthetic oligonucleotide
uuuaagaauacagcuuuaa

SEQ ID NO: 1746395 - RNA, 19 nt, Artificial Sequence
  Description of Artificial Sequence: Synthetic oligonucleotide
cuaccaucuauccuagaag

SEQ ID NO: 1746396 - RNA, 19 nt, Artificial Sequence
  Description of Artificial Sequence: Synthetic oligonucleotide
gaugcgucucaucuccgcg

SEQ ID NO: 1746397 - RNA, 19 nt, Artificial Sequence
  Description of Artificial Sequence: Synthetic oligonucleotide
acuuuuaacaguucacauu

SEQ ID NO: 1746398 - RNA, 19 nt, Artificial Sequence
  Description of Artificial Sequence: Synthetic oligonucleotide
gucuccgcgaaucaugucc

SEQ ID NO: 1746399 - RNA, 19 nt, Artificial Sequence
  Description of Artificial Sequence: Synthetic oligonucleotide
acaucgaauauugacgaug

SEQ ID NO: 1746400 - RNA, 19 nt, Artificial Sequence
  Description of Artificial Sequence: Synthetic oligonucleotide
ugucaagucguuugcagaa

SEQ ID NO: 1746401 - RNA, 19 nt, Artificial Sequence
  Description of Artificial Sequence: Synthetic oligonucleotide
cuacagaaaacugaaucac

SEQ ID NO: 1746402 - RNA, 19 nt, Artificial Sequence
  Description of Artificial Sequence: Synthetic oligonucleotide
uccggaacaggaccggcgg

SEQ ID NO: 1746403 - RNA, 19 nt, Artificial Sequence
  Description of Artificial Sequence: Synthetic oligonucleotide
agaugcgucucaucuccgc

SEQ ID NO: 1746404 - RNA, 19 nt, Artificial Sequence
  Description of Artificial Sequence: Synthetic oligonucleotide
ugucaucgcagccagggaa

SEQ ID NO: 1746405 - RNA, 19 nt, Artificial Sequence
  Description of Artificial Sequence: Synthetic oligonucleotide
ugauaagcuaagccuuuga

SEQ ID NO: 1746406 - RNA, 19 nt, Artificial Sequence
  Description of Artificial Sequence: Synthetic oligonucleotide
cuguuaacuguaauaaaga

SEQ ID NO: 1746407 - RNA, 19 nt, Artificial Sequence
  Description of Artificial Sequence: Synthetic oligonucleotide
ucuuacuggaguccuccug

SEQ ID NO: 1746408 - RNA, 19 nt, Artificial Sequence
  Description of Artificial Sequence: Synthetic oligonucleotide
acaagguaacacuguuaac

SEQ ID NO: 1746409 - RNA, 19 nt, Artificial Sequence
  Description of Artificial Sequence: Synthetic oligonucleotide
uuuggcugucuugagaaac

SEQ ID NO: 1746410 - RNA, 19 nt, Artificial Sequence
  Description of Artificial Sequence: Synthetic oligonucleotide
gauacguggccgcuguccc

SEQ ID NO: 1746411 - RNA, 19 nt, Artificial Sequence
  Description of Artificial Sequence: Synthetic oligonucleotide
gaaaacugaaucacuucac

SEQ ID NO: 1746412 - RNA, 19 nt, Artificial Sequence
  Description of Artificial Sequence: Synthetic oligonucleotide
cagauaaauuaaucaguug

SEQ ID NO: 1746413 - RNA, 19 nt, Artificial Sequence
  Description of Artificial Sequence: Synthetic oligonucleotide
uccuccugcgguaaaggug

SEQ ID NO: 1746414 - RNA, 19 nt, Artificial Sequence
  Description of Artificial Sequence: Synthetic oligonucleotide
ucgcucaccacgugggacg

SEQ ID NO: 1746415 - RNA, 19 nt, Artificial Sequence
  Description of Artificial Sequence: Synthetic oligonucleotide
uacacucucgacaucgaau

SEQ ID NO: 1746416 - RNA, 19 nt, Artificial Sequence
  Description of Artificial Sequence: Synthetic oligonucleotide
ugucuugagaaacuaucuu

SEQ ID NO: 1746417 - RNA, 19 nt, Artificial Sequence
  Description of Artificial Sequence: Synthetic oligonucleotide
ucaagucguuugcagaaaa

SEQ ID NO: 1746418 - RNA, 19 nt, Artificial Sequence
  Description of Artificial Sequence: Synthetic oligonucleotide
uucggaacaagagucuuac

SEQ ID NO: 1746419 - RNA, 19 nt, Artificial Sequence
  Description of Artificial Sequence: Synthetic oligonucleotide
ucgguccggaacaggaccg

SEQ ID NO: 1746420 - RNA, 19 nt, Artificial Sequence
  Description of Artificial Sequence: Synthetic oligonucleotide
ucggccucggccuugguga

SEQ ID NO: 1746421 - RNA, 19 nt, Artificial Sequence
  Description of Artificial Sequence: Synthetic oligonucleotide
ugcggaccugaagagagcg

SEQ ID NO: 1746422 - RNA, 19 nt, Artificial Sequence
  Description of Artificial Sequence: Synthetic oligonucleotide
acagauaaauuaaucaguu

SEQ ID NO: 1746423 - RNA, 19 nt, Artificial Sequence
  Description of Artificial Sequence: Synthetic oligonucleotide
aagucguuugcagaaaaua

SEQ ID NO: 1746424 - RNA, 19 nt, Artificial Sequence
  Description of Artificial Sequence: Synthetic oligonucleotide
uuacuggaguccuccugcg

SEQ ID NO: 1746425 - RNA, 19 nt, Artificial Sequence
  Description of Artificial Sequence: Synthetic oligonucleotide
ucgagcuugucgauccugc

SEQ ID NO: 1746426 - RNA, 19 nt, Artificial Sequence
  Description of Artificial Sequence: Synthetic oligonucleotide
gaggcguaacccaaggcag

SEQ ID NO: 1746427 - RNA, 19 nt, Artificial Sequence
  Description of Artificial Sequence: Synthetic oligonucleotide
agcuugucgauccugccgu

SEQ ID NO: 1746428 - RNA, 19 nt, Artificial Sequence
  Description of Artificial Sequence: Synthetic oligonucleotide
aucgcagccagggaagugg

SEQ ID NO: 1746429 - RNA, 19 nt, Artificial Sequence
  Description of Artificial Sequence: Synthetic oligonucleotide
cauuccgacaucauauaca

SEQ ID NO: 1746430 - RNA, 19 nt, Artificial Sequence
  Description of Artificial Sequence: Synthetic oligonucleotide
cacuguuaggauuuaagaa

SEQ ID NO: 1746431 - RNA, 19 nt, Artificial Sequence
  Description of Artificial Sequence: Synthetic oligonucleotide
uccuagaaggcuacagaaa

SEQ ID NO: 1746432 - RNA, 19 nt, Artificial Sequence
  Description of Artificial Sequence: Synthetic oligonucleotide
acacucucgacaucgaaua

SEQ ID NO: 1746433 - RNA, 19 nt, Artificial Sequence
  Description of Artificial Sequence: Synthetic oligonucleotide
gaacgccucgagcuugucg

SEQ ID NO: 1746434 - RNA, 19 nt, Artificial Sequence
  Description of Artificial Sequence: Synthetic oligonucleotide
accaucuauccuagaaggc

SEQ ID NO: 1746435 - RNA, 19 nt, Artificial Sequence
  Description of Artificial Sequence: Synthetic oligonucleotide
caagagucuuacuggaguc

SEQ ID NO: 1746436 - RNA, 19 nt, Artificial Sequence
  Description of Artificial Sequence: Synthetic oligonucleotide
aucuccgcggcuuuggcgu

SEQ ID NO: 1746437 - RNA, 19 nt, Artificial Sequence
  Description of Artificial Sequence: Synthetic oligonucleotide
uccucgguccggaacagga

SEQ ID NO: 1746438 - RNA, 19 nt, Artificial Sequence
  Description of Artificial Sequence: Synthetic oligonucleotide
ugugauaagcuaagccuuu

SEQ ID NO: 1746439 - RNA, 19 nt, Artificial Sequence
  Description of Artificial Sequence: Synthetic oligonucleotide
ugguccucgguccggaaca

SEQ ID NO: 1746440 - RNA, 19 nt, Artificial Sequence
  Description of Artificial Sequence: Synthetic oligonucleotide
cuccacguagcacccagcg

SEQ ID NO: 1746441 - RNA, 19 nt, Artificial Sequence
  Description of Artificial Sequence: Synthetic oligonucleotide
gucuugagaaacuaucuua

SEQ ID NO: 1746442 - RNA, 19 nt, Artificial Sequence
  Description of Artificial Sequence: Synthetic oligonucleotide
acaucauauacaccaguuu

SEQ ID NO: 1746443 - RNA, 19 nt, Artificial Sequence
  Description of Artificial Sequence: Synthetic oligonucleotide
ccgaucauccucacgaacg

SEQ ID NO: 1746444 - RNA, 19 nt, Artificial Sequence
  Description of Artificial Sequence: Synthetic oligonucleotide
guaggcggaacgcuggggc

SEQ ID NO: 1746445 - RNA, 19 nt, Artificial Sequence
  Description of Artificial Sequence: Synthetic oligonucleotide
cuauccuagaaggcuacag

SEQ ID NO: 1746446 - RNA, 19 nt, Artificial Sequence
  Description of Artificial Sequence: Synthetic oligonucleotide
augcgucucaucuccgcgg

SEQ ID NO: 1746447 - RNA, 19 nt, Artificial Sequence
  Description of Artificial Sequence: Synthetic oligonucleotide
auugaacacugauaaccau

SEQ ID NO: 1746448 - RNA, 19 nt, Artificial Sequence
  Description of Artificial Sequence: Synthetic oligonucleotide
caggaucucuuaacauucg

SEQ ID NO: 1746449 - RNA, 19 nt, Artificial Sequence
  Description of Artificial Sequence: Synthetic oligonucleotide
cucguaggcggaacgcugg

SEQ ID NO: 1746450 - RNA, 19 nt, Artificial Sequence
  Description of Artificial Sequence: Synthetic oligonucleotide
guuaggauuuaagaauaca

SEQ ID NO: 1746451 - RNA, 19 nt, Artificial Sequence
  Description of Artificial Sequence: Synthetic oligonucleotide
agggaucuacacucucgac

SEQ ID NO: 1746452 - RNA, 19 nt, Artificial Sequence
  Description of Artificial Sequence: Synthetic oligonucleotide
agucguuugcagaaaauaa

SEQ ID NO: 1746453 - RNA, 19 nt, Artificial Sequence
  Description of Artificial Sequence: Synthetic oligonucleotide
caacuuucggaucaaaacu

SEQ ID NO: 1746454 - RNA, 19 nt, Artificial Sequence
  Description of Artificial Sequence: Synthetic oligonucleotide
aucgaauauugacgauguc

SEQ ID NO: 1746455 - RNA, 19 nt, Artificial Sequence
  Description of Artificial Sequence: Synthetic oligonucleotide
cagccgaucauccucacga

SEQ ID NO: 1746456 - RNA, 19 nt, Artificial Sequence
  Description of Artificial Sequence: Synthetic oligonucleotide
aacccaaggcagcgcggcg

SEQ ID NO: 1746457 - RNA, 19 nt, Artificial Sequence
  Description of Artificial Sequence: Synthetic oligonucleotide
agaaacuaucuuauuuccu

SEQ ID NO: 1746458 - RNA, 19 nt, Artificial Sequence
  Description of Artificial Sequence: Synthetic oligonucleotide
ugcgucucaucuccgcggc

SEQ ID NO: 1746459 - RNA, 19 nt, Artificial Sequence
  Description of Artificial Sequence: Synthetic oligonucleotide
ccuccugcgguaaaggugc

SEQ ID NO: 1746460 - RNA, 19 nt, Artificial Sequence
  Description of Artificial Sequence: Synthetic oligonucleotide
ucuacacucucgacaucga

SEQ ID NO: 1746461 - RNA, 19 nt, Artificial Sequence
  Description of Artificial Sequence: Synthetic oligonucleotide
auacguggccgcugucccc

SEQ ID NO: 1746462 - RNA, 19 nt, Artificial Sequence
  Description of Artificial Sequence: Synthetic oligonucleotide
aucuauccuagaaggcuac

SEQ ID NO: 1746463 - RNA, 19 nt, Artificial Sequence
  Description of Artificial Sequence: Synthetic oligonucleotide
ugcgauacguggccgcugu

SEQ ID NO: 1746464 - RNA, 19 nt, Artificial Sequence
  Description of Artificial Sequence: Synthetic oligonucleotide
aggaccggcggcucguagg

SEQ ID NO: 1746465 - RNA, 19 nt, Artificial Sequence
  Description of Artificial Sequence: Synthetic oligonucleotide
uacguggccgcuguccccg

SEQ ID NO: 1746466 - RNA, 19 nt, Artificial Sequence
  Description of Artificial Sequence: Synthetic oligonucleotide
ggaggcguaacccaaggca

SEQ ID NO: 1746467 - RNA, 19 nt, Artificial Sequence
  Description of Artificial Sequence: Synthetic oligonucleotide
ccacguagcacccagcggc

SEQ ID NO: 1746468 - RNA, 19 nt, Artificial Sequence
  Description of Artificial Sequence: Synthetic oligonucleotide
ucuuaacauucggaacaag

SEQ ID NO: 1746469 - RNA, 19 nt, Artificial Sequence
  Description of Artificial Sequence: Synthetic oligonucleotide
uggaggcguaacccaaggc

SEQ ID NO: 1746470 - RNA, 19 nt, Artificial Sequence
  Description of Artificial Sequence: Synthetic oligonucleotide
cagucgaggccucucgggg

SEQ ID NO: 1746471 - RNA, 19 nt, Artificial Sequence
  Description of Artificial Sequence: Synthetic oligonucleotide
acuuuugaucauauaaaua

SEQ ID NO: 1746472 - RNA, 19 nt, Artificial Sequence
  Description of Artificial Sequence: Synthetic oligonucleotide
ugacgcgcugcuuuggcuc

SEQ ID NO: 1746473 - RNA, 19 nt, Artificial Sequence
  Description of Artificial Sequence: Synthetic oligonucleotide
ucguaggcggaacgcuggg

SEQ ID NO: 1746474 - RNA, 19 nt, Artificial Sequence
  Description of Artificial Sequence: Synthetic oligonucleotide
cucacgaacgccucgagcu

SEQ ID NO: 1746475 - RNA, 19 nt, Artificial Sequence
  Description of Artificial Sequence: Synthetic oligonucleotide
agaaggcuacagaaaacug

SEQ ID NO: 1746476 - RNA, 19 nt, Artificial Sequence
  Description of Artificial Sequence: Synthetic oligonucleotide
uggucacuuuugaucauau

SEQ ID NO: 1746477 - RNA, 19 nt, Artificial Sequence
  Description of Artificial Sequence: Synthetic oligonucleotide
cugauaaccauacauuaau

SEQ ID NO: 1746478 - RNA, 19 nt, Artificial Sequence
  Description of Artificial Sequence: Synthetic oligonucleotide
uaacccaaggcagcgcggc

SEQ ID NO: 1746479 - RNA, 19 nt, Artificial Sequence
  Description of Artificial Sequence: Synthetic oligonucleotide
cuuaacaagguaacacugu

SEQ ID NO: 1746480 - RNA, 19 nt, Artificial Sequence
  Description of Artificial Sequence: Synthetic oligonucleotide
accaguuuagcaggaucuc

SEQ ID NO: 1746481 - RNA, 19 nt, Artificial Sequence
  Description of Artificial Sequence: Synthetic oligonucleotide
caucuccgcggcuuuggcg

SEQ ID NO: 1746482 - RNA, 19 nt, Artificial Sequence
  Description of Artificial Sequence: Synthetic oligonucleotide
cuggaggcguaacccaagg

SEQ ID NO: 1746483 - RNA, 19 nt, Artificial Sequence
  Description of Artificial Sequence: Synthetic oligonucleotide
ugcccacgaacucauccac

SEQ ID NO: 1746484 - RNA, 19 nt, Artificial Sequence
  Description of Artificial Sequence: Synthetic oligonucleotide
acacugauaaccauacauu

SEQ ID NO: 1746485 - RNA, 19 nt, Artificial Sequence
  Description of Artificial Sequence: Synthetic oligonucleotide
uggcucugcgauacguggc

SEQ ID NO: 1746486 - RNA, 19 nt, Artificial Sequence
  Description of Artificial Sequence: Synthetic oligonucleotide
gaacgcuggggcccggaag

SEQ ID NO: 1746487 - RNA, 19 nt, Artificial Sequence
  Description of Artificial Sequence: Synthetic oligonucleotide
ggugcggaccugaagagag

SEQ ID NO: 1746488 - RNA, 19 nt, Artificial Sequence
  Description of Artificial Sequence: Synthetic oligonucleotide
gaaggcucgagggaagguc

SEQ ID NO: 1746489 - RNA, 19 nt, Artificial Sequence
  Description of Artificial Sequence: Synthetic oligonucleotide
cuaucaauugaacacugau

SEQ ID NO: 1746490 - RNA, 19 nt, Artificial Sequence
  Description of Artificial Sequence: Synthetic oligonucleotide
gacgcugauggugugcaac

SEQ ID NO: 1746491 - RNA, 19 nt, Artificial Sequence
  Description of Artificial Sequence: Synthetic oligonucleotide
ugucgauccugccguagau

SEQ ID NO: 1746492 - RNA, 19 nt, Artificial Sequence
  Description of Artificial Sequence: Synthetic oligonucleotide
ugcgggaucagagcugcug

SEQ ID NO: 1746493 - RNA, 19 nt, Artificial Sequence
  Description of Artificial Sequence: Synthetic oligonucleotide
ucaucuccgcggcuuuggc

SEQ ID NO: 1746494 - RNA, 19 nt, Artificial Sequence
  Description of Artificial Sequence: Synthetic oligonucleotide
uuccgacaucauauacacc

SEQ ID NO: 1746495 - RNA, 19 nt, Artificial Sequence
  Description of Artificial Sequence: Synthetic oligonucleotide
ucucgacaucgaauauuga

SEQ ID NO: 1746496 - RNA, 19 nt, Artificial Sequence
  Description of Artificial Sequence: Synthetic oligonucleotide
aggcguaacccaaggcagc

SEQ ID NO: 1746497 - RNA, 19 nt, Artificial Sequence
  Description of Artificial Sequence: Synthetic oligonucleotide
acgugggacgagucuccgc

SEQ ID NO: 1746498 - RNA, 19 nt, Artificial Sequence
  Description of Artificial Sequence: Synthetic oligonucleotide
ugaauccgcggcacgcccu

SEQ ID NO: 1746499 - RNA, 19 nt, Artificial Sequence
  Description of Artificial Sequence: Synthetic oligonucleotide
cacuuuugaucauauaaau

SEQ ID NO: 1746500 - RNA, 19 nt, Artificial Sequence
  Description of Artificial Sequence: Synthetic oligonucleotide
gcggcuuuggcgugaaucc

SEQ ID NO: 1746501 - RNA, 19 nt, Artificial Sequence
  Description of Artificial Sequence: Synthetic oligonucleotide
gaagugguccucgguccgg

SEQ ID NO: 1746502 - RNA, 19 nt, Artificial Sequence
  Description of Artificial Sequence: Synthetic oligonucleotide
aucaaaacuggaagacaca

SEQ ID NO: 1746503 - RNA, 19 nt, Artificial Sequence
  Description of Artificial Sequence: Synthetic oligonucleotide
guuuagcaggaucucuuaa

SEQ ID NO: 1746504 - RNA, 19 nt, Artificial Sequence
  Description of Artificial Sequence: Synthetic oligonucleotide
aaggcagcgcggcgcagca

SEQ ID NO: 1746505 - RNA, 19 nt, Artificial Sequence
  Description of Artificial Sequence: Synthetic oligonucleotide
aggcggaacgcuggggccc

SEQ ID NO: 1746506 - RNA, 19 nt, Artificial Sequence
  Description of Artificial Sequence: Synthetic oligonucleotide
caucuauccuagaaggcua

SEQ ID NO: 1746507 - RNA, 19 nt, Artificial Sequence
  Description of Artificial Sequence: Synthetic oligonucleotide
agccuuugaaucauauuau

SEQ ID NO: 1746508 - RNA, 19 nt, Artificial Sequence
  Description of Artificial Sequence: Synthetic oligonucleotide
cucugcgauacguggccgc

SEQ ID NO: 1746509 - RNA, 19 nt, Artificial Sequence
  Description of Artificial Sequence: Synthetic oligonucleotide
uccucacgaacgccucgag

SEQ ID NO: 1746510 - RNA, 19 nt, Artificial Sequence
  Description of Artificial Sequence: Synthetic oligonucleotide
uccgcgaaucauguccagc

SEQ ID NO: 1746511 - RNA, 19 nt, Artificial Sequence
  Description of Artificial Sequence: Synthetic oligonucleotide
cccaucaaacaacuuucgg

SEQ ID NO: 1746512 - RNA, 19 nt, Artificial Sequence
  Description of Artificial Sequence: Synthetic oligonucleotide
cuuuggcgugaauccgcgg

SEQ ID NO: 1746513 - RNA, 19 nt, Artificial Sequence
  Description of Artificial Sequence: Synthetic oligonucleotide
ucuauccuagaaggcuaca

SEQ ID NO: 1746514 - RNA, 19 nt, Artificial Sequence
  Description of Artificial Sequence: Synthetic oligonucleotide
gugaauccgcggcacgccc

SEQ ID NO: 1746515 - RNA, 19 nt, Artificial Sequence
  Description of Artificial Sequence: Synthetic oligonucleotide
gugauaagcuaagccuuug

SEQ ID NO: 1746516 - RNA, 19 nt, Artificial Sequence
  Description of Artificial Sequence: Synthetic oligonucleotide
gaacacugauaaccauaca

SEQ ID NO: 1746517 - RNA, 19 nt, Artificial Sequence
  Description of Artificial Sequence: Synthetic oligonucleotide
gcgaaucauguccagcaug

SEQ ID NO: 1746518 - RNA, 19 nt, Artificial Sequence
  Description of Artificial Sequence: Synthetic oligonucleotide
agucuccgcgaaucauguc

SEQ ID NO: 1746519 - RNA, 19 nt, Artificial Sequence
  Description of Artificial Sequence: Synthetic oligonucleotide
ugcuugcugugauaagcua

SEQ ID NO: 1746520 - RNA, 19 nt, Artificial Sequence
  Description of Artificial Sequence: Synthetic oligonucleotide
auccgcggcacgcccucgc

SEQ ID NO: 1746521 - RNA, 19 nt, Artificial Sequence
  Description of Artificial Sequence: Synthetic oligonucleotide
guaacccaaggcagcgcgg

SEQ ID NO: 1746522 - RNA, 19 nt, Artificial Sequence
  Description of Artificial Sequence: Synthetic oligonucleotide
gacgagucuccgcgaauca

SEQ ID NO: 1746523 - RNA, 19 nt, Artificial Sequence
  Description of Artificial Sequence: Synthetic oligonucleotide
gaccugaagagagcgggga

SEQ ID NO: 1746524 - RNA, 19 nt, Artificial Sequence
  Description of Artificial Sequence: Synthetic oligonucleotide
cacuguuaacuguaauaaa

SEQ ID NO: 1746525 - RNA, 19 nt, Artificial Sequence
  Description of Artificial Sequence: Synthetic oligonucleotide
gccuuugaaucauauuauc

SEQ ID NO: 1746526 - RNA, 19 nt, Artificial Sequence
  Description of Artificial Sequence: Synthetic oligonucleotide
ucugcgauacguggccgcu

SEQ ID NO: 1746527 - RNA, 19 nt, Artificial Sequence
  Description of Artificial Sequence: Synthetic oligonucleotide
guccggaacaggaccggcg

SEQ ID NO: 1746528 - RNA, 19 nt, Artificial Sequence
  Description of Artificial Sequence: Synthetic oligonucleotide
ggcucugcgauacguggcc

SEQ ID NO: 1746529 - RNA, 19 nt, Artificial Sequence
  Description of Artificial Sequence: Synthetic oligonucleotide
cguaacccaaggcagcgcg

SEQ ID NO: 1746530 - RNA, 19 nt, Artificial Sequence
  Description of Artificial Sequence: Synthetic oligonucleotide
ggaaggugcggaccugaag

SEQ ID NO: 1746531 - RNA, 19 nt, Artificial Sequence
  Description of Artificial Sequence: Synthetic oligonucleotide
cgugggacgagucuccgcg

SEQ ID NO: 1746532 - RNA, 19 nt, Artificial Sequence
  Description of Artificial Sequence: Synthetic oligonucleotide
ucggaacaagagucuuacu

SEQ ID NO: 1746533 - RNA, 19 nt, Artificial Sequence
  Description of Artificial Sequence: Synthetic oligonucleotide
guaaaggugcgggaucaga

SEQ ID NO: 1746534 - RNA, 19 nt, Artificial Sequence
  Description of Artificial Sequence: Synthetic oligonucleotide
ggcguaacccaaggcagcg

SEQ ID NO: 1746535 - RNA, 19 nt, Artificial Sequence
  Description of Artificial Sequence: Synthetic oligonucleotide
agcuaagccuuugaaucau

SEQ ID NO: 1746536 - RNA, 19 nt, Artificial Sequence
  Description of Artificial Sequence: Synthetic oligonucleotide
uguccccgcuccacguagc

SEQ ID NO: 1746537 - RNA, 19 nt, Artificial Sequence
  Description of Artificial Sequence: Synthetic oligonucleotide
gauccugccguagaugcgu

SEQ ID NO: 1746538 - RNA, 19 nt, Artificial Sequence
  Description of Artificial Sequence: Synthetic oligonucleotide
gguccguccuccauggccc

SEQ ID NO: 1746539 - RNA, 19 nt, Artificial Sequence
  Description of Artificial Sequence: Synthetic oligonucleotide
ccccaucaaacaacuuucg

SEQ ID NO: 1746540 - RNA, 19 nt, Artificial Sequence
  Description of Artificial Sequence: Synthetic oligonucleotide
gaauccgcggcacgcccuc

SEQ ID NO: 1746541 - RNA, 19 nt, Artificial Sequence
  Description of Artificial Sequence: Synthetic oligonucleotide
aagugguccucgguccgga

SEQ ID NO: 1746542 - RNA, 19 nt, Artificial Sequence
  Description of Artificial Sequence: Synthetic oligonucleotide
cucgcucaccacgugggac

SEQ ID NO: 1746543 - RNA, 19 nt, Artificial Sequence
  Description of Artificial Sequence: Synthetic oligonucleotide
gcuuuggcgugaauccgcg

SEQ ID NO: 1746544 - RNA, 19 nt, Artificial Sequence
  Description of Artificial Sequence: Synthetic oligonucleotide
aauccgcggcacgcccucg

SEQ ID NO: 1746545 - RNA, 19 nt, Artificial Sequence
  Description of Artificial Sequence: Synthetic oligonucleotide
caguuggcuuccccagccc

SEQ ID NO: 1746546 - RNA, 19 nt, Artificial Sequence
  Description of Artificial Sequence: Synthetic oligonucleotide
cacauuccgacaucauaua

SEQ ID NO: 1746547 - RNA, 19 nt, Artificial Sequence
  Description of Artificial Sequence: Synthetic oligonucleotide
caguucacauuccgacauc

SEQ ID NO: 1746548 - RNA, 19 nt, Artificial Sequence
  Description of Artificial Sequence: Synthetic oligonucleotide
auccucacgaacgccucga

SEQ ID NO: 1746549 - RNA, 19 nt, Artificial Sequence
  Description of Artificial Sequence: Synthetic oligonucleotide
cgacaucgaauauugacga

SEQ ID NO: 1746550 - RNA, 19 nt, Artificial Sequence
  Description of Artificial Sequence: Synthetic oligonucleotide
cucgagcuugucgauccug

SEQ ID NO: 1746551 - RNA, 19 nt, Artificial Sequence
  Description of Artificial Sequence: Synthetic oligonucleotide
cucuuaacauucggaacaa

SEQ ID NO: 1746552 - RNA, 19 nt, Artificial Sequence
  Description of Artificial Sequence: Synthetic oligonucleotide
ccgacaucauauacaccag

SEQ ID NO: 1746553 - RNA, 19 nt, Artificial Sequence
  Description of Artificial Sequence: Synthetic oligonucleotide
auucggaacaagagucuua

SEQ ID NO: 1746554 - RNA, 19 nt, Artificial Sequence
  Description of Artificial Sequence: Synthetic oligonucleotide
gcggguccguccuccaugg

SEQ ID NO: 1746555 - RNA, 19 nt, Artificial Sequence
  Description of Artificial Sequence: Synthetic oligonucleotide
gagagcggggacgcugaug

SEQ ID NO: 1746556 - RNA, 19 nt, Artificial Sequence
  Description of Artificial Sequence: Synthetic oligonucleotide
uccugccguagaugcgucu

SEQ ID NO: 1746557 - RNA, 19 nt, Artificial Sequence
  Description of Artificial Sequence: Synthetic oligonucleotide
cuacacucucgacaucgaa

SEQ ID NO: 1746558 - RNA, 19 nt, Artificial Sequence
  Description of Artificial Sequence: Synthetic oligonucleotide
ggauuuaagaauacagcuu

SEQ ID NO: 1746559 - RNA, 19 nt, Artificial Sequence
  Description of Artificial Sequence: Synthetic oligonucleotide
agccgaucauccucacgaa

SEQ ID NO: 1746560 - RNA, 19 nt, Artificial Sequence
  Description of Artificial Sequence: Synthetic oligonucleotide
agguuuccgcccgcggguc

SEQ ID NO: 1746561 - RNA, 19 nt, Artificial Sequence
  Description of Artificial Sequence: Synthetic oligonucleotide
gacaucgaauauugacgau

SEQ ID NO: 1746562 - RNA, 19 nt, Artificial Sequence
  Description of Artificial Sequence: Synthetic oligonucleotide
ggaccugaagagagcgggg

SEQ ID NO: 1746563 - RNA, 19 nt, Artificial Sequence
  Description of Artificial Sequence: Synthetic oligonucleotide
ggcgugaauccgcggcacg

SEQ ID NO: 1746564 - RNA, 19 nt, Artificial Sequence
  Description of Artificial Sequence: Synthetic oligonucleotide
cuccgcgaaucauguccag

SEQ ID NO: 1746565 - RNA, 19 nt, Artificial Sequence
  Description of Artificial Sequence: Synthetic oligonucleotide
ucuccgcggcuuuggcgug

SEQ ID NO: 1746566 - RNA, 19 nt, Artificial Sequence
  Description of Artificial Sequence: Synthetic oligonucleotide
gagucuccgcgaaucaugu

SEQ ID NO: 1746567 - RNA, 19 nt, Artificial Sequence
  Description of Artificial Sequence: Synthetic oligonucleotide
gcagccgaucauccucacg

SEQ ID NO: 1746568 - RNA, 19 nt, Artificial Sequence
  Description of Artificial Sequence: Synthetic oligonucleotide
cacgugggacgagucuccg

SEQ ID NO: 1746569 - RNA, 19 nt, Artificial Sequence
  Description of Artificial Sequence: Synthetic oligonucleotide
gcuugcugugauaagcuaa

SEQ ID NO: 1746570 - RNA, 19 nt, Artificial Sequence
  Description of Artificial Sequence: Synthetic oligonucleotide
uggcgugaauccgcggcac

SEQ ID NO: 1746571 - RNA, 19 nt, Artificial Sequence
  Description of Artificial Sequence: Synthetic oligonucleotide
cggaccugaagagagcggg

SEQ ID NO: 1746572 - RNA, 19 nt, Artificial Sequence
  Description of Artificial Sequence: Synthetic oligonucleotide
aggugcggaccugaagaga

SEQ ID NO: 1746573 - RNA, 19 nt, Artificial Sequence
  Description of Artificial Sequence: Synthetic oligonucleotide
caguuuagcaggaucucuu

SEQ ID NO: 1746574 - RNA, 19 nt, Artificial Sequence
  Description of Artificial Sequence: Synthetic oligonucleotide
gcccucgcucaccacgugg

SEQ ID NO: 1746575 - RNA, 19 nt, Artificial Sequence
  Description of Artificial Sequence: Synthetic oligonucleotide
gcggcucguaggcggaacg

SEQ ID NO: 1746576 - RNA, 19 nt, Artificial Sequence
  Description of Artificial Sequence: Synthetic oligonucleotide
ugccguagaugcgucucau

SEQ ID NO: 1746577 - RNA, 19 nt, Artificial Sequence
  Description of Artificial Sequence: Synthetic oligonucleotide
ggacgagucuccgcgaauc

SEQ ID NO: 1746578 - RNA, 19 nt, Artificial Sequence
  Description of Artificial Sequence: Synthetic oligonucleotide
gccgaucauccucacgaac

SEQ ID NO: 1746579 - RNA, 19 nt, Artificial Sequence
  Description of Artificial Sequence: Synthetic oligonucleotide
gcuaucaauugaacacuga

SEQ ID NO: 1746580 - RNA, 19 nt, Artificial Sequence
  Description of Artificial Sequence: Synthetic oligonucleotide
uccgcggcacgcccucgcu

SEQ ID NO: 1746581 - RNA, 19 nt, Artificial Sequence
  Description of Artificial Sequence: Synthetic oligonucleotide
acgagucuccgcgaaucau

SEQ ID NO: 1746582 - RNA, 19 nt, Artificial Sequence
  Description of Artificial Sequence: Synthetic oligonucleotide
gucaagucguuugcagaaa

SEQ ID NO: 1746583 - RNA, 19 nt, Artificial Sequence
  Description of Artificial Sequence: Synthetic oligonucleotide
acguagcacccagcggcuc

SEQ ID NO: 1746584 - RNA, 19 nt, Artificial Sequence
  Description of Artificial Sequence: Synthetic oligonucleotide
caagucguuugcagaaaau

SEQ ID NO: 1746585 - RNA, 19 nt, Artificial Sequence
  Description of Artificial Sequence: Synthetic oligonucleotide
caucgcagccagggaagug

SEQ ID NO: 1746586 - RNA, 19 nt, Artificial Sequence
  Description of Artificial Sequence: Synthetic oligonucleotide
ccacgugggacgagucucc

SEQ ID NO: 1746587 - RNA, 19 nt, Artificial Sequence
  Description of Artificial Sequence: Synthetic oligonucleotide
cuccggaaggcucgaggga

SEQ ID NO: 1746588 - RNA, 19 nt, Artificial Sequence
  Description of Artificial Sequence: Synthetic oligonucleotide
cguagaugcgucucaucuc

SEQ ID NO: 1746589 - RNA, 19 nt, Artificial Sequence
  Description of Artificial Sequence: Synthetic oligonucleotide
gacgcgcugcuuuggcucu

SEQ ID NO: 1746590 - RNA, 19 nt, Artificial Sequence
  Description of Artificial Sequence: Synthetic oligonucleotide
ccugacgcgcugcuuuggc

SEQ ID NO: 1746591 - RNA, 19 nt, Artificial Sequence
  Description of Artificial Sequence: Synthetic oligonucleotide
gcucguaggcggaacgcug

SEQ ID NO: 1746592 - RNA, 19 nt, Artificial Sequence
  Description of Artificial Sequence: Synthetic oligonucleotide
gcugcaacaaacacccagu

SEQ ID NO: 1746593 - RNA, 19 nt, Artificial Sequence
  Description of Artificial Sequence: Synthetic oligonucleotide
gaccggcggcucguaggcg

SEQ ID NO: 1746594 - RNA, 19 nt, Artificial Sequence
  Description of Artificial Sequence: Synthetic oligonucleotide
ggugugcaacagccuccgg

SEQ ID NO: 1746595 - RNA, 19 nt, Artificial Sequence
  Description of Artificial Sequence: Synthetic oligonucleotide
guccucgguccggaacagg

SEQ ID NO: 1746596 - RNA, 19 nt, Artificial Sequence
  Description of Artificial Sequence: Synthetic oligonucleotide
caggaccggcggcucguag

SEQ ID NO: 1746597 - RNA, 19 nt, Artificial Sequence
  Description of Artificial Sequence: Synthetic oligonucleotide
auccucccacggcccugac

SEQ ID NO: 1746598 - RNA, 19 nt, Artificial Sequence
  Description of Artificial Sequence: Synthetic oligonucleotide
gugcggaccugaagagagc

SEQ ID NO: 1746599 - RNA, 19 nt, Artificial Sequence
  Description of Artificial Sequence: Synthetic oligonucleotide
ccaucuauccuagaaggcu

SEQ ID NO: 1746600 - RNA, 19 nt, Artificial Sequence
  Description of Artificial Sequence: Synthetic oligonucleotide
cgauacguggccgcugucc

SEQ ID NO: 1746601 - RNA, 19 nt, Artificial Sequence
  Description of Artificial Sequence: Synthetic oligonucleotide
gcucugcgauacguggccg

SEQ ID NO: 1746602 - RNA, 19 nt, Artificial Sequence
  Description of Artificial Sequence: Synthetic oligonucleotide
ccggcgcguccucagagcc

SEQ ID NO: 1746603 - RNA, 19 nt, Artificial Sequence
  Description of Artificial Sequence: Synthetic oligonucleotide
gugggacgagucuccgcga

SEQ ID NO: 1746604 - RNA, 19 nt, Artificial Sequence
  Description of Artificial Sequence: Synthetic oligonucleotide
gccuacaaucuguaaaguu

SEQ ID NO: 1746605 - RNA, 19 nt, Artificial Sequence
  Description of Artificial Sequence: Synthetic oligonucleotide
agagagcggggacgcugau

SEQ ID NO: 1746606 - RNA, 19 nt, Artificial Sequence
  Description of Artificial Sequence: Synthetic oligonucleotide
caccucgggccguggcccc

SEQ ID NO: 1746607 - RNA, 19 nt, Artificial Sequence
  Description of Artificial Sequence: Synthetic oligonucleotide
gguuuccgcccgcgggucc

SEQ ID NO: 1746608 - RNA, 19 nt, Artificial Sequence
  Description of Artificial Sequence: Synthetic oligonucleotide
acgaacgccucgagcuugu

SEQ ID NO: 1746609 - RNA, 19 nt, Artificial Sequence
  Description of Artificial Sequence: Synthetic oligonucleotide
cugcgauacguggccgcug

SEQ ID NO: 1746610 - RNA, 19 nt, Artificial Sequence
  Description of Artificial Sequence: Synthetic oligonucleotide
cgagcuugucgauccugcc

SEQ ID NO: 1746611 - RNA, 19 nt, Artificial Sequence
  Description of Artificial Sequence: Synthetic oligonucleotide
ggggagguuuccgcccgcg

SEQ ID NO: 1746612 - RNA, 19 nt, Artificial Sequence
  Description of Artificial Sequence: Synthetic oligonucleotide
cugccauauugcacagaua

SEQ ID NO: 1746613 - RNA, 19 nt, Artificial Sequence
  Description of Artificial Sequence: Synthetic oligonucleotide
gccacgcugcagccgauca

SEQ ID NO: 1746614 - RNA, 19 nt, Artificial Sequence
  Description of Artificial Sequence: Synthetic oligonucleotide
gcggaccugaagagagcgg

SEQ ID NO: 1746615 - RNA, 19 nt, Artificial Sequence
  Description of Artificial Sequence: Synthetic oligonucleotide
cauucggaacaagagucuu

SEQ ID NO: 1746616 - RNA, 19 nt, Artificial Sequence
  Description of Artificial Sequence: Synthetic oligonucleotide
ggcggaacgcuggggcccg

SEQ ID NO: 1746617 - RNA, 19 nt, Artificial Sequence
  Description of Artificial Sequence: Synthetic oligonucleotide
cucaccacgugggacgagu

SEQ ID NO: 1746618 - RNA, 19 nt, Artificial Sequence
  Description of Artificial Sequence: Synthetic oligonucleotide
cugcaacaaacacccaguu

SEQ ID NO: 1746619 - RNA, 19 nt, Artificial Sequence
  Description of Artificial Sequence: Synthetic oligonucleotide
cugcuuuggcucugcgaua

SEQ ID NO: 1746620 - RNA, 19 nt, Artificial Sequence
  Description of Artificial Sequence: Synthetic oligonucleotide
ggggacgcugauggugugc

SEQ ID NO: 1746621 - RNA, 19 nt, Artificial Sequence
  Description of Artificial Sequence: Synthetic oligonucleotide
cugacgcgcugcuuuggcu

SEQ ID NO: 1746622 - RNA, 19 nt, Artificial Sequence
  Description of Artificial Sequence: Synthetic oligonucleotide
gcccggcgcguccucagag

SEQ ID NO: 1746623 - RNA, 19 nt, Artificial Sequence
  Description of Artificial Sequence: Synthetic oligonucleotide
ggaacaggaccggcggcuc

SEQ ID NO: 1746624 - RNA, 19 nt, Artificial Sequence
  Description of Artificial Sequence: Synthetic oligonucleotide
uggccggcagcaggcugga

SEQ ID NO: 1746625 - RNA, 19 nt, Artificial Sequence
  Description of Artificial Sequence: Synthetic oligonucleotide
gccguagaugcgucucauc

SEQ ID NO: 1746626 - RNA, 19 nt, Artificial Sequence
  Description of Artificial Sequence: Synthetic oligonucleotide
cgcggcuuuggcgugaauc

SEQ ID NO: 1746627 - RNA, 19 nt, Artificial Sequence
  Description of Artificial Sequence: Synthetic oligonucleotide
gcccugacgcgcugcuuug

SEQ ID NO: 1746628 - RNA, 19 nt, Artificial Sequence
  Description of Artificial Sequence: Synthetic oligonucleotide
ccggaacaggaccggcggc

SEQ ID NO: 1746629 - RNA, 19 nt, Artificial Sequence
  Description of Artificial Sequence: Synthetic oligonucleotide
uccgcggcuuuggcgugaa

SEQ ID NO: 1746630 - RNA, 19 nt, Artificial Sequence
  Description of Artificial Sequence: Synthetic oligonucleotide
uuuccgcccgcggguccgu

SEQ ID NO: 1746631 - RNA, 19 nt, Artificial Sequence
  Description of Artificial Sequence: Synthetic oligonucleotide
caccacgugggacgagucu

SEQ ID NO: 1746632 - RNA, 19 nt, Artificial Sequence
  Description of Artificial Sequence: Synthetic oligonucleotide
gcguaacccaaggcagcgc

SEQ ID NO: 1746633 - RNA, 19 nt, Artificial Sequence
  Description of Artificial Sequence: Synthetic oligonucleotide
ggcuggaggcguaacccaa

SEQ ID NO: 1746634 - RNA, 19 nt, Artificial Sequence
  Description of Artificial Sequence: Synthetic oligonucleotide
ggaacgcuggggcccggaa

SEQ ID NO: 1746635 - RNA, 19 nt, Artificial Sequence
  Description of Artificial Sequence: Synthetic oligonucleotide
cguaggcggaacgcugggg

SEQ ID NO: 1746636 - RNA, 19 nt, Artificial Sequence
  Description of Artificial Sequence: Synthetic oligonucleotide
ggccuacaaucuguaaagu

SEQ ID NO: 1746637 - RNA, 19 nt, Artificial Sequence
  Description of Artificial Sequence: Synthetic oligonucleotide
cgcggguccguccuccaug

SEQ ID NO: 1746638 - RNA, 19 nt, Artificial Sequence
  Description of Artificial Sequence: Synthetic oligonucleotide
cguagcacccagcggcuca

SEQ ID NO: 1746639 - RNA, 19 nt, Artificial Sequence
  Description of Artificial Sequence: Synthetic oligonucleotide
ggcccugacgcgcugcuuu

SEQ ID NO: 1746640 - RNA, 19 nt, Artificial Sequence
  Description of Artificial Sequence: Synthetic oligonucleotide
ggcucguaggcggaacgcu

SEQ ID NO: 1746641 - RNA, 19 nt, Artificial Sequence
  Description of Artificial Sequence: Synthetic oligonucleotide
ggcggcucguaggcggaac

SEQ ID NO: 1746642 - RNA, 19 nt, Artificial Sequence
  Description of Artificial Sequence: Synthetic oligonucleotide
acaggaccggcggcucgua

SEQ ID NO: 1746643 - RNA, 19 nt, Artificial Sequence
  Description of Artificial Sequence: Synthetic oligonucleotide
cgacaucauauacaccagu

SEQ ID NO: 1746644 - RNA, 19 nt, Artificial Sequence
  Description of Artificial Sequence: Synthetic oligonucleotide
gcccggaaggugcggaccu

SEQ ID NO: 1746645 - RNA, 19 nt, Artificial Sequence
  Description of Artificial Sequence: Synthetic oligonucleotide
cccaaggcagcgcggcgca

SEQ ID NO: 1746646 - RNA, 19 nt, Artificial Sequence
  Description of Artificial Sequence: Synthetic oligonucleotide
gcuguccccgcuccacgua

SEQ ID NO: 1746647 - RNA, 19 nt, Artificial Sequence
  Description of Artificial Sequence: Synthetic oligonucleotide
gcggggacgcugauggugu

SEQ ID NO: 1746648 - RNA, 19 nt, Artificial Sequence
  Description of Artificial Sequence: Synthetic oligonucleotide
cggcucguaggcggaacgc

SEQ ID NO: 1746649 - RNA, 19 nt, Artificial Sequence
  Description of Artificial Sequence: Synthetic oligonucleotide
gcgauacguggccgcuguc

SEQ ID NO: 1746650 - RNA, 19 nt, Artificial Sequence
  Description of Artificial Sequence: Synthetic oligonucleotide
cgguccggaacaggaccgg

SEQ ID NO: 1746651 - RNA, 19 nt, Artificial Sequence
  Description of Artificial Sequence: Synthetic oligonucleotide
cuccgcggcuuuggcguga

SEQ ID NO: 1746652 - RNA, 19 nt, Artificial Sequence
  Description of Artificial Sequence: Synthetic oligonucleotide
uuccgcccgcggguccguc

SEQ ID NO: 1746653 - RNA, 19 nt, Artificial Sequence
  Description of Artificial Sequence: Synthetic oligonucleotide
gggacgagucuccgcgaau

SEQ ID NO: 1746654 - RNA, 19 nt, Artificial Sequence
  Description of Artificial Sequence: Synthetic oligonucleotide
ggccacgcugcagccgauc

SEQ ID NO: 1746655 - RNA, 19 nt, Artificial Sequence
  Description of Artificial Sequence: Synthetic oligonucleotide
ggcccggcgcguccucaga

SEQ ID NO: 1746656 - RNA, 19 nt, Artificial Sequence
  Description of Artificial Sequence: Synthetic oligonucleotide
aggucgcggcccggcgcgu

SEQ ID NO: 1746657 - RNA, 19 nt, Artificial Sequence
  Description of Artificial Sequence: Synthetic oligonucleotide
ccacgaacucauccacccu

SEQ ID NO: 1746658 - RNA, 19 nt, Artificial Sequence
  Description of Artificial Sequence: Synthetic oligonucleotide
ccgcggcacgcccucgcuc

SEQ ID NO: 1746659 - RNA, 19 nt, Artificial Sequence
  Description of Artificial Sequence: Synthetic oligonucleotide
cgccucgagcuugucgauc

SEQ ID NO: 1746660 - RNA, 19 nt, Artificial Sequence
  Description of Artificial Sequence: Synthetic oligonucleotide
gcggaacgcuggggcccgg

SEQ ID NO: 1746661 - RNA, 19 nt, Artificial Sequence
  Description of Artificial Sequence: Synthetic oligonucleotide
gugcgggaucagagcugcu

SEQ ID NO: 1746662 - RNA, 19 nt, Artificial Sequence
  Description of Artificial Sequence: Synthetic oligonucleotide
cggcgcguccucagagcca

SEQ ID NO: 1746663 - RNA, 19 nt, Artificial Sequence
  Description of Artificial Sequence: Synthetic oligonucleotide
cgcuguccccgcuccacgu

SEQ ID NO: 1746664 - RNA, 19 nt, Artificial Sequence
  Description of Artificial Sequence: Synthetic oligonucleotide
ccgcuccacguagcaccca

SEQ ID NO: 1746665 - RNA, 19 nt, Artificial Sequence
  Description of Artificial Sequence: Synthetic oligonucleotide
ccgcggguccguccuccau

SEQ ID NO: 1746666 - RNA, 19 nt, Artificial Sequence
  Description of Artificial Sequence: Synthetic oligonucleotide
cggcggcucguaggcggaa

SEQ ID NO: 1746667 - RNA, 19 nt, Artificial Sequence
  Description of Artificial Sequence: Synthetic oligonucleotide
ccgcggcuuuggcgugaau

SEQ ID NO: 1746668 - RNA, 19 nt, Artificial Sequence
  Description of Artificial Sequence: Synthetic oligonucleotide
aaagguuuaaagcaaaggu

SEQ ID NO: 1746669 - RNA, 19 nt, Artificial Sequence
  Description of Artificial Sequence: Synthetic oligonucleotide
uuucaaaagguuuaaagca

SEQ ID NO: 1746670 - RNA, 19 nt, Artificial Sequence
  Description of Artificial Sequence: Synthetic oligonucleotide
aaaggugccauuugcuucc

SEQ ID NO: 1746671 - RNA, 19 nt, Artificial Sequence
  Description of Artificial Sequence: Synthetic oligonucleotide
aagaugauccaugauagcg

SEQ ID NO: 1746672 - RNA, 19 nt, Artificial Sequence
  Description of Artificial Sequence: Synthetic oligonucleotide
aacagaaucccauuggucu

SEQ ID NO: 1746673 - RNA, 19 nt, Artificial Sequence
  Description of Artificial Sequence: Synthetic oligonucleotide
ugcugaaugaagaagagga

SEQ ID NO: 1746674 - RNA, 19 nt, Artificial Sequence
  Description of Artificial Sequence: Synthetic oligonucleotide
uuuauuucaaaauugucau

SEQ ID NO: 1746675 - RNA, 19 nt, Artificial Sequence
  Description of Artificial Sequence: Synthetic oligonucleotide
auugccgcugcauuuaucc

SEQ ID NO: 1746676 - RNA, 19 nt, Artificial Sequence
  Description of Artificial Sequence: Synthetic oligonucleotide
ucuuguucacuucacagag

SEQ ID NO: 1746677 - RNA, 19 nt, Artificial Sequence
  Description of Artificial Sequence: Synthetic oligonucleotide
uuaacaugcugaaugaaga

SEQ ID NO: 1746678 - RNA, 19 nt, Artificial Sequence
  Description of Artificial Sequence: Synthetic oligonucleotide
aaaagguuuaaagcaaagg

SEQ ID NO: 1746679 - RNA, 19 nt, Artificial Sequence
  Description of Artificial Sequence: Synthetic oligonucleotide
cucaucaugauaauggcag

SEQ ID NO: 1746680 - RNA, 19 nt, Artificial Sequence
  Description of Artificial Sequence: Synthetic oligonucleotide
agguuuaaagcaaaggugc

SEQ ID NO: 1746681 - RNA, 19 nt, Artificial Sequence
  Description of Artificial Sequence: Synthetic oligonucleotide
aagcaaaggugccauuugc

SEQ ID NO: 1746682 - RNA, 19 nt, Artificial Sequence
  Description of Artificial Sequence: Synthetic oligonucleotide
uucaaaauugucauugcac

SEQ ID NO: 1746683 - RNA, 19 nt, Artificial Sequence
  Description of Artificial Sequence: Synthetic oligonucleotide
aaucccauuggucuuaaca

SEQ ID NO: 1746684 - RNA, 19 nt, Artificial Sequence
  Description of Artificial Sequence: Synthetic oligonucleotide
auuucaaaauugucauugc

SEQ ID NO: 1746685 - RNA, 19 nt, Artificial Sequence
  Description of Artificial Sequence: Synthetic oligonucleotide
cauuuauccaaagagagug

SEQ ID NO: 1746686 - RNA, 19 nt, Artificial Sequence
  Description of Artificial Sequence: Synthetic oligonucleotide
cuagaaagcacuuuauuuc

SEQ ID NO: 1746687 - RNA, 19 nt, Artificial Sequence
  Description of Artificial Sequence: Synthetic oligonucleotide
cuuaacaugcugaaugaag

SEQ ID NO: 1746688 - RNA, 19 nt, Artificial Sequence
  Description of Artificial Sequence: Synthetic oligonucleotide
aaggugggaugcuagaaag

SEQ ID NO: 1746689 - RNA, 19 nt, Artificial Sequence
  Description of Artificial Sequence: Synthetic oligonucleotide
uuuugagcugucuucaccc

SEQ ID NO: 1746690 - RNA, 19 nt, Artificial Sequence
  Description of Artificial Sequence: Synthetic oligonucleotide
caccucaucaugauaaugg

SEQ ID NO: 1746691 - RNA, 19 nt, Artificial Sequence
  Description of Artificial Sequence: Synthetic oligonucleotide
ugauccaugauagcgagcc

SEQ ID NO: 1746692 - RNA, 19 nt, Artificial Sequence
  Description of Artificial Sequence: Synthetic oligonucleotide
aagguuuaaagcaaaggug

SEQ ID NO: 1746693 - RNA, 19 nt, Artificial Sequence
  Description of Artificial Sequence: Synthetic oligonucleotide
guaaaagacccacagaaca

SEQ ID NO: 1746694 - RNA, 19 nt, Artificial Sequence
  Description of Artificial Sequence: Synthetic oligonucleotide
gacaucuccaccuccauug

SEQ ID NO: 1746695 - RNA, 19 nt, Artificial Sequence
  Description of Artificial Sequence: Synthetic oligonucleotide
uuucaaaauugucauugca

SEQ ID NO: 1746696 - RNA, 19 nt, Artificial Sequence
  Description of Artificial Sequence: Synthetic oligonucleotide
uucaaaagguuuaaagcaa

SEQ ID NO: 1746697 - RNA, 19 nt, Artificial Sequence
  Description of Artificial Sequence: Synthetic oligonucleotide
ucacaggcaaaccauggag

SEQ ID NO: 1746698 - RNA, 19 nt, Artificial Sequence
  Description of Artificial Sequence: Synthetic oligonucleotide
gcugcauuuauccaaagag

SEQ ID NO: 1746699 - RNA, 19 nt, Artificial Sequence
  Description of Artificial Sequence: Synthetic oligonucleotide
gaagaggaaggggugaucg

SEQ ID NO: 1746700 - RNA, 19 nt, Artificial Sequence
  Description of Artificial Sequence: Synthetic oligonucleotide
uagaaagcacuuuauuuca

SEQ ID NO: 1746701 - RNA, 19 nt, Artificial Sequence
  Description of Artificial Sequence: Synthetic oligonucleotide
gaugauccaugauagcgag

SEQ ID NO: 1746702 - RNA, 19 nt, Artificial Sequence
  Description of Artificial Sequence: Synthetic oligonucleotide
agucuuguucacuucacag

SEQ ID NO: 1746703 - RNA, 19 nt, Artificial Sequence
  Description of Artificial Sequence: Synthetic oligonucleotide
aaagcaaaggugccauuug

SEQ ID NO: 1746704 - RNA, 19 nt, Artificial Sequence
  Description of Artificial Sequence: Synthetic oligonucleotide
aacaugcugaaugaagaag

SEQ ID NO: 1746705 - RNA, 19 nt, Artificial Sequence
  Description of Artificial Sequence: Synthetic oligonucleotide
uuguucacuucacagagaa

SEQ ID NO: 1746706 - RNA, 19 nt, Artificial Sequence
  Description of Artificial Sequence: Synthetic oligonucleotide
aaagacccacagaacaccc

SEQ ID NO: 1746707 - RNA, 19 nt, Artificial Sequence
  Description of Artificial Sequence: Synthetic oligonucleotide
ggucuuaacaugcugaaug

SEQ ID NO: 1746708 - RNA, 19 nt, Artificial Sequence
  Description of Artificial Sequence: Synthetic oligonucleotide
gagacuggguaaaagaccc

SEQ ID NO: 1746709 - RNA, 19 nt, Artificial Sequence
  Description of Artificial Sequence: Synthetic oligonucleotide
aagaccauggccagggccg

SEQ ID NO: 1746710 - RNA, 19 nt, Artificial Sequence
  Description of Artificial Sequence: Synthetic oligonucleotide
ugaagaagaggaaggggug

SEQ ID NO: 1746711 - RNA, 19 nt, Artificial Sequence
  Description of Artificial Sequence: Synthetic oligonucleotide
ugggaugcuagaaagcacu

SEQ ID NO: 1746712 - RNA, 19 nt, Artificial Sequence
  Description of Artificial Sequence: Synthetic oligonucleotide
ugcuucccgaagaugaucc

SEQ ID NO: 1746713 - RNA, 19 nt, Artificial Sequence
  Description of Artificial Sequence: Synthetic oligonucleotide
ucaaaagguuuaaagcaaa

SEQ ID NO: 1746714 - RNA, 19 nt, Artificial Sequence
  Description of Artificial Sequence: Synthetic oligonucleotide
uggagacuggguaaaagac

SEQ ID NO: 1746715 - RNA, 19 nt, Artificial Sequence
  Description of Artificial Sequence: Synthetic oligonucleotide
uauccaaagagagugccug

SEQ ID NO: 1746716 - RNA, 19 nt, Artificial Sequence
  Description of Artificial Sequence: Synthetic oligonucleotide
ucugaaggugggaugcuag

SEQ ID NO: 1746717 - RNA, 19 nt, Artificial Sequence
  Description of Artificial Sequence: Synthetic oligonucleotide
ucacccaguauuuucaaaa

SEQ ID NO: 1746718 - RNA, 19 nt, Artificial Sequence
  Description of Artificial Sequence: Synthetic oligonucleotide
aaaccauggagacugggua

SEQ ID NO: 1746719 - RNA, 19 nt, Artificial Sequence
  Description of Artificial Sequence: Synthetic oligonucleotide
ugaucggcacagaagcggg

SEQ ID NO: 1746720 - RNA, 19 nt, Artificial Sequence
  Description of Artificial Sequence: Synthetic oligonucleotide
acagaacagaaucccauug

SEQ ID NO: 1746721 - RNA, 19 nt, Artificial Sequence
  Description of Artificial Sequence: Synthetic oligonucleotide
acccaguauuuucaaaagg

SEQ ID NO: 1746722 - RNA, 19 nt, Artificial Sequence
  Description of Artificial Sequence: Synthetic oligonucleotide
augauaauggcagccgugg

SEQ ID NO: 1746723 - RNA, 19 nt, Artificial Sequence
  Description of Artificial Sequence: Synthetic oligonucleotide
agaacagaaucccauuggu

SEQ ID NO: 1746724 - RNA, 19 nt, Artificial Sequence
  Description of Artificial Sequence: Synthetic oligonucleotide
agaggaaggggugaucggc

SEQ ID NO: 1746725 - RNA, 19 nt, Artificial Sequence
  Description of Artificial Sequence: Synthetic oligonucleotide
gaugcuagaaagcacuuua

SEQ ID NO: 1746726 - RNA, 19 nt, Artificial Sequence
  Description of Artificial Sequence: Synthetic oligonucleotide
caaaagguuuaaagcaaag

SEQ ID NO: 1746727 - RNA, 19 nt, Artificial Sequence
  Description of Artificial Sequence: Synthetic oligonucleotide
cuggguaaaagacccacag

SEQ ID NO: 1746728 - RNA, 19 nt, Artificial Sequence
  Description of Artificial Sequence: Synthetic oligonucleotide
uuuaaagcaaaggugccau

SEQ ID NO: 1746729 - RNA, 19 nt, Artificial Sequence
  Description of Artificial Sequence: Synthetic oligonucleotide
cagaacagaaucccauugg

SEQ ID NO: 1746730 - RNA, 19 nt, Artificial Sequence
  Description of Artificial Sequence: Synthetic oligonucleotide
acuuuauuucaaaauuguc

SEQ ID NO: 1746731 - RNA, 19 nt, Artificial Sequence
  Description of Artificial Sequence: Synthetic oligonucleotide
auuugcuucccgaagauga

SEQ ID NO: 1746732 - RNA, 19 nt, Artificial Sequence
  Description of Artificial Sequence: Synthetic oligonucleotide
uucacuucacagagaagug

SEQ ID NO: 1746733 - RNA, 19 nt, Artificial Sequence
  Description of Artificial Sequence: Synthetic oligonucleotide
aagaggaaggggugaucgg

SEQ ID NO: 1746734 - RNA, 19 nt, Artificial Sequence
  Description of Artificial Sequence: Synthetic oligonucleotide
auuuauccaaagagagugc

SEQ ID NO: 1746735 - RNA, 19 nt, Artificial Sequence
  Description of Artificial Sequence: Synthetic oligonucleotide
uugggucacaggcaaacca

SEQ ID NO: 1746736 - RNA, 19 nt, Artificial Sequence
  Description of Artificial Sequence: Synthetic oligonucleotide
aggagaaccggccacagaa

SEQ ID NO: 1746737 - RNA, 19 nt, Artificial Sequence
  Description of Artificial Sequence: Synthetic oligonucleotide
aucaugauaauggcagccg

SEQ ID NO: 1746738 - RNA, 19 nt, Artificial Sequence
  Description of Artificial Sequence: Synthetic oligonucleotide
augaagaccauggccaggg

SEQ ID NO: 1746739 - RNA, 19 nt, Artificial Sequence
  Description of Artificial Sequence: Synthetic oligonucleotide
aggcaaaccauggagacug

SEQ ID NO: 1746740 - RNA, 19 nt, Artificial Sequence
  Description of Artificial Sequence: Synthetic oligonucleotide
gaagaccauggccagggcc

SEQ ID NO: 1746741 - RNA, 19 nt, Artificial Sequence
  Description of Artificial Sequence: Synthetic oligonucleotide
aucccauuggucuuaacau

SEQ ID NO: 1746742 - RNA, 19 nt, Artificial Sequence
  Description of Artificial Sequence: Synthetic oligonucleotide
ucaugauaauggcagccgu

SEQ ID NO: 1746743 - RNA, 19 nt, Artificial Sequence
  Description of Artificial Sequence: Synthetic oligonucleotide
acggacaucgcacaccuca

SEQ ID NO: 1746744 - RNA, 19 nt, Artificial Sequence
  Description of Artificial Sequence: Synthetic oligonucleotide
caugcugaaugaagaagag

SEQ ID NO: 1746745 - RNA, 19 nt, Artificial Sequence
  Description of Artificial Sequence: Synthetic oligonucleotide
aguauuuucaaaagguuua

SEQ ID NO: 1746746 - RNA, 19 nt, Artificial Sequence
  Description of Artificial Sequence: Synthetic oligonucleotide
cacuucacagagaagugac

SEQ ID NO: 1746747 - RNA, 19 nt, Artificial Sequence
  Description of Artificial Sequence: Synthetic oligonucleotide
acuugggucacaggcaaac

SEQ ID NO: 1746748 - RNA, 19 nt, Artificial Sequence
  Description of Artificial Sequence: Synthetic oligonucleotide
ggucacuugggucacaggc

SEQ ID NO: 1746749 - RNA, 19 nt, Artificial Sequence
  Description of Artificial Sequence: Synthetic oligonucleotide
uuauccaaagagagugccu

SEQ ID NO: 1746750 - RNA, 19 nt, Artificial Sequence
  Description of Artificial Sequence: Synthetic oligonucleotide
acaugcugaaugaagaaga

SEQ ID NO: 1746751 - RNA, 19 nt, Artificial Sequence
  Description of Artificial Sequence: Synthetic oligonucleotide
ucaucaugauaauggcagc

SEQ ID NO: 1746752 - RNA, 19 nt, Artificial Sequence
  Description of Artificial Sequence: Synthetic oligonucleotide
gacaucgcacaccucauca

SEQ ID NO: 1746753 - RNA, 19 nt, Artificial Sequence
  Description of Artificial Sequence: Synthetic oligonucleotide
gaagaugauccaugauagc

SEQ ID NO: 1746754 - RNA, 19 nt, Artificial Sequence
  Description of Artificial Sequence: Synthetic oligonucleotide
ucccauuggucuuaacaug

SEQ ID NO: 1746755 - RNA, 19 nt, Artificial Sequence
  Description of Artificial Sequence: Synthetic oligonucleotide
ggguaaaagacccacagaa

SEQ ID NO: 1746756 - RNA, 19 nt, Artificial Sequence
  Description of Artificial Sequence: Synthetic oligonucleotide
caaaggugccauuugcuuc

SEQ ID NO: 1746757 - RNA, 19 nt, Artificial Sequence
  Description of Artificial Sequence: Synthetic oligonucleotide
caucaugauaauggcagcc

SEQ ID NO: 1746758 - RNA, 19 nt, Artificial Sequence
  Description of Artificial Sequence: Synthetic oligonucleotide
gaacacccuuuccucaggg

SEQ ID NO: 1746759 - RNA, 19 nt, Artificial Sequence
  Description of Artificial Sequence: Synthetic oligonucleotide
auuggucuuaacaugcuga

SEQ ID NO: 1746760 - RNA, 19 nt, Artificial Sequence
  Description of Artificial Sequence: Synthetic oligonucleotide
uaacaugcugaaugaagaa

SEQ ID NO: 1746761 - RNA, 19 nt, Artificial Sequence
  Description of Artificial Sequence: Synthetic oligonucleotide
guucacuucacagagaagu

SEQ ID NO: 1746762 - RNA, 19 nt, Artificial Sequence
  Description of Artificial Sequence: Synthetic oligonucleotide
gggugaucggcacagaagc

SEQ ID NO: 1746763 - RNA, 19 nt, Artificial Sequence
  Description of Artificial Sequence: Synthetic oligonucleotide
caugauaauggcagccgug

SEQ ID NO: 1746764 - RNA, 19 nt, Artificial Sequence
  Description of Artificial Sequence: Synthetic oligonucleotide
caguguugcccuuugcccc

SEQ ID NO: 1746765 - RNA, 19 nt, Artificial Sequence
  Description of Artificial Sequence: Synthetic oligonucleotide
ucacuugggucacaggcaa

SEQ ID NO: 1746766 - RNA, 19 nt, Artificial Sequence
  Description of Artificial Sequence: Synthetic oligonucleotide
cucagggagaggagaaccg

SEQ ID NO: 1746767 - RNA, 19 nt, Artificial Sequence
  Description of Artificial Sequence: Synthetic oligonucleotide
aaccauggagacuggguaa

SEQ ID NO: 1746768 - RNA, 19 nt, Artificial Sequence
  Description of Artificial Sequence: Synthetic oligonucleotide
ucagggagaggagaaccgg

SEQ ID NO: 1746769 - RNA, 19 nt, Artificial Sequence
  Description of Artificial Sequence: Synthetic oligonucleotide
uggguaaaagacccacaga

SEQ ID NO: 1746770 - RNA, 19 nt, Artificial Sequence
  Description of Artificial Sequence: Synthetic oligonucleotide
agcccagguggacaucucc

SEQ ID NO: 1746771 - RNA, 19 nt, Artificial Sequence
  Description of Artificial Sequence: Synthetic oligonucleotide
ugauaauggcagccguggc

SEQ ID NO: 1746772 - RNA, 19 nt, Artificial Sequence
  Description of Artificial Sequence: Synthetic oligonucleotide
gaaggggugaucggcacag

SEQ ID NO: 1746773 - RNA, 19 nt, Artificial Sequence
  Description of Artificial Sequence: Synthetic oligonucleotide
gugaucggcacagaagcgg

SEQ ID NO: 1746774 - RNA, 19 nt, Artificial Sequence
  Description of Artificial Sequence: Synthetic oligonucleotide
uuggucuuaacaugcugaa

SEQ ID NO: 1746775 - RNA, 19 nt, Artificial Sequence
  Description of Artificial Sequence: Synthetic oligonucleotide
cacccaguauuuucaaaag

SEQ ID NO: 1746776 - RNA, 19 nt, Artificial Sequence
  Description of Artificial Sequence: Synthetic oligonucleotide
uaaagcaaaggugccauuu

SEQ ID NO: 1746777 - RNA, 19 nt, Artificial Sequence
  Description of Artificial Sequence: Synthetic oligonucleotide
ucacuucacagagaaguga

SEQ ID NO: 1746778 - RNA, 19 nt, Artificial Sequence
  Description of Artificial Sequence: Synthetic oligonucleotide
cgaagaugauccaugauag

SEQ ID NO: 1746779 - RNA, 19 nt, Artificial Sequence
  Description of Artificial Sequence: Synthetic oligonucleotide
aucuccaccuccauugccg

SEQ ID NO: 1746780 - RNA, 19 nt, Artificial Sequence
  Description of Artificial Sequence: Synthetic oligonucleotide
aaggucacuugggucacag

SEQ ID NO: 1746781 - RNA, 19 nt, Artificial Sequence
  Description of Artificial Sequence: Synthetic oligonucleotide
augcugaaugaagaagagg

SEQ ID NO: 1746782 - RNA, 19 nt, Artificial Sequence
  Description of Artificial Sequence: Synthetic oligonucleotide
uguucacuucacagagaag

SEQ ID NO: 1746783 - RNA, 19 nt, Artificial Sequence
  Description of Artificial Sequence: Synthetic oligonucleotide
acagaacacccuuuccuca

SEQ ID NO: 1746784 - RNA, 19 nt, Artificial Sequence
  Description of Artificial Sequence: Synthetic oligonucleotide
gucuuaacaugcugaauga

SEQ ID NO: 1746785 - RNA, 19 nt, Artificial Sequence
  Description of Artificial Sequence: Synthetic oligonucleotide
augcucaugggugagaaaa

SEQ ID NO: 1746786 - RNA, 19 nt, Artificial Sequence
  Description of Artificial Sequence: Synthetic oligonucleotide
cacagaacacccuuuccuc

SEQ ID NO: 1746787 - RNA, 19 nt, Artificial Sequence
  Description of Artificial Sequence: Synthetic oligonucleotide
acccacagaacacccuuuc

SEQ ID NO: 1746788 - RNA, 19 nt, Artificial Sequence
  Description of Artificial Sequence: Synthetic oligonucleotide
agaacacccuuuccucagg

SEQ ID NO: 1746789 - RNA, 19 nt, Artificial Sequence
  Description of Artificial Sequence: Synthetic oligonucleotide
gagaaccggccacagaaca

SEQ ID NO: 1746790 - RNA, 19 nt, Artificial Sequence
  Description of Artificial Sequence: Synthetic oligonucleotide
aggaaggggugaucggcac

SEQ ID NO: 1746791 - RNA, 19 nt, Artificial Sequence
  Description of Artificial Sequence: Synthetic oligonucleotide
ugggucacaggcaaaccau

SEQ ID NO: 1746792 - RNA, 19 nt, Artificial Sequence
  Description of Artificial Sequence: Synthetic oligonucleotide
cuggcuugcaguguugccc

SEQ ID NO: 1746793 - RNA, 19 nt, Artificial Sequence
  Description of Artificial Sequence: Synthetic oligonucleotide
gucuuguucacuucacaga

SEQ ID NO: 1746794 - RNA, 19 nt, Artificial Sequence
  Description of Artificial Sequence: Synthetic oligonucleotide
auaaggucacuugggucac

SEQ ID NO: 1746795 - RNA, 19 nt, Artificial Sequence
  Description of Artificial Sequence: Synthetic oligonucleotide
aucuggcuugcaguguugc

SEQ ID NO: 1746796 - RNA, 19 nt, Artificial Sequence
  Description of Artificial Sequence: Synthetic oligonucleotide
uuugagcugucuucaccca

SEQ ID NO: 1746797 - RNA, 19 nt, Artificial Sequence
  Description of Artificial Sequence: Synthetic oligonucleotide
cauuggucuuaacaugcug

SEQ ID NO: 1746798 - RNA, 19 nt, Artificial Sequence
  Description of Artificial Sequence: Synthetic oligonucleotide
agcugcagccucugugccc

SEQ ID NO: 1746799 - RNA, 19 nt, Artificial Sequence
  Description of Artificial Sequence: Synthetic oligonucleotide
cagaacacccuuuccucag

SEQ ID NO: 1746800 - RNA, 19 nt, Artificial Sequence
  Description of Artificial Sequence: Synthetic oligonucleotide
uuuccucagggagaggaga

SEQ ID NO: 1746801 - RNA, 19 nt, Artificial Sequence
  Description of Artificial Sequence: Synthetic oligonucleotide
agaugauccaugauagcga

SEQ ID NO: 1746802 - RNA, 19 nt, Artificial Sequence
  Description of Artificial Sequence: Synthetic oligonucleotide
gccgaggagaugcucaugg

SEQ ID NO: 1746803 - RNA, 19 nt, Artificial Sequence
  Description of Artificial Sequence: Synthetic oligonucleotide
cccauuggucuuaacaugc

SEQ ID NO: 1746804 - RNA, 19 nt, Artificial Sequence
  Description of Artificial Sequence: Synthetic oligonucleotide
gaaggugggaugcuagaaa

SEQ ID NO: 1746805 - RNA, 19 nt, Artificial Sequence
  Description of Artificial Sequence: Synthetic oligonucleotide
gacuggguaaaagacccac

SEQ ID NO: 1746806 - RNA, 19 nt, Artificial Sequence
  Description of Artificial Sequence: Synthetic oligonucleotide
uuugcuucccgaagaugau

SEQ ID NO: 1746807 - RNA, 19 nt, Artificial Sequence
  Description of Artificial Sequence: Synthetic oligonucleotide
caucgcacaccucaucaug

SEQ ID NO: 1746808 - RNA, 19 nt, Artificial Sequence
  Description of Artificial Sequence: Synthetic oligonucleotide
aggagaugcucauggguga

SEQ ID NO: 1746809 - RNA, 19 nt, Artificial Sequence
  Description of Artificial Sequence: Synthetic oligonucleotide
gcacuuuauuucaaaauug

SEQ ID NO: 1746810 - RNA, 19 nt, Artificial Sequence
  Description of Artificial Sequence: Synthetic oligonucleotide
cacuuuauuucaaaauugu

SEQ ID NO: 1746811 - RNA, 19 nt, Artificial Sequence
  Description of Artificial Sequence: Synthetic oligonucleotide
ucuuaacaugcugaaugaa

SEQ ID NO: 1746812 - RNA, 19 nt, Artificial Sequence
  Description of Artificial Sequence: Synthetic oligonucleotide
gaacagaaucccauugguc

SEQ ID NO: 1746813 - RNA, 19 nt, Artificial Sequence
  Description of Artificial Sequence: Synthetic oligonucleotide
gaagaagaggaagggguga

SEQ ID NO: 1746814 - RNA, 19 nt, Artificial Sequence
  Description of Artificial Sequence: Synthetic oligonucleotide
cauggagacuggguaaaag

SEQ ID NO: 1746815 - RNA, 19 nt, Artificial Sequence
  Description of Artificial Sequence: Synthetic oligonucleotide
ugccgcugcauuuauccaa

SEQ ID NO: 1746816 - RNA, 19 nt, Artificial Sequence
  Description of Artificial Sequence: Synthetic oligonucleotide
cuuuccucagggagaggag

SEQ ID NO: 1746817 - RNA, 19 nt, Artificial Sequence
  Description of Artificial Sequence: Synthetic oligonucleotide
aagaagaggaaggggugau

SEQ ID NO: 1746818 - RNA, 19 nt, Artificial Sequence
  Description of Artificial Sequence: Synthetic oligonucleotide
uggcuugcaguguugcccu

SEQ ID NO: 1746819 - RNA, 19 nt, Artificial Sequence
  Description of Artificial Sequence: Synthetic oligonucleotide
cagggagaggagaaccggc

SEQ ID NO: 1746820 - RNA, 19 nt, Artificial Sequence
  Description of Artificial Sequence: Synthetic oligonucleotide
aggugggaugcuagaaagc

SEQ ID NO: 1746821 - RNA, 19 nt, Artificial Sequence
  Description of Artificial Sequence: Synthetic oligonucleotide
ugaaggugggaugcuagaa

SEQ ID NO: 1746822 - RNA, 19 nt, Artificial Sequence
  Description of Artificial Sequence: Synthetic oligonucleotide
ucuggcuugcaguguugcc

SEQ ID NO: 1746823 - RNA, 19 nt, Artificial Sequence
  Description of Artificial Sequence: Synthetic oligonucleotide
ucuccaccuccauugccgc

SEQ ID NO: 1746824 - RNA, 19 nt, Artificial Sequence
  Description of Artificial Sequence: Synthetic oligonucleotide
ggagacuggguaaaagacc

SEQ ID NO: 1746825 - RNA, 19 nt, Artificial Sequence
  Description of Artificial Sequence: Synthetic oligonucleotide
uucacccaguauuuucaaa

SEQ ID NO: 1746826 - RNA, 19 nt, Artificial Sequence
  Description of Artificial Sequence: Synthetic oligonucleotide
acagaaucccauuggucuu

SEQ ID NO: 1746827 - RNA, 19 nt, Artificial Sequence
  Description of Artificial Sequence: Synthetic oligonucleotide
agguggacaucuccaccuc

SEQ ID NO: 1746828 - RNA, 19 nt, Artificial Sequence
  Description of Artificial Sequence: Synthetic oligonucleotide
gguuuaaagcaaaggugcc

SEQ ID NO: 1746829 - RNA, 19 nt, Artificial Sequence
  Description of Artificial Sequence: Synthetic oligonucleotide
cccaugaagaccauggcca

SEQ ID NO: 1746830 - RNA, 19 nt, Artificial Sequence
  Description of Artificial Sequence: Synthetic oligonucleotide
aaggugccauuugcuuccc

SEQ ID NO: 1746831 - RNA, 19 nt, Artificial Sequence
  Description of Artificial Sequence: Synthetic oligonucleotide
gauccaugauagcgagccc

SEQ ID NO: 1746832 - RNA, 19 nt, Artificial Sequence
  Description of Artificial Sequence: Synthetic oligonucleotide
agacccacagaacacccuu

SEQ ID NO: 1746833 - RNA, 19 nt, Artificial Sequence
  Description of Artificial Sequence: Synthetic oligonucleotide
cuugcaguguugcccuuug

SEQ ID NO: 1746834 - RNA, 19 nt, Artificial Sequence
  Description of Artificial Sequence: Synthetic oligonucleotide
auggccagggccgaggaga

SEQ ID NO: 1746835 - RNA, 19 nt, Artificial Sequence
  Description of Artificial Sequence: Synthetic oligonucleotide
acaccucaucaugauaaug

SEQ ID NO: 1746836 - RNA, 19 nt, Artificial Sequence
  Description of Artificial Sequence: Synthetic oligonucleotide
ggucacaggcaaaccaugg

SEQ ID NO: 1746837 - RNA, 19 nt, Artificial Sequence
  Description of Artificial Sequence: Synthetic oligonucleotide
gaaccggccacagaacaga

SEQ ID NO: 1746838 - RNA, 19 nt, Artificial Sequence
  Description of Artificial Sequence: Synthetic oligonucleotide
caugaagaccauggccagg

SEQ ID NO: 1746839 - RNA, 19 nt, Artificial Sequence
  Description of Artificial Sequence: Synthetic oligonucleotide
augauccaugauagcgagc

SEQ ID NO: 1746840 - RNA, 19 nt, Artificial Sequence
  Description of Artificial Sequence: Synthetic oligonucleotide
ggugggaugcuagaaagca

SEQ ID NO: 1746841 - RNA, 19 nt, Artificial Sequence
  Description of Artificial Sequence: Synthetic oligonucleotide
gguaaaagacccacagaac

SEQ ID NO: 1746842 - RNA, 19 nt, Artificial Sequence
  Description of Artificial Sequence: Synthetic oligonucleotide
agcaaaggugccauuugcu

SEQ ID NO: 1746843 - RNA, 19 nt, Artificial Sequence
  Description of Artificial Sequence: Synthetic oligonucleotide
acccuuuccucagggagag

SEQ ID NO: 1746844 - RNA, 19 nt, Artificial Sequence
  Description of Artificial Sequence: Synthetic oligonucleotide
gucacaggcaaaccaugga

SEQ ID NO: 1746845 - RNA, 19 nt, Artificial Sequence
  Description of Artificial Sequence: Synthetic oligonucleotide
uuaaagcaaaggugccauu

SEQ ID NO: 1746846 - RNA, 19 nt, Artificial Sequence
  Description of Artificial Sequence: Synthetic oligonucleotide
agaaccggccacagaacag

SEQ ID NO: 1746847 - RNA, 19 nt, Artificial Sequence
  Description of Artificial Sequence: Synthetic oligonucleotide
cuugggucacaggcaaacc

SEQ ID NO: 1746848 - RNA, 19 nt, Artificial Sequence
  Description of Artificial Sequence: Synthetic oligonucleotide
gcuagaaagcacuuuauuu

SEQ ID NO: 1746849 - RNA, 19 nt, Artificial Sequence
  Description of Artificial Sequence: Synthetic oligonucleotide
gaucggcacagaagcgggg

SEQ ID NO: 1746850 - RNA, 19 nt, Artificial Sequence
  Description of Artificial Sequence: Synthetic oligonucleotide
agaugcucaugggugagaa

SEQ ID NO: 1746851 - RNA, 19 nt, Artificial Sequence
  Description of Artificial Sequence: Synthetic oligonucleotide
ccggccacagaacagaauc

SEQ ID NO: 1746852 - RNA, 19 nt, Artificial Sequence
  Description of Artificial Sequence: Synthetic oligonucleotide
aucgcacaccucaucauga

SEQ ID NO: 1746853 - RNA, 19 nt, Artificial Sequence
  Description of Artificial Sequence: Synthetic oligonucleotide
uugccgcugcauuuaucca

SEQ ID NO: 1746854 - RNA, 19 nt, Artificial Sequence
  Description of Artificial Sequence: Synthetic oligonucleotide
aggucacuugggucacagg

SEQ ID NO: 1746855 - RNA, 19 nt, Artificial Sequence
  Description of Artificial Sequence: Synthetic oligonucleotide
uugcaguguugcccuuugc

SEQ ID NO: 1746856 - RNA, 19 nt, Artificial Sequence
  Description of Artificial Sequence: Synthetic oligonucleotide
cuuguucacuucacagaga

SEQ ID NO: 1746857 - RNA, 19 nt, Artificial Sequence
  Description of Artificial Sequence: Synthetic oligonucleotide
cauuugcuucccgaagaug

SEQ ID NO: 1746858 - RNA, 19 nt, Artificial Sequence
  Description of Artificial Sequence: Synthetic oligonucleotide
aagacccacagaacacccu

SEQ ID NO: 1746859 - RNA, 19 nt, Artificial Sequence
  Description of Artificial Sequence: Synthetic oligonucleotide
aggggugaucggcacagaa

SEQ ID NO: 1746860 - RNA, 19 nt, Artificial Sequence
  Description of Artificial Sequence: Synthetic oligonucleotide
agaggagaaccggccacag

SEQ ID NO: 1746861 - RNA, 19 nt, Artificial Sequence
  Description of Artificial Sequence: Synthetic oligonucleotide
uccauugccgcugcauuua

SEQ ID NO: 1746862 - RNA, 19 nt, Artificial Sequence
  Description of Artificial Sequence: Synthetic oligonucleotide
ggugccauuugcuucccga

SEQ ID NO: 1746863 - RNA, 19 nt, Artificial Sequence
  Description of Artificial Sequence: Synthetic oligonucleotide
caaaccauggagacugggu

SEQ ID NO: 1746864 - RNA, 19 nt, Artificial Sequence
  Description of Artificial Sequence: Synthetic oligonucleotide
uggacaucuccaccuccau

SEQ ID NO: 1746865 - RNA, 19 nt, Artificial Sequence
  Description of Artificial Sequence: Synthetic oligonucleotide
ggagaggagaaccggccac

SEQ ID NO: 1746866 - RNA, 19 nt, Artificial Sequence
  Description of Artificial Sequence: Synthetic oligonucleotide
gucacuugggucacaggca

SEQ ID NO: 1746867 - RNA, 19 nt, Artificial Sequence
  Description of Artificial Sequence: Synthetic oligonucleotide
gccauuugcuucccgaaga

SEQ ID NO: 1746868 - RNA, 19 nt, Artificial Sequence
  Description of Artificial Sequence: Synthetic oligonucleotide
gaggaaggggugaucggca

SEQ ID NO: 1746869 - RNA, 19 nt, Artificial Sequence
  Description of Artificial Sequence: Synthetic oligonucleotide
ggugaucggcacagaagcg

SEQ ID NO: 1746870 - RNA, 19 nt, Artificial Sequence
  Description of Artificial Sequence: Synthetic oligonucleotide
gcacaccucaucaugauaa

SEQ ID NO: 1746871 - RNA, 19 nt, Artificial Sequence
  Description of Artificial Sequence: Synthetic oligonucleotide
accauggccagggccgagg

SEQ ID NO: 1746872 - RNA, 19 nt, Artificial Sequence
  Description of Artificial Sequence: Synthetic oligonucleotide
acuggguaaaagacccaca

SEQ ID NO: 1746873 - RNA, 19 nt, Artificial Sequence
  Description of Artificial Sequence: Synthetic oligonucleotide
gguggacaucuccaccucc

SEQ ID NO: 1746874 - RNA, 19 nt, Artificial Sequence
  Description of Artificial Sequence: Synthetic oligonucleotide
agaaagcacuuuauuucaa

SEQ ID NO: 1746875 - RNA, 19 nt, Artificial Sequence
  Description of Artificial Sequence: Synthetic oligonucleotide
cccaguauuuucaaaaggu

SEQ ID NO: 1746876 - RNA, 19 nt, Artificial Sequence
  Description of Artificial Sequence: Synthetic oligonucleotide
cugaaggugggaugcuaga

SEQ ID NO: 1746877 - RNA, 19 nt, Artificial Sequence
  Description of Artificial Sequence: Synthetic oligonucleotide
uugcuucccgaagaugauc

SEQ ID NO: 1746878 - RNA, 19 nt, Artificial Sequence
  Description of Artificial Sequence: Synthetic oligonucleotide
uggucuuaacaugcugaau

SEQ ID NO: 1746879 - RNA, 19 nt, Artificial Sequence
  Description of Artificial Sequence: Synthetic oligonucleotide
uucugaaggugggaugcua

SEQ ID NO: 1746880 - RNA, 19 nt, Artificial Sequence
  Description of Artificial Sequence: Synthetic oligonucleotide
ucgcacaccucaucaugau

SEQ ID NO: 1746881 - RNA, 19 nt, Artificial Sequence
  Description of Artificial Sequence: Synthetic oligonucleotide
cacccuuuccucagggaga

SEQ ID NO: 1746882 - RNA, 19 nt, Artificial Sequence
  Description of Artificial Sequence: Synthetic oligonucleotide
caucuggcuugcaguguug

SEQ ID NO: 1746883 - RNA, 19 nt, Artificial Sequence
  Description of Artificial Sequence: Synthetic oligonucleotide
accauggagacuggguaaa

SEQ ID NO: 1746884 - RNA, 19 nt, Artificial Sequence
  Description of Artificial Sequence: Synthetic oligonucleotide
gccagggccgaggagaugc

SEQ ID NO: 1746885 - RNA, 19 nt, Artificial Sequence
  Description of Artificial Sequence: Synthetic oligonucleotide
cagucuuguucacuucaca

SEQ ID NO: 1746886 - RNA, 19 nt, Artificial Sequence
  Description of Artificial Sequence: Synthetic oligonucleotide
gugggaugcuagaaagcac

SEQ ID NO: 1746887 - RNA, 19 nt, Artificial Sequence
  Description of Artificial Sequence: Synthetic oligonucleotide
cagguggacaucuccaccu

SEQ ID NO: 1746888 - RNA, 19 nt, Artificial Sequence
  Description of Artificial Sequence: Synthetic oligonucleotide
ggggugaucggcacagaag

SEQ ID NO: 1746889 - RNA, 19 nt, Artificial Sequence
  Description of Artificial Sequence: Synthetic oligonucleotide
gcaaaccauggagacuggg

SEQ ID NO: 1746890 - RNA, 19 nt, Artificial Sequence
  Description of Artificial Sequence: Synthetic oligonucleotide
ccucagggagaggagaacc

SEQ ID NO: 1746891 - RNA, 19 nt, Artificial Sequence
  Description of Artificial Sequence: Synthetic oligonucleotide
cauugccgcugcauuuauc

SEQ ID NO: 1746892 - RNA, 19 nt, Artificial Sequence
  Description of Artificial Sequence: Synthetic oligonucleotide
aggugccauuugcuucccg

SEQ ID NO: 1746893 - RNA, 19 nt, Artificial Sequence
  Description of Artificial Sequence: Synthetic oligonucleotide
uccucagggagaggagaac

SEQ ID NO: 1746894 - RNA, 19 nt, Artificial Sequence
  Description of Artificial Sequence: Synthetic oligonucleotide
augcuagaaagcacuuuau

SEQ ID NO: 1746895 - RNA, 19 nt, Artificial Sequence
  Description of Artificial Sequence: Synthetic oligonucleotide
gaugcucaugggugagaaa

SEQ ID NO: 1746896 - RNA, 19 nt, Artificial Sequence
  Description of Artificial Sequence: Synthetic oligonucleotide
cuucacccaguauuuucaa

SEQ ID NO: 1746897 - RNA, 19 nt, Artificial Sequence
  Description of Artificial Sequence: Synthetic oligonucleotide
gaaucccauuggucuuaac

SEQ ID NO: 1746898 - RNA, 19 nt, Artificial Sequence
  Description of Artificial Sequence: Synthetic oligonucleotide
agggccgaggagaugcuca

SEQ ID NO: 1746899 - RNA, 19 nt, Artificial Sequence
  Description of Artificial Sequence: Synthetic oligonucleotide
gaggagaaccggccacaga

SEQ ID NO: 1746900 - RNA, 19 nt, Artificial Sequence
  Description of Artificial Sequence: Synthetic oligonucleotide
ggagaugcucaugggugag

SEQ ID NO: 1746901 - RNA, 19 nt, Artificial Sequence
  Description of Artificial Sequence: Synthetic oligonucleotide
ccagguggacaucuccacc

SEQ ID NO: 1746902 - RNA, 19 nt, Artificial Sequence
  Description of Artificial Sequence: Synthetic oligonucleotide
cauggccagggccgaggag

SEQ ID NO: 1746903 - RNA, 19 nt, Artificial Sequence
  Description of Artificial Sequence: Synthetic oligonucleotide
gagaugcucaugggugaga

SEQ ID NO: 1746904 - RNA, 19 nt, Artificial Sequence
  Description of Artificial Sequence: Synthetic oligonucleotide
aaccggccacagaacagaa

SEQ ID NO: 1746905 - RNA, 19 nt, Artificial Sequence
  Description of Artificial Sequence: Synthetic oligonucleotide
accuccauugccgcugcau

SEQ ID NO: 1746906 - RNA, 19 nt, Artificial Sequence
  Description of Artificial Sequence: Synthetic oligonucleotide
ccuuuccucagggagagga

SEQ ID NO: 1746907 - RNA, 19 nt, Artificial Sequence
  Description of Artificial Sequence: Synthetic oligonucleotide
uaaggucacuugggucaca

SEQ ID NO: 1746908 - RNA, 19 nt, Artificial Sequence
  Description of Artificial Sequence: Synthetic oligonucleotide
agaaucccauuggucuuaa

SEQ ID NO: 1746909 - RNA, 19 nt, Artificial Sequence
  Description of Artificial Sequence: Synthetic oligonucleotide
ccgaggagaugcucauggg

SEQ ID NO: 1746910 - RNA, 19 nt, Artificial Sequence
  Description of Artificial Sequence: Synthetic oligonucleotide
cugucuucacccaguauuu

SEQ ID NO: 1746911 - RNA, 19 nt, Artificial Sequence
  Description of Artificial Sequence: Synthetic oligonucleotide
gggagaggagaaccggcca

SEQ ID NO: 1746912 - RNA, 19 nt, Artificial Sequence
  Description of Artificial Sequence: Synthetic oligonucleotide
gggucacaggcaaaccaug

SEQ ID NO: 1746913 - RNA, 19 nt, Artificial Sequence
  Description of Artificial Sequence: Synthetic oligonucleotide
gggacggacaucgcacacc

SEQ ID NO: 1746914 - RNA, 19 nt, Artificial Sequence
  Description of Artificial Sequence: Synthetic oligonucleotide
gcugaaugaagaagaggaa

SEQ ID NO: 1746915 - RNA, 19 nt, Artificial Sequence
  Description of Artificial Sequence: Synthetic oligonucleotide
agacuggguaaaagaccca

SEQ ID NO: 1746916 - RNA, 19 nt, Artificial Sequence
  Description of Artificial Sequence: Synthetic oligonucleotide
ggacggacaucgcacaccu

SEQ ID NO: 1746917 - RNA, 19 nt, Artificial Sequence
  Description of Artificial Sequence: Synthetic oligonucleotide
cccagguggacaucuccac

SEQ ID NO: 1746918 - RNA, 19 nt, Artificial Sequence
  Description of Artificial Sequence: Synthetic oligonucleotide
ggaaggggugaucggcaca

SEQ ID NO: 1746919 - RNA, 19 nt, Artificial Sequence
  Description of Artificial Sequence: Synthetic oligonucleotide
cacagaacagaaucccauu

SEQ ID NO: 1746920 - RNA, 19 nt, Artificial Sequence
  Description of Artificial Sequence: Synthetic oligonucleotide
aaggggugaucggcacaga

SEQ ID NO: 1746921 - RNA, 19 nt, Artificial Sequence
  Description of Artificial Sequence: Synthetic oligonucleotide
ggacaucgcacaccucauc

SEQ ID NO: 1746922 - RNA, 19 nt, Artificial Sequence
  Description of Artificial Sequence: Synthetic oligonucleotide
ggagaaccggccacagaac

SEQ ID NO: 1746923 - RNA, 19 nt, Artificial Sequence
  Description of Artificial Sequence: Synthetic oligonucleotide
gcaaaggugccauuugcuu

SEQ ID NO: 1746924 - RNA, 19 nt, Artificial Sequence
  Description of Artificial Sequence: Synthetic oligonucleotide
cggccacagaacagaaucc

SEQ ID NO: 1746925 - RNA, 19 nt, Artificial Sequence
  Description of Artificial Sequence: Synthetic oligonucleotide
gcauuuauccaaagagagu

SEQ ID NO: 1746926 - RNA, 19 nt, Artificial Sequence
  Description of Artificial Sequence: Synthetic oligonucleotide
agaccauggccagggccga

SEQ ID NO: 1746927 - RNA, 19 nt, Artificial Sequence
  Description of Artificial Sequence: Synthetic oligonucleotide
ggcaaaccauggagacugg

SEQ ID NO: 1746928 - RNA, 19 nt, Artificial Sequence
  Description of Artificial Sequence: Synthetic oligonucleotide
ggggacggacaucgcacac

SEQ ID NO: 1746929 - RNA, 19 nt, Artificial Sequence
  Description of Artificial Sequence: Synthetic oligonucleotide
cagaaucccauuggucuua

SEQ ID NO: 1746930 - RNA, 19 nt, Artificial Sequence
  Description of Artificial Sequence: Synthetic oligonucleotide
ccaguauuuucaaaagguu

SEQ ID NO: 1746931 - RNA, 19 nt, Artificial Sequence
  Description of Artificial Sequence: Synthetic oligonucleotide
gaccauggccagggccgag

SEQ ID NO: 1746932 - RNA, 19 nt, Artificial Sequence
  Description of Artificial Sequence: Synthetic oligonucleotide
cuccauugccgcugcauuu

SEQ ID NO: 1746933 - RNA, 19 nt, Artificial Sequence
  Description of Artificial Sequence: Synthetic oligonucleotide
cacaccucaucaugauaau

SEQ ID NO: 1746934 - RNA, 19 nt, Artificial Sequence
  Description of Artificial Sequence: Synthetic oligonucleotide
ccacagaacagaaucccau

SEQ ID NO: 1746935 - RNA, 19 nt, Artificial Sequence
  Description of Artificial Sequence: Synthetic oligonucleotide
cacuugggucacaggcaaa

SEQ ID NO: 1746936 - RNA, 19 nt, Artificial Sequence
  Description of Artificial Sequence: Synthetic oligonucleotide
cagggccgaggagaugcuc

SEQ ID NO: 1746937 - RNA, 19 nt, Artificial Sequence
  Description of Artificial Sequence: Synthetic oligonucleotide
accggccacagaacagaau

SEQ ID NO: 1746938 - RNA, 19 nt, Artificial Sequence
  Description of Artificial Sequence: Synthetic oligonucleotide
gcccagguggacaucucca

SEQ ID NO: 1746939 - RNA, 19 nt, Artificial Sequence
  Description of Artificial Sequence: Synthetic oligonucleotide
caggcaaaccauggagacu

SEQ ID NO: 1746940 - RNA, 19 nt, Artificial Sequence
  Description of Artificial Sequence: Synthetic oligonucleotide
cgcugcauuuauccaaaga

SEQ ID NO: 1746941 - RNA, 19 nt, Artificial Sequence
  Description of Artificial Sequence: Synthetic oligonucleotide
gccgcugcauuuauccaaa

SEQ ID NO: 1746942 - RNA, 19 nt, Artificial Sequence
  Description of Artificial Sequence: Synthetic oligonucleotide
gacggacaucgcacaccuc

SEQ ID NO: 1746943 - RNA, 19 nt, Artificial Sequence
  Description of Artificial Sequence: Synthetic oligonucleotide
ccgcugcauuuauccaaag

SEQ ID NO: 1746944 - RNA, 19 nt, Artificial Sequence
  Description of Artificial Sequence: Synthetic oligonucleotide
ccauuggucuuaacaugcu

SEQ ID NO: 1746945 - RNA, 19 nt, Artificial Sequence
  Description of Artificial Sequence: Synthetic oligonucleotide
cgaggagaugcucaugggu

SEQ ID NO: 1746946 - RNA, 19 nt, Artificial Sequence
  Description of Artificial Sequence: Synthetic oligonucleotide
ggacaucuccaccuccauu

SEQ ID NO: 1746947 - RNA, 19 nt, Artificial Sequence
  Description of Artificial Sequence: Synthetic oligonucleotide
ggaugcuagaaagcacuuu

SEQ ID NO: 1746948 - RNA, 19 nt, Artificial Sequence
  Description of Artificial Sequence: Synthetic oligonucleotide
ggccgaggagaugcucaug

SEQ ID NO: 1746949 - RNA, 19 nt, Artificial Sequence
  Description of Artificial Sequence: Synthetic oligonucleotide
ccauuugcuucccgaagau

SEQ ID NO: 1746950 - RNA, 19 nt, Artificial Sequence
  Description of Artificial Sequence: Synthetic oligonucleotide
cuccaccuccauugccgcu

SEQ ID NO: 1746951 - RNA, 19 nt, Artificial Sequence
  Description of Artificial Sequence: Synthetic oligonucleotide
gggaugcuagaaagcacuu

SEQ ID NO: 1746952 - RNA, 19 nt, Artificial Sequence
  Description of Artificial Sequence: Synthetic oligonucleotide
gcagccucugugcccuccu

SEQ ID NO: 1746953 - RNA, 19 nt, Artificial Sequence
  Description of Artificial Sequence: Synthetic oligonucleotide
gggccgaggagaugcucau

SEQ ID NO: 1746954 - RNA, 19 nt, Artificial Sequence
  Description of Artificial Sequence: Synthetic oligonucleotide
ccuccauugccgcugcauu

SEQ ID NO: 1746955 - RNA, 19 nt, Artificial Sequence
  Description of Artificial Sequence: Synthetic oligonucleotide
ccauggagacuggguaaaa

SEQ ID NO: 1746956 - RNA, 19 nt, Artificial Sequence
  Description of Artificial Sequence: Synthetic oligonucleotide
cgcacaccucaucaugaua

SEQ ID NO: 1746957 - RNA, 19 nt, Artificial Sequence
  Description of Artificial Sequence: Synthetic oligonucleotide
gcuugcaguguugcccuuu

SEQ ID NO: 1746958 - RNA, 19 nt, Artificial Sequence
  Description of Artificial Sequence: Synthetic oligonucleotide
ccauugccgcugcauuuau

SEQ ID NO: 1746959 - RNA, 19 nt, Artificial Sequence
  Description of Artificial Sequence: Synthetic oligonucleotide
cggacaucgcacaccucau

SEQ ID NO: 1746960 - RNA, 19 nt, Artificial Sequence
  Description of Artificial Sequence: Synthetic oligonucleotide
ccagggccgaggagaugcu

SEQ ID NO: 1746961 - RNA, 19 nt, Artificial Sequence
  Description of Artificial Sequence: Synthetic oligonucleotide
ggcuugcaguguugcccuu

SEQ ID NO: 1746962 - RNA, 19 nt, Artificial Sequence
  Description of Artificial Sequence: Synthetic oligonucleotide
uguagcacaaccccuaacg

SEQ ID NO: 1746963 - RNA, 19 nt, Artificial Sequence
  Description of Artificial Sequence: Synthetic oligonucleotide
uuugagaaugucaagcucc

SEQ ID NO: 1746964 - RNA, 19 nt, Artificial Sequence
  Description of Artificial Sequence: Synthetic oligonucleotide
uuucuuugaacuuugcucc

SEQ ID NO: 1746965 - RNA, 19 nt, Artificial Sequence
  Description of Artificial Sequence: Synthetic oligonucleotide
ugucuuugagaaaagaccc

SEQ ID NO: 1746966 - RNA, 19 nt, Artificial Sequence
  Description of Artificial Sequence: Synthetic oligonucleotide
ugggagauggcuuuaaagg

SEQ ID NO: 1746967 - RNA, 19 nt, Artificial Sequence
  Description of Artificial Sequence: Synthetic oligonucleotide
uaucgcuucaacuaggugc

SEQ ID NO: 1746968 - RNA, 19 nt, Artificial Sequence
  Description of Artificial Sequence: Synthetic oligonucleotide
aaugagaacauugucgcuc

SEQ ID NO: 1746969 - RNA, 19 nt, Artificial Sequence
  Description of Artificial Sequence: Synthetic oligonucleotide
acugacuucaucaagacuc

SEQ ID NO: 1746970 - RNA, 19 nt, Artificial Sequence
  Description of Artificial Sequence: Synthetic oligonucleotide
gaaucucuaacucuggagc

SEQ ID NO: 1746971 - RNA, 19 nt, Artificial Sequence
  Description of Artificial Sequence: Synthetic oligonucleotide
agucuugugccacagugcc

SEQ ID NO: 1746972 - RNA, 19 nt, Artificial Sequence
  Description of Artificial Sequence: Synthetic oligonucleotide
aacccugcaaggcaccucc

SEQ ID NO: 1746973 - RNA, 19 nt, Artificial Sequence
  Description of Artificial Sequence: Synthetic oligonucleotide
ucuuuaucgcuucaacuag

SEQ ID NO: 1746974 - RNA, 19 nt, Artificial Sequence
  Description of Artificial Sequence: Synthetic oligonucleotide
agcauaaggguugagcucc

SEQ ID NO: 1746975 - RNA, 19 nt, Artificial Sequence
  Description of Artificial Sequence: Synthetic oligonucleotide
ugacucuacacccugggag

SEQ ID NO: 1746976 - RNA, 19 nt, Artificial Sequence
  Description of Artificial Sequence: Synthetic oligonucleotide
aaaggccgcagucuugccc

SEQ ID NO: 1746977 - RNA, 19 nt, Artificial Sequence
  Description of Artificial Sequence: Synthetic oligonucleotide
ugaacuuugcuccagcaaa

SEQ ID NO: 1746978 - RNA, 19 nt, Artificial Sequence
  Description of Artificial Sequence: Synthetic oligonucleotide
augcguagcaccuuguccg

SEQ ID NO: 1746979 - RNA, 19 nt, Artificial Sequence
  Description of Artificial Sequence: Synthetic oligonucleotide
ucagucuugugccacagug

SEQ ID NO: 1746980 - RNA, 19 nt, Artificial Sequence
  Description of Artificial Sequence: Synthetic oligonucleotide
auaaggguugagcuccucc

SEQ ID NO: 1746981 - RNA, 19 nt, Artificial Sequence
  Description of Artificial Sequence: Synthetic oligonucleotide
aacacuuugcuuucuuuga

SEQ ID NO: 1746982 - RNA, 19 nt, Artificial Sequence
  Description of Artificial Sequence: Synthetic oligonucleotide
uggauacugacucugcuga

SEQ ID NO: 1746983 - RNA, 19 nt, Artificial Sequence
  Description of Artificial Sequence: Synthetic oligonucleotide
cacacugucgaagaaagcg

SEQ ID NO: 1746984 - RNA, 19 nt, Artificial Sequence
  Description of Artificial Sequence: Synthetic oligonucleotide
uucuuuaucgcuucaacua

SEQ ID NO: 1746985 - RNA, 19 nt, Artificial Sequence
  Description of Artificial Sequence: Synthetic oligonucleotide
ugcucgaaugagaacauug

SEQ ID NO: 1746986 - RNA, 19 nt, Artificial Sequence
  Description of Artificial Sequence: Synthetic oligonucleotide
aaucucuaacucuggagca

SEQ ID NO: 1746987 - RNA, 19 nt, Artificial Sequence
  Description of Artificial Sequence: Synthetic oligonucleotide
ucaguuaaggcccgggaug

SEQ ID NO: 1746988 - RNA, 19 nt, Artificial Sequence
  Description of Artificial Sequence: Synthetic oligonucleotide
uuugaaguccuuccacugc

SEQ ID NO: 1746989 - RNA, 19 nt, Artificial Sequence
  Description of Artificial Sequence: Synthetic oligonucleotide
gaaaucauggccucuagua

SEQ ID NO: 1746990 - RNA, 19 nt, Artificial Sequence
  Description of Artificial Sequence: Synthetic oligonucleotide
gaaggugacgaucagcaca

SEQ ID NO: 1746991 - RNA, 19 nt, Artificial Sequence
  Description of Artificial Sequence: Synthetic oligonucleotide
cuuacugacuucaucaaga

SEQ ID NO: 1746992 - RNA, 19 nt, Artificial Sequence
  Description of Artificial Sequence: Synthetic oligonucleotide
uuaaggcccgggaugcucg

SEQ ID NO: 1746993 - RNA, 19 nt, Artificial Sequence
  Description of Artificial Sequence: Synthetic oligonucleotide
uagaugccagccaucauug

SEQ ID NO: 1746994 - RNA, 19 nt, Artificial Sequence
  Description of Artificial Sequence: Synthetic oligonucleotide
uccucguuagccucgaaca

SEQ ID NO: 1746995 - RNA, 19 nt, Artificial Sequence
  Description of Artificial Sequence: Synthetic oligonucleotide
ucuaguauguuggggauga

SEQ ID NO: 1746996 - RNA, 19 nt, Artificial Sequence
  Description of Artificial Sequence: Synthetic oligonucleotide
ugaucuuccggccaagguc

SEQ ID NO: 1746997 - RNA, 19 nt, Artificial Sequence
  Description of Artificial Sequence: Synthetic oligonucleotide
aaccccuaacgcuuccucg

SEQ ID NO: 1746998 - RNA, 19 nt, Artificial Sequence
  Description of Artificial Sequence: Synthetic oligonucleotide
cagaguaucuguucugugc

SEQ ID NO: 1746999 - RNA, 19 nt, Artificial Sequence
  Description of Artificial Sequence: Synthetic oligonucleotide
gauagggugggccagcuga

SEQ ID NO: 1747000 - RNA, 19 nt, Artificial Sequence
  Description of Artificial Sequence: Synthetic oligonucleotide
agaaugucaagcuccccag

SEQ ID NO: 1747001 - RNA, 19 nt, Artificial Sequence
  Description of Artificial Sequence: Synthetic oligonucleotide
uuuaucgcuucaacuaggu

SEQ ID NO: 1747002 - RNA, 19 nt, Artificial Sequence
  Description of Artificial Sequence: Synthetic oligonucleotide
cuuuaucgcuucaacuagg

SEQ ID NO: 1747003 - RNA, 19 nt, Artificial Sequence
  Description of Artificial Sequence: Synthetic oligonucleotide
uagguagcuucauagcacc

SEQ ID NO: 1747004 - RNA, 19 nt, Artificial Sequence
  Description of Artificial Sequence: Synthetic oligonucleotide
aacgcuuccucguuagccu

SEQ ID NO: 1747005 - RNA, 19 nt, Artificial Sequence
  Description of Artificial Sequence: Synthetic oligonucleotide
gagaaugucaagcucccca

SEQ ID NO: 1747006 - RNA, 19 nt, Artificial Sequence
  Description of Artificial Sequence: Synthetic oligonucleotide
guuggguccacucucagga

SEQ ID NO: 1747007 - RNA, 19 nt, Artificial Sequence
  Description of Artificial Sequence: Synthetic oligonucleotide
uucuuauccagcugguuuc

SEQ ID NO: 1747008 - RNA, 19 nt, Artificial Sequence
  Description of Artificial Sequence: Synthetic oligonucleotide
ugucacucucacacugucg

SEQ ID NO: 1747009 - RNA, 19 nt, Artificial Sequence
  Description of Artificial Sequence: Synthetic oligonucleotide
aucgcuucaacuaggugcg

SEQ ID NO: 1747010 - RNA, 19 nt, Artificial Sequence
  Description of Artificial Sequence: Synthetic oligonucleotide
ugugccacagugccucacg

SEQ ID NO: 1747011 - RNA, 19 nt, Artificial Sequence
  Description of Artificial Sequence: Synthetic oligonucleotide
uggaacuggaggcccagag

SEQ ID NO: 1747012 - RNA, 19 nt, Artificial Sequence
  Description of Artificial Sequence: Synthetic oligonucleotide
auacugacucugcugacug

SEQ ID NO: 1747013 - RNA, 19 nt, Artificial Sequence
  Description of Artificial Sequence: Synthetic oligonucleotide
uuacugacuucaucaagac

SEQ ID NO: 1747014 - RNA, 19 nt, Artificial Sequence
  Description of Artificial Sequence: Synthetic oligonucleotide
cugggagauggcuuuaaag

SEQ ID NO: 1747015 - RNA, 19 nt, Artificial Sequence
  Description of Artificial Sequence: Synthetic oligonucleotide
acacguacagcaugcguag

SEQ ID NO: 1747016 - RNA, 19 nt, Artificial Sequence
  Description of Artificial Sequence: Synthetic oligonucleotide
cuggggaacaucccaaccc

SEQ ID NO: 1747017 - RNA, 19 nt, Artificial Sequence
  Description of Artificial Sequence: Synthetic oligonucleotide
ugugugucccaguacacuc

SEQ ID NO: 1747018 - RNA, 19 nt, Artificial Sequence
  Description of Artificial Sequence: Synthetic oligonucleotide
aucucaaagaagcgguuga

SEQ ID NO: 1747019 - RNA, 19 nt, Artificial Sequence
  Description of Artificial Sequence: Synthetic oligonucleotide
augccagccaucauugccc

SEQ ID NO: 1747020 - RNA, 19 nt, Artificial Sequence
  Description of Artificial Sequence: Synthetic oligonucleotide
ucuggggaacaucccaacc

SEQ ID NO: 1747021 - RNA, 19 nt, Artificial Sequence
  Description of Artificial Sequence: Synthetic oligonucleotide
gccaaggucacucuuacug

SEQ ID NO: 1747022 - RNA, 19 nt, Artificial Sequence
  Description of Artificial Sequence: Synthetic oligonucleotide
agguccacauugcugaugu

SEQ ID NO: 1747023 - RNA, 19 nt, Artificial Sequence
  Description of Artificial Sequence: Synthetic oligonucleotide
uaacgcuuccucguuagcc

SEQ ID NO: 1747024 - RNA, 19 nt, Artificial Sequence
  Description of Artificial Sequence: Synthetic oligonucleotide
gucacccucgaccaccucg

SEQ ID NO: 1747025 - RNA, 19 nt, Artificial Sequence
  Description of Artificial Sequence: Synthetic oligonucleotide
uccuggucucugcagagug

SEQ ID NO: 1747026 - RNA, 19 nt, Artificial Sequence
  Description of Artificial Sequence: Synthetic oligonucleotide
ugucccgcgaaucucuaac

SEQ ID NO: 1747027 - RNA, 19 nt, Artificial Sequence
  Description of Artificial Sequence: Synthetic oligonucleotide
uuuccggagccgcucaggc

SEQ ID NO: 1747028 - RNA, 19 nt, Artificial Sequence
  Description of Artificial Sequence: Synthetic oligonucleotide
uucacugacucuacacccu

SEQ ID NO: 1747029 - RNA, 19 nt, Artificial Sequence
  Description of Artificial Sequence: Synthetic oligonucleotide
uccagcccuuuucuuaucc

SEQ ID NO: 1747030 - RNA, 19 nt, Artificial Sequence
  Description of Artificial Sequence: Synthetic oligonucleotide
ugucaguuaaggcccggga

SEQ ID NO: 1747031 - RNA, 19 nt, Artificial Sequence
  Description of Artificial Sequence: Synthetic oligonucleotide
uuaucgcuucaacuaggug

SEQ ID NO: 1747032 - RNA, 19 nt, Artificial Sequence
  Description of Artificial Sequence: Synthetic oligonucleotide
uagcacaaccccuaacgcu

SEQ ID NO: 1747033 - RNA, 19 nt, Artificial Sequence
  Description of Artificial Sequence: Synthetic oligonucleotide
ucuaucucugucccgcgaa

SEQ ID NO: 1747034 - RNA, 19 nt, Artificial Sequence
  Description of Artificial Sequence: Synthetic oligonucleotide
ggccuuuugacacugccag

SEQ ID NO: 1747035 - RNA, 19 nt, Artificial Sequence
  Description of Artificial Sequence: Synthetic oligonucleotide
augagaacauugucgcucu

SEQ ID NO: 1747036 - RNA, 19 nt, Artificial Sequence
  Description of Artificial Sequence: Synthetic oligonucleotide
gucacucucacacugucga

SEQ ID NO: 1747037 - RNA, 19 nt, Artificial Sequence
  Description of Artificial Sequence: Synthetic oligonucleotide
cuuugaacuuugcuccagc

SEQ ID NO: 1747038 - RNA, 19 nt, Artificial Sequence
  Description of Artificial Sequence: Synthetic oligonucleotide
uuccucguuagccucgaac

SEQ ID NO: 1747039 - RNA, 19 nt, Artificial Sequence
  Description of Artificial Sequence: Synthetic oligonucleotide
gaagcgguugaacaccaca

SEQ ID NO: 1747040 - RNA, 19 nt, Artificial Sequence
  Description of Artificial Sequence: Synthetic oligonucleotide
ucaaagguuggguccacuc

SEQ ID NO: 1747041 - RNA, 19 nt, Artificial Sequence
  Description of Artificial Sequence: Synthetic oligonucleotide
cugucgaagaaagcggucc

SEQ ID NO: 1747042 - RNA, 19 nt, Artificial Sequence
  Description of Artificial Sequence: Synthetic oligonucleotide
acacugucgaagaaagcgg

SEQ ID NO: 1747043 - RNA, 19 nt, Artificial Sequence
  Description of Artificial Sequence: Synthetic oligonucleotide
agaaaucauggccucuagu

SEQ ID NO: 1747044 - RNA, 19 nt, Artificial Sequence
  Description of Artificial Sequence: Synthetic oligonucleotide
cuugaucaccaucaccaac

SEQ ID NO: 1747045 - RNA, 19 nt, Artificial Sequence
  Description of Artificial Sequence: Synthetic oligonucleotide
ucagaguaucuguucugug

SEQ ID NO: 1747046 - RNA, 19 nt, Artificial Sequence
  Description of Artificial Sequence: Synthetic oligonucleotide
ugucgaagaaagcgguccu

SEQ ID NO: 1747047 - RNA, 19 nt, Artificial Sequence
  Description of Artificial Sequence: Synthetic oligonucleotide
agagugcccacacguacag

SEQ ID NO: 1747048 - RNA, 19 nt, Artificial Sequence
  Description of Artificial Sequence: Synthetic oligonucleotide
uaguauguuggggaugaug

SEQ ID NO: 1747049 - RNA, 19 nt, Artificial Sequence
  Description of Artificial Sequence: Synthetic oligonucleotide
uucauagcaccagucuuug

SEQ ID NO: 1747050 - RNA, 19 nt, Artificial Sequence
  Description of Artificial Sequence: Synthetic oligonucleotide
gugacgaucagcacagggc

SEQ ID NO: 1747051 - RNA, 19 nt, Artificial Sequence
  Description of Artificial Sequence: Synthetic oligonucleotide
gacucuacacccugggaga

SEQ ID NO: 1747052 - RNA, 19 nt, Artificial Sequence
  Description of Artificial Sequence: Synthetic oligonucleotide
ugcugguaccacuuggagu

SEQ ID NO: 1747053 - RNA, 19 nt, Artificial Sequence
  Description of Artificial Sequence: Synthetic oligonucleotide
cucgaaugagaacauuguc

SEQ ID NO: 1747054 - RNA, 19 nt, Artificial Sequence
  Description of Artificial Sequence: Synthetic oligonucleotide
ucacccucgaccaccucgc

SEQ ID NO: 1747055 - RNA, 19 nt, Artificial Sequence
  Description of Artificial Sequence: Synthetic oligonucleotide
acucucacacugucgaaga

SEQ ID NO: 1747056 - RNA, 19 nt, Artificial Sequence
  Description of Artificial Sequence: Synthetic oligonucleotide
cuuugucaguuaaggcccg

SEQ ID NO: 1747057 - RNA, 19 nt, Artificial Sequence
  Description of Artificial Sequence: Synthetic oligonucleotide
ggugacgaucagcacaggg

SEQ ID NO: 1747058 - RNA, 19 nt, Artificial Sequence
  Description of Artificial Sequence: Synthetic oligonucleotide
ggaugcucgaaugagaaca

SEQ ID NO: 1747059 - RNA, 19 nt, Artificial Sequence
  Description of Artificial Sequence: Synthetic oligonucleotide
ucucuaacucuggagcagc

SEQ ID NO: 1747060 - RNA, 19 nt, Artificial Sequence
  Description of Artificial Sequence: Synthetic oligonucleotide
agcccuuuucuuauccagc

SEQ ID NO: 1747061 - RNA, 19 nt, Artificial Sequence
  Description of Artificial Sequence: Synthetic oligonucleotide
uucuuugaacuuugcucca

SEQ ID NO: 1747062 - RNA, 19 nt, Artificial Sequence
  Description of Artificial Sequence: Synthetic oligonucleotide
acaucccaacccugcaagg

SEQ ID NO: 1747063 - RNA, 19 nt, Artificial Sequence
  Description of Artificial Sequence: Synthetic oligonucleotide
cacauugcugauguccagg

SEQ ID NO: 1747064 - RNA, 19 nt, Artificial Sequence
  Description of Artificial Sequence: Synthetic oligonucleotide
agcaaacuccguccuuuuc

SEQ ID NO: 1747065 - RNA, 19 nt, Artificial Sequence
  Description of Artificial Sequence: Synthetic oligonucleotide
agcagccuagaugccagcc

SEQ ID NO: 1747066 - RNA, 19 nt, Artificial Sequence
  Description of Artificial Sequence: Synthetic oligonucleotide
cugacugcuuggcuguccg

SEQ ID NO: 1747067 - RNA, 19 nt, Artificial Sequence
  Description of Artificial Sequence: Synthetic oligonucleotide
ucgccuuugggguucuuga

SEQ ID NO: 1747068 - RNA, 19 nt, Artificial Sequence
  Description of Artificial Sequence: Synthetic oligonucleotide
ucucuaucucugucccgcg

SEQ ID NO: 1747069 - RNA, 19 nt, Artificial Sequence
  Description of Artificial Sequence: Synthetic oligonucleotide
ugcaaggcaccuccagccc

SEQ ID NO: 1747070 - RNA, 19 nt, Artificial Sequence
  Description of Artificial Sequence: Synthetic oligonucleotide
guagguagcuucauagcac

SEQ ID NO: 1747071 - RNA, 19 nt, Artificial Sequence
  Description of Artificial Sequence: Synthetic oligonucleotide
ugcguagcaccuuguccgg

SEQ ID NO: 1747072 - RNA, 19 nt, Artificial Sequence
  Description of Artificial Sequence: Synthetic oligonucleotide
acguacagcaugcguagca

SEQ ID NO: 1747073 - RNA, 19 nt, Artificial Sequence
  Description of Artificial Sequence: Synthetic oligonucleotide
ucguuagccucgaacacuu

SEQ ID NO: 1747074 - RNA, 19 nt, Artificial Sequence
  Description of Artificial Sequence: Synthetic oligonucleotide
gaggcugagauguccagaa

SEQ ID NO: 1747075 - RNA, 19 nt, Artificial Sequence
  Description of Artificial Sequence: Synthetic oligonucleotide
ugggucuugugucagucuu

SEQ ID NO: 1747076 - RNA, 19 nt, Artificial Sequence
  Description of Artificial Sequence: Synthetic oligonucleotide
aacuuugcuccagcaaacu

SEQ ID NO: 1747077 - RNA, 19 nt, Artificial Sequence
  Description of Artificial Sequence: Synthetic oligonucleotide
ugcccacacguacagcaug

SEQ ID NO: 1747078 - RNA, 19 nt, Artificial Sequence
  Description of Artificial Sequence: Synthetic oligonucleotide
guugaacaccacauuguug

SEQ ID NO: 1747079 - RNA, 19 nt, Artificial Sequence
  Description of Artificial Sequence: Synthetic oligonucleotide
uccgggucacccucgacca

SEQ ID NO: 1747080 - RNA, 19 nt, Artificial Sequence
  Description of Artificial Sequence: Synthetic oligonucleotide
ucacacugucgaagaaagc

SEQ ID NO: 1747081 - RNA, 19 nt, Artificial Sequence
  Description of Artificial Sequence: Synthetic oligonucleotide
cagcccuuuucuuauccag

SEQ ID NO: 1747082 - RNA, 19 nt, Artificial Sequence
  Description of Artificial Sequence: Synthetic oligonucleotide
auggcuuuaaaggccgcag

SEQ ID NO: 1747083 - RNA, 19 nt, Artificial Sequence
  Description of Artificial Sequence: Synthetic oligonucleotide
ccuuguguagcacaacccc

SEQ ID NO: 1747084 - RNA, 19 nt, Artificial Sequence
  Description of Artificial Sequence: Synthetic oligonucleotide
uuuuccggagccgcucagg

SEQ ID NO: 1747085 - RNA, 19 nt, Artificial Sequence
  Description of Artificial Sequence: Synthetic oligonucleotide
agacucucuuucacugucc

SEQ ID NO: 1747086 - RNA, 19 nt, Artificial Sequence
  Description of Artificial Sequence: Synthetic oligonucleotide
uguguagcacaaccccuaa

SEQ ID NO: 1747087 - RNA, 19 nt, Artificial Sequence
  Description of Artificial Sequence: Synthetic oligonucleotide
caguuaaggcccgggaugc

SEQ ID NO: 1747088 - RNA, 19 nt, Artificial Sequence
  Description of Artificial Sequence: Synthetic oligonucleotide
aucucuaacucuggagcag

SEQ ID NO: 1747089 - RNA, 19 nt, Artificial Sequence
  Description of Artificial Sequence: Synthetic oligonucleotide
aucccaacccugcaaggca

SEQ ID NO: 1747090 - RNA, 19 nt, Artificial Sequence
  Description of Artificial Sequence: Synthetic oligonucleotide
ugugucagucuugugccac

SEQ ID NO: 1747091 - RNA, 19 nt, Artificial Sequence
  Description of Artificial Sequence: Synthetic oligonucleotide
acuccguccuuuuccggag

SEQ ID NO: 1747092 - RNA, 19 nt, Artificial Sequence
  Description of Artificial Sequence: Synthetic oligonucleotide
gauccgggaguggaacugg

SEQ ID NO: 1747093 - RNA, 19 nt, Artificial Sequence
  Description of Artificial Sequence: Synthetic oligonucleotide
guagggaccuguguguccc

SEQ ID NO: 1747094 - RNA, 19 nt, Artificial Sequence
  Description of Artificial Sequence: Synthetic oligonucleotide
uccguccuuuuccggagcc

SEQ ID NO: 1747095 - RNA, 19 nt, Artificial Sequence
  Description of Artificial Sequence: Synthetic oligonucleotide
gcgguugaacaccacauug

SEQ ID NO: 1747096 - RNA, 19 nt, Artificial Sequence
  Description of Artificial Sequence: Synthetic oligonucleotide
aagcgguugaacaccacau

SEQ ID NO: 1747097 - RNA, 19 nt, Artificial Sequence
  Description of Artificial Sequence: Synthetic oligonucleotide
cacucucacacugucgaag

SEQ ID NO: 1747098 - RNA, 19 nt, Artificial Sequence
  Description of Artificial Sequence: Synthetic oligonucleotide
acacuuugcuuucuuugaa

SEQ ID NO: 1747099 - RNA, 19 nt, Artificial Sequence
  Description of Artificial Sequence: Synthetic oligonucleotide
gucuuugagaaaagacccc

SEQ ID NO: 1747100 - RNA, 19 nt, Artificial Sequence
  Description of Artificial Sequence: Synthetic oligonucleotide
cucuaacucuggagcagcc

SEQ ID NO: 1747101 - RNA, 19 nt, Artificial Sequence
  Description of Artificial Sequence: Synthetic oligonucleotide
cugacuguagguagcuuca

SEQ ID NO: 1747102 - RNA, 19 nt, Artificial Sequence
  Description of Artificial Sequence: Synthetic oligonucleotide
gagaacauugucgcucuca

SEQ ID NO: 1747103 - RNA, 19 nt, Artificial Sequence
  Description of Artificial Sequence: Synthetic oligonucleotide
uggguccacucucaggauc

SEQ ID NO: 1747104 - RNA, 19 nt, Artificial Sequence
  Description of Artificial Sequence: Synthetic oligonucleotide
uccgggaguggaacuggag

SEQ ID NO: 1747105 - RNA, 19 nt, Artificial Sequence
  Description of Artificial Sequence: Synthetic oligonucleotide
cacacguacagcaugcgua

SEQ ID NO: 1747106 - RNA, 19 nt, Artificial Sequence
  Description of Artificial Sequence: Synthetic oligonucleotide
ucuuauccagcugguuuca

SEQ ID NO: 1747107 - RNA, 19 nt, Artificial Sequence
  Description of Artificial Sequence: Synthetic oligonucleotide
gcaccagucuuugagaaug

SEQ ID NO: 1747108 - RNA, 19 nt, Artificial Sequence
  Description of Artificial Sequence: Synthetic oligonucleotide
ucccgcgaaucucuaacuc

SEQ ID NO: 1747109 - RNA, 19 nt, Artificial Sequence
  Description of Artificial Sequence: Synthetic oligonucleotide
cuuguccgggucacccucg

SEQ ID NO: 1747110 - RNA, 19 nt, Artificial Sequence
  Description of Artificial Sequence: Synthetic oligonucleotide
agcgguccuugucaaaggu

SEQ ID NO: 1747111 - RNA, 19 nt, Artificial Sequence
  Description of Artificial Sequence: Synthetic oligonucleotide
cagcauaaggguugagcuc

SEQ ID NO: 1747112 - RNA, 19 nt, Artificial Sequence
  Description of Artificial Sequence: Synthetic oligonucleotide
cacucuuacugacuucauc

SEQ ID NO: 1747113 - RNA, 19 nt, Artificial Sequence
  Description of Artificial Sequence: Synthetic oligonucleotide
uguccaggauccgggagug

SEQ ID NO: 1747114 - RNA, 19 nt, Artificial Sequence
  Description of Artificial Sequence: Synthetic oligonucleotide
ucaacuaggugcgcacagu

SEQ ID NO: 1747115 - RNA, 19 nt, Artificial Sequence
  Description of Artificial Sequence: Synthetic oligonucleotide
uccccaagcuucuucuuua

SEQ ID NO: 1747116 - RNA, 19 nt, Artificial Sequence
  Description of Artificial Sequence: Synthetic oligonucleotide
cugcugguaccacuuggag

SEQ ID NO: 1747117 - RNA, 19 nt, Artificial Sequence
  Description of Artificial Sequence: Synthetic oligonucleotide
acugucgaagaaagcgguc

SEQ ID NO: 1747118 - RNA, 19 nt, Artificial Sequence
  Description of Artificial Sequence: Synthetic oligonucleotide
ugccccgaggaacuugggu

SEQ ID NO: 1747119 - RNA, 19 nt, Artificial Sequence
  Description of Artificial Sequence: Synthetic oligonucleotide
ucgaacacuuugcuuucuu

SEQ ID NO: 1747120 - RNA, 19 nt, Artificial Sequence
  Description of Artificial Sequence: Synthetic oligonucleotide
cacucucaggaucucugug

SEQ ID NO: 1747121 - RNA, 19 nt, Artificial Sequence
  Description of Artificial Sequence: Synthetic oligonucleotide
gccucuaguauguugggga

SEQ ID NO: 1747122 - RNA, 19 nt, Artificial Sequence
  Description of Artificial Sequence: Synthetic oligonucleotide
agggcccugcuccaucauc

SEQ ID NO: 1747123 - RNA, 19 nt, Artificial Sequence
  Description of Artificial Sequence: Synthetic oligonucleotide
augucaagcuccccagaaa

SEQ ID NO: 1747124 - RNA, 19 nt, Artificial Sequence
  Description of Artificial Sequence: Synthetic oligonucleotide
gccagcugacuguagguag

SEQ ID NO: 1747125 - RNA, 19 nt, Artificial Sequence
  Description of Artificial Sequence: Synthetic oligonucleotide
ucuccccgcccuuggauac

SEQ ID NO: 1747126 - RNA, 19 nt, Artificial Sequence
  Description of Artificial Sequence: Synthetic oligonucleotide
ugcagagugcccacacgua

SEQ ID NO: 1747127 - RNA, 19 nt, Artificial Sequence
  Description of Artificial Sequence: Synthetic oligonucleotide
uuuucuuauccagcugguu

SEQ ID NO: 1747128 - RNA, 19 nt, Artificial Sequence
  Description of Artificial Sequence: Synthetic oligonucleotide
cuaacgcuuccucguuagc

SEQ ID NO: 1747129 - RNA, 19 nt, Artificial Sequence
  Description of Artificial Sequence: Synthetic oligonucleotide
cuuccggccaaggucacuc

SEQ ID NO: 1747130 - RNA, 19 nt, Artificial Sequence
  Description of Artificial Sequence: Synthetic oligonucleotide
acggagcuucucucuaucu

SEQ ID NO: 1747131 - RNA, 19 nt, Artificial Sequence
  Description of Artificial Sequence: Synthetic oligonucleotide
gcagcauaaggguugagcu

SEQ ID NO: 1747132 - RNA, 19 nt, Artificial Sequence
  Description of Artificial Sequence: Synthetic oligonucleotide
uaaaggccgcagucuugcc

SEQ ID NO: 1747133 - RNA, 19 nt, Artificial Sequence
  Description of Artificial Sequence: Synthetic oligonucleotide
ucauagcaccagucuuuga

SEQ ID NO: 1747134 - RNA, 19 nt, Artificial Sequence
  Description of Artificial Sequence: Synthetic oligonucleotide
cgaaucucuaacucuggag

SEQ ID NO: 1747135 - RNA, 19 nt, Artificial Sequence
  Description of Artificial Sequence: Synthetic oligonucleotide
ucauugcccucagaguauc

SEQ ID NO: 1747136 - RNA, 19 nt, Artificial Sequence
  Description of Artificial Sequence: Synthetic oligonucleotide
ccgggaguggaacuggagg

SEQ ID NO: 1747137 - RNA, 19 nt, Artificial Sequence
  Description of Artificial Sequence: Synthetic oligonucleotide
ccuuugggguucuugauca

SEQ ID NO: 1747138 - RNA, 19 nt, Artificial Sequence
  Description of Artificial Sequence: Synthetic oligonucleotide
cucuaguauguuggggaug

SEQ ID NO: 1747139 - RNA, 19 nt, Artificial Sequence
  Description of Artificial Sequence: Synthetic oligonucleotide
uuccggagccgcucaggcc

SEQ ID NO: 1747140 - RNA, 19 nt, Artificial Sequence
  Description of Artificial Sequence: Synthetic oligonucleotide
aggauccgggaguggaacu

SEQ ID NO: 1747141 - RNA, 19 nt, Artificial Sequence
  Description of Artificial Sequence: Synthetic oligonucleotide
guagcuucauagcaccagu

SEQ ID NO: 1747142 - RNA, 19 nt, Artificial Sequence
  Description of Artificial Sequence: Synthetic oligonucleotide
cagcaugcguagcaccuug

SEQ ID NO: 1747143 - RNA, 19 nt, Artificial Sequence
  Description of Artificial Sequence: Synthetic oligonucleotide
agcgguugaacaccacauu

SEQ ID NO: 1747144 - RNA, 19 nt, Artificial Sequence
  Description of Artificial Sequence: Synthetic oligonucleotide
gcagagugcccacacguac

SEQ ID NO: 1747145 - RNA, 19 nt, Artificial Sequence
  Description of Artificial Sequence: Synthetic oligonucleotide
ucacggagcuucucucuau

SEQ ID NO: 1747146 - RNA, 19 nt, Artificial Sequence
  Description of Artificial Sequence: Synthetic oligonucleotide
gcuucaacuaggugcgcac

SEQ ID NO: 1747147 - RNA, 19 nt, Artificial Sequence
  Description of Artificial Sequence: Synthetic oligonucleotide
ucacucucacacugucgaa

SEQ ID NO: 1747148 - RNA, 19 nt, Artificial Sequence
  Description of Artificial Sequence: Synthetic oligonucleotide
cuuuuccggagccgcucag

SEQ ID NO: 1747149 - RNA, 19 nt, Artificial Sequence
  Description of Artificial Sequence: Synthetic oligonucleotide
gacuguagguagcuucaua

SEQ ID NO: 1747150 - RNA, 19 nt, Artificial Sequence
  Description of Artificial Sequence: Synthetic oligonucleotide
cagagugcccacacguaca

SEQ ID NO: 1747151 - RNA, 19 nt, Artificial Sequence
  Description of Artificial Sequence: Synthetic oligonucleotide
caaccccuaacgcuuccuc

SEQ ID NO: 1747152 - RNA, 19 nt, Artificial Sequence
  Description of Artificial Sequence: Synthetic oligonucleotide
guuaaggcccgggaugcuc

SEQ ID NO: 1747153 - RNA, 19 nt, Artificial Sequence
  Description of Artificial Sequence: Synthetic oligonucleotide
cuucauagcaccagucuuu

SEQ ID NO: 1747154 - RNA, 19 nt, Artificial Sequence
  Description of Artificial Sequence: Synthetic oligonucleotide
gguagggaccugugugucc

SEQ ID NO: 1747155 - RNA, 19 nt, Artificial Sequence
  Description of Artificial Sequence: Synthetic oligonucleotide
ugagaacauugucgcucuc

SEQ ID NO: 1747156 - RNA, 19 nt, Artificial Sequence
  Description of Artificial Sequence: Synthetic oligonucleotide
guguagcacaaccccuaac

SEQ ID NO: 1747157 - RNA, 19 nt, Artificial Sequence
  Description of Artificial Sequence: Synthetic oligonucleotide
cuggaggcugagaugucca

SEQ ID NO: 1747158 - RNA, 19 nt, Artificial Sequence
  Description of Artificial Sequence: Synthetic oligonucleotide
caggauccgggaguggaac

SEQ ID NO: 1747159 - RNA, 19 nt, Artificial Sequence
  Description of Artificial Sequence: Synthetic oligonucleotide
ccgcgaaucucuaacucug

SEQ ID NO: 1747160 - RNA, 19 nt, Artificial Sequence
  Description of Artificial Sequence: Synthetic oligonucleotide
gguccuugucaaagguugg

SEQ ID NO: 1747161 - RNA, 19 nt, Artificial Sequence
  Description of Artificial Sequence: Synthetic oligonucleotide
agaagcgguugaacaccac

SEQ ID NO: 1747162 - RNA, 19 nt, Artificial Sequence
  Description of Artificial Sequence: Synthetic oligonucleotide
cacggagcuucucucuauc

SEQ ID NO: 1747163 - RNA, 19 nt, Artificial Sequence
  Description of Artificial Sequence: Synthetic oligonucleotide
uccagcaaacuccguccuu

SEQ ID NO: 1747164 - RNA, 19 nt, Artificial Sequence
  Description of Artificial Sequence: Synthetic oligonucleotide
cacaaccccuaacgcuucc

SEQ ID NO: 1747165 - RNA, 19 nt, Artificial Sequence
  Description of Artificial Sequence: Synthetic oligonucleotide
cuuggauacugacucugcu

SEQ ID NO: 1747166 - RNA, 19 nt, Artificial Sequence
  Description of Artificial Sequence: Synthetic oligonucleotide
cuuuucuuauccagcuggu

SEQ ID NO: 1747167 - RNA, 19 nt, Artificial Sequence
  Description of Artificial Sequence: Synthetic oligonucleotide
gccccgaggaacuuggguc

SEQ ID NO: 1747168 - RNA, 19 nt, Artificial Sequence
  Description of Artificial Sequence: Synthetic oligonucleotide
ucugucccgcgaaucucua

SEQ ID NO: 1747169 - RNA, 19 nt, Artificial Sequence
  Description of Artificial Sequence: Synthetic oligonucleotide
ggaguggaacuggaggccc

SEQ ID NO: 1747170 - RNA, 19 nt, Artificial Sequence
  Description of Artificial Sequence: Synthetic oligonucleotide
guuucacagcugccccgag

SEQ ID NO: 1747171 - RNA, 19 nt, Artificial Sequence
  Description of Artificial Sequence: Synthetic oligonucleotide
guaccacuuggaguccuug

SEQ ID NO: 1747172 - RNA, 19 nt, Artificial Sequence
  Description of Artificial Sequence: Synthetic oligonucleotide
gucaguuaaggcccgggau

SEQ ID NO: 1747173 - RNA, 19 nt, Artificial Sequence
  Description of Artificial Sequence: Synthetic oligonucleotide
caaagguuggguccacucu

SEQ ID NO: 1747174 - RNA, 19 nt, Artificial Sequence
  Description of Artificial Sequence: Synthetic oligonucleotide
cuggagcagccuagaugcc

SEQ ID NO: 1747175 - RNA, 19 nt, Artificial Sequence
  Description of Artificial Sequence: Synthetic oligonucleotide
acucuggagcagccuagau

SEQ ID NO: 1747176 - RNA, 19 nt, Artificial Sequence
  Description of Artificial Sequence: Synthetic oligonucleotide
acccucgaccaccucgccu

SEQ ID NO: 1747177 - RNA, 19 nt, Artificial Sequence
  Description of Artificial Sequence: Synthetic oligonucleotide
agccucgaacacuuugcuu

SEQ ID NO: 1747178 - RNA, 19 nt, Artificial Sequence
  Description of Artificial Sequence: Synthetic oligonucleotide
uaaggcccgggaugcucga

SEQ ID NO: 1747179 - RNA, 19 nt, Artificial Sequence
  Description of Artificial Sequence: Synthetic oligonucleotide
cacugucgaagaaagcggu

SEQ ID NO: 1747180 - RNA, 19 nt, Artificial Sequence
  Description of Artificial Sequence: Synthetic oligonucleotide
cugacuucaucaagacucu

SEQ ID NO: 1747181 - RNA, 19 nt, Artificial Sequence
  Description of Artificial Sequence: Synthetic oligonucleotide
ugguaccacuuggaguccu

SEQ ID NO: 1747182 - RNA, 19 nt, Artificial Sequence
  Description of Artificial Sequence: Synthetic oligonucleotide
gugagcaccucugacauuu

SEQ ID NO: 1747183 - RNA, 19 nt, Artificial Sequence
  Description of Artificial Sequence: Synthetic oligonucleotide
uuggguccacucucaggau

SEQ ID NO: 1747184 - RNA, 19 nt, Artificial Sequence
  Description of Artificial Sequence: Synthetic oligonucleotide
ggccucuaguauguugggg

SEQ ID NO: 1747185 - RNA, 19 nt, Artificial Sequence
  Description of Artificial Sequence: Synthetic oligonucleotide
cugugagcaccucugacau

SEQ ID NO: 1747186 - RNA, 19 nt, Artificial Sequence
  Description of Artificial Sequence: Synthetic oligonucleotide
ggaaggugacgaucagcac

SEQ ID NO: 1747187 - RNA, 19 nt, Artificial Sequence
  Description of Artificial Sequence: Synthetic oligonucleotide
cugcagagugcccacacgu

SEQ ID NO: 1747188 - RNA, 19 nt, Artificial Sequence
  Description of Artificial Sequence: Synthetic oligonucleotide
uccggccaaggucacucuu

SEQ ID NO: 1747189 - RNA, 19 nt, Artificial Sequence
  Description of Artificial Sequence: Synthetic oligonucleotide
cuccguccuuuuccggagc

SEQ ID NO: 1747190 - RNA, 19 nt, Artificial Sequence
  Description of Artificial Sequence: Synthetic oligonucleotide
aaggcgccaggcagcauaa

SEQ ID NO: 1747191 - RNA, 19 nt, Artificial Sequence
  Description of Artificial Sequence: Synthetic oligonucleotide
cuucaacuaggugcgcaca

SEQ ID NO: 1747192 - RNA, 19 nt, Artificial Sequence
  Description of Artificial Sequence: Synthetic oligonucleotide
acaaccccuaacgcuuccu

SEQ ID NO: 1747193 - RNA, 19 nt, Artificial Sequence
  Description of Artificial Sequence: Synthetic oligonucleotide
cucagaguaucuguucugu

SEQ ID NO: 1747194 - RNA, 19 nt, Artificial Sequence
  Description of Artificial Sequence: Synthetic oligonucleotide
cauugucgcucucaucaua

SEQ ID NO: 1747195 - RNA, 19 nt, Artificial Sequence
  Description of Artificial Sequence: Synthetic oligonucleotide
cucuaucucugucccgcga

SEQ ID NO: 1747196 - RNA, 19 nt, Artificial Sequence
  Description of Artificial Sequence: Synthetic oligonucleotide
agccuagaugccagccauc

SEQ ID NO: 1747197 - RNA, 19 nt, Artificial Sequence
  Description of Artificial Sequence: Synthetic oligonucleotide
gcgaaucucuaacucugga

SEQ ID NO: 1747198 - RNA, 19 nt, Artificial Sequence
  Description of Artificial Sequence: Synthetic oligonucleotide
acucuacacccugggagau

SEQ ID NO: 1747199 - RNA, 19 nt, Artificial Sequence
  Description of Artificial Sequence: Synthetic oligonucleotide
ugugagcaccucugacauu

SEQ ID NO: 1747200 - RNA, 19 nt, Artificial Sequence
  Description of Artificial Sequence: Synthetic oligonucleotide
gaugcucgaaugagaacau

SEQ ID NO: 1747201 - RNA, 19 nt, Artificial Sequence
  Description of Artificial Sequence: Synthetic oligonucleotide
ccucguuagccucgaacac

SEQ ID NO: 1747202 - RNA, 19 nt, Artificial Sequence
  Description of Artificial Sequence: Synthetic oligonucleotide
cuggggccuuuugacacug

SEQ ID NO: 1747203 - RNA, 19 nt, Artificial Sequence
  Description of Artificial Sequence: Synthetic oligonucleotide
gggaugcucgaaugagaac

SEQ ID NO: 1747204 - RNA, 19 nt, Artificial Sequence
  Description of Artificial Sequence: Synthetic oligonucleotide
aggcccgggaugcucgaau

SEQ ID NO: 1747205 - RNA, 19 nt, Artificial Sequence
  Description of Artificial Sequence: Synthetic oligonucleotide
gccuuuugacacugccagc

SEQ ID NO: 1747206 - RNA, 19 nt, Artificial Sequence
  Description of Artificial Sequence: Synthetic oligonucleotide
aguuaaggcccgggaugcu

SEQ ID NO: 1747207 - RNA, 19 nt, Artificial Sequence
  Description of Artificial Sequence: Synthetic oligonucleotide
uccccgcccuuggauacug

SEQ ID NO: 1747208 - RNA, 19 nt, Artificial Sequence
  Description of Artificial Sequence: Synthetic oligonucleotide
gaguggaacuggaggccca

SEQ ID NO: 1747209 - RNA, 19 nt, Artificial Sequence
  Description of Artificial Sequence: Synthetic oligonucleotide
uagggaccuguguguccca

SEQ ID NO: 1747210 - RNA, 19 nt, Artificial Sequence
  Description of Artificial Sequence: Synthetic oligonucleotide
agguagcuucauagcacca

SEQ ID NO: 1747211 - RNA, 19 nt, Artificial Sequence
  Description of Artificial Sequence: Synthetic oligonucleotide
cucguuagccucgaacacu

SEQ ID NO: 1747212 - RNA, 19 nt, Artificial Sequence
  Description of Artificial Sequence: Synthetic oligonucleotide
cgggcagccucuucuaccc

SEQ ID NO: 1747213 - RNA, 19 nt, Artificial Sequence
  Description of Artificial Sequence: Synthetic oligonucleotide
cucacggagcuucucucua

SEQ ID NO: 1747214 - RNA, 19 nt, Artificial Sequence
  Description of Artificial Sequence: Synthetic oligonucleotide
cugccccgaggaacuuggg

SEQ ID NO: 1747215 - RNA, 19 nt, Artificial Sequence
  Description of Artificial Sequence: Synthetic oligonucleotide
gcccacacguacagcaugc

SEQ ID NO: 1747216 - RNA, 19 nt, Artificial Sequence
  Description of Artificial Sequence: Synthetic oligonucleotide
cgcgaaucucuaacucugg

SEQ ID NO: 1747217 - RNA, 19 nt, Artificial Sequence
  Description of Artificial Sequence: Synthetic oligonucleotide
agcugccccgaggaacuug

SEQ ID NO: 1747218 - RNA, 19 nt, Artificial Sequence
  Description of Artificial Sequence: Synthetic oligonucleotide
acagcaugcguagcaccuu

SEQ ID NO: 1747219 - RNA, 19 nt, Artificial Sequence
  Description of Artificial Sequence: Synthetic oligonucleotide
aggugacgaucagcacagg

SEQ ID NO: 1747220 - RNA, 19 nt, Artificial Sequence
  Description of Artificial Sequence: Synthetic oligonucleotide
gcucgaaugagaacauugu

SEQ ID NO: 1747221 - RNA, 19 nt, Artificial Sequence
  Description of Artificial Sequence: Synthetic oligonucleotide
cccgggaugcucgaaugag

SEQ ID NO: 1747222 - RNA, 19 nt, Artificial Sequence
  Description of Artificial Sequence: Synthetic oligonucleotide
gucccgcgaaucucuaacu

SEQ ID NO: 1747223 - RNA, 19 nt, Artificial Sequence
  Description of Artificial Sequence: Synthetic oligonucleotide
aggccggcgguagggaccu

SEQ ID NO: 1747224 - RNA, 19 nt, Artificial Sequence
  Description of Artificial Sequence: Synthetic oligonucleotide
ggauagggugggccagcug

SEQ ID NO: 1747225 - RNA, 19 nt, Artificial Sequence
  Description of Artificial Sequence: Synthetic oligonucleotide
ggaggcugagauguccaga

SEQ ID NO: 1747226 - RNA, 19 nt, Artificial Sequence
  Description of Artificial Sequence: Synthetic oligonucleotide
cagaaggcgccaggcagca

SEQ ID NO: 1747227 - RNA, 19 nt, Artificial Sequence
  Description of Artificial Sequence: Synthetic oligonucleotide
ucgcuucaacuaggugcgc

SEQ ID NO: 1747228 - RNA, 19 nt, Artificial Sequence
  Description of Artificial Sequence: Synthetic oligonucleotide
aggccgcagucuugcccag

SEQ ID NO: 1747229 - RNA, 19 nt, Artificial Sequence
  Description of Artificial Sequence: Synthetic oligonucleotide
ccuuguccgggucacccuc

SEQ ID NO: 1747230 - RNA, 19 nt, Artificial Sequence
  Description of Artificial Sequence: Synthetic oligonucleotide
caacccugcaaggcaccuc

SEQ ID NO: 1747231 - RNA, 19 nt, Artificial Sequence
  Description of Artificial Sequence: Synthetic oligonucleotide
gccucacggagcuucucuc

SEQ ID NO: 1747232 - RNA, 19 nt, Artificial Sequence
  Description of Artificial Sequence: Synthetic oligonucleotide
cacccucgaccaccucgcc

SEQ ID NO: 1747233 - RNA, 19 nt, Artificial Sequence
  Description of Artificial Sequence: Synthetic oligonucleotide
augcucgaaugagaacauu

SEQ ID NO: 1747234 - RNA, 19 nt, Artificial Sequence
  Description of Artificial Sequence: Synthetic oligonucleotide
cguccuuuuccggagccgc

SEQ ID NO: 1747235 - RNA, 19 nt, Artificial Sequence
  Description of Artificial Sequence: Synthetic oligonucleotide
cccuguccaacuccccaag

SEQ ID NO: 1747236 - RNA, 19 nt, Artificial Sequence
  Description of Artificial Sequence: Synthetic oligonucleotide
cguacagcaugcguagcac

SEQ ID NO: 1747237 - RNA, 19 nt, Artificial Sequence
  Description of Artificial Sequence: Synthetic oligonucleotide
cccaacccugcaaggcacc

SEQ ID NO: 1747238 - RNA, 19 nt, Artificial Sequence
  Description of Artificial Sequence: Synthetic oligonucleotide
gcugacugcuuggcugucc

SEQ ID NO: 1747239 - RNA, 19 nt, Artificial Sequence
  Description of Artificial Sequence: Synthetic oligonucleotide
gggccuuuugacacugcca

SEQ ID NO: 1747240 - RNA, 19 nt, Artificial Sequence
  Description of Artificial Sequence: Synthetic oligonucleotide
cggagcuucucucuaucuc

SEQ ID NO: 1747241 - RNA, 19 nt, Artificial Sequence
  Description of Artificial Sequence: Synthetic oligonucleotide
cccgcccuuggauacugac

SEQ ID NO: 1747242 - RNA, 19 nt, Artificial Sequence
  Description of Artificial Sequence: Synthetic oligonucleotide
caccucgccuuugggguuc

SEQ ID NO: 1747243 - RNA, 19 nt, Artificial Sequence
  Description of Artificial Sequence: Synthetic oligonucleotide
ccccagaaaucauggccuc

SEQ ID NO: 1747244 - RNA, 19 nt, Artificial Sequence
  Description of Artificial Sequence: Synthetic oligonucleotide
aaggcccgggaugcucgaa

SEQ ID NO: 1747245 - RNA, 19 nt, Artificial Sequence
  Description of Artificial Sequence: Synthetic oligonucleotide
cgggaugcucgaaugagaa

SEQ ID NO: 1747246 - RNA, 19 nt, Artificial Sequence
  Description of Artificial Sequence: Synthetic oligonucleotide
cccaguacacucucaucaa

SEQ ID NO: 1747247 - RNA, 19 nt, Artificial Sequence
  Description of Artificial Sequence: Synthetic oligonucleotide
cuaucucugucccgcgaau

SEQ ID NO: 1747248 - RNA, 19 nt, Artificial Sequence
  Description of Artificial Sequence: Synthetic oligonucleotide
caccagucuuugagaaugu

SEQ ID NO: 1747249 - RNA, 19 nt, Artificial Sequence
  Description of Artificial Sequence: Synthetic oligonucleotide
gcguagcaccuuguccggg

SEQ ID NO: 1747250 - RNA, 19 nt, Artificial Sequence
  Description of Artificial Sequence: Synthetic oligonucleotide
cugucccgcgaaucucuaa

SEQ ID NO: 1747251 - RNA, 19 nt, Artificial Sequence
  Description of Artificial Sequence: Synthetic oligonucleotide
cccacacguacagcaugcg

SEQ ID NO: 1747252 - RNA, 19 nt, Artificial Sequence
  Description of Artificial Sequence: Synthetic oligonucleotide
ggguccacucucaggaucu

SEQ ID NO: 1747253 - RNA, 19 nt, Artificial Sequence
  Description of Artificial Sequence: Synthetic oligonucleotide
gcgguagggaccugugugu

SEQ ID NO: 1747254 - RNA, 19 nt, Artificial Sequence
  Description of Artificial Sequence: Synthetic oligonucleotide
ccagaaaucauggccucua

SEQ ID NO: 1747255 - RNA, 19 nt, Artificial Sequence
  Description of Artificial Sequence: Synthetic oligonucleotide
cggccaaggucacucuuac

SEQ ID NO: 1747256 - RNA, 19 nt, Artificial Sequence
  Description of Artificial Sequence: Synthetic oligonucleotide
ggagccgcucaggccggcg

SEQ ID NO: 1747257 - RNA, 19 nt, Artificial Sequence
  Description of Artificial Sequence: Synthetic oligonucleotide
ccuuuuccggagccgcuca

SEQ ID NO: 1747258 - RNA, 19 nt, Artificial Sequence
  Description of Artificial Sequence: Synthetic oligonucleotide
gucaaagguuggguccacu

SEQ ID NO: 1747259 - RNA, 19 nt, Artificial Sequence
  Description of Artificial Sequence: Synthetic oligonucleotide
gcccgggaugcucgaauga

SEQ ID NO: 1747260 - RNA, 19 nt, Artificial Sequence
  Description of Artificial Sequence: Synthetic oligonucleotide
ccacuuggaguccuugugu

SEQ ID NO: 1747261 - RNA, 19 nt, Artificial Sequence
  Description of Artificial Sequence: Synthetic oligonucleotide
cccgcgaaucucuaacucu

SEQ ID NO: 1747262 - RNA, 19 nt, Artificial Sequence
  Description of Artificial Sequence: Synthetic oligonucleotide
cucaggccggcgguaggga

SEQ ID NO: 1747263 - RNA, 19 nt, Artificial Sequence
  Description of Artificial Sequence: Synthetic oligonucleotide
cgggucacccucgaccacc

SEQ ID NO: 1747264 - RNA, 19 nt, Artificial Sequence
  Description of Artificial Sequence: Synthetic oligonucleotide
aggcgccaggcagcauaag

SEQ ID NO: 1747265 - RNA, 19 nt, Artificial Sequence
  Description of Artificial Sequence: Synthetic oligonucleotide
gccgcagucuugcccagcu

SEQ ID NO: 1747266 - RNA, 19 nt, Artificial Sequence
  Description of Artificial Sequence: Synthetic oligonucleotide
ccggcgguagggaccugug

SEQ ID NO: 1747267 - RNA, 19 nt, Artificial Sequence
  Description of Artificial Sequence: Synthetic oligonucleotide
ccucuaguauguuggggau

SEQ ID NO: 1747268 - RNA, 19 nt, Artificial Sequence
  Description of Artificial Sequence: Synthetic oligonucleotide
ccaggauccgggaguggaa

SEQ ID NO: 1747269 - RNA, 19 nt, Artificial Sequence
  Description of Artificial Sequence: Synthetic oligonucleotide
ccccgaggaacuugggucu

SEQ ID NO: 1747270 - RNA, 19 nt, Artificial Sequence
  Description of Artificial Sequence: Synthetic oligonucleotide
cuuccucguuagccucgaa

SEQ ID NO: 1747271 - RNA, 19 nt, Artificial Sequence
  Description of Artificial Sequence: Synthetic oligonucleotide
ccggccaaggucacucuua

SEQ ID NO: 1747272 - RNA, 19 nt, Artificial Sequence
  Description of Artificial Sequence: Synthetic oligonucleotide
ccgaggaacuugggucuug

SEQ ID NO: 1747273 - RNA, 19 nt, Artificial Sequence
  Description of Artificial Sequence: Synthetic oligonucleotide
cuccuggucucugcagagu

SEQ ID NO: 1747274 - RNA, 19 nt, Artificial Sequence
  Description of Artificial Sequence: Synthetic oligonucleotide
cgaagaaagcgguccuugu

SEQ ID NO: 1747275 - RNA, 19 nt, Artificial Sequence
  Description of Artificial Sequence: Synthetic oligonucleotide
cccucgaccaccucgccuu

SEQ ID NO: 1747276 - RNA, 19 nt, Artificial Sequence
  Description of Artificial Sequence: Synthetic oligonucleotide
gggaccugugugucccagu

SEQ ID NO: 1747277 - RNA, 19 nt, Artificial Sequence
  Description of Artificial Sequence: Synthetic oligonucleotide
ggccaaggucacucuuacu

SEQ ID NO: 1747278 - RNA, 19 nt, Artificial Sequence
  Description of Artificial Sequence: Synthetic oligonucleotide
gcccuuggauacugacucu

SEQ ID NO: 1747279 - RNA, 19 nt, Artificial Sequence
  Description of Artificial Sequence: Synthetic oligonucleotide
cgguagggaccuguguguc

SEQ ID NO: 1747280 - RNA, 19 nt, Artificial Sequence
  Description of Artificial Sequence: Synthetic oligonucleotide
ggccgcagucuugcccagc

SEQ ID NO: 1747281 - RNA, 19 nt, Artificial Sequence
  Description of Artificial Sequence: Synthetic oligonucleotide
cccuaacgcuuccucguua

SEQ ID NO: 1747282 - RNA, 19 nt, Artificial Sequence
  Description of Artificial Sequence: Synthetic oligonucleotide
ggucacccucgaccaccuc

SEQ ID NO: 1747283 - RNA, 19 nt, Artificial Sequence
  Description of Artificial Sequence: Synthetic oligonucleotide
ccgcccuuggauacugacu

SEQ ID NO: 1747284 - RNA, 19 nt, Artificial Sequence
  Description of Artificial Sequence: Synthetic oligonucleotide
cuaguauguuggggaugau

SEQ ID NO: 1747285 - RNA, 19 nt, Artificial Sequence
  Description of Artificial Sequence: Synthetic oligonucleotide
ccgggucacccucgaccac

SEQ ID NO: 1747286 - RNA, 19 nt, Artificial Sequence
  Description of Artificial Sequence: Synthetic oligonucleotide
gguaccacuuggaguccuu

SEQ ID NO: 1747287 - RNA, 19 nt, Artificial Sequence
  Description of Artificial Sequence: Synthetic oligonucleotide
cccagaaaucauggccucu

SEQ ID NO: 1747288 - RNA, 19 nt, Artificial Sequence
  Description of Artificial Sequence: Synthetic oligonucleotide
cccugggagauggcuuuaa

SEQ ID NO: 1747289 - RNA, 19 nt, Artificial Sequence
  Description of Artificial Sequence: Synthetic oligonucleotide
ccaacccugcaaggcaccu

SEQ ID NO: 1747290 - RNA, 19 nt, Artificial Sequence
  Description of Artificial Sequence: Synthetic oligonucleotide
gccggcgguagggaccugu

SEQ ID NO: 1747291 - RNA, 19 nt, Artificial Sequence
  Description of Artificial Sequence: Synthetic oligonucleotide
ggcuguccgggcagccucu

SEQ ID NO: 1747292 - RNA, 19 nt, Artificial Sequence
  Description of Artificial Sequence: Synthetic oligonucleotide
cuccccgcccuuggauacu

SEQ ID NO: 1747293 - RNA, 19 nt, Artificial Sequence
  Description of Artificial Sequence: Synthetic oligonucleotide
gccgcucaggccggcggua

SEQ ID NO: 1747294 - RNA, 19 nt, Artificial Sequence
  Description of Artificial Sequence: Synthetic oligonucleotide
ccccuaacgcuuccucguu

SEQ ID NO: 1747295 - RNA, 19 nt, Artificial Sequence
  Description of Artificial Sequence: Synthetic oligonucleotide
cagcugccccgaggaacuu

SEQ ID NO: 1747296 - RNA, 19 nt, Artificial Sequence
  Description of Artificial Sequence: Synthetic oligonucleotide
cguuagccucgaacacuuu

SEQ ID NO: 1747297 - RNA, 19 nt, Artificial Sequence
  Description of Artificial Sequence: Synthetic oligonucleotide
gcuguccgggcagccucuu

SEQ ID NO: 1747298 - RNA, 19 nt, Artificial Sequence
  Description of Artificial Sequence: Synthetic oligonucleotide
ggccggcgguagggaccug

SEQ ID NO: 1747299 - RNA, 19 nt, Artificial Sequence
  Description of Artificial Sequence: Synthetic oligonucleotide
cccgaggaacuugggucuu

SEQ ID NO: 1747300 - RNA, 19 nt, Artificial Sequence
  Description of Artificial Sequence: Synthetic oligonucleotide
ccgcagucuugcccagcuu

SEQ ID NO: 1747301 - RNA, 19 nt, Artificial Sequence
  Description of Artificial Sequence: Synthetic oligonucleotide
auaaauuuaacguaagacg

SEQ ID NO: 1747302 - RNA, 19 nt, Artificial Sequence
  Description of Artificial Sequence: Synthetic oligonucleotide
uuaaaauacuguuugagag

SEQ ID NO: 1747303 - RNA, 19 nt, Artificial Sequence
  Description of Artificial Sequence: Synthetic oligonucleotide
uaaauuuaacguaagacga

SEQ ID NO: 1747304 - RNA, 19 nt, Artificial Sequence
  Description of Artificial Sequence: Synthetic oligonucleotide
uuaucaauuaccaaucccc

SEQ ID NO: 1747305 - RNA, 19 nt, Artificial Sequence
  Description of Artificial Sequence: Synthetic oligonucleotide
acagauuuuacauucguac

SEQ ID NO: 1747306 - RNA, 19 nt, Artificial Sequence
  Description of Artificial Sequence: Synthetic oligonucleotide
acuuguauaaauuuaacgu

SEQ ID NO: 1747307 - RNA, 19 nt, Artificial Sequence
  Description of Artificial Sequence: Synthetic oligonucleotide
auuucaaaccuuuauauug

SEQ ID NO: 1747308 - RNA, 19 nt, Artificial Sequence
  Description of Artificial Sequence: Synthetic oligonucleotide
uguacuuuaucaauuacca

SEQ ID NO: 1747309 - RNA, 19 nt, Artificial Sequence
  Description of Artificial Sequence: Synthetic oligonucleotide
aaauuauccaaauagcaaa

SEQ ID NO: 1747310 - RNA, 19 nt, Artificial Sequence
  Description of Artificial Sequence: Synthetic oligonucleotide
aauacaucuuacuaaauau

SEQ ID NO: 1747311 - RNA, 19 nt, Artificial Sequence
  Description of Artificial Sequence: Synthetic oligonucleotide
uuuaaggucacccugggcu

SEQ ID NO: 1747312 - RNA, 19 nt, Artificial Sequence
  Description of Artificial Sequence: Synthetic oligonucleotide
gugaauauggauuuucugg

SEQ ID NO: 1747313 - RNA, 19 nt, Artificial Sequence
  Description of Artificial Sequence: Synthetic oligonucleotide
auucguacgguuuaucgcc

SEQ ID NO: 1747314 - RNA, 19 nt, Artificial Sequence
  Description of Artificial Sequence: Synthetic oligonucleotide
ucuagauucacuauucugu

SEQ ID NO: 1747315 - RNA, 19 nt, Artificial Sequence
  Description of Artificial Sequence: Synthetic oligonucleotide
aagagcaucaccagaagcc

SEQ ID NO: 1747316 - RNA, 19 nt, Artificial Sequence
  Description of Artificial Sequence: Synthetic oligonucleotide
auuaucuugauauacuuga

SEQ ID NO: 1747317 - RNA, 19 nt, Artificial Sequence
  Description of Artificial Sequence: Synthetic oligonucleotide
uguacuuucagcuuugagu

SEQ ID NO: 1747318 - RNA, 19 nt, Artificial Sequence
  Description of Artificial Sequence: Synthetic oligonucleotide
agauuuuacauucguacgg

SEQ ID NO: 1747319 - RNA, 19 nt, Artificial Sequence
  Description of Artificial Sequence: Synthetic oligonucleotide
ugauauauuacuaaccaua

SEQ ID NO: 1747320 - RNA, 19 nt, Artificial Sequence
  Description of Artificial Sequence: Synthetic oligonucleotide
aaagcaagaguugagaacu

SEQ ID NO: 1747321 - RNA, 19 nt, Artificial Sequence
  Description of Artificial Sequence: Synthetic oligonucleotide
uuuaacguaagacgaaucu

SEQ ID NO: 1747322 - RNA, 19 nt, Artificial Sequence
  Description of Artificial Sequence: Synthetic oligonucleotide
cuugauauacuugauaagc

SEQ ID NO: 1747323 - RNA, 19 nt, Artificial Sequence
  Description of Artificial Sequence: Synthetic oligonucleotide
uuacuaaccauacauucug

SEQ ID NO: 1747324 - RNA, 19 nt, Artificial Sequence
  Description of Artificial Sequence: Synthetic oligonucleotide
aaguguauaacauacugua

SEQ ID NO: 1747325 - RNA, 19 nt, Artificial Sequence
  Description of Artificial Sequence: Synthetic oligonucleotide
uaaccauacauucugcuca

SEQ ID NO: 1747326 - RNA, 19 nt, Artificial Sequence
  Description of Artificial Sequence: Synthetic oligonucleotide
uuguacuuuaucaauuacc

SEQ ID NO: 1747327 - RNA, 19 nt, Artificial Sequence
  Description of Artificial Sequence: Synthetic oligonucleotide
uacuaaauaucuuucuuug

SEQ ID NO: 1747328 - RNA, 19 nt, Artificial Sequence
  Description of Artificial Sequence: Synthetic oligonucleotide
uuucaaaccuuuauauugc

SEQ ID NO: 1747329 - RNA, 19 nt, Artificial Sequence
  Description of Artificial Sequence: Synthetic oligonucleotide
uauaacauacuguaauaca

SEQ ID NO: 1747330 - RNA, 19 nt, Artificial Sequence
  Description of Artificial Sequence: Synthetic oligonucleotide
uauuacuaaccauacauuc

SEQ ID NO: 1747331 - RNA, 19 nt, Artificial Sequence
  Description of Artificial Sequence: Synthetic oligonucleotide
uuaaguucauugagaaggg

SEQ ID NO: 1747332 - RNA, 19 nt, Artificial Sequence
  Description of Artificial Sequence: Synthetic oligonucleotide
uuauccaaauagcaaagca

SEQ ID NO: 1747333 - RNA, 19 nt, Artificial Sequence
  Description of Artificial Sequence: Synthetic oligonucleotide
cacuuguauaaauuuaacg

SEQ ID NO: 1747334 - RNA, 19 nt, Artificial Sequence
  Description of Artificial Sequence: Synthetic oligonucleotide
uguauaaauuuaacguaag

SEQ ID NO: 1747335 - RNA, 19 nt, Artificial Sequence
  Description of Artificial Sequence: Synthetic oligonucleotide
aguucauugagaagggucc

SEQ ID NO: 1747336 - RNA, 19 nt, Artificial Sequence
  Description of Artificial Sequence: Synthetic oligonucleotide
aagacgaaucuucugauau

SEQ ID NO: 1747337 - RNA, 19 nt, Artificial Sequence
  Description of Artificial Sequence: Synthetic oligonucleotide
uuuaucgccuguaugaauc

SEQ ID NO: 1747338 - RNA, 19 nt, Artificial Sequence
  Description of Artificial Sequence: Synthetic oligonucleotide
ugaauauggauuuucuggu

SEQ ID NO: 1747339 - RNA, 19 nt, Artificial Sequence
  Description of Artificial Sequence: Synthetic oligonucleotide
uuugagucccuacggaagg

SEQ ID NO: 1747340 - RNA, 19 nt, Artificial Sequence
  Description of Artificial Sequence: Synthetic oligonucleotide
uuuauauugcucauauuau

SEQ ID NO: 1747341 - RNA, 19 nt, Artificial Sequence
  Description of Artificial Sequence: Synthetic oligonucleotide
auuuucacaaauuauccaa

SEQ ID NO: 1747342 - RNA, 19 nt, Artificial Sequence
  Description of Artificial Sequence: Synthetic oligonucleotide
uaaauaucuuucuuuguac

SEQ ID NO: 1747343 - RNA, 19 nt, Artificial Sequence
  Description of Artificial Sequence: Synthetic oligonucleotide
cuuuauauugcucauauua

SEQ ID NO: 1747344 - RNA, 19 nt, Artificial Sequence
  Description of Artificial Sequence: Synthetic oligonucleotide
gacucuuaaguucauugag

SEQ ID NO: 1747345 - RNA, 19 nt, Artificial Sequence
  Description of Artificial Sequence: Synthetic oligonucleotide
uguauguuugaugagguac

SEQ ID NO: 1747346 - RNA, 19 nt, Artificial Sequence
  Description of Artificial Sequence: Synthetic oligonucleotide
uugauauacuugauaagcu

SEQ ID NO: 1747347 - RNA, 19 nt, Artificial Sequence
  Description of Artificial Sequence: Synthetic oligonucleotide
uuauacagcucuaccaaca

SEQ ID NO: 1747348 - RNA, 19 nt, Artificial Sequence
  Description of Artificial Sequence: Synthetic oligonucleotide
uaacguaagacgaaucuuc

SEQ ID NO: 1747349 - RNA, 19 nt, Artificial Sequence
  Description of Artificial Sequence: Synthetic oligonucleotide
ucuaccaacaaagacuucu

SEQ ID NO: 1747350 - RNA, 19 nt, Artificial Sequence
  Description of Artificial Sequence: Synthetic oligonucleotide
gacguaauccgggagaagg

SEQ ID NO: 1747351 - RNA, 19 nt, Artificial Sequence
  Description of Artificial Sequence: Synthetic oligonucleotide
guacuuucagcuuugaguc

SEQ ID NO: 1747352 - RNA, 19 nt, Artificial Sequence
  Description of Artificial Sequence: Synthetic oligonucleotide
gauauauuacuaaccauac

SEQ ID NO: 1747353 - RNA, 19 nt, Artificial Sequence
  Description of Artificial Sequence: Synthetic oligonucleotide
cagauuuuacauucguacg

SEQ ID NO: 1747354 - RNA, 19 nt, Artificial Sequence
  Description of Artificial Sequence: Synthetic oligonucleotide
ucauauuaucuugauauac

SEQ ID NO: 1747355 - RNA, 19 nt, Artificial Sequence
  Description of Artificial Sequence: Synthetic oligonucleotide
agauucacuauucuguccu

SEQ ID NO: 1747356 - RNA, 19 nt, Artificial Sequence
  Description of Artificial Sequence: Synthetic oligonucleotide
uggacucuuaaguucauug

SEQ ID NO: 1747357 - RNA, 19 nt, Artificial Sequence
  Description of Artificial Sequence: Synthetic oligonucleotide
accaacaaagacuucugag

SEQ ID NO: 1747358 - RNA, 19 nt, Artificial Sequence
  Description of Artificial Sequence: Synthetic oligonucleotide
ucuugauauacuugauaag

SEQ ID NO: 1747359 - RNA, 19 nt, Artificial Sequence
  Description of Artificial Sequence: Synthetic oligonucleotide
uaagagcaucaccagaagc

SEQ ID NO: 1747360 - RNA, 19 nt, Artificial Sequence
  Description of Artificial Sequence: Synthetic oligonucleotide
auacauucugcucaggcgu

SEQ ID NO: 1747361 - RNA, 19 nt, Artificial Sequence
  Description of Artificial Sequence: Synthetic oligonucleotide
guuuauagaguucuaguga

SEQ ID NO: 1747362 - RNA, 19 nt, Artificial Sequence
  Description of Artificial Sequence: Synthetic oligonucleotide
ucuucugauauauuacuaa

SEQ ID NO: 1747363 - RNA, 19 nt, Artificial Sequence
  Description of Artificial Sequence: Synthetic oligonucleotide
cuuucuaagacucugcuaa

SEQ ID NO: 1747364 - RNA, 19 nt, Artificial Sequence
  Description of Artificial Sequence: Synthetic oligonucleotide
cuaagacucugcuaacugg

SEQ ID NO: 1747365 - RNA, 19 nt, Artificial Sequence
  Description of Artificial Sequence: Synthetic oligonucleotide
aaugauuuucacaaauuau

SEQ ID NO: 1747366 - RNA, 19 nt, Artificial Sequence
  Description of Artificial Sequence: Synthetic oligonucleotide
uucuagauucacuauucug

SEQ ID NO: 1747367 - RNA, 19 nt, Artificial Sequence
  Description of Artificial Sequence: Synthetic oligonucleotide
agaguucuagugaauaugg

SEQ ID NO: 1747368 - RNA, 19 nt, Artificial Sequence
  Description of Artificial Sequence: Synthetic oligonucleotide
acgaugagugacguaaucc

SEQ ID NO: 1747369 - RNA, 19 nt, Artificial Sequence
  Description of Artificial Sequence: Synthetic oligonucleotide
cuucugauauauuacuaac

SEQ ID NO: 1747370 - RNA, 19 nt, Artificial Sequence
  Description of Artificial Sequence: Synthetic oligonucleotide
uacuguuugagagucuggg

SEQ ID NO: 1747371 - RNA, 19 nt, Artificial Sequence
  Description of Artificial Sequence: Synthetic oligonucleotide
augagguacugcuucugcc

SEQ ID NO: 1747372 - RNA, 19 nt, Artificial Sequence
  Description of Artificial Sequence: Synthetic oligonucleotide
uguuugagagucugggaag

SEQ ID NO: 1747373 - RNA, 19 nt, Artificial Sequence
  Description of Artificial Sequence: Synthetic oligonucleotide
acuguaauacaucuuacua

SEQ ID NO: 1747374 - RNA, 19 nt, Artificial Sequence
  Description of Artificial Sequence: Synthetic oligonucleotide
ugauuugccacugaaggcu

SEQ ID NO: 1747375 - RNA, 19 nt, Artificial Sequence
  Description of Artificial Sequence: Synthetic oligonucleotide
ugaccucaacuuuauacag

SEQ ID NO: 1747376 - RNA, 19 nt, Artificial Sequence
  Description of Artificial Sequence: Synthetic oligonucleotide
uccucaugugcaaagcaag

SEQ ID NO: 1747377 - RNA, 19 nt, Artificial Sequence
  Description of Artificial Sequence: Synthetic oligonucleotide
aaggcguuuauagaguucu

SEQ ID NO: 1747378 - RNA, 19 nt, Artificial Sequence
  Description of Artificial Sequence: Synthetic oligonucleotide
uguauaacauacuguaaua

SEQ ID NO: 1747379 - RNA, 19 nt, Artificial Sequence
  Description of Artificial Sequence: Synthetic oligonucleotide
uuuguacuuuaucaauuac

SEQ ID NO: 1747380 - RNA, 19 nt, Artificial Sequence
  Description of Artificial Sequence: Synthetic oligonucleotide
uacgcuugcaauugcagca

SEQ ID NO: 1747381 - RNA, 19 nt, Artificial Sequence
  Description of Artificial Sequence: Synthetic oligonucleotide
acuccuugcacguguaagg

SEQ ID NO: 1747382 - RNA, 19 nt, Artificial Sequence
  Description of Artificial Sequence: Synthetic oligonucleotide
uguacgcuugcaauugcag

SEQ ID NO: 1747383 - RNA, 19 nt, Artificial Sequence
  Description of Artificial Sequence: Synthetic oligonucleotide
ucuccaaugugaaucuucu

SEQ ID NO: 1747384 - RNA, 19 nt, Artificial Sequence
  Description of Artificial Sequence: Synthetic oligonucleotide
aauuuaacguaagacgaau

SEQ ID NO: 1747385 - RNA, 19 nt, Artificial Sequence
  Description of Artificial Sequence: Synthetic oligonucleotide
ucuaaggcguuuauagagu

SEQ ID NO: 1747386 - RNA, 19 nt, Artificial Sequence
  Description of Artificial Sequence: Synthetic oligonucleotide
acuuccuacacuuguauaa

SEQ ID NO: 1747387 - RNA, 19 nt, Artificial Sequence
  Description of Artificial Sequence: Synthetic oligonucleotide
accucaacuuuauacagcu

SEQ ID NO: 1747388 - RNA, 19 nt, Artificial Sequence
  Description of Artificial Sequence: Synthetic oligonucleotide
uugcaauugcagcacuggg

SEQ ID NO: 1747389 - RNA, 19 nt, Artificial Sequence
  Description of Artificial Sequence: Synthetic oligonucleotide
ugugcaaagcaagaguuga

SEQ ID NO: 1747390 - RNA, 19 nt, Artificial Sequence
  Description of Artificial Sequence: Synthetic oligonucleotide
aaaaucguuccgcacucgu

SEQ ID NO: 1747391 - RNA, 19 nt, Artificial Sequence
  Description of Artificial Sequence: Synthetic oligonucleotide
ucuuaaguucauugagaag

SEQ ID NO: 1747392 - RNA, 19 nt, Artificial Sequence
  Description of Artificial Sequence: Synthetic oligonucleotide
ugcaauugcagcacuggga

SEQ ID NO: 1747393 - RNA, 19 nt, Artificial Sequence
  Description of Artificial Sequence: Synthetic oligonucleotide
acggaguaagagcaucacc

SEQ ID NO: 1747394 - RNA, 19 nt, Artificial Sequence
  Description of Artificial Sequence: Synthetic oligonucleotide
uagcaaagcauauaucaaa

SEQ ID NO: 1747395 - RNA, 19 nt, Artificial Sequence
  Description of Artificial Sequence: Synthetic oligonucleotide
uacuguaauacaucuuacu

SEQ ID NO: 1747396 - RNA, 19 nt, Artificial Sequence
  Description of Artificial Sequence: Synthetic oligonucleotide
caaagcaagaguugagaac

SEQ ID NO: 1747397 - RNA, 19 nt, Artificial Sequence
  Description of Artificial Sequence: Synthetic oligonucleotide
auucgcugcaaccguaggg

SEQ ID NO: 1747398 - RNA, 19 nt, Artificial Sequence
  Description of Artificial Sequence: Synthetic oligonucleotide
auaacauacuguaauacau

SEQ ID NO: 1747399 - RNA, 19 nt, Artificial Sequence
  Description of Artificial Sequence: Synthetic oligonucleotide
uaucuugauauacuugaua

SEQ ID NO: 1747400 - RNA, 19 nt, Artificial Sequence
  Description of Artificial Sequence: Synthetic oligonucleotide
cuuugagucccuacggaag

SEQ ID NO: 1747401 - RNA, 19 nt, Artificial Sequence
  Description of Artificial Sequence: Synthetic oligonucleotide
aaucguuccgcacucguua

SEQ ID NO: 1747402 - RNA, 19 nt, Artificial Sequence
  Description of Artificial Sequence: Synthetic oligonucleotide
uacugcuucugccugaaaa

SEQ ID NO: 1747403 - RNA, 19 nt, Artificial Sequence
  Description of Artificial Sequence: Synthetic oligonucleotide
auauacuugauaagcuuuc

SEQ ID NO: 1747404 - RNA, 19 nt, Artificial Sequence
  Description of Artificial Sequence: Synthetic oligonucleotide
ugcacgaugagugacguaa

SEQ ID NO: 1747405 - RNA, 19 nt, Artificial Sequence
  Description of Artificial Sequence: Synthetic oligonucleotide
accuuuauauugcucauau

SEQ ID NO: 1747406 - RNA, 19 nt, Artificial Sequence
  Description of Artificial Sequence: Synthetic oligonucleotide
gggacaaugauuuucacaa

SEQ ID NO: 1747407 - RNA, 19 nt, Artificial Sequence
  Description of Artificial Sequence: Synthetic oligonucleotide
agacucugucccaaaaugc

SEQ ID NO: 1747408 - RNA, 19 nt, Artificial Sequence
  Description of Artificial Sequence: Synthetic oligonucleotide
gaugagugacguaauccgg

SEQ ID NO: 1747409 - RNA, 19 nt, Artificial Sequence
  Description of Artificial Sequence: Synthetic oligonucleotide
ugaaaaucguuccgcacuc

SEQ ID NO: 1747410 - RNA, 19 nt, Artificial Sequence
  Description of Artificial Sequence: Synthetic oligonucleotide
aguuuaaggucacccuggg

SEQ ID NO: 1747411 - RNA, 19 nt, Artificial Sequence
  Description of Artificial Sequence: Synthetic oligonucleotide
uagugaauauggauuuucu

SEQ ID NO: 1747412 - RNA, 19 nt, Artificial Sequence
  Description of Artificial Sequence: Synthetic oligonucleotide
cugggcuauguacauaggg

SEQ ID NO: 1747413 - RNA, 19 nt, Artificial Sequence
  Description of Artificial Sequence: Synthetic oligonucleotide
auugagaaggguccuaaaa

SEQ ID NO: 1747414 - RNA, 19 nt, Artificial Sequence
  Description of Artificial Sequence: Synthetic oligonucleotide
uucuagugaauauggauuu

SEQ ID NO: 1747415 - RNA, 19 nt, Artificial Sequence
  Description of Artificial Sequence: Synthetic oligonucleotide
aagcuuucuaagacucugc

SEQ ID NO: 1747416 - RNA, 19 nt, Artificial Sequence
  Description of Artificial Sequence: Synthetic oligonucleotide
acuaaauaucuuucuuugu

SEQ ID NO: 1747417 - RNA, 19 nt, Artificial Sequence
  Description of Artificial Sequence: Synthetic oligonucleotide
guauaacauacuguaauac

SEQ ID NO: 1747418 - RNA, 19 nt, Artificial Sequence
  Description of Artificial Sequence: Synthetic oligonucleotide
aauccgcacaugcacgaug

SEQ ID NO: 1747419 - RNA, 19 nt, Artificial Sequence
  Description of Artificial Sequence: Synthetic oligonucleotide
agcucuaccaacaaagacu

SEQ ID NO: 1747420 - RNA, 19 nt, Artificial Sequence
  Description of Artificial Sequence: Synthetic oligonucleotide
agugacguaauccgggaga

SEQ ID NO: 1747421 - RNA, 19 nt, Artificial Sequence
  Description of Artificial Sequence: Synthetic oligonucleotide
uauagaguucuagugaaua

SEQ ID NO: 1747422 - RNA, 19 nt, Artificial Sequence
  Description of Artificial Sequence: Synthetic oligonucleotide
ugggacaaugauuuucaca

SEQ ID NO: 1747423 - RNA, 19 nt, Artificial Sequence
  Description of Artificial Sequence: Synthetic oligonucleotide
acuaaccauacauucugcu

SEQ ID NO: 1747424 - RNA, 19 nt, Artificial Sequence
  Description of Artificial Sequence: Synthetic oligonucleotide
ucacuauucuguccugacc

SEQ ID NO: 1747425 - RNA, 19 nt, Artificial Sequence
  Description of Artificial Sequence: Synthetic oligonucleotide
guauaaauuuaacguaaga

SEQ ID NO: 1747426 - RNA, 19 nt, Artificial Sequence
  Description of Artificial Sequence: Synthetic oligonucleotide
auauauuacuaaccauaca

SEQ ID NO: 1747427 - RNA, 19 nt, Artificial Sequence
  Description of Artificial Sequence: Synthetic oligonucleotide
ccaacaaagacuucugagc

SEQ ID NO: 1747428 - RNA, 19 nt, Artificial Sequence
  Description of Artificial Sequence: Synthetic oligonucleotide
aaaccuuuauauugcucau

SEQ ID NO: 1747429 - RNA, 19 nt, Artificial Sequence
  Description of Artificial Sequence: Synthetic oligonucleotide
augaauucauccacguuuc

SEQ ID NO: 1747430 - RNA, 19 nt, Artificial Sequence
  Description of Artificial Sequence: Synthetic oligonucleotide
auuacuaaccauacauucu

SEQ ID NO: 1747431 - RNA, 19 nt, Artificial Sequence
  Description of Artificial Sequence: Synthetic oligonucleotide
uccaaauagcaaagcauau

SEQ ID NO: 1747432 - RNA, 19 nt, Artificial Sequence
  Description of Artificial Sequence: Synthetic oligonucleotide
uuguacuuucagcuuugag

SEQ ID NO: 1747433 - RNA, 19 nt, Artificial Sequence
  Description of Artificial Sequence: Synthetic oligonucleotide
uacuaaccauacauucugc

SEQ ID NO: 1747434 - RNA, 19 nt, Artificial Sequence
  Description of Artificial Sequence: Synthetic oligonucleotide
aacuggacucuuaaguuca

SEQ ID NO: 1747435 - RNA, 19 nt, Artificial Sequence
  Description of Artificial Sequence: Synthetic oligonucleotide
ucacccugggcuauguaca

SEQ ID NO: 1747436 - RNA, 19 nt, Artificial Sequence
  Description of Artificial Sequence: Synthetic oligonucleotide
uccucaggugcacuguaag

SEQ ID NO: 1747437 - RNA, 19 nt, Artificial Sequence
  Description of Artificial Sequence: Synthetic oligonucleotide
ugcaaagcaagaguugaga

SEQ ID NO: 1747438 - RNA, 19 nt, Artificial Sequence
  Description of Artificial Sequence: Synthetic oligonucleotide
uauguacauagggagacuc

SEQ ID NO: 1747439 - RNA, 19 nt, Artificial Sequence
  Description of Artificial Sequence: Synthetic oligonucleotide
aaauuuaacguaagacgaa

SEQ ID NO: 1747440 - RNA, 19 nt, Artificial Sequence
  Description of Artificial Sequence: Synthetic oligonucleotide
auuuaacguaagacgaauc

SEQ ID NO: 1747441 - RNA, 19 nt, Artificial Sequence
  Description of Artificial Sequence: Synthetic oligonucleotide
acuguaagggaugaacucu

SEQ ID NO: 1747442 - RNA, 19 nt, Artificial Sequence
  Description of Artificial Sequence: Synthetic oligonucleotide
acacuuguauaaauuuaac

SEQ ID NO: 1747443 - RNA, 19 nt, Artificial Sequence
  Description of Artificial Sequence: Synthetic oligonucleotide
aguaagagcaucaccagaa

SEQ ID NO: 1747444 - RNA, 19 nt, Artificial Sequence
  Description of Artificial Sequence: Synthetic oligonucleotide
auagaguucuagugaauau

SEQ ID NO: 1747445 - RNA, 19 nt, Artificial Sequence
  Description of Artificial Sequence: Synthetic oligonucleotide
auacuguaauacaucuuac

SEQ ID NO: 1747446 - RNA, 19 nt, Artificial Sequence
  Description of Artificial Sequence: Synthetic oligonucleotide
uuaucgccuguaugaaucc

SEQ ID NO: 1747447 - RNA, 19 nt, Artificial Sequence
  Description of Artificial Sequence: Synthetic oligonucleotide
acuauucuguccugaccuc

SEQ ID NO: 1747448 - RNA, 19 nt, Artificial Sequence
  Description of Artificial Sequence: Synthetic oligonucleotide
gcucauauuaucuugauau

SEQ ID NO: 1747449 - RNA, 19 nt, Artificial Sequence
  Description of Artificial Sequence: Synthetic oligonucleotide
cuacggaaggacuuccuac

SEQ ID NO: 1747450 - RNA, 19 nt, Artificial Sequence
  Description of Artificial Sequence: Synthetic oligonucleotide
ugaauccgcacaugcacga

SEQ ID NO: 1747451 - RNA, 19 nt, Artificial Sequence
  Description of Artificial Sequence: Synthetic oligonucleotide
cguuccuaaaucuaaggcg

SEQ ID NO: 1747452 - RNA, 19 nt, Artificial Sequence
  Description of Artificial Sequence: Synthetic oligonucleotide
uucaaaccuuuauauugcu

SEQ ID NO: 1747453 - RNA, 19 nt, Artificial Sequence
  Description of Artificial Sequence: Synthetic oligonucleotide
aggguccuaaaauuaaaau

SEQ ID NO: 1747454 - RNA, 19 nt, Artificial Sequence
  Description of Artificial Sequence: Synthetic oligonucleotide
augagugacguaauccggg

SEQ ID NO: 1747455 - RNA, 19 nt, Artificial Sequence
  Description of Artificial Sequence: Synthetic oligonucleotide
uaccaacaaagacuucuga

SEQ ID NO: 1747456 - RNA, 19 nt, Artificial Sequence
  Description of Artificial Sequence: Synthetic oligonucleotide
cucuuaaguucauugagaa

SEQ ID NO: 1747457 - RNA, 19 nt, Artificial Sequence
  Description of Artificial Sequence: Synthetic oligonucleotide
uucacuauucuguccugac

SEQ ID NO: 1747458 - RNA, 19 nt, Artificial Sequence
  Description of Artificial Sequence: Synthetic oligonucleotide
guacgcuugcaauugcagc

SEQ ID NO: 1747459 - RNA, 19 nt, Artificial Sequence
  Description of Artificial Sequence: Synthetic oligonucleotide
caggcauggagcuguacgc

SEQ ID NO: 1747460 - RNA, 19 nt, Artificial Sequence
  Description of Artificial Sequence: Synthetic oligonucleotide
acggaaggacuuccuacac

SEQ ID NO: 1747461 - RNA, 19 nt, Artificial Sequence
  Description of Artificial Sequence: Synthetic oligonucleotide
agcuuucuaagacucugcu

SEQ ID NO: 1747462 - RNA, 19 nt, Artificial Sequence
  Description of Artificial Sequence: Synthetic oligonucleotide
aacguaagacgaaucuucu

SEQ ID NO: 1747463 - RNA, 19 nt, Artificial Sequence
  Description of Artificial Sequence: Synthetic oligonucleotide
cuagugaauauggauuuuc

SEQ ID NO: 1747464 - RNA, 19 nt, Artificial Sequence
  Description of Artificial Sequence: Synthetic oligonucleotide
uuuucacccguguggauau

SEQ ID NO: 1747465 - RNA, 19 nt, Artificial Sequence
  Description of Artificial Sequence: Synthetic oligonucleotide
ugagugacguaauccggga

SEQ ID NO: 1747466 - RNA, 19 nt, Artificial Sequence
  Description of Artificial Sequence: Synthetic oligonucleotide
uguaagggaugaacucuga

SEQ ID NO: 1747467 - RNA, 19 nt, Artificial Sequence
  Description of Artificial Sequence: Synthetic oligonucleotide
uguccugaccucaacuuua

SEQ ID NO: 1747468 - RNA, 19 nt, Artificial Sequence
  Description of Artificial Sequence: Synthetic oligonucleotide
ucauccacguuucuagauu

SEQ ID NO: 1747469 - RNA, 19 nt, Artificial Sequence
  Description of Artificial Sequence: Synthetic oligonucleotide
ugagagucugggaagugua

SEQ ID NO: 1747470 - RNA, 19 nt, Artificial Sequence
  Description of Artificial Sequence: Synthetic oligonucleotide
aucguuccgcacucguuac

SEQ ID NO: 1747471 - RNA, 19 nt, Artificial Sequence
  Description of Artificial Sequence: Synthetic oligonucleotide
uauacuugauaagcuuucu

SEQ ID NO: 1747472 - RNA, 19 nt, Artificial Sequence
  Description of Artificial Sequence: Synthetic oligonucleotide
ugcuaacuggacucuuaag

SEQ ID NO: 1747473 - RNA, 19 nt, Artificial Sequence
  Description of Artificial Sequence: Synthetic oligonucleotide
uuaacguaagacgaaucuu

SEQ ID NO: 1747474 - RNA, 19 nt, Artificial Sequence
  Description of Artificial Sequence: Synthetic oligonucleotide
uuauagaguucuagugaau

SEQ ID NO: 1747475 - RNA, 19 nt, Artificial Sequence
  Description of Artificial Sequence: Synthetic oligonucleotide
ucaccagaagccugaggcc

SEQ ID NO: 1747476 - RNA, 19 nt, Artificial Sequence
  Description of Artificial Sequence: Synthetic oligonucleotide
uccgggagaaggcuuuccc

SEQ ID NO: 1747477 - RNA, 19 nt, Artificial Sequence
  Description of Artificial Sequence: Synthetic oligonucleotide
augaauccgcacaugcacg

SEQ ID NO: 1747478 - RNA, 19 nt, Artificial Sequence
  Description of Artificial Sequence: Synthetic oligonucleotide
uucuaagacucugcuaacu

SEQ ID NO: 1747479 - RNA, 19 nt, Artificial Sequence
  Description of Artificial Sequence: Synthetic oligonucleotide
uuucuaagacucugcuaac

SEQ ID NO: 1747480 - RNA, 19 nt, Artificial Sequence
  Description of Artificial Sequence: Synthetic oligonucleotide
acuguuugagagucuggga

SEQ ID NO: 1747481 - RNA, 19 nt, Artificial Sequence
  Description of Artificial Sequence: Synthetic oligonucleotide
gaguaagagcaucaccaga

SEQ ID NO: 1747482 - RNA, 19 nt, Artificial Sequence
  Description of Artificial Sequence: Synthetic oligonucleotide
auccaaauagcaaagcaua

SEQ ID NO: 1747483 - RNA, 19 nt, Artificial Sequence
  Description of Artificial Sequence: Synthetic oligonucleotide
aaggguccuaaaauuaaaa

SEQ ID NO: 1747484 - RNA, 19 nt, Artificial Sequence
  Description of Artificial Sequence: Synthetic oligonucleotide
uaaaucuaaggcguuuaua

SEQ ID NO: 1747485 - RNA, 19 nt, Artificial Sequence
  Description of Artificial Sequence: Synthetic oligonucleotide
cagcuuugagucccuacgg

SEQ ID NO: 1747486 - RNA, 19 nt, Artificial Sequence
  Description of Artificial Sequence: Synthetic oligonucleotide
acgguuuaucgccuguaug

SEQ ID NO: 1747487 - RNA, 19 nt, Artificial Sequence
  Description of Artificial Sequence: Synthetic oligonucleotide
ugccugaaaaucguuccgc

SEQ ID NO: 1747488 - RNA, 19 nt, Artificial Sequence
  Description of Artificial Sequence: Synthetic oligonucleotide
ugcucauauuaucuugaua

SEQ ID NO: 1747489 - RNA, 19 nt, Artificial Sequence
  Description of Artificial Sequence: Synthetic oligonucleotide
uacuuucagcuuugagucc

SEQ ID NO: 1747490 - RNA, 19 nt, Artificial Sequence
  Description of Artificial Sequence: Synthetic oligonucleotide
acguaauccgggagaaggc

SEQ ID NO: 1747491 - RNA, 19 nt, Artificial Sequence
  Description of Artificial Sequence: Synthetic oligonucleotide
gucacccugggcuauguac

SEQ ID NO: 1747492 - RNA, 19 nt, Artificial Sequence
  Description of Artificial Sequence: Synthetic oligonucleotide
acucuuaaguucauugaga

SEQ ID NO: 1747493 - RNA, 19 nt, Artificial Sequence
  Description of Artificial Sequence: Synthetic oligonucleotide
cugccugaaaaucguuccg

SEQ ID NO: 1747494 - RNA, 19 nt, Artificial Sequence
  Description of Artificial Sequence: Synthetic oligonucleotide
uauucuguccugaccucaa

SEQ ID NO: 1747495 - RNA, 19 nt, Artificial Sequence
  Description of Artificial Sequence: Synthetic oligonucleotide
uaagacgaaucuucugaua

SEQ ID NO: 1747496 - RNA, 19 nt, Artificial Sequence
  Description of Artificial Sequence: Synthetic oligonucleotide
gaaaaucguuccgcacucg

SEQ ID NO: 1747497 - RNA, 19 nt, Artificial Sequence
  Description of Artificial Sequence: Synthetic oligonucleotide
uuaaggucacccugggcua

SEQ ID NO: 1747498 - RNA, 19 nt, Artificial Sequence
  Description of Artificial Sequence: Synthetic oligonucleotide
uaucgccuguaugaauccg

SEQ ID NO: 1747499 - RNA, 19 nt, Artificial Sequence
  Description of Artificial Sequence: Synthetic oligonucleotide
guaagggaugaacucugac

SEQ ID NO: 1747500 - RNA, 19 nt, Artificial Sequence
  Description of Artificial Sequence: Synthetic oligonucleotide
gaccucaacuuuauacagc

SEQ ID NO: 1747501 - RNA, 19 nt, Artificial Sequence
  Description of Artificial Sequence: Synthetic oligonucleotide
ggcguuccuaaaucuaagg

SEQ ID NO: 1747502 - RNA, 19 nt, Artificial Sequence
  Description of Artificial Sequence: Synthetic oligonucleotide
ucugcuaacuggacucuua

SEQ ID NO: 1747503 - RNA, 19 nt, Artificial Sequence
  Description of Artificial Sequence: Synthetic oligonucleotide
uuccgcacucguuacauuu

SEQ ID NO: 1747504 - RNA, 19 nt, Artificial Sequence
  Description of Artificial Sequence: Synthetic oligonucleotide
ggaguaagagcaucaccag

SEQ ID NO: 1747505 - RNA, 19 nt, Artificial Sequence
  Description of Artificial Sequence: Synthetic oligonucleotide
uucagcuuugagucccuac

SEQ ID NO: 1747506 - RNA, 19 nt, Artificial Sequence
  Description of Artificial Sequence: Synthetic oligonucleotide
uaaggcguuuauagaguuc

SEQ ID NO: 1747507 - RNA, 19 nt, Artificial Sequence
  Description of Artificial Sequence: Synthetic oligonucleotide
ucaggcguuccuaaaucua

SEQ ID NO: 1747508 - RNA, 19 nt, Artificial Sequence
  Description of Artificial Sequence: Synthetic oligonucleotide
acaugcacgaugagugacg

SEQ ID NO: 1747509 - RNA, 19 nt, Artificial Sequence
  Description of Artificial Sequence: Synthetic oligonucleotide
cagcucuaccaacaaagac

SEQ ID NO: 1747510 - RNA, 19 nt, Artificial Sequence
  Description of Artificial Sequence: Synthetic oligonucleotide
ucgccuguaugaauccgca

SEQ ID NO: 1747511 - RNA, 19 nt, Artificial Sequence
  Description of Artificial Sequence: Synthetic oligonucleotide
ggguccuaaaauuaaaaua

SEQ ID NO: 1747512 - RNA, 19 nt, Artificial Sequence
  Description of Artificial Sequence: Synthetic oligonucleotide
acguaagacgaaucuucug

SEQ ID NO: 1747513 - RNA, 19 nt, Artificial Sequence
  Description of Artificial Sequence: Synthetic oligonucleotide
uugagagucugggaagugu

SEQ ID NO: 1747514 - RNA, 19 nt, Artificial Sequence
  Description of Artificial Sequence: Synthetic oligonucleotide
guuccuaaaucuaaggcgu

SEQ ID NO: 1747515 - RNA, 19 nt, Artificial Sequence
  Description of Artificial Sequence: Synthetic oligonucleotide
ugaauucauccacguuucu

SEQ ID NO: 1747516 - RNA, 19 nt, Artificial Sequence
  Description of Artificial Sequence: Synthetic oligonucleotide
cguuuauagaguucuagug

SEQ ID NO: 1747517 - RNA, 19 nt, Artificial Sequence
  Description of Artificial Sequence: Synthetic oligonucleotide
cgaugagugacguaauccg

SEQ ID NO: 1747518 - RNA, 19 nt, Artificial Sequence
  Description of Artificial Sequence: Synthetic oligonucleotide
ucauugagaaggguccuaa

SEQ ID NO: 1747519 - RNA, 19 nt, Artificial Sequence
  Description of Artificial Sequence: Synthetic oligonucleotide
agcuuugagucccuacgga

SEQ ID NO: 1747520 - RNA, 19 nt, Artificial Sequence
  Description of Artificial Sequence: Synthetic oligonucleotide
auacuugauaagcuuucua

SEQ ID NO: 1747521 - RNA, 19 nt, Artificial Sequence
  Description of Artificial Sequence: Synthetic oligonucleotide
ucugcucaggcguuccuaa

SEQ ID NO: 1747522 - RNA, 19 nt, Artificial Sequence
  Description of Artificial Sequence: Synthetic oligonucleotide
cuacacuuguauaaauuua

SEQ ID NO: 1747523 - RNA, 19 nt, Artificial Sequence
  Description of Artificial Sequence: Synthetic oligonucleotide
ugcucaggcguuccuaaau

SEQ ID NO: 1747524 - RNA, 19 nt, Artificial Sequence
  Description of Artificial Sequence: Synthetic oligonucleotide
ccuaaaauuaaaauacugu

SEQ ID NO: 1747525 - RNA, 19 nt, Artificial Sequence
  Description of Artificial Sequence: Synthetic oligonucleotide
uacgguuuaucgccuguau

SEQ ID NO: 1747526 - RNA, 19 nt, Artificial Sequence
  Description of Artificial Sequence: Synthetic oligonucleotide
uggagcuguacgcuugcaa

SEQ ID NO: 1747527 - RNA, 19 nt, Artificial Sequence
  Description of Artificial Sequence: Synthetic oligonucleotide
agcuguacgcuugcaauug

SEQ ID NO: 1747528 - RNA, 19 nt, Artificial Sequence
  Description of Artificial Sequence: Synthetic oligonucleotide
gcguuccuaaaucuaaggc

SEQ ID NO: 1747529 - RNA, 19 nt, Artificial Sequence
  Description of Artificial Sequence: Synthetic oligonucleotide
uucguacgguuuaucgccu

SEQ ID NO: 1747530 - RNA, 19 nt, Artificial Sequence
  Description of Artificial Sequence: Synthetic oligonucleotide
caucuuacuaaauaucuuu

SEQ ID NO: 1747531 - RNA, 19 nt, Artificial Sequence
  Description of Artificial Sequence: Synthetic oligonucleotide
uuccuacacuuguauaaau

SEQ ID NO: 1747532 - RNA, 19 nt, Artificial Sequence
  Description of Artificial Sequence: Synthetic oligonucleotide
gcuaacuggacucuuaagu

SEQ ID NO: 1747533 - RNA, 19 nt, Artificial Sequence
  Description of Artificial Sequence: Synthetic oligonucleotide
guuuaaggucacccugggc

SEQ ID NO: 1747534 - RNA, 19 nt, Artificial Sequence
  Description of Artificial Sequence: Synthetic oligonucleotide
cacuauucuguccugaccu

SEQ ID NO: 1747535 - RNA, 19 nt, Artificial Sequence
  Description of Artificial Sequence: Synthetic oligonucleotide
gcuauguacauagggagac

SEQ ID NO: 1747536 - RNA, 19 nt, Artificial Sequence
  Description of Artificial Sequence: Synthetic oligonucleotide
acaaugauuuucacaaauu

SEQ ID NO: 1747537 - RNA, 19 nt, Artificial Sequence
  Description of Artificial Sequence: Synthetic oligonucleotide
cugaaaaucguuccgcacu

SEQ ID NO: 1747538 - RNA, 19 nt, Artificial Sequence
  Description of Artificial Sequence: Synthetic oligonucleotide
gauauuguguauguuugau

SEQ ID NO: 1747539 - RNA, 19 nt, Artificial Sequence
  Description of Artificial Sequence: Synthetic oligonucleotide
ucccgcauucgcugcaacc

SEQ ID NO: 1747540 - RNA, 19 nt, Artificial Sequence
  Description of Artificial Sequence: Synthetic oligonucleotide
agaaggguccuaaaauuaa

SEQ ID NO: 1747541 - RNA, 19 nt, Artificial Sequence
  Description of Artificial Sequence: Synthetic oligonucleotide
gagaaggguccuaaaauua

SEQ ID NO: 1747542 - RNA, 19 nt, Artificial Sequence
  Description of Artificial Sequence: Synthetic oligonucleotide
uccacguuucuagauucac

SEQ ID NO: 1747543 - RNA, 19 nt, Artificial Sequence
  Description of Artificial Sequence: Synthetic oligonucleotide
acgcuugcaauugcagcac

SEQ ID NO: 1747544 - RNA, 19 nt, Artificial Sequence
  Description of Artificial Sequence: Synthetic oligonucleotide
aauccgggagaaggcuuuc

SEQ ID NO: 1747545 - RNA, 19 nt, Artificial Sequence
  Description of Artificial Sequence: Synthetic oligonucleotide
cauucgcugcaaccguagg

SEQ ID NO: 1747546 - RNA, 19 nt, Artificial Sequence
  Description of Artificial Sequence: Synthetic oligonucleotide
cgcacaugcacgaugagug

SEQ ID NO: 1747547 - RNA, 19 nt, Artificial Sequence
  Description of Artificial Sequence: Synthetic oligonucleotide
ggcguuuauagaguucuag

SEQ ID NO: 1747548 - RNA, 19 nt, Artificial Sequence
  Description of Artificial Sequence: Synthetic oligonucleotide
cacugggagacggaguaag

SEQ ID NO: 1747549 - RNA, 19 nt, Artificial Sequence
  Description of Artificial Sequence: Synthetic oligonucleotide
cauggagcuguacgcuugc

SEQ ID NO: 1747550 - RNA, 19 nt, Artificial Sequence
  Description of Artificial Sequence: Synthetic oligonucleotide
aguguauaacauacuguaa

SEQ ID NO: 1747551 - RNA, 19 nt, Artificial Sequence
  Description of Artificial Sequence: Synthetic oligonucleotide
auucacuauucuguccuga

SEQ ID NO: 1747552 - RNA, 19 nt, Artificial Sequence
  Description of Artificial Sequence: Synthetic oligonucleotide
auacuguuugagagucugg

SEQ ID NO: 1747553 - RNA, 19 nt, Artificial Sequence
  Description of Artificial Sequence: Synthetic oligonucleotide
ggacucuuaaguucauuga

SEQ ID NO: 1747554 - RNA, 19 nt, Artificial Sequence
  Description of Artificial Sequence: Synthetic oligonucleotide
uuuguacuuucagcuuuga

SEQ ID NO: 1747555 - RNA, 19 nt, Artificial Sequence
  Description of Artificial Sequence: Synthetic oligonucleotide
gacgaaucuucugauauau

SEQ ID NO: 1747556 - RNA, 19 nt, Artificial Sequence
  Description of Artificial Sequence: Synthetic oligonucleotide
gccuguaugaauccgcaca

SEQ ID NO: 1747557 - RNA, 19 nt, Artificial Sequence
  Description of Artificial Sequence: Synthetic oligonucleotide
auagggagacucuguccca

SEQ ID NO: 1747558 - RNA, 19 nt, Artificial Sequence
  Description of Artificial Sequence: Synthetic oligonucleotide
uugggacaaugauuuucac

SEQ ID NO: 1747559 - RNA, 19 nt, Artificial Sequence
  Description of Artificial Sequence: Synthetic oligonucleotide
gaaggguccuaaaauuaaa

SEQ ID NO: 1747560 - RNA, 19 nt, Artificial Sequence
  Description of Artificial Sequence: Synthetic oligonucleotide
guucuagugaauauggauu

SEQ ID NO: 1747561 - RNA, 19 nt, Artificial Sequence
  Description of Artificial Sequence: Synthetic oligonucleotide
gcaagaguugagaacugag

SEQ ID NO: 1747562 - RNA, 19 nt, Artificial Sequence
  Description of Artificial Sequence: Synthetic oligonucleotide
acguuucuagauucacuau

SEQ ID NO: 1747563 - RNA, 19 nt, Artificial Sequence
  Description of Artificial Sequence: Synthetic oligonucleotide
gagacggaguaagagcauc

SEQ ID NO: 1747564 - RNA, 19 nt, Artificial Sequence
  Description of Artificial Sequence: Synthetic oligonucleotide
aagcaagaguugagaacug

SEQ ID NO: 1747565 - RNA, 19 nt, Artificial Sequence
  Description of Artificial Sequence: Synthetic oligonucleotide
aaccuuuauauugcucaua

SEQ ID NO: 1747566 - RNA, 19 nt, Artificial Sequence
  Description of Artificial Sequence: Synthetic oligonucleotide
cuaacuggacucuuaaguu

SEQ ID NO: 1747567 - RNA, 19 nt, Artificial Sequence
  Description of Artificial Sequence: Synthetic oligonucleotide
agacgaaucuucugauaua

SEQ ID NO: 1747568 - RNA, 19 nt, Artificial Sequence
  Description of Artificial Sequence: Synthetic oligonucleotide
agcaagaguugagaacuga

SEQ ID NO: 1747569 - RNA, 19 nt, Artificial Sequence
  Description of Artificial Sequence: Synthetic oligonucleotide
uacauucugcucaggcguu

SEQ ID NO: 1747570 - RNA, 19 nt, Artificial Sequence
  Description of Artificial Sequence: Synthetic oligonucleotide
cacgaugagugacguaauc

SEQ ID NO: 1747571 - RNA, 19 nt, Artificial Sequence
  Description of Artificial Sequence: Synthetic oligonucleotide
cucauauuaucuugauaua

SEQ ID NO: 1747572 - RNA, 19 nt, Artificial Sequence
  Description of Artificial Sequence: Synthetic oligonucleotide
ugagucccuacggaaggac

SEQ ID NO: 1747573 - RNA, 19 nt, Artificial Sequence
  Description of Artificial Sequence: Synthetic oligonucleotide
uuccuaaaucuaaggcguu

SEQ ID NO: 1747574 - RNA, 19 nt, Artificial Sequence
  Description of Artificial Sequence: Synthetic oligonucleotide
gacggaguaagagcaucac

SEQ ID NO: 1747575 - RNA, 19 nt, Artificial Sequence
  Description of Artificial Sequence: Synthetic oligonucleotide
agggaugaacucugacaga

SEQ ID NO: 1747576 - RNA, 19 nt, Artificial Sequence
  Description of Artificial Sequence: Synthetic oligonucleotide
acccguguggauauugugu

SEQ ID NO: 1747577 - RNA, 19 nt, Artificial Sequence
  Description of Artificial Sequence: Synthetic oligonucleotide
cggaguaagagcaucacca

SEQ ID NO: 1747578 - RNA, 19 nt, Artificial Sequence
  Description of Artificial Sequence: Synthetic oligonucleotide
acaucuuacuaaauaucuu

SEQ ID NO: 1747579 - RNA, 19 nt, Artificial Sequence
  Description of Artificial Sequence: Synthetic oligonucleotide
acucugucccaaaaugccu

SEQ ID NO: 1747580 - RNA, 19 nt, Artificial Sequence
  Description of Artificial Sequence: Synthetic oligonucleotide
uccuaaaucuaaggcguuu

SEQ ID NO: 1747581 - RNA, 19 nt, Artificial Sequence
  Description of Artificial Sequence: Synthetic oligonucleotide
cguaagacgaaucuucuga

SEQ ID NO: 1747582 - RNA, 19 nt, Artificial Sequence
  Description of Artificial Sequence: Synthetic oligonucleotide
ucuagugaauauggauuuu

SEQ ID NO: 1747583 - RNA, 19 nt, Artificial Sequence
  Description of Artificial Sequence: Synthetic oligonucleotide
aucuucugauauauuacua

SEQ ID NO: 1747584 - RNA, 19 nt, Artificial Sequence
  Description of Artificial Sequence: Synthetic oligonucleotide
cauucugcucaggcguucc

SEQ ID NO: 1747585 - RNA, 19 nt, Artificial Sequence
  Description of Artificial Sequence: Synthetic oligonucleotide
gacuuccuacacuuguaua

SEQ ID NO: 1747586 - RNA, 19 nt, Artificial Sequence
  Description of Artificial Sequence: Synthetic oligonucleotide
guauguuugaugagguacu

SEQ ID NO: 1747587 - RNA, 19 nt, Artificial Sequence
  Description of Artificial Sequence: Synthetic oligonucleotide
cuugcacguguaagguuuc

SEQ ID NO: 1747588 - RNA, 19 nt, Artificial Sequence
  Description of Artificial Sequence: Synthetic oligonucleotide
cacagauuuuacauucgua

SEQ ID NO: 1747589 - RNA, 19 nt, Artificial Sequence
  Description of Artificial Sequence: Synthetic oligonucleotide
ucguacgguuuaucgccug

SEQ ID NO: 1747590 - RNA, 19 nt, Artificial Sequence
  Description of Artificial Sequence: Synthetic oligonucleotide
ggauauuguguauguuuga

SEQ ID NO: 1747591 - RNA, 19 nt, Artificial Sequence
  Description of Artificial Sequence: Synthetic oligonucleotide
aaaucguuccgcacucguu

SEQ ID NO: 1747592 - RNA, 19 nt, Artificial Sequence
  Description of Artificial Sequence: Synthetic oligonucleotide
uccgcacaugcacgaugag

SEQ ID NO: 1747593 - RNA, 19 nt, Artificial Sequence
  Description of Artificial Sequence: Synthetic oligonucleotide
caggcguuccuaaaucuaa

SEQ ID NO: 1747594 - RNA, 19 nt, Artificial Sequence
  Description of Artificial Sequence: Synthetic oligonucleotide
ugcagcacugggagacgga

SEQ ID NO: 1747595 - RNA, 19 nt, Artificial Sequence
  Description of Artificial Sequence: Synthetic oligonucleotide
guaagacgaaucuucugau

SEQ ID NO: 1747596 - RNA, 19 nt, Artificial Sequence
  Description of Artificial Sequence: Synthetic oligonucleotide
ugacguaauccgggagaag

SEQ ID NO: 1747597 - RNA, 19 nt, Artificial Sequence
  Description of Artificial Sequence: Synthetic oligonucleotide
ucguuccgcacucguuaca

SEQ ID NO: 1747598 - RNA, 19 nt, Artificial Sequence
  Description of Artificial Sequence: Synthetic oligonucleotide
auguacauagggagacucu

SEQ ID NO: 1747599 - RNA, 19 nt, Artificial Sequence
  Description of Artificial Sequence: Synthetic oligonucleotide
uugagucccuacggaagga

SEQ ID NO: 1747600 - RNA, 19 nt, Artificial Sequence
  Description of Artificial Sequence: Synthetic oligonucleotide
agacggaguaagagcauca

SEQ ID NO: 1747601 - RNA, 19 nt, Artificial Sequence
  Description of Artificial Sequence: Synthetic oligonucleotide
uucauugagaaggguccua

SEQ ID NO: 1747602 - RNA, 19 nt, Artificial Sequence
  Description of Artificial Sequence: Synthetic oligonucleotide
gggaugaacucugacagaa

SEQ ID NO: 1747603 - RNA, 19 nt, Artificial Sequence
  Description of Artificial Sequence: Synthetic oligonucleotide
cuguacgcuugcaauugca

SEQ ID NO: 1747604 - RNA, 19 nt, Artificial Sequence
  Description of Artificial Sequence: Synthetic oligonucleotide
aggcguuccuaaaucuaag

SEQ ID NO: 1747605 - RNA, 19 nt, Artificial Sequence
  Description of Artificial Sequence: Synthetic oligonucleotide
cccacagauuuuacauucg

SEQ ID NO: 1747606 - RNA, 19 nt, Artificial Sequence
  Description of Artificial Sequence: Synthetic oligonucleotide
ucccuacggaaggacuucc

SEQ ID NO: 1747607 - RNA, 19 nt, Artificial Sequence
  Description of Artificial Sequence: Synthetic oligonucleotide
cugauauauuacuaaccau

SEQ ID NO: 1747608 - RNA, 19 nt, Artificial Sequence
  Description of Artificial Sequence: Synthetic oligonucleotide
ccugaaaaucguuccgcac

SEQ ID NO: 1747609 - RNA, 19 nt, Artificial Sequence
  Description of Artificial Sequence: Synthetic oligonucleotide
agguacugcuucugccuga

SEQ ID NO: 1747610 - RNA, 19 nt, Artificial Sequence
  Description of Artificial Sequence: Synthetic oligonucleotide
ccccaugaauucauccacg

SEQ ID NO: 1747611 - RNA, 19 nt, Artificial Sequence
  Description of Artificial Sequence: Synthetic oligonucleotide
cuauucuguccugaccuca

SEQ ID NO: 1747612 - RNA, 19 nt, Artificial Sequence
  Description of Artificial Sequence: Synthetic oligonucleotide
agagucugggaaguguaua

SEQ ID NO: 1747613 - RNA, 19 nt, Artificial Sequence
  Description of Artificial Sequence: Synthetic oligonucleotide
uccuugcacguguaagguu

SEQ ID NO: 1747614 - RNA, 19 nt, Artificial Sequence
  Description of Artificial Sequence: Synthetic oligonucleotide
cuuccuacacuuguauaaa

SEQ ID NO: 1747615 - RNA, 19 nt, Artificial Sequence
  Description of Artificial Sequence: Synthetic oligonucleotide
cccgcauucgcugcaaccg

SEQ ID NO: 1747616 - RNA, 19 nt, Artificial Sequence
  Description of Artificial Sequence: Synthetic oligonucleotide
cuguaugaauccgcacaug

SEQ ID NO: 1747617 - RNA, 19 nt, Artificial Sequence
  Description of Artificial Sequence: Synthetic oligonucleotide
aggugcacuguaagggaug

SEQ ID NO: 1747618 - RNA, 19 nt, Artificial Sequence
  Description of Artificial Sequence: Synthetic oligonucleotide
cugcuaacuggacucuuaa

SEQ ID NO: 1747619 - RNA, 19 nt, Artificial Sequence
  Description of Artificial Sequence: Synthetic oligonucleotide
acauacuguaauacaucuu

SEQ ID NO: 1747620 - RNA, 19 nt, Artificial Sequence
  Description of Artificial Sequence: Synthetic oligonucleotide
agaagccugaggccagcuu

SEQ ID NO: 1747621 - RNA, 19 nt, Artificial Sequence
  Description of Artificial Sequence: Synthetic oligonucleotide
gugacguaauccgggagaa

SEQ ID NO: 1747622 - RNA, 19 nt, Artificial Sequence
  Description of Artificial Sequence: Synthetic oligonucleotide
gcucaggcguuccuaaauc

SEQ ID NO: 1747623 - RNA, 19 nt, Artificial Sequence
  Description of Artificial Sequence: Synthetic oligonucleotide
uucugcucaggcguuccua

SEQ ID NO: 1747624 - RNA, 19 nt, Artificial Sequence
  Description of Artificial Sequence: Synthetic oligonucleotide
agucccuacggaaggacuu

SEQ ID NO: 1747625 - RNA, 19 nt, Artificial Sequence
  Description of Artificial Sequence: Synthetic oligonucleotide
gcguuuauagaguucuagu

SEQ ID NO: 1747626 - RNA, 19 nt, Artificial Sequence
  Description of Artificial Sequence: Synthetic oligonucleotide
cauugagaaggguccuaaa

SEQ ID NO: 1747627 - RNA, 19 nt, Artificial Sequence
  Description of Artificial Sequence: Synthetic oligonucleotide
guguauguuugaugaggua

SEQ ID NO: 1747628 - RNA, 19 nt, Artificial Sequence
  Description of Artificial Sequence: Synthetic oligonucleotide
guuuaucgccuguaugaau

SEQ ID NO: 1747629 - RNA, 19 nt, Artificial Sequence
  Description of Artificial Sequence: Synthetic oligonucleotide
gcuguacgcuugcaauugc

SEQ ID NO: 1747630 - RNA, 19 nt, Artificial Sequence
  Description of Artificial Sequence: Synthetic oligonucleotide
cuaaaucuaaggcguuuau

SEQ ID NO: 1747631 - RNA, 19 nt, Artificial Sequence
  Description of Artificial Sequence: Synthetic oligonucleotide
gccugaaaaucguuccgca

SEQ ID NO: 1747632 - RNA, 19 nt, Artificial Sequence
  Description of Artificial Sequence: Synthetic oligonucleotide
uugcacguguaagguuucu

SEQ ID NO: 1747633 - RNA, 19 nt, Artificial Sequence
  Description of Artificial Sequence: Synthetic oligonucleotide
ggagcuguacgcuugcaau

SEQ ID NO: 1747634 - RNA, 19 nt, Artificial Sequence
  Description of Artificial Sequence: Synthetic oligonucleotide
cucuaccaacaaagacuuc

SEQ ID NO: 1747635 - RNA, 19 nt, Artificial Sequence
  Description of Artificial Sequence: Synthetic oligonucleotide
cagugaguuuaaggucacc

SEQ ID NO: 1747636 - RNA, 19 nt, Artificial Sequence
  Description of Artificial Sequence: Synthetic oligonucleotide
gagcuguacgcuugcaauu

SEQ ID NO: 1747637 - RNA, 19 nt, Artificial Sequence
  Description of Artificial Sequence: Synthetic oligonucleotide
gcuacacagugaguuuaag

SEQ ID NO: 1747638 - RNA, 19 nt, Artificial Sequence
  Description of Artificial Sequence: Synthetic oligonucleotide
gguuuaucgccuguaugaa

SEQ ID NO: 1747639 - RNA, 19 nt, Artificial Sequence
  Description of Artificial Sequence: Synthetic oligonucleotide
gcuugcaauugcagcacug

SEQ ID NO: 1747640 - RNA, 19 nt, Artificial Sequence
  Description of Artificial Sequence: Synthetic oligonucleotide
gcauucgcugcaaccguag

SEQ ID NO: 1747641 - RNA, 19 nt, Artificial Sequence
  Description of Artificial Sequence: Synthetic oligonucleotide
ccuacacuuguauaaauuu

SEQ ID NO: 1747642 - RNA, 19 nt, Artificial Sequence
  Description of Artificial Sequence: Synthetic oligonucleotide
gcuuucuaagacucugcua

SEQ ID NO: 1747643 - RNA, 19 nt, Artificial Sequence
  Description of Artificial Sequence: Synthetic oligonucleotide
ggacaaugauuuucacaaa

SEQ ID NO: 1747644 - RNA, 19 nt, Artificial Sequence
  Description of Artificial Sequence: Synthetic oligonucleotide
guacauagggagacucugu

SEQ ID NO: 1747645 - RNA, 19 nt, Artificial Sequence
  Description of Artificial Sequence: Synthetic oligonucleotide
guucauugagaaggguccu

SEQ ID NO: 1747646 - RNA, 19 nt, Artificial Sequence
  Description of Artificial Sequence: Synthetic oligonucleotide
gucccuacggaaggacuuc

SEQ ID NO: 1747647 - RNA, 19 nt, Artificial Sequence
  Description of Artificial Sequence: Synthetic oligonucleotide
gcucuaccaacaaagacuu

SEQ ID NO: 1747648 - RNA, 19 nt, Artificial Sequence
  Description of Artificial Sequence: Synthetic oligonucleotide
cuccucaggugcacuguaa

SEQ ID NO: 1747649 - RNA, 19 nt, Artificial Sequence
  Description of Artificial Sequence: Synthetic oligonucleotide
gagucccuacggaaggacu

SEQ ID NO: 1747650 - RNA, 19 nt, Artificial Sequence
  Description of Artificial Sequence: Synthetic oligonucleotide
acgaaucuucugauauauu

SEQ ID NO: 1747651 - RNA, 19 nt, Artificial Sequence
  Description of Artificial Sequence: Synthetic oligonucleotide
gcacuguaagggaugaacu

SEQ ID NO: 1747652 - RNA, 19 nt, Artificial Sequence
  Description of Artificial Sequence: Synthetic oligonucleotide
gauuugccacugaaggcuu

SEQ ID NO: 1747653 - RNA, 19 nt, Artificial Sequence
  Description of Artificial Sequence: Synthetic oligonucleotide
caugcacgaugagugacgu

SEQ ID NO: 1747654 - RNA, 19 nt, Artificial Sequence
  Description of Artificial Sequence: Synthetic oligonucleotide
gagagucugggaaguguau

SEQ ID NO: 1747655 - RNA, 19 nt, Artificial Sequence
  Description of Artificial Sequence: Synthetic oligonucleotide
cuccuugcacguguaaggu

SEQ ID NO: 1747656 - RNA, 19 nt, Artificial Sequence
  Description of Artificial Sequence: Synthetic oligonucleotide
cccguguggauauugugua

SEQ ID NO: 1747657 - RNA, 19 nt, Artificial Sequence
  Description of Artificial Sequence: Synthetic oligonucleotide
ccuugcacguguaagguuu

SEQ ID NO: 1747658 - RNA, 19 nt, Artificial Sequence
  Description of Artificial Sequence: Synthetic oligonucleotide
augcacgaugagugacgua

SEQ ID NO: 1747659 - RNA, 19 nt, Artificial Sequence
  Description of Artificial Sequence: Synthetic oligonucleotide
caggugcacuguaagggau

SEQ ID NO: 1747660 - RNA, 19 nt, Artificial Sequence
  Description of Artificial Sequence: Synthetic oligonucleotide
ccuaaaucuaaggcguuua

SEQ ID NO: 1747661 - RNA, 19 nt, Artificial Sequence
  Description of Artificial Sequence: Synthetic oligonucleotide
gcuucugccugaaaaucgu

SEQ ID NO: 1747662 - RNA, 19 nt, Artificial Sequence
  Description of Artificial Sequence: Synthetic oligonucleotide
cuguccugaccucaacuuu

SEQ ID NO: 1747663 - RNA, 19 nt, Artificial Sequence
  Description of Artificial Sequence: Synthetic oligonucleotide
cugcucaggcguuccuaaa

SEQ ID NO: 1747664 - RNA, 19 nt, Artificial Sequence
  Description of Artificial Sequence: Synthetic oligonucleotide
gggaaguguauaacauacu

SEQ ID NO: 1747665 - RNA, 19 nt, Artificial Sequence
  Description of Artificial Sequence: Synthetic oligonucleotide
gaauccgcacaugcacgau

SEQ ID NO: 1747666 - RNA, 19 nt, Artificial Sequence
  Description of Artificial Sequence: Synthetic oligonucleotide
ccuacggaaggacuuccua

SEQ ID NO: 1747667 - RNA, 19 nt, Artificial Sequence
  Description of Artificial Sequence: Synthetic oligonucleotide
ccucuuaauuucaaaccuu

SEQ ID NO: 1747668 - RNA, 19 nt, Artificial Sequence
  Description of Artificial Sequence: Synthetic oligonucleotide
uuucacccguguggauauu

SEQ ID NO: 1747669 - RNA, 19 nt, Artificial Sequence
  Description of Artificial Sequence: Synthetic oligonucleotide
cguuucuagauucacuauu

SEQ ID NO: 1747670 - RNA, 19 nt, Artificial Sequence
  Description of Artificial Sequence: Synthetic oligonucleotide
aggcguuuauagaguucua

SEQ ID NO: 1747671 - RNA, 19 nt, Artificial Sequence
  Description of Artificial Sequence: Synthetic oligonucleotide
ccagaagccugaggccagc

SEQ ID NO: 1747672 - RNA, 19 nt, Artificial Sequence
  Description of Artificial Sequence: Synthetic oligonucleotide
ggcauggagcuguacgcuu

SEQ ID NO: 1747673 - RNA, 19 nt, Artificial Sequence
  Description of Artificial Sequence: Synthetic oligonucleotide
cgccuguaugaauccgcac

SEQ ID NO: 1747674 - RNA, 19 nt, Artificial Sequence
  Description of Artificial Sequence: Synthetic oligonucleotide
cguaauccgggagaaggcu

SEQ ID NO: 1747675 - RNA, 19 nt, Artificial Sequence
  Description of Artificial Sequence: Synthetic oligonucleotide
ggucacccugggcuaugua

SEQ ID NO: 1747676 - RNA, 19 nt, Artificial Sequence
  Description of Artificial Sequence: Synthetic oligonucleotide
cagaagccugaggccagcu

SEQ ID NO: 1747677 - RNA, 19 nt, Artificial Sequence
  Description of Artificial Sequence: Synthetic oligonucleotide
ccaugaauucauccacguu

SEQ ID NO: 1747678 - RNA, 19 nt, Artificial Sequence
  Description of Artificial Sequence: Synthetic oligonucleotide
cugucccaaaaugccuuuu

SEQ ID NO: 1747679 - RNA, 19 nt, Artificial Sequence
  Description of Artificial Sequence: Synthetic oligonucleotide
ccgcacaugcacgaugagu

SEQ ID NO: 1747680 - RNA, 19 nt, Artificial Sequence
  Description of Artificial Sequence: Synthetic oligonucleotide
cgcauucgcugcaaccgua

SEQ ID NO: 1747681 - RNA, 19 nt, Artificial Sequence
  Description of Artificial Sequence: Synthetic oligonucleotide
cguacgguuuaucgccugu

SEQ ID NO: 1747682 - RNA, 19 nt, Artificial Sequence
  Description of Artificial Sequence: Synthetic oligonucleotide
ccgcacucguuacauuuau

SEQ ID NO: 1747683 - RNA, 19 nt, Artificial Sequence
  Description of Artificial Sequence: Synthetic oligonucleotide
gcacgaugagugacguaau

SEQ ID NO: 1747684 - RNA, 19 nt, Artificial Sequence
  Description of Artificial Sequence: Synthetic oligonucleotide
cccuacggaaggacuuccu

SEQ ID NO: 1747685 - RNA, 19 nt, Artificial Sequence
  Description of Artificial Sequence: Synthetic oligonucleotide
ccguguggauauuguguau

SEQ ID NO: 1747686 - RNA, 19 nt, Artificial Sequence
  Description of Artificial Sequence: Synthetic oligonucleotide
cgcacucguuacauuuaua

SEQ ID NO: 1747687 - RNA, 19 nt, Artificial Sequence
  Description of Artificial Sequence: Synthetic oligonucleotide
ccgcauucgcugcaaccgu

SEQ ID NO: 1747688 - RNA, 19 nt, Artificial Sequence
  Description of Artificial Sequence: Synthetic oligonucleotide
cgcuugcaauugcagcacu

SEQ ID NO: 1747689 - RNA, 19 nt, Artificial Sequence
  Description of Artificial Sequence: Synthetic oligonucleotide
cugcaaccguagggcuucu

SEQ ID NO: 1747690 - RNA, 19 nt, Artificial Sequence
  Description of Artificial Sequence: Synthetic oligonucleotide
aauguuguuguguugcugg

SEQ ID NO: 1747691 - RNA, 19 nt, Artificial Sequence
  Description of Artificial Sequence: Synthetic oligonucleotide
uaaaauguuuguuugaaug

SEQ ID NO: 1747692 - RNA, 19 nt, Artificial Sequence
  Description of Artificial Sequence: Synthetic oligonucleotide
aucaaguccaauuaaaaug

SEQ ID NO: 1747693 - RNA, 19 nt, Artificial Sequence
  Description of Artificial Sequence: Synthetic oligonucleotide
caacacaugaaacagauac

SEQ ID NO: 1747694 - RNA, 19 nt, Artificial Sequence
  Description of Artificial Sequence: Synthetic oligonucleotide
cuacaaauagcacucaucc

SEQ ID NO: 1747695 - RNA, 19 nt, Artificial Sequence
  Description of Artificial Sequence: Synthetic oligonucleotide
aaauagcacucauccaucc

SEQ ID NO: 1747696 - RNA, 19 nt, Artificial Sequence
  Description of Artificial Sequence: Synthetic oligonucleotide
uauuguguguugcacacgg

SEQ ID NO: 1747697 - RNA, 19 nt, Artificial Sequence
  Description of Artificial Sequence: Synthetic oligonucleotide
ucaaguccaauuaaaaugu

SEQ ID NO: 1747698 - RNA, 19 nt, Artificial Sequence
  Description of Artificial Sequence: Synthetic oligonucleotide
uuugaaugaaugaaugacu

SEQ ID NO: 1747699 - RNA, 19 nt, Artificial Sequence
  Description of Artificial Sequence: Synthetic oligonucleotide
gauugugcuauacugcagg

SEQ ID NO: 1747700 - RNA, 19 nt, Artificial Sequence
  Description of Artificial Sequence: Synthetic oligonucleotide
aguauuguguguugcacac

SEQ ID NO: 1747701 - RNA, 19 nt, Artificial Sequence
  Description of Artificial Sequence: Synthetic oligonucleotide
aguucguuuauuaugacuc

SEQ ID NO: 1747702 - RNA, 19 nt, Artificial Sequence
  Description of Artificial Sequence: Synthetic oligonucleotide
cauggaagacccaagaaag

SEQ ID NO: 1747703 - RNA, 19 nt, Artificial Sequence
  Description of Artificial Sequence: Synthetic oligonucleotide
ucaguuaccagcuucugca

SEQ ID NO: 1747704 - RNA, 19 nt, Artificial Sequence
  Description of Artificial Sequence: Synthetic oligonucleotide
uuguuugaaugaaugaaug

SEQ ID NO: 1747705 - RNA, 19 nt, Artificial Sequence
  Description of Artificial Sequence: Synthetic oligonucleotide
ucuaucccagggaacaugg

SEQ ID NO: 1747706 - RNA, 19 nt, Artificial Sequence
  Description of Artificial Sequence: Synthetic oligonucleotide
acuaccagcuccuugaacu

SEQ ID NO: 1747707 - RNA, 19 nt, Artificial Sequence
  Description of Artificial Sequence: Synthetic oligonucleotide
ugagauugugcuauacugc

SEQ ID NO: 1747708 - RNA, 19 nt, Artificial Sequence
  Description of Artificial Sequence: Synthetic oligonucleotide
aggaaacacgccuugacuc

SEQ ID NO: 1747709 - RNA, 19 nt, Artificial Sequence
  Description of Artificial Sequence: Synthetic oligonucleotide
agagaguucguuuauuaug

SEQ ID NO: 1747710 - RNA, 19 nt, Artificial Sequence
  Description of Artificial Sequence: Synthetic oligonucleotide
uuauuaugacucaacagau

SEQ ID NO: 1747711 - RNA, 19 nt, Artificial Sequence
  Description of Artificial Sequence: Synthetic oligonucleotide
aagucggugauccuggacu

SEQ ID NO: 1747712 - RNA, 19 nt, Artificial Sequence
  Description of Artificial Sequence: Synthetic oligonucleotide
ugaagcaguuuucuugccg

SEQ ID NO: 1747713 - RNA, 19 nt, Artificial Sequence
  Description of Artificial Sequence: Synthetic oligonucleotide
uuuggggucgagcagguug

SEQ ID NO: 1747714 - RNA, 19 nt, Artificial Sequence
  Description of Artificial Sequence: Synthetic oligonucleotide
ugucucuuugcacaugugc

SEQ ID NO: 1747715 - RNA, 19 nt, Artificial Sequence
  Description of Artificial Sequence: Synthetic oligonucleotide
uuuggcuuggcuuuagacu

SEQ ID NO: 1747716 - RNA, 19 nt, Artificial Sequence
  Description of Artificial Sequence: Synthetic oligonucleotide
uguuugaaugaaugaauga

SEQ ID NO: 1747717 - RNA, 19 nt, Artificial Sequence
  Description of Artificial Sequence: Synthetic oligonucleotide
cugagauugugcuauacug

SEQ ID NO: 1747718 - RNA, 19 nt, Artificial Sequence
  Description of Artificial Sequence: Synthetic oligonucleotide
augugcacccaucuggccc

SEQ ID NO: 1747719 - RNA, 19 nt, Artificial Sequence
  Description of Artificial Sequence: Synthetic oligonucleotide
ugaaugacuccaaaggcuc

SEQ ID NO: 1747720 - RNA, 19 nt, Artificial Sequence
  Description of Artificial Sequence: Synthetic oligonucleotide
uuccccaugagccagucca

SEQ ID NO: 1747721 - RNA, 19 nt, Artificial Sequence
  Description of Artificial Sequence: Synthetic oligonucleotide
auaccaguaguauugugug

SEQ ID NO: 1747722 - RNA, 19 nt, Artificial Sequence
  Description of Artificial Sequence: Synthetic oligonucleotide
guuugaaugaaugaaugac

SEQ ID NO: 1747723 - RNA, 19 nt, Artificial Sequence
  Description of Artificial Sequence: Synthetic oligonucleotide
uuguguguugcacacggcc

SEQ ID NO: 1747724 - RNA, 19 nt, Artificial Sequence
  Description of Artificial Sequence: Synthetic oligonucleotide
uugaacucaaagucgguga

SEQ ID NO: 1747725 - RNA, 19 nt, Artificial Sequence
  Description of Artificial Sequence: Synthetic oligonucleotide
ugaaugaaugaaugacucc

SEQ ID NO: 1747726 - RNA, 19 nt, Artificial Sequence
  Description of Artificial Sequence: Synthetic oligonucleotide
aaagucggugauccuggac

SEQ ID NO: 1747727 - RNA, 19 nt, Artificial Sequence
  Description of Artificial Sequence: Synthetic oligonucleotide
cacucauccauccaacagg

SEQ ID NO: 1747728 - RNA, 19 nt, Artificial Sequence
  Description of Artificial Sequence: Synthetic oligonucleotide
caugacugcaguuucuuug

SEQ ID NO: 1747729 - RNA, 19 nt, Artificial Sequence
  Description of Artificial Sequence: Synthetic oligonucleotide
aagugggcccaguagaugu

SEQ ID NO: 1747730 - RNA, 19 nt, Artificial Sequence
  Description of Artificial Sequence: Synthetic oligonucleotide
gguucugugcuccagaagc

SEQ ID NO: 1747731 - RNA, 19 nt, Artificial Sequence
  Description of Artificial Sequence: Synthetic oligonucleotide
cagggaacauggaagaccc

SEQ ID NO: 1747732 - RNA, 19 nt, Artificial Sequence
  Description of Artificial Sequence: Synthetic oligonucleotide
ucaccaaggacucgaacga

SEQ ID NO: 1747733 - RNA, 19 nt, Artificial Sequence
  Description of Artificial Sequence: Synthetic oligonucleotide
uccagguauacuuucuucu

SEQ ID NO: 1747734 - RNA, 19 nt, Artificial Sequence
  Description of Artificial Sequence: Synthetic oligonucleotide
aaacaucaaguccaauuaa

SEQ ID NO: 1747735 - RNA, 19 nt, Artificial Sequence
  Description of Artificial Sequence: Synthetic oligonucleotide
uccagcggcauccauggag

SEQ ID NO: 1747736 - RNA, 19 nt, Artificial Sequence
  Description of Artificial Sequence: Synthetic oligonucleotide
ucugagauugugcuauacu

SEQ ID NO: 1747737 - RNA, 19 nt, Artificial Sequence
  Description of Artificial Sequence: Synthetic oligonucleotide
ucugacacgucucuccugu

SEQ ID NO: 1747738 - RNA, 19 nt, Artificial Sequence
  Description of Artificial Sequence: Synthetic oligonucleotide
ugcaguuucuuuggggucg

SEQ ID NO: 1747739 - RNA, 19 nt, Artificial Sequence
  Description of Artificial Sequence: Synthetic oligonucleotide
guuucuuuggggucgagca

SEQ ID NO: 1747740 - RNA, 19 nt, Artificial Sequence
  Description of Artificial Sequence: Synthetic oligonucleotide
uugaggucgaucucccggg

SEQ ID NO: 1747741 - RNA, 19 nt, Artificial Sequence
  Description of Artificial Sequence: Synthetic oligonucleotide
aaugggaccuccaugggca

SEQ ID NO: 1747742 - RNA, 19 nt, Artificial Sequence
  Description of Artificial Sequence: Synthetic oligonucleotide
aacauggaagacccaagaa

SEQ ID NO: 1747743 - RNA, 19 nt, Artificial Sequence
  Description of Artificial Sequence: Synthetic oligonucleotide
aauagcacucauccaucca

SEQ ID NO: 1747744 - RNA, 19 nt, Artificial Sequence
  Description of Artificial Sequence: Synthetic oligonucleotide
ugauagcccaguuuccacc

SEQ ID NO: 1747745 - RNA, 19 nt, Artificial Sequence
  Description of Artificial Sequence: Synthetic oligonucleotide
acuacaaauagcacucauc

SEQ ID NO: 1747746 - RNA, 19 nt, Artificial Sequence
  Description of Artificial Sequence: Synthetic oligonucleotide
gauagcccaguuuccaccc

SEQ ID NO: 1747747 - RNA, 19 nt, Artificial Sequence
  Description of Artificial Sequence: Synthetic oligonucleotide
guagauguggcccaacaca

SEQ ID NO: 1747748 - RNA, 19 nt, Artificial Sequence
  Description of Artificial Sequence: Synthetic oligonucleotide
uugucugacacgucucucc

SEQ ID NO: 1747749 - RNA, 19 nt, Artificial Sequence
  Description of Artificial Sequence: Synthetic oligonucleotide
aacgucuccuugaaguggg

SEQ ID NO: 1747750 - RNA, 19 nt, Artificial Sequence
  Description of Artificial Sequence: Synthetic oligonucleotide
gagaguucguuuauuauga

SEQ ID NO: 1747751 - RNA, 19 nt, Artificial Sequence
  Description of Artificial Sequence: Synthetic oligonucleotide
ccaguuuccacccagggcc

SEQ ID NO: 1747752 - RNA, 19 nt, Artificial Sequence
  Description of Artificial Sequence: Synthetic oligonucleotide
ucaggaaacacgccuugac

SEQ ID NO: 1747753 - RNA, 19 nt, Artificial Sequence
  Description of Artificial Sequence: Synthetic oligonucleotide
gaggaugaagugcacguac

SEQ ID NO: 1747754 - RNA, 19 nt, Artificial Sequence
  Description of Artificial Sequence: Synthetic oligonucleotide
cuugaagugggcccaguag

SEQ ID NO: 1747755 - RNA, 19 nt, Artificial Sequence
  Description of Artificial Sequence: Synthetic oligonucleotide
gaagugcacguacagugug

SEQ ID NO: 1747756 - RNA, 19 nt, Artificial Sequence
  Description of Artificial Sequence: Synthetic oligonucleotide
agacccaagaaaggaaaac

SEQ ID NO: 1747757 - RNA, 19 nt, Artificial Sequence
  Description of Artificial Sequence: Synthetic oligonucleotide
ugcacaugugcacccaucu

SEQ ID NO: 1747758 - RNA, 19 nt, Artificial Sequence
  Description of Artificial Sequence: Synthetic oligonucleotide
ugaacucucuggcgaagag

SEQ ID NO: 1747759 - RNA, 19 nt, Artificial Sequence
  Description of Artificial Sequence: Synthetic oligonucleotide
aguuucuuuggggucgagc

SEQ ID NO: 1747760 - RNA, 19 nt, Artificial Sequence
  Description of Artificial Sequence: Synthetic oligonucleotide
acgccuugacuccagcggc

SEQ ID NO: 1747761 - RNA, 19 nt, Artificial Sequence
  Description of Artificial Sequence: Synthetic oligonucleotide
ggcucuucacuacaaauag

SEQ ID NO: 1747762 - RNA, 19 nt, Artificial Sequence
  Description of Artificial Sequence: Synthetic oligonucleotide
aacaucaaguccaauuaaa

SEQ ID NO: 1747763 - RNA, 19 nt, Artificial Sequence
  Description of Artificial Sequence: Synthetic oligonucleotide
auagcacucauccauccaa

SEQ ID NO: 1747764 - RNA, 19 nt, Artificial Sequence
  Description of Artificial Sequence: Synthetic oligonucleotide
ugagagaguucguuuauua

SEQ ID NO: 1747765 - RNA, 19 nt, Artificial Sequence
  Description of Artificial Sequence: Synthetic oligonucleotide
uggcccaacacaugaaaca

SEQ ID NO: 1747766 - RNA, 19 nt, Artificial Sequence
  Description of Artificial Sequence: Synthetic oligonucleotide
aaauguuguuguguugcug

SEQ ID NO: 1747767 - RNA, 19 nt, Artificial Sequence
  Description of Artificial Sequence: Synthetic oligonucleotide
ugaagugcacguacagugu

SEQ ID NO: 1747768 - RNA, 19 nt, Artificial Sequence
  Description of Artificial Sequence: Synthetic oligonucleotide
agaguucguuuauuaugac

SEQ ID NO: 1747769 - RNA, 19 nt, Artificial Sequence
  Description of Artificial Sequence: Synthetic oligonucleotide
gaacauggaagacccaaga

SEQ ID NO: 1747770 - RNA, 19 nt, Artificial Sequence
  Description of Artificial Sequence: Synthetic oligonucleotide
agguauacuuucuucuccu

SEQ ID NO: 1747771 - RNA, 19 nt, Artificial Sequence
  Description of Artificial Sequence: Synthetic oligonucleotide
caaagucaacauacugggg

SEQ ID NO: 1747772 - RNA, 19 nt, Artificial Sequence
  Description of Artificial Sequence: Synthetic oligonucleotide
ugacucaacagaugaacua

SEQ ID NO: 1747773 - RNA, 19 nt, Artificial Sequence
  Description of Artificial Sequence: Synthetic oligonucleotide
agguugaacucucuggcga

SEQ ID NO: 1747774 - RNA, 19 nt, Artificial Sequence
  Description of Artificial Sequence: Synthetic oligonucleotide
ugaacucaaagucggugau

SEQ ID NO: 1747775 - RNA, 19 nt, Artificial Sequence
  Description of Artificial Sequence: Synthetic oligonucleotide
caugaaacagauacuugca

SEQ ID NO: 1747776 - RNA, 19 nt, Artificial Sequence
  Description of Artificial Sequence: Synthetic oligonucleotide
aaauucugagauugugcua

SEQ ID NO: 1747777 - RNA, 19 nt, Artificial Sequence
  Description of Artificial Sequence: Synthetic oligonucleotide
aacacaugaaacagauacu

SEQ ID NO: 1747778 - RNA, 19 nt, Artificial Sequence
  Description of Artificial Sequence: Synthetic oligonucleotide
ucaugacaaagucaacaua

SEQ ID NO: 1747779 - RNA, 19 nt, Artificial Sequence
  Description of Artificial Sequence: Synthetic oligonucleotide
caaauagcacucauccauc

SEQ ID NO: 1747780 - RNA, 19 nt, Artificial Sequence
  Description of Artificial Sequence: Synthetic oligonucleotide
uuguggggaacacaucuuc

SEQ ID NO: 1747781 - RNA, 19 nt, Artificial Sequence
  Description of Artificial Sequence: Synthetic oligonucleotide
ugcaaaauucugagauugu

SEQ ID NO: 1747782 - RNA, 19 nt, Artificial Sequence
  Description of Artificial Sequence: Synthetic oligonucleotide
gaacucucuggcgaagagg

SEQ ID NO: 1747783 - RNA, 19 nt, Artificial Sequence
  Description of Artificial Sequence: Synthetic oligonucleotide
acacaugaaacagauacuu

SEQ ID NO: 1747784 - RNA, 19 nt, Artificial Sequence
  Description of Artificial Sequence: Synthetic oligonucleotide
cacgccuugacuccagcgg

SEQ ID NO: 1747785 - RNA, 19 nt, Artificial Sequence
  Description of Artificial Sequence: Synthetic oligonucleotide
cacaugaaacagauacuug

SEQ ID NO: 1747786 - RNA, 19 nt, Artificial Sequence
  Description of Artificial Sequence: Synthetic oligonucleotide
uucacugauagcccaguuu

SEQ ID NO: 1747787 - RNA, 19 nt, Artificial Sequence
  Description of Artificial Sequence: Synthetic oligonucleotide
aaaggcucuucacuacaaa

SEQ ID NO: 1747788 - RNA, 19 nt, Artificial Sequence
  Description of Artificial Sequence: Synthetic oligonucleotide
ucggugauccuggacuugg

SEQ ID NO: 1747789 - RNA, 19 nt, Artificial Sequence
  Description of Artificial Sequence: Synthetic oligonucleotide
acacaguugucucuuugca

SEQ ID NO: 1747790 - RNA, 19 nt, Artificial Sequence
  Description of Artificial Sequence: Synthetic oligonucleotide
accaaggacucgaacgagc

SEQ ID NO: 1747791 - RNA, 19 nt, Artificial Sequence
  Description of Artificial Sequence: Synthetic oligonucleotide
aguguguucaaguguccgu

SEQ ID NO: 1747792 - RNA, 19 nt, Artificial Sequence
  Description of Artificial Sequence: Synthetic oligonucleotide
uagacuuccccaugagcca

SEQ ID NO: 1747793 - RNA, 19 nt, Artificial Sequence
  Description of Artificial Sequence: Synthetic oligonucleotide
gacucgaacgagcugggga

SEQ ID NO: 1747794 - RNA, 19 nt, Artificial Sequence
  Description of Artificial Sequence: Synthetic oligonucleotide
cagguugaacucucuggcg

SEQ ID NO: 1747795 - RNA, 19 nt, Artificial Sequence
  Description of Artificial Sequence: Synthetic oligonucleotide
acggccauugucugacacg

SEQ ID NO: 1747796 - RNA, 19 nt, Artificial Sequence
  Description of Artificial Sequence: Synthetic oligonucleotide
guguccgugcagcucaagg

SEQ ID NO: 1747797 - RNA, 19 nt, Artificial Sequence
  Description of Artificial Sequence: Synthetic oligonucleotide
cauaccaguaguauugugu

SEQ ID NO: 1747798 - RNA, 19 nt, Artificial Sequence
  Description of Artificial Sequence: Synthetic oligonucleotide
augcacaaaugggaccucc

SEQ ID NO: 1747799 - RNA, 19 nt, Artificial Sequence
  Description of Artificial Sequence: Synthetic oligonucleotide
aaagcagguucugccuuuc

SEQ ID NO: 1747800 - RNA, 19 nt, Artificial Sequence
  Description of Artificial Sequence: Synthetic oligonucleotide
ucauaccaguaguauugug

SEQ ID NO: 1747801 - RNA, 19 nt, Artificial Sequence
  Description of Artificial Sequence: Synthetic oligonucleotide
ggccccuaugcacaaaugg

SEQ ID NO: 1747802 - RNA, 19 nt, Artificial Sequence
  Description of Artificial Sequence: Synthetic oligonucleotide
augaacuaaagcagguucu

SEQ ID NO: 1747803 - RNA, 19 nt, Artificial Sequence
  Description of Artificial Sequence: Synthetic oligonucleotide
auugugcuauacugcaggu

SEQ ID NO: 1747804 - RNA, 19 nt, Artificial Sequence
  Description of Artificial Sequence: Synthetic oligonucleotide
gugaggucguccaugacug

SEQ ID NO: 1747805 - RNA, 19 nt, Artificial Sequence
  Description of Artificial Sequence: Synthetic oligonucleotide
ugugcaaaauucugagauu

SEQ ID NO: 1747806 - RNA, 19 nt, Artificial Sequence
  Description of Artificial Sequence: Synthetic oligonucleotide
acucgaacgagcuggggaa

SEQ ID NO: 1747807 - RNA, 19 nt, Artificial Sequence
  Description of Artificial Sequence: Synthetic oligonucleotide
uccgugcagcucaagggcc

SEQ ID NO: 1747808 - RNA, 19 nt, Artificial Sequence
  Description of Artificial Sequence: Synthetic oligonucleotide
uccaaaggcucuucacuac

SEQ ID NO: 1747809 - RNA, 19 nt, Artificial Sequence
  Description of Artificial Sequence: Synthetic oligonucleotide
ugcacaaaugggaccucca

SEQ ID NO: 1747810 - RNA, 19 nt, Artificial Sequence
  Description of Artificial Sequence: Synthetic oligonucleotide
cagagcucaugacaaaguc

SEQ ID NO: 1747811 - RNA, 19 nt, Artificial Sequence
  Description of Artificial Sequence: Synthetic oligonucleotide
gacucaacagaugaacuaa

SEQ ID NO: 1747812 - RNA, 19 nt, Artificial Sequence
  Description of Artificial Sequence: Synthetic oligonucleotide
guucaaguguccgugcagc

SEQ ID NO: 1747813 - RNA, 19 nt, Artificial Sequence
  Description of Artificial Sequence: Synthetic oligonucleotide
gaagacccaagaaaggaaa

SEQ ID NO: 1747814 - RNA, 19 nt, Artificial Sequence
  Description of Artificial Sequence: Synthetic oligonucleotide
gaccuugccaccagcacgc

SEQ ID NO: 1747815 - RNA, 19 nt, Artificial Sequence
  Description of Artificial Sequence: Synthetic oligonucleotide
uccuucacaugguucugug

SEQ ID NO: 1747816 - RNA, 19 nt, Artificial Sequence
  Description of Artificial Sequence: Synthetic oligonucleotide
aaguccaauuaaaauguuu

SEQ ID NO: 1747817 - RNA, 19 nt, Artificial Sequence
  Description of Artificial Sequence: Synthetic oligonucleotide
acacgccuugacuccagcg

SEQ ID NO: 1747818 - RNA, 19 nt, Artificial Sequence
  Description of Artificial Sequence: Synthetic oligonucleotide
cucuuugcacaugugcacc

SEQ ID NO: 1747819 - RNA, 19 nt, Artificial Sequence
  Description of Artificial Sequence: Synthetic oligonucleotide
ucguugaggucgaucuccc

SEQ ID NO: 1747820 - RNA, 19 nt, Artificial Sequence
  Description of Artificial Sequence: Synthetic oligonucleotide
caaaugggaccuccauggg

SEQ ID NO: 1747821 - RNA, 19 nt, Artificial Sequence
  Description of Artificial Sequence: Synthetic oligonucleotide
gggaagucaggaaacacgc

SEQ ID NO: 1747822 - RNA, 19 nt, Artificial Sequence
  Description of Artificial Sequence: Synthetic oligonucleotide
uagcacucauccauccaac

SEQ ID NO: 1747823 - RNA, 19 nt, Artificial Sequence
  Description of Artificial Sequence: Synthetic oligonucleotide
caacgucuccuugaagugg

SEQ ID NO: 1747824 - RNA, 19 nt, Artificial Sequence
  Description of Artificial Sequence: Synthetic oligonucleotide
uuuguggggaacacaucuu

SEQ ID NO: 1747825 - RNA, 19 nt, Artificial Sequence
  Description of Artificial Sequence: Synthetic oligonucleotide
auugucugacacgucucuc

SEQ ID NO: 1747826 - RNA, 19 nt, Artificial Sequence
  Description of Artificial Sequence: Synthetic oligonucleotide
ucgucauaccaguaguauu

SEQ ID NO: 1747827 - RNA, 19 nt, Artificial Sequence
  Description of Artificial Sequence: Synthetic oligonucleotide
cuucacaugguucugugcu

SEQ ID NO: 1747828 - RNA, 19 nt, Artificial Sequence
  Description of Artificial Sequence: Synthetic oligonucleotide
cgucauaccaguaguauug

SEQ ID NO: 1747829 - RNA, 19 nt, Artificial Sequence
  Description of Artificial Sequence: Synthetic oligonucleotide
guucguuuauuaugacuca

SEQ ID NO: 1747830 - RNA, 19 nt, Artificial Sequence
  Description of Artificial Sequence: Synthetic oligonucleotide
uggcuuuagacuuccccau

SEQ ID NO: 1747831 - RNA, 19 nt, Artificial Sequence
  Description of Artificial Sequence: Synthetic oligonucleotide
cugauagcccaguuuccac

SEQ ID NO: 1747832 - RNA, 19 nt, Artificial Sequence
  Description of Artificial Sequence: Synthetic oligonucleotide
caguguguucaaguguccg

SEQ ID NO: 1747833 - RNA, 19 nt, Artificial Sequence
  Description of Artificial Sequence: Synthetic oligonucleotide
gaguucguuuauuaugacu

SEQ ID NO: 1747834 - RNA, 19 nt, Artificial Sequence
  Description of Artificial Sequence: Synthetic oligonucleotide
augacucaacagaugaacu

SEQ ID NO: 1747835 - RNA, 19 nt, Artificial Sequence
  Description of Artificial Sequence: Synthetic oligonucleotide
acucguugaggucgaucuc

SEQ ID NO: 1747836 - RNA, 19 nt, Artificial Sequence
  Description of Artificial Sequence: Synthetic oligonucleotide
acucugcgcagcccagggc

SEQ ID NO: 1747837 - RNA, 19 nt, Artificial Sequence
  Description of Artificial Sequence: Synthetic oligonucleotide
ucuccuugaagugggccca

SEQ ID NO: 1747838 - RNA, 19 nt, Artificial Sequence
  Description of Artificial Sequence: Synthetic oligonucleotide
aaugacuccaaaggcucuu

SEQ ID NO: 1747839 - RNA, 19 nt, Artificial Sequence
  Description of Artificial Sequence: Synthetic oligonucleotide
uucacaugguucugugcuc

SEQ ID NO: 1747840 - RNA, 19 nt, Artificial Sequence
  Description of Artificial Sequence: Synthetic oligonucleotide
aggucgaucucccggggca

SEQ ID NO: 1747841 - RNA, 19 nt, Artificial Sequence
  Description of Artificial Sequence: Synthetic oligonucleotide
agcacucauccauccaaca

SEQ ID NO: 1747842 - RNA, 19 nt, Artificial Sequence
  Description of Artificial Sequence: Synthetic oligonucleotide
uaccaguaguauugugugu

SEQ ID NO: 1747843 - RNA, 19 nt, Artificial Sequence
  Description of Artificial Sequence: Synthetic oligonucleotide
aagggccaacgucuccuug

SEQ ID NO: 1747844 - RNA, 19 nt, Artificial Sequence
  Description of Artificial Sequence: Synthetic oligonucleotide
auuuuguggggaacacauc

SEQ ID NO: 1747845 - RNA, 19 nt, Artificial Sequence
  Description of Artificial Sequence: Synthetic oligonucleotide
ucuuuggggucgagcaggu

SEQ ID NO: 1747846 - RNA, 19 nt, Artificial Sequence
  Description of Artificial Sequence: Synthetic oligonucleotide
uugccguuuggcuuggcuu

SEQ ID NO: 1747847 - RNA, 19 nt, Artificial Sequence
  Description of Artificial Sequence: Synthetic oligonucleotide
ucgagcagguugaacucuc

SEQ ID NO: 1747848 - RNA, 19 nt, Artificial Sequence
  Description of Artificial Sequence: Synthetic oligonucleotide
agcggcauccauggagccc

SEQ ID NO: 1747849 - RNA, 19 nt, Artificial Sequence
  Description of Artificial Sequence: Synthetic oligonucleotide
uaaagcagguucugccuuu

SEQ ID NO: 1747850 - RNA, 19 nt, Artificial Sequence
  Description of Artificial Sequence: Synthetic oligonucleotide
aagacccaagaaaggaaaa

SEQ ID NO: 1747851 - RNA, 19 nt, Artificial Sequence
  Description of Artificial Sequence: Synthetic oligonucleotide
guauacuuucuucuccucu

SEQ ID NO: 1747852 - RNA, 19 nt, Artificial Sequence
  Description of Artificial Sequence: Synthetic oligonucleotide
uucugagauugugcuauac

SEQ ID NO: 1747853 - RNA, 19 nt, Artificial Sequence
  Description of Artificial Sequence: Synthetic oligonucleotide
cucaucucuccuucacaug

SEQ ID NO: 1747854 - RNA, 19 nt, Artificial Sequence
  Description of Artificial Sequence: Synthetic oligonucleotide
caucaaguccaauuaaaau

SEQ ID NO: 1747855 - RNA, 19 nt, Artificial Sequence
  Description of Artificial Sequence: Synthetic oligonucleotide
ugccguuuggcuuggcuuu

SEQ ID NO: 1747856 - RNA, 19 nt, Artificial Sequence
  Description of Artificial Sequence: Synthetic oligonucleotide
cacacggccauugucugac

SEQ ID NO: 1747857 - RNA, 19 nt, Artificial Sequence
  Description of Artificial Sequence: Synthetic oligonucleotide
gcucaugacaaagucaaca

SEQ ID NO: 1747858 - RNA, 19 nt, Artificial Sequence
  Description of Artificial Sequence: Synthetic oligonucleotide
cacucugcgcagcccaggg

SEQ ID NO: 1747859 - RNA, 19 nt, Artificial Sequence
  Description of Artificial Sequence: Synthetic oligonucleotide
ucccggggcagcacuacca

SEQ ID NO: 1747860 - RNA, 19 nt, Artificial Sequence
  Description of Artificial Sequence: Synthetic oligonucleotide
agacuuccccaugagccag

SEQ ID NO: 1747861 - RNA, 19 nt, Artificial Sequence
  Description of Artificial Sequence: Synthetic oligonucleotide
cacucguugaggucgaucu

SEQ ID NO: 1747862 - RNA, 19 nt, Artificial Sequence
  Description of Artificial Sequence: Synthetic oligonucleotide
guccaauuaaaauguuugu

SEQ ID NO: 1747863 - RNA, 19 nt, Artificial Sequence
  Description of Artificial Sequence: Synthetic oligonucleotide
aagucaggaaacacgccuu

SEQ ID NO: 1747864 - RNA, 19 nt, Artificial Sequence
  Description of Artificial Sequence: Synthetic oligonucleotide
aagugcacguacagugugu

SEQ ID NO: 1747865 - RNA, 19 nt, Artificial Sequence
  Description of Artificial Sequence: Synthetic oligonucleotide
ucaaguguccgugcagcuc

SEQ ID NO: 1747866 - RNA, 19 nt, Artificial Sequence
  Description of Artificial Sequence: Synthetic oligonucleotide
gccccuaugcacaaauggg

SEQ ID NO: 1747867 - RNA, 19 nt, Artificial Sequence
  Description of Artificial Sequence: Synthetic oligonucleotide
gaggucgaucucccggggc

SEQ ID NO: 1747868 - RNA, 19 nt, Artificial Sequence
  Description of Artificial Sequence: Synthetic oligonucleotide
cucaugacaaagucaacau

SEQ ID NO: 1747869 - RNA, 19 nt, Artificial Sequence
  Description of Artificial Sequence: Synthetic oligonucleotide
gagagaguucguuuauuau

SEQ ID NO: 1747870 - RNA, 19 nt, Artificial Sequence
  Description of Artificial Sequence: Synthetic oligonucleotide
gaaacacgccuugacucca

SEQ ID NO: 1747871 - RNA, 19 nt, Artificial Sequence
  Description of Artificial Sequence: Synthetic oligonucleotide
cucagaccuugccaccagc

SEQ ID NO: 1747872 - RNA, 19 nt, Artificial Sequence
  Description of Artificial Sequence: Synthetic oligonucleotide
guguucaaguguccgugca

SEQ ID NO: 1747873 - RNA, 19 nt, Artificial Sequence
  Description of Artificial Sequence: Synthetic oligonucleotide
cagcucaagggccaacguc

SEQ ID NO: 1747874 - RNA, 19 nt, Artificial Sequence
  Description of Artificial Sequence: Synthetic oligonucleotide
cagaccuugccaccagcac

SEQ ID NO: 1747875 - RNA, 19 nt, Artificial Sequence
  Description of Artificial Sequence: Synthetic oligonucleotide
guauuuuguggggaacaca

SEQ ID NO: 1747876 - RNA, 19 nt, Artificial Sequence
  Description of Artificial Sequence: Synthetic oligonucleotide
uugccaccagcacgcucgg

SEQ ID NO: 1747877 - RNA, 19 nt, Artificial Sequence
  Description of Artificial Sequence: Synthetic oligonucleotide
gaugaagugcacguacagu

SEQ ID NO: 1747878 - RNA, 19 nt, Artificial Sequence
  Description of Artificial Sequence: Synthetic oligonucleotide
gaacucaaagucggugauc

SEQ ID NO: 1747879 - RNA, 19 nt, Artificial Sequence
  Description of Artificial Sequence: Synthetic oligonucleotide
cccuaugcacaaaugggac

SEQ ID NO: 1747880 - RNA, 19 nt, Artificial Sequence
  Description of Artificial Sequence: Synthetic oligonucleotide
ccagggaacauggaagacc

SEQ ID NO: 1747881 - RNA, 19 nt, Artificial Sequence
  Description of Artificial Sequence: Synthetic oligonucleotide
uggccccuaugcacaaaug

SEQ ID NO: 1747882 - RNA, 19 nt, Artificial Sequence
  Description of Artificial Sequence: Synthetic oligonucleotide
agucggugauccuggacuu

SEQ ID NO: 1747883 - RNA, 19 nt, Artificial Sequence
  Description of Artificial Sequence: Synthetic oligonucleotide
gccaacgucuccuugaagu

SEQ ID NO: 1747884 - RNA, 19 nt, Artificial Sequence
  Description of Artificial Sequence: Synthetic oligonucleotide
cacggccauugucugacac

SEQ ID NO: 1747885 - RNA, 19 nt, Artificial Sequence
  Description of Artificial Sequence: Synthetic oligonucleotide
ugcucuggcuccagguaua

SEQ ID NO: 1747886 - RNA, 19 nt, Artificial Sequence
  Description of Artificial Sequence: Synthetic oligonucleotide
ugcuauacugcagguugau

SEQ ID NO: 1747887 - RNA, 19 nt, Artificial Sequence
  Description of Artificial Sequence: Synthetic oligonucleotide
gcacuugaccuucuucccc

SEQ ID NO: 1747888 - RNA, 19 nt, Artificial Sequence
  Description of Artificial Sequence: Synthetic oligonucleotide
gggucgagcagguugaacu

SEQ ID NO: 1747889 - RNA, 19 nt, Artificial Sequence
  Description of Artificial Sequence: Synthetic oligonucleotide
caggccucucuaucccagg

SEQ ID NO: 1747890 - RNA, 19 nt, Artificial Sequence
  Description of Artificial Sequence: Synthetic oligonucleotide
uggccccauccccaguggc

SEQ ID NO: 1747891 - RNA, 19 nt, Artificial Sequence
  Description of Artificial Sequence: Synthetic oligonucleotide
ccagguauacuuucuucuc

SEQ ID NO: 1747892 - RNA, 19 nt, Artificial Sequence
  Description of Artificial Sequence: Synthetic oligonucleotide
caaaggcucuucacuacaa

SEQ ID NO: 1747893 - RNA, 19 nt, Artificial Sequence
  Description of Artificial Sequence: Synthetic oligonucleotide
aggucguccaugacugcag

SEQ ID NO: 1747894 - RNA, 19 nt, Artificial Sequence
  Description of Artificial Sequence: Synthetic oligonucleotide
acucaacagaugaacuaaa

SEQ ID NO: 1747895 - RNA, 19 nt, Artificial Sequence
  Description of Artificial Sequence: Synthetic oligonucleotide
aguugucucuuugcacaug

SEQ ID NO: 1747896 - RNA, 19 nt, Artificial Sequence
  Description of Artificial Sequence: Synthetic oligonucleotide
ggcccaguagauguggccc

SEQ ID NO: 1747897 - RNA, 19 nt, Artificial Sequence
  Description of Artificial Sequence: Synthetic oligonucleotide
uggggaauucucugccgua

SEQ ID NO: 1747898 - RNA, 19 nt, Artificial Sequence
  Description of Artificial Sequence: Synthetic oligonucleotide
ccaacgucuccuugaagug

SEQ ID NO: 1747899 - RNA, 19 nt, Artificial Sequence
  Description of Artificial Sequence: Synthetic oligonucleotide
acucaaagucggugauccu

SEQ ID NO: 1747900 - RNA, 19 nt, Artificial Sequence
  Description of Artificial Sequence: Synthetic oligonucleotide
gguauacuuucuucuccuc

SEQ ID NO: 1747901 - RNA, 19 nt, Artificial Sequence
  Description of Artificial Sequence: Synthetic oligonucleotide
gcugcccuggccccuaugc

SEQ ID NO: 1747902 - RNA, 19 nt, Artificial Sequence
  Description of Artificial Sequence: Synthetic oligonucleotide
guggcaccacugcuacccg

SEQ ID NO: 1747903 - RNA, 19 nt, Artificial Sequence
  Description of Artificial Sequence: Synthetic oligonucleotide
ggcccucagaccuugccac

SEQ ID NO: 1747904 - RNA, 19 nt, Artificial Sequence
  Description of Artificial Sequence: Synthetic oligonucleotide
ggggcagugcacuugaccu

SEQ ID NO: 1747905 - RNA, 19 nt, Artificial Sequence
  Description of Artificial Sequence: Synthetic oligonucleotide
auagcccaguuuccaccca

SEQ ID NO: 1747906 - RNA, 19 nt, Artificial Sequence
  Description of Artificial Sequence: Synthetic oligonucleotide
uggagcccacacucugcgc

SEQ ID NO: 1747907 - RNA, 19 nt, Artificial Sequence
  Description of Artificial Sequence: Synthetic oligonucleotide
agugcacguacaguguguu

SEQ ID NO: 1747908 - RNA, 19 nt, Artificial Sequence
  Description of Artificial Sequence: Synthetic oligonucleotide
acugcuacccgggcugcug

SEQ ID NO: 1747909 - RNA, 19 nt, Artificial Sequence
  Description of Artificial Sequence: Synthetic oligonucleotide
acgagcuggggaauucucu

SEQ ID NO: 1747910 - RNA, 19 nt, Artificial Sequence
  Description of Artificial Sequence: Synthetic oligonucleotide
caccaaggacucgaacgag

SEQ ID NO: 1747911 - RNA, 19 nt, Artificial Sequence
  Description of Artificial Sequence: Synthetic oligonucleotide
acacucugcgcagcccagg

SEQ ID NO: 1747912 - RNA, 19 nt, Artificial Sequence
  Description of Artificial Sequence: Synthetic oligonucleotide
gcccaguuuccacccaggg

SEQ ID NO: 1747913 - RNA, 19 nt, Artificial Sequence
  Description of Artificial Sequence: Synthetic oligonucleotide
uaugcacaaaugggaccuc

SEQ ID NO: 1747914 - RNA, 19 nt, Artificial Sequence
  Description of Artificial Sequence: Synthetic oligonucleotide
agcccacacucugcgcagc

SEQ ID NO: 1747915 - RNA, 19 nt, Artificial Sequence
  Description of Artificial Sequence: Synthetic oligonucleotide
caggaaacacgccuugacu

SEQ ID NO: 1747916 - RNA, 19 nt, Artificial Sequence
  Description of Artificial Sequence: Synthetic oligonucleotide
ggaagucaggaaacacgcc

SEQ ID NO: 1747917 - RNA, 19 nt, Artificial Sequence
  Description of Artificial Sequence: Synthetic oligonucleotide
uugacuccagcggcaucca

SEQ ID NO: 1747918 - RNA, 19 nt, Artificial Sequence
  Description of Artificial Sequence: Synthetic oligonucleotide
ucgaucucccggggcagca

SEQ ID NO: 1747919 - RNA, 19 nt, Artificial Sequence
  Description of Artificial Sequence: Synthetic oligonucleotide
aguuuccacccagggccuc

SEQ ID NO: 1747920 - RNA, 19 nt, Artificial Sequence
  Description of Artificial Sequence: Synthetic oligonucleotide
cauugucugacacgucucu

SEQ ID NO: 1747921 - RNA, 19 nt, Artificial Sequence
  Description of Artificial Sequence: Synthetic oligonucleotide
cacguacaguguguucaag

SEQ ID NO: 1747922 - RNA, 19 nt, Artificial Sequence
  Description of Artificial Sequence: Synthetic oligonucleotide
ccccuaugcacaaauggga

SEQ ID NO: 1747923 - RNA, 19 nt, Artificial Sequence
  Description of Artificial Sequence: Synthetic oligonucleotide
caugagccaguccauggcu

SEQ ID NO: 1747924 - RNA, 19 nt, Artificial Sequence
  Description of Artificial Sequence: Synthetic oligonucleotide
ggaggcagcaagaaggggu

SEQ ID NO: 1747925 - RNA, 19 nt, Artificial Sequence
  Description of Artificial Sequence: Synthetic oligonucleotide
gccaguccauggcugcgcg

SEQ ID NO: 1747926 - RNA, 19 nt, Artificial Sequence
  Description of Artificial Sequence: Synthetic oligonucleotide
gccuuucacugauagccca

SEQ ID NO: 1747927 - RNA, 19 nt, Artificial Sequence
  Description of Artificial Sequence: Synthetic oligonucleotide
ccauccaacagggaaguca

SEQ ID NO: 1747928 - RNA, 19 nt, Artificial Sequence
  Description of Artificial Sequence: Synthetic oligonucleotide
acgucuccuugaagugggc

SEQ ID NO: 1747929 - RNA, 19 nt, Artificial Sequence
  Description of Artificial Sequence: Synthetic oligonucleotide
cugacacgucucuccugug

SEQ ID NO: 1747930 - RNA, 19 nt, Artificial Sequence
  Description of Artificial Sequence: Synthetic oligonucleotide
acagauacuugcagaucuu

SEQ ID NO: 1747931 - RNA, 19 nt, Artificial Sequence
  Description of Artificial Sequence: Synthetic oligonucleotide
gucaggaaacacgccuuga

SEQ ID NO: 1747932 - RNA, 19 nt, Artificial Sequence
  Description of Artificial Sequence: Synthetic oligonucleotide
agugggcccaguagaugug

SEQ ID NO: 1747933 - RNA, 19 nt, Artificial Sequence
  Description of Artificial Sequence: Synthetic oligonucleotide
cuaucccagggaacaugga

SEQ ID NO: 1747934 - RNA, 19 nt, Artificial Sequence
  Description of Artificial Sequence: Synthetic oligonucleotide
agcaccucagugaggucgu

SEQ ID NO: 1747935 - RNA, 19 nt, Artificial Sequence
  Description of Artificial Sequence: Synthetic oligonucleotide
ucgaacgagcuggggaauu

SEQ ID NO: 1747936 - RNA, 19 nt, Artificial Sequence
  Description of Artificial Sequence: Synthetic oligonucleotide
gccucucuaucccagggaa

SEQ ID NO: 1747937 - RNA, 19 nt, Artificial Sequence
  Description of Artificial Sequence: Synthetic oligonucleotide
cucccggggcagcacuacc

SEQ ID NO: 1747938 - RNA, 19 nt, Artificial Sequence
  Description of Artificial Sequence: Synthetic oligonucleotide
gugcuauacugcagguuga

SEQ ID NO: 1747939 - RNA, 19 nt, Artificial Sequence
  Description of Artificial Sequence: Synthetic oligonucleotide
ugacuccagcggcauccau

SEQ ID NO: 1747940 - RNA, 19 nt, Artificial Sequence
  Description of Artificial Sequence: Synthetic oligonucleotide
gugcacguacaguguguuc

SEQ ID NO: 1747941 - RNA, 19 nt, Artificial Sequence
  Description of Artificial Sequence: Synthetic oligonucleotide
ucucccggggcagcacuac

SEQ ID NO: 1747942 - RNA, 19 nt, Artificial Sequence
  Description of Artificial Sequence: Synthetic oligonucleotide
ccgcucgucauaccaguag

SEQ ID NO: 1747943 - RNA, 19 nt, Artificial Sequence
  Description of Artificial Sequence: Synthetic oligonucleotide
cuggggaauucucugccgu

SEQ ID NO: 1747944 - RNA, 19 nt, Artificial Sequence
  Description of Artificial Sequence: Synthetic oligonucleotide
ugcugcccuggccccuaug

SEQ ID NO: 1747945 - RNA, 19 nt, Artificial Sequence
  Description of Artificial Sequence: Synthetic oligonucleotide
gaacgagcuggggaauucu

SEQ ID NO: 1747946 - RNA, 19 nt, Artificial Sequence
  Description of Artificial Sequence: Synthetic oligonucleotide
cucauccauccaacaggga

SEQ ID NO: 1747947 - RNA, 19 nt, Artificial Sequence
  Description of Artificial Sequence: Synthetic oligonucleotide
aguguccgugcagcucaag

SEQ ID NO: 1747948 - RNA, 19 nt, Artificial Sequence
  Description of Artificial Sequence: Synthetic oligonucleotide
cccaacacaugaaacagau

SEQ ID NO: 1747949 - RNA, 19 nt, Artificial Sequence
  Description of Artificial Sequence: Synthetic oligonucleotide
gucggugauccuggacuug

SEQ ID NO: 1747950 - RNA, 19 nt, Artificial Sequence
  Description of Artificial Sequence: Synthetic oligonucleotide
cacuacaaauagcacucau

SEQ ID NO: 1747951 - RNA, 19 nt, Artificial Sequence
  Description of Artificial Sequence: Synthetic oligonucleotide
cugccguauuuugugggga

SEQ ID NO: 1747952 - RNA, 19 nt, Artificial Sequence
  Description of Artificial Sequence: Synthetic oligonucleotide
cucgucauaccaguaguau

SEQ ID NO: 1747953 - RNA, 19 nt, Artificial Sequence
  Description of Artificial Sequence: Synthetic oligonucleotide
cuugccguuuggcuuggcu

SEQ ID NO: 1747954 - RNA, 19 nt, Artificial Sequence
  Description of Artificial Sequence: Synthetic oligonucleotide
cguauuuuguggggaacac

SEQ ID NO: 1747955 - RNA, 19 nt, Artificial Sequence
  Description of Artificial Sequence: Synthetic oligonucleotide
gcggcauccauggagccca

SEQ ID NO: 1747956 - RNA, 19 nt, Artificial Sequence
  Description of Artificial Sequence: Synthetic oligonucleotide
cagugaggucguccaugac

SEQ ID NO: 1747957 - RNA, 19 nt, Artificial Sequence
  Description of Artificial Sequence: Synthetic oligonucleotide
uccauccaacagggaaguc

SEQ ID NO: 1747958 - RNA, 19 nt, Artificial Sequence
  Description of Artificial Sequence: Synthetic oligonucleotide
accagcacgcucggggcau

SEQ ID NO: 1747959 - RNA, 19 nt, Artificial Sequence
  Description of Artificial Sequence: Synthetic oligonucleotide
caaguccaauuaaaauguu

SEQ ID NO: 1747960 - RNA, 19 nt, Artificial Sequence
  Description of Artificial Sequence: Synthetic oligonucleotide
ggccucucuaucccaggga

SEQ ID NO: 1747961 - RNA, 19 nt, Artificial Sequence
  Description of Artificial Sequence: Synthetic oligonucleotide
cucggggcaugugugcgca

SEQ ID NO: 1747962 - RNA, 19 nt, Artificial Sequence
  Description of Artificial Sequence: Synthetic oligonucleotide
cguccaugacugcaguuuc

SEQ ID NO: 1747963 - RNA, 19 nt, Artificial Sequence
  Description of Artificial Sequence: Synthetic oligonucleotide
gucgagcagguugaacucu

SEQ ID NO: 1747964 - RNA, 19 nt, Artificial Sequence
  Description of Artificial Sequence: Synthetic oligonucleotide
ccaaggacucgaacgagcu

SEQ ID NO: 1747965 - RNA, 19 nt, Artificial Sequence
  Description of Artificial Sequence: Synthetic oligonucleotide
gccguauuuuguggggaac

SEQ ID NO: 1747966 - RNA, 19 nt, Artificial Sequence
  Description of Artificial Sequence: Synthetic oligonucleotide
aaguguccgugcagcucaa

SEQ ID NO: 1747967 - RNA, 19 nt, Artificial Sequence
  Description of Artificial Sequence: Synthetic oligonucleotide
ccguauuuuguggggaaca

SEQ ID NO: 1747968 - RNA, 19 nt, Artificial Sequence
  Description of Artificial Sequence: Synthetic oligonucleotide
gcccucagaccuugccacc

SEQ ID NO: 1747969 - RNA, 19 nt, Artificial Sequence
  Description of Artificial Sequence: Synthetic oligonucleotide
gcacguacaguguguucaa

SEQ ID NO: 1747970 - RNA, 19 nt, Artificial Sequence
  Description of Artificial Sequence: Synthetic oligonucleotide
agcacgcucggggcaugug

SEQ ID NO: 1747971 - RNA, 19 nt, Artificial Sequence
  Description of Artificial Sequence: Synthetic oligonucleotide
cuggccccuaugcacaaau

SEQ ID NO: 1747972 - RNA, 19 nt, Artificial Sequence
  Description of Artificial Sequence: Synthetic oligonucleotide
ucggggcaugugugcgcac

SEQ ID NO: 1747973 - RNA, 19 nt, Artificial Sequence
  Description of Artificial Sequence: Synthetic oligonucleotide
cccggggcagcacuaccag

SEQ ID NO: 1747974 - RNA, 19 nt, Artificial Sequence
  Description of Artificial Sequence: Synthetic oligonucleotide
ucuugccguuuggcuuggc

SEQ ID NO: 1747975 - RNA, 19 nt, Artificial Sequence
  Description of Artificial Sequence: Synthetic oligonucleotide
agggaacauggaagaccca

SEQ ID NO: 1747976 - RNA, 19 nt, Artificial Sequence
  Description of Artificial Sequence: Synthetic oligonucleotide
caguuucuuuggggucgag

SEQ ID NO: 1747977 - RNA, 19 nt, Artificial Sequence
  Description of Artificial Sequence: Synthetic oligonucleotide
caguuuccacccagggccu

SEQ ID NO: 1747978 - RNA, 19 nt, Artificial Sequence
  Description of Artificial Sequence: Synthetic oligonucleotide
gggccaacgucuccuugaa

SEQ ID NO: 1747979 - RNA, 19 nt, Artificial Sequence
  Description of Artificial Sequence: Synthetic oligonucleotide
acucucuggcgaagaggau

SEQ ID NO: 1747980 - RNA, 19 nt, Artificial Sequence
  Description of Artificial Sequence: Synthetic oligonucleotide
gcacacggccauugucuga

SEQ ID NO: 1747981 - RNA, 19 nt, Artificial Sequence
  Description of Artificial Sequence: Synthetic oligonucleotide
gcacccaucuggcccugga

SEQ ID NO: 1747982 - RNA, 19 nt, Artificial Sequence
  Description of Artificial Sequence: Synthetic oligonucleotide
caccacugcuacccgggcu

SEQ ID NO: 1747983 - RNA, 19 nt, Artificial Sequence
  Description of Artificial Sequence: Synthetic oligonucleotide
ggggucgagcagguugaac

SEQ ID NO: 1747984 - RNA, 19 nt, Artificial Sequence
  Description of Artificial Sequence: Synthetic oligonucleotide
gcaguuucuuuggggucga

SEQ ID NO: 1747985 - RNA, 19 nt, Artificial Sequence
  Description of Artificial Sequence: Synthetic oligonucleotide
gcacgcucggggcaugugu

SEQ ID NO: 1747986 - RNA, 19 nt, Artificial Sequence
  Description of Artificial Sequence: Synthetic oligonucleotide
cugagagaguucguuuauu

SEQ ID NO: 1747987 - RNA, 19 nt, Artificial Sequence
  Description of Artificial Sequence: Synthetic oligonucleotide
ccuugaagugggcccagua

SEQ ID NO: 1747988 - RNA, 19 nt, Artificial Sequence
  Description of Artificial Sequence: Synthetic oligonucleotide
ggggaauucucugccguau

SEQ ID NO: 1747989 - RNA, 19 nt, Artificial Sequence
  Description of Artificial Sequence: Synthetic oligonucleotide
gacuuccccaugagccagu

SEQ ID NO: 1747990 - RNA, 19 nt, Artificial Sequence
  Description of Artificial Sequence: Synthetic oligonucleotide
ccacucguugaggucgauc

SEQ ID NO: 1747991 - RNA, 19 nt, Artificial Sequence
  Description of Artificial Sequence: Synthetic oligonucleotide
ccccaugagccaguccaug

SEQ ID NO: 1747992 - RNA, 19 nt, Artificial Sequence
  Description of Artificial Sequence: Synthetic oligonucleotide
cgcucggggcaugugugcg

SEQ ID NO: 1747993 - RNA, 19 nt, Artificial Sequence
  Description of Artificial Sequence: Synthetic oligonucleotide
ccaguagauguggcccaac

SEQ ID NO: 1747994 - RNA, 19 nt, Artificial Sequence
  Description of Artificial Sequence: Synthetic oligonucleotide
aucucccggggcagcacua

SEQ ID NO: 1747995 - RNA, 19 nt, Artificial Sequence
  Description of Artificial Sequence: Synthetic oligonucleotide
gcuacccgggcugcugcac

SEQ ID NO: 1747996 - RNA, 19 nt, Artificial Sequence
  Description of Artificial Sequence: Synthetic oligonucleotide
gggaauucucugccguauu

SEQ ID NO: 1747997 - RNA, 19 nt, Artificial Sequence
  Description of Artificial Sequence: Synthetic oligonucleotide
gggcaugugugcgcacaca

SEQ ID NO: 1747998 - RNA, 19 nt, Artificial Sequence
  Description of Artificial Sequence: Synthetic oligonucleotide
ccguuuggcuuggcuuuag

SEQ ID NO: 1747999 - RNA, 19 nt, Artificial Sequence
  Description of Artificial Sequence: Synthetic oligonucleotide
ccgggcugcugcacagcac

SEQ ID NO: 1748000 - RNA, 19 nt, Artificial Sequence
  Description of Artificial Sequence: Synthetic oligonucleotide
ccacugcuacccgggcugc

SEQ ID NO: 1748001 - RNA, 19 nt, Artificial Sequence
  Description of Artificial Sequence: Synthetic oligonucleotide
cuccagcggcauccaugga

SEQ ID NO: 1748002 - RNA, 19 nt, Artificial Sequence
  Description of Artificial Sequence: Synthetic oligonucleotide
caagggccaacgucuccuu

SEQ ID NO: 1748003 - RNA, 19 nt, Artificial Sequence
  Description of Artificial Sequence: Synthetic oligonucleotide
cucgaacgagcuggggaau

SEQ ID NO: 1748004 - RNA, 19 nt, Artificial Sequence
  Description of Artificial Sequence: Synthetic oligonucleotide
cgcucgucauaccaguagu

SEQ ID NO: 1748005 - RNA, 19 nt, Artificial Sequence
  Description of Artificial Sequence: Synthetic oligonucleotide
cguuuggcuuggcuuuaga

SEQ ID NO: 1748006 - RNA, 19 nt, Artificial Sequence
  Description of Artificial Sequence: Synthetic oligonucleotide
gccguuuggcuuggcuuua

SEQ ID NO: 1748007 - RNA, 19 nt, Artificial Sequence
  Description of Artificial Sequence: Synthetic oligonucleotide
ggaccuccaugggcacuga

SEQ ID NO: 1748008 - RNA, 19 nt, Artificial Sequence
  Description of Artificial Sequence: Synthetic oligonucleotide
ccccgcucgucauaccagu

SEQ ID NO: 1748009 - RNA, 19 nt, Artificial Sequence
  Description of Artificial Sequence: Synthetic oligonucleotide
cccgcucgucauaccagua

SEQ ID NO: 1748010 - RNA, 19 nt, Artificial Sequence
  Description of Artificial Sequence: Synthetic oligonucleotide
cccaguagauguggcccaa

SEQ ID NO: 1748011 - RNA, 19 nt, Artificial Sequence
  Description of Artificial Sequence: Synthetic oligonucleotide
cgaucucccggggcagcac

SEQ ID NO: 1748012 - RNA, 19 nt, Artificial Sequence
  Description of Artificial Sequence: Synthetic oligonucleotide
cugcgcggggcccgcgccu

SEQ ID NO: 1748013 - RNA, 19 nt, Artificial Sequence
  Description of Artificial Sequence: Synthetic oligonucleotide
cgagcagguugaacucucu

SEQ ID NO: 1748014 - RNA, 19 nt, Artificial Sequence
  Description of Artificial Sequence: Synthetic oligonucleotide
gcagugcacuugaccuucu

SEQ ID NO: 1748015 - RNA, 19 nt, Artificial Sequence
  Description of Artificial Sequence: Synthetic oligonucleotide
cuuuggggucgagcagguu

SEQ ID NO: 1748016 - RNA, 19 nt, Artificial Sequence
  Description of Artificial Sequence: Synthetic oligonucleotide
cagcacgcucggggcaugu

SEQ ID NO: 1748017 - RNA, 19 nt, Artificial Sequence
  Description of Artificial Sequence: Synthetic oligonucleotide
cgucucuccugugcaaaau

SEQ ID NO: 1748018 - RNA, 19 nt, Artificial Sequence
  Description of Artificial Sequence: Synthetic oligonucleotide
ccuggccccuaugcacaaa

SEQ ID NO: 1748019 - RNA, 19 nt, Artificial Sequence
  Description of Artificial Sequence: Synthetic oligonucleotide
cgcgccucgcucggccuca

SEQ ID NO: 1748020 - RNA, 19 nt, Artificial Sequence
  Description of Artificial Sequence: Synthetic oligonucleotide
gccacucguugaggucgau

SEQ ID NO: 1748021 - RNA, 19 nt, Artificial Sequence
  Description of Artificial Sequence: Synthetic oligonucleotide
ucaaaagucacuaaaacga

SEQ ID NO: 1748022 - RNA, 19 nt, Artificial Sequence
  Description of Artificial Sequence: Synthetic oligonucleotide
guuauuuuaaauuugguga

SEQ ID NO: 1748023 - RNA, 19 nt, Artificial Sequence
  Description of Artificial Sequence: Synthetic oligonucleotide
aguuauuuuaaauuuggug

SEQ ID NO: 1748024 - RNA, 19 nt, Artificial Sequence
  Description of Artificial Sequence: Synthetic oligonucleotide
uuuugcuugauaaaguuau

SEQ ID NO: 1748025 - RNA, 19 nt, Artificial Sequence
  Description of Artificial Sequence: Synthetic oligonucleotide
aacuauguggaucuggcca

SEQ ID NO: 1748026 - RNA, 19 nt, Artificial Sequence
  Description of Artificial Sequence: Synthetic oligonucleotide
uguuguuggacacagaaua

SEQ ID NO: 1748027 - RNA, 19 nt, Artificial Sequence
  Description of Artificial Sequence: Synthetic oligonucleotide
acaaguuugaagguguccc

SEQ ID NO: 1748028 - RNA, 19 nt, Artificial Sequence
  Description of Artificial Sequence: Synthetic oligonucleotide
gaaacugccaugcccaggg

SEQ ID NO: 1748029 - RNA, 19 nt, Artificial Sequence
  Description of Artificial Sequence: Synthetic oligonucleotide
aauaagggcauggagcuag

SEQ ID NO: 1748030 - RNA, 19 nt, Artificial Sequence
  Description of Artificial Sequence: Synthetic oligonucleotide
ucagacugaguucacaucu

SEQ ID NO: 1748031 - RNA, 19 nt, Artificial Sequence
  Description of Artificial Sequence: Synthetic oligonucleotide
ugggaaaccugccagcugg

SEQ ID NO: 1748032 - RNA, 19 nt, Artificial Sequence
  Description of Artificial Sequence: Synthetic oligonucleotide
augaucagcggucuugccc

SEQ ID NO: 1748033 - RNA, 19 nt, Artificial Sequence
  Description of Artificial Sequence: Synthetic oligonucleotide
acacagaauacugagcccc

SEQ ID NO: 1748034 - RNA, 19 nt, Artificial Sequence
  Description of Artificial Sequence: Synthetic oligonucleotide
uaaaacgacgguaggcagg

SEQ ID NO: 1748035 - RNA, 19 nt, Artificial Sequence
  Description of Artificial Sequence: Synthetic oligonucleotide
aaaagucacuaaaacgacg

SEQ ID NO: 1748036 - RNA, 19 nt, Artificial Sequence
  Description of Artificial Sequence: Synthetic oligonucleotide
uccacugacaaguuugaag

SEQ ID NO: 1748037 - RNA, 19 nt, Artificial Sequence
  Description of Artificial Sequence: Synthetic oligonucleotide
uaggucaucuccaaagagc

SEQ ID NO: 1748038 - RNA, 19 nt, Artificial Sequence
  Description of Artificial Sequence: Synthetic oligonucleotide
uguuggacacagaauacug

SEQ ID NO: 1748039 - RNA, 19 nt, Artificial Sequence
  Description of Artificial Sequence: Synthetic oligonucleotide
aacucacucaccuaagaaa

SEQ ID NO: 1748040 - RNA, 19 nt, Artificial Sequence
  Description of Artificial Sequence: Synthetic oligonucleotide
caugcugcaagauacucag

SEQ ID NO: 1748041 - RNA, 19 nt, Artificial Sequence
  Description of Artificial Sequence: Synthetic oligonucleotide
acuauguggaucuggccac

SEQ ID NO: 1748042 - RNA, 19 nt, Artificial Sequence
  Description of Artificial Sequence: Synthetic oligonucleotide
gaaauagcaugaucagcgg

SEQ ID NO: 1748043 - RNA, 19 nt, Artificial Sequence
  Description of Artificial Sequence: Synthetic oligonucleotide
aagcuucagggucagacug

SEQ ID NO: 1748044 - RNA, 19 nt, Artificial Sequence
  Description of Artificial Sequence: Synthetic oligonucleotide
aaaccugccagcugggcug

SEQ ID NO: 1748045 - RNA, 19 nt, Artificial Sequence
  Description of Artificial Sequence: Synthetic oligonucleotide
ggggcuagcaacuaugugg

SEQ ID NO: 1748046 - RNA, 19 nt, Artificial Sequence
  Description of Artificial Sequence: Synthetic oligonucleotide
aauucagccuucucuagau

SEQ ID NO: 1748047 - RNA, 19 nt, Artificial Sequence
  Description of Artificial Sequence: Synthetic oligonucleotide
ugguauguccccacaacag

SEQ ID NO: 1748048 - RNA, 19 nt, Artificial Sequence
  Description of Artificial Sequence: Synthetic oligonucleotide
cuugauaaaguuauuuuaa

SEQ ID NO: 1748049 - RNA, 19 nt, Artificial Sequence
  Description of Artificial Sequence: Synthetic oligonucleotide
auuacugaccucaacaaca

SEQ ID NO: 1748050 - RNA, 19 nt, Artificial Sequence
  Description of Artificial Sequence: Synthetic oligonucleotide
caagauacucaggugaagg

SEQ ID NO: 1748051 - RNA, 19 nt, Artificial Sequence
  Description of Artificial Sequence: Synthetic oligonucleotide
ugggacugaguucagagaa

SEQ ID NO: 1748052 - RNA, 19 nt, Artificial Sequence
  Description of Artificial Sequence: Synthetic oligonucleotide
gaguagacaaugccaaagc

SEQ ID NO: 1748053 - RNA, 19 nt, Artificial Sequence
  Description of Artificial Sequence: Synthetic oligonucleotide
ggacacagaauacugagcc

SEQ ID NO: 1748054 - RNA, 19 nt, Artificial Sequence
  Description of Artificial Sequence: Synthetic oligonucleotide
aaagagcuuggucacuuga

SEQ ID NO: 1748055 - RNA, 19 nt, Artificial Sequence
  Description of Artificial Sequence: Synthetic oligonucleotide
uucuggaagggcuuguagc

SEQ ID NO: 1748056 - RNA, 19 nt, Artificial Sequence
  Description of Artificial Sequence: Synthetic oligonucleotide
aggugaaggaucuguuccc

SEQ ID NO: 1748057 - RNA, 19 nt, Artificial Sequence
  Description of Artificial Sequence: Synthetic oligonucleotide
aaggugaauaagggcaugg

SEQ ID NO: 1748058 - RNA, 19 nt, Artificial Sequence
  Description of Artificial Sequence: Synthetic oligonucleotide
aaacucacucaccuaagaa

SEQ ID NO: 1748059 - RNA, 19 nt, Artificial Sequence
  Description of Artificial Sequence: Synthetic oligonucleotide
agauuucugggaaaccugc

SEQ ID NO: 1748060 - RNA, 19 nt, Artificial Sequence
  Description of Artificial Sequence: Synthetic oligonucleotide
cagaccaaggcauucuggg

SEQ ID NO: 1748061 - RNA, 19 nt, Artificial Sequence
  Description of Artificial Sequence: Synthetic oligonucleotide
gaugacaaguggcaccugc

SEQ ID NO: 1748062 - RNA, 19 nt, Artificial Sequence
  Description of Artificial Sequence: Synthetic oligonucleotide
agcaaugggcuuaggaucc

SEQ ID NO: 1748063 - RNA, 19 nt, Artificial Sequence
  Description of Artificial Sequence: Synthetic oligonucleotide
cuugugagggaggagagcc

SEQ ID NO: 1748064 - RNA, 19 nt, Artificial Sequence
  Description of Artificial Sequence: Synthetic oligonucleotide
ugaggcuaguucuucagga

SEQ ID NO: 1748065 - RNA, 19 nt, Artificial Sequence
  Description of Artificial Sequence: Synthetic oligonucleotide
uagauuucugggaaaccug

SEQ ID NO: 1748066 - RNA, 19 nt, Artificial Sequence
  Description of Artificial Sequence: Synthetic oligonucleotide
ugaagagugagggucagcu

SEQ ID NO: 1748067 - RNA, 19 nt, Artificial Sequence
  Description of Artificial Sequence: Synthetic oligonucleotide
ucacuaaaacgacgguagg

SEQ ID NO: 1748068 - RNA, 19 nt, Artificial Sequence
  Description of Artificial Sequence: Synthetic oligonucleotide
uucaauucagccuucucua

SEQ ID NO: 1748069 - RNA, 19 nt, Artificial Sequence
  Description of Artificial Sequence: Synthetic oligonucleotide
acuaaaacgacgguaggca

SEQ ID NO: 1748070 - RNA, 19 nt, Artificial Sequence
  Description of Artificial Sequence: Synthetic oligonucleotide
ucuccugggaggcauuucc

SEQ ID NO: 1748071 - RNA, 19 nt, Artificial Sequence
  Description of Artificial Sequence: Synthetic oligonucleotide
cuuaggauccucagcacug

SEQ ID NO: 1748072 - RNA, 19 nt, Artificial Sequence
  Description of Artificial Sequence: Synthetic oligonucleotide
aguccgaaggugaauaagg

SEQ ID NO: 1748073 - RNA, 19 nt, Artificial Sequence
  Description of Artificial Sequence: Synthetic oligonucleotide
agaguagacaaugccaaag

SEQ ID NO: 1748074 - RNA, 19 nt, Artificial Sequence
  Description of Artificial Sequence: Synthetic oligonucleotide
ugaucagcggucuugcccu

SEQ ID NO: 1748075 - RNA, 19 nt, Artificial Sequence
  Description of Artificial Sequence: Synthetic oligonucleotide
agcaaacucacucaccuaa

SEQ ID NO: 1748076 - RNA, 19 nt, Artificial Sequence
  Description of Artificial Sequence: Synthetic oligonucleotide
uccacuugcugcauaggug

SEQ ID NO: 1748077 - RNA, 19 nt, Artificial Sequence
  Description of Artificial Sequence: Synthetic oligonucleotide
aaaacgacgguaggcagga

SEQ ID NO: 1748078 - RNA, 19 nt, Artificial Sequence
  Description of Artificial Sequence: Synthetic oligonucleotide
uaggggacugguuaggaac

SEQ ID NO: 1748079 - RNA, 19 nt, Artificial Sequence
  Description of Artificial Sequence: Synthetic oligonucleotide
cuggaaauagcaugaucag

SEQ ID NO: 1748080 - RNA, 19 nt, Artificial Sequence
  Description of Artificial Sequence: Synthetic oligonucleotide
ucaauucagccuucucuag

SEQ ID NO: 1748081 - RNA, 19 nt, Artificial Sequence
  Description of Artificial Sequence: Synthetic oligonucleotide
uucagguggccacacaggu

SEQ ID NO: 1748082 - RNA, 19 nt, Artificial Sequence
  Description of Artificial Sequence: Synthetic oligonucleotide
acucaccuaagaaacugcc

SEQ ID NO: 1748083 - RNA, 19 nt, Artificial Sequence
  Description of Artificial Sequence: Synthetic oligonucleotide
ugcuugauaaaguuauuuu

SEQ ID NO: 1748084 - RNA, 19 nt, Artificial Sequence
  Description of Artificial Sequence: Synthetic oligonucleotide
acugguuaggaacaggguu

SEQ ID NO: 1748085 - RNA, 19 nt, Artificial Sequence
  Description of Artificial Sequence: Synthetic oligonucleotide
cauaggugggccugaagag

SEQ ID NO: 1748086 - RNA, 19 nt, Artificial Sequence
  Description of Artificial Sequence: Synthetic oligonucleotide
acaaacucccgguacguca

SEQ ID NO: 1748087 - RNA, 19 nt, Artificial Sequence
  Description of Artificial Sequence: Synthetic oligonucleotide
cuaaaacgacgguaggcag

SEQ ID NO: 1748088 - RNA, 19 nt, Artificial Sequence
  Description of Artificial Sequence: Synthetic oligonucleotide
ucacucaccuaagaaacug

SEQ ID NO: 1748089 - RNA, 19 nt, Artificial Sequence
  Description of Artificial Sequence: Synthetic oligonucleotide
ugaacucuggccucauuac

SEQ ID NO: 1748090 - RNA, 19 nt, Artificial Sequence
  Description of Artificial Sequence: Synthetic oligonucleotide
uuccacuugcugcauaggu

SEQ ID NO: 1748091 - RNA, 19 nt, Artificial Sequence
  Description of Artificial Sequence: Synthetic oligonucleotide
uagccugucaccuccuuug

SEQ ID NO: 1748092 - RNA, 19 nt, Artificial Sequence
  Description of Artificial Sequence: Synthetic oligonucleotide
aaggaucuguuccccagcu

SEQ ID NO: 1748093 - RNA, 19 nt, Artificial Sequence
  Description of Artificial Sequence: Synthetic oligonucleotide
uuacugaccucaacaacaa

SEQ ID NO: 1748094 - RNA, 19 nt, Artificial Sequence
  Description of Artificial Sequence: Synthetic oligonucleotide
agaccaaggcauucugggg

SEQ ID NO: 1748095 - RNA, 19 nt, Artificial Sequence
  Description of Artificial Sequence: Synthetic oligonucleotide
aacucuggccucauuacug

SEQ ID NO: 1748096 - RNA, 19 nt, Artificial Sequence
  Description of Artificial Sequence: Synthetic oligonucleotide
aaggcagccgagcuccaag

SEQ ID NO: 1748097 - RNA, 19 nt, Artificial Sequence
  Description of Artificial Sequence: Synthetic oligonucleotide
uugaguccuaccuccagac

SEQ ID NO: 1748098 - RNA, 19 nt, Artificial Sequence
  Description of Artificial Sequence: Synthetic oligonucleotide
ggaacaggguucuggaagg

SEQ ID NO: 1748099 - RNA, 19 nt, Artificial Sequence
  Description of Artificial Sequence: Synthetic oligonucleotide
ggugaauaagggcauggag

SEQ ID NO: 1748100 - RNA, 19 nt, Artificial Sequence
  Description of Artificial Sequence: Synthetic oligonucleotide
gauacucaggugaaggauc

SEQ ID NO: 1748101 - RNA, 19 nt, Artificial Sequence
  Description of Artificial Sequence: Synthetic oligonucleotide
cacagcaggggcuagcaac

SEQ ID NO: 1748102 - RNA, 19 nt, Artificial Sequence
  Description of Artificial Sequence: Synthetic oligonucleotide
gcuggaaauagcaugauca

SEQ ID NO: 1748103 - RNA, 19 nt, Artificial Sequence
  Description of Artificial Sequence: Synthetic oligonucleotide
gcaggagggaccuuuagcc

SEQ ID NO: 1748104 - RNA, 19 nt, Artificial Sequence
  Description of Artificial Sequence: Synthetic oligonucleotide
gacaaguggcaccugcgug

SEQ ID NO: 1748105 - RNA, 19 nt, Artificial Sequence
  Description of Artificial Sequence: Synthetic oligonucleotide
cauuacugaccucaacaac

SEQ ID NO: 1748106 - RNA, 19 nt, Artificial Sequence
  Description of Artificial Sequence: Synthetic oligonucleotide
uugcccuccacugacaagu

SEQ ID NO: 1748107 - RNA, 19 nt, Artificial Sequence
  Description of Artificial Sequence: Synthetic oligonucleotide
augaacucuggccucauua

SEQ ID NO: 1748108 - RNA, 19 nt, Artificial Sequence
  Description of Artificial Sequence: Synthetic oligonucleotide
cacuaaaacgacgguaggc

SEQ ID NO: 1748109 - RNA, 19 nt, Artificial Sequence
  Description of Artificial Sequence: Synthetic oligonucleotide
aagucacuaaaacgacggu

SEQ ID NO: 1748110 - RNA, 19 nt, Artificial Sequence
  Description of Artificial Sequence: Synthetic oligonucleotide
ucuagauuucugggaaacc

SEQ ID NO: 1748111 - RNA, 19 nt, Artificial Sequence
  Description of Artificial Sequence: Synthetic oligonucleotide
ugguauggcuggaaauagc

SEQ ID NO: 1748112 - RNA, 19 nt, Artificial Sequence
  Description of Artificial Sequence: Synthetic oligonucleotide
agcaacuauguggaucugg

SEQ ID NO: 1748113 - RNA, 19 nt, Artificial Sequence
  Description of Artificial Sequence: Synthetic oligonucleotide
gcuuggaugaacucuggcc

SEQ ID NO: 1748114 - RNA, 19 nt, Artificial Sequence
  Description of Artificial Sequence: Synthetic oligonucleotide
gaaggaucuguuccccagc

SEQ ID NO: 1748115 - RNA, 19 nt, Artificial Sequence
  Description of Artificial Sequence: Synthetic oligonucleotide
cugggaggcauuucccugg

SEQ ID NO: 1748116 - RNA, 19 nt, Artificial Sequence
  Description of Artificial Sequence: Synthetic oligonucleotide
ccacuugcugcauaggugg

SEQ ID NO: 1748117 - RNA, 19 nt, Artificial Sequence
  Description of Artificial Sequence: Synthetic oligonucleotide
ggugggacugaguucagag

SEQ ID NO: 1748118 - RNA, 19 nt, Artificial Sequence
  Description of Artificial Sequence: Synthetic oligonucleotide
ugacaaguggcaccugcgu

SEQ ID NO: 1748119 - RNA, 19 nt, Artificial Sequence
  Description of Artificial Sequence: Synthetic oligonucleotide
ugaccucaacaacaacagc

SEQ ID NO: 1748120 - RNA, 19 nt, Artificial Sequence
  Description of Artificial Sequence: Synthetic oligonucleotide
aacgacgguaggcaggauu

SEQ ID NO: 1748121 - RNA, 19 nt, Artificial Sequence
  Description of Artificial Sequence: Synthetic oligonucleotide
aguuugaaggugucccgug

SEQ ID NO: 1748122 - RNA, 19 nt, Artificial Sequence
  Description of Artificial Sequence: Synthetic oligonucleotide
agcuuggucacuugaucug

SEQ ID NO: 1748123 - RNA, 19 nt, Artificial Sequence
  Description of Artificial Sequence: Synthetic oligonucleotide
guagggcaucaucagcugg

SEQ ID NO: 1748124 - RNA, 19 nt, Artificial Sequence
  Description of Artificial Sequence: Synthetic oligonucleotide
cuagcaacuauguggaucu

SEQ ID NO: 1748125 - RNA, 19 nt, Artificial Sequence
  Description of Artificial Sequence: Synthetic oligonucleotide
agggaagaguagacaaugc

SEQ ID NO: 1748126 - RNA, 19 nt, Artificial Sequence
  Description of Artificial Sequence: Synthetic oligonucleotide
aguucacaucuucaauuca

SEQ ID NO: 1748127 - RNA, 19 nt, Artificial Sequence
  Description of Artificial Sequence: Synthetic oligonucleotide
uacgucacugguaggggcu

SEQ ID NO: 1748128 - RNA, 19 nt, Artificial Sequence
  Description of Artificial Sequence: Synthetic oligonucleotide
ugaggcacggccagcugcc

SEQ ID NO: 1748129 - RNA, 19 nt, Artificial Sequence
  Description of Artificial Sequence: Synthetic oligonucleotide
aaguuugaaggugucccgu

SEQ ID NO: 1748130 - RNA, 19 nt, Artificial Sequence
  Description of Artificial Sequence: Synthetic oligonucleotide
ugagggaagaguagacaau

SEQ ID NO: 1748131 - RNA, 19 nt, Artificial Sequence
  Description of Artificial Sequence: Synthetic oligonucleotide
gucugugaugacaaguggc

SEQ ID NO: 1748132 - RNA, 19 nt, Artificial Sequence
  Description of Artificial Sequence: Synthetic oligonucleotide
guagccuccaugcccacug

SEQ ID NO: 1748133 - RNA, 19 nt, Artificial Sequence
  Description of Artificial Sequence: Synthetic oligonucleotide
uccaaggccccugaggggc

SEQ ID NO: 1748134 - RNA, 19 nt, Artificial Sequence
  Description of Artificial Sequence: Synthetic oligonucleotide
aaucccuugugagggagga

SEQ ID NO: 1748135 - RNA, 19 nt, Artificial Sequence
  Description of Artificial Sequence: Synthetic oligonucleotide
cuuguagccuccaugccca

SEQ ID NO: 1748136 - RNA, 19 nt, Artificial Sequence
  Description of Artificial Sequence: Synthetic oligonucleotide
gauugucugugaugacaag

SEQ ID NO: 1748137 - RNA, 19 nt, Artificial Sequence
  Description of Artificial Sequence: Synthetic oligonucleotide
aggauugucugugaugaca

SEQ ID NO: 1748138 - RNA, 19 nt, Artificial Sequence
  Description of Artificial Sequence: Synthetic oligonucleotide
uccuaccuccagaccaagg

SEQ ID NO: 1748139 - RNA, 19 nt, Artificial Sequence
  Description of Artificial Sequence: Synthetic oligonucleotide
uugcuugauaaaguuauuu

SEQ ID NO: 1748140 - RNA, 19 nt, Artificial Sequence
  Description of Artificial Sequence: Synthetic oligonucleotide
guccgaaggugaauaaggg

SEQ ID NO: 1748141 - RNA, 19 nt, Artificial Sequence
  Description of Artificial Sequence: Synthetic oligonucleotide
ugaucugcaggagggaccu

SEQ ID NO: 1748142 - RNA, 19 nt, Artificial Sequence
  Description of Artificial Sequence: Synthetic oligonucleotide
ugccugcacaaacucccgg

SEQ ID NO: 1748143 - RNA, 19 nt, Artificial Sequence
  Description of Artificial Sequence: Synthetic oligonucleotide
gcuaccuugcuucacugcc

SEQ ID NO: 1748144 - RNA, 19 nt, Artificial Sequence
  Description of Artificial Sequence: Synthetic oligonucleotide
cuucugguggcaucucccc

SEQ ID NO: 1748145 - RNA, 19 nt, Artificial Sequence
  Description of Artificial Sequence: Synthetic oligonucleotide
cugaggcuaguucuucagg

SEQ ID NO: 1748146 - RNA, 19 nt, Artificial Sequence
  Description of Artificial Sequence: Synthetic oligonucleotide
caacagcaaacucacucac

SEQ ID NO: 1748147 - RNA, 19 nt, Artificial Sequence
  Description of Artificial Sequence: Synthetic oligonucleotide
cucuagauuucugggaaac

SEQ ID NO: 1748148 - RNA, 19 nt, Artificial Sequence
  Description of Artificial Sequence: Synthetic oligonucleotide
acaaugccaaagccuaggu

SEQ ID NO: 1748149 - RNA, 19 nt, Artificial Sequence
  Description of Artificial Sequence: Synthetic oligonucleotide
uguuccccagcuuuccacu

SEQ ID NO: 1748150 - RNA, 19 nt, Artificial Sequence
  Description of Artificial Sequence: Synthetic oligonucleotide
gguauguccccacaacagc

SEQ ID NO: 1748151 - RNA, 19 nt, Artificial Sequence
  Description of Artificial Sequence: Synthetic oligonucleotide
gccuaggucaucuccaaag

SEQ ID NO: 1748152 - RNA, 19 nt, Artificial Sequence
  Description of Artificial Sequence: Synthetic oligonucleotide
gaagagugagggucagcug

SEQ ID NO: 1748153 - RNA, 19 nt, Artificial Sequence
  Description of Artificial Sequence: Synthetic oligonucleotide
caaacucccgguacgucac

SEQ ID NO: 1748154 - RNA, 19 nt, Artificial Sequence
  Description of Artificial Sequence: Synthetic oligonucleotide
caacuccauguccaguccg

SEQ ID NO: 1748155 - RNA, 19 nt, Artificial Sequence
  Description of Artificial Sequence: Synthetic oligonucleotide
ugaguccuaccuccagacc

SEQ ID NO: 1748156 - RNA, 19 nt, Artificial Sequence
  Description of Artificial Sequence: Synthetic oligonucleotide
cuuggaugaacucuggccu

SEQ ID NO: 1748157 - RNA, 19 nt, Artificial Sequence
  Description of Artificial Sequence: Synthetic oligonucleotide
cuucucuagauuucuggga

SEQ ID NO: 1748158 - RNA, 19 nt, Artificial Sequence
  Description of Artificial Sequence: Synthetic oligonucleotide
caacuauguggaucuggcc

SEQ ID NO: 1748159 - RNA, 19 nt, Artificial Sequence
  Description of Artificial Sequence: Synthetic oligonucleotide
gaaggugucccgugugcug

SEQ ID NO: 1748160 - RNA, 19 nt, Artificial Sequence
  Description of Artificial Sequence: Synthetic oligonucleotide
ugugagggaggagagccca

SEQ ID NO: 1748161 - RNA, 19 nt, Artificial Sequence
  Description of Artificial Sequence: Synthetic oligonucleotide
guaggcaggauugucugug

SEQ ID NO: 1748162 - RNA, 19 nt, Artificial Sequence
  Description of Artificial Sequence: Synthetic oligonucleotide
caugcccacugucaguccc

SEQ ID NO: 1748163 - RNA, 19 nt, Artificial Sequence
  Description of Artificial Sequence: Synthetic oligonucleotide
aggcauucuggggugcugc

SEQ ID NO: 1748164 - RNA, 19 nt, Artificial Sequence
  Description of Artificial Sequence: Synthetic oligonucleotide
cugucaccuccuuugaguc

SEQ ID NO: 1748165 - RNA, 19 nt, Artificial Sequence
  Description of Artificial Sequence: Synthetic oligonucleotide
agcaugaucagcggucuug

SEQ ID NO: 1748166 - RNA, 19 nt, Artificial Sequence
  Description of Artificial Sequence: Synthetic oligonucleotide
augggcuuaggauccucag

SEQ ID NO: 1748167 - RNA, 19 nt, Artificial Sequence
  Description of Artificial Sequence: Synthetic oligonucleotide
gcuugauaaaguuauuuua

SEQ ID NO: 1748168 - RNA, 19 nt, Artificial Sequence
  Description of Artificial Sequence: Synthetic oligonucleotide
cugguauggcuggaaauag

SEQ ID NO: 1748169 - RNA, 19 nt, Artificial Sequence
  Description of Artificial Sequence: Synthetic oligonucleotide
uguuuccaaggccccugag

SEQ ID NO: 1748170 - RNA, 19 nt, Artificial Sequence
  Description of Artificial Sequence: Synthetic oligonucleotide
gugguauguccccacaaca

SEQ ID NO: 1748171 - RNA, 19 nt, Artificial Sequence
  Description of Artificial Sequence: Synthetic oligonucleotide
aaugggcuuaggauccuca

SEQ ID NO: 1748172 - RNA, 19 nt, Artificial Sequence
  Description of Artificial Sequence: Synthetic oligonucleotide
ggaagaguagacaaugcca

SEQ ID NO: 1748173 - RNA, 19 nt, Artificial Sequence
  Description of Artificial Sequence: Synthetic oligonucleotide
ugucaccuccuuugagucc

SEQ ID NO: 1748174 - RNA, 19 nt, Artificial Sequence
  Description of Artificial Sequence: Synthetic oligonucleotide
agauacucaggugaaggau

SEQ ID NO: 1748175 - RNA, 19 nt, Artificial Sequence
  Description of Artificial Sequence: Synthetic oligonucleotide
auggcuggaaauagcauga

SEQ ID NO: 1748176 - RNA, 19 nt, Artificial Sequence
  Description of Artificial Sequence: Synthetic oligonucleotide
aaggugucccgugugcuga

SEQ ID NO: 1748177 - RNA, 19 nt, Artificial Sequence
  Description of Artificial Sequence: Synthetic oligonucleotide
uuuccacuugcugcauagg

SEQ ID NO: 1748178 - RNA, 19 nt, Artificial Sequence
  Description of Artificial Sequence: Synthetic oligonucleotide
guuguuggacacagaauac

SEQ ID NO: 1748179 - RNA, 19 nt, Artificial Sequence
  Description of Artificial Sequence: Synthetic oligonucleotide
gcauaggugggccugaaga

SEQ ID NO: 1748180 - RNA, 19 nt, Artificial Sequence
  Description of Artificial Sequence: Synthetic oligonucleotide
agucacuaaaacgacggua

SEQ ID NO: 1748181 - RNA, 19 nt, Artificial Sequence
  Description of Artificial Sequence: Synthetic oligonucleotide
ccuaccuccagaccaaggc

SEQ ID NO: 1748182 - RNA, 19 nt, Artificial Sequence
  Description of Artificial Sequence: Synthetic oligonucleotide
cugaggugaagcuggcuuc

SEQ ID NO: 1748183 - RNA, 19 nt, Artificial Sequence
  Description of Artificial Sequence: Synthetic oligonucleotide
ugcauaggugggccugaag

SEQ ID NO: 1748184 - RNA, 19 nt, Artificial Sequence
  Description of Artificial Sequence: Synthetic oligonucleotide
gaccaaggcauucuggggu

SEQ ID NO: 1748185 - RNA, 19 nt, Artificial Sequence
  Description of Artificial Sequence: Synthetic oligonucleotide
ucucuagauuucugggaaa

SEQ ID NO: 1748186 - RNA, 19 nt, Artificial Sequence
  Description of Artificial Sequence: Synthetic oligonucleotide
acgacgguaggcaggauug

SEQ ID NO: 1748187 - RNA, 19 nt, Artificial Sequence
  Description of Artificial Sequence: Synthetic oligonucleotide
cacugccugcacaaacucc

SEQ ID NO: 1748188 - RNA, 19 nt, Artificial Sequence
  Description of Artificial Sequence: Synthetic oligonucleotide
cucagcacuguuguuggac

SEQ ID NO: 1748189 - RNA, 19 nt, Artificial Sequence
  Description of Artificial Sequence: Synthetic oligonucleotide
ugcugguauggcuggaaau

SEQ ID NO: 1748190 - RNA, 19 nt, Artificial Sequence
  Description of Artificial Sequence: Synthetic oligonucleotide
gaaucccuugugagggagg

SEQ ID NO: 1748191 - RNA, 19 nt, Artificial Sequence
  Description of Artificial Sequence: Synthetic oligonucleotide
uccaguccgaaggugaaua

SEQ ID NO: 1748192 - RNA, 19 nt, Artificial Sequence
  Description of Artificial Sequence: Synthetic oligonucleotide
agacaccuugcugguaugg

SEQ ID NO: 1748193 - RNA, 19 nt, Artificial Sequence
  Description of Artificial Sequence: Synthetic oligonucleotide
uguccaguccgaaggugaa

SEQ ID NO: 1748194 - RNA, 19 nt, Artificial Sequence
  Description of Artificial Sequence: Synthetic oligonucleotide
guauguccccacaacagca

SEQ ID NO: 1748195 - RNA, 19 nt, Artificial Sequence
  Description of Artificial Sequence: Synthetic oligonucleotide
auacucaggugaaggaucu

SEQ ID NO: 1748196 - RNA, 19 nt, Artificial Sequence
  Description of Artificial Sequence: Synthetic oligonucleotide
caaugccaaagccuagguc

SEQ ID NO: 1748197 - RNA, 19 nt, Artificial Sequence
  Description of Artificial Sequence: Synthetic oligonucleotide
ugaaggugucccgugugcu

SEQ ID NO: 1748198 - RNA, 19 nt, Artificial Sequence
  Description of Artificial Sequence: Synthetic oligonucleotide
ugguuaggaacaggguucu

SEQ ID NO: 1748199 - RNA, 19 nt, Artificial Sequence
  Description of Artificial Sequence: Synthetic oligonucleotide
auaggugggccugaagagu

SEQ ID NO: 1748200 - RNA, 19 nt, Artificial Sequence
  Description of Artificial Sequence: Synthetic oligonucleotide
ugagggucagcugggcuug

SEQ ID NO: 1748201 - RNA, 19 nt, Artificial Sequence
  Description of Artificial Sequence: Synthetic oligonucleotide
gacaccuugcugguauggc

SEQ ID NO: 1748202 - RNA, 19 nt, Artificial Sequence
  Description of Artificial Sequence: Synthetic oligonucleotide
agugagggucagcugggcu

SEQ ID NO: 1748203 - RNA, 19 nt, Artificial Sequence
  Description of Artificial Sequence: Synthetic oligonucleotide
gcaacuauguggaucuggc

SEQ ID NO: 1748204 - RNA, 19 nt, Artificial Sequence
  Description of Artificial Sequence: Synthetic oligonucleotide
cagccgagcuccaagcuuc

SEQ ID NO: 1748205 - RNA, 19 nt, Artificial Sequence
  Description of Artificial Sequence: Synthetic oligonucleotide
uuagccugucaccuccuuu

SEQ ID NO: 1748206 - RNA, 19 nt, Artificial Sequence
  Description of Artificial Sequence: Synthetic oligonucleotide
aagagcuuggucacuugau

SEQ ID NO: 1748207 - RNA, 19 nt, Artificial Sequence
  Description of Artificial Sequence: Synthetic oligonucleotide
uggugguauguccccacaa

SEQ ID NO: 1748208 - RNA, 19 nt, Artificial Sequence
  Description of Artificial Sequence: Synthetic oligonucleotide
uuaggauccucagcacugu

SEQ ID NO: 1748209 - RNA, 19 nt, Artificial Sequence
  Description of Artificial Sequence: Synthetic oligonucleotide
cugggugggacugaguuca

SEQ ID NO: 1748210 - RNA, 19 nt, Artificial Sequence
  Description of Artificial Sequence: Synthetic oligonucleotide
cacacagguggcaggugag

SEQ ID NO: 1748211 - RNA, 19 nt, Artificial Sequence
  Description of Artificial Sequence: Synthetic oligonucleotide
caaacucacucaccuaaga

SEQ ID NO: 1748212 - RNA, 19 nt, Artificial Sequence
  Description of Artificial Sequence: Synthetic oligonucleotide
aacuccauguccaguccga

SEQ ID NO: 1748213 - RNA, 19 nt, Artificial Sequence
  Description of Artificial Sequence: Synthetic oligonucleotide
cuguuccccagcuuuccac

SEQ ID NO: 1748214 - RNA, 19 nt, Artificial Sequence
  Description of Artificial Sequence: Synthetic oligonucleotide
cucaccuaagaaacugcca

SEQ ID NO: 1748215 - RNA, 19 nt, Artificial Sequence
  Description of Artificial Sequence: Synthetic oligonucleotide
ccuuuagccugucaccucc

SEQ ID NO: 1748216 - RNA, 19 nt, Artificial Sequence
  Description of Artificial Sequence: Synthetic oligonucleotide
cuagauuucugggaaaccu

SEQ ID NO: 1748217 - RNA, 19 nt, Artificial Sequence
  Description of Artificial Sequence: Synthetic oligonucleotide
cuucaggauguggggacgg

SEQ ID NO: 1748218 - RNA, 19 nt, Artificial Sequence
  Description of Artificial Sequence: Synthetic oligonucleotide
caauucagccuucucuaga

SEQ ID NO: 1748219 - RNA, 19 nt, Artificial Sequence
  Description of Artificial Sequence: Synthetic oligonucleotide
ugucccgugugcugaggug

SEQ ID NO: 1748220 - RNA, 19 nt, Artificial Sequence
  Description of Artificial Sequence: Synthetic oligonucleotide
uggaugaacucuggccuca

SEQ ID NO: 1748221 - RNA, 19 nt, Artificial Sequence
  Description of Artificial Sequence: Synthetic oligonucleotide
caugaucagcggucuugcc

SEQ ID NO: 1748222 - RNA, 19 nt, Artificial Sequence
  Description of Artificial Sequence: Synthetic oligonucleotide
ugguaggggcugaggcacg

SEQ ID NO: 1748223 - RNA, 19 nt, Artificial Sequence
  Description of Artificial Sequence: Synthetic oligonucleotide
ggugguauguccccacaac

SEQ ID NO: 1748224 - RNA, 19 nt, Artificial Sequence
  Description of Artificial Sequence: Synthetic oligonucleotide
ugcugcauaggugggccug

SEQ ID NO: 1748225 - RNA, 19 nt, Artificial Sequence
  Description of Artificial Sequence: Synthetic oligonucleotide
aggauguggggacgggcug

SEQ ID NO: 1748226 - RNA, 19 nt, Artificial Sequence
  Description of Artificial Sequence: Synthetic oligonucleotide
aggggcuagcaacuaugug

SEQ ID NO: 1748227 - RNA, 19 nt, Artificial Sequence
  Description of Artificial Sequence: Synthetic oligonucleotide
cccuccacugacaaguuug

SEQ ID NO: 1748228 - RNA, 19 nt, Artificial Sequence
  Description of Artificial Sequence: Synthetic oligonucleotide
aacucccgguacgucacug

SEQ ID NO: 1748229 - RNA, 19 nt, Artificial Sequence
  Description of Artificial Sequence: Synthetic oligonucleotide
ucagcggucuugcccucca

SEQ ID NO: 1748230 - RNA, 19 nt, Artificial Sequence
  Description of Artificial Sequence: Synthetic oligonucleotide
caguccgaaggugaauaag

SEQ ID NO: 1748231 - RNA, 19 nt, Artificial Sequence
  Description of Artificial Sequence: Synthetic oligonucleotide
gggcauguuuccaaggccc

SEQ ID NO: 1748232 - RNA, 19 nt, Artificial Sequence
  Description of Artificial Sequence: Synthetic oligonucleotide
ggcaggauugucugugaug

SEQ ID NO: 1748233 - RNA, 19 nt, Artificial Sequence
  Description of Artificial Sequence: Synthetic oligonucleotide
cuaccuccagaccaaggca

SEQ ID NO: 1748234 - RNA, 19 nt, Artificial Sequence
  Description of Artificial Sequence: Synthetic oligonucleotide
acgggcugucaaaagucac

SEQ ID NO: 1748235 - RNA, 19 nt, Artificial Sequence
  Description of Artificial Sequence: Synthetic oligonucleotide
cccgguacgucacugguag

SEQ ID NO: 1748236 - RNA, 19 nt, Artificial Sequence
  Description of Artificial Sequence: Synthetic oligonucleotide
gacugaguucagagaacug

SEQ ID NO: 1748237 - RNA, 19 nt, Artificial Sequence
  Description of Artificial Sequence: Synthetic oligonucleotide
cugugaugacaaguggcac

SEQ ID NO: 1748238 - RNA, 19 nt, Artificial Sequence
  Description of Artificial Sequence: Synthetic oligonucleotide
gguacgucacugguagggg

SEQ ID NO: 1748239 - RNA, 19 nt, Artificial Sequence
  Description of Artificial Sequence: Synthetic oligonucleotide
cuugcccuccacugacaag

SEQ ID NO: 1748240 - RNA, 19 nt, Artificial Sequence
  Description of Artificial Sequence: Synthetic oligonucleotide
uggaucuggccaccuuccu

SEQ ID NO: 1748241 - RNA, 19 nt, Artificial Sequence
  Description of Artificial Sequence: Synthetic oligonucleotide
aaggcauucuggggugcug

SEQ ID NO: 1748242 - RNA, 19 nt, Artificial Sequence
  Description of Artificial Sequence: Synthetic oligonucleotide
agcggucuugcccuccacu

SEQ ID NO: 1748243 - RNA, 19 nt, Artificial Sequence
  Description of Artificial Sequence: Synthetic oligonucleotide
aggauccucagcacuguug

SEQ ID NO: 1748244 - RNA, 19 nt, Artificial Sequence
  Description of Artificial Sequence: Synthetic oligonucleotide
cagggucagacugaguuca

SEQ ID NO: 1748245 - RNA, 19 nt, Artificial Sequence
  Description of Artificial Sequence: Synthetic oligonucleotide
cugcuaccuugcuucacug

SEQ ID NO: 1748246 - RNA, 19 nt, Artificial Sequence
  Description of Artificial Sequence: Synthetic oligonucleotide
aggugaauaagggcaugga

SEQ ID NO: 1748247 - RNA, 19 nt, Artificial Sequence
  Description of Artificial Sequence: Synthetic oligonucleotide
guggaucuggccaccuucc

SEQ ID NO: 1748248 - RNA, 19 nt, Artificial Sequence
  Description of Artificial Sequence: Synthetic oligonucleotide
gaacucuggccucauuacu

SEQ ID NO: 1748249 - RNA, 19 nt, Artificial Sequence
  Description of Artificial Sequence: Synthetic oligonucleotide
ugggcuugaaggguccccu

SEQ ID NO: 1748250 - RNA, 19 nt, Artificial Sequence
  Description of Artificial Sequence: Synthetic oligonucleotide
gggucaguugcaccauggg

SEQ ID NO: 1748251 - RNA, 19 nt, Artificial Sequence
  Description of Artificial Sequence: Synthetic oligonucleotide
ggagcaaugggcuuaggau

SEQ ID NO: 1748252 - RNA, 19 nt, Artificial Sequence
  Description of Artificial Sequence: Synthetic oligonucleotide
gcuagcaacuauguggauc

SEQ ID NO: 1748253 - RNA, 19 nt, Artificial Sequence
  Description of Artificial Sequence: Synthetic oligonucleotide
aguccccgguccugcuacc

SEQ ID NO: 1748254 - RNA, 19 nt, Artificial Sequence
  Description of Artificial Sequence: Synthetic oligonucleotide
uuuagccugucaccuccuu

SEQ ID NO: 1748255 - RNA, 19 nt, Artificial Sequence
  Description of Artificial Sequence: Synthetic oligonucleotide
acgguaggcaggauugucu

SEQ ID NO: 1748256 - RNA, 19 nt, Artificial Sequence
  Description of Artificial Sequence: Synthetic oligonucleotide
aucagcggucuugcccucc

SEQ ID NO: 1748257 - RNA, 19 nt, Artificial Sequence
  Description of Artificial Sequence: Synthetic oligonucleotide
gacgggcugucaaaaguca

SEQ ID NO: 1748258 - RNA, 19 nt, Artificial Sequence
  Description of Artificial Sequence: Synthetic oligonucleotide
ggucuugcccuccacugac

SEQ ID NO: 1748259 - RNA, 19 nt, Artificial Sequence
  Description of Artificial Sequence: Synthetic oligonucleotide
gucaguugcaccauggguu

SEQ ID NO: 1748260 - RNA, 19 nt, Artificial Sequence
  Description of Artificial Sequence: Synthetic oligonucleotide
cuauguggaucuggccacc

SEQ ID NO: 1748261 - RNA, 19 nt, Artificial Sequence
  Description of Artificial Sequence: Synthetic oligonucleotide
ggugaaggaucuguucccc

SEQ ID NO: 1748262 - RNA, 19 nt, Artificial Sequence
  Description of Artificial Sequence: Synthetic oligonucleotide
cauguccaguccgaaggug

SEQ ID NO: 1748263 - RNA, 19 nt, Artificial Sequence
  Description of Artificial Sequence: Synthetic oligonucleotide
auaagggcauggagcuagg

SEQ ID NO: 1748264 - RNA, 19 nt, Artificial Sequence
  Description of Artificial Sequence: Synthetic oligonucleotide
gggagcaaugggcuuagga

SEQ ID NO: 1748265 - RNA, 19 nt, Artificial Sequence
  Description of Artificial Sequence: Synthetic oligonucleotide
gacgguaggcaggauuguc

SEQ ID NO: 1748266 - RNA, 19 nt, Artificial Sequence
  Description of Artificial Sequence: Synthetic oligonucleotide
ggagagcccaggccagugg

SEQ ID NO: 1748267 - RNA, 19 nt, Artificial Sequence
  Description of Artificial Sequence: Synthetic oligonucleotide
ggccugaagagugaggguc

SEQ ID NO: 1748268 - RNA, 19 nt, Artificial Sequence
  Description of Artificial Sequence: Synthetic oligonucleotide
caguccccgguccugcuac

SEQ ID NO: 1748269 - RNA, 19 nt, Artificial Sequence
  Description of Artificial Sequence: Synthetic oligonucleotide
ggggauggugguauguccc

SEQ ID NO: 1748270 - RNA, 19 nt, Artificial Sequence
  Description of Artificial Sequence: Synthetic oligonucleotide
ggauugucugugaugacaa

SEQ ID NO: 1748271 - RNA, 19 nt, Artificial Sequence
  Description of Artificial Sequence: Synthetic oligonucleotide
ugccugcagacaccuugcu

SEQ ID NO: 1748272 - RNA, 19 nt, Artificial Sequence
  Description of Artificial Sequence: Synthetic oligonucleotide
agcaggggcuagcaacuau

SEQ ID NO: 1748273 - RNA, 19 nt, Artificial Sequence
  Description of Artificial Sequence: Synthetic oligonucleotide
aaguggcaccugcgugcag

SEQ ID NO: 1748274 - RNA, 19 nt, Artificial Sequence
  Description of Artificial Sequence: Synthetic oligonucleotide
gggcuagcaacuaugugga

SEQ ID NO: 1748275 - RNA, 19 nt, Artificial Sequence
  Description of Artificial Sequence: Synthetic oligonucleotide
caggauugucugugaugac

SEQ ID NO: 1748276 - RNA, 19 nt, Artificial Sequence
  Description of Artificial Sequence: Synthetic oligonucleotide
uaggauccucagcacuguu

SEQ ID NO: 1748277 - RNA, 19 nt, Artificial Sequence
  Description of Artificial Sequence: Synthetic oligonucleotide
ggcuggaaauagcaugauc

SEQ ID NO: 1748278 - RNA, 19 nt, Artificial Sequence
  Description of Artificial Sequence: Synthetic oligonucleotide
cuggggauggugguauguc

SEQ ID NO: 1748279 - RNA, 19 nt, Artificial Sequence
  Description of Artificial Sequence: Synthetic oligonucleotide
uggggacgggcugucaaaa

SEQ ID NO: 1748280 - RNA, 19 nt, Artificial Sequence
  Description of Artificial Sequence: Synthetic oligonucleotide
gaggcuaguucuucaggau

SEQ ID NO: 1748281 - RNA, 19 nt, Artificial Sequence
  Description of Artificial Sequence: Synthetic oligonucleotide
gcaugaucagcggucuugc

SEQ ID NO: 1748282 - RNA, 19 nt, Artificial Sequence
  Description of Artificial Sequence: Synthetic oligonucleotide
gcggucuugcccuccacug

SEQ ID NO: 1748283 - RNA, 19 nt, Artificial Sequence
  Description of Artificial Sequence: Synthetic oligonucleotide
ucccgguacgucacuggua

SEQ ID NO: 1748284 - RNA, 19 nt, Artificial Sequence
  Description of Artificial Sequence: Synthetic oligonucleotide
cugcgugcaggcuggguca

SEQ ID NO: 1748285 - RNA, 19 nt, Artificial Sequence
  Description of Artificial Sequence: Synthetic oligonucleotide
cuaggggacugguuaggaa

SEQ ID NO: 1748286 - RNA, 19 nt, Artificial Sequence
  Description of Artificial Sequence: Synthetic oligonucleotide
cugaagagugagggucagc

SEQ ID NO: 1748287 - RNA, 19 nt, Artificial Sequence
  Description of Artificial Sequence: Synthetic oligonucleotide
ucaguccccgguccugcua

SEQ ID NO: 1748288 - RNA, 19 nt, Artificial Sequence
  Description of Artificial Sequence: Synthetic oligonucleotide
ucccgugugcugaggugaa

SEQ ID NO: 1748289 - RNA, 19 nt, Artificial Sequence
  Description of Artificial Sequence: Synthetic oligonucleotide
aggugucccgugugcugag

SEQ ID NO: 1748290 - RNA, 19 nt, Artificial Sequence
  Description of Artificial Sequence: Synthetic oligonucleotide
ggaucuggccaccuuccuc

SEQ ID NO: 1748291 - RNA, 19 nt, Artificial Sequence
  Description of Artificial Sequence: Synthetic oligonucleotide
ugaugacaaguggcaccug

SEQ ID NO: 1748292 - RNA, 19 nt, Artificial Sequence
  Description of Artificial Sequence: Synthetic oligonucleotide
gcaggggcuagcaacuaug

SEQ ID NO: 1748293 - RNA, 19 nt, Artificial Sequence
  Description of Artificial Sequence: Synthetic oligonucleotide
gggacugguuaggaacagg

SEQ ID NO: 1748294 - RNA, 19 nt, Artificial Sequence
  Description of Artificial Sequence: Synthetic oligonucleotide
ggucaguugcaccaugggu

SEQ ID NO: 1748295 - RNA, 19 nt, Artificial Sequence
  Description of Artificial Sequence: Synthetic oligonucleotide
ugcgugcaggcugggucag

SEQ ID NO: 1748296 - RNA, 19 nt, Artificial Sequence
  Description of Artificial Sequence: Synthetic oligonucleotide
ggacgggcugucaaaaguc

SEQ ID NO: 1748297 - RNA, 19 nt, Artificial Sequence
  Description of Artificial Sequence: Synthetic oligonucleotide
aguccuaccuccagaccaa

SEQ ID NO: 1748298 - RNA, 19 nt, Artificial Sequence
  Description of Artificial Sequence: Synthetic oligonucleotide
ggcauguuuccaaggcccc

SEQ ID NO: 1748299 - RNA, 19 nt, Artificial Sequence
  Description of Artificial Sequence: Synthetic oligonucleotide
uagccuccaugcccacugu

SEQ ID NO: 1748300 - RNA, 19 nt, Artificial Sequence
  Description of Artificial Sequence: Synthetic oligonucleotide
gcugguauggcuggaaaua

SEQ ID NO: 1748301 - RNA, 19 nt, Artificial Sequence
  Description of Artificial Sequence: Synthetic oligonucleotide
gaggugaagcuggcuucug

SEQ ID NO: 1748302 - RNA, 19 nt, Artificial Sequence
  Description of Artificial Sequence: Synthetic oligonucleotide
aaccugccagcugggcugu

SEQ ID NO: 1748303 - RNA, 19 nt, Artificial Sequence
  Description of Artificial Sequence: Synthetic oligonucleotide
agccuaggucaucuccaaa

SEQ ID NO: 1748304 - RNA, 19 nt, Artificial Sequence
  Description of Artificial Sequence: Synthetic oligonucleotide
cacaaacucccgguacguc

SEQ ID NO: 1748305 - RNA, 19 nt, Artificial Sequence
  Description of Artificial Sequence: Synthetic oligonucleotide
ccugcgugcaggcuggguc

SEQ ID NO: 1748306 - RNA, 19 nt, Artificial Sequence
  Description of Artificial Sequence: Synthetic oligonucleotide
gguaggggcugaggcacgg

SEQ ID NO: 1748307 - RNA, 19 nt, Artificial Sequence
  Description of Artificial Sequence: Synthetic oligonucleotide
ccuaggucaucuccaaaga

SEQ ID NO: 1748308 - RNA, 19 nt, Artificial Sequence
  Description of Artificial Sequence: Synthetic oligonucleotide
augccaaagccuaggucau

SEQ ID NO: 1748309 - RNA, 19 nt, Artificial Sequence
  Description of Artificial Sequence: Synthetic oligonucleotide
agggaccuuuagccuguca

SEQ ID NO: 1748310 - RNA, 19 nt, Artificial Sequence
  Description of Artificial Sequence: Synthetic oligonucleotide
uccugcuaccuugcuucac

SEQ ID NO: 1748311 - RNA, 19 nt, Artificial Sequence
  Description of Artificial Sequence: Synthetic oligonucleotide
gacugguuaggaacagggu

SEQ ID NO: 1748312 - RNA, 19 nt, Artificial Sequence
  Description of Artificial Sequence: Synthetic oligonucleotide
auggguuagggugccugaa

SEQ ID NO: 1748313 - RNA, 19 nt, Artificial Sequence
  Description of Artificial Sequence: Synthetic oligonucleotide
ggggacgggcugucaaaag

SEQ ID NO: 1748314 - RNA, 19 nt, Artificial Sequence
  Description of Artificial Sequence: Synthetic oligonucleotide
uagcaugaucagcggucuu

SEQ ID NO: 1748315 - RNA, 19 nt, Artificial Sequence
  Description of Artificial Sequence: Synthetic oligonucleotide
uagcaacuauguggaucug

SEQ ID NO: 1748316 - RNA, 19 nt, Artificial Sequence
  Description of Artificial Sequence: Synthetic oligonucleotide
ggacugaguucagagaacu

SEQ ID NO: 1748317 - RNA, 19 nt, Artificial Sequence
  Description of Artificial Sequence: Synthetic oligonucleotide
gaauaagggcauggagcua

SEQ ID NO: 1748318 - RNA, 19 nt, Artificial Sequence
  Description of Artificial Sequence: Synthetic oligonucleotide
gugggaaggcagccgagcu

SEQ ID NO: 1748319 - RNA, 19 nt, Artificial Sequence
  Description of Artificial Sequence: Synthetic oligonucleotide
ccgugugcugaggugaagc

SEQ ID NO: 1748320 - RNA, 19 nt, Artificial Sequence
  Description of Artificial Sequence: Synthetic oligonucleotide
auguggaucuggccaccuu

SEQ ID NO: 1748321 - RNA, 19 nt, Artificial Sequence
  Description of Artificial Sequence: Synthetic oligonucleotide
uuguagccuccaugcccac

SEQ ID NO: 1748322 - RNA, 19 nt, Artificial Sequence
  Description of Artificial Sequence: Synthetic oligonucleotide
gaucagcggucuugcccuc

SEQ ID NO: 1748323 - RNA, 19 nt, Artificial Sequence
  Description of Artificial Sequence: Synthetic oligonucleotide
cuaccuugcuucacugccu

SEQ ID NO: 1748324 - RNA, 19 nt, Artificial Sequence
  Description of Artificial Sequence: Synthetic oligonucleotide
ggcuaguucuucaggaugu

SEQ ID NO: 1748325 - RNA, 19 nt, Artificial Sequence
  Description of Artificial Sequence: Synthetic oligonucleotide
cugccaugcccagggugcc

SEQ ID NO: 1748326 - RNA, 19 nt, Artificial Sequence
  Description of Artificial Sequence: Synthetic oligonucleotide
caaguggcaccugcgugca

SEQ ID NO: 1748327 - RNA, 19 nt, Artificial Sequence
  Description of Artificial Sequence: Synthetic oligonucleotide
gcuaguucuucaggaugug

SEQ ID NO: 1748328 - RNA, 19 nt, Artificial Sequence
  Description of Artificial Sequence: Synthetic oligonucleotide
ugcccuccacugacaaguu

SEQ ID NO: 1748329 - RNA, 19 nt, Artificial Sequence
  Description of Artificial Sequence: Synthetic oligonucleotide
gggaaaccugccagcuggg

SEQ ID NO: 1748330 - RNA, 19 nt, Artificial Sequence
  Description of Artificial Sequence: Synthetic oligonucleotide
gggacgggcugucaaaagu

SEQ ID NO: 1748331 - RNA, 19 nt, Artificial Sequence
  Description of Artificial Sequence: Synthetic oligonucleotide
guccuaccuccagaccaag

SEQ ID NO: 1748332 - RNA, 19 nt, Artificial Sequence
  Description of Artificial Sequence: Synthetic oligonucleotide
caguugcaccauggguuag

SEQ ID NO: 1748333 - RNA, 19 nt, Artificial Sequence
  Description of Artificial Sequence: Synthetic oligonucleotide
gggacugaguucagagaac

SEQ ID NO: 1748334 - RNA, 19 nt, Artificial Sequence
  Description of Artificial Sequence: Synthetic oligonucleotide
gcagacaccuugcugguau

SEQ ID NO: 1748335 - RNA, 19 nt, Artificial Sequence
  Description of Artificial Sequence: Synthetic oligonucleotide
guggggacgggcugucaaa

SEQ ID NO: 1748336 - RNA, 19 nt, Artificial Sequence
  Description of Artificial Sequence: Synthetic oligonucleotide
uccccgguccugcuaccuu

SEQ ID NO: 1748337 - RNA, 19 nt, Artificial Sequence
  Description of Artificial Sequence: Synthetic oligonucleotide
cgguaggcaggauugucug

SEQ ID NO: 1748338 - RNA, 19 nt, Artificial Sequence
  Description of Artificial Sequence: Synthetic oligonucleotide
gaagggcuuguagccucca

SEQ ID NO: 1748339 - RNA, 19 nt, Artificial Sequence
  Description of Artificial Sequence: Synthetic oligonucleotide
guccugcuaccuugcuuca

SEQ ID NO: 1748340 - RNA, 19 nt, Artificial Sequence
  Description of Artificial Sequence: Synthetic oligonucleotide
ccugucaccuccuuugagu

SEQ ID NO: 1748341 - RNA, 19 nt, Artificial Sequence
  Description of Artificial Sequence: Synthetic oligonucleotide
ccauggguuagggugccug

SEQ ID NO: 1748342 - RNA, 19 nt, Artificial Sequence
  Description of Artificial Sequence: Synthetic oligonucleotide
gggcauggagcuaggggac

SEQ ID NO: 1748343 - RNA, 19 nt, Artificial Sequence
  Description of Artificial Sequence: Synthetic oligonucleotide
gggcugucaaaagucacua

SEQ ID NO: 1748344 - RNA, 19 nt, Artificial Sequence
  Description of Artificial Sequence: Synthetic oligonucleotide
ggcugucaaaagucacuaa

SEQ ID NO: 1748345 - RNA, 19 nt, Artificial Sequence
  Description of Artificial Sequence: Synthetic oligonucleotide
cacuguuguuggacacaga

SEQ ID NO: 1748346 - RNA, 19 nt, Artificial Sequence
  Description of Artificial Sequence: Synthetic oligonucleotide
ccugaagagugagggucag

SEQ ID NO: 1748347 - RNA, 19 nt, Artificial Sequence
  Description of Artificial Sequence: Synthetic oligonucleotide
gaggcacggccagcugccc

SEQ ID NO: 1748348 - RNA, 19 nt, Artificial Sequence
  Description of Artificial Sequence: Synthetic oligonucleotide
ggugucccgugugcugagg

SEQ ID NO: 1748349 - RNA, 19 nt, Artificial Sequence
  Description of Artificial Sequence: Synthetic oligonucleotide
gaugaacucuggccucauu

SEQ ID NO: 1748350 - RNA, 19 nt, Artificial Sequence
  Description of Artificial Sequence: Synthetic oligonucleotide
aaacgacgguaggcaggau

SEQ ID NO: 1748351 - RNA, 19 nt, Artificial Sequence
  Description of Artificial Sequence: Synthetic oligonucleotide
uccaagcuucagggucaga

SEQ ID NO: 1748352 - RNA, 19 nt, Artificial Sequence
  Description of Artificial Sequence: Synthetic oligonucleotide
ccccgguccugcuaccuug

SEQ ID NO: 1748353 - RNA, 19 nt, Artificial Sequence
  Description of Artificial Sequence: Synthetic oligonucleotide
cucccgguacgucacuggu

SEQ ID NO: 1748354 - RNA, 19 nt, Artificial Sequence
  Description of Artificial Sequence: Synthetic oligonucleotide
cccgguccugcuaccuugc

SEQ ID NO: 1748355 - RNA, 19 nt, Artificial Sequence
  Description of Artificial Sequence: Synthetic oligonucleotide
gguaggcaggauugucugu

SEQ ID NO: 1748356 - RNA, 19 nt, Artificial Sequence
  Description of Artificial Sequence: Synthetic oligonucleotide
gggucagacugaguucaca

SEQ ID NO: 1748357 - RNA, 19 nt, Artificial Sequence
  Description of Artificial Sequence: Synthetic oligonucleotide
gauccucagcacuguuguu

SEQ ID NO: 1748358 - RNA, 19 nt, Artificial Sequence
  Description of Artificial Sequence: Synthetic oligonucleotide
cagacugaguucacaucuu

SEQ ID NO: 1748359 - RNA, 19 nt, Artificial Sequence
  Description of Artificial Sequence: Synthetic oligonucleotide
ccucaacaacaacagcaaa

SEQ ID NO: 1748360 - RNA, 19 nt, Artificial Sequence
  Description of Artificial Sequence: Synthetic oligonucleotide
cagcggucuugcccuccac

SEQ ID NO: 1748361 - RNA, 19 nt, Artificial Sequence
  Description of Artificial Sequence: Synthetic oligonucleotide
ccugcuaccuugcuucacu

SEQ ID NO: 1748362 - RNA, 19 nt, Artificial Sequence
  Description of Artificial Sequence: Synthetic oligonucleotide
agccgagcuccaagcuuca

SEQ ID NO: 1748363 - RNA, 19 nt, Artificial Sequence
  Description of Artificial Sequence: Synthetic oligonucleotide
auguggggacgggcuguca

SEQ ID NO: 1748364 - RNA, 19 nt, Artificial Sequence
  Description of Artificial Sequence: Synthetic oligonucleotide
accauggguuagggugccu

SEQ ID NO: 1748365 - RNA, 19 nt, Artificial Sequence
  Description of Artificial Sequence: Synthetic oligonucleotide
gguggccacacagguggca

SEQ ID NO: 1748366 - RNA, 19 nt, Artificial Sequence
  Description of Artificial Sequence: Synthetic oligonucleotide
ccaguccgaaggugaauaa

SEQ ID NO: 1748367 - RNA, 19 nt, Artificial Sequence
  Description of Artificial Sequence: Synthetic oligonucleotide
cccacugucaguccccggu

SEQ ID NO: 1748368 - RNA, 19 nt, Artificial Sequence
  Description of Artificial Sequence: Synthetic oligonucleotide
gggugcugcugggugggac

SEQ ID NO: 1748369 - RNA, 19 nt, Artificial Sequence
  Description of Artificial Sequence: Synthetic oligonucleotide
agggucagcugggcuugaa

SEQ ID NO: 1748370 - RNA, 19 nt, Artificial Sequence
  Description of Artificial Sequence: Synthetic oligonucleotide
gaggagagcccaggccagu

SEQ ID NO: 1748371 - RNA, 19 nt, Artificial Sequence
  Description of Artificial Sequence: Synthetic oligonucleotide
ggcagccgagcuccaagcu

SEQ ID NO: 1748372 - RNA, 19 nt, Artificial Sequence
  Description of Artificial Sequence: Synthetic oligonucleotide
gcaggcugggucaguugca

SEQ ID NO: 1748373 - RNA, 19 nt, Artificial Sequence
  Description of Artificial Sequence: Synthetic oligonucleotide
ggauguggggacgggcugu

SEQ ID NO: 1748374 - RNA, 19 nt, Artificial Sequence
  Description of Artificial Sequence: Synthetic oligonucleotide
caccugcgugcaggcuggg

SEQ ID NO: 1748375 - RNA, 19 nt, Artificial Sequence
  Description of Artificial Sequence: Synthetic oligonucleotide
ggcugaggcacggccagcu

SEQ ID NO: 1748376 - RNA, 19 nt, Artificial Sequence
  Description of Artificial Sequence: Synthetic oligonucleotide
cugcauaggugggccugaa

SEQ ID NO: 1748377 - RNA, 19 nt, Artificial Sequence
  Description of Artificial Sequence: Synthetic oligonucleotide
gggccugaagagugagggu

SEQ ID NO: 1748378 - RNA, 19 nt, Artificial Sequence
  Description of Artificial Sequence: Synthetic oligonucleotide
accugccagcugggcuguc

SEQ ID NO: 1748379 - RNA, 19 nt, Artificial Sequence
  Description of Artificial Sequence: Synthetic oligonucleotide
gccucauuacugaccucaa

SEQ ID NO: 1748380 - RNA, 19 nt, Artificial Sequence
  Description of Artificial Sequence: Synthetic oligonucleotide
ccgaaucccuugugaggga

SEQ ID NO: 1748381 - RNA, 19 nt, Artificial Sequence
  Description of Artificial Sequence: Synthetic oligonucleotide
cgggcugucaaaagucacu

SEQ ID NO: 1748382 - RNA, 19 nt, Artificial Sequence
  Description of Artificial Sequence: Synthetic oligonucleotide
cccuggggauggugguaug

SEQ ID NO: 1748383 - RNA, 19 nt, Artificial Sequence
  Description of Artificial Sequence: Synthetic oligonucleotide
ccucagcacuguuguugga

SEQ ID NO: 1748384 - RNA, 19 nt, Artificial Sequence
  Description of Artificial Sequence: Synthetic oligonucleotide
gggcugaggcacggccagc

SEQ ID NO: 1748385 - RNA, 19 nt, Artificial Sequence
  Description of Artificial Sequence: Synthetic oligonucleotide
cccgugugcugaggugaag

SEQ ID NO: 1748386 - RNA, 19 nt, Artificial Sequence
  Description of Artificial Sequence: Synthetic oligonucleotide
gggcucccuggggauggug

SEQ ID NO: 1748387 - RNA, 19 nt, Artificial Sequence
  Description of Artificial Sequence: Synthetic oligonucleotide
cagcaggggcuagcaacua

SEQ ID NO: 1748388 - RNA, 19 nt, Artificial Sequence
  Description of Artificial Sequence: Synthetic oligonucleotide
ggcuagcaacuauguggau

SEQ ID NO: 1748389 - RNA, 19 nt, Artificial Sequence
  Description of Artificial Sequence: Synthetic oligonucleotide
gcaaugggcuuaggauccu

SEQ ID NO: 1748390 - RNA, 19 nt, Artificial Sequence
  Description of Artificial Sequence: Synthetic oligonucleotide
gcaucuccccagggcaugu

SEQ ID NO: 1748391 - RNA, 19 nt, Artificial Sequence
  Description of Artificial Sequence: Synthetic oligonucleotide
ccuggggauggugguaugu

SEQ ID NO: 1748392 - RNA, 19 nt, Artificial Sequence
  Description of Artificial Sequence: Synthetic oligonucleotide
ccccaugcugcaagauacu

SEQ ID NO: 1748393 - RNA, 19 nt, Artificial Sequence
  Description of Artificial Sequence: Synthetic oligonucleotide
gggcuugaaggguccccuu

SEQ ID NO: 1748394 - RNA, 19 nt, Artificial Sequence
  Description of Artificial Sequence: Synthetic oligonucleotide
gaucugcaggagggaccuu

SEQ ID NO: 1748395 - RNA, 19 nt, Artificial Sequence
  Description of Artificial Sequence: Synthetic oligonucleotide
cgucacugguaggggcuga

SEQ ID NO: 1748396 - RNA, 19 nt, Artificial Sequence
  Description of Artificial Sequence: Synthetic oligonucleotide
ccgguccugcuaccuugcu

SEQ ID NO: 1748397 - RNA, 19 nt, Artificial Sequence
  Description of Artificial Sequence: Synthetic oligonucleotide
cgguccugcuaccuugcuu

SEQ ID NO: 1748398 - RNA, 19 nt, Artificial Sequence
  Description of Artificial Sequence: Synthetic oligonucleotide
gcgugcaggcugggucagu

SEQ ID NO: 1748399 - RNA, 19 nt, Artificial Sequence
  Description of Artificial Sequence: Synthetic oligonucleotide
aaacacuuugucuaggucg

SEQ ID NO: 1748400 - RNA, 19 nt, Artificial Sequence
  Description of Artificial Sequence: Synthetic oligonucleotide
auaaccacagcgcugaggc

SEQ ID NO: 1748401 - RNA, 19 nt, Artificial Sequence
  Description of Artificial Sequence: Synthetic oligonucleotide
uauaaaugauucuuuaugc

SEQ ID NO: 1748402 - RNA, 19 nt, Artificial Sequence
  Description of Artificial Sequence: Synthetic oligonucleotide
auaaaugauucuuuaugcc

SEQ ID NO: 1748403 - RNA, 19 nt, Artificial Sequence
  Description of Artificial Sequence: Synthetic oligonucleotide
auguuuacgagucuuauug

SEQ ID NO: 1748404 - RNA, 19 nt, Artificial Sequence
  Description of Artificial Sequence: Synthetic oligonucleotide
ugaacgaugaggccuaugc

SEQ ID NO: 1748405 - RNA, 19 nt, Artificial Sequence
  Description of Artificial Sequence: Synthetic oligonucleotide
cugaaugagagcuggaccg

SEQ ID NO: 1748406 - RNA, 19 nt, Artificial Sequence
  Description of Artificial Sequence: Synthetic oligonucleotide
agagcugagguaaagaugg

SEQ ID NO: 1748407 - RNA, 19 nt, Artificial Sequence
  Description of Artificial Sequence: Synthetic oligonucleotide
aacuauggcagcaaucugg

SEQ ID NO: 1748408 - RNA, 19 nt, Artificial Sequence
  Description of Artificial Sequence: Synthetic oligonucleotide
gagucuuauugccagaugc

SEQ ID NO: 1748409 - RNA, 19 nt, Artificial Sequence
  Description of Artificial Sequence: Synthetic oligonucleotide
gauuguauaaccacagcgc

SEQ ID NO: 1748410 - RNA, 19 nt, Artificial Sequence
  Description of Artificial Sequence: Synthetic oligonucleotide
ucauaauucaggaccuucc

SEQ ID NO: 1748411 - RNA, 19 nt, Artificial Sequence
  Description of Artificial Sequence: Synthetic oligonucleotide
ggauuguauaaccacagcg

SEQ ID NO: 1748412 - RNA, 19 nt, Artificial Sequence
  Description of Artificial Sequence: Synthetic oligonucleotide
gaugcaggauuguauaacc

SEQ ID NO: 1748413 - RNA, 19 nt, Artificial Sequence
  Description of Artificial Sequence: Synthetic oligonucleotide
cuaagugaggaccagauga

SEQ ID NO: 1748414 - RNA, 19 nt, Artificial Sequence
  Description of Artificial Sequence: Synthetic oligonucleotide
auaauucaggaccuuccac

SEQ ID NO: 1748415 - RNA, 19 nt, Artificial Sequence
  Description of Artificial Sequence: Synthetic oligonucleotide
cucaaucacagucagggag

SEQ ID NO: 1748416 - RNA, 19 nt, Artificial Sequence
  Description of Artificial Sequence: Synthetic oligonucleotide
auuguauaaccacagcgcu

SEQ ID NO: 1748417 - RNA, 19 nt, Artificial Sequence
  Description of Artificial Sequence: Synthetic oligonucleotide
uguauaaccacagcgcuga

SEQ ID NO: 1748418 - RNA, 19 nt, Artificial Sequence
  Description of Artificial Sequence: Synthetic oligonucleotide
uuuacgagucuuauugcca

SEQ ID NO: 1748419 - RNA, 19 nt, Artificial Sequence
  Description of Artificial Sequence: Synthetic oligonucleotide
aaaugauucuuuaugcccu

SEQ ID NO: 1748420 - RNA, 19 nt, Artificial Sequence
  Description of Artificial Sequence: Synthetic oligonucleotide
cuggcgacgaggaacaggg

SEQ ID NO: 1748421 - RNA, 19 nt, Artificial Sequence
  Description of Artificial Sequence: Synthetic oligonucleotide
uaugaggcgguaucagugg

SEQ ID NO: 1748422 - RNA, 19 nt, Artificial Sequence
  Description of Artificial Sequence: Synthetic oligonucleotide
gaugguucucuccaagaag

SEQ ID NO: 1748423 - RNA, 19 nt, Artificial Sequence
  Description of Artificial Sequence: Synthetic oligonucleotide
uuacgagucuuauugccag

SEQ ID NO: 1748424 - RNA, 19 nt, Artificial Sequence
  Description of Artificial Sequence: Synthetic oligonucleotide
augaguaugaggcgguauc

SEQ ID NO: 1748425 - RNA, 19 nt, Artificial Sequence
  Description of Artificial Sequence: Synthetic oligonucleotide
agaacuauggcagcaaucu

SEQ ID NO: 1748426 - RNA, 19 nt, Artificial Sequence
  Description of Artificial Sequence: Synthetic oligonucleotide
aucagugggaguuggaaug

SEQ ID NO: 1748427 - RNA, 19 nt, Artificial Sequence
  Description of Artificial Sequence: Synthetic oligonucleotide
aagccguacaugccguagc

SEQ ID NO: 1748428 - RNA, 19 nt, Artificial Sequence
  Description of Artificial Sequence: Synthetic oligonucleotide
uucaugaacgaugaggccu

SEQ ID NO: 1748429 - RNA, 19 nt, Artificial Sequence
  Description of Artificial Sequence: Synthetic oligonucleotide
guuuacgagucuuauugcc

SEQ ID NO: 1748430 - RNA, 19 nt, Artificial Sequence
  Description of Artificial Sequence: Synthetic oligonucleotide
agugaggaccagaugagcc

SEQ ID NO: 1748431 - RNA, 19 nt, Artificial Sequence
  Description of Artificial Sequence: Synthetic oligonucleotide
aggauuguauaaccacagc

SEQ ID NO: 1748432 - RNA, 19 nt, Artificial Sequence
  Description of Artificial Sequence: Synthetic oligonucleotide
uuaccaagucaccauggug

SEQ ID NO: 1748433 - RNA, 19 nt, Artificial Sequence
  Description of Artificial Sequence: Synthetic oligonucleotide
uugucuaggucguaccucc

SEQ ID NO: 1748434 - RNA, 19 nt, Artificial Sequence
  Description of Artificial Sequence: Synthetic oligonucleotide
gauucuuuaugcccuuccc

SEQ ID NO: 1748435 - RNA, 19 nt, Artificial Sequence
  Description of Artificial Sequence: Synthetic oligonucleotide
uugucauaauucaggaccu

SEQ ID NO: 1748436 - RNA, 19 nt, Artificial Sequence
  Description of Artificial Sequence: Synthetic oligonucleotide
ugacuugagaucccuggcc

SEQ ID NO: 1748437 - RNA, 19 nt, Artificial Sequence
  Description of Artificial Sequence: Synthetic oligonucleotide
ugcaggauuguauaaccac

SEQ ID NO: 1748438 - RNA, 19 nt, Artificial Sequence
  Description of Artificial Sequence: Synthetic oligonucleotide
ucuuauugccagaugcccu

SEQ ID NO: 1748439 - RNA, 19 nt, Artificial Sequence
  Description of Artificial Sequence: Synthetic oligonucleotide
uguacagcgcacugagccg

SEQ ID NO: 1748440 - RNA, 19 nt, Artificial Sequence
  Description of Artificial Sequence: Synthetic oligonucleotide
agggcugguguguacagcg

SEQ ID NO: 1748441 - RNA, 19 nt, Artificial Sequence
  Description of Artificial Sequence: Synthetic oligonucleotide
uguuuacgagucuuauugc

SEQ ID NO: 1748442 - RNA, 19 nt, Artificial Sequence
  Description of Artificial Sequence: Synthetic oligonucleotide
uggaccgggcaucuggugg

SEQ ID NO: 1748443 - RNA, 19 nt, Artificial Sequence
  Description of Artificial Sequence: Synthetic oligonucleotide
agaugcaggauuguauaac

SEQ ID NO: 1748444 - RNA, 19 nt, Artificial Sequence
  Description of Artificial Sequence: Synthetic oligonucleotide
cuggccauccucaagauga

SEQ ID NO: 1748445 - RNA, 19 nt, Artificial Sequence
  Description of Artificial Sequence: Synthetic oligonucleotide
agucuuauugccagaugcc

SEQ ID NO: 1748446 - RNA, 19 nt, Artificial Sequence
  Description of Artificial Sequence: Synthetic oligonucleotide
aggucaauguuuacgaguc

SEQ ID NO: 1748447 - RNA, 19 nt, Artificial Sequence
  Description of Artificial Sequence: Synthetic oligonucleotide
uuuaccaagucaccauggu

SEQ ID NO: 1748448 - RNA, 19 nt, Artificial Sequence
  Description of Artificial Sequence: Synthetic oligonucleotide
gacuugagaucccuggccc

SEQ ID NO: 1748449 - RNA, 19 nt, Artificial Sequence
  Description of Artificial Sequence: Synthetic oligonucleotide
cucucguccugaaugagag

SEQ ID NO: 1748450 - RNA, 19 nt, Artificial Sequence
  Description of Artificial Sequence: Synthetic oligonucleotide
caggauuguauaaccacag

SEQ ID NO: 1748451 - RNA, 19 nt, Artificial Sequence
  Description of Artificial Sequence: Synthetic oligonucleotide
uuguauaaccacagcgcug

SEQ ID NO: 1748452 - RNA, 19 nt, Artificial Sequence
  Description of Artificial Sequence: Synthetic oligonucleotide
gaagggcuaagugaggacc

SEQ ID NO: 1748453 - RNA, 19 nt, Artificial Sequence
  Description of Artificial Sequence: Synthetic oligonucleotide
uagcagaguucacagcucc

SEQ ID NO: 1748454 - RNA, 19 nt, Artificial Sequence
  Description of Artificial Sequence: Synthetic oligonucleotide
uuggucucccuuuaccaag

SEQ ID NO: 1748455 - RNA, 19 nt, Artificial Sequence
  Description of Artificial Sequence: Synthetic oligonucleotide
ucuaggucguaccuccagc

SEQ ID NO: 1748456 - RNA, 19 nt, Artificial Sequence
  Description of Artificial Sequence: Synthetic oligonucleotide
cuuauugccagaugcccug

SEQ ID NO: 1748457 - RNA, 19 nt, Artificial Sequence
  Description of Artificial Sequence: Synthetic oligonucleotide
aaugagagcuggaccgggc

SEQ ID NO: 1748458 - RNA, 19 nt, Artificial Sequence
  Description of Artificial Sequence: Synthetic oligonucleotide
auugccagaugcccugugg

SEQ ID NO: 1748459 - RNA, 19 nt, Artificial Sequence
  Description of Artificial Sequence: Synthetic oligonucleotide
ucauccaggugucucuacc

SEQ ID NO: 1748460 - RNA, 19 nt, Artificial Sequence
  Description of Artificial Sequence: Synthetic oligonucleotide
ucaugacaaccucucgucc

SEQ ID NO: 1748461 - RNA, 19 nt, Artificial Sequence
  Description of Artificial Sequence: Synthetic oligonucleotide
uacaugccguagcagaucu

SEQ ID NO: 1748462 - RNA, 19 nt, Artificial Sequence
  Description of Artificial Sequence: Synthetic oligonucleotide
agauccucagugguggggc

SEQ ID NO: 1748463 - RNA, 19 nt, Artificial Sequence
  Description of Artificial Sequence: Synthetic oligonucleotide
gauccagcggaugaggcag

SEQ ID NO: 1748464 - RNA, 19 nt, Artificial Sequence
  Description of Artificial Sequence: Synthetic oligonucleotide
uauaaccacagcgcugagg

SEQ ID NO: 1748465 - RNA, 19 nt, Artificial Sequence
  Description of Artificial Sequence: Synthetic oligonucleotide
uccacuguugguucacugc

SEQ ID NO: 1748466 - RNA, 19 nt, Artificial Sequence
  Description of Artificial Sequence: Synthetic oligonucleotide
caaccucucguccugaaug

SEQ ID NO: 1748467 - RNA, 19 nt, Artificial Sequence
  Description of Artificial Sequence: Synthetic oligonucleotide
gaguucacagcuccaggag

SEQ ID NO: 1748468 - RNA, 19 nt, Artificial Sequence
  Description of Artificial Sequence: Synthetic oligonucleotide
gaugcuggcgacgaggaac

SEQ ID NO: 1748469 - RNA, 19 nt, Artificial Sequence
  Description of Artificial Sequence: Synthetic oligonucleotide
aacacuuugucuaggucgu

SEQ ID NO: 1748470 - RNA, 19 nt, Artificial Sequence
  Description of Artificial Sequence: Synthetic oligonucleotide
gaaaagcuguucucccugc

SEQ ID NO: 1748471 - RNA, 19 nt, Artificial Sequence
  Description of Artificial Sequence: Synthetic oligonucleotide
agguaaagaugguucucuc

SEQ ID NO: 1748472 - RNA, 19 nt, Artificial Sequence
  Description of Artificial Sequence: Synthetic oligonucleotide
aguuggaaugucauccagg

SEQ ID NO: 1748473 - RNA, 19 nt, Artificial Sequence
  Description of Artificial Sequence: Synthetic oligonucleotide
ucaauguuuacgagucuua

SEQ ID NO: 1748474 - RNA, 19 nt, Artificial Sequence
  Description of Artificial Sequence: Synthetic oligonucleotide
uugccagaugcccuguggc

SEQ ID NO: 1748475 - RNA, 19 nt, Artificial Sequence
  Description of Artificial Sequence: Synthetic oligonucleotide
aaccucucguccugaauga

SEQ ID NO: 1748476 - RNA, 19 nt, Artificial Sequence
  Description of Artificial Sequence: Synthetic oligonucleotide
uccaggugucucuaccccg

SEQ ID NO: 1748477 - RNA, 19 nt, Artificial Sequence
  Description of Artificial Sequence: Synthetic oligonucleotide
aaaagcuguucucccugcu

SEQ ID NO: 1748478 - RNA, 19 nt, Artificial Sequence
  Description of Artificial Sequence: Synthetic oligonucleotide
ugaagaugcgguagacaga

SEQ ID NO: 1748479 - RNA, 19 nt, Artificial Sequence
  Description of Artificial Sequence: Synthetic oligonucleotide
gaguuggaaugucauccag

SEQ ID NO: 1748480 - RNA, 19 nt, Artificial Sequence
  Description of Artificial Sequence: Synthetic oligonucleotide
uugguucacugccugccag

SEQ ID NO: 1748481 - RNA, 19 nt, Artificial Sequence
  Description of Artificial Sequence: Synthetic oligonucleotide
guaugaggcgguaucagug

SEQ ID NO: 1748482 - RNA, 19 nt, Artificial Sequence
  Description of Artificial Sequence: Synthetic oligonucleotide
guagaggccagacaauguc

SEQ ID NO: 1748483 - RNA, 19 nt, Artificial Sequence
  Description of Artificial Sequence: Synthetic oligonucleotide
gguaaagaugguucucucc

SEQ ID NO: 1748484 - RNA, 19 nt, Artificial Sequence
  Description of Artificial Sequence: Synthetic oligonucleotide
augguucucuccaagaaga

SEQ ID NO: 1748485 - RNA, 19 nt, Artificial Sequence
  Description of Artificial Sequence: Synthetic oligonucleotide
ucaugaacgaugaggccua

SEQ ID NO: 1748486 - RNA, 19 nt, Artificial Sequence
  Description of Artificial Sequence: Synthetic oligonucleotide
uaucagugggaguuggaau

SEQ ID NO: 1748487 - RNA, 19 nt, Artificial Sequence
  Description of Artificial Sequence: Synthetic oligonucleotide
cuucaugaacgaugaggcc

SEQ ID NO: 1748488 - RNA, 19 nt, Artificial Sequence
  Description of Artificial Sequence: Synthetic oligonucleotide
ugaguaugaggcgguauca

SEQ ID NO: 1748489 - RNA, 19 nt, Artificial Sequence
  Description of Artificial Sequence: Synthetic oligonucleotide
ugaggcaagagcguccgca

SEQ ID NO: 1748490 - RNA, 19 nt, Artificial Sequence
  Description of Artificial Sequence: Synthetic oligonucleotide
uccaagaagaaaagcuguu

SEQ ID NO: 1748491 - RNA, 19 nt, Artificial Sequence
  Description of Artificial Sequence: Synthetic oligonucleotide
agaugguucucuccaagaa

SEQ ID NO: 1748492 - RNA, 19 nt, Artificial Sequence
  Description of Artificial Sequence: Synthetic oligonucleotide
ugccccaaacacuuugucu

SEQ ID NO: 1748493 - RNA, 19 nt, Artificial Sequence
  Description of Artificial Sequence: Synthetic oligonucleotide
gucuuauugccagaugccc

SEQ ID NO: 1748494 - RNA, 19 nt, Artificial Sequence
  Description of Artificial Sequence: Synthetic oligonucleotide
uucaggaccuuccacuguu

SEQ ID NO: 1748495 - RNA, 19 nt, Artificial Sequence
  Description of Artificial Sequence: Synthetic oligonucleotide
agagcucgucucuggcugc

SEQ ID NO: 1748496 - RNA, 19 nt, Artificial Sequence
  Description of Artificial Sequence: Synthetic oligonucleotide
uaccccgugggcaguagag

SEQ ID NO: 1748497 - RNA, 19 nt, Artificial Sequence
  Description of Artificial Sequence: Synthetic oligonucleotide
ggugucucuaccccguggg

SEQ ID NO: 1748498 - RNA, 19 nt, Artificial Sequence
  Description of Artificial Sequence: Synthetic oligonucleotide
gccuaugcagacaacaucc

SEQ ID NO: 1748499 - RNA, 19 nt, Artificial Sequence
  Description of Artificial Sequence: Synthetic oligonucleotide
gaaugagagcuggaccggg

SEQ ID NO: 1748500 - RNA, 19 nt, Artificial Sequence
  Description of Artificial Sequence: Synthetic oligonucleotide
aacauccaugaagccguac

SEQ ID NO: 1748501 - RNA, 19 nt, Artificial Sequence
  Description of Artificial Sequence: Synthetic oligonucleotide
agcccagaacuauggcagc

SEQ ID NO: 1748502 - RNA, 19 nt, Artificial Sequence
  Description of Artificial Sequence: Synthetic oligonucleotide
aggucaaacuguggugacc

SEQ ID NO: 1748503 - RNA, 19 nt, Artificial Sequence
  Description of Artificial Sequence: Synthetic oligonucleotide
cugauccagcggaugaggc

SEQ ID NO: 1748504 - RNA, 19 nt, Artificial Sequence
  Description of Artificial Sequence: Synthetic oligonucleotide
aacuguggugacccucaug

SEQ ID NO: 1748505 - RNA, 19 nt, Artificial Sequence
  Description of Artificial Sequence: Synthetic oligonucleotide
cauuggucucccuuuacca

SEQ ID NO: 1748506 - RNA, 19 nt, Artificial Sequence
  Description of Artificial Sequence: Synthetic oligonucleotide
ugugccccaaacacuuugu

SEQ ID NO: 1748507 - RNA, 19 nt, Artificial Sequence
  Description of Artificial Sequence: Synthetic oligonucleotide
cauaauucaggaccuucca

SEQ ID NO: 1748508 - RNA, 19 nt, Artificial Sequence
  Description of Artificial Sequence: Synthetic oligonucleotide
caugguggagccaggggac

SEQ ID NO: 1748509 - RNA, 19 nt, Artificial Sequence
  Description of Artificial Sequence: Synthetic oligonucleotide
gaggcgguaucagugggag

SEQ ID NO: 1748510 - RNA, 19 nt, Artificial Sequence
  Description of Artificial Sequence: Synthetic oligonucleotide
uuugucuaggucguaccuc

SEQ ID NO: 1748511 - RNA, 19 nt, Artificial Sequence
  Description of Artificial Sequence: Synthetic oligonucleotide
ucguaccuccagcagccag

SEQ ID NO: 1748512 - RNA, 19 nt, Artificial Sequence
  Description of Artificial Sequence: Synthetic oligonucleotide
ucccuuuaccaagucacca

SEQ ID NO: 1748513 - RNA, 19 nt, Artificial Sequence
  Description of Artificial Sequence: Synthetic oligonucleotide
gaguaugaggcgguaucag

SEQ ID NO: 1748514 - RNA, 19 nt, Artificial Sequence
  Description of Artificial Sequence: Synthetic oligonucleotide
ugaagggcuaagugaggac

SEQ ID NO: 1748515 - RNA, 19 nt, Artificial Sequence
  Description of Artificial Sequence: Synthetic oligonucleotide
ggucaaacuguggugaccc

SEQ ID NO: 1748516 - RNA, 19 nt, Artificial Sequence
  Description of Artificial Sequence: Synthetic oligonucleotide
aagaugaguaugaggcggu

SEQ ID NO: 1748517 - RNA, 19 nt, Artificial Sequence
  Description of Artificial Sequence: Synthetic oligonucleotide
gaacgaugaggccuaugca

SEQ ID NO: 1748518 - RNA, 19 nt, Artificial Sequence
  Description of Artificial Sequence: Synthetic oligonucleotide
gaagccguacaugccguag

SEQ ID NO: 1748519 - RNA, 19 nt, Artificial Sequence
  Description of Artificial Sequence: Synthetic oligonucleotide
cagaacuauggcagcaauc

SEQ ID NO: 1748520 - RNA, 19 nt, Artificial Sequence
  Description of Artificial Sequence: Synthetic oligonucleotide
ugguguguacagcgcacug

SEQ ID NO: 1748521 - RNA, 19 nt, Artificial Sequence
  Description of Artificial Sequence: Synthetic oligonucleotide
cucucacugauccagcgga

SEQ ID NO: 1748522 - RNA, 19 nt, Artificial Sequence
  Description of Artificial Sequence: Synthetic oligonucleotide
ugaggcgguaucaguggga

SEQ ID NO: 1748523 - RNA, 19 nt, Artificial Sequence
  Description of Artificial Sequence: Synthetic oligonucleotide
cucccuuuaccaagucacc

SEQ ID NO: 1748524 - RNA, 19 nt, Artificial Sequence
  Description of Artificial Sequence: Synthetic oligonucleotide
aggugucucuaccccgugg

SEQ ID NO: 1748525 - RNA, 19 nt, Artificial Sequence
  Description of Artificial Sequence: Synthetic oligonucleotide
ugagccgucacagcggcaa

SEQ ID NO: 1748526 - RNA, 19 nt, Artificial Sequence
  Description of Artificial Sequence: Synthetic oligonucleotide
aagggcuaagugaggacca

SEQ ID NO: 1748527 - RNA, 19 nt, Artificial Sequence
  Description of Artificial Sequence: Synthetic oligonucleotide
caguagaggccagacaaug

SEQ ID NO: 1748528 - RNA, 19 nt, Artificial Sequence
  Description of Artificial Sequence: Synthetic oligonucleotide
ugguucacugccugccagc

SEQ ID NO: 1748529 - RNA, 19 nt, Artificial Sequence
  Description of Artificial Sequence: Synthetic oligonucleotide
ggcaagagcguccgcaugc

SEQ ID NO: 1748530 - RNA, 19 nt, Artificial Sequence
  Description of Artificial Sequence: Synthetic oligonucleotide
uggucucccuuuaccaagu

SEQ ID NO: 1748531 - RNA, 19 nt, Artificial Sequence
  Description of Artificial Sequence: Synthetic oligonucleotide
acgaggaacagggagccca

SEQ ID NO: 1748532 - RNA, 19 nt, Artificial Sequence
  Description of Artificial Sequence: Synthetic oligonucleotide
ugacccucaugacaaccuc

SEQ ID NO: 1748533 - RNA, 19 nt, Artificial Sequence
  Description of Artificial Sequence: Synthetic oligonucleotide
gcggcaagggcucaggagc

SEQ ID NO: 1748534 - RNA, 19 nt, Artificial Sequence
  Description of Artificial Sequence: Synthetic oligonucleotide
gggaggucaauguuuacga

SEQ ID NO: 1748535 - RNA, 19 nt, Artificial Sequence
  Description of Artificial Sequence: Synthetic oligonucleotide
gagcccgcuguccaggcug

SEQ ID NO: 1748536 - RNA, 19 nt, Artificial Sequence
  Description of Artificial Sequence: Synthetic oligonucleotide
gagaugcaggauuguauaa

SEQ ID NO: 1748537 - RNA, 19 nt, Artificial Sequence
  Description of Artificial Sequence: Synthetic oligonucleotide
ucaggaccuuccacuguug

SEQ ID NO: 1748538 - RNA, 19 nt, Artificial Sequence
  Description of Artificial Sequence: Synthetic oligonucleotide
gucauaauucaggaccuuc

SEQ ID NO: 1748539 - RNA, 19 nt, Artificial Sequence
  Description of Artificial Sequence: Synthetic oligonucleotide
gucuaggucguaccuccag

SEQ ID NO: 1748540 - RNA, 19 nt, Artificial Sequence
  Description of Artificial Sequence: Synthetic oligonucleotide
gugaggaccagaugagcca

SEQ ID NO: 1748541 - RNA, 19 nt, Artificial Sequence
  Description of Artificial Sequence: Synthetic oligonucleotide
cuaggucguaccuccagca

SEQ ID NO: 1748542 - RNA, 19 nt, Artificial Sequence
  Description of Artificial Sequence: Synthetic oligonucleotide
cucaugcagggaacgggag

SEQ ID NO: 1748543 - RNA, 19 nt, Artificial Sequence
  Description of Artificial Sequence: Synthetic oligonucleotide
cugugccccaaacacuuug

SEQ ID NO: 1748544 - RNA, 19 nt, Artificial Sequence
  Description of Artificial Sequence: Synthetic oligonucleotide
uugagaucccuggcccugg

SEQ ID NO: 1748545 - RNA, 19 nt, Artificial Sequence
  Description of Artificial Sequence: Synthetic oligonucleotide
aacgggaggucaauguuua

SEQ ID NO: 1748546 - RNA, 19 nt, Artificial Sequence
  Description of Artificial Sequence: Synthetic oligonucleotide
ugggaguuggaaugucauc

SEQ ID NO: 1748547 - RNA, 19 nt, Artificial Sequence
  Description of Artificial Sequence: Synthetic oligonucleotide
agccguacaugccguagca

SEQ ID NO: 1748548 - RNA, 19 nt, Artificial Sequence
  Description of Artificial Sequence: Synthetic oligonucleotide
uacgagucuuauugccaga

SEQ ID NO: 1748549 - RNA, 19 nt, Artificial Sequence
  Description of Artificial Sequence: Synthetic oligonucleotide
gcauuggucucccuuuacc

SEQ ID NO: 1748550 - RNA, 19 nt, Artificial Sequence
  Description of Artificial Sequence: Synthetic oligonucleotide
cuagagcugagguaaagau

SEQ ID NO: 1748551 - RNA, 19 nt, Artificial Sequence
  Description of Artificial Sequence: Synthetic oligonucleotide
uggcgcugccacuuggcug

SEQ ID NO: 1748552 - RNA, 19 nt, Artificial Sequence
  Description of Artificial Sequence: Synthetic oligonucleotide
ccacuguugguucacugcc

SEQ ID NO: 1748553 - RNA, 19 nt, Artificial Sequence
  Description of Artificial Sequence: Synthetic oligonucleotide
guggugacccucaugacaa

SEQ ID NO: 1748554 - RNA, 19 nt, Artificial Sequence
  Description of Artificial Sequence: Synthetic oligonucleotide
ggagaugcaggauuguaua

SEQ ID NO: 1748555 - RNA, 19 nt, Artificial Sequence
  Description of Artificial Sequence: Synthetic oligonucleotide
ugucuccaagcuugaggcu

SEQ ID NO: 1748556 - RNA, 19 nt, Artificial Sequence
  Description of Artificial Sequence: Synthetic oligonucleotide
ucucguccugaaugagagc

SEQ ID NO: 1748557 - RNA, 19 nt, Artificial Sequence
  Description of Artificial Sequence: Synthetic oligonucleotide
aguagaggccagacaaugu

SEQ ID NO: 1748558 - RNA, 19 nt, Artificial Sequence
  Description of Artificial Sequence: Synthetic oligonucleotide
cuugagaucccuggcccug

SEQ ID NO: 1748559 - RNA, 19 nt, Artificial Sequence
  Description of Artificial Sequence: Synthetic oligonucleotide
aggagaugcaggauuguau

SEQ ID NO: 1748560 - RNA, 19 nt, Artificial Sequence
  Description of Artificial Sequence: Synthetic oligonucleotide
ugucuaggucguaccucca

SEQ ID NO: 1748561 - RNA, 19 nt, Artificial Sequence
  Description of Artificial Sequence: Synthetic oligonucleotide
acgggaggucaauguuuac

SEQ ID NO: 1748562 - RNA, 19 nt, Artificial Sequence
  Description of Artificial Sequence: Synthetic oligonucleotide
guggccguagcuguccaag

SEQ ID NO: 1748563 - RNA, 19 nt, Artificial Sequence
  Description of Artificial Sequence: Synthetic oligonucleotide
guaucagugggaguuggaa

SEQ ID NO: 1748564 - RNA, 19 nt, Artificial Sequence
  Description of Artificial Sequence: Synthetic oligonucleotide
caggucaaacuguggugac

SEQ ID NO: 1748565 - RNA, 19 nt, Artificial Sequence
  Description of Artificial Sequence: Synthetic oligonucleotide
agcgcuugaagaugcggua

SEQ ID NO: 1748566 - RNA, 19 nt, Artificial Sequence
  Description of Artificial Sequence: Synthetic oligonucleotide
uucggagcccgcuguccag

SEQ ID NO: 1748567 - RNA, 19 nt, Artificial Sequence
  Description of Artificial Sequence: Synthetic oligonucleotide
cagggagauggccugccac

SEQ ID NO: 1748568 - RNA, 19 nt, Artificial Sequence
  Description of Artificial Sequence: Synthetic oligonucleotide
guccgcaugcgcugggcag

SEQ ID NO: 1748569 - RNA, 19 nt, Artificial Sequence
  Description of Artificial Sequence: Synthetic oligonucleotide
aaacuguggugacccucau

SEQ ID NO: 1748570 - RNA, 19 nt, Artificial Sequence
  Description of Artificial Sequence: Synthetic oligonucleotide
gugguggggccacugugcc

SEQ ID NO: 1748571 - RNA, 19 nt, Artificial Sequence
  Description of Artificial Sequence: Synthetic oligonucleotide
ugccugccagcgcuugaag

SEQ ID NO: 1748572 - RNA, 19 nt, Artificial Sequence
  Description of Artificial Sequence: Synthetic oligonucleotide
ccuuuaccaagucaccaug

SEQ ID NO: 1748573 - RNA, 19 nt, Artificial Sequence
  Description of Artificial Sequence: Synthetic oligonucleotide
gagaucccuggcccuggag

SEQ ID NO: 1748574 - RNA, 19 nt, Artificial Sequence
  Description of Artificial Sequence: Synthetic oligonucleotide
ucggagcccgcuguccagg

SEQ ID NO: 1748575 - RNA, 19 nt, Artificial Sequence
  Description of Artificial Sequence: Synthetic oligonucleotide
gucucccuuuaccaaguca

SEQ ID NO: 1748576 - RNA, 19 nt, Artificial Sequence
  Description of Artificial Sequence: Synthetic oligonucleotide
uucacagcuccaggagccc

SEQ ID NO: 1748577 - RNA, 19 nt, Artificial Sequence
  Description of Artificial Sequence: Synthetic oligonucleotide
aguccaggucaaacugugg

SEQ ID NO: 1748578 - RNA, 19 nt, Artificial Sequence
  Description of Artificial Sequence: Synthetic oligonucleotide
gcuaagugaggaccagaug

SEQ ID NO: 1748579 - RNA, 19 nt, Artificial Sequence
  Description of Artificial Sequence: Synthetic oligonucleotide
ccacagagauccucagugg

SEQ ID NO: 1748580 - RNA, 19 nt, Artificial Sequence
  Description of Artificial Sequence: Synthetic oligonucleotide
cucguccugaaugagagcu

SEQ ID NO: 1748581 - RNA, 19 nt, Artificial Sequence
  Description of Artificial Sequence: Synthetic oligonucleotide
caagggcucaggagcuccc

SEQ ID NO: 1748582 - RNA, 19 nt, Artificial Sequence
  Description of Artificial Sequence: Synthetic oligonucleotide
acgagucuuauugccagau

SEQ ID NO: 1748583 - RNA, 19 nt, Artificial Sequence
  Description of Artificial Sequence: Synthetic oligonucleotide
uccgcaugcgcugggcagc

SEQ ID NO: 1748584 - RNA, 19 nt, Artificial Sequence
  Description of Artificial Sequence: Synthetic oligonucleotide
guugguucacugccugcca

SEQ ID NO: 1748585 - RNA, 19 nt, Artificial Sequence
  Description of Artificial Sequence: Synthetic oligonucleotide
agcagaucuggaagagcag

SEQ ID NO: 1748586 - RNA, 19 nt, Artificial Sequence
  Description of Artificial Sequence: Synthetic oligonucleotide
uuauugccagaugcccugu

SEQ ID NO: 1748587 - RNA, 19 nt, Artificial Sequence
  Description of Artificial Sequence: Synthetic oligonucleotide
uccccgcccucaugcaggg

SEQ ID NO: 1748588 - RNA, 19 nt, Artificial Sequence
  Description of Artificial Sequence: Synthetic oligonucleotide
aggcaagagcguccgcaug

SEQ ID NO: 1748589 - RNA, 19 nt, Artificial Sequence
  Description of Artificial Sequence: Synthetic oligonucleotide
gaggcccuagagcugaggu

SEQ ID NO: 1748590 - RNA, 19 nt, Artificial Sequence
  Description of Artificial Sequence: Synthetic oligonucleotide
uggcauuggucucccuuua

SEQ ID NO: 1748591 - RNA, 19 nt, Artificial Sequence
  Description of Artificial Sequence: Synthetic oligonucleotide
ggaguuggaaugucaucca

SEQ ID NO: 1748592 - RNA, 19 nt, Artificial Sequence
  Description of Artificial Sequence: Synthetic oligonucleotide
acagcggcaagggcucagg

SEQ ID NO: 1748593 - RNA, 19 nt, Artificial Sequence
  Description of Artificial Sequence: Synthetic oligonucleotide
gcaggauuguauaaccaca

SEQ ID NO: 1748594 - RNA, 19 nt, Artificial Sequence
  Description of Artificial Sequence: Synthetic oligonucleotide
guauaaccacagcgcugag

SEQ ID NO: 1748595 - RNA, 19 nt, Artificial Sequence
  Description of Artificial Sequence: Synthetic oligonucleotide
uccaagcuugaggcugucc

SEQ ID NO: 1748596 - RNA, 19 nt, Artificial Sequence
  Description of Artificial Sequence: Synthetic oligonucleotide
agccgucacagcggcaagg

SEQ ID NO: 1748597 - RNA, 19 nt, Artificial Sequence
  Description of Artificial Sequence: Synthetic oligonucleotide
caagagcguccgcaugcgc

SEQ ID NO: 1748598 - RNA, 19 nt, Artificial Sequence
  Description of Artificial Sequence: Synthetic oligonucleotide
aacagggagcccagaacua

SEQ ID NO: 1748599 - RNA, 19 nt, Artificial Sequence
  Description of Artificial Sequence: Synthetic oligonucleotide
ggugacccucaugacaacc

SEQ ID NO: 1748600 - RNA, 19 nt, Artificial Sequence
  Description of Artificial Sequence: Synthetic oligonucleotide
ggcccuggaguccagguca

SEQ ID NO: 1748601 - RNA, 19 nt, Artificial Sequence
  Description of Artificial Sequence: Synthetic oligonucleotide
acagggagcccagaacuau

SEQ ID NO: 1748602 - RNA, 19 nt, Artificial Sequence
  Description of Artificial Sequence: Synthetic oligonucleotide
gugucucuaccccgugggc

SEQ ID NO: 1748603 - RNA, 19 nt, Artificial Sequence
  Description of Artificial Sequence: Synthetic oligonucleotide
accccgugggcaguagagg

SEQ ID NO: 1748604 - RNA, 19 nt, Artificial Sequence
  Description of Artificial Sequence: Synthetic oligonucleotide
ccaagaagaaaagcuguuc

SEQ ID NO: 1748605 - RNA, 19 nt, Artificial Sequence
  Description of Artificial Sequence: Synthetic oligonucleotide
ggccuaugcagacaacauc

SEQ ID NO: 1748606 - RNA, 19 nt, Artificial Sequence
  Description of Artificial Sequence: Synthetic oligonucleotide
gaggcuguccacagagauc

SEQ ID NO: 1748607 - RNA, 19 nt, Artificial Sequence
  Description of Artificial Sequence: Synthetic oligonucleotide
guagcagaguucacagcuc

SEQ ID NO: 1748608 - RNA, 19 nt, Artificial Sequence
  Description of Artificial Sequence: Synthetic oligonucleotide
cuguggugacccucaugac

SEQ ID NO: 1748609 - RNA, 19 nt, Artificial Sequence
  Description of Artificial Sequence: Synthetic oligonucleotide
gucacagcggcaagggcuc

SEQ ID NO: 1748610 - RNA, 19 nt, Artificial Sequence
  Description of Artificial Sequence: Synthetic oligonucleotide
cuuugucuaggucguaccu

SEQ ID NO: 1748611 - RNA, 19 nt, Artificial Sequence
  Description of Artificial Sequence: Synthetic oligonucleotide
uccuuggucuugucauaau

SEQ ID NO: 1748612 - RNA, 19 nt, Artificial Sequence
  Description of Artificial Sequence: Synthetic oligonucleotide
ggaccgggcaucugguggc

SEQ ID NO: 1748613 - RNA, 19 nt, Artificial Sequence
  Description of Artificial Sequence: Synthetic oligonucleotide
ccaagcuugaggcugucca

SEQ ID NO: 1748614 - RNA, 19 nt, Artificial Sequence
  Description of Artificial Sequence: Synthetic oligonucleotide
aagaugcgguagacagaag

SEQ ID NO: 1748615 - RNA, 19 nt, Artificial Sequence
  Description of Artificial Sequence: Synthetic oligonucleotide
ugaagccguacaugccgua

SEQ ID NO: 1748616 - RNA, 19 nt, Artificial Sequence
  Description of Artificial Sequence: Synthetic oligonucleotide
agggcuaagugaggaccag

SEQ ID NO: 1748617 - RNA, 19 nt, Artificial Sequence
  Description of Artificial Sequence: Synthetic oligonucleotide
gauggccugccacugcagu

SEQ ID NO: 1748618 - RNA, 19 nt, Artificial Sequence
  Description of Artificial Sequence: Synthetic oligonucleotide
agagcuggaccgggcaucu

SEQ ID NO: 1748619 - RNA, 19 nt, Artificial Sequence
  Description of Artificial Sequence: Synthetic oligonucleotide
ugacaaccucucguccuga

SEQ ID NO: 1748620 - RNA, 19 nt, Artificial Sequence
  Description of Artificial Sequence: Synthetic oligonucleotide
cacagagauccucaguggu

SEQ ID NO: 1748621 - RNA, 19 nt, Artificial Sequence
  Description of Artificial Sequence: Synthetic oligonucleotide
guacaugccguagcagauc

SEQ ID NO: 1748622 - RNA, 19 nt, Artificial Sequence
  Description of Artificial Sequence: Synthetic oligonucleotide
cugccagcgcuugaagaug

SEQ ID NO: 1748623 - RNA, 19 nt, Artificial Sequence
  Description of Artificial Sequence: Synthetic oligonucleotide
ccucucacugauccagcgg

SEQ ID NO: 1748624 - RNA, 19 nt, Artificial Sequence
  Description of Artificial Sequence: Synthetic oligonucleotide
ucuaccccgugggcaguag

SEQ ID NO: 1748625 - RNA, 19 nt, Artificial Sequence
  Description of Artificial Sequence: Synthetic oligonucleotide
ggaccugguacuugaagua

SEQ ID NO: 1748626 - RNA, 19 nt, Artificial Sequence
  Description of Artificial Sequence: Synthetic oligonucleotide
gagccgucacagcggcaag

SEQ ID NO: 1748627 - RNA, 19 nt, Artificial Sequence
  Description of Artificial Sequence: Synthetic oligonucleotide
uccgggccuuggaagcaga

SEQ ID NO: 1748628 - RNA, 19 nt, Artificial Sequence
  Description of Artificial Sequence: Synthetic oligonucleotide
accucucguccugaaugag

SEQ ID NO: 1748629 - RNA, 19 nt, Artificial Sequence
  Description of Artificial Sequence: Synthetic oligonucleotide
ggcccuagagcugagguaa

SEQ ID NO: 1748630 - RNA, 19 nt, Artificial Sequence
  Description of Artificial Sequence: Synthetic oligonucleotide
cacagcgcugaggcaagag

SEQ ID NO: 1748631 - RNA, 19 nt, Artificial Sequence
  Description of Artificial Sequence: Synthetic oligonucleotide
gacaaccucucguccugaa

SEQ ID NO: 1748632 - RNA, 19 nt, Artificial Sequence
  Description of Artificial Sequence: Synthetic oligonucleotide
augaacgaugaggccuaug

SEQ ID NO: 1748633 - RNA, 19 nt, Artificial Sequence
  Description of Artificial Sequence: Synthetic oligonucleotide
aggccuaugcagacaacau

SEQ ID NO: 1748634 - RNA, 19 nt, Artificial Sequence
  Description of Artificial Sequence: Synthetic oligonucleotide
aggcccuagagcugaggua

SEQ ID NO: 1748635 - RNA, 19 nt, Artificial Sequence
  Description of Artificial Sequence: Synthetic oligonucleotide
cgggaggucaauguuuacg

SEQ ID NO: 1748636 - RNA, 19 nt, Artificial Sequence
  Description of Artificial Sequence: Synthetic oligonucleotide
gcuggcgacgaggaacagg

SEQ ID NO: 1748637 - RNA, 19 nt, Artificial Sequence
  Description of Artificial Sequence: Synthetic oligonucleotide
gagcguccgcaugcgcugg

SEQ ID NO: 1748638 - RNA, 19 nt, Artificial Sequence
  Description of Artificial Sequence: Synthetic oligonucleotide
ggaccagaugagccaggag

SEQ ID NO: 1748639 - RNA, 19 nt, Artificial Sequence
  Description of Artificial Sequence: Synthetic oligonucleotide
acugccugccagcgcuuga

SEQ ID NO: 1748640 - RNA, 19 nt, Artificial Sequence
  Description of Artificial Sequence: Synthetic oligonucleotide
gaugaguaugaggcgguau

SEQ ID NO: 1748641 - RNA, 19 nt, Artificial Sequence
  Description of Artificial Sequence: Synthetic oligonucleotide
ccugguacuugaaguagca

SEQ ID NO: 1748642 - RNA, 19 nt, Artificial Sequence
  Description of Artificial Sequence: Synthetic oligonucleotide
gcaagagcguccgcaugcg

SEQ ID NO: 1748643 - RNA, 19 nt, Artificial Sequence
  Description of Artificial Sequence: Synthetic oligonucleotide
augcagggaacgggagguc

SEQ ID NO: 1748644 - RNA, 19 nt, Artificial Sequence
  Description of Artificial Sequence: Synthetic oligonucleotide
ggcugguguguacagcgca

SEQ ID NO: 1748645 - RNA, 19 nt, Artificial Sequence
  Description of Artificial Sequence: Synthetic oligonucleotide
ccguacaugccguagcaga

SEQ ID NO: 1748646 - RNA, 19 nt, Artificial Sequence
  Description of Artificial Sequence: Synthetic oligonucleotide
gccgucacagcggcaaggg

SEQ ID NO: 1748647 - RNA, 19 nt, Artificial Sequence
  Description of Artificial Sequence: Synthetic oligonucleotide
uggugacccucaugacaac

SEQ ID NO: 1748648 - RNA, 19 nt, Artificial Sequence
  Description of Artificial Sequence: Synthetic oligonucleotide
uacagcgcacugagccguc

SEQ ID NO: 1748649 - RNA, 19 nt, Artificial Sequence
  Description of Artificial Sequence: Synthetic oligonucleotide
agcgcugaggcaagagcgu

SEQ ID NO: 1748650 - RNA, 19 nt, Artificial Sequence
  Description of Artificial Sequence: Synthetic oligonucleotide
cacugugccccaaacacuu

SEQ ID NO: 1748651 - RNA, 19 nt, Artificial Sequence
  Description of Artificial Sequence: Synthetic oligonucleotide
gccccucucacugauccag

SEQ ID NO: 1748652 - RNA, 19 nt, Artificial Sequence
  Description of Artificial Sequence: Synthetic oligonucleotide
gagcucgucucuggcugcc

SEQ ID NO: 1748653 - RNA, 19 nt, Artificial Sequence
  Description of Artificial Sequence: Synthetic oligonucleotide
gaacgggaggucaauguuu

SEQ ID NO: 1748654 - RNA, 19 nt, Artificial Sequence
  Description of Artificial Sequence: Synthetic oligonucleotide
agaugcuggcgacgaggaa

SEQ ID NO: 1748655 - RNA, 19 nt, Artificial Sequence
  Description of Artificial Sequence: Synthetic oligonucleotide
ccaggucaaacugugguga

SEQ ID NO: 1748656 - RNA, 19 nt, Artificial Sequence
  Description of Artificial Sequence: Synthetic oligonucleotide
gaggcaagagcguccgcau

SEQ ID NO: 1748657 - RNA, 19 nt, Artificial Sequence
  Description of Artificial Sequence: Synthetic oligonucleotide
agcagaguucacagcucca

SEQ ID NO: 1748658 - RNA, 19 nt, Artificial Sequence
  Description of Artificial Sequence: Synthetic oligonucleotide
uggcgacgaggaacaggga

SEQ ID NO: 1748659 - RNA, 19 nt, Artificial Sequence
  Description of Artificial Sequence: Synthetic oligonucleotide
gccauccucaagaugagua

SEQ ID NO: 1748660 - RNA, 19 nt, Artificial Sequence
  Description of Artificial Sequence: Synthetic oligonucleotide
gguucucuccaagaagaaa

SEQ ID NO: 1748661 - RNA, 19 nt, Artificial Sequence
  Description of Artificial Sequence: Synthetic oligonucleotide
cccaaacacuuugucuagg

SEQ ID NO: 1748662 - RNA, 19 nt, Artificial Sequence
  Description of Artificial Sequence: Synthetic oligonucleotide
ccucaugcagggaacggga

SEQ ID NO: 1748663 - RNA, 19 nt, Artificial Sequence
  Description of Artificial Sequence: Synthetic oligonucleotide
auccagcggaugaggcagg

SEQ ID NO: 1748664 - RNA, 19 nt, Artificial Sequence
  Description of Artificial Sequence: Synthetic oligonucleotide
gcgcacugagccgucacag

SEQ ID NO: 1748665 - RNA, 19 nt, Artificial Sequence
  Description of Artificial Sequence: Synthetic oligonucleotide
gacccucaugacaaccucu

SEQ ID NO: 1748666 - RNA, 19 nt, Artificial Sequence
  Description of Artificial Sequence: Synthetic oligonucleotide
agaugaguaugaggcggua

SEQ ID NO: 1748667 - RNA, 19 nt, Artificial Sequence
  Description of Artificial Sequence: Synthetic oligonucleotide
ccagcgcuugaagaugcgg

SEQ ID NO: 1748668 - RNA, 19 nt, Artificial Sequence
  Description of Artificial Sequence: Synthetic oligonucleotide
gggaacgggaggucaaugu

SEQ ID NO: 1748669 - RNA, 19 nt, Artificial Sequence
  Description of Artificial Sequence: Synthetic oligonucleotide
ggccguagcuguccaagga

SEQ ID NO: 1748670 - RNA, 19 nt, Artificial Sequence
  Description of Artificial Sequence: Synthetic oligonucleotide
caggugucucuaccccgug

SEQ ID NO: 1748671 - RNA, 19 nt, Artificial Sequence
  Description of Artificial Sequence: Synthetic oligonucleotide
gguucggagcccgcugucc

SEQ ID NO: 1748672 - RNA, 19 nt, Artificial Sequence
  Description of Artificial Sequence: Synthetic oligonucleotide
gugacccucaugacaaccu

SEQ ID NO: 1748673 - RNA, 19 nt, Artificial Sequence
  Description of Artificial Sequence: Synthetic oligonucleotide
cagcgcacugagccgucac

SEQ ID NO: 1748674 - RNA, 19 nt, Artificial Sequence
  Description of Artificial Sequence: Synthetic oligonucleotide
cugaggcaagagcguccgc

SEQ ID NO: 1748675 - RNA, 19 nt, Artificial Sequence
  Description of Artificial Sequence: Synthetic oligonucleotide
aggcgguaucagugggagu

SEQ ID NO: 1748676 - RNA, 19 nt, Artificial Sequence
  Description of Artificial Sequence: Synthetic oligonucleotide
guacagcgcacugagccgu

SEQ ID NO: 1748677 - RNA, 19 nt, Artificial Sequence
  Description of Artificial Sequence: Synthetic oligonucleotide
gaccgggcaucugguggcc

SEQ ID NO: 1748678 - RNA, 19 nt, Artificial Sequence
  Description of Artificial Sequence: Synthetic oligonucleotide
ggcgguaucagugggaguu

SEQ ID NO: 1748679 - RNA, 19 nt, Artificial Sequence
  Description of Artificial Sequence: Synthetic oligonucleotide
cacagcggcaagggcucag

SEQ ID NO: 1748680 - RNA, 19 nt, Artificial Sequence
  Description of Artificial Sequence: Synthetic oligonucleotide
cuccgggccuuggaagcag

SEQ ID NO: 1748681 - RNA, 19 nt, Artificial Sequence
  Description of Artificial Sequence: Synthetic oligonucleotide
ccguagcagaucuggaaga

SEQ ID NO: 1748682 - RNA, 19 nt, Artificial Sequence
  Description of Artificial Sequence: Synthetic oligonucleotide
ucucuaccccgugggcagu

SEQ ID NO: 1748683 - RNA, 19 nt, Artificial Sequence
  Description of Artificial Sequence: Synthetic oligonucleotide
cugguccgugagguccugg

SEQ ID NO: 1748684 - RNA, 19 nt, Artificial Sequence
  Description of Artificial Sequence: Synthetic oligonucleotide
ccuggcgcugccacuuggc

SEQ ID NO: 1748685 - RNA, 19 nt, Artificial Sequence
  Description of Artificial Sequence: Synthetic oligonucleotide
uggccaugggguggggaau

SEQ ID NO: 1748686 - RNA, 19 nt, Artificial Sequence
  Description of Artificial Sequence: Synthetic oligonucleotide
agguccccgcccucaugca

SEQ ID NO: 1748687 - RNA, 19 nt, Artificial Sequence
  Description of Artificial Sequence: Synthetic oligonucleotide
ccuagagcugagguaaaga

SEQ ID NO: 1748688 - RNA, 19 nt, Artificial Sequence
  Description of Artificial Sequence: Synthetic oligonucleotide
ggccacugugccccaaaca

SEQ ID NO: 1748689 - RNA, 19 nt, Artificial Sequence
  Description of Artificial Sequence: Synthetic oligonucleotide
ugcuggcgacgaggaacag

SEQ ID NO: 1748690 - RNA, 19 nt, Artificial Sequence
  Description of Artificial Sequence: Synthetic oligonucleotide
ccucucguccugaaugaga

SEQ ID NO: 1748691 - RNA, 19 nt, Artificial Sequence
  Description of Artificial Sequence: Synthetic oligonucleotide
ucacagcggcaagggcuca

SEQ ID NO: 1748692 - RNA, 19 nt, Artificial Sequence
  Description of Artificial Sequence: Synthetic oligonucleotide
ccucaugacaaccucucgu

SEQ ID NO: 1748693 - RNA, 19 nt, Artificial Sequence
  Description of Artificial Sequence: Synthetic oligonucleotide
gguaucagugggaguugga

SEQ ID NO: 1748694 - RNA, 19 nt, Artificial Sequence
  Description of Artificial Sequence: Synthetic oligonucleotide
ggaacgggaggucaauguu

SEQ ID NO: 1748695 - RNA, 19 nt, Artificial Sequence
  Description of Artificial Sequence: Synthetic oligonucleotide
ggugucuacagccccuuuu

SEQ ID NO: 1748696 - RNA, 19 nt, Artificial Sequence
  Description of Artificial Sequence: Synthetic oligonucleotide
ggaccuuccacuguugguu

SEQ ID NO: 1748697 - RNA, 19 nt, Artificial Sequence
  Description of Artificial Sequence: Synthetic oligonucleotide
cuaccccgugggcaguaga

SEQ ID NO: 1748698 - RNA, 19 nt, Artificial Sequence
  Description of Artificial Sequence: Synthetic oligonucleotide
gcccucaugcagggaacgg

SEQ ID NO: 1748699 - RNA, 19 nt, Artificial Sequence
  Description of Artificial Sequence: Synthetic oligonucleotide
acagcgcacugagccguca

SEQ ID NO: 1748700 - RNA, 19 nt, Artificial Sequence
  Description of Artificial Sequence: Synthetic oligonucleotide
ggcagggcugguguguaca

SEQ ID NO: 1748701 - RNA, 19 nt, Artificial Sequence
  Description of Artificial Sequence: Synthetic oligonucleotide
ggccaugggguggggaaug

SEQ ID NO: 1748702 - RNA, 19 nt, Artificial Sequence
  Description of Artificial Sequence: Synthetic oligonucleotide
ggcuaagugaggaccagau

SEQ ID NO: 1748703 - RNA, 19 nt, Artificial Sequence
  Description of Artificial Sequence: Synthetic oligonucleotide
cgcugaggcaagagcgucc

SEQ ID NO: 1748704 - RNA, 19 nt, Artificial Sequence
  Description of Artificial Sequence: Synthetic oligonucleotide
cacugccugccagcgcuug

SEQ ID NO: 1748705 - RNA, 19 nt, Artificial Sequence
  Description of Artificial Sequence: Synthetic oligonucleotide
guccugaaugagagcugga

SEQ ID NO: 1748706 - RNA, 19 nt, Artificial Sequence
  Description of Artificial Sequence: Synthetic oligonucleotide
ccccucucacugauccagc

SEQ ID NO: 1748707 - RNA, 19 nt, Artificial Sequence
  Description of Artificial Sequence: Synthetic oligonucleotide
ggagguccccgcccucaug

SEQ ID NO: 1748708 - RNA, 19 nt, Artificial Sequence
  Description of Artificial Sequence: Synthetic oligonucleotide
gggccacugugccccaaac

SEQ ID NO: 1748709 - RNA, 19 nt, Artificial Sequence
  Description of Artificial Sequence: Synthetic oligonucleotide
cgguaucagugggaguugg

SEQ ID NO: 1748710 - RNA, 19 nt, Artificial Sequence
  Description of Artificial Sequence: Synthetic oligonucleotide
gcuugccugcuggccaucc

SEQ ID NO: 1748711 - RNA, 19 nt, Artificial Sequence
  Description of Artificial Sequence: Synthetic oligonucleotide
gcgguaucagugggaguug

SEQ ID NO: 1748712 - RNA, 19 nt, Artificial Sequence
  Description of Artificial Sequence: Synthetic oligonucleotide
ccaugggguggggaauggg

SEQ ID NO: 1748713 - RNA, 19 nt, Artificial Sequence
  Description of Artificial Sequence: Synthetic oligonucleotide
caacauccaugaagccgua

SEQ ID NO: 1748714 - RNA, 19 nt, Artificial Sequence
  Description of Artificial Sequence: Synthetic oligonucleotide
ccugccagcgcuugaagau

SEQ ID NO: 1748715 - RNA, 19 nt, Artificial Sequence
  Description of Artificial Sequence: Synthetic oligonucleotide
gccagcgcuugaagaugcg

SEQ ID NO: 1748716 - RNA, 19 nt, Artificial Sequence
  Description of Artificial Sequence: Synthetic oligonucleotide
cugguguguacagcgcacu

SEQ ID NO: 1748717 - RNA, 19 nt, Artificial Sequence
  Description of Artificial Sequence: Synthetic oligonucleotide
gggcuaagugaggaccaga

SEQ ID NO: 1748718 - RNA, 19 nt, Artificial Sequence
  Description of Artificial Sequence: Synthetic oligonucleotide
ccgucacagcggcaagggc

SEQ ID NO: 1748719 - RNA, 19 nt, Artificial Sequence
  Description of Artificial Sequence: Synthetic oligonucleotide
cugccugccagcgcuugaa

SEQ ID NO: 1748720 - RNA, 19 nt, Artificial Sequence
  Description of Artificial Sequence: Synthetic oligonucleotide
acacuuugucuaggucgua

SEQ ID NO: 1748721 - RNA, 19 nt, Artificial Sequence
  Description of Artificial Sequence: Synthetic oligonucleotide
cacuuggcugaagggcuaa

SEQ ID NO: 1748722 - RNA, 19 nt, Artificial Sequence
  Description of Artificial Sequence: Synthetic oligonucleotide
cuggcgcugccacuuggcu

SEQ ID NO: 1748723 - RNA, 19 nt, Artificial Sequence
  Description of Artificial Sequence: Synthetic oligonucleotide
ugcuugccugcuggccauc

SEQ ID NO: 1748724 - RNA, 19 nt, Artificial Sequence
  Description of Artificial Sequence: Synthetic oligonucleotide
cccgcccucaugcagggaa

SEQ ID NO: 1748725 - RNA, 19 nt, Artificial Sequence
  Description of Artificial Sequence: Synthetic oligonucleotide
cugagccgucacagcggca

SEQ ID NO: 1748726 - RNA, 19 nt, Artificial Sequence
  Description of Artificial Sequence: Synthetic oligonucleotide
ggguucggagcccgcuguc

SEQ ID NO: 1748727 - RNA, 19 nt, Artificial Sequence
  Description of Artificial Sequence: Synthetic oligonucleotide
ccgcccucaugcagggaac

SEQ ID NO: 1748728 - RNA, 19 nt, Artificial Sequence
  Description of Artificial Sequence: Synthetic oligonucleotide
cccuuuaccaagucaccau

SEQ ID NO: 1748729 - RNA, 19 nt, Artificial Sequence
  Description of Artificial Sequence: Synthetic oligonucleotide
gcgcugaggcaagagcguc

SEQ ID NO: 1748730 - RNA, 19 nt, Artificial Sequence
  Description of Artificial Sequence: Synthetic oligonucleotide
gucguaccuccagcagcca

SEQ ID NO: 1748731 - RNA, 19 nt, Artificial Sequence
  Description of Artificial Sequence: Synthetic oligonucleotide
gcagggaacgggaggucaa

SEQ ID NO: 1748732 - RNA, 19 nt, Artificial Sequence
  Description of Artificial Sequence: Synthetic oligonucleotide
ccagcggaugaggcagggc

SEQ ID NO: 1748733 - RNA, 19 nt, Artificial Sequence
  Description of Artificial Sequence: Synthetic oligonucleotide
ccaggugucucuaccccgu

SEQ ID NO: 1748734 - RNA, 19 nt, Artificial Sequence
  Description of Artificial Sequence: Synthetic oligonucleotide
cgcccucaugcagggaacg

SEQ ID NO: 1748735 - RNA, 19 nt, Artificial Sequence
  Description of Artificial Sequence: Synthetic oligonucleotide
gguggccguagcuguccaa

SEQ ID NO: 1748736 - RNA, 19 nt, Artificial Sequence
  Description of Artificial Sequence: Synthetic oligonucleotide
gcgguagacagaagagccu

SEQ ID NO: 1748737 - RNA, 19 nt, Artificial Sequence
  Description of Artificial Sequence: Synthetic oligonucleotide
guggguucuuggugcugau

SEQ ID NO: 1748738 - RNA, 19 nt, Artificial Sequence
  Description of Artificial Sequence: Synthetic oligonucleotide
ccagaacuauggcagcaau

SEQ ID NO: 1748739 - RNA, 19 nt, Artificial Sequence
  Description of Artificial Sequence: Synthetic oligonucleotide
gcaguagaggccagacaau

SEQ ID NO: 1748740 - RNA, 19 nt, Artificial Sequence
  Description of Artificial Sequence: Synthetic oligonucleotide
gcguccgcaugcgcugggc

SEQ ID NO: 1748741 - RNA, 19 nt, Artificial Sequence
  Description of Artificial Sequence: Synthetic oligonucleotide
ggccuuggaagcagauccu

SEQ ID NO: 1748742 - RNA, 19 nt, Artificial Sequence
  Description of Artificial Sequence: Synthetic oligonucleotide
cucuaccccgugggcagua

SEQ ID NO: 1748743 - RNA, 19 nt, Artificial Sequence
  Description of Artificial Sequence: Synthetic oligonucleotide
ccacuuggcugaagggcua

SEQ ID NO: 1748744 - RNA, 19 nt, Artificial Sequence
  Description of Artificial Sequence: Synthetic oligonucleotide
cggagcccgcuguccaggc

SEQ ID NO: 1748745 - RNA, 19 nt, Artificial Sequence
  Description of Artificial Sequence: Synthetic oligonucleotide
cuccuccuauguccuuggu

SEQ ID NO: 1748746 - RNA, 19 nt, Artificial Sequence
  Description of Artificial Sequence: Synthetic oligonucleotide
gguccuggcgcugccacuu

SEQ ID NO: 1748747 - RNA, 19 nt, Artificial Sequence
  Description of Artificial Sequence: Synthetic oligonucleotide
ccaggaccugguacuugaa

SEQ ID NO: 1748748 - RNA, 19 nt, Artificial Sequence
  Description of Artificial Sequence: Synthetic oligonucleotide
gcugguccgugagguccug

SEQ ID NO: 1748749 - RNA, 19 nt, Artificial Sequence
  Description of Artificial Sequence: Synthetic oligonucleotide
ccugccacugcaguggguu

SEQ ID NO: 1748750 - RNA, 19 nt, Artificial Sequence
  Description of Artificial Sequence: Synthetic oligonucleotide
cagggaacgggaggucaau

SEQ ID NO: 1748751 - RNA, 19 nt, Artificial Sequence
  Description of Artificial Sequence: Synthetic oligonucleotide
cgggccuuggaagcagauc

SEQ ID NO: 1748752 - RNA, 19 nt, Artificial Sequence
  Description of Artificial Sequence: Synthetic oligonucleotide
caugaacgaugaggccuau

SEQ ID NO: 1748753 - RNA, 19 nt, Artificial Sequence
  Description of Artificial Sequence: Synthetic oligonucleotide
cguccgcaugcgcugggca

SEQ ID NO: 1748754 - RNA, 19 nt, Artificial Sequence
  Description of Artificial Sequence: Synthetic oligonucleotide
caggggacuggaggcccua

SEQ ID NO: 1748755 - RNA, 19 nt, Artificial Sequence
  Description of Artificial Sequence: Synthetic oligonucleotide
gcccuagagcugagguaaa

SEQ ID NO: 1748756 - RNA, 19 nt, Artificial Sequence
  Description of Artificial Sequence: Synthetic oligonucleotide
ccgggcaucugguggccgu

SEQ ID NO: 1748757 - RNA, 19 nt, Artificial Sequence
  Description of Artificial Sequence: Synthetic oligonucleotide
gggugucuacagccccuuu

SEQ ID NO: 1748758 - RNA, 19 nt, Artificial Sequence
  Description of Artificial Sequence: Synthetic oligonucleotide
ccacagcgcugaggcaaga

SEQ ID NO: 1748759 - RNA, 19 nt, Artificial Sequence
  Description of Artificial Sequence: Synthetic oligonucleotide
gccugccacugcagugggu

SEQ ID NO: 1748760 - RNA, 19 nt, Artificial Sequence
  Description of Artificial Sequence: Synthetic oligonucleotide
ccgcaugcgcugggcagcu

SEQ ID NO: 1748761 - RNA, 19 nt, Artificial Sequence
  Description of Artificial Sequence: Synthetic oligonucleotide
ccgugagguccuggggccu

SEQ ID NO: 1748762 - RNA, 19 nt, Artificial Sequence
  Description of Artificial Sequence: Synthetic oligonucleotide
gcccgcuguccaggcugcu

SEQ ID NO: 1748763 - RNA, 19 nt, Artificial Sequence
  Description of Artificial Sequence: Synthetic oligonucleotide
aagacuaaguaacacaccc

SEQ ID NO: 1748764 - RNA, 19 nt, Artificial Sequence
  Description of Artificial Sequence: Synthetic oligonucleotide
uacacuaucaacaugauga

SEQ ID NO: 1748765 - RNA, 19 nt, Artificial Sequence
  Description of Artificial Sequence: Synthetic oligonucleotide
auacauauggcuuaguacc

SEQ ID NO: 1748766 - RNA, 19 nt, Artificial Sequence
  Description of Artificial Sequence: Synthetic oligonucleotide
aauuguuagccuuugaguc

SEQ ID NO: 1748767 - RNA, 19 nt, Artificial Sequence
  Description of Artificial Sequence: Synthetic oligonucleotide
aauacauauggcuuaguac

SEQ ID NO: 1748768 - RNA, 19 nt, Artificial Sequence
  Description of Artificial Sequence: Synthetic oligonucleotide
aggaauagggccuagacac

SEQ ID NO: 1748769 - RNA, 19 nt, Artificial Sequence
  Description of Artificial Sequence: Synthetic oligonucleotide
ugcaauucaguguugaugg

SEQ ID NO: 1748770 - RNA, 19 nt, Artificial Sequence
  Description of Artificial Sequence: Synthetic oligonucleotide
uguucccuaauacauaugg

SEQ ID NO: 1748771 - RNA, 19 nt, Artificial Sequence
  Description of Artificial Sequence: Synthetic oligonucleotide
aaaacauacaccugccggg

SEQ ID NO: 1748772 - RNA, 19 nt, Artificial Sequence
  Description of Artificial Sequence: Synthetic oligonucleotide
ugucuuucaaauauacugg

SEQ ID NO: 1748773 - RNA, 19 nt, Artificial Sequence
  Description of Artificial Sequence: Synthetic oligonucleotide
ucaaugaaggaauagggcc

SEQ ID NO: 1748774 - RNA, 19 nt, Artificial Sequence
  Description of Artificial Sequence: Synthetic oligonucleotide
gaaaacauacaccugccgg

SEQ ID NO: 1748775 - RNA, 19 nt, Artificial Sequence
  Description of Artificial Sequence: Synthetic oligonucleotide
uuuagccugacucugauac

SEQ ID NO: 1748776 - RNA, 19 nt, Artificial Sequence
  Description of Artificial Sequence: Synthetic oligonucleotide
acaaacaaucuacuguucc

SEQ ID NO: 1748777 - RNA, 19 nt, Artificial Sequence
  Description of Artificial Sequence: Synthetic oligonucleotide
uuaagcauccuuaaacgag

SEQ ID NO: 1748778 - RNA, 19 nt, Artificial Sequence
  Description of Artificial Sequence: Synthetic oligonucleotide
aaauuguuagccuuugagu

SEQ ID NO: 1748779 - RNA, 19 nt, Artificial Sequence
  Description of Artificial Sequence: Synthetic oligonucleotide
cuuucaaauauacugggag

SEQ ID NO: 1748780 - RNA, 19 nt, Artificial Sequence
  Description of Artificial Sequence: Synthetic oligonucleotide
aagucaaucacaaauguca

SEQ ID NO: 1748781 - RNA, 19 nt, Artificial Sequence
  Description of Artificial Sequence: Synthetic oligonucleotide
uaagcauccuuaaacgagg

SEQ ID NO: 1748782 - RNA, 19 nt, Artificial Sequence
  Description of Artificial Sequence: Synthetic oligonucleotide
guaucaaacucaaugaagg

SEQ ID NO: 1748783 - RNA, 19 nt, Artificial Sequence
  Description of Artificial Sequence: Synthetic oligonucleotide
uucaaauauacugggaggg

SEQ ID NO: 1748784 - RNA, 19 nt, Artificial Sequence
  Description of Artificial Sequence: Synthetic oligonucleotide
uucaauauuggccaccaug

SEQ ID NO: 1748785 - RNA, 19 nt, Artificial Sequence
  Description of Artificial Sequence: Synthetic oligonucleotide
auuguuagccuuugagucc

SEQ ID NO: 1748786 - RNA, 19 nt, Artificial Sequence
  Description of Artificial Sequence: Synthetic oligonucleotide
uuuccugaaaacauacacc

SEQ ID NO: 1748787 - RNA, 19 nt, Artificial Sequence
  Description of Artificial Sequence: Synthetic oligonucleotide
auccccaacagcuagccgc

SEQ ID NO: 1748788 - RNA, 19 nt, Artificial Sequence
  Description of Artificial Sequence: Synthetic oligonucleotide
uguugauuaaaguuaagau

SEQ ID NO: 1748789 - RNA, 19 nt, Artificial Sequence
  Description of Artificial Sequence: Synthetic oligonucleotide
uggguucuaauacacagcc

SEQ ID NO: 1748790 - RNA, 19 nt, Artificial Sequence
  Description of Artificial Sequence: Synthetic oligonucleotide
uauuucuuagacagacugg

SEQ ID NO: 1748791 - RNA, 19 nt, Artificial Sequence
  Description of Artificial Sequence: Synthetic oligonucleotide
aaugcugagagugcuuccc

SEQ ID NO: 1748792 - RNA, 19 nt, Artificial Sequence
  Description of Artificial Sequence: Synthetic oligonucleotide
uguucauucaguuuucgaa

SEQ ID NO: 1748793 - RNA, 19 nt, Artificial Sequence
  Description of Artificial Sequence: Synthetic oligonucleotide
cuuggguucuaauacacag

SEQ ID NO: 1748794 - RNA, 19 nt, Artificial Sequence
  Description of Artificial Sequence: Synthetic oligonucleotide
uucgagucuuacuugaaag

SEQ ID NO: 1748795 - RNA, 19 nt, Artificial Sequence
  Description of Artificial Sequence: Synthetic oligonucleotide
uucccuaauacauauggcu

SEQ ID NO: 1748796 - RNA, 19 nt, Artificial Sequence
  Description of Artificial Sequence: Synthetic oligonucleotide
ugaaaacauacaccugccg

SEQ ID NO: 1748797 - RNA, 19 nt, Artificial Sequence
  Description of Artificial Sequence: Synthetic oligonucleotide
uuucgaaagaguuguuuag

SEQ ID NO: 1748798 - RNA, 19 nt, Artificial Sequence
  Description of Artificial Sequence: Synthetic oligonucleotide
uggcuuaguacccagagaa

SEQ ID NO: 1748799 - RNA, 19 nt, Artificial Sequence
  Description of Artificial Sequence: Synthetic oligonucleotide
ugaagggaauuucaggaug

SEQ ID NO: 1748800 - RNA, 19 nt, Artificial Sequence
  Description of Artificial Sequence: Synthetic oligonucleotide
ugauggcuccaucagagag

SEQ ID NO: 1748801 - RNA, 19 nt, Artificial Sequence
  Description of Artificial Sequence: Synthetic oligonucleotide
acuaucaauguagaguuuc

SEQ ID NO: 1748802 - RNA, 19 nt, Artificial Sequence
  Description of Artificial Sequence: Synthetic oligonucleotide
guuauggagacucggacgc

SEQ ID NO: 1748803 - RNA, 19 nt, Artificial Sequence
  Description of Artificial Sequence: Synthetic oligonucleotide
ucaguuuucgaaagaguug

SEQ ID NO: 1748804 - RNA, 19 nt, Artificial Sequence
  Description of Artificial Sequence: Synthetic oligonucleotide
guuuccugaaaacauacac

SEQ ID NO: 1748805 - RNA, 19 nt, Artificial Sequence
  Description of Artificial Sequence: Synthetic oligonucleotide
ucugguaggggacuguuca

SEQ ID NO: 1748806 - RNA, 19 nt, Artificial Sequence
  Description of Artificial Sequence: Synthetic oligonucleotide
uacuugaaagucaaucaca

SEQ ID NO: 1748807 - RNA, 19 nt, Artificial Sequence
  Description of Artificial Sequence: Synthetic oligonucleotide
aaagucaaucacaaauguc

SEQ ID NO: 1748808 - RNA, 19 nt, Artificial Sequence
  Description of Artificial Sequence: Synthetic oligonucleotide
uucauucaguuuucgaaag

SEQ ID NO: 1748809 - RNA, 19 nt, Artificial Sequence
  Description of Artificial Sequence: Synthetic oligonucleotide
gacuucuucaauauuggcc

SEQ ID NO: 1748810 - RNA, 19 nt, Artificial Sequence
  Description of Artificial Sequence: Synthetic oligonucleotide
aucuacuguucccuaauac

SEQ ID NO: 1748811 - RNA, 19 nt, Artificial Sequence
  Description of Artificial Sequence: Synthetic oligonucleotide
agggccuagacacaguagg

SEQ ID NO: 1748812 - RNA, 19 nt, Artificial Sequence
  Description of Artificial Sequence: Synthetic oligonucleotide
aaaccgcacauacacuauc

SEQ ID NO: 1748813 - RNA, 19 nt, Artificial Sequence
  Description of Artificial Sequence: Synthetic oligonucleotide
ggcgguauuucuuagacag

SEQ ID NO: 1748814 - RNA, 19 nt, Artificial Sequence
  Description of Artificial Sequence: Synthetic oligonucleotide
cuuaccagugacuaggcuc

SEQ ID NO: 1748815 - RNA, 19 nt, Artificial Sequence
  Description of Artificial Sequence: Synthetic oligonucleotide
ucuuagacagacuggacaa

SEQ ID NO: 1748816 - RNA, 19 nt, Artificial Sequence
  Description of Artificial Sequence: Synthetic oligonucleotide
aacgaggcgccaucuuucc

SEQ ID NO: 1748817 - RNA, 19 nt, Artificial Sequence
  Description of Artificial Sequence: Synthetic oligonucleotide
acuaucaacaugaugaaaa

SEQ ID NO: 1748818 - RNA, 19 nt, Artificial Sequence
  Description of Artificial Sequence: Synthetic oligonucleotide
ucaaauuccgagugcaggu

SEQ ID NO: 1748819 - RNA, 19 nt, Artificial Sequence
  Description of Artificial Sequence: Synthetic oligonucleotide
agguuauggagacucggac

SEQ ID NO: 1748820 - RNA, 19 nt, Artificial Sequence
  Description of Artificial Sequence: Synthetic oligonucleotide
uacauauggcuuaguaccc

SEQ ID NO: 1748821 - RNA, 19 nt, Artificial Sequence
  Description of Artificial Sequence: Synthetic oligonucleotide
ugauccucugcacaucuug

SEQ ID NO: 1748822 - RNA, 19 nt, Artificial Sequence
  Description of Artificial Sequence: Synthetic oligonucleotide
ucccuuaccagugacuagg

SEQ ID NO: 1748823 - RNA, 19 nt, Artificial Sequence
  Description of Artificial Sequence: Synthetic oligonucleotide
gaaggaauagggccuagac

SEQ ID NO: 1748824 - RNA, 19 nt, Artificial Sequence
  Description of Artificial Sequence: Synthetic oligonucleotide
aucaaauuccgagugcagg

SEQ ID NO: 1748825 - RNA, 19 nt, Artificial Sequence
  Description of Artificial Sequence: Synthetic oligonucleotide
uguugcuagcacagguugg

SEQ ID NO: 1748826 - RNA, 19 nt, Artificial Sequence
  Description of Artificial Sequence: Synthetic oligonucleotide
aaauuccgagugcaggucu

SEQ ID NO: 1748827 - RNA, 19 nt, Artificial Sequence
  Description of Artificial Sequence: Synthetic oligonucleotide
aaacucaaugaaggaauag

SEQ ID NO: 1748828 - RNA, 19 nt, Artificial Sequence
  Description of Artificial Sequence: Synthetic oligonucleotide
agugacuaggcucacuaca

SEQ ID NO: 1748829 - RNA, 19 nt, Artificial Sequence
  Description of Artificial Sequence: Synthetic oligonucleotide
ugacuguucguccuccugc

SEQ ID NO: 1748830 - RNA, 19 nt, Artificial Sequence
  Description of Artificial Sequence: Synthetic oligonucleotide
agcacgacuaucaauguag

SEQ ID NO: 1748831 - RNA, 19 nt, Artificial Sequence
  Description of Artificial Sequence: Synthetic oligonucleotide
acgacuaucaauguagagu

SEQ ID NO: 1748832 - RNA, 19 nt, Artificial Sequence
  Description of Artificial Sequence: Synthetic oligonucleotide
uaucaaacucaaugaagga

SEQ ID NO: 1748833 - RNA, 19 nt, Artificial Sequence
  Description of Artificial Sequence: Synthetic oligonucleotide
ugauuaaaguuaagauucu

SEQ ID NO: 1748834 - RNA, 19 nt, Artificial Sequence
  Description of Artificial Sequence: Synthetic oligonucleotide
ucuuagggaaggcagcuuc

SEQ ID NO: 1748835 - RNA, 19 nt, Artificial Sequence
  Description of Artificial Sequence: Synthetic oligonucleotide
aguuguuuagccugacucu

SEQ ID NO: 1748836 - RNA, 19 nt, Artificial Sequence
  Description of Artificial Sequence: Synthetic oligonucleotide
auguugauuaaaguuaaga

SEQ ID NO: 1748837 - RNA, 19 nt, Artificial Sequence
  Description of Artificial Sequence: Synthetic oligonucleotide
guaaguggaacgcauguuc

SEQ ID NO: 1748838 - RNA, 19 nt, Artificial Sequence
  Description of Artificial Sequence: Synthetic oligonucleotide
aagcccgucggccacgcgg

SEQ ID NO: 1748839 - RNA, 19 nt, Artificial Sequence
  Description of Artificial Sequence: Synthetic oligonucleotide
uugcaauucaguguugaug

SEQ ID NO: 1748840 - RNA, 19 nt, Artificial Sequence
  Description of Artificial Sequence: Synthetic oligonucleotide
uuggguucuaauacacagc

SEQ ID NO: 1748841 - RNA, 19 nt, Artificial Sequence
  Description of Artificial Sequence: Synthetic oligonucleotide
agauucuccaaaaggccgc

SEQ ID NO: 1748842 - RNA, 19 nt, Artificial Sequence
  Description of Artificial Sequence: Synthetic oligonucleotide
guacuucgcauccuggcgg

SEQ ID NO: 1748843 - RNA, 19 nt, Artificial Sequence
  Description of Artificial Sequence: Synthetic oligonucleotide
gguuauggagacucggacg

SEQ ID NO: 1748844 - RNA, 19 nt, Artificial Sequence
  Description of Artificial Sequence: Synthetic oligonucleotide
auguugcuagcacagguug

SEQ ID NO: 1748845 - RNA, 19 nt, Artificial Sequence
  Description of Artificial Sequence: Synthetic oligonucleotide
cauccuuaaacgaggcgcc

SEQ ID NO: 1748846 - RNA, 19 nt, Artificial Sequence
  Description of Artificial Sequence: Synthetic oligonucleotide
uucgaaagaguuguuuagc

SEQ ID NO: 1748847 - RNA, 19 nt, Artificial Sequence
  Description of Artificial Sequence: Synthetic oligonucleotide
acuguucccuaauacauau

SEQ ID NO: 1748848 - RNA, 19 nt, Artificial Sequence
  Description of Artificial Sequence: Synthetic oligonucleotide
uuuggcguaaguggaacgc

SEQ ID NO: 1748849 - RNA, 19 nt, Artificial Sequence
  Description of Artificial Sequence: Synthetic oligonucleotide
uacuucgagucuuacuuga

SEQ ID NO: 1748850 - RNA, 19 nt, Artificial Sequence
  Description of Artificial Sequence: Synthetic oligonucleotide
gacagaaugccccaguucu

SEQ ID NO: 1748851 - RNA, 19 nt, Artificial Sequence
  Description of Artificial Sequence: Synthetic oligonucleotide
gcaaaggccaacuucuuag

SEQ ID NO: 1748852 - RNA, 19 nt, Artificial Sequence
  Description of Artificial Sequence: Synthetic oligonucleotide
guugauuaaaguuaagauu

SEQ ID NO: 1748853 - RNA, 19 nt, Artificial Sequence
  Description of Artificial Sequence: Synthetic oligonucleotide
aguacccagagaaagucuc

SEQ ID NO: 1748854 - RNA, 19 nt, Artificial Sequence
  Description of Artificial Sequence: Synthetic oligonucleotide
auaauguagugaaaaguca

SEQ ID NO: 1748855 - RNA, 19 nt, Artificial Sequence
  Description of Artificial Sequence: Synthetic oligonucleotide
acccagagaaagucucugc

SEQ ID NO: 1748856 - RNA, 19 nt, Artificial Sequence
  Description of Artificial Sequence: Synthetic oligonucleotide
ucgagucuuacuugaaagu

SEQ ID NO: 1748857 - RNA, 19 nt, Artificial Sequence
  Description of Artificial Sequence: Synthetic oligonucleotide
caagacuaaguaacacacc

SEQ ID NO: 1748858 - RNA, 19 nt, Artificial Sequence
  Description of Artificial Sequence: Synthetic oligonucleotide
aaacgaggcgccaucuuuc

SEQ ID NO: 1748859 - RNA, 19 nt, Artificial Sequence
  Description of Artificial Sequence: Synthetic oligonucleotide
gaauagggccuagacacag

SEQ ID NO: 1748860 - RNA, 19 nt, Artificial Sequence
  Description of Artificial Sequence: Synthetic oligonucleotide
agacuaaguaacacacccc

SEQ ID NO: 1748861 - RNA, 19 nt, Artificial Sequence
  Description of Artificial Sequence: Synthetic oligonucleotide
caggauguugcuagcacag

SEQ ID NO: 1748862 - RNA, 19 nt, Artificial Sequence
  Description of Artificial Sequence: Synthetic oligonucleotide
uguugauggagccuagauu

SEQ ID NO: 1748863 - RNA, 19 nt, Artificial Sequence
  Description of Artificial Sequence: Synthetic oligonucleotide
auacacuaucaacaugaug

SEQ ID NO: 1748864 - RNA, 19 nt, Artificial Sequence
  Description of Artificial Sequence: Synthetic oligonucleotide
guagugaaaagucauggcu

SEQ ID NO: 1748865 - RNA, 19 nt, Artificial Sequence
  Description of Artificial Sequence: Synthetic oligonucleotide
gagacuuccacauggguua

SEQ ID NO: 1748866 - RNA, 19 nt, Artificial Sequence
  Description of Artificial Sequence: Synthetic oligonucleotide
auggcuccaucagagagac

SEQ ID NO: 1748867 - RNA, 19 nt, Artificial Sequence
  Description of Artificial Sequence: Synthetic oligonucleotide
caagguacaucugguaggg

SEQ ID NO: 1748868 - RNA, 19 nt, Artificial Sequence
  Description of Artificial Sequence: Synthetic oligonucleotide
ggguuaagcauccuuaaac

SEQ ID NO: 1748869 - RNA, 19 nt, Artificial Sequence
  Description of Artificial Sequence: Synthetic oligonucleotide
ugaaaagucauggcuccug

SEQ ID NO: 1748870 - RNA, 19 nt, Artificial Sequence
  Description of Artificial Sequence: Synthetic oligonucleotide
aguuuggcguaaguggaac

SEQ ID NO: 1748871 - RNA, 19 nt, Artificial Sequence
  Description of Artificial Sequence: Synthetic oligonucleotide
auucucccuuaccagugac

SEQ ID NO: 1748872 - RNA, 19 nt, Artificial Sequence
  Description of Artificial Sequence: Synthetic oligonucleotide
aguggaacgcauguucagg

SEQ ID NO: 1748873 - RNA, 19 nt, Artificial Sequence
  Description of Artificial Sequence: Synthetic oligonucleotide
uaaacgaggcgccaucuuu

SEQ ID NO: 1748874 - RNA, 19 nt, Artificial Sequence
  Description of Artificial Sequence: Synthetic oligonucleotide
gaauguugauuaaaguuaa

SEQ ID NO: 1748875 - RNA, 19 nt, Artificial Sequence
  Description of Artificial Sequence: Synthetic oligonucleotide
guuuggcguaaguggaacg

SEQ ID NO: 1748876 - RNA, 19 nt, Artificial Sequence
  Description of Artificial Sequence: Synthetic oligonucleotide
cauauggcuuaguacccag

SEQ ID NO: 1748877 - RNA, 19 nt, Artificial Sequence
  Description of Artificial Sequence: Synthetic oligonucleotide
uagauuucuccgagcacga

SEQ ID NO: 1748878 - RNA, 19 nt, Artificial Sequence
  Description of Artificial Sequence: Synthetic oligonucleotide
auacuucgagucuuacuug

SEQ ID NO: 1748879 - RNA, 19 nt, Artificial Sequence
  Description of Artificial Sequence: Synthetic oligonucleotide
aaacauacaccugccgggu

SEQ ID NO: 1748880 - RNA, 19 nt, Artificial Sequence
  Description of Artificial Sequence: Synthetic oligonucleotide
gguacuucgcauccuggcg

SEQ ID NO: 1748881 - RNA, 19 nt, Artificial Sequence
  Description of Artificial Sequence: Synthetic oligonucleotide
uuguuagccuuugagucca

SEQ ID NO: 1748882 - RNA, 19 nt, Artificial Sequence
  Description of Artificial Sequence: Synthetic oligonucleotide
uucuaauacacagcccugu

SEQ ID NO: 1748883 - RNA, 19 nt, Artificial Sequence
  Description of Artificial Sequence: Synthetic oligonucleotide
guuguuuagccugacucug

SEQ ID NO: 1748884 - RNA, 19 nt, Artificial Sequence
  Description of Artificial Sequence: Synthetic oligonucleotide
caaguuuggcguaagugga

SEQ ID NO: 1748885 - RNA, 19 nt, Artificial Sequence
  Description of Artificial Sequence: Synthetic oligonucleotide
cuggcgguauuucuuagac

SEQ ID NO: 1748886 - RNA, 19 nt, Artificial Sequence
  Description of Artificial Sequence: Synthetic oligonucleotide
aguuacaccucccgcucag

SEQ ID NO: 1748887 - RNA, 19 nt, Artificial Sequence
  Description of Artificial Sequence: Synthetic oligonucleotide
acauacuucgagucuuacu

SEQ ID NO: 1748888 - RNA, 19 nt, Artificial Sequence
  Description of Artificial Sequence: Synthetic oligonucleotide
gcuuaguacccagagaaag

SEQ ID NO: 1748889 - RNA, 19 nt, Artificial Sequence
  Description of Artificial Sequence: Synthetic oligonucleotide
agguuggcuaccuuaaauu

SEQ ID NO: 1748890 - RNA, 19 nt, Artificial Sequence
  Description of Artificial Sequence: Synthetic oligonucleotide
aacaaucuacuguucccua

SEQ ID NO: 1748891 - RNA, 19 nt, Artificial Sequence
  Description of Artificial Sequence: Synthetic oligonucleotide
aaaaggccgccuucuuuga

SEQ ID NO: 1748892 - RNA, 19 nt, Artificial Sequence
  Description of Artificial Sequence: Synthetic oligonucleotide
aaggucucggccugacugu

SEQ ID NO: 1748893 - RNA, 19 nt, Artificial Sequence
  Description of Artificial Sequence: Synthetic oligonucleotide
gcauccuuaaacgaggcgc

SEQ ID NO: 1748894 - RNA, 19 nt, Artificial Sequence
  Description of Artificial Sequence: Synthetic oligonucleotide
uguuuagccugacucugau

SEQ ID NO: 1748895 - RNA, 19 nt, Artificial Sequence
  Description of Artificial Sequence: Synthetic oligonucleotide
aggccaacuucuuagggaa

SEQ ID NO: 1748896 - RNA, 19 nt, Artificial Sequence
  Description of Artificial Sequence: Synthetic oligonucleotide
aaucuacuguucccuaaua

SEQ ID NO: 1748897 - RNA, 19 nt, Artificial Sequence
  Description of Artificial Sequence: Synthetic oligonucleotide
caaaaccgcacauacacua

SEQ ID NO: 1748898 - RNA, 19 nt, Artificial Sequence
  Description of Artificial Sequence: Synthetic oligonucleotide
gucucggccugacuguucg

SEQ ID NO: 1748899 - RNA, 19 nt, Artificial Sequence
  Description of Artificial Sequence: Synthetic oligonucleotide
caggacaggucuuuucuug

SEQ ID NO: 1748900 - RNA, 19 nt, Artificial Sequence
  Description of Artificial Sequence: Synthetic oligonucleotide
auguagaguuucuugguuu

SEQ ID NO: 1748901 - RNA, 19 nt, Artificial Sequence
  Description of Artificial Sequence: Synthetic oligonucleotide
agccuagauuucuccgagc

SEQ ID NO: 1748902 - RNA, 19 nt, Artificial Sequence
  Description of Artificial Sequence: Synthetic oligonucleotide
uuguuuagccugacucuga

SEQ ID NO: 1748903 - RNA, 19 nt, Artificial Sequence
  Description of Artificial Sequence: Synthetic oligonucleotide
caucaaauuccgagugcag

SEQ ID NO: 1748904 - RNA, 19 nt, Artificial Sequence
  Description of Artificial Sequence: Synthetic oligonucleotide
gagucuuacuugaaaguca

SEQ ID NO: 1748905 - RNA, 19 nt, Artificial Sequence
  Description of Artificial Sequence: Synthetic oligonucleotide
ugcaucgaagcggccagcg

SEQ ID NO: 1748906 - RNA, 19 nt, Artificial Sequence
  Description of Artificial Sequence: Synthetic oligonucleotide
ccgagcacgacuaucaaug

SEQ ID NO: 1748907 - RNA, 19 nt, Artificial Sequence
  Description of Artificial Sequence: Synthetic oligonucleotide
cauacuucgagucuuacuu

SEQ ID NO: 1748908 - RNA, 19 nt, Artificial Sequence
  Description of Artificial Sequence: Synthetic oligonucleotide
guugcuagcacagguuggc

SEQ ID NO: 1748909 - RNA, 19 nt, Artificial Sequence
  Description of Artificial Sequence: Synthetic oligonucleotide
uucacauacuucgagucuu

SEQ ID NO: 1748910 - RNA, 19 nt, Artificial Sequence
  Description of Artificial Sequence: Synthetic oligonucleotide
ugucaccaaccaaaggaau

SEQ ID NO: 1748911 - RNA, 19 nt, Artificial Sequence
  Description of Artificial Sequence: Synthetic oligonucleotide
acuguucauucaguuuucg

SEQ ID NO: 1748912 - RNA, 19 nt, Artificial Sequence
  Description of Artificial Sequence: Synthetic oligonucleotide
aggccgccuucuuugaagg

SEQ ID NO: 1748913 - RNA, 19 nt, Artificial Sequence
  Description of Artificial Sequence: Synthetic oligonucleotide
cacgacuaucaauguagag

SEQ ID NO: 1748914 - RNA, 19 nt, Artificial Sequence
  Description of Artificial Sequence: Synthetic oligonucleotide
gacuaggcucacuacaucu

SEQ ID NO: 1748915 - RNA, 19 nt, Artificial Sequence
  Description of Artificial Sequence: Synthetic oligonucleotide
uggguuaagcauccuuaaa

SEQ ID NO: 1748916 - RNA, 19 nt, Artificial Sequence
  Description of Artificial Sequence: Synthetic oligonucleotide
agagacagaaugccccagu

SEQ ID NO: 1748917 - RNA, 19 nt, Artificial Sequence
  Description of Artificial Sequence: Synthetic oligonucleotide
aaggucuuuagaggcagaa

SEQ ID NO: 1748918 - RNA, 19 nt, Artificial Sequence
  Description of Artificial Sequence: Synthetic oligonucleotide
ucucgcgguggccaguuac

SEQ ID NO: 1748919 - RNA, 19 nt, Artificial Sequence
  Description of Artificial Sequence: Synthetic oligonucleotide
ucucccuuaccagugacua

SEQ ID NO: 1748920 - RNA, 19 nt, Artificial Sequence
  Description of Artificial Sequence: Synthetic oligonucleotide
aggcaccuucuucccaugc

SEQ ID NO: 1748921 - RNA, 19 nt, Artificial Sequence
  Description of Artificial Sequence: Synthetic oligonucleotide
acaaucuacuguucccuaa

SEQ ID NO: 1748922 - RNA, 19 nt, Artificial Sequence
  Description of Artificial Sequence: Synthetic oligonucleotide
cauggguuaagcauccuua

SEQ ID NO: 1748923 - RNA, 19 nt, Artificial Sequence
  Description of Artificial Sequence: Synthetic oligonucleotide
gacucggacgccucgguca

SEQ ID NO: 1748924 - RNA, 19 nt, Artificial Sequence
  Description of Artificial Sequence: Synthetic oligonucleotide
aaccgcacauacacuauca

SEQ ID NO: 1748925 - RNA, 19 nt, Artificial Sequence
  Description of Artificial Sequence: Synthetic oligonucleotide
gauuucuccgagcacgacu

SEQ ID NO: 1748926 - RNA, 19 nt, Artificial Sequence
  Description of Artificial Sequence: Synthetic oligonucleotide
cgcauguucagguacuucg

SEQ ID NO: 1748927 - RNA, 19 nt, Artificial Sequence
  Description of Artificial Sequence: Synthetic oligonucleotide
acuaggcucacuacaucuc

SEQ ID NO: 1748928 - RNA, 19 nt, Artificial Sequence
  Description of Artificial Sequence: Synthetic oligonucleotide
acucggacgccucggucac

SEQ ID NO: 1748929 - RNA, 19 nt, Artificial Sequence
  Description of Artificial Sequence: Synthetic oligonucleotide
auggguuaagcauccuuaa

SEQ ID NO: 1748930 - RNA, 19 nt, Artificial Sequence
  Description of Artificial Sequence: Synthetic oligonucleotide
cuaauacacagcccuguga

SEQ ID NO: 1748931 - RNA, 19 nt, Artificial Sequence
  Description of Artificial Sequence: Synthetic oligonucleotide
agaguuguuuagccugacu

SEQ ID NO: 1748932 - RNA, 19 nt, Artificial Sequence
  Description of Artificial Sequence: Synthetic oligonucleotide
ggaacgcauguucagguac

SEQ ID NO: 1748933 - RNA, 19 nt, Artificial Sequence
  Description of Artificial Sequence: Synthetic oligonucleotide
gauccccaacagcuagccg

SEQ ID NO: 1748934 - RNA, 19 nt, Artificial Sequence
  Description of Artificial Sequence: Synthetic oligonucleotide
agggaauuucaggauguug

SEQ ID NO: 1748935 - RNA, 19 nt, Artificial Sequence
  Description of Artificial Sequence: Synthetic oligonucleotide
guucccuaauacauauggc

SEQ ID NO: 1748936 - RNA, 19 nt, Artificial Sequence
  Description of Artificial Sequence: Synthetic oligonucleotide
uugauggagccuagauuuc

SEQ ID NO: 1748937 - RNA, 19 nt, Artificial Sequence
  Description of Artificial Sequence: Synthetic oligonucleotide
ugacuaggcucacuacauc

SEQ ID NO: 1748938 - RNA, 19 nt, Artificial Sequence
  Description of Artificial Sequence: Synthetic oligonucleotide
aaaaccgcacauacacuau

SEQ ID NO: 1748939 - RNA, 19 nt, Artificial Sequence
  Description of Artificial Sequence: Synthetic oligonucleotide
auggcuuaguacccagaga

SEQ ID NO: 1748940 - RNA, 19 nt, Artificial Sequence
  Description of Artificial Sequence: Synthetic oligonucleotide
agcuacugcugcaaguuug

SEQ ID NO: 1748941 - RNA, 19 nt, Artificial Sequence
  Description of Artificial Sequence: Synthetic oligonucleotide
uuagccugacucugauacu

SEQ ID NO: 1748942 - RNA, 19 nt, Artificial Sequence
  Description of Artificial Sequence: Synthetic oligonucleotide
uuaaacgaggcgccaucuu

SEQ ID NO: 1748943 - RNA, 19 nt, Artificial Sequence
  Description of Artificial Sequence: Synthetic oligonucleotide
uccugcaucgaagcggcca

SEQ ID NO: 1748944 - RNA, 19 nt, Artificial Sequence
  Description of Artificial Sequence: Synthetic oligonucleotide
gauggcuccaucagagaga

SEQ ID NO: 1748945 - RNA, 19 nt, Artificial Sequence
  Description of Artificial Sequence: Synthetic oligonucleotide
aagguacaucugguagggg

SEQ ID NO: 1748946 - RNA, 19 nt, Artificial Sequence
  Description of Artificial Sequence: Synthetic oligonucleotide
ccagagaaagucucugccc

SEQ ID NO: 1748947 - RNA, 19 nt, Artificial Sequence
  Description of Artificial Sequence: Synthetic oligonucleotide
caucgaagcggccagcgga

SEQ ID NO: 1748948 - RNA, 19 nt, Artificial Sequence
  Description of Artificial Sequence: Synthetic oligonucleotide
gauucucccuuaccaguga

SEQ ID NO: 1748949 - RNA, 19 nt, Artificial Sequence
  Description of Artificial Sequence: Synthetic oligonucleotide
agacucggacgccucgguc

SEQ ID NO: 1748950 - RNA, 19 nt, Artificial Sequence
  Description of Artificial Sequence: Synthetic oligonucleotide
uaucaauguagaguuucuu

SEQ ID NO: 1748951 - RNA, 19 nt, Artificial Sequence
  Description of Artificial Sequence: Synthetic oligonucleotide
cacgcgggcaaucauuguc

SEQ ID NO: 1748952 - RNA, 19 nt, Artificial Sequence
  Description of Artificial Sequence: Synthetic oligonucleotide
guucuaauacacagcccug

SEQ ID NO: 1748953 - RNA, 19 nt, Artificial Sequence
  Description of Artificial Sequence: Synthetic oligonucleotide
cuaggcucacuacaucuca

SEQ ID NO: 1748954 - RNA, 19 nt, Artificial Sequence
  Description of Artificial Sequence: Synthetic oligonucleotide
uuggcguaaguggaacgca

SEQ ID NO: 1748955 - RNA, 19 nt, Artificial Sequence
  Description of Artificial Sequence: Synthetic oligonucleotide
gacgccucggucacugucc

SEQ ID NO: 1748956 - RNA, 19 nt, Artificial Sequence
  Description of Artificial Sequence: Synthetic oligonucleotide
uggcguaaguggaacgcau

SEQ ID NO: 1748957 - RNA, 19 nt, Artificial Sequence
  Description of Artificial Sequence: Synthetic oligonucleotide
ugcuagcacagguuggcua

SEQ ID NO: 1748958 - RNA, 19 nt, Artificial Sequence
  Description of Artificial Sequence: Synthetic oligonucleotide
uuccaagguacaucuggua

SEQ ID NO: 1748959 - RNA, 19 nt, Artificial Sequence
  Description of Artificial Sequence: Synthetic oligonucleotide
uggcgguauuucuuagaca

SEQ ID NO: 1748960 - RNA, 19 nt, Artificial Sequence
  Description of Artificial Sequence: Synthetic oligonucleotide
acaccugccggguucuaga

SEQ ID NO: 1748961 - RNA, 19 nt, Artificial Sequence
  Description of Artificial Sequence: Synthetic oligonucleotide
cuuaguacccagagaaagu

SEQ ID NO: 1748962 - RNA, 19 nt, Artificial Sequence
  Description of Artificial Sequence: Synthetic oligonucleotide
uccgagugcaggucuucca

SEQ ID NO: 1748963 - RNA, 19 nt, Artificial Sequence
  Description of Artificial Sequence: Synthetic oligonucleotide
uacuucgcauccuggcggu

SEQ ID NO: 1748964 - RNA, 19 nt, Artificial Sequence
  Description of Artificial Sequence: Synthetic oligonucleotide
agcccugugagcucaguuu

SEQ ID NO: 1748965 - RNA, 19 nt, Artificial Sequence
  Description of Artificial Sequence: Synthetic oligonucleotide
guucuagauucucccuuac

SEQ ID NO: 1748966 - RNA, 19 nt, Artificial Sequence
  Description of Artificial Sequence: Synthetic oligonucleotide
uccgagcacgacuaucaau

SEQ ID NO: 1748967 - RNA, 19 nt, Artificial Sequence
  Description of Artificial Sequence: Synthetic oligonucleotide
acauauggcuuaguaccca

SEQ ID NO: 1748968 - RNA, 19 nt, Artificial Sequence
  Description of Artificial Sequence: Synthetic oligonucleotide
aggauguugcuagcacagg

SEQ ID NO: 1748969 - RNA, 19 nt, Artificial Sequence
  Description of Artificial Sequence: Synthetic oligonucleotide
cuguccucucuucucucgc

SEQ ID NO: 1748970 - RNA, 19 nt, Artificial Sequence
  Description of Artificial Sequence: Synthetic oligonucleotide
aacauacaccugccggguu

SEQ ID NO: 1748971 - RNA, 19 nt, Artificial Sequence
  Description of Artificial Sequence: Synthetic oligonucleotide
agauuucuccgagcacgac

SEQ ID NO: 1748972 - RNA, 19 nt, Artificial Sequence
  Description of Artificial Sequence: Synthetic oligonucleotide
agccugacucugauacugc

SEQ ID NO: 1748973 - RNA, 19 nt, Artificial Sequence
  Description of Artificial Sequence: Synthetic oligonucleotide
uuauggagacucggacgcc

SEQ ID NO: 1748974 - RNA, 19 nt, Artificial Sequence
  Description of Artificial Sequence: Synthetic oligonucleotide
caaauuccgagugcagguc

SEQ ID NO: 1748975 - RNA, 19 nt, Artificial Sequence
  Description of Artificial Sequence: Synthetic oligonucleotide
caucuugcaauucaguguu

SEQ ID NO: 1748976 - RNA, 19 nt, Artificial Sequence
  Description of Artificial Sequence: Synthetic oligonucleotide
cagguuauggagacucgga

SEQ ID NO: 1748977 - RNA, 19 nt, Artificial Sequence
  Description of Artificial Sequence: Synthetic oligonucleotide
aguuuccugaaaacauaca

SEQ ID NO: 1748978 - RNA, 19 nt, Artificial Sequence
  Description of Artificial Sequence: Synthetic oligonucleotide
auauacugggagggaaaga

SEQ ID NO: 1748979 - RNA, 19 nt, Artificial Sequence
  Description of Artificial Sequence: Synthetic oligonucleotide
cuguucauucaguuuucga

SEQ ID NO: 1748980 - RNA, 19 nt, Artificial Sequence
  Description of Artificial Sequence: Synthetic oligonucleotide
gccuagauuucuccgagca

SEQ ID NO: 1748981 - RNA, 19 nt, Artificial Sequence
  Description of Artificial Sequence: Synthetic oligonucleotide
gccuagacacaguaggcac

SEQ ID NO: 1748982 - RNA, 19 nt, Artificial Sequence
  Description of Artificial Sequence: Synthetic oligonucleotide
ucacuacaucucacagcca

SEQ ID NO: 1748983 - RNA, 19 nt, Artificial Sequence
  Description of Artificial Sequence: Synthetic oligonucleotide
ccuaauacauauggcuuag

SEQ ID NO: 1748984 - RNA, 19 nt, Artificial Sequence
  Description of Artificial Sequence: Synthetic oligonucleotide
uggaacgcauguucaggua

SEQ ID NO: 1748985 - RNA, 19 nt, Artificial Sequence
  Description of Artificial Sequence: Synthetic oligonucleotide
cuucgagucuuacuugaaa

SEQ ID NO: 1748986 - RNA, 19 nt, Artificial Sequence
  Description of Artificial Sequence: Synthetic oligonucleotide
uccucucuucucucgcggu

SEQ ID NO: 1748987 - RNA, 19 nt, Artificial Sequence
  Description of Artificial Sequence: Synthetic oligonucleotide
cuguucccuaauacauaug

SEQ ID NO: 1748988 - RNA, 19 nt, Artificial Sequence
  Description of Artificial Sequence: Synthetic oligonucleotide
ccccugcucaauaauguag

SEQ ID NO: 1748989 - RNA, 19 nt, Artificial Sequence
  Description of Artificial Sequence: Synthetic oligonucleotide
ggagccuagauuucuccga

SEQ ID NO: 1748990 - RNA, 19 nt, Artificial Sequence
  Description of Artificial Sequence: Synthetic oligonucleotide
guaggggacuguucauuca

SEQ ID NO: 1748991 - RNA, 19 nt, Artificial Sequence
  Description of Artificial Sequence: Synthetic oligonucleotide
cagugacuaggcucacuac

SEQ ID NO: 1748992 - RNA, 19 nt, Artificial Sequence
  Description of Artificial Sequence: Synthetic oligonucleotide
accgcacauacacuaucaa

SEQ ID NO: 1748993 - RNA, 19 nt, Artificial Sequence
  Description of Artificial Sequence: Synthetic oligonucleotide
cuaucaauguagaguuucu

SEQ ID NO: 1748994 - RNA, 19 nt, Artificial Sequence
  Description of Artificial Sequence: Synthetic oligonucleotide
gacuguucauucaguuuuc

SEQ ID NO: 1748995 - RNA, 19 nt, Artificial Sequence
  Description of Artificial Sequence: Synthetic oligonucleotide
ucugcacaucuugcaauuc

SEQ ID NO: 1748996 - RNA, 19 nt, Artificial Sequence
  Description of Artificial Sequence: Synthetic oligonucleotide
cagacuggacaaauuguua

SEQ ID NO: 1748997 - RNA, 19 nt, Artificial Sequence
  Description of Artificial Sequence: Synthetic oligonucleotide
cugcuuccaagguacaucu

SEQ ID NO: 1748998 - RNA, 19 nt, Artificial Sequence
  Description of Artificial Sequence: Synthetic oligonucleotide
ccuccugcaucgaagcggc

SEQ ID NO: 1748999 - RNA, 19 nt, Artificial Sequence
  Description of Artificial Sequence: Synthetic oligonucleotide
acuuggguucuaauacaca

SEQ ID NO: 1749000 - RNA, 19 nt, Artificial Sequence
  Description of Artificial Sequence: Synthetic oligonucleotide
auccuggcgguauuucuua

SEQ ID NO: 1749001 - RNA, 19 nt, Artificial Sequence
  Description of Artificial Sequence: Synthetic oligonucleotide
uccuuaaacgaggcgccau

SEQ ID NO: 1749002 - RNA, 19 nt, Artificial Sequence
  Description of Artificial Sequence: Synthetic oligonucleotide
ccacauggguuaagcaucc

SEQ ID NO: 1749003 - RNA, 19 nt, Artificial Sequence
  Description of Artificial Sequence: Synthetic oligonucleotide
caacagcuagccgcuggcg

SEQ ID NO: 1749004 - RNA, 19 nt, Artificial Sequence
  Description of Artificial Sequence: Synthetic oligonucleotide
acgcauguucagguacuuc

SEQ ID NO: 1749005 - RNA, 19 nt, Artificial Sequence
  Description of Artificial Sequence: Synthetic oligonucleotide
guggaacgcauguucaggu

SEQ ID NO: 1749006 - RNA, 19 nt, Artificial Sequence
  Description of Artificial Sequence: Synthetic oligonucleotide
cuucucucgcgguggccag

SEQ ID NO: 1749007 - RNA, 19 nt, Artificial Sequence
  Description of Artificial Sequence: Synthetic oligonucleotide
uucuccgagcacgacuauc

SEQ ID NO: 1749008 - RNA, 19 nt, Artificial Sequence
  Description of Artificial Sequence: Synthetic oligonucleotide
gagcacgacuaucaaugua

SEQ ID NO: 1749009 - RNA, 19 nt, Artificial Sequence
  Description of Artificial Sequence: Synthetic oligonucleotide
ccgcacauacacuaucaac

SEQ ID NO: 1749010 - RNA, 19 nt, Artificial Sequence
  Description of Artificial Sequence: Synthetic oligonucleotide
aacgcauguucagguacuu

SEQ ID NO: 1749011 - RNA, 19 nt, Artificial Sequence
  Description of Artificial Sequence: Synthetic oligonucleotide
ugguaggggacuguucauu

SEQ ID NO: 1749012 - RNA, 19 nt, Artificial Sequence
  Description of Artificial Sequence: Synthetic oligonucleotide
cuucacauacuucgagucu

SEQ ID NO: 1749013 - RNA, 19 nt, Artificial Sequence
  Description of Artificial Sequence: Synthetic oligonucleotide
ccagguuauggagacucgg

SEQ ID NO: 1749014 - RNA, 19 nt, Artificial Sequence
  Description of Artificial Sequence: Synthetic oligonucleotide
cacauacuucgagucuuac

SEQ ID NO: 1749015 - RNA, 19 nt, Artificial Sequence
  Description of Artificial Sequence: Synthetic oligonucleotide
acgcgggcaaucauuguca

SEQ ID NO: 1749016 - RNA, 19 nt, Artificial Sequence
  Description of Artificial Sequence: Synthetic oligonucleotide
gguggccaguuacaccucc

SEQ ID NO: 1749017 - RNA, 19 nt, Artificial Sequence
  Description of Artificial Sequence: Synthetic oligonucleotide
ucccgcucagauccccaac

SEQ ID NO: 1749018 - RNA, 19 nt, Artificial Sequence
  Description of Artificial Sequence: Synthetic oligonucleotide
ggauguugcuagcacaggu

SEQ ID NO: 1749019 - RNA, 19 nt, Artificial Sequence
  Description of Artificial Sequence: Synthetic oligonucleotide
auauggcuuaguacccaga

SEQ ID NO: 1749020 - RNA, 19 nt, Artificial Sequence
  Description of Artificial Sequence: Synthetic oligonucleotide
uugcuagcacagguuggcu

SEQ ID NO: 1749021 - RNA, 19 nt, Artificial Sequence
  Description of Artificial Sequence: Synthetic oligonucleotide
uucgcauccuggcgguauu

SEQ ID NO: 1749022 - RNA, 19 nt, Artificial Sequence
  Description of Artificial Sequence: Synthetic oligonucleotide
ccugacucugauacugcug

SEQ ID NO: 1749023 - RNA, 19 nt, Artificial Sequence
  Description of Artificial Sequence: Synthetic oligonucleotide
guuuucgaaagaguuguuu

SEQ ID NO: 1749024 - RNA, 19 nt, Artificial Sequence
  Description of Artificial Sequence: Synthetic oligonucleotide
gauguugcuagcacagguu

SEQ ID NO: 1749025 - RNA, 19 nt, Artificial Sequence
  Description of Artificial Sequence: Synthetic oligonucleotide
ggccaguuacaccucccgc

SEQ ID NO: 1749026 - RNA, 19 nt, Artificial Sequence
  Description of Artificial Sequence: Synthetic oligonucleotide
guguugauggagccuagau

SEQ ID NO: 1749027 - RNA, 19 nt, Artificial Sequence
  Description of Artificial Sequence: Synthetic oligonucleotide
uccugcuuccaagguacau

SEQ ID NO: 1749028 - RNA, 19 nt, Artificial Sequence
  Description of Artificial Sequence: Synthetic oligonucleotide
gacuuccacauggguuaag

SEQ ID NO: 1749029 - RNA, 19 nt, Artificial Sequence
  Description of Artificial Sequence: Synthetic oligonucleotide
uagcacagguuggcuaccu

SEQ ID NO: 1749030 - RNA, 19 nt, Artificial Sequence
  Description of Artificial Sequence: Synthetic oligonucleotide
auccuuaaacgaggcgcca

SEQ ID NO: 1749031 - RNA, 19 nt, Artificial Sequence
  Description of Artificial Sequence: Synthetic oligonucleotide
gcaucgaagcggccagcgg

SEQ ID NO: 1749032 - RNA, 19 nt, Artificial Sequence
  Description of Artificial Sequence: Synthetic oligonucleotide
cucgcgguggccaguuaca

SEQ ID NO: 1749033 - RNA, 19 nt, Artificial Sequence
  Description of Artificial Sequence: Synthetic oligonucleotide
ggcgccaucuuuccuuuuc

SEQ ID NO: 1749034 - RNA, 19 nt, Artificial Sequence
  Description of Artificial Sequence: Synthetic oligonucleotide
ccaaugcugagagugcuuc

SEQ ID NO: 1749035 - RNA, 19 nt, Artificial Sequence
  Description of Artificial Sequence: Synthetic oligonucleotide
ucgaagcggccagcggaag

SEQ ID NO: 1749036 - RNA, 19 nt, Artificial Sequence
  Description of Artificial Sequence: Synthetic oligonucleotide
ucgcgguggccaguuacac

SEQ ID NO: 1749037 - RNA, 19 nt, Artificial Sequence
  Description of Artificial Sequence: Synthetic oligonucleotide
acaucugguaggggacugu

SEQ ID NO: 1749038 - RNA, 19 nt, Artificial Sequence
  Description of Artificial Sequence: Synthetic oligonucleotide
ccuuaaacgaggcgccauc

SEQ ID NO: 1749039 - RNA, 19 nt, Artificial Sequence
  Description of Artificial Sequence: Synthetic oligonucleotide
ccaacuucuuagggaaggc

SEQ ID NO: 1749040 - RNA, 19 nt, Artificial Sequence
  Description of Artificial Sequence: Synthetic oligonucleotide
acgaggcgccaucuuuccu

SEQ ID NO: 1749041 - RNA, 19 nt, Artificial Sequence
  Description of Artificial Sequence: Synthetic oligonucleotide
cuuaaacgaggcgccaucu

SEQ ID NO: 1749042 - RNA, 19 nt, Artificial Sequence
  Description of Artificial Sequence: Synthetic oligonucleotide
uguuagccuuugaguccaa

SEQ ID NO: 1749043 - RNA, 19 nt, Artificial Sequence
  Description of Artificial Sequence: Synthetic oligonucleotide
ggguucuaauacacagccc

SEQ ID NO: 1749044 - RNA, 19 nt, Artificial Sequence
  Description of Artificial Sequence: Synthetic oligonucleotide
ggccuagacacaguaggca

SEQ ID NO: 1749045 - RNA, 19 nt, Artificial Sequence
  Description of Artificial Sequence: Synthetic oligonucleotide
aucgaagcggccagcggaa

SEQ ID NO: 1749046 - RNA, 19 nt, Artificial Sequence
  Description of Artificial Sequence: Synthetic oligonucleotide
gugacuaggcucacuacau

SEQ ID NO: 1749047 - RNA, 19 nt, Artificial Sequence
  Description of Artificial Sequence: Synthetic oligonucleotide
cauacacuaucaacaugau

SEQ ID NO: 1749048 - RNA, 19 nt, Artificial Sequence
  Description of Artificial Sequence: Synthetic oligonucleotide
gccaguuacaccucccgcu

SEQ ID NO: 1749049 - RNA, 19 nt, Artificial Sequence
  Description of Artificial Sequence: Synthetic oligonucleotide
cuugcaauucaguguugau

SEQ ID NO: 1749050 - RNA, 19 nt, Artificial Sequence
  Description of Artificial Sequence: Synthetic oligonucleotide
cccuaauacauauggcuua

SEQ ID NO: 1749051 - RNA, 19 nt, Artificial Sequence
  Description of Artificial Sequence: Synthetic oligonucleotide
cccuuaccagugacuaggc

SEQ ID NO: 1749052 - RNA, 19 nt, Artificial Sequence
  Description of Artificial Sequence: Synthetic oligonucleotide
agcacagguuggcuaccuu

SEQ ID NO: 1749053 - RNA, 19 nt, Artificial Sequence
  Description of Artificial Sequence: Synthetic oligonucleotide
gccacgcgggcaaucauug

SEQ ID NO: 1749054 - RNA, 19 nt, Artificial Sequence
  Description of Artificial Sequence: Synthetic oligonucleotide
aguuuucgaaagaguuguu

SEQ ID NO: 1749055 - RNA, 19 nt, Artificial Sequence
  Description of Artificial Sequence: Synthetic oligonucleotide
cccaaagagacuuccacau

SEQ ID NO: 1749056 - RNA, 19 nt, Artificial Sequence
  Description of Artificial Sequence: Synthetic oligonucleotide
ugccggguucuagauucuc

SEQ ID NO: 1749057 - RNA, 19 nt, Artificial Sequence
  Description of Artificial Sequence: Synthetic oligonucleotide
gcguaaguggaacgcaugu

SEQ ID NO: 1749058 - RNA, 19 nt, Artificial Sequence
  Description of Artificial Sequence: Synthetic oligonucleotide
ccagugacuaggcucacua

SEQ ID NO: 1749059 - RNA, 19 nt, Artificial Sequence
  Description of Artificial Sequence: Synthetic oligonucleotide
ucucucgcgguggccaguu

SEQ ID NO: 1749060 - RNA, 19 nt, Artificial Sequence
  Description of Artificial Sequence: Synthetic oligonucleotide
agacuuccacauggguuaa

SEQ ID NO: 1749061 - RNA, 19 nt, Artificial Sequence
  Description of Artificial Sequence: Synthetic oligonucleotide
cacagcccugugagcucag

SEQ ID NO: 1749062 - RNA, 19 nt, Artificial Sequence
  Description of Artificial Sequence: Synthetic oligonucleotide
uucucucgcgguggccagu

SEQ ID NO: 1749063 - RNA, 19 nt, Artificial Sequence
  Description of Artificial Sequence: Synthetic oligonucleotide
gguauuucuuagacagacu

SEQ ID NO: 1749064 - RNA, 19 nt, Artificial Sequence
  Description of Artificial Sequence: Synthetic oligonucleotide
ccgcuguaagacuucuuca

SEQ ID NO: 1749065 - RNA, 19 nt, Artificial Sequence
  Description of Artificial Sequence: Synthetic oligonucleotide
guuacaccucccgcucaga

SEQ ID NO: 1749066 - RNA, 19 nt, Artificial Sequence
  Description of Artificial Sequence: Synthetic oligonucleotide
ccgcucagauccccaacag

SEQ ID NO: 1749067 - RNA, 19 nt, Artificial Sequence
  Description of Artificial Sequence: Synthetic oligonucleotide
ggccagcggaagcccgucg

SEQ ID NO: 1749068 - RNA, 19 nt, Artificial Sequence
  Description of Artificial Sequence: Synthetic oligonucleotide
gcacgacuaucaauguaga

SEQ ID NO: 1749069 - RNA, 19 nt, Artificial Sequence
  Description of Artificial Sequence: Synthetic oligonucleotide
ccagcggaagcccgucggc

SEQ ID NO: 1749070 - RNA, 19 nt, Artificial Sequence
  Description of Artificial Sequence: Synthetic oligonucleotide
ggguucuagauucucccuu

SEQ ID NO: 1749071 - RNA, 19 nt, Artificial Sequence
  Description of Artificial Sequence: Synthetic oligonucleotide
ucgcauccuggcgguauuu

SEQ ID NO: 1749072 - RNA, 19 nt, Artificial Sequence
  Description of Artificial Sequence: Synthetic oligonucleotide
cuccgagcacgacuaucaa

SEQ ID NO: 1749073 - RNA, 19 nt, Artificial Sequence
  Description of Artificial Sequence: Synthetic oligonucleotide
gccugacuguucguccucc

SEQ ID NO: 1749074 - RNA, 19 nt, Artificial Sequence
  Description of Artificial Sequence: Synthetic oligonucleotide
agcuagccgcuggcgucuc

SEQ ID NO: 1749075 - RNA, 19 nt, Artificial Sequence
  Description of Artificial Sequence: Synthetic oligonucleotide
ccuggcgguauuucuuaga

SEQ ID NO: 1749076 - RNA, 19 nt, Artificial Sequence
  Description of Artificial Sequence: Synthetic oligonucleotide
cauacaccugccggguucu

SEQ ID NO: 1749077 - RNA, 19 nt, Artificial Sequence
  Description of Artificial Sequence: Synthetic oligonucleotide
cccgcucagauccccaaca

SEQ ID NO: 1749078 - RNA, 19 nt, Artificial Sequence
  Description of Artificial Sequence: Synthetic oligonucleotide
ggccaccaugauccucugc

SEQ ID NO: 1749079 - RNA, 19 nt, Artificial Sequence
  Description of Artificial Sequence: Synthetic oligonucleotide
cgaagcggccagcggaagc

SEQ ID NO: 1749080 - RNA, 19 nt, Artificial Sequence
  Description of Artificial Sequence: Synthetic oligonucleotide
gacuaucaauguagaguuu

SEQ ID NO: 1749081 - RNA, 19 nt, Artificial Sequence
  Description of Artificial Sequence: Synthetic oligonucleotide
ggcuuaguacccagagaaa

SEQ ID NO: 1749082 - RNA, 19 nt, Artificial Sequence
  Description of Artificial Sequence: Synthetic oligonucleotide
gccucggucacuguccucu

SEQ ID NO: 1749083 - RNA, 19 nt, Artificial Sequence
  Description of Artificial Sequence: Synthetic oligonucleotide
cugcaaguuuggcguaagu

SEQ ID NO: 1749084 - RNA, 19 nt, Artificial Sequence
  Description of Artificial Sequence: Synthetic oligonucleotide
cgcgggcaaucauugucag

SEQ ID NO: 1749085 - RNA, 19 nt, Artificial Sequence
  Description of Artificial Sequence: Synthetic oligonucleotide
ccaaaaccgcacauacacu

SEQ ID NO: 1749086 - RNA, 19 nt, Artificial Sequence
  Description of Artificial Sequence: Synthetic oligonucleotide
ccgccuucuuugaagggaa

SEQ ID NO: 1749087 - RNA, 19 nt, Artificial Sequence
  Description of Artificial Sequence: Synthetic oligonucleotide
cugguaggggacuguucau

SEQ ID NO: 1749088 - RNA, 19 nt, Artificial Sequence
  Description of Artificial Sequence: Synthetic oligonucleotide
gcgguauuucuuagacaga

SEQ ID NO: 1749089 - RNA, 19 nt, Artificial Sequence
  Description of Artificial Sequence: Synthetic oligonucleotide
cuucgcauccuggcgguau

SEQ ID NO: 1749090 - RNA, 19 nt, Artificial Sequence
  Description of Artificial Sequence: Synthetic oligonucleotide
guuagccuuugaguccaau

SEQ ID NO: 1749091 - RNA, 19 nt, Artificial Sequence
  Description of Artificial Sequence: Synthetic oligonucleotide
acuucgcauccuggcggua

SEQ ID NO: 1749092 - RNA, 19 nt, Artificial Sequence
  Description of Artificial Sequence: Synthetic oligonucleotide
caucugguaggggacuguu

SEQ ID NO: 1749093 - RNA, 19 nt, Artificial Sequence
  Description of Artificial Sequence: Synthetic oligonucleotide
caccugccggguucuagau

SEQ ID NO: 1749094 - RNA, 19 nt, Artificial Sequence
  Description of Artificial Sequence: Synthetic oligonucleotide
auacaccugccggguucua

SEQ ID NO: 1749095 - RNA, 19 nt, Artificial Sequence
  Description of Artificial Sequence: Synthetic oligonucleotide
cagcuagccgcuggcgucu

SEQ ID NO: 1749096 - RNA, 19 nt, Artificial Sequence
  Description of Artificial Sequence: Synthetic oligonucleotide
cugccggguucuagauucu

SEQ ID NO: 1749097 - RNA, 19 nt, Artificial Sequence
  Description of Artificial Sequence: Synthetic oligonucleotide
ccuuaccagugacuaggcu

SEQ ID NO: 1749098 - RNA, 19 nt, Artificial Sequence
  Description of Artificial Sequence: Synthetic oligonucleotide
cgagcacgacuaucaaugu

SEQ ID NO: 1749099 - RNA, 19 nt, Artificial Sequence
  Description of Artificial Sequence: Synthetic oligonucleotide
cucucgcgguggccaguua

SEQ ID NO: 1749100 - RNA, 19 nt, Artificial Sequence
  Description of Artificial Sequence: Synthetic oligonucleotide
cggaagcccgucggccacg

SEQ ID NO: 1749101 - RNA, 19 nt, Artificial Sequence
  Description of Artificial Sequence: Synthetic oligonucleotide
ggccacgcgggcaaucauu

SEQ ID NO: 1749102 - RNA, 19 nt, Artificial Sequence
  Description of Artificial Sequence: Synthetic oligonucleotide
gcccgucggccacgcgggc

SEQ ID NO: 1749103 - RNA, 19 nt, Artificial Sequence
  Description of Artificial Sequence: Synthetic oligonucleotide
ccacgcgggcaaucauugu

SEQ ID NO: 1749104 - RNA, 19 nt, Artificial Sequence
  Description of Artificial Sequence: Synthetic oligonucleotide
cucggacgccucggucacu

SEQ ID NO: 1749105 - RNA, 19 nt, Artificial Sequence
  Description of Artificial Sequence: Synthetic oligonucleotide
cggccagcggaagcccguc

SEQ ID NO: 1749106 - RNA, 19 nt, Artificial Sequence
  Description of Artificial Sequence: Synthetic oligonucleotide
cggacgccucggucacugu

SEQ ID NO: 1749107 - RNA, 19 nt, Artificial Sequence
  Description of Artificial Sequence: Synthetic oligonucleotide
cggccacgcgggcaaucau

SEQ ID NO: 1749108 - RNA, 19 nt, Artificial Sequence
  Description of Artificial Sequence: Synthetic oligonucleotide
cgucggccacgcgggcaau

SEQ ID NO: 1749109 - RNA, 19 nt, Artificial Sequence
  Description of Artificial Sequence: Synthetic oligonucleotide
uauaaugugauucuguccc

SEQ ID NO: 1749110 - RNA, 19 nt, Artificial Sequence
  Description of Artificial Sequence: Synthetic oligonucleotide
agacaugcaagucaaaugc

SEQ ID NO: 1749111 - RNA, 19 nt, Artificial Sequence
  Description of Artificial Sequence: Synthetic oligonucleotide
uuauuuaugauuucuuggg

SEQ ID NO: 1749112 - RNA, 19 nt, Artificial Sequence
  Description of Artificial Sequence: Synthetic oligonucleotide
aaagauauacaaaagcaac

SEQ ID NO: 1749113 - RNA, 19 nt, Artificial Sequence
  Description of Artificial Sequence: Synthetic oligonucleotide
uguaaaguguguauuauag

SEQ ID NO: 1749114 - RNA, 19 nt, Artificial Sequence
  Description of Artificial Sequence: Synthetic oligonucleotide
uucaauucaaucuguaggg

SEQ ID NO: 1749115 - RNA, 19 nt, Artificial Sequence
  Description of Artificial Sequence: Synthetic oligonucleotide
uuauacucuguucaguucg

SEQ ID NO: 1749116 - RNA, 19 nt, Artificial Sequence
  Description of Artificial Sequence: Synthetic oligonucleotide
uuuauuaacugucauauua

SEQ ID NO: 1749117 - RNA, 19 nt, Artificial Sequence
  Description of Artificial Sequence: Synthetic oligonucleotide
uuuaucucaauucaauuca

SEQ ID NO: 1749118 - RNA, 19 nt, Artificial Sequence
  Description of Artificial Sequence: Synthetic oligonucleotide
ucauauuauacucuguuca

SEQ ID NO: 1749119 - RNA, 19 nt, Artificial Sequence
  Description of Artificial Sequence: Synthetic oligonucleotide
uuaacucuagauuauaaca

SEQ ID NO: 1749120 - RNA, 19 nt, Artificial Sequence
  Description of Artificial Sequence: Synthetic oligonucleotide
uuuacaggcaguuauaggu

SEQ ID NO: 1749121 - RNA, 19 nt, Artificial Sequence
  Description of Artificial Sequence: Synthetic oligonucleotide
aagauauacaaaagcaacc

SEQ ID NO: 1749122 - RNA, 19 nt, Artificial Sequence
  Description of Artificial Sequence: Synthetic oligonucleotide
gacaaaguagguuauaaug

SEQ ID NO: 1749123 - RNA, 19 nt, Artificial Sequence
  Description of Artificial Sequence: Synthetic oligonucleotide
aaugcaccaaauauguucc

SEQ ID NO: 1749124 - RNA, 19 nt, Artificial Sequence
  Description of Artificial Sequence: Synthetic oligonucleotide
aaaguagaccaacagagcu

SEQ ID NO: 1749125 - RNA, 19 nt, Artificial Sequence
  Description of Artificial Sequence: Synthetic oligonucleotide
aaaacagcaaucuccuuag

SEQ ID NO: 1749126 - RNA, 19 nt, Artificial Sequence
  Description of Artificial Sequence: Synthetic oligonucleotide
ugaccuuacaaaauugagg

SEQ ID NO: 1749127 - RNA, 19 nt, Artificial Sequence
  Description of Artificial Sequence: Synthetic oligonucleotide
uuaacugucauauuauacu

SEQ ID NO: 1749128 - RNA, 19 nt, Artificial Sequence
  Description of Artificial Sequence: Synthetic oligonucleotide
aaucacuuaaauuaaugau

SEQ ID NO: 1749129 - RNA, 19 nt, Artificial Sequence
  Description of Artificial Sequence: Synthetic oligonucleotide
uuagauuaaaugugcaugc

SEQ ID NO: 1749130 - RNA, 19 nt, Artificial Sequence
  Description of Artificial Sequence: Synthetic oligonucleotide
aacucugugcuuuucauug

SEQ ID NO: 1749131 - RNA, 19 nt, Artificial Sequence
  Description of Artificial Sequence: Synthetic oligonucleotide
acuuaaauuaaugauauga

SEQ ID NO: 1749132 - RNA, 19 nt, Artificial Sequence
  Description of Artificial Sequence: Synthetic oligonucleotide
uauuauaguuuauuaacug

SEQ ID NO: 1749133 - RNA, 19 nt, Artificial Sequence
  Description of Artificial Sequence: Synthetic oligonucleotide
uauugcucaaagaaaguag

SEQ ID NO: 1749134 - RNA, 19 nt, Artificial Sequence
  Description of Artificial Sequence: Synthetic oligonucleotide
uauuggugcaaccuaauug

SEQ ID NO: 1749135 - RNA, 19 nt, Artificial Sequence
  Description of Artificial Sequence: Synthetic oligonucleotide
ucucaauucaauucaaucu

SEQ ID NO: 1749136 - RNA, 19 nt, Artificial Sequence
  Description of Artificial Sequence: Synthetic oligonucleotide
uauuauuuaugauuucuug

SEQ ID NO: 1749137 - RNA, 19 nt, Artificial Sequence
  Description of Artificial Sequence: Synthetic oligonucleotide
agagcugaagcuuugugac

SEQ ID NO: 1749138 - RNA, 19 nt, Artificial Sequence
  Description of Artificial Sequence: Synthetic oligonucleotide
uuaaauauuuugagcauac

SEQ ID NO: 1749139 - RNA, 19 nt, Artificial Sequence
  Description of Artificial Sequence: Synthetic oligonucleotide
agaaaguagaccaacagag

SEQ ID NO: 1749140 - RNA, 19 nt, Artificial Sequence
  Description of Artificial Sequence: Synthetic oligonucleotide
uguacuacuguucuaaaau

SEQ ID NO: 1749141 - RNA, 19 nt, Artificial Sequence
  Description of Artificial Sequence: Synthetic oligonucleotide
agaaauuuaaaugcaggcg

SEQ ID NO: 1749142 - RNA, 19 nt, Artificial Sequence
  Description of Artificial Sequence: Synthetic oligonucleotide
uuagaaauguccacuauuc

SEQ ID NO: 1749143 - RNA, 19 nt, Artificial Sequence
  Description of Artificial Sequence: Synthetic oligonucleotide
uuuuaucucaauucaauuc

SEQ ID NO: 1749144 - RNA, 19 nt, Artificial Sequence
  Description of Artificial Sequence: Synthetic oligonucleotide
aucucaauucaauucaauc

SEQ ID NO: 1749145 - RNA, 19 nt, Artificial Sequence
  Description of Artificial Sequence: Synthetic oligonucleotide
aagaaaguagaccaacaga

SEQ ID NO: 1749146 - RNA, 19 nt, Artificial Sequence
  Description of Artificial Sequence: Synthetic oligonucleotide
uuugugacaaaguagguua

SEQ ID NO: 1749147 - RNA, 19 nt, Artificial Sequence
  Description of Artificial Sequence: Synthetic oligonucleotide
ucacuuaaauuaaugauau

SEQ ID NO: 1749148 - RNA, 19 nt, Artificial Sequence
  Description of Artificial Sequence: Synthetic oligonucleotide
acuauucuagaaguuaccc

SEQ ID NO: 1749149 - RNA, 19 nt, Artificial Sequence
  Description of Artificial Sequence: Synthetic oligonucleotide
aauuauugaaauauuucca

SEQ ID NO: 1749150 - RNA, 19 nt, Artificial Sequence
  Description of Artificial Sequence: Synthetic oligonucleotide
gaaauguccacuauucuag

SEQ ID NO: 1749151 - RNA, 19 nt, Artificial Sequence
  Description of Artificial Sequence: Synthetic oligonucleotide
aagaaucugugcugggagc

SEQ ID NO: 1749152 - RNA, 19 nt, Artificial Sequence
  Description of Artificial Sequence: Synthetic oligonucleotide
ucaacuuuauaauugcagu

SEQ ID NO: 1749153 - RNA, 19 nt, Artificial Sequence
  Description of Artificial Sequence: Synthetic oligonucleotide
auuguauucaaauuacuau

SEQ ID NO: 1749154 - RNA, 19 nt, Artificial Sequence
  Description of Artificial Sequence: Synthetic oligonucleotide
aucuccuuagauuaaaugu

SEQ ID NO: 1749155 - RNA, 19 nt, Artificial Sequence
  Description of Artificial Sequence: Synthetic oligonucleotide
auuauaguuuauuaacugu

SEQ ID NO: 1749156 - RNA, 19 nt, Artificial Sequence
  Description of Artificial Sequence: Synthetic oligonucleotide
uaaaguguguauuauaguu

SEQ ID NO: 1749157 - RNA, 19 nt, Artificial Sequence
  Description of Artificial Sequence: Synthetic oligonucleotide
aagacaugcaagucaaaug

SEQ ID NO: 1749158 - RNA, 19 nt, Artificial Sequence
  Description of Artificial Sequence: Synthetic oligonucleotide
uguauucaaauuacuauuc

SEQ ID NO: 1749159 - RNA, 19 nt, Artificial Sequence
  Description of Artificial Sequence: Synthetic oligonucleotide
uuauguaaaacagcaaucu

SEQ ID NO: 1749160 - RNA, 19 nt, Artificial Sequence
  Description of Artificial Sequence: Synthetic oligonucleotide
uuaauuucuguacuacugu

SEQ ID NO: 1749161 - RNA, 19 nt, Artificial Sequence
  Description of Artificial Sequence: Synthetic oligonucleotide
uguugaagagcauaacuca

SEQ ID NO: 1749162 - RNA, 19 nt, Artificial Sequence
  Description of Artificial Sequence: Synthetic oligonucleotide
gacuauugcucaaagaaag

SEQ ID NO: 1749163 - RNA, 19 nt, Artificial Sequence
  Description of Artificial Sequence: Synthetic oligonucleotide
uuauaacaaaguauaacau

SEQ ID NO: 1749164 - RNA, 19 nt, Artificial Sequence
  Description of Artificial Sequence: Synthetic oligonucleotide
aauuacuauucucauguaa

SEQ ID NO: 1749165 - RNA, 19 nt, Artificial Sequence
  Description of Artificial Sequence: Synthetic oligonucleotide
aauucaaucuguagggguc

SEQ ID NO: 1749166 - RNA, 19 nt, Artificial Sequence
  Description of Artificial Sequence: Synthetic oligonucleotide
aguuacuggaucuuauauc

SEQ ID NO: 1749167 - RNA, 19 nt, Artificial Sequence
  Description of Artificial Sequence: Synthetic oligonucleotide
guuacuggaucuuauauca

SEQ ID NO: 1749168 - RNA, 19 nt, Artificial Sequence
  Description of Artificial Sequence: Synthetic oligonucleotide
uaacucuagauuauaacaa

SEQ ID NO: 1749169 - RNA, 19 nt, Artificial Sequence
  Description of Artificial Sequence: Synthetic oligonucleotide
ucuauuauuuaugauuucu

SEQ ID NO: 1749170 - RNA, 19 nt, Artificial Sequence
  Description of Artificial Sequence: Synthetic oligonucleotide
auuacuauucucauguaag

SEQ ID NO: 1749171 - RNA, 19 nt, Artificial Sequence
  Description of Artificial Sequence: Synthetic oligonucleotide
uuguugaagagcauaacuc

SEQ ID NO: 1749172 - RNA, 19 nt, Artificial Sequence
  Description of Artificial Sequence: Synthetic oligonucleotide
cuuagauuaaaugugcaug

SEQ ID NO: 1749173 - RNA, 19 nt, Artificial Sequence
  Description of Artificial Sequence: Synthetic oligonucleotide
uacaaaagcaaccuaggau

SEQ ID NO: 1749174 - RNA, 19 nt, Artificial Sequence
  Description of Artificial Sequence: Synthetic oligonucleotide
ugaagagcauaacucaaug

SEQ ID NO: 1749175 - RNA, 19 nt, Artificial Sequence
  Description of Artificial Sequence: Synthetic oligonucleotide
cugacuuaagagcugaagc

SEQ ID NO: 1749176 - RNA, 19 nt, Artificial Sequence
  Description of Artificial Sequence: Synthetic oligonucleotide
auuuagcaggccuuaacuc

SEQ ID NO: 1749177 - RNA, 19 nt, Artificial Sequence
  Description of Artificial Sequence: Synthetic oligonucleotide
ucuaaaaucuucucuugcu

SEQ ID NO: 1749178 - RNA, 19 nt, Artificial Sequence
  Description of Artificial Sequence: Synthetic oligonucleotide
uuauaaugugauucugucc

SEQ ID NO: 1749179 - RNA, 19 nt, Artificial Sequence
  Description of Artificial Sequence: Synthetic oligonucleotide
uggagaaauuuaaaugcag

SEQ ID NO: 1749180 - RNA, 19 nt, Artificial Sequence
  Description of Artificial Sequence: Synthetic oligonucleotide
agcaaauagguuugcugcc

SEQ ID NO: 1749181 - RNA, 19 nt, Artificial Sequence
  Description of Artificial Sequence: Synthetic oligonucleotide
uguaagagaaacuuccuua

SEQ ID NO: 1749182 - RNA, 19 nt, Artificial Sequence
  Description of Artificial Sequence: Synthetic oligonucleotide
aagagcugaagcuuuguga

SEQ ID NO: 1749183 - RNA, 19 nt, Artificial Sequence
  Description of Artificial Sequence: Synthetic oligonucleotide
agcuuugugacaaaguagg

SEQ ID NO: 1749184 - RNA, 19 nt, Artificial Sequence
  Description of Artificial Sequence: Synthetic oligonucleotide
auuuugagcauacaaguaa

SEQ ID NO: 1749185 - RNA, 19 nt, Artificial Sequence
  Description of Artificial Sequence: Synthetic oligonucleotide
auuauguaaaacagcaauc

SEQ ID NO: 1749186 - RNA, 19 nt, Artificial Sequence
  Description of Artificial Sequence: Synthetic oligonucleotide
uuugcugccaauguguagc

SEQ ID NO: 1749187 - RNA, 19 nt, Artificial Sequence
  Description of Artificial Sequence: Synthetic oligonucleotide
gaaauuuaaaugcaggcgu

SEQ ID NO: 1749188 - RNA, 19 nt, Artificial Sequence
  Description of Artificial Sequence: Synthetic oligonucleotide
uuuagcaggccuuaacucu

SEQ ID NO: 1749189 - RNA, 19 nt, Artificial Sequence
  Description of Artificial Sequence: Synthetic oligonucleotide
ugacuuaagagcugaagcu

SEQ ID NO: 1749190 - RNA, 19 nt, Artificial Sequence
  Description of Artificial Sequence: Synthetic oligonucleotide
ugcaaccuaauugugauug

SEQ ID NO: 1749191 - RNA, 19 nt, Artificial Sequence
  Description of Artificial Sequence: Synthetic oligonucleotide
gagcauaacucaaugaccc

SEQ ID NO: 1749192 - RNA, 19 nt, Artificial Sequence
  Description of Artificial Sequence: Synthetic oligonucleotide
aguacagguguguacuugg

SEQ ID NO: 1749193 - RNA, 19 nt, Artificial Sequence
  Description of Artificial Sequence: Synthetic oligonucleotide
uguguauuauaguuuauua

SEQ ID NO: 1749194 - RNA, 19 nt, Artificial Sequence
  Description of Artificial Sequence: Synthetic oligonucleotide
ugugaccuuacaaaauuga

SEQ ID NO: 1749195 - RNA, 19 nt, Artificial Sequence
  Description of Artificial Sequence: Synthetic oligonucleotide
uacuacuguucuaaaaucu

SEQ ID NO: 1749196 - RNA, 19 nt, Artificial Sequence
  Description of Artificial Sequence: Synthetic oligonucleotide
uuggagaaauuuaaaugca

SEQ ID NO: 1749197 - RNA, 19 nt, Artificial Sequence
  Description of Artificial Sequence: Synthetic oligonucleotide
agagcauaacucaaugacc

SEQ ID NO: 1749198 - RNA, 19 nt, Artificial Sequence
  Description of Artificial Sequence: Synthetic oligonucleotide
aauuuaaaugcaggcguag

SEQ ID NO: 1749199 - RNA, 19 nt, Artificial Sequence
  Description of Artificial Sequence: Synthetic oligonucleotide
uuguauucaaauuacuauu

SEQ ID NO: 1749200 - RNA, 19 nt, Artificial Sequence
  Description of Artificial Sequence: Synthetic oligonucleotide
uaacucaaugacccgaaca

SEQ ID NO: 1749201 - RNA, 19 nt, Artificial Sequence
  Description of Artificial Sequence: Synthetic oligonucleotide
uuuugagcauacaaguaaa

SEQ ID NO: 1749202 - RNA, 19 nt, Artificial Sequence
  Description of Artificial Sequence: Synthetic oligonucleotide
caaaguagguuauaaugug

SEQ ID NO: 1749203 - RNA, 19 nt, Artificial Sequence
  Description of Artificial Sequence: Synthetic oligonucleotide
auuuacaggcaguuauagg

SEQ ID NO: 1749204 - RNA, 19 nt, Artificial Sequence
  Description of Artificial Sequence: Synthetic oligonucleotide
ugucauauuauacucuguu

SEQ ID NO: 1749205 - RNA, 19 nt, Artificial Sequence
  Description of Artificial Sequence: Synthetic oligonucleotide
augacuguagccauuuuac

SEQ ID NO: 1749206 - RNA, 19 nt, Artificial Sequence
  Description of Artificial Sequence: Synthetic oligonucleotide
uaucaaucacuuaaauuaa

SEQ ID NO: 1749207 - RNA, 19 nt, Artificial Sequence
  Description of Artificial Sequence: Synthetic oligonucleotide
auuuaaaugcaggcguagc

SEQ ID NO: 1749208 - RNA, 19 nt, Artificial Sequence
  Description of Artificial Sequence: Synthetic oligonucleotide
uucuuugauaacagcaacu

SEQ ID NO: 1749209 - RNA, 19 nt, Artificial Sequence
  Description of Artificial Sequence: Synthetic oligonucleotide
uuauagguccagacuauug

SEQ ID NO: 1749210 - RNA, 19 nt, Artificial Sequence
  Description of Artificial Sequence: Synthetic oligonucleotide
guagguuauaaugugauuc

SEQ ID NO: 1749211 - RNA, 19 nt, Artificial Sequence
  Description of Artificial Sequence: Synthetic oligonucleotide
auguccacuauucuagaag

SEQ ID NO: 1749212 - RNA, 19 nt, Artificial Sequence
  Description of Artificial Sequence: Synthetic oligonucleotide
uucgcgaugguuuaauuuc

SEQ ID NO: 1749213 - RNA, 19 nt, Artificial Sequence
  Description of Artificial Sequence: Synthetic oligonucleotide
uguccacuauucuagaagu

SEQ ID NO: 1749214 - RNA, 19 nt, Artificial Sequence
  Description of Artificial Sequence: Synthetic oligonucleotide
guuacuaagaaacaggcau

SEQ ID NO: 1749215 - RNA, 19 nt, Artificial Sequence
  Description of Artificial Sequence: Synthetic oligonucleotide
ugcaguuauucuuuuagaa

SEQ ID NO: 1749216 - RNA, 19 nt, Artificial Sequence
  Description of Artificial Sequence: Synthetic oligonucleotide
caaauuacuauucucaugu

SEQ ID NO: 1749217 - RNA, 19 nt, Artificial Sequence
  Description of Artificial Sequence: Synthetic oligonucleotide
uuauaucaaucacuuaaau

SEQ ID NO: 1749218 - RNA, 19 nt, Artificial Sequence
  Description of Artificial Sequence: Synthetic oligonucleotide
ucauuguugaagagcauaa

SEQ ID NO: 1749219 - RNA, 19 nt, Artificial Sequence
  Description of Artificial Sequence: Synthetic oligonucleotide
uauuauacucuguucaguu

SEQ ID NO: 1749220 - RNA, 19 nt, Artificial Sequence
  Description of Artificial Sequence: Synthetic oligonucleotide
aaagugacaucuauuauuu

SEQ ID NO: 1749221 - RNA, 19 nt, Artificial Sequence
  Description of Artificial Sequence: Synthetic oligonucleotide
uagguuauaaugugauucu

SEQ ID NO: 1749222 - RNA, 19 nt, Artificial Sequence
  Description of Artificial Sequence: Synthetic oligonucleotide
acaaaguagguuauaaugu

SEQ ID NO: 1749223 - RNA, 19 nt, Artificial Sequence
  Description of Artificial Sequence: Synthetic oligonucleotide
ucucaagaaucugugcugg

SEQ ID NO: 1749224 - RNA, 19 nt, Artificial Sequence
  Description of Artificial Sequence: Synthetic oligonucleotide
uucuagaaguuacccauga

SEQ ID NO: 1749225 - RNA, 19 nt, Artificial Sequence
  Description of Artificial Sequence: Synthetic oligonucleotide
caugcaagucaaaugcacc

SEQ ID NO: 1749226 - RNA, 19 nt, Artificial Sequence
  Description of Artificial Sequence: Synthetic oligonucleotide
cuccuuagauuaaaugugc

SEQ ID NO: 1749227 - RNA, 19 nt, Artificial Sequence
  Description of Artificial Sequence: Synthetic oligonucleotide
aggauuaguuacuggaucu

SEQ ID NO: 1749228 - RNA, 19 nt, Artificial Sequence
  Description of Artificial Sequence: Synthetic oligonucleotide
aacuuuauaauugcaguua

SEQ ID NO: 1749229 - RNA, 19 nt, Artificial Sequence
  Description of Artificial Sequence: Synthetic oligonucleotide
ucaauucaaucuguagggg

SEQ ID NO: 1749230 - RNA, 19 nt, Artificial Sequence
  Description of Artificial Sequence: Synthetic oligonucleotide
acagggagaacucugugcu

SEQ ID NO: 1749231 - RNA, 19 nt, Artificial Sequence
  Description of Artificial Sequence: Synthetic oligonucleotide
ucuaggauguuuaucuuuu

SEQ ID NO: 1749232 - RNA, 19 nt, Artificial Sequence
  Description of Artificial Sequence: Synthetic oligonucleotide
caaucacuuaaauuaauga

SEQ ID NO: 1749233 - RNA, 19 nt, Artificial Sequence
  Description of Artificial Sequence: Synthetic oligonucleotide
uucucaagaaucugugcug

SEQ ID NO: 1749234 - RNA, 19 nt, Artificial Sequence
  Description of Artificial Sequence: Synthetic oligonucleotide
caugucauuguugaagagc

SEQ ID NO: 1749235 - RNA, 19 nt, Artificial Sequence
  Description of Artificial Sequence: Synthetic oligonucleotide
uucaaauuacuauucucau

SEQ ID NO: 1749236 - RNA, 19 nt, Artificial Sequence
  Description of Artificial Sequence: Synthetic oligonucleotide
ugauuguauucaaauuacu

SEQ ID NO: 1749237 - RNA, 19 nt, Artificial Sequence
  Description of Artificial Sequence: Synthetic oligonucleotide
aaacuuccuuauugcuggc

SEQ ID NO: 1749238 - RNA, 19 nt, Artificial Sequence
  Description of Artificial Sequence: Synthetic oligonucleotide
uaggauuaguuacuggauc

SEQ ID NO: 1749239 - RNA, 19 nt, Artificial Sequence
  Description of Artificial Sequence: Synthetic oligonucleotide
aguuacccaugacuguagc

SEQ ID NO: 1749240 - RNA, 19 nt, Artificial Sequence
  Description of Artificial Sequence: Synthetic oligonucleotide
cagacuauugcucaaagaa

SEQ ID NO: 1749241 - RNA, 19 nt, Artificial Sequence
  Description of Artificial Sequence: Synthetic oligonucleotide
uaguuacuggaucuuauau

SEQ ID NO: 1749242 - RNA, 19 nt, Artificial Sequence
  Description of Artificial Sequence: Synthetic oligonucleotide
cuaauugugauuguauuca

SEQ ID NO: 1749243 - RNA, 19 nt, Artificial Sequence
  Description of Artificial Sequence: Synthetic oligonucleotide
augguuuaauuucuguacu

SEQ ID NO: 1749244 - RNA, 19 nt, Artificial Sequence
  Description of Artificial Sequence: Synthetic oligonucleotide
gagucuaggauguuuaucu

SEQ ID NO: 1749245 - RNA, 19 nt, Artificial Sequence
  Description of Artificial Sequence: Synthetic oligonucleotide
ugugcaugcugcauuuagc

SEQ ID NO: 1749246 - RNA, 19 nt, Artificial Sequence
  Description of Artificial Sequence: Synthetic oligonucleotide
uacuuacagaggaggagag

SEQ ID NO: 1749247 - RNA, 19 nt, Artificial Sequence
  Description of Artificial Sequence: Synthetic oligonucleotide
guaggggucagcaagagca

SEQ ID NO: 1749248 - RNA, 19 nt, Artificial Sequence
  Description of Artificial Sequence: Synthetic oligonucleotide
aaaaucuucucuugcuguu

SEQ ID NO: 1749249 - RNA, 19 nt, Artificial Sequence
  Description of Artificial Sequence: Synthetic oligonucleotide
uguagccauuuuacuauag

SEQ ID NO: 1749250 - RNA, 19 nt, Artificial Sequence
  Description of Artificial Sequence: Synthetic oligonucleotide
aaaguagguuauaauguga

SEQ ID NO: 1749251 - RNA, 19 nt, Artificial Sequence
  Description of Artificial Sequence: Synthetic oligonucleotide
uuucauguaaaguguguau

SEQ ID NO: 1749252 - RNA, 19 nt, Artificial Sequence
  Description of Artificial Sequence: Synthetic oligonucleotide
ugaagcuuugugacaaagu

SEQ ID NO: 1749253 - RNA, 19 nt, Artificial Sequence
  Description of Artificial Sequence: Synthetic oligonucleotide
auauuuucauguaaagugu

SEQ ID NO: 1749254 - RNA, 19 nt, Artificial Sequence
  Description of Artificial Sequence: Synthetic oligonucleotide
uugaaaccuggccaggcca

SEQ ID NO: 1749255 - RNA, 19 nt, Artificial Sequence
  Description of Artificial Sequence: Synthetic oligonucleotide
uacaguacagguguguacu

SEQ ID NO: 1749256 - RNA, 19 nt, Artificial Sequence
  Description of Artificial Sequence: Synthetic oligonucleotide
acuuuauaauugcaguuau

SEQ ID NO: 1749257 - RNA, 19 nt, Artificial Sequence
  Description of Artificial Sequence: Synthetic oligonucleotide
ucuguucaguucgcgaugg

SEQ ID NO: 1749258 - RNA, 19 nt, Artificial Sequence
  Description of Artificial Sequence: Synthetic oligonucleotide
ccaacuagaaaagauauac

SEQ ID NO: 1749259 - RNA, 19 nt, Artificial Sequence
  Description of Artificial Sequence: Synthetic oligonucleotide
uuacuaagaaacaggcaua

SEQ ID NO: 1749260 - RNA, 19 nt, Artificial Sequence
  Description of Artificial Sequence: Synthetic oligonucleotide
uagaaauguccacuauucu

SEQ ID NO: 1749261 - RNA, 19 nt, Artificial Sequence
  Description of Artificial Sequence: Synthetic oligonucleotide
uccagacuauugcucaaag

SEQ ID NO: 1749262 - RNA, 19 nt, Artificial Sequence
  Description of Artificial Sequence: Synthetic oligonucleotide
acaugcaagucaaaugcac

SEQ ID NO: 1749263 - RNA, 19 nt, Artificial Sequence
  Description of Artificial Sequence: Synthetic oligonucleotide
uccuuagauuaaaugugca

SEQ ID NO: 1749264 - RNA, 19 nt, Artificial Sequence
  Description of Artificial Sequence: Synthetic oligonucleotide
auguguagcccucauauuu

SEQ ID NO: 1749265 - RNA, 19 nt, Artificial Sequence
  Description of Artificial Sequence: Synthetic oligonucleotide
aaagcaaccuaggauuagu

SEQ ID NO: 1749266 - RNA, 19 nt, Artificial Sequence
  Description of Artificial Sequence: Synthetic oligonucleotide
auaacucaaugacccgaac

SEQ ID NO: 1749267 - RNA, 19 nt, Artificial Sequence
  Description of Artificial Sequence: Synthetic oligonucleotide
gaagagcauaacucaauga

SEQ ID NO: 1749268 - RNA, 19 nt, Artificial Sequence
  Description of Artificial Sequence: Synthetic oligonucleotide
uauacucuguucaguucgc

SEQ ID NO: 1749269 - RNA, 19 nt, Artificial Sequence
  Description of Artificial Sequence: Synthetic oligonucleotide
aaaagcaaccuaggauuag

SEQ ID NO: 1749270 - RNA, 19 nt, Artificial Sequence
  Description of Artificial Sequence: Synthetic oligonucleotide
uuaugauuucuugggcagg

SEQ ID NO: 1749271 - RNA, 19 nt, Artificial Sequence
  Description of Artificial Sequence: Synthetic oligonucleotide
agcaacauuccuuggauuu

SEQ ID NO: 1749272 - RNA, 19 nt, Artificial Sequence
  Description of Artificial Sequence: Synthetic oligonucleotide
ucuuugauaacagcaacuu

SEQ ID NO: 1749273 - RNA, 19 nt, Artificial Sequence
  Description of Artificial Sequence: Synthetic oligonucleotide
aggcguagcaaauagguuu

SEQ ID NO: 1749274 - RNA, 19 nt, Artificial Sequence
  Description of Artificial Sequence: Synthetic oligonucleotide
uucucauguaagagaaacu

SEQ ID NO: 1749275 - RNA, 19 nt, Artificial Sequence
  Description of Artificial Sequence: Synthetic oligonucleotide
auagguuugcugccaaugu

SEQ ID NO: 1749276 - RNA, 19 nt, Artificial Sequence
  Description of Artificial Sequence: Synthetic oligonucleotide
auaaagugacaucuauuau

SEQ ID NO: 1749277 - RNA, 19 nt, Artificial Sequence
  Description of Artificial Sequence: Synthetic oligonucleotide
accuuacaaaauugagggg

SEQ ID NO: 1749278 - RNA, 19 nt, Artificial Sequence
  Description of Artificial Sequence: Synthetic oligonucleotide
aaguagguuauaaugugau

SEQ ID NO: 1749279 - RNA, 19 nt, Artificial Sequence
  Description of Artificial Sequence: Synthetic oligonucleotide
agcauaacucaaugacccg

SEQ ID NO: 1749280 - RNA, 19 nt, Artificial Sequence
  Description of Artificial Sequence: Synthetic oligonucleotide
gcaaccuaggauuaguuac

SEQ ID NO: 1749281 - RNA, 19 nt, Artificial Sequence
  Description of Artificial Sequence: Synthetic oligonucleotide
uuuagaagacaugcaaguc

SEQ ID NO: 1749282 - RNA, 19 nt, Artificial Sequence
  Description of Artificial Sequence: Synthetic oligonucleotide
acucuagauuauaacaaag

SEQ ID NO: 1749283 - RNA, 19 nt, Artificial Sequence
  Description of Artificial Sequence: Synthetic oligonucleotide
ugcuguuuuagaagacaug

SEQ ID NO: 1749284 - RNA, 19 nt, Artificial Sequence
  Description of Artificial Sequence: Synthetic oligonucleotide
guguauuauaguuuauuaa

SEQ ID NO: 1749285 - RNA, 19 nt, Artificial Sequence
  Description of Artificial Sequence: Synthetic oligonucleotide
uugcucaaagaaaguagac

SEQ ID NO: 1749286 - RNA, 19 nt, Artificial Sequence
  Description of Artificial Sequence: Synthetic oligonucleotide
ugcaggcguagcaaauagg

SEQ ID NO: 1749287 - RNA, 19 nt, Artificial Sequence
  Description of Artificial Sequence: Synthetic oligonucleotide
ugauuugugugaccuuaca

SEQ ID NO: 1749288 - RNA, 19 nt, Artificial Sequence
  Description of Artificial Sequence: Synthetic oligonucleotide
acagguguguacuuggcau

SEQ ID NO: 1749289 - RNA, 19 nt, Artificial Sequence
  Description of Artificial Sequence: Synthetic oligonucleotide
cacuauucuagaaguuacc

SEQ ID NO: 1749290 - RNA, 19 nt, Artificial Sequence
  Description of Artificial Sequence: Synthetic oligonucleotide
gugauuguauucaaauuac

SEQ ID NO: 1749291 - RNA, 19 nt, Artificial Sequence
  Description of Artificial Sequence: Synthetic oligonucleotide
cucauguaagagaaacuuc

SEQ ID NO: 1749292 - RNA, 19 nt, Artificial Sequence
  Description of Artificial Sequence: Synthetic oligonucleotide
agcccucauauuuucaugu

SEQ ID NO: 1749293 - RNA, 19 nt, Artificial Sequence
  Description of Artificial Sequence: Synthetic oligonucleotide
ugcugcauuuagcaggccu

SEQ ID NO: 1749294 - RNA, 19 nt, Artificial Sequence
  Description of Artificial Sequence: Synthetic oligonucleotide
gugacaucuauuauuuaug

SEQ ID NO: 1749295 - RNA, 19 nt, Artificial Sequence
  Description of Artificial Sequence: Synthetic oligonucleotide
uuacagaggaggagagggc

SEQ ID NO: 1749296 - RNA, 19 nt, Artificial Sequence
  Description of Artificial Sequence: Synthetic oligonucleotide
agagcaacauuccuuggau

SEQ ID NO: 1749297 - RNA, 19 nt, Artificial Sequence
  Description of Artificial Sequence: Synthetic oligonucleotide
ugcaugcugcauuuagcag

SEQ ID NO: 1749298 - RNA, 19 nt, Artificial Sequence
  Description of Artificial Sequence: Synthetic oligonucleotide
uugcaguuauucuuuuaga

SEQ ID NO: 1749299 - RNA, 19 nt, Artificial Sequence
  Description of Artificial Sequence: Synthetic oligonucleotide
cauuauguaaaacagcaau

SEQ ID NO: 1749300 - RNA, 19 nt, Artificial Sequence
  Description of Artificial Sequence: Synthetic oligonucleotide
ucuagaaguuacccaugac

SEQ ID NO: 1749301 - RNA, 19 nt, Artificial Sequence
  Description of Artificial Sequence: Synthetic oligonucleotide
uaauuucuguacuacuguu

SEQ ID NO: 1749302 - RNA, 19 nt, Artificial Sequence
  Description of Artificial Sequence: Synthetic oligonucleotide
guacuacuguucuaaaauc

SEQ ID NO: 1749303 - RNA, 19 nt, Artificial Sequence
  Description of Artificial Sequence: Synthetic oligonucleotide
agaaguuacccaugacugu

SEQ ID NO: 1749304 - RNA, 19 nt, Artificial Sequence
  Description of Artificial Sequence: Synthetic oligonucleotide
uuaguuacuggaucuuaua

SEQ ID NO: 1749305 - RNA, 19 nt, Artificial Sequence
  Description of Artificial Sequence: Synthetic oligonucleotide
ucaagaaucugugcuggga

SEQ ID NO: 1749306 - RNA, 19 nt, Artificial Sequence
  Description of Artificial Sequence: Synthetic oligonucleotide
ugggagcuuccuuugaaac

SEQ ID NO: 1749307 - RNA, 19 nt, Artificial Sequence
  Description of Artificial Sequence: Synthetic oligonucleotide
aacugucauauuauacucu

SEQ ID NO: 1749308 - RNA, 19 nt, Artificial Sequence
  Description of Artificial Sequence: Synthetic oligonucleotide
cuauucuagaaguuaccca

SEQ ID NO: 1749309 - RNA, 19 nt, Artificial Sequence
  Description of Artificial Sequence: Synthetic oligonucleotide
uugugauuguauucaaauu

SEQ ID NO: 1749310 - RNA, 19 nt, Artificial Sequence
  Description of Artificial Sequence: Synthetic oligonucleotide
augcaggcguagcaaauag

SEQ ID NO: 1749311 - RNA, 19 nt, Artificial Sequence
  Description of Artificial Sequence: Synthetic oligonucleotide
gcauucauuugguucaugc

SEQ ID NO: 1749312 - RNA, 19 nt, Artificial Sequence
  Description of Artificial Sequence: Synthetic oligonucleotide
uccacuauucuagaaguua

SEQ ID NO: 1749313 - RNA, 19 nt, Artificial Sequence
  Description of Artificial Sequence: Synthetic oligonucleotide
uaauugugauuguauucaa

SEQ ID NO: 1749314 - RNA, 19 nt, Artificial Sequence
  Description of Artificial Sequence: Synthetic oligonucleotide
cuagaaguuacccaugacu

SEQ ID NO: 1749315 - RNA, 19 nt, Artificial Sequence
  Description of Artificial Sequence: Synthetic oligonucleotide
guuacccaugacuguagcc

SEQ ID NO: 1749316 - RNA, 19 nt, Artificial Sequence
  Description of Artificial Sequence: Synthetic oligonucleotide
uaccugguacaguacaggu

SEQ ID NO: 1749317 - RNA, 19 nt, Artificial Sequence
  Description of Artificial Sequence: Synthetic oligonucleotide
aaauuacuauucucaugua

SEQ ID NO: 1749318 - RNA, 19 nt, Artificial Sequence
  Description of Artificial Sequence: Synthetic oligonucleotide
uacuaagaaacaggcauau

SEQ ID NO: 1749319 - RNA, 19 nt, Artificial Sequence
  Description of Artificial Sequence: Synthetic oligonucleotide
cuggaucuuauaucaauca

SEQ ID NO: 1749320 - RNA, 19 nt, Artificial Sequence
  Description of Artificial Sequence: Synthetic oligonucleotide
acucuguucaguucgcgau

SEQ ID NO: 1749321 - RNA, 19 nt, Artificial Sequence
  Description of Artificial Sequence: Synthetic oligonucleotide
auauuauacucuguucagu

SEQ ID NO: 1749322 - RNA, 19 nt, Artificial Sequence
  Description of Artificial Sequence: Synthetic oligonucleotide
uguacagugggaggugcag

SEQ ID NO: 1749323 - RNA, 19 nt, Artificial Sequence
  Description of Artificial Sequence: Synthetic oligonucleotide
aauguguagcccucauauu

SEQ ID NO: 1749324 - RNA, 19 nt, Artificial Sequence
  Description of Artificial Sequence: Synthetic oligonucleotide
uguagcccucauauuuuca

SEQ ID NO: 1749325 - RNA, 19 nt, Artificial Sequence
  Description of Artificial Sequence: Synthetic oligonucleotide
augacucccuggcaggaag

SEQ ID NO: 1749326 - RNA, 19 nt, Artificial Sequence
  Description of Artificial Sequence: Synthetic oligonucleotide
uugugugaccuuacaaaau

SEQ ID NO: 1749327 - RNA, 19 nt, Artificial Sequence
  Description of Artificial Sequence: Synthetic oligonucleotide
aaccuaauugugauuguau

SEQ ID NO: 1749328 - RNA, 19 nt, Artificial Sequence
  Description of Artificial Sequence: Synthetic oligonucleotide
agguccagacuauugcuca

SEQ ID NO: 1749329 - RNA, 19 nt, Artificial Sequence
  Description of Artificial Sequence: Synthetic oligonucleotide
accuaggauuaguuacugg

SEQ ID NO: 1749330 - RNA, 19 nt, Artificial Sequence
  Description of Artificial Sequence: Synthetic oligonucleotide
uacucuguucaguucgcga

SEQ ID NO: 1749331 - RNA, 19 nt, Artificial Sequence
  Description of Artificial Sequence: Synthetic oligonucleotide
accuaauugugauuguauu

SEQ ID NO: 1749332 - RNA, 19 nt, Artificial Sequence
  Description of Artificial Sequence: Synthetic oligonucleotide
agagcuuggagaaauuuaa

SEQ ID NO: 1749333 - RNA, 19 nt, Artificial Sequence
  Description of Artificial Sequence: Synthetic oligonucleotide
aaccuaggauuaguuacug

SEQ ID NO: 1749334 - RNA, 19 nt, Artificial Sequence
  Description of Artificial Sequence: Synthetic oligonucleotide
ugacuguagccauuuuacu

SEQ ID NO: 1749335 - RNA, 19 nt, Artificial Sequence
  Description of Artificial Sequence: Synthetic oligonucleotide
acuuccuuauugcuggcau

SEQ ID NO: 1749336 - RNA, 19 nt, Artificial Sequence
  Description of Artificial Sequence: Synthetic oligonucleotide
acccgaacagcaaaauuuc

SEQ ID NO: 1749337 - RNA, 19 nt, Artificial Sequence
  Description of Artificial Sequence: Synthetic oligonucleotide
gugcaugcugcauuuagca

SEQ ID NO: 1749338 - RNA, 19 nt, Artificial Sequence
  Description of Artificial Sequence: Synthetic oligonucleotide
ugggagucuaggauguuua

SEQ ID NO: 1749339 - RNA, 19 nt, Artificial Sequence
  Description of Artificial Sequence: Synthetic oligonucleotide
uagauuaaaugugcaugcu

SEQ ID NO: 1749340 - RNA, 19 nt, Artificial Sequence
  Description of Artificial Sequence: Synthetic oligonucleotide
caguuauagguccagacua

SEQ ID NO: 1749341 - RNA, 19 nt, Artificial Sequence
  Description of Artificial Sequence: Synthetic oligonucleotide
auaaugugauucugucccu

SEQ ID NO: 1749342 - RNA, 19 nt, Artificial Sequence
  Description of Artificial Sequence: Synthetic oligonucleotide
ucgcgaugguuuaauuucu

SEQ ID NO: 1749343 - RNA, 19 nt, Artificial Sequence
  Description of Artificial Sequence: Synthetic oligonucleotide
caacuagaaaagauauaca

SEQ ID NO: 1749344 - RNA, 19 nt, Artificial Sequence
  Description of Artificial Sequence: Synthetic oligonucleotide
guagccauuuuacuauaga

SEQ ID NO: 1749345 - RNA, 19 nt, Artificial Sequence
  Description of Artificial Sequence: Synthetic oligonucleotide
gaucuuauaucaaucacuu

SEQ ID NO: 1749346 - RNA, 19 nt, Artificial Sequence
  Description of Artificial Sequence: Synthetic oligonucleotide
guacuuacagaggaggaga

SEQ ID NO: 1749347 - RNA, 19 nt, Artificial Sequence
  Description of Artificial Sequence: Synthetic oligonucleotide
aaguuacccaugacuguag

SEQ ID NO: 1749348 - RNA, 19 nt, Artificial Sequence
  Description of Artificial Sequence: Synthetic oligonucleotide
uagcccucauauuuucaug

SEQ ID NO: 1749349 - RNA, 19 nt, Artificial Sequence
  Description of Artificial Sequence: Synthetic oligonucleotide
gaagcacuggguuuauuua

SEQ ID NO: 1749350 - RNA, 19 nt, Artificial Sequence
  Description of Artificial Sequence: Synthetic oligonucleotide
aaucuguaggggucagcaa

SEQ ID NO: 1749351 - RNA, 19 nt, Artificial Sequence
  Description of Artificial Sequence: Synthetic oligonucleotide
aaugacccgaacagcaaaa

SEQ ID NO: 1749352 - RNA, 19 nt, Artificial Sequence
  Description of Artificial Sequence: Synthetic oligonucleotide
cucaagaaucugugcuggg

SEQ ID NO: 1749353 - RNA, 19 nt, Artificial Sequence
  Description of Artificial Sequence: Synthetic oligonucleotide
caccaaauauguuccuuuc

SEQ ID NO: 1749354 - RNA, 19 nt, Artificial Sequence
  Description of Artificial Sequence: Synthetic oligonucleotide
uugugacaaaguagguuau

SEQ ID NO: 1749355 - RNA, 19 nt, Artificial Sequence
  Description of Artificial Sequence: Synthetic oligonucleotide
uuacuggaucuuauaucaa

SEQ ID NO: 1749356 - RNA, 19 nt, Artificial Sequence
  Description of Artificial Sequence: Synthetic oligonucleotide
gaaguuacccaugacugua

SEQ ID NO: 1749357 - RNA, 19 nt, Artificial Sequence
  Description of Artificial Sequence: Synthetic oligonucleotide
cauuggagccaugacuccc

SEQ ID NO: 1749358 - RNA, 19 nt, Artificial Sequence
  Description of Artificial Sequence: Synthetic oligonucleotide
ccuaggauuaguuacugga

SEQ ID NO: 1749359 - RNA, 19 nt, Artificial Sequence
  Description of Artificial Sequence: Synthetic oligonucleotide
guacaguacagguguguac

SEQ ID NO: 1749360 - RNA, 19 nt, Artificial Sequence
  Description of Artificial Sequence: Synthetic oligonucleotide
uuugguucaugcccugguu

SEQ ID NO: 1749361 - RNA, 19 nt, Artificial Sequence
  Description of Artificial Sequence: Synthetic oligonucleotide
cugaagcuuugugacaaag

SEQ ID NO: 1749362 - RNA, 19 nt, Artificial Sequence
  Description of Artificial Sequence: Synthetic oligonucleotide
guauucaaauuacuauucu

SEQ ID NO: 1749363 - RNA, 19 nt, Artificial Sequence
  Description of Artificial Sequence: Synthetic oligonucleotide
aaugcaggcguagcaaaua

SEQ ID NO: 1749364 - RNA, 19 nt, Artificial Sequence
  Description of Artificial Sequence: Synthetic oligonucleotide
cacuuaaauuaaugauaug

SEQ ID NO: 1749365 - RNA, 19 nt, Artificial Sequence
  Description of Artificial Sequence: Synthetic oligonucleotide
agguguguacuuggcauuc

SEQ ID NO: 1749366 - RNA, 19 nt, Artificial Sequence
  Description of Artificial Sequence: Synthetic oligonucleotide
cuuccuuauugcuggcaug

SEQ ID NO: 1749367 - RNA, 19 nt, Artificial Sequence
  Description of Artificial Sequence: Synthetic oligonucleotide
ucuguacuacuguucuaaa

SEQ ID NO: 1749368 - RNA, 19 nt, Artificial Sequence
  Description of Artificial Sequence: Synthetic oligonucleotide
uucaguucgcgaugguuua

SEQ ID NO: 1749369 - RNA, 19 nt, Artificial Sequence
  Description of Artificial Sequence: Synthetic oligonucleotide
cuuuucauuggagccauga

SEQ ID NO: 1749370 - RNA, 19 nt, Artificial Sequence
  Description of Artificial Sequence: Synthetic oligonucleotide
agauuauaacaaaguauaa

SEQ ID NO: 1749371 - RNA, 19 nt, Artificial Sequence
  Description of Artificial Sequence: Synthetic oligonucleotide
auuaguuacuggaucuuau

SEQ ID NO: 1749372 - RNA, 19 nt, Artificial Sequence
  Description of Artificial Sequence: Synthetic oligonucleotide
auauaaagugacaucuauu

SEQ ID NO: 1749373 - RNA, 19 nt, Artificial Sequence
  Description of Artificial Sequence: Synthetic oligonucleotide
guaagagaaacuuccuuau

SEQ ID NO: 1749374 - RNA, 19 nt, Artificial Sequence
  Description of Artificial Sequence: Synthetic oligonucleotide
agguuauaaugugauucug

SEQ ID NO: 1749375 - RNA, 19 nt, Artificial Sequence
  Description of Artificial Sequence: Synthetic oligonucleotide
caauguguagcccucauau

SEQ ID NO: 1749376 - RNA, 19 nt, Artificial Sequence
  Description of Artificial Sequence: Synthetic oligonucleotide
ucauuugguucaugcccug

SEQ ID NO: 1749377 - RNA, 19 nt, Artificial Sequence
  Description of Artificial Sequence: Synthetic oligonucleotide
agcaaccuaggauuaguua

SEQ ID NO: 1749378 - RNA, 19 nt, Artificial Sequence
  Description of Artificial Sequence: Synthetic oligonucleotide
gggguacuuacagaggagg

SEQ ID NO: 1749379 - RNA, 19 nt, Artificial Sequence
  Description of Artificial Sequence: Synthetic oligonucleotide
aaguagaccaacagagcuu

SEQ ID NO: 1749380 - RNA, 19 nt, Artificial Sequence
  Description of Artificial Sequence: Synthetic oligonucleotide
cauuuagcaggccuuaacu

SEQ ID NO: 1749381 - RNA, 19 nt, Artificial Sequence
  Description of Artificial Sequence: Synthetic oligonucleotide
ugacucccuggcaggaagc

SEQ ID NO: 1749382 - RNA, 19 nt, Artificial Sequence
  Description of Artificial Sequence: Synthetic oligonucleotide
caaucuguaggggucagca

SEQ ID NO: 1749383 - RNA, 19 nt, Artificial Sequence
  Description of Artificial Sequence: Synthetic oligonucleotide
ugacccgaacagcaaaauu

SEQ ID NO: 1749384 - RNA, 19 nt, Artificial Sequence
  Description of Artificial Sequence: Synthetic oligonucleotide
uucaugcccugguugggcu

SEQ ID NO: 1749385 - RNA, 19 nt, Artificial Sequence
  Description of Artificial Sequence: Synthetic oligonucleotide
agacuauugcucaaagaaa

SEQ ID NO: 1749386 - RNA, 19 nt, Artificial Sequence
  Description of Artificial Sequence: Synthetic oligonucleotide
uugcugccaauguguagcc

SEQ ID NO: 1749387 - RNA, 19 nt, Artificial Sequence
  Description of Artificial Sequence: Synthetic oligonucleotide
aggaaacaacagcugacuu

SEQ ID NO: 1749388 - RNA, 19 nt, Artificial Sequence
  Description of Artificial Sequence: Synthetic oligonucleotide
cauaacucaaugacccgaa

SEQ ID NO: 1749389 - RNA, 19 nt, Artificial Sequence
  Description of Artificial Sequence: Synthetic oligonucleotide
auacucuguucaguucgcg

SEQ ID NO: 1749390 - RNA, 19 nt, Artificial Sequence
  Description of Artificial Sequence: Synthetic oligonucleotide
cuauugcucaaagaaagua

SEQ ID NO: 1749391 - RNA, 19 nt, Artificial Sequence
  Description of Artificial Sequence: Synthetic oligonucleotide
cucuguucaguucgcgaug

SEQ ID NO: 1749392 - RNA, 19 nt, Artificial Sequence
  Description of Artificial Sequence: Synthetic oligonucleotide
acuacuguucuaaaaucuu

SEQ ID NO: 1749393 - RNA, 19 nt, Artificial Sequence
  Description of Artificial Sequence: Synthetic oligonucleotide
cucaaagaaaguagaccaa

SEQ ID NO: 1749394 - RNA, 19 nt, Artificial Sequence
  Description of Artificial Sequence: Synthetic oligonucleotide
gauuaguuacuggaucuua

SEQ ID NO: 1749395 - RNA, 19 nt, Artificial Sequence
  Description of Artificial Sequence: Synthetic oligonucleotide
gugugaccuuacaaaauug

SEQ ID NO: 1749396 - RNA, 19 nt, Artificial Sequence
  Description of Artificial Sequence: Synthetic oligonucleotide
uucaaucuguaggggucag

SEQ ID NO: 1749397 - RNA, 19 nt, Artificial Sequence
  Description of Artificial Sequence: Synthetic oligonucleotide
caauucaaucuguaggggu

SEQ ID NO: 1749398 - RNA, 19 nt, Artificial Sequence
  Description of Artificial Sequence: Synthetic oligonucleotide
uguucaguucgcgaugguu

SEQ ID NO: 1749399 - RNA, 19 nt, Artificial Sequence
  Description of Artificial Sequence: Synthetic oligonucleotide
gacccgaacagcaaaauuu

SEQ ID NO: 1749400 - RNA, 19 nt, Artificial Sequence
  Description of Artificial Sequence: Synthetic oligonucleotide
caggaccaauaccugguac

SEQ ID NO: 1749401 - RNA, 19 nt, Artificial Sequence
  Description of Artificial Sequence: Synthetic oligonucleotide
caaaagcaaccuaggauua

SEQ ID NO: 1749402 - RNA, 19 nt, Artificial Sequence
  Description of Artificial Sequence: Synthetic oligonucleotide
caccaacuagaaaagauau

SEQ ID NO: 1749403 - RNA, 19 nt, Artificial Sequence
  Description of Artificial Sequence: Synthetic oligonucleotide
ggaccaauaccugguacag

SEQ ID NO: 1749404 - RNA, 19 nt, Artificial Sequence
  Description of Artificial Sequence: Synthetic oligonucleotide
ggcacaccaacuagaaaag

SEQ ID NO: 1749405 - RNA, 19 nt, Artificial Sequence
  Description of Artificial Sequence: Synthetic oligonucleotide
uuucuguacuacuguucua

SEQ ID NO: 1749406 - RNA, 19 nt, Artificial Sequence
  Description of Artificial Sequence: Synthetic oligonucleotide
aucuuauaucaaucacuua

SEQ ID NO: 1749407 - RNA, 19 nt, Artificial Sequence
  Description of Artificial Sequence: Synthetic oligonucleotide
gcugacuuaagagcugaag

SEQ ID NO: 1749408 - RNA, 19 nt, Artificial Sequence
  Description of Artificial Sequence: Synthetic oligonucleotide
agucuaggauguuuaucuu

SEQ ID NO: 1749409 - RNA, 19 nt, Artificial Sequence
  Description of Artificial Sequence: Synthetic oligonucleotide
aguuauagguccagacuau

SEQ ID NO: 1749410 - RNA, 19 nt, Artificial Sequence
  Description of Artificial Sequence: Synthetic oligonucleotide
ucaaucuguaggggucagc

SEQ ID NO: 1749411 - RNA, 19 nt, Artificial Sequence
  Description of Artificial Sequence: Synthetic oligonucleotide
ggagaggcaggaccaauac

SEQ ID NO: 1749412 - RNA, 19 nt, Artificial Sequence
  Description of Artificial Sequence: Synthetic oligonucleotide
ugugacaaaguagguuaua

SEQ ID NO: 1749413 - RNA, 19 nt, Artificial Sequence
  Description of Artificial Sequence: Synthetic oligonucleotide
cuguacuacuguucuaaaa

SEQ ID NO: 1749414 - RNA, 19 nt, Artificial Sequence
  Description of Artificial Sequence: Synthetic oligonucleotide
ccuuauugcuggcauggag

SEQ ID NO: 1749415 - RNA, 19 nt, Artificial Sequence
  Description of Artificial Sequence: Synthetic oligonucleotide
augugauucugucccugau

SEQ ID NO: 1749416 - RNA, 19 nt, Artificial Sequence
  Description of Artificial Sequence: Synthetic oligonucleotide
ggaucuuauaucaaucacu

SEQ ID NO: 1749417 - RNA, 19 nt, Artificial Sequence
  Description of Artificial Sequence: Synthetic oligonucleotide
gagcugaagcuuugugaca

SEQ ID NO: 1749418 - RNA, 19 nt, Artificial Sequence
  Description of Artificial Sequence: Synthetic oligonucleotide
guguagcccucauauuuuc

SEQ ID NO: 1749419 - RNA, 19 nt, Artificial Sequence
  Description of Artificial Sequence: Synthetic oligonucleotide
aaaccuggccaggccagga

SEQ ID NO: 1749420 - RNA, 19 nt, Artificial Sequence
  Description of Artificial Sequence: Synthetic oligonucleotide
aaacaacagcugacuuaag

SEQ ID NO: 1749421 - RNA, 19 nt, Artificial Sequence
  Description of Artificial Sequence: Synthetic oligonucleotide
gaggcaggaccaauaccug

SEQ ID NO: 1749422 - RNA, 19 nt, Artificial Sequence
  Description of Artificial Sequence: Synthetic oligonucleotide
ggcguagcaaauagguuug

SEQ ID NO: 1749423 - RNA, 19 nt, Artificial Sequence
  Description of Artificial Sequence: Synthetic oligonucleotide
aagcaaccuaggauuaguu

SEQ ID NO: 1749424 - RNA, 19 nt, Artificial Sequence
  Description of Artificial Sequence: Synthetic oligonucleotide
gcacuggguuuauuuauug

SEQ ID NO: 1749425 - RNA, 19 nt, Artificial Sequence
  Description of Artificial Sequence: Synthetic oligonucleotide
gcauuuagcaggccuuaac

SEQ ID NO: 1749426 - RNA, 19 nt, Artificial Sequence
  Description of Artificial Sequence: Synthetic oligonucleotide
cuaggauuaguuacuggau

SEQ ID NO: 1749427 - RNA, 19 nt, Artificial Sequence
  Description of Artificial Sequence: Synthetic oligonucleotide
gugcaggcagccugagaag

SEQ ID NO: 1749428 - RNA, 19 nt, Artificial Sequence
  Description of Artificial Sequence: Synthetic oligonucleotide
ccucauauuuucauguaaa

SEQ ID NO: 1749429 - RNA, 19 nt, Artificial Sequence
  Description of Artificial Sequence: Synthetic oligonucleotide
caaccuaggauuaguuacu

SEQ ID NO: 1749430 - RNA, 19 nt, Artificial Sequence
  Description of Artificial Sequence: Synthetic oligonucleotide
guacagguguguacuuggc

SEQ ID NO: 1749431 - RNA, 19 nt, Artificial Sequence
  Description of Artificial Sequence: Synthetic oligonucleotide
aguucgcgaugguuuaauu

SEQ ID NO: 1749432 - RNA, 19 nt, Artificial Sequence
  Description of Artificial Sequence: Synthetic oligonucleotide
cugguacaguacaggugug

SEQ ID NO: 1749433 - RNA, 19 nt, Artificial Sequence
  Description of Artificial Sequence: Synthetic oligonucleotide
cugccaauguguagcccuc

SEQ ID NO: 1749434 - RNA, 19 nt, Artificial Sequence
  Description of Artificial Sequence: Synthetic oligonucleotide
caaauagguuugcugccaa

SEQ ID NO: 1749435 - RNA, 19 nt, Artificial Sequence
  Description of Artificial Sequence: Synthetic oligonucleotide
gguuacuaagaaacaggca

SEQ ID NO: 1749436 - RNA, 19 nt, Artificial Sequence
  Description of Artificial Sequence: Synthetic oligonucleotide
gcauaacucaaugacccga

SEQ ID NO: 1749437 - RNA, 19 nt, Artificial Sequence
  Description of Artificial Sequence: Synthetic oligonucleotide
caagucaaaugcaccaaau

SEQ ID NO: 1749438 - RNA, 19 nt, Artificial Sequence
  Description of Artificial Sequence: Synthetic oligonucleotide
gguuauaaugugauucugu

SEQ ID NO: 1749439 - RNA, 19 nt, Artificial Sequence
  Description of Artificial Sequence: Synthetic oligonucleotide
ggagcuuccuuugaaaccu

SEQ ID NO: 1749440 - RNA, 19 nt, Artificial Sequence
  Description of Artificial Sequence: Synthetic oligonucleotide
aaugugcaugcugcauuua

SEQ ID NO: 1749441 - RNA, 19 nt, Artificial Sequence
  Description of Artificial Sequence: Synthetic oligonucleotide
cccgaacagcaaaauuucc

SEQ ID NO: 1749442 - RNA, 19 nt, Artificial Sequence
  Description of Artificial Sequence: Synthetic oligonucleotide
uuucuugggcaggcacacc

SEQ ID NO: 1749443 - RNA, 19 nt, Artificial Sequence
  Description of Artificial Sequence: Synthetic oligonucleotide
accaacuagaaaagauaua

SEQ ID NO: 1749444 - RNA, 19 nt, Artificial Sequence
  Description of Artificial Sequence: Synthetic oligonucleotide
gucuaggauguuuaucuuu

SEQ ID NO: 1749445 - RNA, 19 nt, Artificial Sequence
  Description of Artificial Sequence: Synthetic oligonucleotide
gcaagucaaaugcaccaaa

SEQ ID NO: 1749446 - RNA, 19 nt, Artificial Sequence
  Description of Artificial Sequence: Synthetic oligonucleotide
ggagucuaggauguuuauc

SEQ ID NO: 1749447 - RNA, 19 nt, Artificial Sequence
  Description of Artificial Sequence: Synthetic oligonucleotide
ugcugccaauguguagccc

SEQ ID NO: 1749448 - RNA, 19 nt, Artificial Sequence
  Description of Artificial Sequence: Synthetic oligonucleotide
guucaguucgcgaugguuu

SEQ ID NO: 1749449 - RNA, 19 nt, Artificial Sequence
  Description of Artificial Sequence: Synthetic oligonucleotide
aguguguauuauaguuuau

SEQ ID NO: 1749450 - RNA, 19 nt, Artificial Sequence
  Description of Artificial Sequence: Synthetic oligonucleotide
cugggagcuuccuuugaaa

SEQ ID NO: 1749451 - RNA, 19 nt, Artificial Sequence
  Description of Artificial Sequence: Synthetic oligonucleotide
augacccgaacagcaaaau

SEQ ID NO: 1749452 - RNA, 19 nt, Artificial Sequence
  Description of Artificial Sequence: Synthetic oligonucleotide
ugccaauguguagcccuca

SEQ ID NO: 1749453 - RNA, 19 nt, Artificial Sequence
  Description of Artificial Sequence: Synthetic oligonucleotide
ucaguucgcgaugguuuaa

SEQ ID NO: 1749454 - RNA, 19 nt, Artificial Sequence
  Description of Artificial Sequence: Synthetic oligonucleotide
acuaagaaacaggcauauu

SEQ ID NO: 1749455 - RNA, 19 nt, Artificial Sequence
  Description of Artificial Sequence: Synthetic oligonucleotide
agcacuggguuuauuuauu

SEQ ID NO: 1749456 - RNA, 19 nt, Artificial Sequence
  Description of Artificial Sequence: Synthetic oligonucleotide
caugcaugucauuguugaa

SEQ ID NO: 1749457 - RNA, 19 nt, Artificial Sequence
  Description of Artificial Sequence: Synthetic oligonucleotide
gcaaauagguuugcugcca

SEQ ID NO: 1749458 - RNA, 19 nt, Artificial Sequence
  Description of Artificial Sequence: Synthetic oligonucleotide
cauguaaaguguguauuau

SEQ ID NO: 1749459 - RNA, 19 nt, Artificial Sequence
  Description of Artificial Sequence: Synthetic oligonucleotide
caggccuuaacucuagauu

SEQ ID NO: 1749460 - RNA, 19 nt, Artificial Sequence
  Description of Artificial Sequence: Synthetic oligonucleotide
caaccuaauugugauugua

SEQ ID NO: 1749461 - RNA, 19 nt, Artificial Sequence
  Description of Artificial Sequence: Synthetic oligonucleotide
agcaggccuuaacucuaga

SEQ ID NO: 1749462 - RNA, 19 nt, Artificial Sequence
  Description of Artificial Sequence: Synthetic oligonucleotide
cuuuauaauugcaguuauu

SEQ ID NO: 1749463 - RNA, 19 nt, Artificial Sequence
  Description of Artificial Sequence: Synthetic oligonucleotide
agcaaucuccuuagauuaa

SEQ ID NO: 1749464 - RNA, 19 nt, Artificial Sequence
  Description of Artificial Sequence: Synthetic oligonucleotide
agccugagaagagcagccu

SEQ ID NO: 1749465 - RNA, 19 nt, Artificial Sequence
  Description of Artificial Sequence: Synthetic oligonucleotide
gacucccuggcaggaagca

SEQ ID NO: 1749466 - RNA, 19 nt, Artificial Sequence
  Description of Artificial Sequence: Synthetic oligonucleotide
gcaggcguagcaaauaggu

SEQ ID NO: 1749467 - RNA, 19 nt, Artificial Sequence
  Description of Artificial Sequence: Synthetic oligonucleotide
cuggcauggagaggcagga

SEQ ID NO: 1749468 - RNA, 19 nt, Artificial Sequence
  Description of Artificial Sequence: Synthetic oligonucleotide
cuguagccauuuuacuaua

SEQ ID NO: 1749469 - RNA, 19 nt, Artificial Sequence
  Description of Artificial Sequence: Synthetic oligonucleotide
gguacaguacaggugugua

SEQ ID NO: 1749470 - RNA, 19 nt, Artificial Sequence
  Description of Artificial Sequence: Synthetic oligonucleotide
auggagaggcaggaccaau

SEQ ID NO: 1749471 - RNA, 19 nt, Artificial Sequence
  Description of Artificial Sequence: Synthetic oligonucleotide
ccagacuauugcucaaaga

SEQ ID NO: 1749472 - RNA, 19 nt, Artificial Sequence
  Description of Artificial Sequence: Synthetic oligonucleotide
caacagagcuuggagaaau

SEQ ID NO: 1749473 - RNA, 19 nt, Artificial Sequence
  Description of Artificial Sequence: Synthetic oligonucleotide
uggcauucauuugguucau

SEQ ID NO: 1749474 - RNA, 19 nt, Artificial Sequence
  Description of Artificial Sequence: Synthetic oligonucleotide
gagcaacauuccuuggauu

SEQ ID NO: 1749475 - RNA, 19 nt, Artificial Sequence
  Description of Artificial Sequence: Synthetic oligonucleotide
gcaaucuccuuagauuaaa

SEQ ID NO: 1749476 - RNA, 19 nt, Artificial Sequence
  Description of Artificial Sequence: Synthetic oligonucleotide
uggcauggagaggcaggac

SEQ ID NO: 1749477 - RNA, 19 nt, Artificial Sequence
  Description of Artificial Sequence: Synthetic oligonucleotide
cgaugguuuaauuucugua

SEQ ID NO: 1749478 - RNA, 19 nt, Artificial Sequence
  Description of Artificial Sequence: Synthetic oligonucleotide
ccuuagauuaaaugugcau

SEQ ID NO: 1749479 - RNA, 19 nt, Artificial Sequence
  Description of Artificial Sequence: Synthetic oligonucleotide
gcaccaaauauguuccuuu

SEQ ID NO: 1749480 - RNA, 19 nt, Artificial Sequence
  Description of Artificial Sequence: Synthetic oligonucleotide
guuauagguccagacuauu

SEQ ID NO: 1749481 - RNA, 19 nt, Artificial Sequence
  Description of Artificial Sequence: Synthetic oligonucleotide
caggcacaccaacuagaaa

SEQ ID NO: 1749482 - RNA, 19 nt, Artificial Sequence
  Description of Artificial Sequence: Synthetic oligonucleotide
caaaugcaccaaauauguu

SEQ ID NO: 1749483 - RNA, 19 nt, Artificial Sequence
  Description of Artificial Sequence: Synthetic oligonucleotide
gaccaauaccugguacagu

SEQ ID NO: 1749484 - RNA, 19 nt, Artificial Sequence
  Description of Artificial Sequence: Synthetic oligonucleotide
gguccagacuauugcucaa

SEQ ID NO: 1749485 - RNA, 19 nt, Artificial Sequence
  Description of Artificial Sequence: Synthetic oligonucleotide
cugcauuuagcaggccuua

SEQ ID NO: 1749486 - RNA, 19 nt, Artificial Sequence
  Description of Artificial Sequence: Synthetic oligonucleotide
ggcauucauuugguucaug

SEQ ID NO: 1749487 - RNA, 19 nt, Artificial Sequence
  Description of Artificial Sequence: Synthetic oligonucleotide
cgcgaugguuuaauuucug

SEQ ID NO: 1749488 - RNA, 19 nt, Artificial Sequence
  Description of Artificial Sequence: Synthetic oligonucleotide
gcaggccuuaacucuagau

SEQ ID NO: 1749489 - RNA, 19 nt, Artificial Sequence
  Description of Artificial Sequence: Synthetic oligonucleotide
gcaaccuaauugugauugu

SEQ ID NO: 1749490 - RNA, 19 nt, Artificial Sequence
  Description of Artificial Sequence: Synthetic oligonucleotide
cagcugcacagggagaacu

SEQ ID NO: 1749491 - RNA, 19 nt, Artificial Sequence
  Description of Artificial Sequence: Synthetic oligonucleotide
caggcguagcaaauagguu

SEQ ID NO: 1749492 - RNA, 19 nt, Artificial Sequence
  Description of Artificial Sequence: Synthetic oligonucleotide
gcaggaccaauaccuggua

SEQ ID NO: 1749493 - RNA, 19 nt, Artificial Sequence
  Description of Artificial Sequence: Synthetic oligonucleotide
gccuuaacucuagauuaua

SEQ ID NO: 1749494 - RNA, 19 nt, Artificial Sequence
  Description of Artificial Sequence: Synthetic oligonucleotide
gcugaagcuuugugacaaa

SEQ ID NO: 1749495 - RNA, 19 nt, Artificial Sequence
  Description of Artificial Sequence: Synthetic oligonucleotide
gugcaaccuaauugugauu

SEQ ID NO: 1749496 - RNA, 19 nt, Artificial Sequence
  Description of Artificial Sequence: Synthetic oligonucleotide
aggaagcacuggguuuauu

SEQ ID NO: 1749497 - RNA, 19 nt, Artificial Sequence
  Description of Artificial Sequence: Synthetic oligonucleotide
gggcuguacagugggaggu

SEQ ID NO: 1749498 - RNA, 19 nt, Artificial Sequence
  Description of Artificial Sequence: Synthetic oligonucleotide
ggauuaguuacuggaucuu

SEQ ID NO: 1749499 - RNA, 19 nt, Artificial Sequence
  Description of Artificial Sequence: Synthetic oligonucleotide
gggagucuaggauguuuau

SEQ ID NO: 1749500 - RNA, 19 nt, Artificial Sequence
  Description of Artificial Sequence: Synthetic oligonucleotide
ccaauguguagcccucaua

SEQ ID NO: 1749501 - RNA, 19 nt, Artificial Sequence
  Description of Artificial Sequence: Synthetic oligonucleotide
guccacuauucuagaaguu

SEQ ID NO: 1749502 - RNA, 19 nt, Artificial Sequence
  Description of Artificial Sequence: Synthetic oligonucleotide
caguucgcgaugguuuaau

SEQ ID NO: 1749503 - RNA, 19 nt, Artificial Sequence
  Description of Artificial Sequence: Synthetic oligonucleotide
ggccuuaacucuagauuau

SEQ ID NO: 1749504 - RNA, 19 nt, Artificial Sequence
  Description of Artificial Sequence: Synthetic oligonucleotide
gccaauguguagcccucau

SEQ ID NO: 1749505 - RNA, 19 nt, Artificial Sequence
  Description of Artificial Sequence: Synthetic oligonucleotide
cuguucaguucgcgauggu

SEQ ID NO: 1749506 - RNA, 19 nt, Artificial Sequence
  Description of Artificial Sequence: Synthetic oligonucleotide
cccaugacuguagccauuu

SEQ ID NO: 1749507 - RNA, 19 nt, Artificial Sequence
  Description of Artificial Sequence: Synthetic oligonucleotide
caggaagcacuggguuuau

SEQ ID NO: 1749508 - RNA, 19 nt, Artificial Sequence
  Description of Artificial Sequence: Synthetic oligonucleotide
aacaagaggacguuaaagg

SEQ ID NO: 1749509 - RNA, 19 nt, Artificial Sequence
  Description of Artificial Sequence: Synthetic oligonucleotide
aacauacacacacacacac

SEQ ID NO: 1749510 - RNA, 19 nt, Artificial Sequence
  Description of Artificial Sequence: Synthetic oligonucleotide
acuguauccauccacugcc

SEQ ID NO: 1749511 - RNA, 19 nt, Artificial Sequence
  Description of Artificial Sequence: Synthetic oligonucleotide
ugcaauacacucuucagag

SEQ ID NO: 1749512 - RNA, 19 nt, Artificial Sequence
  Description of Artificial Sequence: Synthetic oligonucleotide
caaacauacacacacacac

SEQ ID NO: 1749513 - RNA, 19 nt, Artificial Sequence
  Description of Artificial Sequence: Synthetic oligonucleotide
aacuguauccauccacugc

SEQ ID NO: 1749514 - RNA, 19 nt, Artificial Sequence
  Description of Artificial Sequence: Synthetic oligonucleotide
ugagacacaacacaaacaa

SEQ ID NO: 1749515 - RNA, 19 nt, Artificial Sequence
  Description of Artificial Sequence: Synthetic oligonucleotide
acugagacacaacacaaac

SEQ ID NO: 1749516 - RNA, 19 nt, Artificial Sequence
  Description of Artificial Sequence: Synthetic oligonucleotide
ugagacccuauaaagaccc

SEQ ID NO: 1749517 - RNA, 19 nt, Artificial Sequence
  Description of Artificial Sequence: Synthetic oligonucleotide
uguaguuggugcaauacac

SEQ ID NO: 1749518 - RNA, 19 nt, Artificial Sequence
  Description of Artificial Sequence: Synthetic oligonucleotide
ugaccaggagccaugaucc

SEQ ID NO: 1749519 - RNA, 19 nt, Artificial Sequence
  Description of Artificial Sequence: Synthetic oligonucleotide
aagaccccuacacaagugg

SEQ ID NO: 1749520 - RNA, 19 nt, Artificial Sequence
  Description of Artificial Sequence: Synthetic oligonucleotide
ucugagacccuauaaagac

SEQ ID NO: 1749521 - RNA, 19 nt, Artificial Sequence
  Description of Artificial Sequence: Synthetic oligonucleotide
aagaggacguuaaaggaac

SEQ ID NO: 1749522 - RNA, 19 nt, Artificial Sequence
  Description of Artificial Sequence: Synthetic oligonucleotide
  modified_base (16)..(16): a, c, u, g, unknown or other
cacacacacacacacngcg

SEQ ID NO: 1749523 - RNA, 19 nt, Artificial Sequence
  Description of Artificial Sequence: Synthetic oligonucleotide
ugcaccacgaauaucccag

SEQ ID NO: 1749524 - RNA, 19 nt, Artificial Sequence
  Description of Artificial Sequence: Synthetic oligonucleotide
acgaauaucccaguguccc

SEQ ID NO: 1749525 - RNA, 19 nt, Artificial Sequence
  Description of Artificial Sequence: Synthetic oligonucleotide
uggugcuccacucuggccg

SEQ ID NO: 1749526 - RNA, 19 nt, Artificial Sequence
  Description of Artificial Sequence: Synthetic oligonucleotide
agagcuguuccacucaggg

SEQ ID NO: 1749527 - RNA, 19 nt, Artificial Sequence
  Description of Artificial Sequence: Synthetic oligonucleotide
uacacacacacacacacac

SEQ ID NO: 1749528 - RNA, 19 nt, Artificial Sequence
  Description of Artificial Sequence: Synthetic oligonucleotide
cauacacacacacacacac

SEQ ID NO: 1749529 - RNA, 19 nt, Artificial Sequence
  Description of Artificial Sequence: Synthetic oligonucleotide
gugacaaccaugcaccacg

SEQ ID NO: 1749530 - RNA, 19 nt, Artificial Sequence
  Description of Artificial Sequence: Synthetic oligonucleotide
aaccuugggcuucccaugc

SEQ ID NO: 1749531 - RNA, 19 nt, Artificial Sequence
  Description of Artificial Sequence: Synthetic oligonucleotide
acuuccugcacuguggggc

SEQ ID NO: 1749532 - RNA, 19 nt, Artificial Sequence
  Description of Artificial Sequence: Synthetic oligonucleotide
caaagcugccuccagacgg

SEQ ID NO: 1749533 - RNA, 19 nt, Artificial Sequence
  Description of Artificial Sequence: Synthetic oligonucleotide
accaacucccuuucgaccg

SEQ ID NO: 1749534 - RNA, 19 nt, Artificial Sequence
  Description of Artificial Sequence: Synthetic oligonucleotide
cauguuccagagaucaugg

SEQ ID NO: 1749535 - RNA, 19 nt, Artificial Sequence
  Description of Artificial Sequence: Synthetic oligonucleotide
  modified_base (18)..(18): a, c, u, g, unknown or other
cacacacacacacacacng

SEQ ID NO: 1749536 - RNA, 19 nt, Artificial Sequence
  Description of Artificial Sequence: Synthetic oligonucleotide
accaugcaugcguaggucc

SEQ ID NO: 1749537 - RNA, 19 nt, Artificial Sequence
  Description of Artificial Sequence: Synthetic oligonucleotide
aacucuugcuuuaccagcg

SEQ ID NO: 1749538 - RNA, 19 nt, Artificial Sequence
  Description of Artificial Sequence: Synthetic oligonucleotide
acaagaggacguuaaagga

SEQ ID NO: 1749539 - RNA, 19 nt, Artificial Sequence
  Description of Artificial Sequence: Synthetic oligonucleotide
gacguuaaaggaacagugg

SEQ ID NO: 1749540 - RNA, 19 nt, Artificial Sequence
  Description of Artificial Sequence: Synthetic oligonucleotide
ugaccuaugccuccaaccu

SEQ ID NO: 1749541 - RNA, 19 nt, Artificial Sequence
  Description of Artificial Sequence: Synthetic oligonucleotide
agcgccgccacuccaaagc

SEQ ID NO: 1749542 - RNA, 19 nt, Artificial Sequence
  Description of Artificial Sequence: Synthetic oligonucleotide
  modified_base (2)..(2): a, c, u, g, unknown or other
cngaagaccagcucgcagc

SEQ ID NO: 1749543 - RNA, 19 nt, Artificial Sequence
  Description of Artificial Sequence: Synthetic oligonucleotide
uaaagaccccuacacaagu

SEQ ID NO: 1749544 - RNA, 19 nt, Artificial Sequence
  Description of Artificial Sequence: Synthetic oligonucleotide
acguuaaaggaacagugga

SEQ ID NO: 1749545 - RNA, 19 nt, Artificial Sequence
  Description of Artificial Sequence: Synthetic oligonucleotide
acagacagcucuaccaugc

SEQ ID NO: 1749546 - RNA, 19 nt, Artificial Sequence
  Description of Artificial Sequence: Synthetic oligonucleotide
ugucccaacaagaggacgu

SEQ ID NO: 1749547 - RNA, 19 nt, Artificial Sequence
  Description of Artificial Sequence: Synthetic oligonucleotide
cacagugacaaccaugcac

SEQ ID NO: 1749548 - RNA, 19 nt, Artificial Sequence
  Description of Artificial Sequence: Synthetic oligonucleotide
agcucuaccaugcaugcgu

SEQ ID NO: 1749549 - RNA, 19 nt, Artificial Sequence
  Description of Artificial Sequence: Synthetic oligonucleotide
aauacacucuucagagagg

SEQ ID NO: 1749550 - RNA, 19 nt, Artificial Sequence
  Description of Artificial Sequence: Synthetic oligonucleotide
cacacacacacacacacac

SEQ ID NO: 1749551 - RNA, 19 nt, Artificial Sequence
  Description of Artificial Sequence: Synthetic oligonucleotide
uuauggugcuccacucugg

SEQ ID NO: 1749552 - RNA, 19 nt, Artificial Sequence
  Description of Artificial Sequence: Synthetic oligonucleotide
  modified_base (6)..(6): a, c, u, g, unknown or other
cugccngaagaccagcucg

SEQ ID NO: 1749553 - RNA, 19 nt, Artificial Sequence
  Description of Artificial Sequence: Synthetic oligonucleotide
  modified_base (14)..(14): a, c, u, g, unknown or other
uccauccacugccngaaga

SEQ ID NO: 1749554 - RNA, 19 nt, Artificial Sequence
  Description of Artificial Sequence: Synthetic oligonucleotide
ucuugcuuuaccagcgcca

SEQ ID NO: 1749555 - RNA, 19 nt, Artificial Sequence
  Description of Artificial Sequence: Synthetic oligonucleotide
  modified_base (7)..(7): a, c, u, g, unknown or other
acugccngaagaccagcuc

SEQ ID NO: 1749556 - RNA, 19 nt, Artificial Sequence
  Description of Artificial Sequence: Synthetic oligonucleotide
  modified_base (18)..(18): a, c, u, g, unknown or other
uguauccauccacugccng

SEQ ID NO: 1749557 - RNA, 19 nt, Artificial Sequence
  Description of Artificial Sequence: Synthetic oligonucleotide
acaaccaugcaccacgaau

SEQ ID NO: 1749558 - RNA, 19 nt, Artificial Sequence
  Description of Artificial Sequence: Synthetic oligonucleotide
cacaauacuuccugcacug

SEQ ID NO: 1749559 - RNA, 19 nt, Artificial Sequence
  Description of Artificial Sequence: Synthetic oligonucleotide
cugaccuaugccuccaacc

SEQ ID NO: 1749560 - RNA, 19 nt, Artificial Sequence
  Description of Artificial Sequence: Synthetic oligonucleotide
  modified_base (10)..(10): a, c, u, g, unknown or other
uccacugccngaagaccag

SEQ ID NO: 1749561 - RNA, 19 nt, Artificial Sequence
  Description of Artificial Sequence: Synthetic oligonucleotide
acuucucaccagccgaugg

SEQ ID NO: 1749562 - RNA, 19 nt, Artificial Sequence
  Description of Artificial Sequence: Synthetic oligonucleotide
cagccuucggaacaaaggc

SEQ ID NO: 1749563 - RNA, 19 nt, Artificial Sequence
  Description of Artificial Sequence: Synthetic oligonucleotide
uccucugagacccuauaaa

SEQ ID NO: 1749564 - RNA, 19 nt, Artificial Sequence
  Description of Artificial Sequence: Synthetic oligonucleotide
gaacaaaggccuucuguac

SEQ ID NO: 1749565 - RNA, 19 nt, Artificial Sequence
  Description of Artificial Sequence: Synthetic oligonucleotide
uauggugcuccacucuggc

SEQ ID NO: 1749566 - RNA, 19 nt, Artificial Sequence
  Description of Artificial Sequence: Synthetic oligonucleotide
  modified_base (7)..(7): a, c, u, g, unknown or other
acacacngcggaucugaac

SEQ ID NO: 1749567 - RNA, 19 nt, Artificial Sequence
  Description of Artificial Sequence: Synthetic oligonucleotide
cauccuggggccuucagug

SEQ ID NO: 1749568 - RNA, 19 nt, Artificial Sequence
  Description of Artificial Sequence: Synthetic oligonucleotide
gacagcucuaccaugcaug

SEQ ID NO: 1749569 - RNA, 19 nt, Artificial Sequence
  Description of Artificial Sequence: Synthetic oligonucleotide
gaagccugggcuaggagag

SEQ ID NO: 1749570 - RNA, 19 nt, Artificial Sequence
  Description of Artificial Sequence: Synthetic oligonucleotide
ccuauaaagaccccuacac

SEQ ID NO: 1749571 - RNA, 19 nt, Artificial Sequence
  Description of Artificial Sequence: Synthetic oligonucleotide
gacucuccgacgaacaggc

SEQ ID NO: 1749572 - RNA, 19 nt, Artificial Sequence
  Description of Artificial Sequence: Synthetic oligonucleotide
aaggccuucuguacacgcc

SEQ ID NO: 1749573 - RNA, 19 nt, Artificial Sequence
  Description of Artificial Sequence: Synthetic oligonucleotide
aggccuucuguacacgccg

SEQ ID NO: 1749574 - RNA, 19 nt, Artificial Sequence
  Description of Artificial Sequence: Synthetic oligonucleotide
auccaaaucaagccaggca

SEQ ID NO: 1749575 - RNA, 19 nt, Artificial Sequence
  Description of Artificial Sequence: Synthetic oligonucleotide
uucuguacacgccgaagcu

SEQ ID NO: 1749576 - RNA, 19 nt, Artificial Sequence
  Description of Artificial Sequence: Synthetic oligonucleotide
ugcuuuaccagcgccagcu

SEQ ID NO: 1749577 - RNA, 19 nt, Artificial Sequence
  Description of Artificial Sequence: Synthetic oligonucleotide
  modified_base (16)..(16): a, c, u, g, unknown or other
uauccauccacugccngaa

SEQ ID NO: 1749578 - RNA, 19 nt, Artificial Sequence
  Description of Artificial Sequence: Synthetic oligonucleotide
caacaagaggacguuaaag

SEQ ID NO: 1749579 - RNA, 19 nt, Artificial Sequence
  Description of Artificial Sequence: Synthetic oligonucleotide
ucuguaguuggugcaauac

SEQ ID NO: 1749580 - RNA, 19 nt, Artificial Sequence
  Description of Artificial Sequence: Synthetic oligonucleotide
uguccuuacuucucaccag

SEQ ID NO: 1749581 - RNA, 19 nt, Artificial Sequence
  Description of Artificial Sequence: Synthetic oligonucleotide
caucccaccaggcuguggc

SEQ ID NO: 1749582 - RNA, 19 nt, Artificial Sequence
  Description of Artificial Sequence: Synthetic oligonucleotide
cugagacccuauaaagacc

SEQ ID NO: 1749583 - RNA, 19 nt, Artificial Sequence
  Description of Artificial Sequence: Synthetic oligonucleotide
caaaucaagccaggcaggg

SEQ ID NO: 1749584 - RNA, 19 nt, Artificial Sequence
  Description of Artificial Sequence: Synthetic oligonucleotide
aggagagagccaucccacc

SEQ ID NO: 1749585 - RNA, 19 nt, Artificial Sequence
  Description of Artificial Sequence: Synthetic oligonucleotide
auggcgacuccaaaacugc

SEQ ID NO: 1749586 - RNA, 19 nt, Artificial Sequence
  Description of Artificial Sequence: Synthetic oligonucleotide
acgaacaggcauccagaac

SEQ ID NO: 1749587 - RNA, 19 nt, Artificial Sequence
  Description of Artificial Sequence: Synthetic oligonucleotide
accacgaauaucccagugu

SEQ ID NO: 1749588 - RNA, 19 nt, Artificial Sequence
  Description of Artificial Sequence: Synthetic oligonucleotide
gaacuguauccauccacug

SEQ ID NO: 1749589 - RNA, 19 nt, Artificial Sequence
  Description of Artificial Sequence: Synthetic oligonucleotide
  modified_base (5)..(5): a, c, u, g, unknown or other
ugccngaagaccagcucgc

SEQ ID NO: 1749590 - RNA, 19 nt, Artificial Sequence
  Description of Artificial Sequence: Synthetic oligonucleotide
aucccagugucccaacaag

SEQ ID NO: 1749591 - RNA, 19 nt, Artificial Sequence
  Description of Artificial Sequence: Synthetic oligonucleotide
aaacauacacacacacaca

SEQ ID NO: 1749592 - RNA, 19 nt, Artificial Sequence
  Description of Artificial Sequence: Synthetic oligonucleotide
auaaagaccccuacacaag

SEQ ID NO: 1749593 - RNA, 19 nt, Artificial Sequence
  Description of Artificial Sequence: Synthetic oligonucleotide
cuucucaccagccgauggg

SEQ ID NO: 1749594 - RNA, 19 nt, Artificial Sequence
  Description of Artificial Sequence: Synthetic oligonucleotide
agaacuguauccauccacu

SEQ ID NO: 1749595 - RNA, 19 nt, Artificial Sequence
  Description of Artificial Sequence: Synthetic oligonucleotide
uguccugaucaccuuggcu

SEQ ID NO: 1749596 - RNA, 19 nt, Artificial Sequence
  Description of Artificial Sequence: Synthetic oligonucleotide
ggaggacuagcccauggcg

SEQ ID NO: 1749597 - RNA, 19 nt, Artificial Sequence
  Description of Artificial Sequence: Synthetic oligonucleotide
aaccaugcaccacgaauau

SEQ ID NO: 1749598 - RNA, 19 nt, Artificial Sequence
  Description of Artificial Sequence: Synthetic oligonucleotide
ucuccgacgaacaggcauc

SEQ ID NO: 1749599 - RNA, 19 nt, Artificial Sequence
  Description of Artificial Sequence: Synthetic oligonucleotide
ucccagugucccaacaaga

SEQ ID NO: 1749600 - RNA, 19 nt, Artificial Sequence
  Description of Artificial Sequence: Synthetic oligonucleotide
ggugcaauacacucuucag

SEQ ID NO: 1749601 - RNA, 19 nt, Artificial Sequence
  Description of Artificial Sequence: Synthetic oligonucleotide
uccaagagcuguuccacuc

SEQ ID NO: 1749602 - RNA, 19 nt, Artificial Sequence
  Description of Artificial Sequence: Synthetic oligonucleotide
uccugaucaccuuggcugc

SEQ ID NO: 1749603 - RNA, 19 nt, Artificial Sequence
  Description of Artificial Sequence: Synthetic oligonucleotide
cuguacacgccgaagcuuc

SEQ ID NO: 1749604 - RNA, 19 nt, Artificial Sequence
  Description of Artificial Sequence: Synthetic oligonucleotide
  modified_base (11)..(11): a, c, u, g, unknown or other
acacacacacngcggaucu

SEQ ID NO: 1749605 - RNA, 19 nt, Artificial Sequence
  Description of Artificial Sequence: Synthetic oligonucleotide
ugacucuguaguuggugca

SEQ ID NO: 1749606 - RNA, 19 nt, Artificial Sequence
  Description of Artificial Sequence: Synthetic oligonucleotide
uaucccagugucccaacaa

SEQ ID NO: 1749607 - RNA, 19 nt, Artificial Sequence
  Description of Artificial Sequence: Synthetic oligonucleotide
acaagugggcacauccugg

SEQ ID NO: 1749608 - RNA, 19 nt, Artificial Sequence
  Description of Artificial Sequence: Synthetic oligonucleotide
  modified_base (5)..(5): a, c, u, g, unknown or other
acacngcggaucugaacuc

SEQ ID NO: 1749609 - RNA, 19 nt, Artificial Sequence
  Description of Artificial Sequence: Synthetic oligonucleotide
auggugcuccacucuggcc

SEQ ID NO: 1749610 - RNA, 19 nt, Artificial Sequence
  Description of Artificial Sequence: Synthetic oligonucleotide
cacaccacgcuagagcccg

SEQ ID NO: 1749611 - RNA, 19 nt, Artificial Sequence
  Description of Artificial Sequence: Synthetic oligonucleotide
ggacguuaaaggaacagug

SEQ ID NO: 1749612 - RNA, 19 nt, Artificial Sequence
  Description of Artificial Sequence: Synthetic oligonucleotide
guuacuggauggcucccag

SEQ ID NO: 1749613 - RNA, 19 nt, Artificial Sequence
  Description of Artificial Sequence: Synthetic oligonucleotide
gaggcacaauacuuccugc

SEQ ID NO: 1749614 - RNA, 19 nt, Artificial Sequence
  Description of Artificial Sequence: Synthetic oligonucleotide
ggcuggugaggucacagcg

SEQ ID NO: 1749615 - RNA, 19 nt, Artificial Sequence
  Description of Artificial Sequence: Synthetic oligonucleotide
cacgaauaucccagugucc

SEQ ID NO: 1749616 - RNA, 19 nt, Artificial Sequence
  Description of Artificial Sequence: Synthetic oligonucleotide
agagaucaugggcagcacu

SEQ ID NO: 1749617 - RNA, 19 nt, Artificial Sequence
  Description of Artificial Sequence: Synthetic oligonucleotide
cuugcuuuaccagcgccag

SEQ ID NO: 1749618 - RNA, 19 nt, Artificial Sequence
  Description of Artificial Sequence: Synthetic oligonucleotide
caagaggacguuaaaggaa

SEQ ID NO: 1749619 - RNA, 19 nt, Artificial Sequence
  Description of Artificial Sequence: Synthetic oligonucleotide
agggcagcagccugguauc

SEQ ID NO: 1749620 - RNA, 19 nt, Artificial Sequence
  Description of Artificial Sequence: Synthetic oligonucleotide
uuacuucucaccagccgau

SEQ ID NO: 1749621 - RNA, 19 nt, Artificial Sequence
  Description of Artificial Sequence: Synthetic oligonucleotide
cacaagugggcacauccug

SEQ ID NO: 1749622 - RNA, 19 nt, Artificial Sequence
  Description of Artificial Sequence: Synthetic oligonucleotide
aaagaccccuacacaagug

SEQ ID NO: 1749623 - RNA, 19 nt, Artificial Sequence
  Description of Artificial Sequence: Synthetic oligonucleotide
gaucugaacuccagcacac

SEQ ID NO: 1749624 - RNA, 19 nt, Artificial Sequence
  Description of Artificial Sequence: Synthetic oligonucleotide
ggaggcacaauacuuccug

SEQ ID NO: 1749625 - RNA, 19 nt, Artificial Sequence
  Description of Artificial Sequence: Synthetic oligonucleotide
  modified_base (14)..(14): a, c, u, g, unknown or other
cacacacacacacngcgga

SEQ ID NO: 1749626 - RNA, 19 nt, Artificial Sequence
  Description of Artificial Sequence: Synthetic oligonucleotide
aggcacaauacuuccugca

SEQ ID NO: 1749627 - RNA, 19 nt, Artificial Sequence
  Description of Artificial Sequence: Synthetic oligonucleotide
ugacuuguccuuacuucuc

SEQ ID NO: 1749628 - RNA, 19 nt, Artificial Sequence
  Description of Artificial Sequence: Synthetic oligonucleotide
caccaacucccuuucgacc

SEQ ID NO: 1749629 - RNA, 19 nt, Artificial Sequence
  Description of Artificial Sequence: Synthetic oligonucleotide
aggacguuaaaggaacagu

SEQ ID NO: 1749630 - RNA, 19 nt, Artificial Sequence
  Description of Artificial Sequence: Synthetic oligonucleotide
  modified_base (17)..(17): a, c, u, g, unknown or other
acacacacacacacacngc

SEQ ID NO: 1749631 - RNA, 19 nt, Artificial Sequence
  Description of Artificial Sequence: Synthetic oligonucleotide
cagacggauguucucacuc

SEQ ID NO: 1749632 - RNA, 19 nt, Artificial Sequence
  Description of Artificial Sequence: Synthetic oligonucleotide
caagagcuguuccacucag

SEQ ID NO: 1749633 - RNA, 19 nt, Artificial Sequence
  Description of Artificial Sequence: Synthetic oligonucleotide
ccucugagacccuauaaag

SEQ ID NO: 1749634 - RNA, 19 nt, Artificial Sequence
  Description of Artificial Sequence: Synthetic oligonucleotide
caugcaccacgaauauccc

SEQ ID NO: 1749635 - RNA, 19 nt, Artificial Sequence
  Description of Artificial Sequence: Synthetic oligonucleotide
cuuucgaccgcuuccugca

SEQ ID NO: 1749636 - RNA, 19 nt, Artificial Sequence
  Description of Artificial Sequence: Synthetic oligonucleotide
ggugacuuguccuuacuuc

SEQ ID NO: 1749637 - RNA, 19 nt, Artificial Sequence
  Description of Artificial Sequence: Synthetic oligonucleotide
acuguggggcaugugugac

SEQ ID NO: 1749638 - RNA, 19 nt, Artificial Sequence
  Description of Artificial Sequence: Synthetic oligonucleotide
agacggauguucucacucu

SEQ ID NO: 1749639 - RNA, 19 nt, Artificial Sequence
  Description of Artificial Sequence: Synthetic oligonucleotide
aaacugcagccaacagggc

SEQ ID NO: 1749640 - RNA, 19 nt, Artificial Sequence
  Description of Artificial Sequence: Synthetic oligonucleotide
cuugggcuucccaugccgc

SEQ ID NO: 1749641 - RNA, 19 nt, Artificial Sequence
  Description of Artificial Sequence: Synthetic oligonucleotide
aggaacaguggaagagggc

SEQ ID NO: 1749642 - RNA, 19 nt, Artificial Sequence
  Description of Artificial Sequence: Synthetic oligonucleotide
ugugagaccugagcuggcc

SEQ ID NO: 1749643 - RNA, 19 nt, Artificial Sequence
  Description of Artificial Sequence: Synthetic oligonucleotide
aacuucucaggaggacuag

SEQ ID NO: 1749644 - RNA, 19 nt, Artificial Sequence
  Description of Artificial Sequence: Synthetic oligonucleotide
uacuuccugcacugugggg

SEQ ID NO: 1749645 - RNA, 19 nt, Artificial Sequence
  Description of Artificial Sequence: Synthetic oligonucleotide
caaccaugcaccacgaaua

SEQ ID NO: 1749646 - RNA, 19 nt, Artificial Sequence
  Description of Artificial Sequence: Synthetic oligonucleotide
uggccgcugaccuaugccu

SEQ ID NO: 1749647 - RNA, 19 nt, Artificial Sequence
  Description of Artificial Sequence: Synthetic oligonucleotide
uuuggggcggggcaggguu

SEQ ID NO: 1749648 - RNA, 19 nt, Artificial Sequence
  Description of Artificial Sequence: Synthetic oligonucleotide
ggaacaaaggccuucugua

SEQ ID NO: 1749649 - RNA, 19 nt, Artificial Sequence
  Description of Artificial Sequence: Synthetic oligonucleotide
ugacaaccaugcaccacga

SEQ ID NO: 1749650 - RNA, 19 nt, Artificial Sequence
  Description of Artificial Sequence: Synthetic oligonucleotide
uguuccacucaggggaggc

SEQ ID NO: 1749651 - RNA, 19 nt, Artificial Sequence
  Description of Artificial Sequence: Synthetic oligonucleotide
  modified_base (6)..(6): a, c, u, g, unknown or other
cacacngcggaucugaacu

SEQ ID NO: 1749652 - RNA, 19 nt, Artificial Sequence
  Description of Artificial Sequence: Synthetic oligonucleotide
uguacacgccgaagcuucc

SEQ ID NO: 1749653 - RNA, 19 nt, Artificial Sequence
  Description of Artificial Sequence: Synthetic oligonucleotide
gagcccauguuccagagau

SEQ ID NO: 1749654 - RNA, 19 nt, Artificial Sequence
  Description of Artificial Sequence: Synthetic oligonucleotide
uucggaacaaaggccuucu

SEQ ID NO: 1749655 - RNA, 19 nt, Artificial Sequence
  Description of Artificial Sequence: Synthetic oligonucleotide
accuaugccuccaaccuug

SEQ ID NO: 1749656 - RNA, 19 nt, Artificial Sequence
  Description of Artificial Sequence: Synthetic oligonucleotide
aagagcuguuccacucagg

SEQ ID NO: 1749657 - RNA, 19 nt, Artificial Sequence
  Description of Artificial Sequence: Synthetic oligonucleotide
cauccaagagcuguuccac

SEQ ID NO: 1749658 - RNA, 19 nt, Artificial Sequence
  Description of Artificial Sequence: Synthetic oligonucleotide
ggaucugaacuccagcaca

SEQ ID NO: 1749659 - RNA, 19 nt, Artificial Sequence
  Description of Artificial Sequence: Synthetic oligonucleotide
agaccccuacacaaguggg

SEQ ID NO: 1749660 - RNA, 19 nt, Artificial Sequence
  Description of Artificial Sequence: Synthetic oligonucleotide
  modified_base (17)..(17): a, c, u, g, unknown or other
guauccauccacugccnga

SEQ ID NO: 1749661 - RNA, 19 nt, Artificial Sequence
  Description of Artificial Sequence: Synthetic oligonucleotide
gccgauggggucuuugggg

SEQ ID NO: 1749662 - RNA, 19 nt, Artificial Sequence
  Description of Artificial Sequence: Synthetic oligonucleotide
uggugacuuguccuuacuu

SEQ ID NO: 1749663 - RNA, 19 nt, Artificial Sequence
  Description of Artificial Sequence: Synthetic oligonucleotide
gugugacuccagcacagug

SEQ ID NO: 1749664 - RNA, 19 nt, Artificial Sequence
  Description of Artificial Sequence: Synthetic oligonucleotide
agcagccugguauccccac

SEQ ID NO: 1749665 - RNA, 19 nt, Artificial Sequence
  Description of Artificial Sequence: Synthetic oligonucleotide
gaacaggcauccagaacug

SEQ ID NO: 1749666 - RNA, 19 nt, Artificial Sequence
  Description of Artificial Sequence: Synthetic oligonucleotide
  modified_base (15)..(15): a, c, u, g, unknown or other
acacacacacacacngcgg

SEQ ID NO: 1749667 - RNA, 19 nt, Artificial Sequence
  Description of Artificial Sequence: Synthetic oligonucleotide
gacggauguucucacucuc

SEQ ID NO: 1749668 - RNA, 19 nt, Artificial Sequence
  Description of Artificial Sequence: Synthetic oligonucleotide
aguuggugcaauacacucu

SEQ ID NO: 1749669 - RNA, 19 nt, Artificial Sequence
  Description of Artificial Sequence: Synthetic oligonucleotide
cuucccaugccgcccgccg

SEQ ID NO: 1749670 - RNA, 19 nt, Artificial Sequence
  Description of Artificial Sequence: Synthetic oligonucleotide
  modified_base (9)..(9): a, c, u, g, unknown or other
acacacacngcggaucuga

SEQ ID NO: 1749671 - RNA, 19 nt, Artificial Sequence
  Description of Artificial Sequence: Synthetic oligonucleotide
uccagacggauguucucac

SEQ ID NO: 1749672 - RNA, 19 nt, Artificial Sequence
  Description of Artificial Sequence: Synthetic oligonucleotide
agccaacagggcucuggac

SEQ ID NO: 1749673 - RNA, 19 nt, Artificial Sequence
  Description of Artificial Sequence: Synthetic oligonucleotide
agacccuauaaagaccccu

SEQ ID NO: 1749674 - RNA, 19 nt, Artificial Sequence
  Description of Artificial Sequence: Synthetic oligonucleotide
  modified_base (12)..(12): a, c, u, g, unknown or other
cauccacugccngaagacc

SEQ ID NO: 1749675 - RNA, 19 nt, Artificial Sequence
  Description of Artificial Sequence: Synthetic oligonucleotide
gacgaacaggcauccagaa

SEQ ID NO: 1749676 - RNA, 19 nt, Artificial Sequence
  Description of Artificial Sequence: Synthetic oligonucleotide
gaggacuagcccauggcga

SEQ ID NO: 1749677 - RNA, 19 nt, Artificial Sequence
  Description of Artificial Sequence: Synthetic oligonucleotide
  modified_base (4)..(4): a, c, u, g, unknown or other
cacngcggaucugaacucc

SEQ ID NO: 1749678 - RNA, 19 nt, Artificial Sequence
  Description of Artificial Sequence: Synthetic oligonucleotide
uggggcaugugugacucca

SEQ ID NO: 1749679 - RNA, 19 nt, Artificial Sequence
  Description of Artificial Sequence: Synthetic oligonucleotide
acuccagcacagugacaac

SEQ ID NO: 1749680 - RNA, 19 nt, Artificial Sequence
  Description of Artificial Sequence: Synthetic oligonucleotide
uuaccagcgccagcucacg

SEQ ID NO: 1749681 - RNA, 19 nt, Artificial Sequence
  Description of Artificial Sequence: Synthetic oligonucleotide
gaccccuacacaagugggc

SEQ ID NO: 1749682 - RNA, 19 nt, Artificial Sequence
  Description of Artificial Sequence: Synthetic oligonucleotide
ucucaccagccgauggggu

SEQ ID NO: 1749683 - RNA, 19 nt, Artificial Sequence
  Description of Artificial Sequence: Synthetic oligonucleotide
ggcacaauacuuccugcac

SEQ ID NO: 1749684 - RNA, 19 nt, Artificial Sequence
  Description of Artificial Sequence: Synthetic oligonucleotide
cacgcuagagcccgcuggc

SEQ ID NO: 1749685 - RNA, 19 nt, Artificial Sequence
  Description of Artificial Sequence: Synthetic oligonucleotide
uggcgacuccaaaacugca

SEQ ID NO: 1749686 - RNA, 19 nt, Artificial Sequence
  Description of Artificial Sequence: Synthetic oligonucleotide
uccaaccuugggcuuccca

SEQ ID NO: 1749687 - RNA, 19 nt, Artificial Sequence
  Description of Artificial Sequence: Synthetic oligonucleotide
acuagcccauggcgacucc

SEQ ID NO: 1749688 - RNA, 19 nt, Artificial Sequence
  Description of Artificial Sequence: Synthetic oligonucleotide
gaagcugcugaccguucuc

SEQ ID NO: 1749689 - RNA, 19 nt, Artificial Sequence
  Description of Artificial Sequence: Synthetic oligonucleotide
augcaccacgaauauccca

SEQ ID NO: 1749690 - RNA, 19 nt, Artificial Sequence
  Description of Artificial Sequence: Synthetic oligonucleotide
gcuagagcccgcuggcugg

SEQ ID NO: 1749691 - RNA, 19 nt, Artificial Sequence
  Description of Artificial Sequence: Synthetic oligonucleotide
gugucccaacaagaggacg

SEQ ID NO: 1749692 - RNA, 19 nt, Artificial Sequence
  Description of Artificial Sequence: Synthetic oligonucleotide
cacucaguguccugaucac

SEQ ID NO: 1749693 - RNA, 19 nt, Artificial Sequence
  Description of Artificial Sequence: Synthetic oligonucleotide
cuggccgcugaccuaugcc

SEQ ID NO: 1749694 - RNA, 19 nt, Artificial Sequence
  Description of Artificial Sequence: Synthetic oligonucleotide
ccuuacuucucaccagccg

SEQ ID NO: 1749695 - RNA, 19 nt, Artificial Sequence
  Description of Artificial Sequence: Synthetic oligonucleotide
ggggaggcacaauacuucc

SEQ ID NO: 1749696 - RNA, 19 nt, Artificial Sequence
  Description of Artificial Sequence: Synthetic oligonucleotide
cagggcucccauccaagag

SEQ ID NO: 1749697 - RNA, 19 nt, Artificial Sequence
  Description of Artificial Sequence: Synthetic oligonucleotide
uugcuuuaccagcgccagc

SEQ ID NO: 1749698 - RNA, 19 nt, Artificial Sequence
  Description of Artificial Sequence: Synthetic oligonucleotide
uugugagaccugagcuggc

SEQ ID NO: 1749699 - RNA, 19 nt, Artificial Sequence
  Description of Artificial Sequence: Synthetic oligonucleotide
ccacgaauaucccaguguc

SEQ ID NO: 1749700 - RNA, 19 nt, Artificial Sequence
  Description of Artificial Sequence: Synthetic oligonucleotide
ucuguacacgccgaagcuu

SEQ ID NO: 1749701 - RNA, 19 nt, Artificial Sequence
  Description of Artificial Sequence: Synthetic oligonucleotide
cuaugccuccaaccuuggg

SEQ ID NO: 1749702 - RNA, 19 nt, Artificial Sequence
  Description of Artificial Sequence: Synthetic oligonucleotide
accccuacacaagugggca

SEQ ID NO: 1749703 - RNA, 19 nt, Artificial Sequence
  Description of Artificial Sequence: Synthetic oligonucleotide
aacaggcauccagaacugu

SEQ ID NO: 1749704 - RNA, 19 nt, Artificial Sequence
  Description of Artificial Sequence: Synthetic oligonucleotide
ugguauccccacagacagc

SEQ ID NO: 1749705 - RNA, 19 nt, Artificial Sequence
  Description of Artificial Sequence: Synthetic oligonucleotide
ggacucuccgacgaacagg

SEQ ID NO: 1749706 - RNA, 19 nt, Artificial Sequence
  Description of Artificial Sequence: Synthetic oligonucleotide
acauacacacacacacaca

SEQ ID NO: 1749707 - RNA, 19 nt, Artificial Sequence
  Description of Artificial Sequence: Synthetic oligonucleotide
acugugggcuggugagguc

SEQ ID NO: 1749708 - RNA, 19 nt, Artificial Sequence
  Description of Artificial Sequence: Synthetic oligonucleotide
caaaggccuucuguacacg

SEQ ID NO: 1749709 - RNA, 19 nt, Artificial Sequence
  Description of Artificial Sequence: Synthetic oligonucleotide
caccacgaauaucccagug

SEQ ID NO: 1749710 - RNA, 19 nt, Artificial Sequence
  Description of Artificial Sequence: Synthetic oligonucleotide
cugcaacucuugcuuuacc

SEQ ID NO: 1749711 - RNA, 19 nt, Artificial Sequence
  Description of Artificial Sequence: Synthetic oligonucleotide
ucccuuucgaccgcuuccu

SEQ ID NO: 1749712 - RNA, 19 nt, Artificial Sequence
  Description of Artificial Sequence: Synthetic oligonucleotide
caugcaugcguaggucccc

SEQ ID NO: 1749713 - RNA, 19 nt, Artificial Sequence
  Description of Artificial Sequence: Synthetic oligonucleotide
ugcguagguccccuccaaa

SEQ ID NO: 1749714 - RNA, 19 nt, Artificial Sequence
  Description of Artificial Sequence: Synthetic oligonucleotide
ugugggcuggugaggucac

SEQ ID NO: 1749715 - RNA, 19 nt, Artificial Sequence
  Description of Artificial Sequence: Synthetic oligonucleotide
uagcccauggcgacuccaa

SEQ ID NO: 1749716 - RNA, 19 nt, Artificial Sequence
  Description of Artificial Sequence: Synthetic oligonucleotide
accaugcaccacgaauauc

SEQ ID NO: 1749717 - RNA, 19 nt, Artificial Sequence
  Description of Artificial Sequence: Synthetic oligonucleotide
agcacacaccacgcuagag

SEQ ID NO: 1749718 - RNA, 19 nt, Artificial Sequence
  Description of Artificial Sequence: Synthetic oligonucleotide
agagcccgcuggcugggag

SEQ ID NO: 1749719 - RNA, 19 nt, Artificial Sequence
  Description of Artificial Sequence: Synthetic oligonucleotide
cuucggaacaaaggccuuc

SEQ ID NO: 1749720 - RNA, 19 nt, Artificial Sequence
  Description of Artificial Sequence: Synthetic oligonucleotide
  modified_base (2)..(2): a, c, u, g, unknown or other
cngcggaucugaacuccag

SEQ ID NO: 1749721 - RNA, 19 nt, Artificial Sequence
  Description of Artificial Sequence: Synthetic oligonucleotide
ccgacgaacaggcauccag

SEQ ID NO: 1749722 - RNA, 19 nt, Artificial Sequence
  Description of Artificial Sequence: Synthetic oligonucleotide
gcggaucugaacuccagca

SEQ ID NO: 1749723 - RNA, 19 nt, Artificial Sequence
  Description of Artificial Sequence: Synthetic oligonucleotide
auacacacacacacacaca

SEQ ID NO: 1749724 - RNA, 19 nt, Artificial Sequence
  Description of Artificial Sequence: Synthetic oligonucleotide
agcagccuucggaacaaag

SEQ ID NO: 1749725 - RNA, 19 nt, Artificial Sequence
  Description of Artificial Sequence: Synthetic oligonucleotide
ccuuucgaccgcuuccugc

SEQ ID NO: 1749726 - RNA, 19 nt, Artificial Sequence
  Description of Artificial Sequence: Synthetic oligonucleotide
ggcuaggagagagccaucc

SEQ ID NO: 1749727 - RNA, 19 nt, Artificial Sequence
  Description of Artificial Sequence: Synthetic oligonucleotide
acggagcccauguuccaga

SEQ ID NO: 1749728 - RNA, 19 nt, Artificial Sequence
  Description of Artificial Sequence: Synthetic oligonucleotide
ugugugacuccagcacagu

SEQ ID NO: 1749729 - RNA, 19 nt, Artificial Sequence
  Description of Artificial Sequence: Synthetic oligonucleotide
ccgauggggucuuuggggc

SEQ ID NO: 1749730 - RNA, 19 nt, Artificial Sequence
  Description of Artificial Sequence: Synthetic oligonucleotide
ccaugcaugcguagguccc

SEQ ID NO: 1749731 - RNA, 19 nt, Artificial Sequence
  Description of Artificial Sequence: Synthetic oligonucleotide
ggcgacuccaaaacugcag

SEQ ID NO: 1749732 - RNA, 19 nt, Artificial Sequence
  Description of Artificial Sequence: Synthetic oligonucleotide
cccauggcgacuccaaaac

SEQ ID NO: 1749733 - RNA, 19 nt, Artificial Sequence
  Description of Artificial Sequence: Synthetic oligonucleotide
gcagcagccugguaucccc

SEQ ID NO: 1749734 - RNA, 19 nt, Artificial Sequence
  Description of Artificial Sequence: Synthetic oligonucleotide
acaauacuuccugcacugu

SEQ ID NO: 1749735 - RNA, 19 nt, Artificial Sequence
  Description of Artificial Sequence: Synthetic oligonucleotide
gacccuauaaagaccccua

SEQ ID NO: 1749736 - RNA, 19 nt, Artificial Sequence
  Description of Artificial Sequence: Synthetic oligonucleotide
acacaagugggcacauccu

SEQ ID NO: 1749737 - RNA, 19 nt, Artificial Sequence
  Description of Artificial Sequence: Synthetic oligonucleotide
uuucgaccgcuuccugcaa

SEQ ID NO: 1749738 - RNA, 19 nt, Artificial Sequence
  Description of Artificial Sequence: Synthetic oligonucleotide
acucuggccgcugaccuau

SEQ ID NO: 1749739 - RNA, 19 nt, Artificial Sequence
  Description of Artificial Sequence: Synthetic oligonucleotide
gcccauguuccagagauca

SEQ ID NO: 1749740 - RNA, 19 nt, Artificial Sequence
  Description of Artificial Sequence: Synthetic oligonucleotide
caaacuucucaggaggacu

SEQ ID NO: 1749741 - RNA, 19 nt, Artificial Sequence
  Description of Artificial Sequence: Synthetic oligonucleotide
gggacucuccgacgaacag

SEQ ID NO: 1749742 - RNA, 19 nt, Artificial Sequence
  Description of Artificial Sequence: Synthetic oligonucleotide
acaggcauccagaacugua

SEQ ID NO: 1749743 - RNA, 19 nt, Artificial Sequence
  Description of Artificial Sequence: Synthetic oligonucleotide
cgaacaggcauccagaacu

SEQ ID NO: 1749744 - RNA, 19 nt, Artificial Sequence
  Description of Artificial Sequence: Synthetic oligonucleotide
  modified_base (19)..(19): a, c, u, g, unknown or other
acacacacacacacacacn

SEQ ID NO: 1749745 - RNA, 19 nt, Artificial Sequence
  Description of Artificial Sequence: Synthetic oligonucleotide
caugcguagguccccucca

SEQ ID NO: 1749746 - RNA, 19 nt, Artificial Sequence
  Description of Artificial Sequence: Synthetic oligonucleotide
cuccgacgaacaggcaucc

SEQ ID NO: 1749747 - RNA, 19 nt, Artificial Sequence
  Description of Artificial Sequence: Synthetic oligonucleotide
  modified_base (19)..(19): a, c, u, g, unknown or other
cuguauccauccacugccn

SEQ ID NO: 1749748 - RNA, 19 nt, Artificial Sequence
  Description of Artificial Sequence: Synthetic oligonucleotide
gcaugcguagguccccucc

SEQ ID NO: 1749749 - RNA, 19 nt, Artificial Sequence
  Description of Artificial Sequence: Synthetic oligonucleotide
gguauccccacagacagcu

SEQ ID NO: 1749750 - RNA, 19 nt, Artificial Sequence
  Description of Artificial Sequence: Synthetic oligonucleotide
  modified_base (3)..(3): a, c, u, g, unknown or other
ccngaagaccagcucgcag

SEQ ID NO: 1749751 - RNA, 19 nt, Artificial Sequence
  Description of Artificial Sequence: Synthetic oligonucleotide
gcuaggagagagccauccc

SEQ ID NO: 1749752 - RNA, 19 nt, Artificial Sequence
  Description of Artificial Sequence: Synthetic oligonucleotide
gcuacauccuggacacagg

SEQ ID NO: 1749753 - RNA, 19 nt, Artificial Sequence
  Description of Artificial Sequence: Synthetic oligonucleotide
gcugcuuugugagaccuga

SEQ ID NO: 1749754 - RNA, 19 nt, Artificial Sequence
  Description of Artificial Sequence: Synthetic oligonucleotide
ccacgcuagagcccgcugg

SEQ ID NO: 1749755 - RNA, 19 nt, Artificial Sequence
  Description of Artificial Sequence: Synthetic oligonucleotide
gcucacggagcccauguuc

SEQ ID NO: 1749756 - RNA, 19 nt, Artificial Sequence
  Description of Artificial Sequence: Synthetic oligonucleotide
ccaaagcugccuccagacg

SEQ ID NO: 1749757 - RNA, 19 nt, Artificial Sequence
  Description of Artificial Sequence: Synthetic oligonucleotide
ccaccaacucccuuucgac

SEQ ID NO: 1749758 - RNA, 19 nt, Artificial Sequence
  Description of Artificial Sequence: Synthetic oligonucleotide
cacuguggggcauguguga

SEQ ID NO: 1749759 - RNA, 19 nt, Artificial Sequence
  Description of Artificial Sequence: Synthetic oligonucleotide
acacacacacacacacaca

SEQ ID NO: 1749760 - RNA, 19 nt, Artificial Sequence
  Description of Artificial Sequence: Synthetic oligonucleotide
cacggagcccauguuccag

SEQ ID NO: 1749761 - RNA, 19 nt, Artificial Sequence
  Description of Artificial Sequence: Synthetic oligonucleotide
cuagagcccgcuggcuggg

SEQ ID NO: 1749762 - RNA, 19 nt, Artificial Sequence
  Description of Artificial Sequence: Synthetic oligonucleotide
ugggguccuggugacuugu

SEQ ID NO: 1749763 - RNA, 19 nt, Artificial Sequence
  Description of Artificial Sequence: Synthetic oligonucleotide
accacgcuagagcccgcug

SEQ ID NO: 1749764 - RNA, 19 nt, Artificial Sequence
  Description of Artificial Sequence: Synthetic oligonucleotide
cagggcucuggaccucugc

SEQ ID NO: 1749765 - RNA, 19 nt, Artificial Sequence
  Description of Artificial Sequence: Synthetic oligonucleotide
gcaauacacucuucagaga

SEQ ID NO: 1749766 - RNA, 19 nt, Artificial Sequence
  Description of Artificial Sequence: Synthetic oligonucleotide
gcguagguccccuccaaac

SEQ ID NO: 1749767 - RNA, 19 nt, Artificial Sequence
  Description of Artificial Sequence: Synthetic oligonucleotide
ucacagcgggacucuccga

SEQ ID NO: 1749768 - RNA, 19 nt, Artificial Sequence
  Description of Artificial Sequence: Synthetic oligonucleotide
guacacgccgaagcuuccc

SEQ ID NO: 1749769 - RNA, 19 nt, Artificial Sequence
  Description of Artificial Sequence: Synthetic oligonucleotide
  modified_base (3)..(3): a, c, u, g, unknown or other
acngcggaucugaacucca

SEQ ID NO: 1749770 - RNA, 19 nt, Artificial Sequence
  Description of Artificial Sequence: Synthetic oligonucleotide
gccaccaacucccuuucga

SEQ ID NO: 1749771 - RNA, 19 nt, Artificial Sequence
  Description of Artificial Sequence: Synthetic oligonucleotide
cagaagcugcugaccguuc

SEQ ID NO: 1749772 - RNA, 19 nt, Artificial Sequence
  Description of Artificial Sequence: Synthetic oligonucleotide
cuaccaugcaugcguaggu

SEQ ID NO: 1749773 - RNA, 19 nt, Artificial Sequence
  Description of Artificial Sequence: Synthetic oligonucleotide
  modified_base (10)..(10): a, c, u, g, unknown or other
cacacacacngcggaucug

SEQ ID NO: 1749774 - RNA, 19 nt, Artificial Sequence
  Description of Artificial Sequence: Synthetic oligonucleotide
cagcucuaccaugcaugcg

SEQ ID NO: 1749775 - RNA, 19 nt, Artificial Sequence
  Description of Artificial Sequence: Synthetic oligonucleotide
augcguagguccccuccaa

SEQ ID NO: 1749776 - RNA, 19 nt, Artificial Sequence
  Description of Artificial Sequence: Synthetic oligonucleotide
agugaccaggagccaugau

SEQ ID NO: 1749777 - RNA, 19 nt, Artificial Sequence
  Description of Artificial Sequence: Synthetic oligonucleotide
guagguccccuccaaacuu

SEQ ID NO: 1749778 - RNA, 19 nt, Artificial Sequence
  Description of Artificial Sequence: Synthetic oligonucleotide
ucccaacaagaggacguua

SEQ ID NO: 1749779 - RNA, 19 nt, Artificial Sequence
  Description of Artificial Sequence: Synthetic oligonucleotide
cacgccggccccagucugc

SEQ ID NO: 1749780 - RNA, 19 nt, Artificial Sequence
  Description of Artificial Sequence: Synthetic oligonucleotide
cuguggcuacauccuggac

SEQ ID NO: 1749781 - RNA, 19 nt, Artificial Sequence
  Description of Artificial Sequence: Synthetic oligonucleotide
caggcauccagaacuguau

SEQ ID NO: 1749782 - RNA, 19 nt, Artificial Sequence
  Description of Artificial Sequence: Synthetic oligonucleotide
cucuccgacgaacaggcau

SEQ ID NO: 1749783 - RNA, 19 nt, Artificial Sequence
  Description of Artificial Sequence: Synthetic oligonucleotide
gcacaauacuuccugcacu

SEQ ID NO: 1749784 - RNA, 19 nt, Artificial Sequence
  Description of Artificial Sequence: Synthetic oligonucleotide
ggucuuuggggcggggcag

SEQ ID NO: 1749785 - RNA, 19 nt, Artificial Sequence
  Description of Artificial Sequence: Synthetic oligonucleotide
gaccagcucgcagcgccgc

SEQ ID NO: 1749786 - RNA, 19 nt, Artificial Sequence
  Description of Artificial Sequence: Synthetic oligonucleotide
agcccauggcgacuccaaa

SEQ ID NO: 1749787 - RNA, 19 nt, Artificial Sequence
  Description of Artificial Sequence: Synthetic oligonucleotide
  modified_base (13)..(13): a, c, u, g, unknown or other
acacacacacacngcggau

SEQ ID NO: 1749788 - RNA, 19 nt, Artificial Sequence
  Description of Artificial Sequence: Synthetic oligonucleotide
cccaacaagaggacguuaa

SEQ ID NO: 1749789 - RNA, 19 nt, Artificial Sequence
  Description of Artificial Sequence: Synthetic oligonucleotide
ccuaugccuccaaccuugg

SEQ ID NO: 1749790 - RNA, 19 nt, Artificial Sequence
  Description of Artificial Sequence: Synthetic oligonucleotide
ccggggcucagccacuucc

SEQ ID NO: 1749791 - RNA, 19 nt, Artificial Sequence
  Description of Artificial Sequence: Synthetic oligonucleotide
ucgcagcgccgccacucca

SEQ ID NO: 1749792 - RNA, 19 nt, Artificial Sequence
  Description of Artificial Sequence: Synthetic oligonucleotide
gcugaccuaugccuccaac

SEQ ID NO: 1749793 - RNA, 19 nt, Artificial Sequence
  Description of Artificial Sequence: Synthetic oligonucleotide
cguuaaaggaacaguggaa

SEQ ID NO: 1749794 - RNA, 19 nt, Artificial Sequence
  Description of Artificial Sequence: Synthetic oligonucleotide
gcacuguggggcaugugug

SEQ ID NO: 1749795 - RNA, 19 nt, Artificial Sequence
  Description of Artificial Sequence: Synthetic oligonucleotide
cucuguaguuggugcaaua

SEQ ID NO: 1749796 - RNA, 19 nt, Artificial Sequence
  Description of Artificial Sequence: Synthetic oligonucleotide
ccagagaucaugggcagca

SEQ ID NO: 1749797 - RNA, 19 nt, Artificial Sequence
  Description of Artificial Sequence: Synthetic oligonucleotide
cagcacugugggcugguga

SEQ ID NO: 1749798 - RNA, 19 nt, Artificial Sequence
  Description of Artificial Sequence: Synthetic oligonucleotide
ccuggugacuuguccuuac

SEQ ID NO: 1749799 - RNA, 19 nt, Artificial Sequence
  Description of Artificial Sequence: Synthetic oligonucleotide
augcaugcguagguccccu

SEQ ID NO: 1749800 - RNA, 19 nt, Artificial Sequence
  Description of Artificial Sequence: Synthetic oligonucleotide
cccuauaaagaccccuaca

SEQ ID NO: 1749801 - RNA, 19 nt, Artificial Sequence
  Description of Artificial Sequence: Synthetic oligonucleotide
ggucacagcgggacucucc

SEQ ID NO: 1749802 - RNA, 19 nt, Artificial Sequence
  Description of Artificial Sequence: Synthetic oligonucleotide
cagacagcucuaccaugca

SEQ ID NO: 1749803 - RNA, 19 nt, Artificial Sequence
  Description of Artificial Sequence: Synthetic oligonucleotide
ugcaugcguagguccccuc

SEQ ID NO: 1749804 - RNA, 19 nt, Artificial Sequence
  Description of Artificial Sequence: Synthetic oligonucleotide
caggggaggcacaauacuu

SEQ ID NO: 1749805 - RNA, 19 nt, Artificial Sequence
  Description of Artificial Sequence: Synthetic oligonucleotide
uccgacgaacaggcaucca

SEQ ID NO: 1749806 - RNA, 19 nt, Artificial Sequence
  Description of Artificial Sequence: Synthetic oligonucleotide
aagcugccuccagacggau

SEQ ID NO: 1749807 - RNA, 19 nt, Artificial Sequence
  Description of Artificial Sequence: Synthetic oligonucleotide
gaccuaugccuccaaccuu

SEQ ID NO: 1749808 - RNA, 19 nt, Artificial Sequence
  Description of Artificial Sequence: Synthetic oligonucleotide
cagcgccgccacuccaaag

SEQ ID NO: 1749809 - RNA, 19 nt, Artificial Sequence
  Description of Artificial Sequence: Synthetic oligonucleotide
ccuggggccuucagugacc

SEQ ID NO: 1749810 - RNA, 19 nt, Artificial Sequence
  Description of Artificial Sequence: Synthetic oligonucleotide
  modified_base (8)..(8): a, c, u, g, unknown or other
cacacacngcggaucugaa

SEQ ID NO: 1749811 - RNA, 19 nt, Artificial Sequence
  Description of Artificial Sequence: Synthetic oligonucleotide
ccugcaacucuugcuuuac

SEQ ID NO: 1749812 - RNA, 19 nt, Artificial Sequence
  Description of Artificial Sequence: Synthetic oligonucleotide
agcgggacucuccgacgaa

SEQ ID NO: 1749813 - RNA, 19 nt, Artificial Sequence
  Description of Artificial Sequence: Synthetic oligonucleotide
cuagcccauggcgacucca

SEQ ID NO: 1749814 - RNA, 19 nt, Artificial Sequence
  Description of Artificial Sequence: Synthetic oligonucleotide
ccaacucccuuucgaccgc

SEQ ID NO: 1749815 - RNA, 19 nt, Artificial Sequence
  Description of Artificial Sequence: Synthetic oligonucleotide
ggccaccaacucccuuucg

SEQ ID NO: 1749816 - RNA, 19 nt, Artificial Sequence
  Description of Artificial Sequence: Synthetic oligonucleotide
gcccauggcgacuccaaaa

SEQ ID NO: 1749817 - RNA, 19 nt, Artificial Sequence
  Description of Artificial Sequence: Synthetic oligonucleotide
ccaagagcuguuccacuca

SEQ ID NO: 1749818 - RNA, 19 nt, Artificial Sequence
  Description of Artificial Sequence: Synthetic oligonucleotide
  modified_base (8)..(8): a, c, u, g, unknown or other
cacugccngaagaccagcu

SEQ ID NO: 1749819 - RNA, 19 nt, Artificial Sequence
  Description of Artificial Sequence: Synthetic oligonucleotide
gguuacuggauggcuccca

SEQ ID NO: 1749820 - RNA, 19 nt, Artificial Sequence
  Description of Artificial Sequence: Synthetic oligonucleotide
ugccuccaaccuugggcuu

SEQ ID NO: 1749821 - RNA, 19 nt, Artificial Sequence
  Description of Artificial Sequence: Synthetic oligonucleotide
acaccacgcuagagcccgc

SEQ ID NO: 1749822 - RNA, 19 nt, Artificial Sequence
  Description of Artificial Sequence: Synthetic oligonucleotide
cgauggggucuuuggggcg

SEQ ID NO: 1749823 - RNA, 19 nt, Artificial Sequence
  Description of Artificial Sequence: Synthetic oligonucleotide
cuggcccagcagccuucgg

SEQ ID NO: 1749824 - RNA, 19 nt, Artificial Sequence
  Description of Artificial Sequence: Synthetic oligonucleotide
cagcacacaccacgcuaga

SEQ ID NO: 1749825 - RNA, 19 nt, Artificial Sequence
  Description of Artificial Sequence: Synthetic oligonucleotide
cagugaccaggagccauga

SEQ ID NO: 1749826 - RNA, 19 nt, Artificial Sequence
  Description of Artificial Sequence: Synthetic oligonucleotide
acgcuagagcccgcuggcu

SEQ ID NO: 1749827 - RNA, 19 nt, Artificial Sequence
  Description of Artificial Sequence: Synthetic oligonucleotide
ccaacaagaggacguuaaa

SEQ ID NO: 1749828 - RNA, 19 nt, Artificial Sequence
  Description of Artificial Sequence: Synthetic oligonucleotide
cgacgaacaggcauccaga

SEQ ID NO: 1749829 - RNA, 19 nt, Artificial Sequence
  Description of Artificial Sequence: Synthetic oligonucleotide
ccccacagacagcucuacc

SEQ ID NO: 1749830 - RNA, 19 nt, Artificial Sequence
  Description of Artificial Sequence: Synthetic oligonucleotide
ggagcccauguuccagaga

SEQ ID NO: 1749831 - RNA, 19 nt, Artificial Sequence
  Description of Artificial Sequence: Synthetic oligonucleotide
ccaacagggcucuggaccu

SEQ ID NO: 1749832 - RNA, 19 nt, Artificial Sequence
  Description of Artificial Sequence: Synthetic oligonucleotide
augccgcccgccggggcuc

SEQ ID NO: 1749833 - RNA, 19 nt, Artificial Sequence
  Description of Artificial Sequence: Synthetic oligonucleotide
gcuggcccagcagccuucg

SEQ ID NO: 1749834 - RNA, 19 nt, Artificial Sequence
  Description of Artificial Sequence: Synthetic oligonucleotide
cacugugggcuggugaggu

SEQ ID NO: 1749835 - RNA, 19 nt, Artificial Sequence
  Description of Artificial Sequence: Synthetic oligonucleotide
cuggugacuuguccuuacu

SEQ ID NO: 1749836 - RNA, 19 nt, Artificial Sequence
  Description of Artificial Sequence: Synthetic oligonucleotide
ggggcaugugugacuccag

SEQ ID NO: 1749837 - RNA, 19 nt, Artificial Sequence
  Description of Artificial Sequence: Synthetic oligonucleotide
cucuggccgcugaccuaug

SEQ ID NO: 1749838 - RNA, 19 nt, Artificial Sequence
  Description of Artificial Sequence: Synthetic oligonucleotide
cgcuagagcccgcuggcug

SEQ ID NO: 1749839 - RNA, 19 nt, Artificial Sequence
  Description of Artificial Sequence: Synthetic oligonucleotide
  modified_base (9)..(9): a, c, u, g, unknown or other
ccacugccngaagaccagc

SEQ ID NO: 1749840 - RNA, 19 nt, Artificial Sequence
  Description of Artificial Sequence: Synthetic oligonucleotide
gggcggggcaggguuacug

SEQ ID NO: 1749841 - RNA, 19 nt, Artificial Sequence
  Description of Artificial Sequence: Synthetic oligonucleotide
cccuacacaagugggcaca

SEQ ID NO: 1749842 - RNA, 19 nt, Artificial Sequence
  Description of Artificial Sequence: Synthetic oligonucleotide
guauccccacagacagcuc

SEQ ID NO: 1749843 - RNA, 19 nt, Artificial Sequence
  Description of Artificial Sequence: Synthetic oligonucleotide
cccgcuggcugggaggaag

SEQ ID NO: 1749844 - RNA, 19 nt, Artificial Sequence
  Description of Artificial Sequence: Synthetic oligonucleotide
uagagcccgcuggcuggga

SEQ ID NO: 1749845 - RNA, 19 nt, Artificial Sequence
  Description of Artificial Sequence: Synthetic oligonucleotide
ccagaacuguauccaucca

SEQ ID NO: 1749846 - RNA, 19 nt, Artificial Sequence
  Description of Artificial Sequence: Synthetic oligonucleotide
ccgcuggcugggaggaagc

SEQ ID NO: 1749847 - RNA, 19 nt, Artificial Sequence
  Description of Artificial Sequence: Synthetic oligonucleotide
acgccggccccagucugcu

SEQ ID NO: 1749848 - RNA, 19 nt, Artificial Sequence
  Description of Artificial Sequence: Synthetic oligonucleotide
gcgggacucuccgacgaac

SEQ ID NO: 1749849 - RNA, 19 nt, Artificial Sequence
  Description of Artificial Sequence: Synthetic oligonucleotide
  modified_base (4)..(4): a, c, u, g, unknown or other
gccngaagaccagcucgca

SEQ ID NO: 1749850 - RNA, 19 nt, Artificial Sequence
  Description of Artificial Sequence: Synthetic oligonucleotide
cggagcccauguuccagag

SEQ ID NO: 1749851 - RNA, 19 nt, Artificial Sequence
  Description of Artificial Sequence: Synthetic oligonucleotide
cgaauaucccaguguccca

SEQ ID NO: 1749852 - RNA, 19 nt, Artificial Sequence
  Description of Artificial Sequence: Synthetic oligonucleotide
acucuccgacgaacaggca

SEQ ID NO: 1749853 - RNA, 19 nt, Artificial Sequence
  Description of Artificial Sequence: Synthetic oligonucleotide
gccuccaaccuugggcuuc

SEQ ID NO: 1749854 - RNA, 19 nt, Artificial Sequence
  Description of Artificial Sequence: Synthetic oligonucleotide
caugccgcccgccggggcu

SEQ ID NO: 1749855 - RNA, 19 nt, Artificial Sequence
  Description of Artificial Sequence: Synthetic oligonucleotide
gggcucccauccaagagcu

SEQ ID NO: 1749856 - RNA, 19 nt, Artificial Sequence
  Description of Artificial Sequence: Synthetic oligonucleotide
cugcacuguggggcaugug

SEQ ID NO: 1749857 - RNA, 19 nt, Artificial Sequence
  Description of Artificial Sequence: Synthetic oligonucleotide
ccagccgauggggucuuug

SEQ ID NO: 1749858 - RNA, 19 nt, Artificial Sequence
  Description of Artificial Sequence: Synthetic oligonucleotide
gccuucuguacacgccgaa

SEQ ID NO: 1749859 - RNA, 19 nt, Artificial Sequence
  Description of Artificial Sequence: Synthetic oligonucleotide
gucccaacaagaggacguu

SEQ ID NO: 1749860 - RNA, 19 nt, Artificial Sequence
  Description of Artificial Sequence: Synthetic oligonucleotide
gcuucccaugccgcccgcc

SEQ ID NO: 1749861 - RNA, 19 nt, Artificial Sequence
  Description of Artificial Sequence: Synthetic oligonucleotide
cguagguccccuccaaacu

SEQ ID NO: 1749862 - RNA, 19 nt, Artificial Sequence
  Description of Artificial Sequence: Synthetic oligonucleotide
cccuuucgaccgcuuccug

SEQ ID NO: 1749863 - RNA, 19 nt, Artificial Sequence
  Description of Artificial Sequence: Synthetic oligonucleotide
cgggacucuccgacgaaca

SEQ ID NO: 1749864 - RNA, 19 nt, Artificial Sequence
  Description of Artificial Sequence: Synthetic oligonucleotide
gcaccacgaauaucccagu

SEQ ID NO: 1749865 - RNA, 19 nt, Artificial Sequence
  Description of Artificial Sequence: Synthetic oligonucleotide
ccccacgccggccccaguc

SEQ ID NO: 1749866 - RNA, 19 nt, Artificial Sequence
  Description of Artificial Sequence: Synthetic oligonucleotide
gcagcacugugggcuggug

SEQ ID NO: 1749867 - RNA, 19 nt, Artificial Sequence
  Description of Artificial Sequence: Synthetic oligonucleotide
ccacgccggccccagucug

SEQ ID NO: 1749868 - RNA, 19 nt, Artificial Sequence
  Description of Artificial Sequence: Synthetic oligonucleotide
gccuccagacggauguucu

SEQ ID NO: 1749869 - RNA, 19 nt, Artificial Sequence
  Description of Artificial Sequence: Synthetic oligonucleotide
ccauggcgacuccaaaacu

SEQ ID NO: 1749870 - RNA, 19 nt, Artificial Sequence
  Description of Artificial Sequence: Synthetic oligonucleotide
ccagcucacggagcccaug

SEQ ID NO: 1749871 - RNA, 19 nt, Artificial Sequence
  Description of Artificial Sequence: Synthetic oligonucleotide
gcagcgccgccacuccaaa

SEQ ID NO: 1749872 - RNA, 19 nt, Artificial Sequence
  Description of Artificial Sequence: Synthetic oligonucleotide
cugcagccaacagggcucu

SEQ ID NO: 1749873 - RNA, 19 nt, Artificial Sequence
  Description of Artificial Sequence: Synthetic oligonucleotide
ccaugccgcccgccggggc

SEQ ID NO: 1749874 - RNA, 19 nt, Artificial Sequence
  Description of Artificial Sequence: Synthetic oligonucleotide
caacucccuuucgaccgcu

SEQ ID NO: 1749875 - RNA, 19 nt, Artificial Sequence
  Description of Artificial Sequence: Synthetic oligonucleotide
gcgccgccacuccaaagcu

SEQ ID NO: 1749876 - RNA, 19 nt, Artificial Sequence
  Description of Artificial Sequence: Synthetic oligonucleotide
ccagacggauguucucacu

SEQ ID NO: 1749877 - RNA, 19 nt, Artificial Sequence
  Description of Artificial Sequence: Synthetic oligonucleotide
gggguccuggugacuuguc

SEQ ID NO: 1749878 - RNA, 19 nt, Artificial Sequence
  Description of Artificial Sequence: Synthetic oligonucleotide
cuuuggggcggggcagggu

SEQ ID NO: 1749879 - RNA, 19 nt, Artificial Sequence
  Description of Artificial Sequence: Synthetic oligonucleotide
ggacuagcccauggcgacu

SEQ ID NO: 1749880 - RNA, 19 nt, Artificial Sequence
  Description of Artificial Sequence: Synthetic oligonucleotide
cccaugccgcccgccgggg

SEQ ID NO: 1749881 - RNA, 19 nt, Artificial Sequence
  Description of Artificial Sequence: Synthetic oligonucleotide
gggcacucaguguccugau

SEQ ID NO: 1749882 - RNA, 19 nt, Artificial Sequence
  Description of Artificial Sequence: Synthetic oligonucleotide
ccacucaggggaggcacaa

SEQ ID NO: 1749883 - RNA, 19 nt, Artificial Sequence
  Description of Artificial Sequence: Synthetic oligonucleotide
gcucccgcugacacugacu

SEQ ID NO: 1749884 - RNA, 19 nt, Artificial Sequence
  Description of Artificial Sequence: Synthetic oligonucleotide
caccaggcuguggcuacau

SEQ ID NO: 1749885 - RNA, 19 nt, Artificial Sequence
  Description of Artificial Sequence: Synthetic oligonucleotide
accagccgauggggucuuu

SEQ ID NO: 1749886 - RNA, 19 nt, Artificial Sequence
  Description of Artificial Sequence: Synthetic oligonucleotide
ccgcugaccuaugccucca

SEQ ID NO: 1749887 - RNA, 19 nt, Artificial Sequence
  Description of Artificial Sequence: Synthetic oligonucleotide
ccuacacaagugggcacau

SEQ ID NO: 1749888 - RNA, 19 nt, Artificial Sequence
  Description of Artificial Sequence: Synthetic oligonucleotide
ccgcugacacugacucugu

SEQ ID NO: 1749889 - RNA, 19 nt, Artificial Sequence
  Description of Artificial Sequence: Synthetic oligonucleotide
cccacgccggccccagucu

SEQ ID NO: 1749890 - RNA, 19 nt, Artificial Sequence
  Description of Artificial Sequence: Synthetic oligonucleotide
ccgcccgccggggcucagc

SEQ ID NO: 1749891 - RNA, 19 nt, Artificial Sequence
  Description of Artificial Sequence: Synthetic oligonucleotide
gggcacauccuggggccuu

SEQ ID NO: 1749892 - RNA, 19 nt, Artificial Sequence
  Description of Artificial Sequence: Synthetic oligonucleotide
caccagccgauggggucuu

SEQ ID NO: 1749893 - RNA, 19 nt, Artificial Sequence
  Description of Artificial Sequence: Synthetic oligonucleotide
cgcugaccuaugccuccaa

SEQ ID NO: 1749894 - RNA, 19 nt, Artificial Sequence
  Description of Artificial Sequence: Synthetic oligonucleotide
ccggccccagucugcuccu

SEQ ID NO: 1749895 - RNA, 19 nt, Artificial Sequence
  Description of Artificial Sequence: Synthetic oligonucleotide
cgccggccccagucugcuc

SEQ ID NO: 1749896 - RNA, 19 nt, Artificial Sequence
  Description of Artificial Sequence: Synthetic oligonucleotide
ccgccggggcucagccacu

SEQ ID NO: 1749897 - RNA, 19 nt, Artificial Sequence
  Description of Artificial Sequence: Synthetic oligonucleotide
cgccggggcucagccacuu

SEQ ID NO: 1749898 - RNA, 19 nt, Artificial Sequence
  Description of Artificial Sequence: Synthetic oligonucleotide
  modified_base (1)..(1): a, c, u, g, unknown or other
ngaagaccagcucgcagcg

SEQ ID NO: 1749899 - RNA, 19 nt, Artificial Sequence
  Description of Artificial Sequence: Synthetic oligonucleotide
  modified_base (1)..(1): a, c, u, g, unknown or other
ngcggaucugaacuccagc

SEQ ID NO: 1749900 - RNA, 19 nt, Artificial Sequence
  Description of Artificial Sequence: Synthetic oligonucleotide
uuuugugugucccaacggg

SEQ ID NO: 1749901 - RNA, 19 nt, Artificial Sequence
  Description of Artificial Sequence: Synthetic oligonucleotide
cuuagaaguccuuucuugg

SEQ ID NO: 1749902 - RNA, 19 nt, Artificial Sequence
  Description of Artificial Sequence: Synthetic oligonucleotide
uuugugugucccaacgggg

SEQ ID NO: 1749903 - RNA, 19 nt, Artificial Sequence
  Description of Artificial Sequence: Synthetic oligonucleotide
aauccagcaagcaucauca

SEQ ID NO: 1749904 - RNA, 19 nt, Artificial Sequence
  Description of Artificial Sequence: Synthetic oligonucleotide
ggaaagcuagaacugaugg

SEQ ID NO: 1749905 - RNA, 19 nt, Artificial Sequence
  Description of Artificial Sequence: Synthetic oligonucleotide
agcaucaucaguaccaggg

SEQ ID NO: 1749906 - RNA, 19 nt, Artificial Sequence
  Description of Artificial Sequence: Synthetic oligonucleotide
acuuagaaguccuuucuug

SEQ ID NO: 1749907 - RNA, 19 nt, Artificial Sequence
  Description of Artificial Sequence: Synthetic oligonucleotide
agcaagcaucaucaguacc

SEQ ID NO: 1749908 - RNA, 19 nt, Artificial Sequence
  Description of Artificial Sequence: Synthetic oligonucleotide
uuagaaguccuuucuugga

SEQ ID NO: 1749909 - RNA, 19 nt, Artificial Sequence
  Description of Artificial Sequence: Synthetic oligonucleotide
uagaaguccuuucuuggac

SEQ ID NO: 1749910 - RNA, 19 nt, Artificial Sequence
  Description of Artificial Sequence: Synthetic oligonucleotide
aaauccacuuagaaguccu

SEQ ID NO: 1749911 - RNA, 19 nt, Artificial Sequence
  Description of Artificial Sequence: Synthetic oligonucleotide
gaaagcuagaacugaugga

SEQ ID NO: 1749912 - RNA, 19 nt, Artificial Sequence
  Description of Artificial Sequence: Synthetic oligonucleotide
uaaauccacuuagaagucc

SEQ ID NO: 1749913 - RNA, 19 nt, Artificial Sequence
  Description of Artificial Sequence: Synthetic oligonucleotide
gaaguccuuucuuggacug

SEQ ID NO: 1749914 - RNA, 19 nt, Artificial Sequence
  Description of Artificial Sequence: Synthetic oligonucleotide
uccagcaagcaucaucagu

SEQ ID NO: 1749915 - RNA, 19 nt, Artificial Sequence
  Description of Artificial Sequence: Synthetic oligonucleotide
uccuuucuuggacugaaau

SEQ ID NO: 1749916 - RNA, 19 nt, Artificial Sequence
  Description of Artificial Sequence: Synthetic oligonucleotide
ugugugucccaacggggag

SEQ ID NO: 1749917 - RNA, 19 nt, Artificial Sequence
  Description of Artificial Sequence: Synthetic oligonucleotide
agaaguccuuucuuggacu

SEQ ID NO: 1749918 - RNA, 19 nt, Artificial Sequence
  Description of Artificial Sequence: Synthetic oligonucleotide
uugugugucccaacgggga

SEQ ID NO: 1749919 - RNA, 19 nt, Artificial Sequence
  Description of Artificial Sequence: Synthetic oligonucleotide
uccacuuagaaguccuuuc

SEQ ID NO: 1749920 - RNA, 19 nt, Artificial Sequence
  Description of Artificial Sequence: Synthetic oligonucleotide
ugucccaacggggagcaug

SEQ ID NO: 1749921 - RNA, 19 nt, Artificial Sequence
  Description of Artificial Sequence: Synthetic oligonucleotide
uagaacugauggagaggcc

SEQ ID NO: 1749922 - RNA, 19 nt, Artificial Sequence
  Description of Artificial Sequence: Synthetic oligonucleotide
gcaucaucaguaccagggg

SEQ ID NO: 1749923 - RNA, 19 nt, Artificial Sequence
  Description of Artificial Sequence: Synthetic oligonucleotide
ccuuucuuggacugaaaug

SEQ ID NO: 1749924 - RNA, 19 nt, Artificial Sequence
  Description of Artificial Sequence: Synthetic oligonucleotide
gcaagcaucaucaguacca

SEQ ID NO: 1749925 - RNA, 19 nt, Artificial Sequence
  Description of Artificial Sequence: Synthetic oligonucleotide
ugugucccaacggggagca

SEQ ID NO: 1749926 - RNA, 19 nt, Artificial Sequence
  Description of Artificial Sequence: Synthetic oligonucleotide
cagcaagcaucaucaguac

SEQ ID NO: 1749927 - RNA, 19 nt, Artificial Sequence
  Description of Artificial Sequence: Synthetic oligonucleotide
gcuagaacugauggagagg

SEQ ID NO: 1749928 - RNA, 19 nt, Artificial Sequence
  Description of Artificial Sequence: Synthetic oligonucleotide
ccagcaagcaucaucagua

SEQ ID NO: 1749929 - RNA, 19 nt, Artificial Sequence
  Description of Artificial Sequence: Synthetic oligonucleotide
aguccuuucuuggacugaa

SEQ ID NO: 1749930 - RNA, 19 nt, Artificial Sequence
  Description of Artificial Sequence: Synthetic oligonucleotide
aaguccuuucuuggacuga

SEQ ID NO: 1749931 - RNA, 19 nt, Artificial Sequence
  Description of Artificial Sequence: Synthetic oligonucleotide
auccagcaagcaucaucag

SEQ ID NO: 1749932 - RNA, 19 nt, Artificial Sequence
  Description of Artificial Sequence: Synthetic oligonucleotide
gggaaagcuagaacugaug

SEQ ID NO: 1749933 - RNA, 19 nt, Artificial Sequence
  Description of Artificial Sequence: Synthetic oligonucleotide
auccacuuagaaguccuuu

SEQ ID NO: 1749934 - RNA, 19 nt, Artificial Sequence
  Description of Artificial Sequence: Synthetic oligonucleotide
aauccacuuagaaguccuu

SEQ ID NO: 1749935 - RNA, 19 nt, Artificial Sequence
  Description of Artificial Sequence: Synthetic oligonucleotide
gugugucccaacggggagc

SEQ ID NO: 1749936 - RNA, 19 nt, Artificial Sequence
  Description of Artificial Sequence: Synthetic oligonucleotide
cacuuagaaguccuuucuu

SEQ ID NO: 1749937 - RNA, 19 nt, Artificial Sequence
  Description of Artificial Sequence: Synthetic oligonucleotide
ccacuuagaaguccuuucu

SEQ ID NO: 1749938 - RNA, 19 nt, Artificial Sequence
  Description of Artificial Sequence: Synthetic oligonucleotide
guccuuucuuggacugaaa

SEQ ID NO: 1749939 - RNA, 19 nt, Artificial Sequence
  Description of Artificial Sequence: Synthetic oligonucleotide
ggggaaagcuagaacugau

SEQ ID NO: 1749940 - RNA, 19 nt, Artificial Sequence
  Description of Artificial Sequence: Synthetic oligonucleotide
gugucccaacggggagcau

SEQ ID NO: 1749941 - RNA, 19 nt, Artificial Sequence
  Description of Artificial Sequence: Synthetic oligonucleotide
uguucuuucagcaugagga

SEQ ID NO: 1749942 - RNA, 19 nt, Artificial Sequence
  Description of Artificial Sequence: Synthetic oligonucleotide
aaaagcucgcggcagcccc

SEQ ID NO: 1749943 - RNA, 19 nt, Artificial Sequence
  Description of Artificial Sequence: Synthetic oligonucleotide
agcgacacgugccugaucc

SEQ ID NO: 1749944 - RNA, 19 nt, Artificial Sequence
  Description of Artificial Sequence: Synthetic oligonucleotide
uuaucagucaccuccugag

SEQ ID NO: 1749945 - RNA, 19 nt, Artificial Sequence
  Description of Artificial Sequence: Synthetic oligonucleotide
gaaagcuaccaccagcuag

SEQ ID NO: 1749946 - RNA, 19 nt, Artificial Sequence
  Description of Artificial Sequence: Synthetic oligonucleotide
ucuggagaaaagcucgcgg

SEQ ID NO: 1749947 - RNA, 19 nt, Artificial Sequence
  Description of Artificial Sequence: Synthetic oligonucleotide
ugaugguaugccuucgacg

SEQ ID NO: 1749948 - RNA, 19 nt, Artificial Sequence
  Description of Artificial Sequence: Synthetic oligonucleotide
uagaaagcuaccaccagcu

SEQ ID NO: 1749949 - RNA, 19 nt, Artificial Sequence
  Description of Artificial Sequence: Synthetic oligonucleotide
uacacaguagcucaggguu

SEQ ID NO: 1749950 - RNA, 19 nt, Artificial Sequence
  Description of Artificial Sequence: Synthetic oligonucleotide
ucgacguucaccucgggcc

SEQ ID NO: 1749951 - RNA, 19 nt, Artificial Sequence
  Description of Artificial Sequence: Synthetic oligonucleotide
guuagguagccacuggccg

SEQ ID NO: 1749952 - RNA, 19 nt, Artificial Sequence
  Description of Artificial Sequence: Synthetic oligonucleotide
uccuagaaagcuaccacca

SEQ ID NO: 1749953 - RNA, 19 nt, Artificial Sequence
  Description of Artificial Sequence: Synthetic oligonucleotide
agguuagguagccacuggc

SEQ ID NO: 1749954 - RNA, 19 nt, Artificial Sequence
  Description of Artificial Sequence: Synthetic oligonucleotide
cuagaaagcuaccaccagc

SEQ ID NO: 1749955 - RNA, 19 nt, Artificial Sequence
  Description of Artificial Sequence: Synthetic oligonucleotide
gcucuuaucagucaccucc

SEQ ID NO: 1749956 - RNA, 19 nt, Artificial Sequence
  Description of Artificial Sequence: Synthetic oligonucleotide
gaugguaugccuucgacgu

SEQ ID NO: 1749957 - RNA, 19 nt, Artificial Sequence
  Description of Artificial Sequence: Synthetic oligonucleotide
uguccuagaaagcuaccac

SEQ ID NO: 1749958 - RNA, 19 nt, Artificial Sequence
  Description of Artificial Sequence: Synthetic oligonucleotide
aguagcucaggguuccggg

SEQ ID NO: 1749959 - RNA, 19 nt, Artificial Sequence
  Description of Artificial Sequence: Synthetic oligonucleotide
aaagcuaccaccagcuaga

SEQ ID NO: 1749960 - RNA, 19 nt, Artificial Sequence
  Description of Artificial Sequence: Synthetic oligonucleotide
gaugcgcucgcucuuauca

SEQ ID NO: 1749961 - RNA, 19 nt, Artificial Sequence
  Description of Artificial Sequence: Synthetic oligonucleotide
cuggagaaaagcucgcggc

SEQ ID NO: 1749962 - RNA, 19 nt, Artificial Sequence
  Description of Artificial Sequence: Synthetic oligonucleotide
aagacgagggcagagcucu

SEQ ID NO: 1749963 - RNA, 19 nt, Artificial Sequence
  Description of Artificial Sequence: Synthetic oligonucleotide
agcuagaugaaaguggagu

SEQ ID NO: 1749964 - RNA, 19 nt, Artificial Sequence
  Description of Artificial Sequence: Synthetic oligonucleotide
ucgucggccggcaugaaca

SEQ ID NO: 1749965 - RNA, 19 nt, Artificial Sequence
  Description of Artificial Sequence: Synthetic oligonucleotide
cuagaugaaaguggagucc

SEQ ID NO: 1749966 - RNA, 19 nt, Artificial Sequence
  Description of Artificial Sequence: Synthetic oligonucleotide
accagcuagaugaaagugg

SEQ ID NO: 1749967 - RNA, 19 nt, Artificial Sequence
  Description of Artificial Sequence: Synthetic oligonucleotide
uggagaaaagcucgcggca

SEQ ID NO: 1749968 - RNA, 19 nt, Artificial Sequence
  Description of Artificial Sequence: Synthetic oligonucleotide
uagaugaaaguggagucca

SEQ ID NO: 1749969 - RNA, 19 nt, Artificial Sequence
  Description of Artificial Sequence: Synthetic oligonucleotide
cuuccauccgcgucggucc

SEQ ID NO: 1749970 - RNA, 19 nt, Artificial Sequence
  Description of Artificial Sequence: Synthetic oligonucleotide
ugaggcuaagucugugugc

SEQ ID NO: 1749971 - RNA, 19 nt, Artificial Sequence
  Description of Artificial Sequence: Synthetic oligonucleotide
ugccugaucccucgggccg

SEQ ID NO: 1749972 - RNA, 19 nt, Artificial Sequence
  Description of Artificial Sequence: Synthetic oligonucleotide
aggaugucgaagagggugc

SEQ ID NO: 1749973 - RNA, 19 nt, Artificial Sequence
  Description of Artificial Sequence: Synthetic oligonucleotide
aacgggacucgaucucgcg

SEQ ID NO: 1749974 - RNA, 19 nt, Artificial Sequence
  Description of Artificial Sequence: Synthetic oligonucleotide
acgggacucgaucucgcgc

SEQ ID NO: 1749975 - RNA, 19 nt, Artificial Sequence
  Description of Artificial Sequence: Synthetic oligonucleotide
uucgacguucaccucgggc

SEQ ID NO: 1749976 - RNA, 19 nt, Artificial Sequence
  Description of Artificial Sequence: Synthetic oligonucleotide
cucgaucucgcgcaagugc

SEQ ID NO: 1749977 - RNA, 19 nt, Artificial Sequence
  Description of Artificial Sequence: Synthetic oligonucleotide
ucgagcacgccgcagggca

SEQ ID NO: 1749978 - RNA, 19 nt, Artificial Sequence
  Description of Artificial Sequence: Synthetic oligonucleotide
agccaucaucuccaagccc

SEQ ID NO: 1749979 - RNA, 19 nt, Artificial Sequence
  Description of Artificial Sequence: Synthetic oligonucleotide
cagcgucuuacucaggggc

SEQ ID NO: 1749980 - RNA, 19 nt, Artificial Sequence
  Description of Artificial Sequence: Synthetic oligonucleotide
uccgggaggugccacuggg

SEQ ID NO: 1749981 - RNA, 19 nt, Artificial Sequence
  Description of Artificial Sequence: Synthetic oligonucleotide
cuuacucaggggccgcucg

SEQ ID NO: 1749982 - RNA, 19 nt, Artificial Sequence
  Description of Artificial Sequence: Synthetic oligonucleotide
gccacacugguguugaggg

SEQ ID NO: 1749983 - RNA, 19 nt, Artificial Sequence
  Description of Artificial Sequence: Synthetic oligonucleotide
gagaaaagcucgcggcagc

SEQ ID NO: 1749984 - RNA, 19 nt, Artificial Sequence
  Description of Artificial Sequence: Synthetic oligonucleotide
uccgccgggauacacagua

SEQ ID NO: 1749985 - RNA, 19 nt, Artificial Sequence
  Description of Artificial Sequence: Synthetic oligonucleotide
accggggagcgacacgugc

SEQ ID NO: 1749986 - RNA, 19 nt, Artificial Sequence
  Description of Artificial Sequence: Synthetic oligonucleotide
cuugcagacggcugcacuc

SEQ ID NO: 1749987 - RNA, 19 nt, Artificial Sequence
  Description of Artificial Sequence: Synthetic oligonucleotide
accguuggugaugguaugc

SEQ ID NO: 1749988 - RNA, 19 nt, Artificial Sequence
  Description of Artificial Sequence: Synthetic oligonucleotide
uucaccucgggcccgugga

SEQ ID NO: 1749989 - RNA, 19 nt, Artificial Sequence
  Description of Artificial Sequence: Synthetic oligonucleotide
guuggcguucagcagcgag

SEQ ID NO: 1749990 - RNA, 19 nt, Artificial Sequence
  Description of Artificial Sequence: Synthetic oligonucleotide
auagccgcgcugccggucg

SEQ ID NO: 1749991 - RNA, 19 nt, Artificial Sequence
  Description of Artificial Sequence: Synthetic oligonucleotide
agcgucuuacucaggggcc

SEQ ID NO: 1749992 - RNA, 19 nt, Artificial Sequence
  Description of Artificial Sequence: Synthetic oligonucleotide
cuuugggcagcaaccuccc

SEQ ID NO: 1749993 - RNA, 19 nt, Artificial Sequence
  Description of Artificial Sequence: Synthetic oligonucleotide
gagcccgggccucaaacag

SEQ ID NO: 1749994 - RNA, 19 nt, Artificial Sequence
  Description of Artificial Sequence: Synthetic oligonucleotide
gcuagaugaaaguggaguc

SEQ ID NO: 1749995 - RNA, 19 nt, Artificial Sequence
  Description of Artificial Sequence: Synthetic oligonucleotide
aagcgcucgaagguuaggu

SEQ ID NO: 1749996 - RNA, 19 nt, Artificial Sequence
  Description of Artificial Sequence: Synthetic oligonucleotide
augagugcagacuucucuu

SEQ ID NO: 1749997 - RNA, 19 nt, Artificial Sequence
  Description of Artificial Sequence: Synthetic oligonucleotide
cuugaugagugcagacuuc

SEQ ID NO: 1749998 - RNA, 19 nt, Artificial Sequence
  Description of Artificial Sequence: Synthetic oligonucleotide
acacgugccugaucccucg

SEQ ID NO: 1749999 - RNA, 19 nt, Artificial Sequence
  Description of Artificial Sequence: Synthetic oligonucleotide
aggugcgcaagcccgccac

SEQ ID NO: 1750000 - RNA, 19 nt, Artificial Sequence
  Description of Artificial Sequence: Synthetic oligonucleotide
cucgcucuuaucagucacc

SEQ ID NO: 1750001 - RNA, 19 nt, Artificial Sequence
  Description of Artificial Sequence: Synthetic oligonucleotide
gagaguccgcggcucgucg

SEQ ID NO: 1750002 - RNA, 19 nt, Artificial Sequence
  Description of Artificial Sequence: Synthetic oligonucleotide
cucgcgcaagugcacauag

SEQ ID NO: 1750003 - RNA, 19 nt, Artificial Sequence
  Description of Artificial Sequence: Synthetic oligonucleotide
agcgaggugcgcaagcccg

SEQ ID NO: 1750004 - RNA, 19 nt, Artificial Sequence
  Description of Artificial Sequence: Synthetic oligonucleotide
cuuaucagucaccuccuga

SEQ ID NO: 1750005 - RNA, 19 nt, Artificial Sequence
  Description of Artificial Sequence: Synthetic oligonucleotide
ucggugcuaggcgugggcg

SEQ ID NO: 1750006 - RNA, 19 nt, Artificial Sequence
  Description of Artificial Sequence: Synthetic oligonucleotide
cacgccgcagggcagcucg

SEQ ID NO: 1750007 - RNA, 19 nt, Artificial Sequence
  Description of Artificial Sequence: Synthetic oligonucleotide
cucgcgugcgucugcaccc

SEQ ID NO: 1750008 - RNA, 19 nt, Artificial Sequence
  Description of Artificial Sequence: Synthetic oligonucleotide
ugccaacgggacucgaucu

SEQ ID NO: 1750009 - RNA, 19 nt, Artificial Sequence
  Description of Artificial Sequence: Synthetic oligonucleotide
cugccggucguccaggaug

SEQ ID NO: 1750010 - RNA, 19 nt, Artificial Sequence
  Description of Artificial Sequence: Synthetic oligonucleotide
gaagagggugcgcaagcuc

SEQ ID NO: 1750011 - RNA, 19 nt, Artificial Sequence
  Description of Artificial Sequence: Synthetic oligonucleotide
ugguaugccuucgacguuc

SEQ ID NO: 1750012 - RNA, 19 nt, Artificial Sequence
  Description of Artificial Sequence: Synthetic oligonucleotide
gugaugguaugccuucgac

SEQ ID NO: 1750013 - RNA, 19 nt, Artificial Sequence
  Description of Artificial Sequence: Synthetic oligonucleotide
uuucaccugugccuauguc

SEQ ID NO: 1750014 - RNA, 19 nt, Artificial Sequence
  Description of Artificial Sequence: Synthetic oligonucleotide
ucgcucuuaucagucaccu

SEQ ID NO: 1750015 - RNA, 19 nt, Artificial Sequence
  Description of Artificial Sequence: Synthetic oligonucleotide
cgcaagugcacauagccgc

SEQ ID NO: 1750016 - RNA, 19 nt, Artificial Sequence
  Description of Artificial Sequence: Synthetic oligonucleotide
cauccugcuggcugagagc

SEQ ID NO: 1750017 - RNA, 19 nt, Artificial Sequence
  Description of Artificial Sequence: Synthetic oligonucleotide
agaguccgcggcucgucgg

SEQ ID NO: 1750018 - RNA, 19 nt, Artificial Sequence
  Description of Artificial Sequence: Synthetic oligonucleotide
gagagcccgggccucaaac

SEQ ID NO: 1750019 - RNA, 19 nt, Artificial Sequence
  Description of Artificial Sequence: Synthetic oligonucleotide
ugccggucguccaggaugu

SEQ ID NO: 1750020 - RNA, 19 nt, Artificial Sequence
  Description of Artificial Sequence: Synthetic oligonucleotide
gcagcaaccuccccagagg

SEQ ID NO: 1750021 - RNA, 19 nt, Artificial Sequence
  Description of Artificial Sequence: Synthetic oligonucleotide
uggugaugguaugccuucg

SEQ ID NO: 1750022 - RNA, 19 nt, Artificial Sequence
  Description of Artificial Sequence: Synthetic oligonucleotide
ugcgcucgcucuuaucagu

SEQ ID NO: 1750023 - RNA, 19 nt, Artificial Sequence
  Description of Artificial Sequence: Synthetic oligonucleotide
augcgcucgcucuuaucag

SEQ ID NO: 1750024 - RNA, 19 nt, Artificial Sequence
  Description of Artificial Sequence: Synthetic oligonucleotide
gcgcucgaagguuagguag

SEQ ID NO: 1750025 - RNA, 19 nt, Artificial Sequence
  Description of Artificial Sequence: Synthetic oligonucleotide
uugcagacggcugcacucc

SEQ ID NO: 1750026 - RNA, 19 nt, Artificial Sequence
  Description of Artificial Sequence: Synthetic oligonucleotide
agugcacauagccgcgcug

SEQ ID NO: 1750027 - RNA, 19 nt, Artificial Sequence
  Description of Artificial Sequence: Synthetic oligonucleotide
aucaggcguugcugcagcg

SEQ ID NO: 1750028 - RNA, 19 nt, Artificial Sequence
  Description of Artificial Sequence: Synthetic oligonucleotide
caccagcuagaugaaagug

SEQ ID NO: 1750029 - RNA, 19 nt, Artificial Sequence
  Description of Artificial Sequence: Synthetic oligonucleotide
uggcguucagcagcgaggu

SEQ ID NO: 1750030 - RNA, 19 nt, Artificial Sequence
  Description of Artificial Sequence: Synthetic oligonucleotide
agagcccgggccucaaaca

SEQ ID NO: 1750031 - RNA, 19 nt, Artificial Sequence
  Description of Artificial Sequence: Synthetic oligonucleotide
gguuagguagccacuggcc

SEQ ID NO: 1750032 - RNA, 19 nt, Artificial Sequence
  Description of Artificial Sequence: Synthetic oligonucleotide
ggagaaaagcucgcggcag

SEQ ID NO: 1750033 - RNA, 19 nt, Artificial Sequence
  Description of Artificial Sequence: Synthetic oligonucleotide
agaccggggagcgacacgu

SEQ ID NO: 1750034 - RNA, 19 nt, Artificial Sequence
  Description of Artificial Sequence: Synthetic oligonucleotide
cugagugaugcgcucgcuc

SEQ ID NO: 1750035 - RNA, 19 nt, Artificial Sequence
  Description of Artificial Sequence: Synthetic oligonucleotide
cugccaacgggacucgauc

SEQ ID NO: 1750036 - RNA, 19 nt, Artificial Sequence
  Description of Artificial Sequence: Synthetic oligonucleotide
gcguucagcagcgaggugc

SEQ ID NO: 1750037 - RNA, 19 nt, Artificial Sequence
  Description of Artificial Sequence: Synthetic oligonucleotide
ccggcaugaacaucaggcg

SEQ ID NO: 1750038 - RNA, 19 nt, Artificial Sequence
  Description of Artificial Sequence: Synthetic oligonucleotide
ucaccucgggcccguggag

SEQ ID NO: 1750039 - RNA, 19 nt, Artificial Sequence
  Description of Artificial Sequence: Synthetic oligonucleotide
ugcacuccagcgucuuacu

SEQ ID NO: 1750040 - RNA, 19 nt, Artificial Sequence
  Description of Artificial Sequence: Synthetic oligonucleotide
caacgggacucgaucucgc

SEQ ID NO: 1750041 - RNA, 19 nt, Artificial Sequence
  Description of Artificial Sequence: Synthetic oligonucleotide
gugccugaucccucgggcc

SEQ ID NO: 1750042 - RNA, 19 nt, Artificial Sequence
  Description of Artificial Sequence: Synthetic oligonucleotide
ggcguugcugcagcgaagg

SEQ ID NO: 1750043 - RNA, 19 nt, Artificial Sequence
  Description of Artificial Sequence: Synthetic oligonucleotide
uaccauucucggccccgag

SEQ ID NO: 1750044 - RNA, 19 nt, Artificial Sequence
  Description of Artificial Sequence: Synthetic oligonucleotide
acaccguuggugaugguau

SEQ ID NO: 1750045 - RNA, 19 nt, Artificial Sequence
  Description of Artificial Sequence: Synthetic oligonucleotide
ucgcgcaagugcacauagc

SEQ ID NO: 1750046 - RNA, 19 nt, Artificial Sequence
  Description of Artificial Sequence: Synthetic oligonucleotide
cgcgcaagugcacauagcc

SEQ ID NO: 1750047 - RNA, 19 nt, Artificial Sequence
  Description of Artificial Sequence: Synthetic oligonucleotide
ugccggguuucaccugugc

SEQ ID NO: 1750048 - RNA, 19 nt, Artificial Sequence
  Description of Artificial Sequence: Synthetic oligonucleotide
ccagcuagaugaaagugga

SEQ ID NO: 1750049 - RNA, 19 nt, Artificial Sequence
  Description of Artificial Sequence: Synthetic oligonucleotide
uuccauccgcgucgguccc

SEQ ID NO: 1750050 - RNA, 19 nt, Artificial Sequence
  Description of Artificial Sequence: Synthetic oligonucleotide
ucggccccgagccaucauc

SEQ ID NO: 1750051 - RNA, 19 nt, Artificial Sequence
  Description of Artificial Sequence: Synthetic oligonucleotide
ugguaccauucucggcccc

SEQ ID NO: 1750052 - RNA, 19 nt, Artificial Sequence
  Description of Artificial Sequence: Synthetic oligonucleotide
agaugaaaguggaguccag

SEQ ID NO: 1750053 - RNA, 19 nt, Artificial Sequence
  Description of Artificial Sequence: Synthetic oligonucleotide
gaguccgcggcucgucggc

SEQ ID NO: 1750054 - RNA, 19 nt, Artificial Sequence
  Description of Artificial Sequence: Synthetic oligonucleotide
ugcagacggcugcacucca

SEQ ID NO: 1750055 - RNA, 19 nt, Artificial Sequence
  Description of Artificial Sequence: Synthetic oligonucleotide
caggagaguccgcggcucg

SEQ ID NO: 1750056 - RNA, 19 nt, Artificial Sequence
  Description of Artificial Sequence: Synthetic oligonucleotide
ggcuaagucugugugcaug

SEQ ID NO: 1750057 - RNA, 19 nt, Artificial Sequence
  Description of Artificial Sequence: Synthetic oligonucleotide
agaaagcuaccaccagcua

SEQ ID NO: 1750058 - RNA, 19 nt, Artificial Sequence
  Description of Artificial Sequence: Synthetic oligonucleotide
caagugcacauagccgcgc

SEQ ID NO: 1750059 - RNA, 19 nt, Artificial Sequence
  Description of Artificial Sequence: Synthetic oligonucleotide
gaucucgcgcaagugcaca

SEQ ID NO: 1750060 - RNA, 19 nt, Artificial Sequence
  Description of Artificial Sequence: Synthetic oligonucleotide
gguaccauucucggccccg

SEQ ID NO: 1750061 - RNA, 19 nt, Artificial Sequence
  Description of Artificial Sequence: Synthetic oligonucleotide
ccuagaaagcuaccaccag

SEQ ID NO: 1750062 - RNA, 19 nt, Artificial Sequence
  Description of Artificial Sequence: Synthetic oligonucleotide
ucccucgggccgccguugg

SEQ ID NO: 1750063 - RNA, 19 nt, Artificial Sequence
  Description of Artificial Sequence: Synthetic oligonucleotide
gacucgaucucgcgcaagu

SEQ ID NO: 1750064 - RNA, 19 nt, Artificial Sequence
  Description of Artificial Sequence: Synthetic oligonucleotide
cacgcucggccaucgcugc

SEQ ID NO: 1750065 - RNA, 19 nt, Artificial Sequence
  Description of Artificial Sequence: Synthetic oligonucleotide
agccauggagcugaggcua

SEQ ID NO: 1750066 - RNA, 19 nt, Artificial Sequence
  Description of Artificial Sequence: Synthetic oligonucleotide
gcugccacggccaugggca

SEQ ID NO: 1750067 - RNA, 19 nt, Artificial Sequence
  Description of Artificial Sequence: Synthetic oligonucleotide
ccuucgacguucaccucgg

SEQ ID NO: 1750068 - RNA, 19 nt, Artificial Sequence
  Description of Artificial Sequence: Synthetic oligonucleotide
ggugcgcaagcucuggaga

SEQ ID NO: 1750069 - RNA, 19 nt, Artificial Sequence
  Description of Artificial Sequence: Synthetic oligonucleotide
agcgcucgaagguuaggua

SEQ ID NO: 1750070 - RNA, 19 nt, Artificial Sequence
  Description of Artificial Sequence: Synthetic oligonucleotide
gggugcgcaagcucuggag

SEQ ID NO: 1750071 - RNA, 19 nt, Artificial Sequence
  Description of Artificial Sequence: Synthetic oligonucleotide
cagcgaggugcgcaagccc

SEQ ID NO: 1750072 - RNA, 19 nt, Artificial Sequence
  Description of Artificial Sequence: Synthetic oligonucleotide
caugaacaucaggcguugc

SEQ ID NO: 1750073 - RNA, 19 nt, Artificial Sequence
  Description of Artificial Sequence: Synthetic oligonucleotide
gcaagugcacauagccgcg

SEQ ID NO: 1750074 - RNA, 19 nt, Artificial Sequence
  Description of Artificial Sequence: Synthetic oligonucleotide
gcgcaagugcacauagccg

SEQ ID NO: 1750075 - RNA, 19 nt, Artificial Sequence
  Description of Artificial Sequence: Synthetic oligonucleotide
ugaugcgcucgcucuuauc

SEQ ID NO: 1750076 - RNA, 19 nt, Artificial Sequence
  Description of Artificial Sequence: Synthetic oligonucleotide
gugcgcaagcucuggagaa

SEQ ID NO: 1750077 - RNA, 19 nt, Artificial Sequence
  Description of Artificial Sequence: Synthetic oligonucleotide
caccguuggugaugguaug

SEQ ID NO: 1750078 - RNA, 19 nt, Artificial Sequence
  Description of Artificial Sequence: Synthetic oligonucleotide
ugcgcaagcccgccacgaa

SEQ ID NO: 1750079 - RNA, 19 nt, Artificial Sequence
  Description of Artificial Sequence: Synthetic oligonucleotide
ggaugucgaagagggugcg

SEQ ID NO: 1750080 - RNA, 19 nt, Artificial Sequence
  Description of Artificial Sequence: Synthetic oligonucleotide
gcucgcucuuaucagucac

SEQ ID NO: 1750081 - RNA, 19 nt, Artificial Sequence
  Description of Artificial Sequence: Synthetic oligonucleotide
ugcgcaagcucuggagaaa

SEQ ID NO: 1750082 - RNA, 19 nt, Artificial Sequence
  Description of Artificial Sequence: Synthetic oligonucleotide
cucgucggccggcaugaac

SEQ ID NO: 1750083 - RNA, 19 nt, Artificial Sequence
  Description of Artificial Sequence: Synthetic oligonucleotide
gccggguuucaccugugcc

SEQ ID NO: 1750084 - RNA, 19 nt, Artificial Sequence
  Description of Artificial Sequence: Synthetic oligonucleotide
ccaacgggacucgaucucg

SEQ ID NO: 1750085 - RNA, 19 nt, Artificial Sequence
  Description of Artificial Sequence: Synthetic oligonucleotide
auucucggccccgagccau

SEQ ID NO: 1750086 - RNA, 19 nt, Artificial Sequence
  Description of Artificial Sequence: Synthetic oligonucleotide
agggugcgcaagcucugga

SEQ ID NO: 1750087 - RNA, 19 nt, Artificial Sequence
  Description of Artificial Sequence: Synthetic oligonucleotide
guccacaccguuggugaug

SEQ ID NO: 1750088 - RNA, 19 nt, Artificial Sequence
  Description of Artificial Sequence: Synthetic oligonucleotide
cagaccggggagcgacacg

SEQ ID NO: 1750089 - RNA, 19 nt, Artificial Sequence
  Description of Artificial Sequence: Synthetic oligonucleotide
gcucgcgugcgucugcacc

SEQ ID NO: 1750090 - RNA, 19 nt, Artificial Sequence
  Description of Artificial Sequence: Synthetic oligonucleotide
ugcgacaggcggccacgcu

SEQ ID NO: 1750091 - RNA, 19 nt, Artificial Sequence
  Description of Artificial Sequence: Synthetic oligonucleotide
gacggcugcacuccagcgu

SEQ ID NO: 1750092 - RNA, 19 nt, Artificial Sequence
  Description of Artificial Sequence: Synthetic oligonucleotide
ccuccgccgggauacacag

SEQ ID NO: 1750093 - RNA, 19 nt, Artificial Sequence
  Description of Artificial Sequence: Synthetic oligonucleotide
cuucgacguucaccucggg

SEQ ID NO: 1750094 - RNA, 19 nt, Artificial Sequence
  Description of Artificial Sequence: Synthetic oligonucleotide
cacugguguugagggagag

SEQ ID NO: 1750095 - RNA, 19 nt, Artificial Sequence
  Description of Artificial Sequence: Synthetic oligonucleotide
gggauacacaguagcucag

SEQ ID NO: 1750096 - RNA, 19 nt, Artificial Sequence
  Description of Artificial Sequence: Synthetic oligonucleotide
guacuuugggcagcaaccu

SEQ ID NO: 1750097 - RNA, 19 nt, Artificial Sequence
  Description of Artificial Sequence: Synthetic oligonucleotide
cacgugccugaucccucgg

SEQ ID NO: 1750098 - RNA, 19 nt, Artificial Sequence
  Description of Artificial Sequence: Synthetic oligonucleotide
gcuugaugagugcagacuu

SEQ ID NO: 1750099 - RNA, 19 nt, Artificial Sequence
  Description of Artificial Sequence: Synthetic oligonucleotide
agugaugcgcucgcucuua

SEQ ID NO: 1750100 - RNA, 19 nt, Artificial Sequence
  Description of Artificial Sequence: Synthetic oligonucleotide
ggugcgcaagcccgccacg

SEQ ID NO: 1750101 - RNA, 19 nt, Artificial Sequence
  Description of Artificial Sequence: Synthetic oligonucleotide
gcaugaacaucaggcguug

SEQ ID NO: 1750102 - RNA, 19 nt, Artificial Sequence
  Description of Artificial Sequence: Synthetic oligonucleotide
cgggauacacaguagcuca

SEQ ID NO: 1750103 - RNA, 19 nt, Artificial Sequence
  Description of Artificial Sequence: Synthetic oligonucleotide
ccguuggcguucagcagcg

SEQ ID NO: 1750104 - RNA, 19 nt, Artificial Sequence
  Description of Artificial Sequence: Synthetic oligonucleotide
ucgggcuccucgggagagg

SEQ ID NO: 1750105 - RNA, 19 nt, Artificial Sequence
  Description of Artificial Sequence: Synthetic oligonucleotide
cgcucgaagguuagguagc

SEQ ID NO: 1750106 - RNA, 19 nt, Artificial Sequence
  Description of Artificial Sequence: Synthetic oligonucleotide
ucgggagagggugccgccu

SEQ ID NO: 1750107 - RNA, 19 nt, Artificial Sequence
  Description of Artificial Sequence: Synthetic oligonucleotide
ucucgcgcaagugcacaua

SEQ ID NO: 1750108 - RNA, 19 nt, Artificial Sequence
  Description of Artificial Sequence: Synthetic oligonucleotide
cgucgguccccacaggacc

SEQ ID NO: 1750109 - RNA, 19 nt, Artificial Sequence
  Description of Artificial Sequence: Synthetic oligonucleotide
cugcacccugccaacggga

SEQ ID NO: 1750110 - RNA, 19 nt, Artificial Sequence
  Description of Artificial Sequence: Synthetic oligonucleotide
ccacgcucggccaucgcug

SEQ ID NO: 1750111 - RNA, 19 nt, Artificial Sequence
  Description of Artificial Sequence: Synthetic oligonucleotide
ggccggcaugaacaucagg

SEQ ID NO: 1750112 - RNA, 19 nt, Artificial Sequence
  Description of Artificial Sequence: Synthetic oligonucleotide
gcgacaggcggccacgcuc

SEQ ID NO: 1750113 - RNA, 19 nt, Artificial Sequence
  Description of Artificial Sequence: Synthetic oligonucleotide
ccguuggugaugguaugcc

SEQ ID NO: 1750114 - RNA, 19 nt, Artificial Sequence
  Description of Artificial Sequence: Synthetic oligonucleotide
ccggggagcgacacgugcc

SEQ ID NO: 1750115 - RNA, 19 nt, Artificial Sequence
  Description of Artificial Sequence: Synthetic oligonucleotide
ugggcgcggcgugcgacag

SEQ ID NO: 1750116 - RNA, 19 nt, Artificial Sequence
  Description of Artificial Sequence: Synthetic oligonucleotide
ugcuaggcgugggcgcggc

SEQ ID NO: 1750117 - RNA, 19 nt, Artificial Sequence
  Description of Artificial Sequence: Synthetic oligonucleotide
ggcgcggcgugcgacaggc

SEQ ID NO: 1750118 - RNA, 19 nt, Artificial Sequence
  Description of Artificial Sequence: Synthetic oligonucleotide
cgugccugaucccucgggc

SEQ ID NO: 1750119 - RNA, 19 nt, Artificial Sequence
  Description of Artificial Sequence: Synthetic oligonucleotide
agcaaccuccccagaggga

SEQ ID NO: 1750120 - RNA, 19 nt, Artificial Sequence
  Description of Artificial Sequence: Synthetic oligonucleotide
ccgggauacacaguagcuc

SEQ ID NO: 1750121 - RNA, 19 nt, Artificial Sequence
  Description of Artificial Sequence: Synthetic oligonucleotide
cucccugcagucccaaagu

SEQ ID NO: 1750122 - RNA, 19 nt, Artificial Sequence
  Description of Artificial Sequence: Synthetic oligonucleotide
acgaagcgcucgaagguua

SEQ ID NO: 1750123 - RNA, 19 nt, Artificial Sequence
  Description of Artificial Sequence: Synthetic oligonucleotide
cgcacucggcugcagaggc

SEQ ID NO: 1750124 - RNA, 19 nt, Artificial Sequence
  Description of Artificial Sequence: Synthetic oligonucleotide
gcucuggagaaaagcucgc

SEQ ID NO: 1750125 - RNA, 19 nt, Artificial Sequence
  Description of Artificial Sequence: Synthetic oligonucleotide
cucggccaucgcugccacg

SEQ ID NO: 1750126 - RNA, 19 nt, Artificial Sequence
  Description of Artificial Sequence: Synthetic oligonucleotide
gcagcgaaggcuggucccc

SEQ ID NO: 1750127 - RNA, 19 nt, Artificial Sequence
  Description of Artificial Sequence: Synthetic oligonucleotide
guaugccuucgacguucac

SEQ ID NO: 1750128 - RNA, 19 nt, Artificial Sequence
  Description of Artificial Sequence: Synthetic oligonucleotide
ccggucguccaggaugucg

SEQ ID NO: 1750129 - RNA, 19 nt, Artificial Sequence
  Description of Artificial Sequence: Synthetic oligonucleotide
gggagcgacacgugccuga

SEQ ID NO: 1750130 - RNA, 19 nt, Artificial Sequence
  Description of Artificial Sequence: Synthetic oligonucleotide
cgccgggauacacaguagc

SEQ ID NO: 1750131 - RNA, 19 nt, Artificial Sequence
  Description of Artificial Sequence: Synthetic oligonucleotide
agcucgcggcagccccucg

SEQ ID NO: 1750132 - RNA, 19 nt, Artificial Sequence
  Description of Artificial Sequence: Synthetic oligonucleotide
gcucgcggcagccccucgg

SEQ ID NO: 1750133 - RNA, 19 nt, Artificial Sequence
  Description of Artificial Sequence: Synthetic oligonucleotide
ccucgagcacgccgcaggg

SEQ ID NO: 1750134 - RNA, 19 nt, Artificial Sequence
  Description of Artificial Sequence: Synthetic oligonucleotide
uccauccgcgucggucccc

SEQ ID NO: 1750135 - RNA, 19 nt, Artificial Sequence
  Description of Artificial Sequence: Synthetic oligonucleotide
aggcguugcugcagcgaag

SEQ ID NO: 1750136 - RNA, 19 nt, Artificial Sequence
  Description of Artificial Sequence: Synthetic oligonucleotide
cauagccgcgcugccgguc

SEQ ID NO: 1750137 - RNA, 19 nt, Artificial Sequence
  Description of Artificial Sequence: Synthetic oligonucleotide
aggagaguccgcggcucgu

SEQ ID NO: 1750138 - RNA, 19 nt, Artificial Sequence
  Description of Artificial Sequence: Synthetic oligonucleotide
gggcccguggagccugccg

SEQ ID NO: 1750139 - RNA, 19 nt, Artificial Sequence
  Description of Artificial Sequence: Synthetic oligonucleotide
cugccacacugguguugag

SEQ ID NO: 1750140 - RNA, 19 nt, Artificial Sequence
  Description of Artificial Sequence: Synthetic oligonucleotide
acccugccaacgggacucg

SEQ ID NO: 1750141 - RNA, 19 nt, Artificial Sequence
  Description of Artificial Sequence: Synthetic oligonucleotide
gagcgacacgugccugauc

SEQ ID NO: 1750142 - RNA, 19 nt, Artificial Sequence
  Description of Artificial Sequence: Synthetic oligonucleotide
ccgccguuggcguucagca

SEQ ID NO: 1750143 - RNA, 19 nt, Artificial Sequence
  Description of Artificial Sequence: Synthetic oligonucleotide
gcagucccaaagucagcuc

SEQ ID NO: 1750144 - RNA, 19 nt, Artificial Sequence
  Description of Artificial Sequence: Synthetic oligonucleotide
cgcggcgugcgacaggcgg

SEQ ID NO: 1750145 - RNA, 19 nt, Artificial Sequence
  Description of Artificial Sequence: Synthetic oligonucleotide
cgacguucaccucgggccc

SEQ ID NO: 1750146 - RNA, 19 nt, Artificial Sequence
  Description of Artificial Sequence: Synthetic oligonucleotide
ccgggaggugccacugggg

SEQ ID NO: 1750147 - RNA, 19 nt, Artificial Sequence
  Description of Artificial Sequence: Synthetic oligonucleotide
cugccggguuucaccugug

SEQ ID NO: 1750148 - RNA, 19 nt, Artificial Sequence
  Description of Artificial Sequence: Synthetic oligonucleotide
cccagcuuccauccgcguc

SEQ ID NO: 1750149 - RNA, 19 nt, Artificial Sequence
  Description of Artificial Sequence: Synthetic oligonucleotide
ucgcgugcgucugcacccu

SEQ ID NO: 1750150 - RNA, 19 nt, Artificial Sequence
  Description of Artificial Sequence: Synthetic oligonucleotide
gugcuaggcgugggcgcgg

SEQ ID NO: 1750151 - RNA, 19 nt, Artificial Sequence
  Description of Artificial Sequence: Synthetic oligonucleotide
gugcgcaagcccgccacga

SEQ ID NO: 1750152 - RNA, 19 nt, Artificial Sequence
  Description of Artificial Sequence: Synthetic oligonucleotide
gcgcacucggcugcagagg

SEQ ID NO: 1750153 - RNA, 19 nt, Artificial Sequence
  Description of Artificial Sequence: Synthetic oligonucleotide
uggagccugccggguuuca

SEQ ID NO: 1750154 - RNA, 19 nt, Artificial Sequence
  Description of Artificial Sequence: Synthetic oligonucleotide
gaccggggagcgacacgug

SEQ ID NO: 1750155 - RNA, 19 nt, Artificial Sequence
  Description of Artificial Sequence: Synthetic oligonucleotide
ggcaugaacaucaggcguu

SEQ ID NO: 1750156 - RNA, 19 nt, Artificial Sequence
  Description of Artificial Sequence: Synthetic oligonucleotide
gcgacacgugccugauccc

SEQ ID NO: 1750157 - RNA, 19 nt, Artificial Sequence
  Description of Artificial Sequence: Synthetic oligonucleotide
gcgucugcacccugccaac

SEQ ID NO: 1750158 - RNA, 19 nt, Artificial Sequence
  Description of Artificial Sequence: Synthetic oligonucleotide
ucgggcccguggagccugc

SEQ ID NO: 1750159 - RNA, 19 nt, Artificial Sequence
  Description of Artificial Sequence: Synthetic oligonucleotide
aggcggccacgcucggcca

SEQ ID NO: 1750160 - RNA, 19 nt, Artificial Sequence
  Description of Artificial Sequence: Synthetic oligonucleotide
aggguuccgggaggugcca

SEQ ID NO: 1750161 - RNA, 19 nt, Artificial Sequence
  Description of Artificial Sequence: Synthetic oligonucleotide
caccgggccaccuccugua

SEQ ID NO: 1750162 - RNA, 19 nt, Artificial Sequence
  Description of Artificial Sequence: Synthetic oligonucleotide
acguucaccucgggcccgu

SEQ ID NO: 1750163 - RNA, 19 nt, Artificial Sequence
  Description of Artificial Sequence: Synthetic oligonucleotide
caucgcugccacggccaug

SEQ ID NO: 1750164 - RNA, 19 nt, Artificial Sequence
  Description of Artificial Sequence: Synthetic oligonucleotide
gcguugcugcagcgaaggc

SEQ ID NO: 1750165 - RNA, 19 nt, Artificial Sequence
  Description of Artificial Sequence: Synthetic oligonucleotide
gcgcggggcgcgcacucgg

SEQ ID NO: 1750166 - RNA, 19 nt, Artificial Sequence
  Description of Artificial Sequence: Synthetic oligonucleotide
gcuaggcgugggcgcggcg

SEQ ID NO: 1750167 - RNA, 19 nt, Artificial Sequence
  Description of Artificial Sequence: Synthetic oligonucleotide
agcuuccauccgcgucggu

SEQ ID NO: 1750168 - RNA, 19 nt, Artificial Sequence
  Description of Artificial Sequence: Synthetic oligonucleotide
cuaggcgugggcgcggcgu

SEQ ID NO: 1750169 - RNA, 19 nt, Artificial Sequence
  Description of Artificial Sequence: Synthetic oligonucleotide
ggagaguccgcggcucguc

SEQ ID NO: 1750170 - RNA, 19 nt, Artificial Sequence
  Description of Artificial Sequence: Synthetic oligonucleotide
ggcguucagcagcgaggug

SEQ ID NO: 1750171 - RNA, 19 nt, Artificial Sequence
  Description of Artificial Sequence: Synthetic oligonucleotide
ccccagaccggggagcgac

SEQ ID NO: 1750172 - RNA, 19 nt, Artificial Sequence
  Description of Artificial Sequence: Synthetic oligonucleotide
gaucccucgggccgccguu

SEQ ID NO: 1750173 - RNA, 19 nt, Artificial Sequence
  Description of Artificial Sequence: Synthetic oligonucleotide
gcgcucgcucuuaucaguc

SEQ ID NO: 1750174 - RNA, 19 nt, Artificial Sequence
  Description of Artificial Sequence: Synthetic oligonucleotide
cgugcgacaggcggccacg

SEQ ID NO: 1750175 - RNA, 19 nt, Artificial Sequence
  Description of Artificial Sequence: Synthetic oligonucleotide
ggagccugccggguuucac

SEQ ID NO: 1750176 - RNA, 19 nt, Artificial Sequence
  Description of Artificial Sequence: Synthetic oligonucleotide
gcagggcagcucgcgugcg

SEQ ID NO: 1750177 - RNA, 19 nt, Artificial Sequence
  Description of Artificial Sequence: Synthetic oligonucleotide
gcgcaagcucuggagaaaa

SEQ ID NO: 1750178 - RNA, 19 nt, Artificial Sequence
  Description of Artificial Sequence: Synthetic oligonucleotide
gcgugcgacaggcggccac

SEQ ID NO: 1750179 - RNA, 19 nt, Artificial Sequence
  Description of Artificial Sequence: Synthetic oligonucleotide
gucggccggcaugaacauc

SEQ ID NO: 1750180 - RNA, 19 nt, Artificial Sequence
  Description of Artificial Sequence: Synthetic oligonucleotide
ccgccgggauacacaguag

SEQ ID NO: 1750181 - RNA, 19 nt, Artificial Sequence
  Description of Artificial Sequence: Synthetic oligonucleotide
gcggcgugcgacaggcggc

SEQ ID NO: 1750182 - RNA, 19 nt, Artificial Sequence
  Description of Artificial Sequence: Synthetic oligonucleotide
gcgugcgucugcacccugc

SEQ ID NO: 1750183 - RNA, 19 nt, Artificial Sequence
  Description of Artificial Sequence: Synthetic oligonucleotide
gccacgcucggccaucgcu

SEQ ID NO: 1750184 - RNA, 19 nt, Artificial Sequence
  Description of Artificial Sequence: Synthetic oligonucleotide
gguuccgggaggugccacu

SEQ ID NO: 1750185 - RNA, 19 nt, Artificial Sequence
  Description of Artificial Sequence: Synthetic oligonucleotide
ccagaccggggagcgacac

SEQ ID NO: 1750186 - RNA, 19 nt, Artificial Sequence
  Description of Artificial Sequence: Synthetic oligonucleotide
cccucggugcuaggcgugg

SEQ ID NO: 1750187 - RNA, 19 nt, Artificial Sequence
  Description of Artificial Sequence: Synthetic oligonucleotide
ggggagcgacacgugccug

SEQ ID NO: 1750188 - RNA, 19 nt, Artificial Sequence
  Description of Artificial Sequence: Synthetic oligonucleotide
cauccgcgucgguccccac

SEQ ID NO: 1750189 - RNA, 19 nt, Artificial Sequence
  Description of Artificial Sequence: Synthetic oligonucleotide
cacucggcugcagaggcuu

SEQ ID NO: 1750190 - RNA, 19 nt, Artificial Sequence
  Description of Artificial Sequence: Synthetic oligonucleotide
cucgcggcagccccucggu

SEQ ID NO: 1750191 - RNA, 19 nt, Artificial Sequence
  Description of Artificial Sequence: Synthetic oligonucleotide
gccugccggguuucaccug

SEQ ID NO: 1750192 - RNA, 19 nt, Artificial Sequence
  Description of Artificial Sequence: Synthetic oligonucleotide
ccccucggugcuaggcgug

SEQ ID NO: 1750193 - RNA, 19 nt, Artificial Sequence
  Description of Artificial Sequence: Synthetic oligonucleotide
cucgggccgccguuggcgu

SEQ ID NO: 1750194 - RNA, 19 nt, Artificial Sequence
  Description of Artificial Sequence: Synthetic oligonucleotide
cugugccuauguccugggu

SEQ ID NO: 1750195 - RNA, 19 nt, Artificial Sequence
  Description of Artificial Sequence: Synthetic oligonucleotide
cgaagguuagguagccacu

SEQ ID NO: 1750196 - RNA, 19 nt, Artificial Sequence
  Description of Artificial Sequence: Synthetic oligonucleotide
gggcgcggcgugcgacagg

SEQ ID NO: 1750197 - RNA, 19 nt, Artificial Sequence
  Description of Artificial Sequence: Synthetic oligonucleotide
cgcgcugccggucguccag

SEQ ID NO: 1750198 - RNA, 19 nt, Artificial Sequence
  Description of Artificial Sequence: Synthetic oligonucleotide
gccuccgccgggauacaca

SEQ ID NO: 1750199 - RNA, 19 nt, Artificial Sequence
  Description of Artificial Sequence: Synthetic oligonucleotide
gcuggcgcggggcgcgcac

SEQ ID NO: 1750200 - RNA, 19 nt, Artificial Sequence
  Description of Artificial Sequence: Synthetic oligonucleotide
gccgcgcugccggucgucc

SEQ ID NO: 1750201 - RNA, 19 nt, Artificial Sequence
  Description of Artificial Sequence: Synthetic oligonucleotide
cggcaugaacaucaggcgu

SEQ ID NO: 1750202 - RNA, 19 nt, Artificial Sequence
  Description of Artificial Sequence: Synthetic oligonucleotide
ggguuccgggaggugccac

SEQ ID NO: 1750203 - RNA, 19 nt, Artificial Sequence
  Description of Artificial Sequence: Synthetic oligonucleotide
gcgcgcacucggcugcaga

SEQ ID NO: 1750204 - RNA, 19 nt, Artificial Sequence
  Description of Artificial Sequence: Synthetic oligonucleotide
ccccagagggaggggacuc

SEQ ID NO: 1750205 - RNA, 19 nt, Artificial Sequence
  Description of Artificial Sequence: Synthetic oligonucleotide
cgaggugcgcaagcccgcc

SEQ ID NO: 1750206 - RNA, 19 nt, Artificial Sequence
  Description of Artificial Sequence: Synthetic oligonucleotide
ggccacgcucggccaucgc

SEQ ID NO: 1750207 - RNA, 19 nt, Artificial Sequence
  Description of Artificial Sequence: Synthetic oligonucleotide
cgcaggcccucgagcacgc

SEQ ID NO: 1750208 - RNA, 19 nt, Artificial Sequence
  Description of Artificial Sequence: Synthetic oligonucleotide
agcuggcgcggggcgcgca

SEQ ID NO: 1750209 - RNA, 19 nt, Artificial Sequence
  Description of Artificial Sequence: Synthetic oligonucleotide
gcaccgggccaccuccugu

SEQ ID NO: 1750210 - RNA, 19 nt, Artificial Sequence
  Description of Artificial Sequence: Synthetic oligonucleotide
cagcuggcgcggggcgcgc

SEQ ID NO: 1750211 - RNA, 19 nt, Artificial Sequence
  Description of Artificial Sequence: Synthetic oligonucleotide
cagggcagcucgcgugcgu

SEQ ID NO: 1750212 - RNA, 19 nt, Artificial Sequence
  Description of Artificial Sequence: Synthetic oligonucleotide
cggcgugcgacaggcggcc

SEQ ID NO: 1750213 - RNA, 19 nt, Artificial Sequence
  Description of Artificial Sequence: Synthetic oligonucleotide
ggacucccugcagucccaa

SEQ ID NO: 1750214 - RNA, 19 nt, Artificial Sequence
  Description of Artificial Sequence: Synthetic oligonucleotide
ggagcgacacgugccugau

SEQ ID NO: 1750215 - RNA, 19 nt, Artificial Sequence
  Description of Artificial Sequence: Synthetic oligonucleotide
cuccgccgggauacacagu

SEQ ID NO: 1750216 - RNA, 19 nt, Artificial Sequence
  Description of Artificial Sequence: Synthetic oligonucleotide
ccauccgcgucggucccca

SEQ ID NO: 1750217 - RNA, 19 nt, Artificial Sequence
  Description of Artificial Sequence: Synthetic oligonucleotide
cgugggcgcggcgugcgac

SEQ ID NO: 1750218 - RNA, 19 nt, Artificial Sequence
  Description of Artificial Sequence: Synthetic oligonucleotide
cccagaccggggagcgaca

SEQ ID NO: 1750219 - RNA, 19 nt, Artificial Sequence
  Description of Artificial Sequence: Synthetic oligonucleotide
gcggccacgcucggccauc

SEQ ID NO: 1750220 - RNA, 19 nt, Artificial Sequence
  Description of Artificial Sequence: Synthetic oligonucleotide
gcugccggucguccaggau

SEQ ID NO: 1750221 - RNA, 19 nt, Artificial Sequence
  Description of Artificial Sequence: Synthetic oligonucleotide
cgacacgugccugaucccu

SEQ ID NO: 1750222 - RNA, 19 nt, Artificial Sequence
  Description of Artificial Sequence: Synthetic oligonucleotide
gcgcggcgugcgacaggcg

SEQ ID NO: 1750223 - RNA, 19 nt, Artificial Sequence
  Description of Artificial Sequence: Synthetic oligonucleotide
ggcggccacgcucggccau

SEQ ID NO: 1750224 - RNA, 19 nt, Artificial Sequence
  Description of Artificial Sequence: Synthetic oligonucleotide
cggccccgagccaucaucu

SEQ ID NO: 1750225 - RNA, 19 nt, Artificial Sequence
  Description of Artificial Sequence: Synthetic oligonucleotide
ggcgugcgacaggcggcca

SEQ ID NO: 1750226 - RNA, 19 nt, Artificial Sequence
  Description of Artificial Sequence: Synthetic oligonucleotide
gcacucggcugcagaggcu

SEQ ID NO: 1750227 - RNA, 19 nt, Artificial Sequence
  Description of Artificial Sequence: Synthetic oligonucleotide
gcgugggcgcggcgugcga

SEQ ID NO: 1750228 - RNA, 19 nt, Artificial Sequence
  Description of Artificial Sequence: Synthetic oligonucleotide
cucggccccgagccaucau

SEQ ID NO: 1750229 - RNA, 19 nt, Artificial Sequence
  Description of Artificial Sequence: Synthetic oligonucleotide
cgggccaccuccuguacuu

SEQ ID NO: 1750230 - RNA, 19 nt, Artificial Sequence
  Description of Artificial Sequence: Synthetic oligonucleotide
cggggagcgacacgugccu

SEQ ID NO: 1750231 - RNA, 19 nt, Artificial Sequence
  Description of Artificial Sequence: Synthetic oligonucleotide
cgcgugcgucugcacccug

SEQ ID NO: 1750232 - RNA, 19 nt, Artificial Sequence
  Description of Artificial Sequence: Synthetic oligonucleotide
ccgcgcugccggucgucca

SEQ ID NO: 1750233 - RNA, 19 nt, Artificial Sequence
  Description of Artificial Sequence: Synthetic oligonucleotide
gcacgccgcagggcagcuc

SEQ ID NO: 1750234 - RNA, 19 nt, Artificial Sequence
  Description of Artificial Sequence: Synthetic oligonucleotide
cgccuccgccgggauacac

SEQ ID NO: 1750235 - RNA, 19 nt, Artificial Sequence
  Description of Artificial Sequence: Synthetic oligonucleotide
cguggagccugccggguuu

SEQ ID NO: 1750236 - RNA, 19 nt, Artificial Sequence
  Description of Artificial Sequence: Synthetic oligonucleotide
ccgcggcucgucggccggc

SEQ ID NO: 1750237 - RNA, 19 nt, Artificial Sequence
  Description of Artificial Sequence: Synthetic oligonucleotide
gccggucguccaggauguc

SEQ ID NO: 1750238 - RNA, 19 nt, Artificial Sequence
  Description of Artificial Sequence: Synthetic oligonucleotide
cguucaccucgggcccgug

SEQ ID NO: 1750239 - RNA, 19 nt, Artificial Sequence
  Description of Artificial Sequence: Synthetic oligonucleotide
cccugccaacgggacucga

SEQ ID NO: 1750240 - RNA, 19 nt, Artificial Sequence
  Description of Artificial Sequence: Synthetic oligonucleotide
cgucggccggcaugaacau

SEQ ID NO: 1750241 - RNA, 19 nt, Artificial Sequence
  Description of Artificial Sequence: Synthetic oligonucleotide
gcucgucggccggcaugaa

SEQ ID NO: 1750242 - RNA, 19 nt, Artificial Sequence
  Description of Artificial Sequence: Synthetic oligonucleotide
cccguggagccugccgggu

SEQ ID NO: 1750243 - RNA, 19 nt, Artificial Sequence
  Description of Artificial Sequence: Synthetic oligonucleotide
cguuggcguucagcagcga

SEQ ID NO: 1750244 - RNA, 19 nt, Artificial Sequence
  Description of Artificial Sequence: Synthetic oligonucleotide
ccgccuccgccgggauaca

SEQ ID NO: 1750245 - RNA, 19 nt, Artificial Sequence
  Description of Artificial Sequence: Synthetic oligonucleotide
cuaacaucaauuuugaugc

SEQ ID NO: 1750246 - RNA, 19 nt, Artificial Sequence
  Description of Artificial Sequence: Synthetic oligonucleotide
uacaaugacacuuaaagcc

SEQ ID NO: 1750247 - RNA, 19 nt, Artificial Sequence
  Description of Artificial Sequence: Synthetic oligonucleotide
uuagauuucauuaugaauu

SEQ ID NO: 1750248 - RNA, 19 nt, Artificial Sequence
  Description of Artificial Sequence: Synthetic oligonucleotide
cauacaaugacacuuaaag

SEQ ID NO: 1750249 - RNA, 19 nt, Artificial Sequence
  Description of Artificial Sequence: Synthetic oligonucleotide
acuaacaucaauuuugaug

SEQ ID NO: 1750250 - RNA, 19 nt, Artificial Sequence
  Description of Artificial Sequence: Synthetic oligonucleotide
aauucuauucgcgauggcc

SEQ ID NO: 1750251 - RNA, 19 nt, Artificial Sequence
  Description of Artificial Sequence: Synthetic oligonucleotide
guuucaaugacuauagugg

SEQ ID NO: 1750252 - RNA, 19 nt, Artificial Sequence
  Description of Artificial Sequence: Synthetic oligonucleotide
uuggacuuaauucuauucg

SEQ ID NO: 1750253 - RNA, 19 nt, Artificial Sequence
  Description of Artificial Sequence: Synthetic oligonucleotide
ugaauuuacccaaacaacu

SEQ ID NO: 1750254 - RNA, 19 nt, Artificial Sequence
  Description of Artificial Sequence: Synthetic oligonucleotide
ucuuugaugagauucagac

SEQ ID NO: 1750255 - RNA, 19 nt, Artificial Sequence
  Description of Artificial Sequence: Synthetic oligonucleotide
cucuaaaugagucuggucc

SEQ ID NO: 1750256 - RNA, 19 nt, Artificial Sequence
  Description of Artificial Sequence: Synthetic oligonucleotide
aguuauuucuucuuggcag

SEQ ID NO: 1750257 - RNA, 19 nt, Artificial Sequence
  Description of Artificial Sequence: Synthetic oligonucleotide
auugauggauucuagagug

SEQ ID NO: 1750258 - RNA, 19 nt, Artificial Sequence
  Description of Artificial Sequence: Synthetic oligonucleotide
gaauguaccagccuuucgg

SEQ ID NO: 1750259 - RNA, 19 nt, Artificial Sequence
  Description of Artificial Sequence: Synthetic oligonucleotide
aguuucaaugacuauagug

SEQ ID NO: 1750260 - RNA, 19 nt, Artificial Sequence
  Description of Artificial Sequence: Synthetic oligonucleotide
ucaagcaaguuuuagauau

SEQ ID NO: 1750261 - RNA, 19 nt, Artificial Sequence
  Description of Artificial Sequence: Synthetic oligonucleotide
aaagucauuucggaauucc

SEQ ID NO: 1750262 - RNA, 19 nt, Artificial Sequence
  Description of Artificial Sequence: Synthetic oligonucleotide
uuuacccaaacaacuaucc

SEQ ID NO: 1750263 - RNA, 19 nt, Artificial Sequence
  Description of Artificial Sequence: Synthetic oligonucleotide
auccacuuuacacaagccc

SEQ ID NO: 1750264 - RNA, 19 nt, Artificial Sequence
  Description of Artificial Sequence: Synthetic oligonucleotide
aaagcgucuccucagaagu

SEQ ID NO: 1750265 - RNA, 19 nt, Artificial Sequence
  Description of Artificial Sequence: Synthetic oligonucleotide
agaaaauccgauuugccca

SEQ ID NO: 1750266 - RNA, 19 nt, Artificial Sequence
  Description of Artificial Sequence: Synthetic oligonucleotide
ucuucagugcacuuggucc

SEQ ID NO: 1750267 - RNA, 19 nt, Artificial Sequence
  Description of Artificial Sequence: Synthetic oligonucleotide
acuauauuguuguggacuc

SEQ ID NO: 1750268 - RNA, 19 nt, Artificial Sequence
  Description of Artificial Sequence: Synthetic oligonucleotide
uuaauucuauucgcgaugg

SEQ ID NO: 1750269 - RNA, 19 nt, Artificial Sequence
  Description of Artificial Sequence: Synthetic oligonucleotide
uuugggcucagaaaauccg

SEQ ID NO: 1750270 - RNA, 19 nt, Artificial Sequence
  Description of Artificial Sequence: Synthetic oligonucleotide
uaauccauaaacugcugag

SEQ ID NO: 1750271 - RNA, 19 nt, Artificial Sequence
  Description of Artificial Sequence: Synthetic oligonucleotide
ucauuguacacuauauugu

SEQ ID NO: 1750272 - RNA, 19 nt, Artificial Sequence
  Description of Artificial Sequence: Synthetic oligonucleotide
agcccuuuggacuuaauuc

SEQ ID NO: 1750273 - RNA, 19 nt, Artificial Sequence
  Description of Artificial Sequence: Synthetic oligonucleotide
ucuauguacugaauguacc

SEQ ID NO: 1750274 - RNA, 19 nt, Artificial Sequence
  Description of Artificial Sequence: Synthetic oligonucleotide
uguacugaauguaccagcc

SEQ ID NO: 1750275 - RNA, 19 nt, Artificial Sequence
  Description of Artificial Sequence: Synthetic oligonucleotide
accguuuaaaacuagaauu

SEQ ID NO: 1750276 - RNA, 19 nt, Artificial Sequence
  Description of Artificial Sequence: Synthetic oligonucleotide
auguacugaauguaccagc

SEQ ID NO: 1750277 - RNA, 19 nt, Artificial Sequence
  Description of Artificial Sequence: Synthetic oligonucleotide
uacacuauauuguugugga

SEQ ID NO: 1750278 - RNA, 19 nt, Artificial Sequence
  Description of Artificial Sequence: Synthetic oligonucleotide
augagauucagacauacaa

SEQ ID NO: 1750279 - RNA, 19 nt, Artificial Sequence
  Description of Artificial Sequence: Synthetic oligonucleotide
aguuacauaguaccuugac

SEQ ID NO: 1750280 - RNA, 19 nt, Artificial Sequence
  Description of Artificial Sequence: Synthetic oligonucleotide
uucagauugaaugucaccu

SEQ ID NO: 1750281 - RNA, 19 nt, Artificial Sequence
  Description of Artificial Sequence: Synthetic oligonucleotide
cugaguggcguucauaugg

SEQ ID NO: 1750282 - RNA, 19 nt, Artificial Sequence
  Description of Artificial Sequence: Synthetic oligonucleotide
uaugguuaacaaauuuuca

SEQ ID NO: 1750283 - RNA, 19 nt, Artificial Sequence
  Description of Artificial Sequence: Synthetic oligonucleotide
uccacuuuacacaagcccu

SEQ ID NO: 1750284 - RNA, 19 nt, Artificial Sequence
  Description of Artificial Sequence: Synthetic oligonucleotide
uguaugguuaacaaauuuu

SEQ ID NO: 1750285 - RNA, 19 nt, Artificial Sequence
  Description of Artificial Sequence: Synthetic oligonucleotide
uacugaauaccuuccaccc

SEQ ID NO: 1750286 - RNA, 19 nt, Artificial Sequence
  Description of Artificial Sequence: Synthetic oligonucleotide
cucucuuagugccaaagcg

SEQ ID NO: 1750287 - RNA, 19 nt, Artificial Sequence
  Description of Artificial Sequence: Synthetic oligonucleotide
uuguuguggacucucuuag

SEQ ID NO: 1750288 - RNA, 19 nt, Artificial Sequence
  Description of Artificial Sequence: Synthetic oligonucleotide
aagucggucagaguuuccc

SEQ ID NO: 1750289 - RNA, 19 nt, Artificial Sequence
  Description of Artificial Sequence: Synthetic oligonucleotide
uggacuuaauucuauucgc

SEQ ID NO: 1750290 - RNA, 19 nt, Artificial Sequence
  Description of Artificial Sequence: Synthetic oligonucleotide
aaauccgauuugcccaugg

SEQ ID NO: 1750291 - RNA, 19 nt, Artificial Sequence
  Description of Artificial Sequence: Synthetic oligonucleotide
uucaauguaugguuaacaa

SEQ ID NO: 1750292 - RNA, 19 nt, Artificial Sequence
  Description of Artificial Sequence: Synthetic oligonucleotide
uucgcgauggccuuugggc

SEQ ID NO: 1750293 - RNA, 19 nt, Artificial Sequence
  Description of Artificial Sequence: Synthetic oligonucleotide
ucagaaaauccgauuugcc

SEQ ID NO: 1750294 - RNA, 19 nt, Artificial Sequence
  Description of Artificial Sequence: Synthetic oligonucleotide
ugauguauucauuguacac

SEQ ID NO: 1750295 - RNA, 19 nt, Artificial Sequence
  Description of Artificial Sequence: Synthetic oligonucleotide
guaguuacauaguaccuug

SEQ ID NO: 1750296 - RNA, 19 nt, Artificial Sequence
  Description of Artificial Sequence: Synthetic oligonucleotide
uccgauuugcccauggcga

SEQ ID NO: 1750297 - RNA, 19 nt, Artificial Sequence
  Description of Artificial Sequence: Synthetic oligonucleotide
acucucuuagugccaaagc

SEQ ID NO: 1750298 - RNA, 19 nt, Artificial Sequence
  Description of Artificial Sequence: Synthetic oligonucleotide
uuuggacuuaauucuauuc

SEQ ID NO: 1750299 - RNA, 19 nt, Artificial Sequence
  Description of Artificial Sequence: Synthetic oligonucleotide
uuuucaagcucaagcaagu

SEQ ID NO: 1750300 - RNA, 19 nt, Artificial Sequence
  Description of Artificial Sequence: Synthetic oligonucleotide
ucuaaaugagucuggucca

SEQ ID NO: 1750301 - RNA, 19 nt, Artificial Sequence
  Description of Artificial Sequence: Synthetic oligonucleotide
cagaguuucccacugagug

SEQ ID NO: 1750302 - RNA, 19 nt, Artificial Sequence
  Description of Artificial Sequence: Synthetic oligonucleotide
uuuacacaagcccucucug

SEQ ID NO: 1750303 - RNA, 19 nt, Artificial Sequence
  Description of Artificial Sequence: Synthetic oligonucleotide
cuuaauucuauucgcgaug

SEQ ID NO: 1750304 - RNA, 19 nt, Artificial Sequence
  Description of Artificial Sequence: Synthetic oligonucleotide
auccgauuugcccauggcg

SEQ ID NO: 1750305 - RNA, 19 nt, Artificial Sequence
  Description of Artificial Sequence: Synthetic oligonucleotide
uauggaugugcucucggug

SEQ ID NO: 1750306 - RNA, 19 nt, Artificial Sequence
  Description of Artificial Sequence: Synthetic oligonucleotide
aaaacaggcgucuccugcu

SEQ ID NO: 1750307 - RNA, 19 nt, Artificial Sequence
  Description of Artificial Sequence: Synthetic oligonucleotide
aagccauucucgucacggc

SEQ ID NO: 1750308 - RNA, 19 nt, Artificial Sequence
  Description of Artificial Sequence: Synthetic oligonucleotide
auuuucaagcucaagcaag

SEQ ID NO: 1750309 - RNA, 19 nt, Artificial Sequence
  Description of Artificial Sequence: Synthetic oligonucleotide
auaauccauaaacugcuga

SEQ ID NO: 1750310 - RNA, 19 nt, Artificial Sequence
  Description of Artificial Sequence: Synthetic oligonucleotide
ucaauguaugguuaacaaa

SEQ ID NO: 1750311 - RNA, 19 nt, Artificial Sequence
  Description of Artificial Sequence: Synthetic oligonucleotide
ugaauguaccagccuuucg

SEQ ID NO: 1750312 - RNA, 19 nt, Artificial Sequence
  Description of Artificial Sequence: Synthetic oligonucleotide
aauaccuuccacccuucgu

SEQ ID NO: 1750313 - RNA, 19 nt, Artificial Sequence
  Description of Artificial Sequence: Synthetic oligonucleotide
uucguccuuucaaaggucc

SEQ ID NO: 1750314 - RNA, 19 nt, Artificial Sequence
  Description of Artificial Sequence: Synthetic oligonucleotide
uuucaauguaugguuaaca

SEQ ID NO: 1750315 - RNA, 19 nt, Artificial Sequence
  Description of Artificial Sequence: Synthetic oligonucleotide
uucggaauuccuccgaaaa

SEQ ID NO: 1750316 - RNA, 19 nt, Artificial Sequence
  Description of Artificial Sequence: Synthetic oligonucleotide
gaaugacagucucuaaaug

SEQ ID NO: 1750317 - RNA, 19 nt, Artificial Sequence
  Description of Artificial Sequence: Synthetic oligonucleotide
guacacuauauuguugugg

SEQ ID NO: 1750318 - RNA, 19 nt, Artificial Sequence
  Description of Artificial Sequence: Synthetic oligonucleotide
guuguggacucucuuagug

SEQ ID NO: 1750319 - RNA, 19 nt, Artificial Sequence
  Description of Artificial Sequence: Synthetic oligonucleotide
aauaguuuccgggucucug

SEQ ID NO: 1750320 - RNA, 19 nt, Artificial Sequence
  Description of Artificial Sequence: Synthetic oligonucleotide
uucaaugacuauaguggcu

SEQ ID NO: 1750321 - RNA, 19 nt, Artificial Sequence
  Description of Artificial Sequence: Synthetic oligonucleotide
accucgucucaccuguucc

SEQ ID NO: 1750322 - RNA, 19 nt, Artificial Sequence
  Description of Artificial Sequence: Synthetic oligonucleotide
acuuaauucuauucgcgau

SEQ ID NO: 1750323 - RNA, 19 nt, Artificial Sequence
  Description of Artificial Sequence: Synthetic oligonucleotide
aauuccaguugccugcgaa

SEQ ID NO: 1750324 - RNA, 19 nt, Artificial Sequence
  Description of Artificial Sequence: Synthetic oligonucleotide
ugacuauaguggcugaaaa

SEQ ID NO: 1750325 - RNA, 19 nt, Artificial Sequence
  Description of Artificial Sequence: Synthetic oligonucleotide
cuucagugcacuugguccc

SEQ ID NO: 1750326 - RNA, 19 nt, Artificial Sequence
  Description of Artificial Sequence: Synthetic oligonucleotide
gacuuaauucuauucgcga

SEQ ID NO: 1750327 - RNA, 19 nt, Artificial Sequence
  Description of Artificial Sequence: Synthetic oligonucleotide
agaaguuccagaaagucau

SEQ ID NO: 1750328 - RNA, 19 nt, Artificial Sequence
  Description of Artificial Sequence: Synthetic oligonucleotide
gauugaaugucaccuuuuc

SEQ ID NO: 1750329 - RNA, 19 nt, Artificial Sequence
  Description of Artificial Sequence: Synthetic oligonucleotide
uuuucauugauggauucua

SEQ ID NO: 1750330 - RNA, 19 nt, Artificial Sequence
  Description of Artificial Sequence: Synthetic oligonucleotide
guagccaccguuuaaaacu

SEQ ID NO: 1750331 - RNA, 19 nt, Artificial Sequence
  Description of Artificial Sequence: Synthetic oligonucleotide
cacaguaguuacauaguac

SEQ ID NO: 1750332 - RNA, 19 nt, Artificial Sequence
  Description of Artificial Sequence: Synthetic oligonucleotide
guaccagcgaagcuucugg

SEQ ID NO: 1750333 - RNA, 19 nt, Artificial Sequence
  Description of Artificial Sequence: Synthetic oligonucleotide
ugaugagauucagacauac

SEQ ID NO: 1750334 - RNA, 19 nt, Artificial Sequence
  Description of Artificial Sequence: Synthetic oligonucleotide
aaacaggcgucuccugcuc

SEQ ID NO: 1750335 - RNA, 19 nt, Artificial Sequence
  Description of Artificial Sequence: Synthetic oligonucleotide
uuuugaugcuucacaauuu

SEQ ID NO: 1750336 - RNA, 19 nt, Artificial Sequence
  Description of Artificial Sequence: Synthetic oligonucleotide
cuguguaucugucaaucac

SEQ ID NO: 1750337 - RNA, 19 nt, Artificial Sequence
  Description of Artificial Sequence: Synthetic oligonucleotide
acauaguaccuugacuaac

SEQ ID NO: 1750338 - RNA, 19 nt, Artificial Sequence
  Description of Artificial Sequence: Synthetic oligonucleotide
uguagccaccguuuaaaac

SEQ ID NO: 1750339 - RNA, 19 nt, Artificial Sequence
  Description of Artificial Sequence: Synthetic oligonucleotide
agcucaagcaaguuuuaga

SEQ ID NO: 1750340 - RNA, 19 nt, Artificial Sequence
  Description of Artificial Sequence: Synthetic oligonucleotide
ucucaccuguuccucaaug

SEQ ID NO: 1750341 - RNA, 19 nt, Artificial Sequence
  Description of Artificial Sequence: Synthetic oligonucleotide
ugaugauguggcuaccgcu

SEQ ID NO: 1750342 - RNA, 19 nt, Artificial Sequence
  Description of Artificial Sequence: Synthetic oligonucleotide
uccgucucauugacgaugc

SEQ ID NO: 1750343 - RNA, 19 nt, Artificial Sequence
  Description of Artificial Sequence: Synthetic oligonucleotide
uauauuguuguggacucuc

SEQ ID NO: 1750344 - RNA, 19 nt, Artificial Sequence
  Description of Artificial Sequence: Synthetic oligonucleotide
cauuugguaaagucgguca

SEQ ID NO: 1750345 - RNA, 19 nt, Artificial Sequence
  Description of Artificial Sequence: Synthetic oligonucleotide
uguacacuauauuguugug

SEQ ID NO: 1750346 - RNA, 19 nt, Artificial Sequence
  Description of Artificial Sequence: Synthetic oligonucleotide
cuaccgcugagcuaccugc

SEQ ID NO: 1750347 - RNA, 19 nt, Artificial Sequence
  Description of Artificial Sequence: Synthetic oligonucleotide
ucuuuccgucucauugacg

SEQ ID NO: 1750348 - RNA, 19 nt, Artificial Sequence
  Description of Artificial Sequence: Synthetic oligonucleotide
cuauguacugaauguacca

SEQ ID NO: 1750349 - RNA, 19 nt, Artificial Sequence
  Description of Artificial Sequence: Synthetic oligonucleotide
gacagucucuaaaugaguc

SEQ ID NO: 1750350 - RNA, 19 nt, Artificial Sequence
  Description of Artificial Sequence: Synthetic oligonucleotide
acaaugacacuuaaagcca

SEQ ID NO: 1750351 - RNA, 19 nt, Artificial Sequence
  Description of Artificial Sequence: Synthetic oligonucleotide
ucagacauacaaugacacu

SEQ ID NO: 1750352 - RNA, 19 nt, Artificial Sequence
  Description of Artificial Sequence: Synthetic oligonucleotide
acacuauauuguuguggac

SEQ ID NO: 1750353 - RNA, 19 nt, Artificial Sequence
  Description of Artificial Sequence: Synthetic oligonucleotide
cauaguaccuugacuaaca

SEQ ID NO: 1750354 - RNA, 19 nt, Artificial Sequence
  Description of Artificial Sequence: Synthetic oligonucleotide
agaaagucauuucggaauu

SEQ ID NO: 1750355 - RNA, 19 nt, Artificial Sequence
  Description of Artificial Sequence: Synthetic oligonucleotide
aaacaacuauccaacagua

SEQ ID NO: 1750356 - RNA, 19 nt, Artificial Sequence
  Description of Artificial Sequence: Synthetic oligonucleotide
cuuucggugucucauccac

SEQ ID NO: 1750357 - RNA, 19 nt, Artificial Sequence
  Description of Artificial Sequence: Synthetic oligonucleotide
uccaguugccugcgaauag

SEQ ID NO: 1750358 - RNA, 19 nt, Artificial Sequence
  Description of Artificial Sequence: Synthetic oligonucleotide
cauauggaugugcucucgg

SEQ ID NO: 1750359 - RNA, 19 nt, Artificial Sequence
  Description of Artificial Sequence: Synthetic oligonucleotide
auucuauucgcgauggccu

SEQ ID NO: 1750360 - RNA, 19 nt, Artificial Sequence
  Description of Artificial Sequence: Synthetic oligonucleotide
auuguuguggacucucuua

SEQ ID NO: 1750361 - RNA, 19 nt, Artificial Sequence
  Description of Artificial Sequence: Synthetic oligonucleotide
caaagcgucuccucagaag

SEQ ID NO: 1750362 - RNA, 19 nt, Artificial Sequence
  Description of Artificial Sequence: Synthetic oligonucleotide
uucuuuccgucucauugac

SEQ ID NO: 1750363 - RNA, 19 nt, Artificial Sequence
  Description of Artificial Sequence: Synthetic oligonucleotide
ucauauggaugugcucucg

SEQ ID NO: 1750364 - RNA, 19 nt, Artificial Sequence
  Description of Artificial Sequence: Synthetic oligonucleotide
uacauaguaccuugacuaa

SEQ ID NO: 1750365 - RNA, 19 nt, Artificial Sequence
  Description of Artificial Sequence: Synthetic oligonucleotide
ugaguggcguucauaugga

SEQ ID NO: 1750366 - RNA, 19 nt, Artificial Sequence
  Description of Artificial Sequence: Synthetic oligonucleotide
ucuccuaguuucuuaguua

SEQ ID NO: 1750367 - RNA, 19 nt, Artificial Sequence
  Description of Artificial Sequence: Synthetic oligonucleotide
gaauaccuuccacccuucg

SEQ ID NO: 1750368 - RNA, 19 nt, Artificial Sequence
  Description of Artificial Sequence: Synthetic oligonucleotide
auaguuuccgggucucugu

SEQ ID NO: 1750369 - RNA, 19 nt, Artificial Sequence
  Description of Artificial Sequence: Synthetic oligonucleotide
ucuucauacugaauaccuu

SEQ ID NO: 1750370 - RNA, 19 nt, Artificial Sequence
  Description of Artificial Sequence: Synthetic oligonucleotide
auucgcgauggccuuuggg

SEQ ID NO: 1750371 - RNA, 19 nt, Artificial Sequence
  Description of Artificial Sequence: Synthetic oligonucleotide
aagcucaagcaaguuuuag

SEQ ID NO: 1750372 - RNA, 19 nt, Artificial Sequence
  Description of Artificial Sequence: Synthetic oligonucleotide
guggcuaccgcugagcuac

SEQ ID NO: 1750373 - RNA, 19 nt, Artificial Sequence
  Description of Artificial Sequence: Synthetic oligonucleotide
cauuagauuucauuaugaa

SEQ ID NO: 1750374 - RNA, 19 nt, Artificial Sequence
  Description of Artificial Sequence: Synthetic oligonucleotide
caaacaacuauccaacagu

SEQ ID NO: 1750375 - RNA, 19 nt, Artificial Sequence
  Description of Artificial Sequence: Synthetic oligonucleotide
ugcgaauaguuuccggguc

SEQ ID NO: 1750376 - RNA, 19 nt, Artificial Sequence
  Description of Artificial Sequence: Synthetic oligonucleotide
ccugcgaauaguuuccggg

SEQ ID NO: 1750377 - RNA, 19 nt, Artificial Sequence
  Description of Artificial Sequence: Synthetic oligonucleotide
gacucucuuagugccaaag

SEQ ID NO: 1750378 - RNA, 19 nt, Artificial Sequence
  Description of Artificial Sequence: Synthetic oligonucleotide
auauggaugugcucucggu

SEQ ID NO: 1750379 - RNA, 19 nt, Artificial Sequence
  Description of Artificial Sequence: Synthetic oligonucleotide
aguaguuacauaguaccuu

SEQ ID NO: 1750380 - RNA, 19 nt, Artificial Sequence
  Description of Artificial Sequence: Synthetic oligonucleotide
acacaguaguuacauagua

SEQ ID NO: 1750381 - RNA, 19 nt, Artificial Sequence
  Description of Artificial Sequence: Synthetic oligonucleotide
ggacuuaauucuauucgcg

SEQ ID NO: 1750382 - RNA, 19 nt, Artificial Sequence
  Description of Artificial Sequence: Synthetic oligonucleotide
auuguacacuauauuguug

SEQ ID NO: 1750383 - RNA, 19 nt, Artificial Sequence
  Description of Artificial Sequence: Synthetic oligonucleotide
uuccgucucauugacgaug

SEQ ID NO: 1750384 - RNA, 19 nt, Artificial Sequence
  Description of Artificial Sequence: Synthetic oligonucleotide
cagaaguuccagaaaguca

SEQ ID NO: 1750385 - RNA, 19 nt, Artificial Sequence
  Description of Artificial Sequence: Synthetic oligonucleotide
ucggcuuaauucuguaaaa

SEQ ID NO: 1750386 - RNA, 19 nt, Artificial Sequence
  Description of Artificial Sequence: Synthetic oligonucleotide
uaguuacauaguaccuuga

SEQ ID NO: 1750387 - RNA, 19 nt, Artificial Sequence
  Description of Artificial Sequence: Synthetic oligonucleotide
ccguuuaaaacuagaauuc

SEQ ID NO: 1750388 - RNA, 19 nt, Artificial Sequence
  Description of Artificial Sequence: Synthetic oligonucleotide
uuagugccaaagcgucucc

SEQ ID NO: 1750389 - RNA, 19 nt, Artificial Sequence
  Description of Artificial Sequence: Synthetic oligonucleotide
gaagauucuuuccgucuca

SEQ ID NO: 1750390 - RNA, 19 nt, Artificial Sequence
  Description of Artificial Sequence: Synthetic oligonucleotide
cuuagugccaaagcgucuc

SEQ ID NO: 1750391 - RNA, 19 nt, Artificial Sequence
  Description of Artificial Sequence: Synthetic oligonucleotide
uaccugcuccuuuauucag

SEQ ID NO: 1750392 - RNA, 19 nt, Artificial Sequence
  Description of Artificial Sequence: Synthetic oligonucleotide
uucauauggaugugcucuc

SEQ ID NO: 1750393 - RNA, 19 nt, Artificial Sequence
  Description of Artificial Sequence: Synthetic oligonucleotide
uaauucuauucgcgauggc

SEQ ID NO: 1750394 - RNA, 19 nt, Artificial Sequence
  Description of Artificial Sequence: Synthetic oligonucleotide
aaagucggucagaguuucc

SEQ ID NO: 1750395 - RNA, 19 nt, Artificial Sequence
  Description of Artificial Sequence: Synthetic oligonucleotide
aaugacuauaguggcugaa

SEQ ID NO: 1750396 - RNA, 19 nt, Artificial Sequence
  Description of Artificial Sequence: Synthetic oligonucleotide
ucagauugaaugucaccuu

SEQ ID NO: 1750397 - RNA, 19 nt, Artificial Sequence
  Description of Artificial Sequence: Synthetic oligonucleotide
uggaugugcucucgguggc

SEQ ID NO: 1750398 - RNA, 19 nt, Artificial Sequence
  Description of Artificial Sequence: Synthetic oligonucleotide
uaccuugacuaacaucaau

SEQ ID NO: 1750399 - RNA, 19 nt, Artificial Sequence
  Description of Artificial Sequence: Synthetic oligonucleotide
uaaagucggucagaguuuc

SEQ ID NO: 1750400 - RNA, 19 nt, Artificial Sequence
  Description of Artificial Sequence: Synthetic oligonucleotide
ucucauugacgaugcacuc

SEQ ID NO: 1750401 - RNA, 19 nt, Artificial Sequence
  Description of Artificial Sequence: Synthetic oligonucleotide
ucaucguuuucucggcuua

SEQ ID NO: 1750402 - RNA, 19 nt, Artificial Sequence
  Description of Artificial Sequence: Synthetic oligonucleotide
guggcguucauauggaugu

SEQ ID NO: 1750403 - RNA, 19 nt, Artificial Sequence
  Description of Artificial Sequence: Synthetic oligonucleotide
uucggugucucauccacuu

SEQ ID NO: 1750404 - RNA, 19 nt, Artificial Sequence
  Description of Artificial Sequence: Synthetic oligonucleotide
ucuggagcccuuuggacuu

SEQ ID NO: 1750405 - RNA, 19 nt, Artificial Sequence
  Description of Artificial Sequence: Synthetic oligonucleotide
gauguggcuaccgcugagc

SEQ ID NO: 1750406 - RNA, 19 nt, Artificial Sequence
  Description of Artificial Sequence: Synthetic oligonucleotide
cucggcuuaauucuguaaa

SEQ ID NO: 1750407 - RNA, 19 nt, Artificial Sequence
  Description of Artificial Sequence: Synthetic oligonucleotide
auaguaccuugacuaacau

SEQ ID NO: 1750408 - RNA, 19 nt, Artificial Sequence
  Description of Artificial Sequence: Synthetic oligonucleotide
ugcucucgguggcugaugu

SEQ ID NO: 1750409 - RNA, 19 nt, Artificial Sequence
  Description of Artificial Sequence: Synthetic oligonucleotide
gucaaucaucuuuaccaca

SEQ ID NO: 1750410 - RNA, 19 nt, Artificial Sequence
  Description of Artificial Sequence: Synthetic oligonucleotide
uguuguggacucucuuagu

SEQ ID NO: 1750411 - RNA, 19 nt, Artificial Sequence
  Description of Artificial Sequence: Synthetic oligonucleotide
acuauccaacaguauuuaa

SEQ ID NO: 1750412 - RNA, 19 nt, Artificial Sequence
  Description of Artificial Sequence: Synthetic oligonucleotide
uuucggaauuccuccgaaa

SEQ ID NO: 1750413 - RNA, 19 nt, Artificial Sequence
  Description of Artificial Sequence: Synthetic oligonucleotide
acccuucguccuuucaaag

SEQ ID NO: 1750414 - RNA, 19 nt, Artificial Sequence
  Description of Artificial Sequence: Synthetic oligonucleotide
uuucggugucucauccacu

SEQ ID NO: 1750415 - RNA, 19 nt, Artificial Sequence
  Description of Artificial Sequence: Synthetic oligonucleotide
gaagccagcaacaguuguc

SEQ ID NO: 1750416 - RNA, 19 nt, Artificial Sequence
  Description of Artificial Sequence: Synthetic oligonucleotide
gcugauguauucauuguac

SEQ ID NO: 1750417 - RNA, 19 nt, Artificial Sequence
  Description of Artificial Sequence: Synthetic oligonucleotide
agcaacaguugucuuugau

SEQ ID NO: 1750418 - RNA, 19 nt, Artificial Sequence
  Description of Artificial Sequence: Synthetic oligonucleotide
auuccaguugccugcgaau

SEQ ID NO: 1750419 - RNA, 19 nt, Artificial Sequence
  Description of Artificial Sequence: Synthetic oligonucleotide
cuaccugcuccuuuauuca

SEQ ID NO: 1750420 - RNA, 19 nt, Artificial Sequence
  Description of Artificial Sequence: Synthetic oligonucleotide
uagccaccguuuaaaacua

SEQ ID NO: 1750421 - RNA, 19 nt, Artificial Sequence
  Description of Artificial Sequence: Synthetic oligonucleotide
ucggucagaguuucccacu

SEQ ID NO: 1750422 - RNA, 19 nt, Artificial Sequence
  Description of Artificial Sequence: Synthetic oligonucleotide
ugaauaccuuccacccuuc

SEQ ID NO: 1750423 - RNA, 19 nt, Artificial Sequence
  Description of Artificial Sequence: Synthetic oligonucleotide
uaguuuccgggucucuguc

SEQ ID NO: 1750424 - RNA, 19 nt, Artificial Sequence
  Description of Artificial Sequence: Synthetic oligonucleotide
guuucagccugucuccaga

SEQ ID NO: 1750425 - RNA, 19 nt, Artificial Sequence
  Description of Artificial Sequence: Synthetic oligonucleotide
agucggucagaguuuccca

SEQ ID NO: 1750426 - RNA, 19 nt, Artificial Sequence
  Description of Artificial Sequence: Synthetic oligonucleotide
uauucgcgauggccuuugg

SEQ ID NO: 1750427 - RNA, 19 nt, Artificial Sequence
  Description of Artificial Sequence: Synthetic oligonucleotide
gucggucagaguuucccac

SEQ ID NO: 1750428 - RNA, 19 nt, Artificial Sequence
  Description of Artificial Sequence: Synthetic oligonucleotide
cauugauggauucuagagu

SEQ ID NO: 1750429 - RNA, 19 nt, Artificial Sequence
  Description of Artificial Sequence: Synthetic oligonucleotide
ucucgucacggcauuguuu

SEQ ID NO: 1750430 - RNA, 19 nt, Artificial Sequence
  Description of Artificial Sequence: Synthetic oligonucleotide
uagagugccuucguuuccu

SEQ ID NO: 1750431 - RNA, 19 nt, Artificial Sequence
  Description of Artificial Sequence: Synthetic oligonucleotide
uugaugagauucagacaua

SEQ ID NO: 1750432 - RNA, 19 nt, Artificial Sequence
  Description of Artificial Sequence: Synthetic oligonucleotide
aagauucuuuccgucucau

SEQ ID NO: 1750433 - RNA, 19 nt, Artificial Sequence
  Description of Artificial Sequence: Synthetic oligonucleotide
gaugagauucagacauaca

SEQ ID NO: 1750434 - RNA, 19 nt, Artificial Sequence
  Description of Artificial Sequence: Synthetic oligonucleotide
cacuauauuguuguggacu

SEQ ID NO: 1750435 - RNA, 19 nt, Artificial Sequence
  Description of Artificial Sequence: Synthetic oligonucleotide
accccuaacacaguaguua

SEQ ID NO: 1750436 - RNA, 19 nt, Artificial Sequence
  Description of Artificial Sequence: Synthetic oligonucleotide
cuucguccuuucaaagguc

SEQ ID NO: 1750437 - RNA, 19 nt, Artificial Sequence
  Description of Artificial Sequence: Synthetic oligonucleotide
accgcugagcuaccugcuc

SEQ ID NO: 1750438 - RNA, 19 nt, Artificial Sequence
  Description of Artificial Sequence: Synthetic oligonucleotide
cuuuacacaagcccucucu

SEQ ID NO: 1750439 - RNA, 19 nt, Artificial Sequence
  Description of Artificial Sequence: Synthetic oligonucleotide
uaccagcgaagcuucugga

SEQ ID NO: 1750440 - RNA, 19 nt, Artificial Sequence
  Description of Artificial Sequence: Synthetic oligonucleotide
uucuauucgcgauggccuu

SEQ ID NO: 1750441 - RNA, 19 nt, Artificial Sequence
  Description of Artificial Sequence: Synthetic oligonucleotide
auucuagagugccuucguu

SEQ ID NO: 1750442 - RNA, 19 nt, Artificial Sequence
  Description of Artificial Sequence: Synthetic oligonucleotide
cauggcgacccagaacgcc

SEQ ID NO: 1750443 - RNA, 19 nt, Artificial Sequence
  Description of Artificial Sequence: Synthetic oligonucleotide
gucucauugacgaugcacu

SEQ ID NO: 1750444 - RNA, 19 nt, Artificial Sequence
  Description of Artificial Sequence: Synthetic oligonucleotide
aaaauccgauuugcccaug

SEQ ID NO: 1750445 - RNA, 19 nt, Artificial Sequence
  Description of Artificial Sequence: Synthetic oligonucleotide
gucuucauacugaauaccu

SEQ ID NO: 1750446 - RNA, 19 nt, Artificial Sequence
  Description of Artificial Sequence: Synthetic oligonucleotide
uuccaguugccugcgaaua

SEQ ID NO: 1750447 - RNA, 19 nt, Artificial Sequence
  Description of Artificial Sequence: Synthetic oligonucleotide
ugguaaagucggucagagu

SEQ ID NO: 1750448 - RNA, 19 nt, Artificial Sequence
  Description of Artificial Sequence: Synthetic oligonucleotide
gucucugucuauguacuga

SEQ ID NO: 1750449 - RNA, 19 nt, Artificial Sequence
  Description of Artificial Sequence: Synthetic oligonucleotide
uggacucucuuagugccaa

SEQ ID NO: 1750450 - RNA, 19 nt, Artificial Sequence
  Description of Artificial Sequence: Synthetic oligonucleotide
cugaauguaccagccuuuc

SEQ ID NO: 1750451 - RNA, 19 nt, Artificial Sequence
  Description of Artificial Sequence: Synthetic oligonucleotide
auucucgucacggcauugu

SEQ ID NO: 1750452 - RNA, 19 nt, Artificial Sequence
  Description of Artificial Sequence: Synthetic oligonucleotide
ggaaugacagucucuaaau

SEQ ID NO: 1750453 - RNA, 19 nt, Artificial Sequence
  Description of Artificial Sequence: Synthetic oligonucleotide
cauuucggaauuccuccga

SEQ ID NO: 1750454 - RNA, 19 nt, Artificial Sequence
  Description of Artificial Sequence: Synthetic oligonucleotide
cagacauacaaugacacuu

SEQ ID NO: 1750455 - RNA, 19 nt, Artificial Sequence
  Description of Artificial Sequence: Synthetic oligonucleotide
uucucgucacggcauuguu

SEQ ID NO: 1750456 - RNA, 19 nt, Artificial Sequence
  Description of Artificial Sequence: Synthetic oligonucleotide
uccgggucucugucuaugu

SEQ ID NO: 1750457 - RNA, 19 nt, Artificial Sequence
  Description of Artificial Sequence: Synthetic oligonucleotide
auauuguuguggacucucu

SEQ ID NO: 1750458 - RNA, 19 nt, Artificial Sequence
  Description of Artificial Sequence: Synthetic oligonucleotide
acauacaaugacacuuaaa

SEQ ID NO: 1750459 - RNA, 19 nt, Artificial Sequence
  Description of Artificial Sequence: Synthetic oligonucleotide
uccacccuucguccuuuca

SEQ ID NO: 1750460 - RNA, 19 nt, Artificial Sequence
  Description of Artificial Sequence: Synthetic oligonucleotide
uccuaguuucuuaguuauu

SEQ ID NO: 1750461 - RNA, 19 nt, Artificial Sequence
  Description of Artificial Sequence: Synthetic oligonucleotide
cuauucgcgauggccuuug

SEQ ID NO: 1750462 - RNA, 19 nt, Artificial Sequence
  Description of Artificial Sequence: Synthetic oligonucleotide
gaccucgucucaccuguuc

SEQ ID NO: 1750463 - RNA, 19 nt, Artificial Sequence
  Description of Artificial Sequence: Synthetic oligonucleotide
cacuuaaagccauucucgu

SEQ ID NO: 1750464 - RNA, 19 nt, Artificial Sequence
  Description of Artificial Sequence: Synthetic oligonucleotide
uuuccgucucauugacgau

SEQ ID NO: 1750465 - RNA, 19 nt, Artificial Sequence
  Description of Artificial Sequence: Synthetic oligonucleotide
cuccuaguuucuuaguuau

SEQ ID NO: 1750466 - RNA, 19 nt, Artificial Sequence
  Description of Artificial Sequence: Synthetic oligonucleotide
agagccugacuuugaugau

SEQ ID NO: 1750467 - RNA, 19 nt, Artificial Sequence
  Description of Artificial Sequence: Synthetic oligonucleotide
cacugaguggcguucauau

SEQ ID NO: 1750468 - RNA, 19 nt, Artificial Sequence
  Description of Artificial Sequence: Synthetic oligonucleotide
ggauuuucugaagccagca

SEQ ID NO: 1750469 - RNA, 19 nt, Artificial Sequence
  Description of Artificial Sequence: Synthetic oligonucleotide
gguugagcugagcucugug

SEQ ID NO: 1750470 - RNA, 19 nt, Artificial Sequence
  Description of Artificial Sequence: Synthetic oligonucleotide
acugaauguaccagccuuu

SEQ ID NO: 1750471 - RNA, 19 nt, Artificial Sequence
  Description of Artificial Sequence: Synthetic oligonucleotide
uguggcuaccgcugagcua

SEQ ID NO: 1750472 - RNA, 19 nt, Artificial Sequence
  Description of Artificial Sequence: Synthetic oligonucleotide
agauugaaugucaccuuuu

SEQ ID NO: 1750473 - RNA, 19 nt, Artificial Sequence
  Description of Artificial Sequence: Synthetic oligonucleotide
gccuuucggugucucaucc

SEQ ID NO: 1750474 - RNA, 19 nt, Artificial Sequence
  Description of Artificial Sequence: Synthetic oligonucleotide
cuucaucgucaagaucuug

SEQ ID NO: 1750475 - RNA, 19 nt, Artificial Sequence
  Description of Artificial Sequence: Synthetic oligonucleotide
gugcuggaaugacagucuc

SEQ ID NO: 1750476 - RNA, 19 nt, Artificial Sequence
  Description of Artificial Sequence: Synthetic oligonucleotide
guuuuagauaugucuucau

SEQ ID NO: 1750477 - RNA, 19 nt, Artificial Sequence
  Description of Artificial Sequence: Synthetic oligonucleotide
auggcgacccagaacgcca

SEQ ID NO: 1750478 - RNA, 19 nt, Artificial Sequence
  Description of Artificial Sequence: Synthetic oligonucleotide
caaugacuauaguggcuga

SEQ ID NO: 1750479 - RNA, 19 nt, Artificial Sequence
  Description of Artificial Sequence: Synthetic oligonucleotide
cucgucacggcauuguuuu

SEQ ID NO: 1750480 - RNA, 19 nt, Artificial Sequence
  Description of Artificial Sequence: Synthetic oligonucleotide
uggcgacccagaacgccac

SEQ ID NO: 1750481 - RNA, 19 nt, Artificial Sequence
  Description of Artificial Sequence: Synthetic oligonucleotide
cucagaaguuccagaaagu

SEQ ID NO: 1750482 - RNA, 19 nt, Artificial Sequence
  Description of Artificial Sequence: Synthetic oligonucleotide
acuuccuuaacgacaccuu

SEQ ID NO: 1750483 - RNA, 19 nt, Artificial Sequence
  Description of Artificial Sequence: Synthetic oligonucleotide
cugaauaccuuccacccuu

SEQ ID NO: 1750484 - RNA, 19 nt, Artificial Sequence
  Description of Artificial Sequence: Synthetic oligonucleotide
gcccuuuggacuuaauucu

SEQ ID NO: 1750485 - RNA, 19 nt, Artificial Sequence
  Description of Artificial Sequence: Synthetic oligonucleotide
ggcguucauauggaugugc

SEQ ID NO: 1750486 - RNA, 19 nt, Artificial Sequence
  Description of Artificial Sequence: Synthetic oligonucleotide
gcuguguaucugucaauca

SEQ ID NO: 1750487 - RNA, 19 nt, Artificial Sequence
  Description of Artificial Sequence: Synthetic oligonucleotide
cacccuucguccuuucaaa

SEQ ID NO: 1750488 - RNA, 19 nt, Artificial Sequence
  Description of Artificial Sequence: Synthetic oligonucleotide
cugcgaauaguuuccgggu

SEQ ID NO: 1750489 - RNA, 19 nt, Artificial Sequence
  Description of Artificial Sequence: Synthetic oligonucleotide
gagcccuuuggacuuaauu

SEQ ID NO: 1750490 - RNA, 19 nt, Artificial Sequence
  Description of Artificial Sequence: Synthetic oligonucleotide
ucuauucgcgauggccuuu

SEQ ID NO: 1750491 - RNA, 19 nt, Artificial Sequence
  Description of Artificial Sequence: Synthetic oligonucleotide
cauucucgucacggcauug

SEQ ID NO: 1750492 - RNA, 19 nt, Artificial Sequence
  Description of Artificial Sequence: Synthetic oligonucleotide
guacugaauguaccagccu

SEQ ID NO: 1750493 - RNA, 19 nt, Artificial Sequence
  Description of Artificial Sequence: Synthetic oligonucleotide
aucguuuucucggcuuaau

SEQ ID NO: 1750494 - RNA, 19 nt, Artificial Sequence
  Description of Artificial Sequence: Synthetic oligonucleotide
gcuaccgcugagcuaccug

SEQ ID NO: 1750495 - RNA, 19 nt, Artificial Sequence
  Description of Artificial Sequence: Synthetic oligonucleotide
gccugcgaauaguuuccgg

SEQ ID NO: 1750496 - RNA, 19 nt, Artificial Sequence
  Description of Artificial Sequence: Synthetic oligonucleotide
aguuucccacugaguggcg

SEQ ID NO: 1750497 - RNA, 19 nt, Artificial Sequence
  Description of Artificial Sequence: Synthetic oligonucleotide
agcuaccugcuccuuuauu

SEQ ID NO: 1750498 - RNA, 19 nt, Artificial Sequence
  Description of Artificial Sequence: Synthetic oligonucleotide
ugugcucucgguggcugau

SEQ ID NO: 1750499 - RNA, 19 nt, Artificial Sequence
  Description of Artificial Sequence: Synthetic oligonucleotide
uggcguucauauggaugug

SEQ ID NO: 1750500 - RNA, 19 nt, Artificial Sequence
  Description of Artificial Sequence: Synthetic oligonucleotide
gacuaacaucaauuuugau

SEQ ID NO: 1750501 - RNA, 19 nt, Artificial Sequence
  Description of Artificial Sequence: Synthetic oligonucleotide
acaggcgucuccugcucuu

SEQ ID NO: 1750502 - RNA, 19 nt, Artificial Sequence
  Description of Artificial Sequence: Synthetic oligonucleotide
cagaccucgucucaccugu

SEQ ID NO: 1750503 - RNA, 19 nt, Artificial Sequence
  Description of Artificial Sequence: Synthetic oligonucleotide
ccauuugguaaagucgguc

SEQ ID NO: 1750504 - RNA, 19 nt, Artificial Sequence
  Description of Artificial Sequence: Synthetic oligonucleotide
caagcucaagcaaguuuua

SEQ ID NO: 1750505 - RNA, 19 nt, Artificial Sequence
  Description of Artificial Sequence: Synthetic oligonucleotide
cagauugaaugucaccuuu

SEQ ID NO: 1750506 - RNA, 19 nt, Artificial Sequence
  Description of Artificial Sequence: Synthetic oligonucleotide
acuuggucccaaagagccu

SEQ ID NO: 1750507 - RNA, 19 nt, Artificial Sequence
  Description of Artificial Sequence: Synthetic oligonucleotide
cgggucucugucuauguac

SEQ ID NO: 1750508 - RNA, 19 nt, Artificial Sequence
  Description of Artificial Sequence: Synthetic oligonucleotide
ccaccguuuaaaacuagaa

SEQ ID NO: 1750509 - RNA, 19 nt, Artificial Sequence
  Description of Artificial Sequence: Synthetic oligonucleotide
ccgauuugcccauggcgac

SEQ ID NO: 1750510 - RNA, 19 nt, Artificial Sequence
  Description of Artificial Sequence: Synthetic oligonucleotide
ccgcugagcuaccugcucc

SEQ ID NO: 1750511 - RNA, 19 nt, Artificial Sequence
  Description of Artificial Sequence: Synthetic oligonucleotide
gcaguaccagcgaagcuuc

SEQ ID NO: 1750512 - RNA, 19 nt, Artificial Sequence
  Description of Artificial Sequence: Synthetic oligonucleotide
gcagguugagcugagcucu

SEQ ID NO: 1750513 - RNA, 19 nt, Artificial Sequence
  Description of Artificial Sequence: Synthetic oligonucleotide
guaaagucggucagaguuu

SEQ ID NO: 1750514 - RNA, 19 nt, Artificial Sequence
  Description of Artificial Sequence: Synthetic oligonucleotide
ugccuucguuuccucugua

SEQ ID NO: 1750515 - RNA, 19 nt, Artificial Sequence
  Description of Artificial Sequence: Synthetic oligonucleotide
agccaccguuuaaaacuag

SEQ ID NO: 1750516 - RNA, 19 nt, Artificial Sequence
  Description of Artificial Sequence: Synthetic oligonucleotide
cgucucauugacgaugcac

SEQ ID NO: 1750517 - RNA, 19 nt, Artificial Sequence
  Description of Artificial Sequence: Synthetic oligonucleotide
ccuucguccuuucaaaggu

SEQ ID NO: 1750518 - RNA, 19 nt, Artificial Sequence
  Description of Artificial Sequence: Synthetic oligonucleotide
gcgaauaguuuccgggucu

SEQ ID NO: 1750519 - RNA, 19 nt, Artificial Sequence
  Description of Artificial Sequence: Synthetic oligonucleotide
uggcuaccgcugagcuacc

SEQ ID NO: 1750520 - RNA, 19 nt, Artificial Sequence
  Description of Artificial Sequence: Synthetic oligonucleotide
ggcaguaccagcgaagcuu

SEQ ID NO: 1750521 - RNA, 19 nt, Artificial Sequence
  Description of Artificial Sequence: Synthetic oligonucleotide
caaauaccccuaacacagu

SEQ ID NO: 1750522 - RNA, 19 nt, Artificial Sequence
  Description of Artificial Sequence: Synthetic oligonucleotide
cuucaucguuuucucggcu

SEQ ID NO: 1750523 - RNA, 19 nt, Artificial Sequence
  Description of Artificial Sequence: Synthetic oligonucleotide
cccaaacaacuauccaaca

SEQ ID NO: 1750524 - RNA, 19 nt, Artificial Sequence
  Description of Artificial Sequence: Synthetic oligonucleotide
gccaccguuuaaaacuaga

SEQ ID NO: 1750525 - RNA, 19 nt, Artificial Sequence
  Description of Artificial Sequence: Synthetic oligonucleotide
cguucauauggaugugcuc

SEQ ID NO: 1750526 - RNA, 19 nt, Artificial Sequence
  Description of Artificial Sequence: Synthetic oligonucleotide
gccaaagcgucuccucaga

SEQ ID NO: 1750527 - RNA, 19 nt, Artificial Sequence
  Description of Artificial Sequence: Synthetic oligonucleotide
guggacucucuuagugcca

SEQ ID NO: 1750528 - RNA, 19 nt, Artificial Sequence
  Description of Artificial Sequence: Synthetic oligonucleotide
cguccuuucaaagguccag

SEQ ID NO: 1750529 - RNA, 19 nt, Artificial Sequence
  Description of Artificial Sequence: Synthetic oligonucleotide
uggagcccuuuggacuuaa

SEQ ID NO: 1750530 - RNA, 19 nt, Artificial Sequence
  Description of Artificial Sequence: Synthetic oligonucleotide
ccuugacuaacaucaauuu

SEQ ID NO: 1750531 - RNA, 19 nt, Artificial Sequence
  Description of Artificial Sequence: Synthetic oligonucleotide
guuucccacugaguggcgu

SEQ ID NO: 1750532 - RNA, 19 nt, Artificial Sequence
  Description of Artificial Sequence: Synthetic oligonucleotide
caucguuuucucggcuuaa

SEQ ID NO: 1750533 - RNA, 19 nt, Artificial Sequence
  Description of Artificial Sequence: Synthetic oligonucleotide
ccauggcgacccagaacgc

SEQ ID NO: 1750534 - RNA, 19 nt, Artificial Sequence
  Description of Artificial Sequence: Synthetic oligonucleotide
gaaguuccagaaagucauu

SEQ ID NO: 1750535 - RNA, 19 nt, Artificial Sequence
  Description of Artificial Sequence: Synthetic oligonucleotide
cucugucuauguacugaau

SEQ ID NO: 1750536 - RNA, 19 nt, Artificial Sequence
  Description of Artificial Sequence: Synthetic oligonucleotide
caguugccugcgaauaguu

SEQ ID NO: 1750537 - RNA, 19 nt, Artificial Sequence
  Description of Artificial Sequence: Synthetic oligonucleotide
gcguucauauggaugugcu

SEQ ID NO: 1750538 - RNA, 19 nt, Artificial Sequence
  Description of Artificial Sequence: Synthetic oligonucleotide
cccuuuggacuuaauucua

SEQ ID NO: 1750539 - RNA, 19 nt, Artificial Sequence
  Description of Artificial Sequence: Synthetic oligonucleotide
ccuuucggugucucaucca

SEQ ID NO: 1750540 - RNA, 19 nt, Artificial Sequence
  Description of Artificial Sequence: Synthetic oligonucleotide
gccugacuuugaugaugug

SEQ ID NO: 1750541 - RNA, 19 nt, Artificial Sequence
  Description of Artificial Sequence: Synthetic oligonucleotide
cgaauaguuuccgggucuc

SEQ ID NO: 1750542 - RNA, 19 nt, Artificial Sequence
  Description of Artificial Sequence: Synthetic oligonucleotide
gguccaguuucagccuguc

SEQ ID NO: 1750543 - RNA, 19 nt, Artificial Sequence
  Description of Artificial Sequence: Synthetic oligonucleotide
ccaaagcgucuccucagaa

SEQ ID NO: 1750544 - RNA, 19 nt, Artificial Sequence
  Description of Artificial Sequence: Synthetic oligonucleotide
cagcuguguaucugucaau

SEQ ID NO: 1750545 - RNA, 19 nt, Artificial Sequence
  Description of Artificial Sequence: Synthetic oligonucleotide
ggacucucuuagugccaaa

SEQ ID NO: 1750546 - RNA, 19 nt, Artificial Sequence
  Description of Artificial Sequence: Synthetic oligonucleotide
ggcgacccagaacgccaca

SEQ ID NO: 1750547 - RNA, 19 nt, Artificial Sequence
  Description of Artificial Sequence: Synthetic oligonucleotide
ccucgucucaccuguuccu

SEQ ID NO: 1750548 - RNA, 19 nt, Artificial Sequence
  Description of Artificial Sequence: Synthetic oligonucleotide
caguaccagcgaagcuucu

SEQ ID NO: 1750549 - RNA, 19 nt, Artificial Sequence
  Description of Artificial Sequence: Synthetic oligonucleotide
ccaguugccugcgaauagu

SEQ ID NO: 1750550 - RNA, 19 nt, Artificial Sequence
  Description of Artificial Sequence: Synthetic oligonucleotide
agaccucgucucaccuguu

SEQ ID NO: 1750551 - RNA, 19 nt, Artificial Sequence
  Description of Artificial Sequence: Synthetic oligonucleotide
cugcuccuuuauucagauu

SEQ ID NO: 1750552 - RNA, 19 nt, Artificial Sequence
  Description of Artificial Sequence: Synthetic oligonucleotide
gcucucgguggcugaugua

SEQ ID NO: 1750553 - RNA, 19 nt, Artificial Sequence
  Description of Artificial Sequence: Synthetic oligonucleotide
ccgggucucugucuaugua

SEQ ID NO: 1750554 - RNA, 19 nt, Artificial Sequence
  Description of Artificial Sequence: Synthetic oligonucleotide
cuggagcccuuuggacuua

SEQ ID NO: 1750555 - RNA, 19 nt, Artificial Sequence
  Description of Artificial Sequence: Synthetic oligonucleotide
gcgaagcuucuggagcccu

SEQ ID NO: 1750556 - RNA, 19 nt, Artificial Sequence
  Description of Artificial Sequence: Synthetic oligonucleotide
ccacugaguggcguucaua

SEQ ID NO: 1750557 - RNA, 19 nt, Artificial Sequence
  Description of Artificial Sequence: Synthetic oligonucleotide
ccauucucgucacggcauu

SEQ ID NO: 1750558 - RNA, 19 nt, Artificial Sequence
  Description of Artificial Sequence: Synthetic oligonucleotide
ccgucucauugacgaugca

SEQ ID NO: 1750559 - RNA, 19 nt, Artificial Sequence
  Description of Artificial Sequence: Synthetic oligonucleotide
ggcuaccgcugagcuaccu

SEQ ID NO: 1750560 - RNA, 19 nt, Artificial Sequence
  Description of Artificial Sequence: Synthetic oligonucleotide
aaauaaaucaacgggagac

SEQ ID NO: 1750561 - RNA, 19 nt, Artificial Sequence
  Description of Artificial Sequence: Synthetic oligonucleotide
uaaaaguugagaaacagca

SEQ ID NO: 1750562 - RNA, 19 nt, Artificial Sequence
  Description of Artificial Sequence: Synthetic oligonucleotide
aguuguugaauauaaauuc

SEQ ID NO: 1750563 - RNA, 19 nt, Artificial Sequence
  Description of Artificial Sequence: Synthetic oligonucleotide
uuugggcugauuuagaagg

SEQ ID NO: 1750564 - RNA, 19 nt, Artificial Sequence
  Description of Artificial Sequence: Synthetic oligonucleotide
uaaguauauaauauugucc

SEQ ID NO: 1750565 - RNA, 19 nt, Artificial Sequence
  Description of Artificial Sequence: Synthetic oligonucleotide
aauacggaacacuugaucu

SEQ ID NO: 1750566 - RNA, 19 nt, Artificial Sequence
  Description of Artificial Sequence: Synthetic oligonucleotide
auuuuaucgugcuugaagg

SEQ ID NO: 1750567 - RNA, 19 nt, Artificial Sequence
  Description of Artificial Sequence: Synthetic oligonucleotide
ucuaugauaagcacuaucu

SEQ ID NO: 1750568 - RNA, 19 nt, Artificial Sequence
  Description of Artificial Sequence: Synthetic oligonucleotide
auuuaggucaccuuuuccg

SEQ ID NO: 1750569 - RNA, 19 nt, Artificial Sequence
  Description of Artificial Sequence: Synthetic oligonucleotide
aaacauaaaguccuguugu

SEQ ID NO: 1750570 - RNA, 19 nt, Artificial Sequence
  Description of Artificial Sequence: Synthetic oligonucleotide
uugggaacaaacuucaaag

SEQ ID NO: 1750571 - RNA, 19 nt, Artificial Sequence
  Description of Artificial Sequence: Synthetic oligonucleotide
aauaaauguggaaaggauc

SEQ ID NO: 1750572 - RNA, 19 nt, Artificial Sequence
  Description of Artificial Sequence: Synthetic oligonucleotide
aaauacggaacacuugauc

SEQ ID NO: 1750573 - RNA, 19 nt, Artificial Sequence
  Description of Artificial Sequence: Synthetic oligonucleotide
uccgauaugauuuugaguu

SEQ ID NO: 1750574 - RNA, 19 nt, Artificial Sequence
  Description of Artificial Sequence: Synthetic oligonucleotide
aagacauauaucucuguag

SEQ ID NO: 1750575 - RNA, 19 nt, Artificial Sequence
  Description of Artificial Sequence: Synthetic oligonucleotide
gagucgaagaaacauaaag

SEQ ID NO: 1750576 - RNA, 19 nt, Artificial Sequence
  Description of Artificial Sequence: Synthetic oligonucleotide
uggaaauaaaucaacggga

SEQ ID NO: 1750577 - RNA, 19 nt, Artificial Sequence
  Description of Artificial Sequence: Synthetic oligonucleotide
uuuaagauugcagaaauaa

SEQ ID NO: 1750578 - RNA, 19 nt, Artificial Sequence
  Description of Artificial Sequence: Synthetic oligonucleotide
aauauguuuucucuuggga

SEQ ID NO: 1750579 - RNA, 19 nt, Artificial Sequence
  Description of Artificial Sequence: Synthetic oligonucleotide
auuuucguaauccauguca

SEQ ID NO: 1750580 - RNA, 19 nt, Artificial Sequence
  Description of Artificial Sequence: Synthetic oligonucleotide
auacuuaucuaguggaagg

SEQ ID NO: 1750581 - RNA, 19 nt, Artificial Sequence
  Description of Artificial Sequence: Synthetic oligonucleotide
agcuagaacaccuucaucu

SEQ ID NO: 1750582 - RNA, 19 nt, Artificial Sequence
  Description of Artificial Sequence: Synthetic oligonucleotide
uguaaauacuuaucuagug

SEQ ID NO: 1750583 - RNA, 19 nt, Artificial Sequence
  Description of Artificial Sequence: Synthetic oligonucleotide
ucaauaucucuucuguucc

SEQ ID NO: 1750584 - RNA, 19 nt, Artificial Sequence
  Description of Artificial Sequence: Synthetic oligonucleotide
ucugcaguuaaguauauaa

SEQ ID NO: 1750585 - RNA, 19 nt, Artificial Sequence
  Description of Artificial Sequence: Synthetic oligonucleotide
ugaaugcuagauuucauug

SEQ ID NO: 1750586 - RNA, 19 nt, Artificial Sequence
  Description of Artificial Sequence: Synthetic oligonucleotide
aauacuuaucuaguggaag

SEQ ID NO: 1750587 - RNA, 19 nt, Artificial Sequence
  Description of Artificial Sequence: Synthetic oligonucleotide
aacucucuaugauaagcac

SEQ ID NO: 1750588 - RNA, 19 nt, Artificial Sequence
  Description of Artificial Sequence: Synthetic oligonucleotide
agcaauuugucccacuuuc

SEQ ID NO: 1750589 - RNA, 19 nt, Artificial Sequence
  Description of Artificial Sequence: Synthetic oligonucleotide
uaacguuuaacuaacucuc

SEQ ID NO: 1750590 - RNA, 19 nt, Artificial Sequence
  Description of Artificial Sequence: Synthetic oligonucleotide
uuuaucaacaaaugaucca

SEQ ID NO: 1750591 - RNA, 19 nt, Artificial Sequence
  Description of Artificial Sequence: Synthetic oligonucleotide
uuaacuaacucucuaugau

SEQ ID NO: 1750592 - RNA, 19 nt, Artificial Sequence
  Description of Artificial Sequence: Synthetic oligonucleotide
uugagaaacagcauuccga

SEQ ID NO: 1750593 - RNA, 19 nt, Artificial Sequence
  Description of Artificial Sequence: Synthetic oligonucleotide
aaggucuuaagaaucggac

SEQ ID NO: 1750594 - RNA, 19 nt, Artificial Sequence
  Description of Artificial Sequence: Synthetic oligonucleotide
uguuaagagcaauuugucc

SEQ ID NO: 1750595 - RNA, 19 nt, Artificial Sequence
  Description of Artificial Sequence: Synthetic oligonucleotide
cuaaaaguugagaaacagc

SEQ ID NO: 1750596 - RNA, 19 nt, Artificial Sequence
  Description of Artificial Sequence: Synthetic oligonucleotide
aagauugcagaaauaaaug

SEQ ID NO: 1750597 - RNA, 19 nt, Artificial Sequence
  Description of Artificial Sequence: Synthetic oligonucleotide
uuaucgugcuugaagguag

SEQ ID NO: 1750598 - RNA, 19 nt, Artificial Sequence
  Description of Artificial Sequence: Synthetic oligonucleotide
aguucuagcuguuuagaag

SEQ ID NO: 1750599 - RNA, 19 nt, Artificial Sequence
  Description of Artificial Sequence: Synthetic oligonucleotide
auagccaauauguuuucuc

SEQ ID NO: 1750600 - RNA, 19 nt, Artificial Sequence
  Description of Artificial Sequence: Synthetic oligonucleotide
ucccaugagggguaaaugg

SEQ ID NO: 1750601 - RNA, 19 nt, Artificial Sequence
  Description of Artificial Sequence: Synthetic oligonucleotide
agauugcagaaauaaaugu

SEQ ID NO: 1750602 - RNA, 19 nt, Artificial Sequence
  Description of Artificial Sequence: Synthetic oligonucleotide
acuaucuauuuuaagauug

SEQ ID NO: 1750603 - RNA, 19 nt, Artificial Sequence
  Description of Artificial Sequence: Synthetic oligonucleotide
ucuaguucuagcuguuuag

SEQ ID NO: 1750604 - RNA, 19 nt, Artificial Sequence
  Description of Artificial Sequence: Synthetic oligonucleotide
aacacuugaucuaagguga

SEQ ID NO: 1750605 - RNA, 19 nt, Artificial Sequence
  Description of Artificial Sequence: Synthetic oligonucleotide
ugagaaaucucuagauagc

SEQ ID NO: 1750606 - RNA, 19 nt, Artificial Sequence
  Description of Artificial Sequence: Synthetic oligonucleotide
aauuuucguaauccauguc

SEQ ID NO: 1750607 - RNA, 19 nt, Artificial Sequence
  Description of Artificial Sequence: Synthetic oligonucleotide
agagguacuguccuuauga

SEQ ID NO: 1750608 - RNA, 19 nt, Artificial Sequence
  Description of Artificial Sequence: Synthetic oligonucleotide
uagaaggacauuccgauau

SEQ ID NO: 1750609 - RNA, 19 nt, Artificial Sequence
  Description of Artificial Sequence: Synthetic oligonucleotide
uaauuuucguaauccaugu

SEQ ID NO: 1750610 - RNA, 19 nt, Artificial Sequence
  Description of Artificial Sequence: Synthetic oligonucleotide
uaacucucuaugauaagca

SEQ ID NO: 1750611 - RNA, 19 nt, Artificial Sequence
  Description of Artificial Sequence: Synthetic oligonucleotide
uagauagccaauauguuuu

SEQ ID NO: 1750612 - RNA, 19 nt, Artificial Sequence
  Description of Artificial Sequence: Synthetic oligonucleotide
ucauuugccggucccagag

SEQ ID NO: 1750613 - RNA, 19 nt, Artificial Sequence
  Description of Artificial Sequence: Synthetic oligonucleotide
uuaucaacaaaugauccaa

SEQ ID NO: 1750614 - RNA, 19 nt, Artificial Sequence
  Description of Artificial Sequence: Synthetic oligonucleotide
auaagcacuaucuauuuua

SEQ ID NO: 1750615 - RNA, 19 nt, Artificial Sequence
  Description of Artificial Sequence: Synthetic oligonucleotide
gaaucggacaguaacauuc

SEQ ID NO: 1750616 - RNA, 19 nt, Artificial Sequence
  Description of Artificial Sequence: Synthetic oligonucleotide
uuuccacccaucuaguucu

SEQ ID NO: 1750617 - RNA, 19 nt, Artificial Sequence
  Description of Artificial Sequence: Synthetic oligonucleotide
agaaacagcauuccgaauu

SEQ ID NO: 1750618 - RNA, 19 nt, Artificial Sequence
  Description of Artificial Sequence: Synthetic oligonucleotide
gaaaucucuagauagccaa

SEQ ID NO: 1750619 - RNA, 19 nt, Artificial Sequence
  Description of Artificial Sequence: Synthetic oligonucleotide
uuaagauugcagaaauaaa

SEQ ID NO: 1750620 - RNA, 19 nt, Artificial Sequence
  Description of Artificial Sequence: Synthetic oligonucleotide
ucucuagauagccaauaug

SEQ ID NO: 1750621 - RNA, 19 nt, Artificial Sequence
  Description of Artificial Sequence: Synthetic oligonucleotide
cuaacucucuaugauaagc

SEQ ID NO: 1750622 - RNA, 19 nt, Artificial Sequence
  Description of Artificial Sequence: Synthetic oligonucleotide
guugagaaacagcauuccg

SEQ ID NO: 1750623 - RNA, 19 nt, Artificial Sequence
  Description of Artificial Sequence: Synthetic oligonucleotide
uaaauuuuaucgugcuuga

SEQ ID NO: 1750624 - RNA, 19 nt, Artificial Sequence
  Description of Artificial Sequence: Synthetic oligonucleotide
ggucuuaagaaucggacag

SEQ ID NO: 1750625 - RNA, 19 nt, Artificial Sequence
  Description of Artificial Sequence: Synthetic oligonucleotide
auuccgauaugauuuugag

SEQ ID NO: 1750626 - RNA, 19 nt, Artificial Sequence
  Description of Artificial Sequence: Synthetic oligonucleotide
aauaaaucaacgggagacu

SEQ ID NO: 1750627 - RNA, 19 nt, Artificial Sequence
  Description of Artificial Sequence: Synthetic oligonucleotide
uuuucguaauccaugucaa

SEQ ID NO: 1750628 - RNA, 19 nt, Artificial Sequence
  Description of Artificial Sequence: Synthetic oligonucleotide
cuaucuauuuuaagauugc

SEQ ID NO: 1750629 - RNA, 19 nt, Artificial Sequence
  Description of Artificial Sequence: Synthetic oligonucleotide
aguugagaaacagcauucc

SEQ ID NO: 1750630 - RNA, 19 nt, Artificial Sequence
  Description of Artificial Sequence: Synthetic oligonucleotide
uccuccguaacguuuaacu

SEQ ID NO: 1750631 - RNA, 19 nt, Artificial Sequence
  Description of Artificial Sequence: Synthetic oligonucleotide
gagaaaucucuagauagcc

SEQ ID NO: 1750632 - RNA, 19 nt, Artificial Sequence
  Description of Artificial Sequence: Synthetic oligonucleotide
agguagucauaauauuggg

SEQ ID NO: 1750633 - RNA, 19 nt, Artificial Sequence
  Description of Artificial Sequence: Synthetic oligonucleotide
ucugagaccacugaagaaa

SEQ ID NO: 1750634 - RNA, 19 nt, Artificial Sequence
  Description of Artificial Sequence: Synthetic oligonucleotide
ucucauuuaggucaccuuu

SEQ ID NO: 1750635 - RNA, 19 nt, Artificial Sequence
  Description of Artificial Sequence: Synthetic oligonucleotide
uggcaaaaggucuuaagaa

SEQ ID NO: 1750636 - RNA, 19 nt, Artificial Sequence
  Description of Artificial Sequence: Synthetic oligonucleotide
ugggaacaaacuucaaagc

SEQ ID NO: 1750637 - RNA, 19 nt, Artificial Sequence
  Description of Artificial Sequence: Synthetic oligonucleotide
aaucuccgcaucucaauca

SEQ ID NO: 1750638 - RNA, 19 nt, Artificial Sequence
  Description of Artificial Sequence: Synthetic oligonucleotide
aacuaacucucuaugauaa

SEQ ID NO: 1750639 - RNA, 19 nt, Artificial Sequence
  Description of Artificial Sequence: Synthetic oligonucleotide
ugcuagauuucauuguagu

SEQ ID NO: 1750640 - RNA, 19 nt, Artificial Sequence
  Description of Artificial Sequence: Synthetic oligonucleotide
auuugccggucccagaguc

SEQ ID NO: 1750641 - RNA, 19 nt, Artificial Sequence
  Description of Artificial Sequence: Synthetic oligonucleotide
agcauuccgaauuucaaau

SEQ ID NO: 1750642 - RNA, 19 nt, Artificial Sequence
  Description of Artificial Sequence: Synthetic oligonucleotide
uccguaacguuuaacuaac

SEQ ID NO: 1750643 - RNA, 19 nt, Artificial Sequence
  Description of Artificial Sequence: Synthetic oligonucleotide
uuuaggucaccuuuuccgu

SEQ ID NO: 1750644 - RNA, 19 nt, Artificial Sequence
  Description of Artificial Sequence: Synthetic oligonucleotide
uugccaagcaaucuccgca

SEQ ID NO: 1750645 - RNA, 19 nt, Artificial Sequence
  Description of Artificial Sequence: Synthetic oligonucleotide
uugaucuaaggugagauuu

SEQ ID NO: 1750646 - RNA, 19 nt, Artificial Sequence
  Description of Artificial Sequence: Synthetic oligonucleotide
uguccaaacugcauagccu

SEQ ID NO: 1750647 - RNA, 19 nt, Artificial Sequence
  Description of Artificial Sequence: Synthetic oligonucleotide
acauauaucucuguagagu

SEQ ID NO: 1750648 - RNA, 19 nt, Artificial Sequence
  Description of Artificial Sequence: Synthetic oligonucleotide
ucuggcaaaaggucuuaag

SEQ ID NO: 1750649 - RNA, 19 nt, Artificial Sequence
  Description of Artificial Sequence: Synthetic oligonucleotide
uucguaauccaugucaaaa

SEQ ID NO: 1750650 - RNA, 19 nt, Artificial Sequence
  Description of Artificial Sequence: Synthetic oligonucleotide
uagccaauauguuuucucu

SEQ ID NO: 1750651 - RNA, 19 nt, Artificial Sequence
  Description of Artificial Sequence: Synthetic oligonucleotide
auaugauuuugaguuguuc

SEQ ID NO: 1750652 - RNA, 19 nt, Artificial Sequence
  Description of Artificial Sequence: Synthetic oligonucleotide
acuuaucuaguggaaggcg

SEQ ID NO: 1750653 - RNA, 19 nt, Artificial Sequence
  Description of Artificial Sequence: Synthetic oligonucleotide
aaaucaacgggagacuuuu

SEQ ID NO: 1750654 - RNA, 19 nt, Artificial Sequence
  Description of Artificial Sequence: Synthetic oligonucleotide
ccauuaaucuggcaaaagg

SEQ ID NO: 1750655 - RNA, 19 nt, Artificial Sequence
  Description of Artificial Sequence: Synthetic oligonucleotide
uuuuaucgugcuugaaggu

SEQ ID NO: 1750656 - RNA, 19 nt, Artificial Sequence
  Description of Artificial Sequence: Synthetic oligonucleotide
uccgaauuucaaaugguuu

SEQ ID NO: 1750657 - RNA, 19 nt, Artificial Sequence
  Description of Artificial Sequence: Synthetic oligonucleotide
uaacuaacucucuaugaua

SEQ ID NO: 1750658 - RNA, 19 nt, Artificial Sequence
  Description of Artificial Sequence: Synthetic oligonucleotide
aauguggaaaggaucaaua

SEQ ID NO: 1750659 - RNA, 19 nt, Artificial Sequence
  Description of Artificial Sequence: Synthetic oligonucleotide
uagucauaauauugggaga

SEQ ID NO: 1750660 - RNA, 19 nt, Artificial Sequence
  Description of Artificial Sequence: Synthetic oligonucleotide
aaucauuucucugguggca

SEQ ID NO: 1750661 - RNA, 19 nt, Artificial Sequence
  Description of Artificial Sequence: Synthetic oligonucleotide
agucauaauauugggagaa

SEQ ID NO: 1750662 - RNA, 19 nt, Artificial Sequence
  Description of Artificial Sequence: Synthetic oligonucleotide
agccuuuuggaaaugaacu

SEQ ID NO: 1750663 - RNA, 19 nt, Artificial Sequence
  Description of Artificial Sequence: Synthetic oligonucleotide
ucuagauagccaauauguu

SEQ ID NO: 1750664 - RNA, 19 nt, Artificial Sequence
  Description of Artificial Sequence: Synthetic oligonucleotide
aggucuuaagaaucggaca

SEQ ID NO: 1750665 - RNA, 19 nt, Artificial Sequence
  Description of Artificial Sequence: Synthetic oligonucleotide
uacuuaucuaguggaaggc

SEQ ID NO: 1750666 - RNA, 19 nt, Artificial Sequence
  Description of Artificial Sequence: Synthetic oligonucleotide
ugcugagaaaucucuagau

SEQ ID NO: 1750667 - RNA, 19 nt, Artificial Sequence
  Description of Artificial Sequence: Synthetic oligonucleotide
gaagacauauaucucugua

SEQ ID NO: 1750668 - RNA, 19 nt, Artificial Sequence
  Description of Artificial Sequence: Synthetic oligonucleotide
agaagguacuuuggaagac

SEQ ID NO: 1750669 - RNA, 19 nt, Artificial Sequence
  Description of Artificial Sequence: Synthetic oligonucleotide
ucauuuaggucaccuuuuc

SEQ ID NO: 1750670 - RNA, 19 nt, Artificial Sequence
  Description of Artificial Sequence: Synthetic oligonucleotide
guucgugcauuuaaggagc

SEQ ID NO: 1750671 - RNA, 19 nt, Artificial Sequence
  Description of Artificial Sequence: Synthetic oligonucleotide
uuugccggucccagagucg

SEQ ID NO: 1750672 - RNA, 19 nt, Artificial Sequence
  Description of Artificial Sequence: Synthetic oligonucleotide
uuccgauaugauuuugagu

SEQ ID NO: 1750673 - RNA, 19 nt, Artificial Sequence
  Description of Artificial Sequence: Synthetic oligonucleotide
cauuuaggucaccuuuucc

SEQ ID NO: 1750674 - RNA, 19 nt, Artificial Sequence
  Description of Artificial Sequence: Synthetic oligonucleotide
guggaaaggaucaauaucu

SEQ ID NO: 1750675 - RNA, 19 nt, Artificial Sequence
  Description of Artificial Sequence: Synthetic oligonucleotide
cuugaagguagucauaaua

SEQ ID NO: 1750676 - RNA, 19 nt, Artificial Sequence
  Description of Artificial Sequence: Synthetic oligonucleotide
uuuaucgugcuugaaggua

SEQ ID NO: 1750677 - RNA, 19 nt, Artificial Sequence
  Description of Artificial Sequence: Synthetic oligonucleotide
cauaauauugggagaaucu

SEQ ID NO: 1750678 - RNA, 19 nt, Artificial Sequence
  Description of Artificial Sequence: Synthetic oligonucleotide
cuauaucuugccguuuugc

SEQ ID NO: 1750679 - RNA, 19 nt, Artificial Sequence
  Description of Artificial Sequence: Synthetic oligonucleotide
cuagcuguuuagaaggaga

SEQ ID NO: 1750680 - RNA, 19 nt, Artificial Sequence
  Description of Artificial Sequence: Synthetic oligonucleotide
ucuagcuguuuagaaggag

SEQ ID NO: 1750681 - RNA, 19 nt, Artificial Sequence
  Description of Artificial Sequence: Synthetic oligonucleotide
augaacuugucguagucuu

SEQ ID NO: 1750682 - RNA, 19 nt, Artificial Sequence
  Description of Artificial Sequence: Synthetic oligonucleotide
uuucucauuuaggucaccu

SEQ ID NO: 1750683 - RNA, 19 nt, Artificial Sequence
  Description of Artificial Sequence: Synthetic oligonucleotide
aguggaaggcguucuguug

SEQ ID NO: 1750684 - RNA, 19 nt, Artificial Sequence
  Description of Artificial Sequence: Synthetic oligonucleotide
caugagggguaaauggcac

SEQ ID NO: 1750685 - RNA, 19 nt, Artificial Sequence
  Description of Artificial Sequence: Synthetic oligonucleotide
aucaacaaaugauccaauu

SEQ ID NO: 1750686 - RNA, 19 nt, Artificial Sequence
  Description of Artificial Sequence: Synthetic oligonucleotide
ugucguagucuucuguuua

SEQ ID NO: 1750687 - RNA, 19 nt, Artificial Sequence
  Description of Artificial Sequence: Synthetic oligonucleotide
acuaacucucuaugauaag

SEQ ID NO: 1750688 - RNA, 19 nt, Artificial Sequence
  Description of Artificial Sequence: Synthetic oligonucleotide
uguagaguuguugaauaua

SEQ ID NO: 1750689 - RNA, 19 nt, Artificial Sequence
  Description of Artificial Sequence: Synthetic oligonucleotide
uccguguucgugcauuuaa

SEQ ID NO: 1750690 - RNA, 19 nt, Artificial Sequence
  Description of Artificial Sequence: Synthetic oligonucleotide
auguggaaaggaucaauau

SEQ ID NO: 1750691 - RNA, 19 nt, Artificial Sequence
  Description of Artificial Sequence: Synthetic oligonucleotide
uaguucuagcuguuuagaa

SEQ ID NO: 1750692 - RNA, 19 nt, Artificial Sequence
  Description of Artificial Sequence: Synthetic oligonucleotide
aggacauuccgauaugauu

SEQ ID NO: 1750693 - RNA, 19 nt, Artificial Sequence
  Description of Artificial Sequence: Synthetic oligonucleotide
cucuaugauaagcacuauc

SEQ ID NO: 1750694 - RNA, 19 nt, Artificial Sequence
  Description of Artificial Sequence: Synthetic oligonucleotide
gaagaaacauaaaguccug

SEQ ID NO: 1750695 - RNA, 19 nt, Artificial Sequence
  Description of Artificial Sequence: Synthetic oligonucleotide
uuugcuaccgaggucccac

SEQ ID NO: 1750696 - RNA, 19 nt, Artificial Sequence
  Description of Artificial Sequence: Synthetic oligonucleotide
ucuccuuagaaugcugaga

SEQ ID NO: 1750697 - RNA, 19 nt, Artificial Sequence
  Description of Artificial Sequence: Synthetic oligonucleotide
uguccuuaugacagggcaa

SEQ ID NO: 1750698 - RNA, 19 nt, Artificial Sequence
  Description of Artificial Sequence: Synthetic oligonucleotide
uuugucccacuuuccuccg

SEQ ID NO: 1750699 - RNA, 19 nt, Artificial Sequence
  Description of Artificial Sequence: Synthetic oligonucleotide
uggaaaggaucaauaucuc

SEQ ID NO: 1750700 - RNA, 19 nt, Artificial Sequence
  Description of Artificial Sequence: Synthetic oligonucleotide
cuuccaacccaucacaaaa

SEQ ID NO: 1750701 - RNA, 19 nt, Artificial Sequence
  Description of Artificial Sequence: Synthetic oligonucleotide
cucucuaugauaagcacua

SEQ ID NO: 1750702 - RNA, 19 nt, Artificial Sequence
  Description of Artificial Sequence: Synthetic oligonucleotide
uuaucuaguggaaggcguu

SEQ ID NO: 1750703 - RNA, 19 nt, Artificial Sequence
  Description of Artificial Sequence: Synthetic oligonucleotide
uucuagcuguuuagaagga

SEQ ID NO: 1750704 - RNA, 19 nt, Artificial Sequence
  Description of Artificial Sequence: Synthetic oligonucleotide
agagcaauuugucccacuu

SEQ ID NO: 1750705 - RNA, 19 nt, Artificial Sequence
  Description of Artificial Sequence: Synthetic oligonucleotide
ugaucuaaggugagauuuu

SEQ ID NO: 1750706 - RNA, 19 nt, Artificial Sequence
  Description of Artificial Sequence: Synthetic oligonucleotide
uaaaucaacgggagacuuu

SEQ ID NO: 1750707 - RNA, 19 nt, Artificial Sequence
  Description of Artificial Sequence: Synthetic oligonucleotide
uaggucaccuuuuccgugu

SEQ ID NO: 1750708 - RNA, 19 nt, Artificial Sequence
  Description of Artificial Sequence: Synthetic oligonucleotide
gccaauauguuuucucuug

SEQ ID NO: 1750709 - RNA, 19 nt, Artificial Sequence
  Description of Artificial Sequence: Synthetic oligonucleotide
gaaugcuagauuucauugu

SEQ ID NO: 1750710 - RNA, 19 nt, Artificial Sequence
  Description of Artificial Sequence: Synthetic oligonucleotide
uucgugcauuuaaggagcc

SEQ ID NO: 1750711 - RNA, 19 nt, Artificial Sequence
  Description of Artificial Sequence: Synthetic oligonucleotide
guuaaguauauaauauugu

SEQ ID NO: 1750712 - RNA, 19 nt, Artificial Sequence
  Description of Artificial Sequence: Synthetic oligonucleotide
aacguuuaacuaacucucu

SEQ ID NO: 1750713 - RNA, 19 nt, Artificial Sequence
  Description of Artificial Sequence: Synthetic oligonucleotide
cuguugcuauaucuugccg

SEQ ID NO: 1750714 - RNA, 19 nt, Artificial Sequence
  Description of Artificial Sequence: Synthetic oligonucleotide
agaaggacauuccgauaug

SEQ ID NO: 1750715 - RNA, 19 nt, Artificial Sequence
  Description of Artificial Sequence: Synthetic oligonucleotide
ucggacaguaacauucauu

SEQ ID NO: 1750716 - RNA, 19 nt, Artificial Sequence
  Description of Artificial Sequence: Synthetic oligonucleotide
cuucagugauauguucugg

SEQ ID NO: 1750717 - RNA, 19 nt, Artificial Sequence
  Description of Artificial Sequence: Synthetic oligonucleotide
cuugggaacaaacuucaaa

SEQ ID NO: 1750718 - RNA, 19 nt, Artificial Sequence
  Description of Artificial Sequence: Synthetic oligonucleotide
ucgugcuugaagguaguca

SEQ ID NO: 1750719 - RNA, 19 nt, Artificial Sequence
  Description of Artificial Sequence: Synthetic oligonucleotide
aacgggagacuuuucuguu

SEQ ID NO: 1750720 - RNA, 19 nt, Artificial Sequence
  Description of Artificial Sequence: Synthetic oligonucleotide
cagagucgaagaaacauaa

SEQ ID NO: 1750721 - RNA, 19 nt, Artificial Sequence
  Description of Artificial Sequence: Synthetic oligonucleotide
uugggcugauuuagaagga

SEQ ID NO: 1750722 - RNA, 19 nt, Artificial Sequence
  Description of Artificial Sequence: Synthetic oligonucleotide
ccgaauuucaaaugguuuc

SEQ ID NO: 1750723 - RNA, 19 nt, Artificial Sequence
  Description of Artificial Sequence: Synthetic oligonucleotide
cuccguaacguuuaacuaa

SEQ ID NO: 1750724 - RNA, 19 nt, Artificial Sequence
  Description of Artificial Sequence: Synthetic oligonucleotide
acacccuuccaacccauca

SEQ ID NO: 1750725 - RNA, 19 nt, Artificial Sequence
  Description of Artificial Sequence: Synthetic oligonucleotide
aaaauacggaacacuugau

SEQ ID NO: 1750726 - RNA, 19 nt, Artificial Sequence
  Description of Artificial Sequence: Synthetic oligonucleotide
gaggucccacuguaaauac

SEQ ID NO: 1750727 - RNA, 19 nt, Artificial Sequence
  Description of Artificial Sequence: Synthetic oligonucleotide
acccaucuaguucuagcug

SEQ ID NO: 1750728 - RNA, 19 nt, Artificial Sequence
  Description of Artificial Sequence: Synthetic oligonucleotide
caaucuccgcaucucaauc

SEQ ID NO: 1750729 - RNA, 19 nt, Artificial Sequence
  Description of Artificial Sequence: Synthetic oligonucleotide
cauuccgauaugauuuuga

SEQ ID NO: 1750730 - RNA, 19 nt, Artificial Sequence
  Description of Artificial Sequence: Synthetic oligonucleotide
uacggaacacuugaucuaa

SEQ ID NO: 1750731 - RNA, 19 nt, Artificial Sequence
  Description of Artificial Sequence: Synthetic oligonucleotide
auaaaucaacgggagacuu

SEQ ID NO: 1750732 - RNA, 19 nt, Artificial Sequence
  Description of Artificial Sequence: Synthetic oligonucleotide
uuucguaauccaugucaaa

SEQ ID NO: 1750733 - RNA, 19 nt, Artificial Sequence
  Description of Artificial Sequence: Synthetic oligonucleotide
gaaggacauuccgauauga

SEQ ID NO: 1750734 - RNA, 19 nt, Artificial Sequence
  Description of Artificial Sequence: Synthetic oligonucleotide
ccaauauguuuucucuugg

SEQ ID NO: 1750735 - RNA, 19 nt, Artificial Sequence
  Description of Artificial Sequence: Synthetic oligonucleotide
caaaauucauuugccgguc

SEQ ID NO: 1750736 - RNA, 19 nt, Artificial Sequence
  Description of Artificial Sequence: Synthetic oligonucleotide
gaguuguugaauauaaauu

SEQ ID NO: 1750737 - RNA, 19 nt, Artificial Sequence
  Description of Artificial Sequence: Synthetic oligonucleotide
aagguacuuuggaagacau

SEQ ID NO: 1750738 - RNA, 19 nt, Artificial Sequence
  Description of Artificial Sequence: Synthetic oligonucleotide
uggugguuucuaccaaccu

SEQ ID NO: 1750739 - RNA, 19 nt, Artificial Sequence
  Description of Artificial Sequence: Synthetic oligonucleotide
auacggaacacuugaucua

SEQ ID NO: 1750740 - RNA, 19 nt, Artificial Sequence
  Description of Artificial Sequence: Synthetic oligonucleotide
cuagggaugugcccgucug

SEQ ID NO: 1750741 - RNA, 19 nt, Artificial Sequence
  Description of Artificial Sequence: Synthetic oligonucleotide
acguuuaacuaacucucua

SEQ ID NO: 1750742 - RNA, 19 nt, Artificial Sequence
  Description of Artificial Sequence: Synthetic oligonucleotide
ugauauguucugguacuuc

SEQ ID NO: 1750743 - RNA, 19 nt, Artificial Sequence
  Description of Artificial Sequence: Synthetic oligonucleotide
uaaauguggaaaggaucaa

SEQ ID NO: 1750744 - RNA, 19 nt, Artificial Sequence
  Description of Artificial Sequence: Synthetic oligonucleotide
uucccaugagggguaaaug

SEQ ID NO: 1750745 - RNA, 19 nt, Artificial Sequence
  Description of Artificial Sequence: Synthetic oligonucleotide
cuagauagccaauauguuu

SEQ ID NO: 1750746 - RNA, 19 nt, Artificial Sequence
  Description of Artificial Sequence: Synthetic oligonucleotide
auuccgaauuucaaauggu

SEQ ID NO: 1750747 - RNA, 19 nt, Artificial Sequence
  Description of Artificial Sequence: Synthetic oligonucleotide
cuguaaauacuuaucuagu

SEQ ID NO: 1750748 - RNA, 19 nt, Artificial Sequence
  Description of Artificial Sequence: Synthetic oligonucleotide
cucaaucauuucucuggug

SEQ ID NO: 1750749 - RNA, 19 nt, Artificial Sequence
  Description of Artificial Sequence: Synthetic oligonucleotide
cuuaucuaguggaaggcgu

SEQ ID NO: 1750750 - RNA, 19 nt, Artificial Sequence
  Description of Artificial Sequence: Synthetic oligonucleotide
aaaucucuagauagccaau

SEQ ID NO: 1750751 - RNA, 19 nt, Artificial Sequence
  Description of Artificial Sequence: Synthetic oligonucleotide
aaucaacgggagacuuuuc

SEQ ID NO: 1750752 - RNA, 19 nt, Artificial Sequence
  Description of Artificial Sequence: Synthetic oligonucleotide
uuuuccguguucgugcauu

SEQ ID NO: 1750753 - RNA, 19 nt, Artificial Sequence
  Description of Artificial Sequence: Synthetic oligonucleotide
uaucgugcuugaagguagu

SEQ ID NO: 1750754 - RNA, 19 nt, Artificial Sequence
  Description of Artificial Sequence: Synthetic oligonucleotide
aaggacauuccgauaugau

SEQ ID NO: 1750755 - RNA, 19 nt, Artificial Sequence
  Description of Artificial Sequence: Synthetic oligonucleotide
gucguagucuucuguuuac

SEQ ID NO: 1750756 - RNA, 19 nt, Artificial Sequence
  Description of Artificial Sequence: Synthetic oligonucleotide
ugccaagcaaucuccgcau

SEQ ID NO: 1750757 - RNA, 19 nt, Artificial Sequence
  Description of Artificial Sequence: Synthetic oligonucleotide
uugcuguuaagagcaauuu

SEQ ID NO: 1750758 - RNA, 19 nt, Artificial Sequence
  Description of Artificial Sequence: Synthetic oligonucleotide
augcuagauuucauuguag

SEQ ID NO: 1750759 - RNA, 19 nt, Artificial Sequence
  Description of Artificial Sequence: Synthetic oligonucleotide
ggaucaauaucucuucugu

SEQ ID NO: 1750760 - RNA, 19 nt, Artificial Sequence
  Description of Artificial Sequence: Synthetic oligonucleotide
agccaauauguuuucucuu

SEQ ID NO: 1750761 - RNA, 19 nt, Artificial Sequence
  Description of Artificial Sequence: Synthetic oligonucleotide
agaaucggacaguaacauu

SEQ ID NO: 1750762 - RNA, 19 nt, Artificial Sequence
  Description of Artificial Sequence: Synthetic oligonucleotide
cuaugauaagcacuaucua

SEQ ID NO: 1750763 - RNA, 19 nt, Artificial Sequence
  Description of Artificial Sequence: Synthetic oligonucleotide
uaguggaaggcguucuguu

SEQ ID NO: 1750764 - RNA, 19 nt, Artificial Sequence
  Description of Artificial Sequence: Synthetic oligonucleotide
aaggcguucuguugcuaua

SEQ ID NO: 1750765 - RNA, 19 nt, Artificial Sequence
  Description of Artificial Sequence: Synthetic oligonucleotide
uaucuaguggaaggcguuc

SEQ ID NO: 1750766 - RNA, 19 nt, Artificial Sequence
  Description of Artificial Sequence: Synthetic oligonucleotide
ugucccacuuuccuccgua

SEQ ID NO: 1750767 - RNA, 19 nt, Artificial Sequence
  Description of Artificial Sequence: Synthetic oligonucleotide
uggcagcuagaacaccuuc

SEQ ID NO: 1750768 - RNA, 19 nt, Artificial Sequence
  Description of Artificial Sequence: Synthetic oligonucleotide
ugcuaccgaggucccacug

SEQ ID NO: 1750769 - RNA, 19 nt, Artificial Sequence
  Description of Artificial Sequence: Synthetic oligonucleotide
uguugcuguuaagagcaau

SEQ ID NO: 1750770 - RNA, 19 nt, Artificial Sequence
  Description of Artificial Sequence: Synthetic oligonucleotide
gguuucauauaauuuucgu

SEQ ID NO: 1750771 - RNA, 19 nt, Artificial Sequence
  Description of Artificial Sequence: Synthetic oligonucleotide
cguguucgugcauuuaagg

SEQ ID NO: 1750772 - RNA, 19 nt, Artificial Sequence
  Description of Artificial Sequence: Synthetic oligonucleotide
cuaguucuagcuguuuaga

SEQ ID NO: 1750773 - RNA, 19 nt, Artificial Sequence
  Description of Artificial Sequence: Synthetic oligonucleotide
ugugcccgucugaauauuu

SEQ ID NO: 1750774 - RNA, 19 nt, Artificial Sequence
  Description of Artificial Sequence: Synthetic oligonucleotide
ucaccuuuuccguguucgu

SEQ ID NO: 1750775 - RNA, 19 nt, Artificial Sequence
  Description of Artificial Sequence: Synthetic oligonucleotide
uggaaggcguucuguugcu

SEQ ID NO: 1750776 - RNA, 19 nt, Artificial Sequence
  Description of Artificial Sequence: Synthetic oligonucleotide
ggaacacuugaucuaaggu

SEQ ID NO: 1750777 - RNA, 19 nt, Artificial Sequence
  Description of Artificial Sequence: Synthetic oligonucleotide
uccgcaucucaaucauuuc

SEQ ID NO: 1750778 - RNA, 19 nt, Artificial Sequence
  Description of Artificial Sequence: Synthetic oligonucleotide
ucguagucuucuguuuacu

SEQ ID NO: 1750779 - RNA, 19 nt, Artificial Sequence
  Description of Artificial Sequence: Synthetic oligonucleotide
cuugccguuuugccuuggc

SEQ ID NO: 1750780 - RNA, 19 nt, Artificial Sequence
  Description of Artificial Sequence: Synthetic oligonucleotide
aucuaguggaaggcguucu

SEQ ID NO: 1750781 - RNA, 19 nt, Artificial Sequence
  Description of Artificial Sequence: Synthetic oligonucleotide
uugccuuggcuagggaugu

SEQ ID NO: 1750782 - RNA, 19 nt, Artificial Sequence
  Description of Artificial Sequence: Synthetic oligonucleotide
uugccggucccagagucga

SEQ ID NO: 1750783 - RNA, 19 nt, Artificial Sequence
  Description of Artificial Sequence: Synthetic oligonucleotide
cgaagaaacauaaaguccu

SEQ ID NO: 1750784 - RNA, 19 nt, Artificial Sequence
  Description of Artificial Sequence: Synthetic oligonucleotide
cagcauuccgaauuucaaa

SEQ ID NO: 1750785 - RNA, 19 nt, Artificial Sequence
  Description of Artificial Sequence: Synthetic oligonucleotide
acauuccgauaugauuuug

SEQ ID NO: 1750786 - RNA, 19 nt, Artificial Sequence
  Description of Artificial Sequence: Synthetic oligonucleotide
aguuuuccacccaucuagu

SEQ ID NO: 1750787 - RNA, 19 nt, Artificial Sequence
  Description of Artificial Sequence: Synthetic oligonucleotide
ggaugugcccgucugaaua

SEQ ID NO: 1750788 - RNA, 19 nt, Artificial Sequence
  Description of Artificial Sequence: Synthetic oligonucleotide
uuuccuccguaacguuuaa

SEQ ID NO: 1750789 - RNA, 19 nt, Artificial Sequence
  Description of Artificial Sequence: Synthetic oligonucleotide
ggcaaaaggucuuaagaau

SEQ ID NO: 1750790 - RNA, 19 nt, Artificial Sequence
  Description of Artificial Sequence: Synthetic oligonucleotide
aucgugcuugaagguaguc

SEQ ID NO: 1750791 - RNA, 19 nt, Artificial Sequence
  Description of Artificial Sequence: Synthetic oligonucleotide
guugcuauaucuugccguu

SEQ ID NO: 1750792 - RNA, 19 nt, Artificial Sequence
  Description of Artificial Sequence: Synthetic oligonucleotide
gcaguuaaguauauaauau

SEQ ID NO: 1750793 - RNA, 19 nt, Artificial Sequence
  Description of Artificial Sequence: Synthetic oligonucleotide
uuuccguguucgugcauuu

SEQ ID NO: 1750794 - RNA, 19 nt, Artificial Sequence
  Description of Artificial Sequence: Synthetic oligonucleotide
caacgggagacuuuucugu

SEQ ID NO: 1750795 - RNA, 19 nt, Artificial Sequence
  Description of Artificial Sequence: Synthetic oligonucleotide
aucggacaguaacauucau

SEQ ID NO: 1750796 - RNA, 19 nt, Artificial Sequence
  Description of Artificial Sequence: Synthetic oligonucleotide
ggacauuccgauaugauuu

SEQ ID NO: 1750797 - RNA, 19 nt, Artificial Sequence
  Description of Artificial Sequence: Synthetic oligonucleotide
gucugagaccacugaagaa

SEQ ID NO: 1750798 - RNA, 19 nt, Artificial Sequence
  Description of Artificial Sequence: Synthetic oligonucleotide
gaaggcguucuguugcuau

SEQ ID NO: 1750799 - RNA, 19 nt, Artificial Sequence
  Description of Artificial Sequence: Synthetic oligonucleotide
augacagggcaaagaaggu

SEQ ID NO: 1750800 - RNA, 19 nt, Artificial Sequence
  Description of Artificial Sequence: Synthetic oligonucleotide
gaugugcccgucugaauau

SEQ ID NO: 1750801 - RNA, 19 nt, Artificial Sequence
  Description of Artificial Sequence: Synthetic oligonucleotide
cugcaguuaaguauauaau

SEQ ID NO: 1750802 - RNA, 19 nt, Artificial Sequence
  Description of Artificial Sequence: Synthetic oligonucleotide
aucuugccguuuugccuug

SEQ ID NO: 1750803 - RNA, 19 nt, Artificial Sequence
  Description of Artificial Sequence: Synthetic oligonucleotide
cacccaucuaguucuagcu

SEQ ID NO: 1750804 - RNA, 19 nt, Artificial Sequence
  Description of Artificial Sequence: Synthetic oligonucleotide
aggagagguacuguccuua

SEQ ID NO: 1750805 - RNA, 19 nt, Artificial Sequence
  Description of Artificial Sequence: Synthetic oligonucleotide
guuuagaaggagagguacu

SEQ ID NO: 1750806 - RNA, 19 nt, Artificial Sequence
  Description of Artificial Sequence: Synthetic oligonucleotide
ucuugccguuuugccuugg

SEQ ID NO: 1750807 - RNA, 19 nt, Artificial Sequence
  Description of Artificial Sequence: Synthetic oligonucleotide
gacauuccgauaugauuuu

SEQ ID NO: 1750808 - RNA, 19 nt, Artificial Sequence
  Description of Artificial Sequence: Synthetic oligonucleotide
ccuuggcuagggaugugcc

SEQ ID NO: 1750809 - RNA, 19 nt, Artificial Sequence
  Description of Artificial Sequence: Synthetic oligonucleotide
ccgauaugauuuugaguug

SEQ ID NO: 1750810 - RNA, 19 nt, Artificial Sequence
  Description of Artificial Sequence: Synthetic oligonucleotide
uugucccacuuuccuccgu

SEQ ID NO: 1750811 - RNA, 19 nt, Artificial Sequence
  Description of Artificial Sequence: Synthetic oligonucleotide
uugcuaccgaggucccacu

SEQ ID NO: 1750812 - RNA, 19 nt, Artificial Sequence
  Description of Artificial Sequence: Synthetic oligonucleotide
agcaaucuccgcaucucaa

SEQ ID NO: 1750813 - RNA, 19 nt, Artificial Sequence
  Description of Artificial Sequence: Synthetic oligonucleotide
ucgugcauuuaaggagccu

SEQ ID NO: 1750814 - RNA, 19 nt, Artificial Sequence
  Description of Artificial Sequence: Synthetic oligonucleotide
cuugaaugcuagauuucau

SEQ ID NO: 1750815 - RNA, 19 nt, Artificial Sequence
  Description of Artificial Sequence: Synthetic oligonucleotide
cuccgcaucucaaucauuu

SEQ ID NO: 1750816 - RNA, 19 nt, Artificial Sequence
  Description of Artificial Sequence: Synthetic oligonucleotide
agagucgaagaaacauaaa

SEQ ID NO: 1750817 - RNA, 19 nt, Artificial Sequence
  Description of Artificial Sequence: Synthetic oligonucleotide
gcagagcaaaauacggaac

SEQ ID NO: 1750818 - RNA, 19 nt, Artificial Sequence
  Description of Artificial Sequence: Synthetic oligonucleotide
ccguguucgugcauuuaag

SEQ ID NO: 1750819 - RNA, 19 nt, Artificial Sequence
  Description of Artificial Sequence: Synthetic oligonucleotide
aggcguucuguugcuauau

SEQ ID NO: 1750820 - RNA, 19 nt, Artificial Sequence
  Description of Artificial Sequence: Synthetic oligonucleotide
ccaugagggguaaauggca

SEQ ID NO: 1750821 - RNA, 19 nt, Artificial Sequence
  Description of Artificial Sequence: Synthetic oligonucleotide
acggaacacuugaucuaag

SEQ ID NO: 1750822 - RNA, 19 nt, Artificial Sequence
  Description of Artificial Sequence: Synthetic oligonucleotide
uuccuccguaacguuuaac

SEQ ID NO: 1750823 - RNA, 19 nt, Artificial Sequence
  Description of Artificial Sequence: Synthetic oligonucleotide
uggcaccauuaaucuggca

SEQ ID NO: 1750824 - RNA, 19 nt, Artificial Sequence
  Description of Artificial Sequence: Synthetic oligonucleotide
cuaccgaggucccacugua

SEQ ID NO: 1750825 - RNA, 19 nt, Artificial Sequence
  Description of Artificial Sequence: Synthetic oligonucleotide
gagaaacagcauuccgaau

SEQ ID NO: 1750826 - RNA, 19 nt, Artificial Sequence
  Description of Artificial Sequence: Synthetic oligonucleotide
gggcugauuuagaaggaca

SEQ ID NO: 1750827 - RNA, 19 nt, Artificial Sequence
  Description of Artificial Sequence: Synthetic oligonucleotide
cuugaucuaaggugagauu

SEQ ID NO: 1750828 - RNA, 19 nt, Artificial Sequence
  Description of Artificial Sequence: Synthetic oligonucleotide
cuguagaguuguugaauau

SEQ ID NO: 1750829 - RNA, 19 nt, Artificial Sequence
  Description of Artificial Sequence: Synthetic oligonucleotide
aucuggcaaaaggucuuaa

SEQ ID NO: 1750830 - RNA, 19 nt, Artificial Sequence
  Description of Artificial Sequence: Synthetic oligonucleotide
gcuagauuucauuguaguu

SEQ ID NO: 1750831 - RNA, 19 nt, Artificial Sequence
  Description of Artificial Sequence: Synthetic oligonucleotide
caccauuaaucuggcaaaa

SEQ ID NO: 1750832 - RNA, 19 nt, Artificial Sequence
  Description of Artificial Sequence: Synthetic oligonucleotide
gcguucuguugcuauaucu

SEQ ID NO: 1750833 - RNA, 19 nt, Artificial Sequence
  Description of Artificial Sequence: Synthetic oligonucleotide
gccuuggcuagggaugugc

SEQ ID NO: 1750834 - RNA, 19 nt, Artificial Sequence
  Description of Artificial Sequence: Synthetic oligonucleotide
gcaucucaaucauuucucu

SEQ ID NO: 1750835 - RNA, 19 nt, Artificial Sequence
  Description of Artificial Sequence: Synthetic oligonucleotide
gggguaaauggcaccauua

SEQ ID NO: 1750836 - RNA, 19 nt, Artificial Sequence
  Description of Artificial Sequence: Synthetic oligonucleotide
cggacaguaacauucauuu

SEQ ID NO: 1750837 - RNA, 19 nt, Artificial Sequence
  Description of Artificial Sequence: Synthetic oligonucleotide
guuuuccacccaucuaguu

SEQ ID NO: 1750838 - RNA, 19 nt, Artificial Sequence
  Description of Artificial Sequence: Synthetic oligonucleotide
cuaguggaaggcguucugu

SEQ ID NO: 1750839 - RNA, 19 nt, Artificial Sequence
  Description of Artificial Sequence: Synthetic oligonucleotide
cguuuugccuuggcuaggg

SEQ ID NO: 1750840 - RNA, 19 nt, Artificial Sequence
  Description of Artificial Sequence: Synthetic oligonucleotide
uuccguguucgugcauuua

SEQ ID NO: 1750841 - RNA, 19 nt, Artificial Sequence
  Description of Artificial Sequence: Synthetic oligonucleotide
gcagcuagaacaccuucau

SEQ ID NO: 1750842 - RNA, 19 nt, Artificial Sequence
  Description of Artificial Sequence: Synthetic oligonucleotide
ccuccguaacguuuaacua

SEQ ID NO: 1750843 - RNA, 19 nt, Artificial Sequence
  Description of Artificial Sequence: Synthetic oligonucleotide
agguacuuuggaagacaua

SEQ ID NO: 1750844 - RNA, 19 nt, Artificial Sequence
  Description of Artificial Sequence: Synthetic oligonucleotide
ccuuuuccguguucgugca

SEQ ID NO: 1750845 - RNA, 19 nt, Artificial Sequence
  Description of Artificial Sequence: Synthetic oligonucleotide
ugccggucccagagucgaa

SEQ ID NO: 1750846 - RNA, 19 nt, Artificial Sequence
  Description of Artificial Sequence: Synthetic oligonucleotide
uucuaccaaccuggccuuu

SEQ ID NO: 1750847 - RNA, 19 nt, Artificial Sequence
  Description of Artificial Sequence: Synthetic oligonucleotide
ccgcaucucaaucauuucu

SEQ ID NO: 1750848 - RNA, 19 nt, Artificial Sequence
  Description of Artificial Sequence: Synthetic oligonucleotide
gccaagcaaucuccgcauc

SEQ ID NO: 1750849 - RNA, 19 nt, Artificial Sequence
  Description of Artificial Sequence: Synthetic oligonucleotide
cgugcuugaagguagucau

SEQ ID NO: 1750850 - RNA, 19 nt, Artificial Sequence
  Description of Artificial Sequence: Synthetic oligonucleotide
ggucaccuuuuccguguuc

SEQ ID NO: 1750851 - RNA, 19 nt, Artificial Sequence
  Description of Artificial Sequence: Synthetic oligonucleotide
augugcccgucugaauauu

SEQ ID NO: 1750852 - RNA, 19 nt, Artificial Sequence
  Description of Artificial Sequence: Synthetic oligonucleotide
gcuaccgaggucccacugu

SEQ ID NO: 1750853 - RNA, 19 nt, Artificial Sequence
  Description of Artificial Sequence: Synthetic oligonucleotide
gugcauuuaaggagccuuu

SEQ ID NO: 1750854 - RNA, 19 nt, Artificial Sequence
  Description of Artificial Sequence: Synthetic oligonucleotide
gugauauguucugguacuu

SEQ ID NO: 1750855 - RNA, 19 nt, Artificial Sequence
  Description of Artificial Sequence: Synthetic oligonucleotide
cauuugccggucccagagu

SEQ ID NO: 1750856 - RNA, 19 nt, Artificial Sequence
  Description of Artificial Sequence: Synthetic oligonucleotide
ccaagcaaucuccgcaucu

SEQ ID NO: 1750857 - RNA, 19 nt, Artificial Sequence
  Description of Artificial Sequence: Synthetic oligonucleotide
ccguuuugccuuggcuagg

SEQ ID NO: 1750858 - RNA, 19 nt, Artificial Sequence
  Description of Artificial Sequence: Synthetic oligonucleotide
ggagagguacuguccuuau

SEQ ID NO: 1750859 - RNA, 19 nt, Artificial Sequence
  Description of Artificial Sequence: Synthetic oligonucleotide
gcuagggaugugcccgucu

SEQ ID NO: 1750860 - RNA, 19 nt, Artificial Sequence
  Description of Artificial Sequence: Synthetic oligonucleotide
ccggucccagagucgaaga

SEQ ID NO: 1750861 - RNA, 19 nt, Artificial Sequence
  Description of Artificial Sequence: Synthetic oligonucleotide
cuuuuccguguucgugcau

SEQ ID NO: 1750862 - RNA, 19 nt, Artificial Sequence
  Description of Artificial Sequence: Synthetic oligonucleotide
caucuaguucuagcuguuu

SEQ ID NO: 1750863 - RNA, 19 nt, Artificial Sequence
  Description of Artificial Sequence: Synthetic oligonucleotide
gugcccgucugaauauuuu

SEQ ID NO: 1750864 - RNA, 19 nt, Artificial Sequence
  Description of Artificial Sequence: Synthetic oligonucleotide
gggaugugcccgucugaau

SEQ ID NO: 1750865 - RNA, 19 nt, Artificial Sequence
  Description of Artificial Sequence: Synthetic oligonucleotide
ccguaacguuuaacuaacu

SEQ ID NO: 1750866 - RNA, 19 nt, Artificial Sequence
  Description of Artificial Sequence: Synthetic oligonucleotide
aauaaugcgcaacaaaccg

SEQ ID NO: 1750867 - RNA, 19 nt, Artificial Sequence
  Description of Artificial Sequence: Synthetic oligonucleotide
aauaauagucgucuuuccc

SEQ ID NO: 1750868 - RNA, 19 nt, Artificial Sequence
  Description of Artificial Sequence: Synthetic oligonucleotide
uuuggaaagauccaaaaca

SEQ ID NO: 1750869 - RNA, 19 nt, Artificial Sequence
  Description of Artificial Sequence: Synthetic oligonucleotide
aauaaucuuauuugaauug

SEQ ID NO: 1750870 - RNA, 19 nt, Artificial Sequence
  Description of Artificial Sequence: Synthetic oligonucleotide
auaauagucgucuuucccc

SEQ ID NO: 1750871 - RNA, 19 nt, Artificial Sequence
  Description of Artificial Sequence: Synthetic oligonucleotide
uuugcucuugucaauaccg

SEQ ID NO: 1750872 - RNA, 19 nt, Artificial Sequence
  Description of Artificial Sequence: Synthetic oligonucleotide
aaacccacaauaguggacc

SEQ ID NO: 1750873 - RNA, 19 nt, Artificial Sequence
  Description of Artificial Sequence: Synthetic oligonucleotide
uccuauauuauacauuuca

SEQ ID NO: 1750874 - RNA, 19 nt, Artificial Sequence
  Description of Artificial Sequence: Synthetic oligonucleotide
gacauaaagaguccaaucc

SEQ ID NO: 1750875 - RNA, 19 nt, Artificial Sequence
  Description of Artificial Sequence: Synthetic oligonucleotide
acagaaaauguccucaagg

SEQ ID NO: 1750876 - RNA, 19 nt, Artificial Sequence
  Description of Artificial Sequence: Synthetic oligonucleotide
uaacucacgauccggaugg

SEQ ID NO: 1750877 - RNA, 19 nt, Artificial Sequence
  Description of Artificial Sequence: Synthetic oligonucleotide
aauaccgaaugccaacugg

SEQ ID NO: 1750878 - RNA, 19 nt, Artificial Sequence
  Description of Artificial Sequence: Synthetic oligonucleotide
acaauaguggaccaggcuc

SEQ ID NO: 1750879 - RNA, 19 nt, Artificial Sequence
  Description of Artificial Sequence: Synthetic oligonucleotide
uggagaaugggccugaagc

SEQ ID NO: 1750880 - RNA, 19 nt, Artificial Sequence
  Description of Artificial Sequence: Synthetic oligonucleotide
cuaagguuggcuuugcugg

SEQ ID NO: 1750881 - RNA, 19 nt, Artificial Sequence
  Description of Artificial Sequence: Synthetic oligonucleotide
uauuuucuaucuaaaagac

SEQ ID NO: 1750882 - RNA, 19 nt, Artificial Sequence
  Description of Artificial Sequence: Synthetic oligonucleotide
cuuaugagguccaauagag

SEQ ID NO: 1750883 - RNA, 19 nt, Artificial Sequence
  Description of Artificial Sequence: Synthetic oligonucleotide
gauugguaugcuuaugagg

SEQ ID NO: 1750884 - RNA, 19 nt, Artificial Sequence
  Description of Artificial Sequence: Synthetic oligonucleotide
uuacuuccaauuaugacca

SEQ ID NO: 1750885 - RNA, 19 nt, Artificial Sequence
  Description of Artificial Sequence: Synthetic oligonucleotide
cauaaacccacaauagugg

SEQ ID NO: 1750886 - RNA, 19 nt, Artificial Sequence
  Description of Artificial Sequence: Synthetic oligonucleotide
auuuacuuccaauuaugac

SEQ ID NO: 1750887 - RNA, 19 nt, Artificial Sequence
  Description of Artificial Sequence: Synthetic oligonucleotide
aacaccacgaauuuucagu

SEQ ID NO: 1750888 - RNA, 19 nt, Artificial Sequence
  Description of Artificial Sequence: Synthetic oligonucleotide
aaugccaacugguugauaa

SEQ ID NO: 1750889 - RNA, 19 nt, Artificial Sequence
  Description of Artificial Sequence: Synthetic oligonucleotide
uguuaugucccuuuguucu

SEQ ID NO: 1750890 - RNA, 19 nt, Artificial Sequence
  Description of Artificial Sequence: Synthetic oligonucleotide
uugcauaucaccuuucucu

SEQ ID NO: 1750891 - RNA, 19 nt, Artificial Sequence
  Description of Artificial Sequence: Synthetic oligonucleotide
agauuuuccauggugggcc

SEQ ID NO: 1750892 - RNA, 19 nt, Artificial Sequence
  Description of Artificial Sequence: Synthetic oligonucleotide
ugcugauacucuuuggugg

SEQ ID NO: 1750893 - RNA, 19 nt, Artificial Sequence
  Description of Artificial Sequence: Synthetic oligonucleotide
ugagcaaugucuuuuggug

SEQ ID NO: 1750894 - RNA, 19 nt, Artificial Sequence
  Description of Artificial Sequence: Synthetic oligonucleotide
ugcgcaacaaaccgcagcg

SEQ ID NO: 1750895 - RNA, 19 nt, Artificial Sequence
  Description of Artificial Sequence: Synthetic oligonucleotide
acacauauugauuugcucu

SEQ ID NO: 1750896 - RNA, 19 nt, Artificial Sequence
  Description of Artificial Sequence: Synthetic oligonucleotide
aucacuuugucuauguggc

SEQ ID NO: 1750897 - RNA, 19 nt, Artificial Sequence
  Description of Artificial Sequence: Synthetic oligonucleotide
cuucucgggaucaaaaucc

SEQ ID NO: 1750898 - RNA, 19 nt, Artificial Sequence
  Description of Artificial Sequence: Synthetic oligonucleotide
agaauaauagucgucuuuc

SEQ ID NO: 1750899 - RNA, 19 nt, Artificial Sequence
  Description of Artificial Sequence: Synthetic oligonucleotide
aaggaagacauaaacccac

SEQ ID NO: 1750900 - RNA, 19 nt, Artificial Sequence
  Description of Artificial Sequence: Synthetic oligonucleotide
acaccuuagaauaauaguc

SEQ ID NO: 1750901 - RNA, 19 nt, Artificial Sequence
  Description of Artificial Sequence: Synthetic oligonucleotide
uaucauaugugauugguau

SEQ ID NO: 1750902 - RNA, 19 nt, Artificial Sequence
  Description of Artificial Sequence: Synthetic oligonucleotide
auaaucuuauuugaauugg

SEQ ID NO: 1750903 - RNA, 19 nt, Artificial Sequence
  Description of Artificial Sequence: Synthetic oligonucleotide
aaagaguccaauccugcug

SEQ ID NO: 1750904 - RNA, 19 nt, Artificial Sequence
  Description of Artificial Sequence: Synthetic oligonucleotide
caccuuagaauaauagucg

SEQ ID NO: 1750905 - RNA, 19 nt, Artificial Sequence
  Description of Artificial Sequence: Synthetic oligonucleotide
ugaggcuccguaauaaugc

SEQ ID NO: 1750906 - RNA, 19 nt, Artificial Sequence
  Description of Artificial Sequence: Synthetic oligonucleotide
uguauuccaaagcuaaggu

SEQ ID NO: 1750907 - RNA, 19 nt, Artificial Sequence
  Description of Artificial Sequence: Synthetic oligonucleotide
uuuggaauuugucuucccc

SEQ ID NO: 1750908 - RNA, 19 nt, Artificial Sequence
  Description of Artificial Sequence: Synthetic oligonucleotide
ucauaugugauugguaugc

SEQ ID NO: 1750909 - RNA, 19 nt, Artificial Sequence
  Description of Artificial Sequence: Synthetic oligonucleotide
ucuccuauauuauacauuu

SEQ ID NO: 1750910 - RNA, 19 nt, Artificial Sequence
  Description of Artificial Sequence: Synthetic oligonucleotide
cuuuugguguguuaugucc

SEQ ID NO: 1750911 - RNA, 19 nt, Artificial Sequence
  Description of Artificial Sequence: Synthetic oligonucleotide
ucaucaacuucacucuccg

SEQ ID NO: 1750912 - RNA, 19 nt, Artificial Sequence
  Description of Artificial Sequence: Synthetic oligonucleotide
aagguaucauaugugauug

SEQ ID NO: 1750913 - RNA, 19 nt, Artificial Sequence
  Description of Artificial Sequence: Synthetic oligonucleotide
uauuuacuuccaauuauga

SEQ ID NO: 1750914 - RNA, 19 nt, Artificial Sequence
  Description of Artificial Sequence: Synthetic oligonucleotide
guaauaaugcgcaacaaac

SEQ ID NO: 1750915 - RNA, 19 nt, Artificial Sequence
  Description of Artificial Sequence: Synthetic oligonucleotide
gacccuauuugacauaaag

SEQ ID NO: 1750916 - RNA, 19 nt, Artificial Sequence
  Description of Artificial Sequence: Synthetic oligonucleotide
aaacgggucgauuaacuca

SEQ ID NO: 1750917 - RNA, 19 nt, Artificial Sequence
  Description of Artificial Sequence: Synthetic oligonucleotide
cauacuguggaucucgggc

SEQ ID NO: 1750918 - RNA, 19 nt, Artificial Sequence
  Description of Artificial Sequence: Synthetic oligonucleotide
agaagguaagaaaauaauc

SEQ ID NO: 1750919 - RNA, 19 nt, Artificial Sequence
  Description of Artificial Sequence: Synthetic oligonucleotide
gauaacaccacgaauuuuc

SEQ ID NO: 1750920 - RNA, 19 nt, Artificial Sequence
  Description of Artificial Sequence: Synthetic oligonucleotide
aacuucacucuccgcauac

SEQ ID NO: 1750921 - RNA, 19 nt, Artificial Sequence
  Description of Artificial Sequence: Synthetic oligonucleotide
uauucugauccacacauau

SEQ ID NO: 1750922 - RNA, 19 nt, Artificial Sequence
  Description of Artificial Sequence: Synthetic oligonucleotide
uaugugauugguaugcuua

SEQ ID NO: 1750923 - RNA, 19 nt, Artificial Sequence
  Description of Artificial Sequence: Synthetic oligonucleotide
auaaacagugguuuauucu

SEQ ID NO: 1750924 - RNA, 19 nt, Artificial Sequence
  Description of Artificial Sequence: Synthetic oligonucleotide
uagugaauauuuucuaucu

SEQ ID NO: 1750925 - RNA, 19 nt, Artificial Sequence
  Description of Artificial Sequence: Synthetic oligonucleotide
uaaacaucagugaggcucc

SEQ ID NO: 1750926 - RNA, 19 nt, Artificial Sequence
  Description of Artificial Sequence: Synthetic oligonucleotide
ucuaucuaaaagacuccag

SEQ ID NO: 1750927 - RNA, 19 nt, Artificial Sequence
  Description of Artificial Sequence: Synthetic oligonucleotide
aaguuguaccaguauaaga

SEQ ID NO: 1750928 - RNA, 19 nt, Artificial Sequence
  Description of Artificial Sequence: Synthetic oligonucleotide
cccuauuugacauaaagag

SEQ ID NO: 1750929 - RNA, 19 nt, Artificial Sequence
  Description of Artificial Sequence: Synthetic oligonucleotide
aacagaaaauguccucaag

SEQ ID NO: 1750930 - RNA, 19 nt, Artificial Sequence
  Description of Artificial Sequence: Synthetic oligonucleotide
uugucaauaccgaaugcca

SEQ ID NO: 1750931 - RNA, 19 nt, Artificial Sequence
  Description of Artificial Sequence: Synthetic oligonucleotide
agcuuuugcaauuucccag

SEQ ID NO: 1750932 - RNA, 19 nt, Artificial Sequence
  Description of Artificial Sequence: Synthetic oligonucleotide
aaaguuguaccaguauaag

SEQ ID NO: 1750933 - RNA, 19 nt, Artificial Sequence
  Description of Artificial Sequence: Synthetic oligonucleotide
gaagguaagaaaauaaucu

SEQ ID NO: 1750934 - RNA, 19 nt, Artificial Sequence
  Description of Artificial Sequence: Synthetic oligonucleotide
uaucuaaaagacuccagaa

SEQ ID NO: 1750935 - RNA, 19 nt, Artificial Sequence
  Description of Artificial Sequence: Synthetic oligonucleotide
uccguaauaaugcgcaaca

SEQ ID NO: 1750936 - RNA, 19 nt, Artificial Sequence
  Description of Artificial Sequence: Synthetic oligonucleotide
uuucuaucuaaaagacucc

SEQ ID NO: 1750937 - RNA, 19 nt, Artificial Sequence
  Description of Artificial Sequence: Synthetic oligonucleotide
ugggaauagcuuuucauac

SEQ ID NO: 1750938 - RNA, 19 nt, Artificial Sequence
  Description of Artificial Sequence: Synthetic oligonucleotide
ugguaaacaucagugaggc

SEQ ID NO: 1750939 - RNA, 19 nt, Artificial Sequence
  Description of Artificial Sequence: Synthetic oligonucleotide
gauuucuccuauauuauac

SEQ ID NO: 1750940 - RNA, 19 nt, Artificial Sequence
  Description of Artificial Sequence: Synthetic oligonucleotide
uccuggauugccuucagug

SEQ ID NO: 1750941 - RNA, 19 nt, Artificial Sequence
  Description of Artificial Sequence: Synthetic oligonucleotide
aacgggucgauuaacucac

SEQ ID NO: 1750942 - RNA, 19 nt, Artificial Sequence
  Description of Artificial Sequence: Synthetic oligonucleotide
uauagugaauauuuucuau

SEQ ID NO: 1750943 - RNA, 19 nt, Artificial Sequence
  Description of Artificial Sequence: Synthetic oligonucleotide
acauaaacccacaauagug

SEQ ID NO: 1750944 - RNA, 19 nt, Artificial Sequence
  Description of Artificial Sequence: Synthetic oligonucleotide
uuaacucacgauccggaug

SEQ ID NO: 1750945 - RNA, 19 nt, Artificial Sequence
  Description of Artificial Sequence: Synthetic oligonucleotide
accaguauaagaaauagau

SEQ ID NO: 1750946 - RNA, 19 nt, Artificial Sequence
  Description of Artificial Sequence: Synthetic oligonucleotide
auaaagaguccaauccugc

SEQ ID NO: 1750947 - RNA, 19 nt, Artificial Sequence
  Description of Artificial Sequence: Synthetic oligonucleotide
cugguaaacaucagugagg

SEQ ID NO: 1750948 - RNA, 19 nt, Artificial Sequence
  Description of Artificial Sequence: Synthetic oligonucleotide
acauaaagaguccaauccu

SEQ ID NO: 1750949 - RNA, 19 nt, Artificial Sequence
  Description of Artificial Sequence: Synthetic oligonucleotide
ucgauuaacucacgauccg

SEQ ID NO: 1750950 - RNA, 19 nt, Artificial Sequence
  Description of Artificial Sequence: Synthetic oligonucleotide
ugcuuaugagguccaauag

SEQ ID NO: 1750951 - RNA, 19 nt, Artificial Sequence
  Description of Artificial Sequence: Synthetic oligonucleotide
aguagagcuucugauuugc

SEQ ID NO: 1750952 - RNA, 19 nt, Artificial Sequence
  Description of Artificial Sequence: Synthetic oligonucleotide
cuccauuggagaaugggcc

SEQ ID NO: 1750953 - RNA, 19 nt, Artificial Sequence
  Description of Artificial Sequence: Synthetic oligonucleotide
acugguugauaacaccacg

SEQ ID NO: 1750954 - RNA, 19 nt, Artificial Sequence
  Description of Artificial Sequence: Synthetic oligonucleotide
uccaaugucacugucggga

SEQ ID NO: 1750955 - RNA, 19 nt, Artificial Sequence
  Description of Artificial Sequence: Synthetic oligonucleotide
ugcugugauaaacaguggu

SEQ ID NO: 1750956 - RNA, 19 nt, Artificial Sequence
  Description of Artificial Sequence: Synthetic oligonucleotide
cuuguacuguuccaguucc

SEQ ID NO: 1750957 - RNA, 19 nt, Artificial Sequence
  Description of Artificial Sequence: Synthetic oligonucleotide
agaaauagauuucuccuau

SEQ ID NO: 1750958 - RNA, 19 nt, Artificial Sequence
  Description of Artificial Sequence: Synthetic oligonucleotide
aguuguaccaguauaagaa

SEQ ID NO: 1750959 - RNA, 19 nt, Artificial Sequence
  Description of Artificial Sequence: Synthetic oligonucleotide
ugauugguaugcuuaugag

SEQ ID NO: 1750960 - RNA, 19 nt, Artificial Sequence
  Description of Artificial Sequence: Synthetic oligonucleotide
gaauaauagucgucuuucc

SEQ ID NO: 1750961 - RNA, 19 nt, Artificial Sequence
  Description of Artificial Sequence: Synthetic oligonucleotide
ugucaagacaccuuagaau

SEQ ID NO: 1750962 - RNA, 19 nt, Artificial Sequence
  Description of Artificial Sequence: Synthetic oligonucleotide
uuggaauuugucuucccca

SEQ ID NO: 1750963 - RNA, 19 nt, Artificial Sequence
  Description of Artificial Sequence: Synthetic oligonucleotide
aaucuuauuugaauuggga

SEQ ID NO: 1750964 - RNA, 19 nt, Artificial Sequence
  Description of Artificial Sequence: Synthetic oligonucleotide
cucacgauccggauggucc

SEQ ID NO: 1750965 - RNA, 19 nt, Artificial Sequence
  Description of Artificial Sequence: Synthetic oligonucleotide
uggaccaggcucaagaguc

SEQ ID NO: 1750966 - RNA, 19 nt, Artificial Sequence
  Description of Artificial Sequence: Synthetic oligonucleotide
uguguuaugucccuuuguu

SEQ ID NO: 1750967 - RNA, 19 nt, Artificial Sequence
  Description of Artificial Sequence: Synthetic oligonucleotide
auaaugcgcaacaaaccgc

SEQ ID NO: 1750968 - RNA, 19 nt, Artificial Sequence
  Description of Artificial Sequence: Synthetic oligonucleotide
uuagguuuggaaagaucca

SEQ ID NO: 1750969 - RNA, 19 nt, Artificial Sequence
  Description of Artificial Sequence: Synthetic oligonucleotide
uuuacugccaaggaagaaa

SEQ ID NO: 1750970 - RNA, 19 nt, Artificial Sequence
  Description of Artificial Sequence: Synthetic oligonucleotide
ucuucucgggaucaaaauc

SEQ ID NO: 1750971 - RNA, 19 nt, Artificial Sequence
  Description of Artificial Sequence: Synthetic oligonucleotide
augcgcaacaaaccgcagc

SEQ ID NO: 1750972 - RNA, 19 nt, Artificial Sequence
  Description of Artificial Sequence: Synthetic oligonucleotide
acgaauuuucaguaguaga

SEQ ID NO: 1750973 - RNA, 19 nt, Artificial Sequence
  Description of Artificial Sequence: Synthetic oligonucleotide
ugagguccaauagagaggu

SEQ ID NO: 1750974 - RNA, 19 nt, Artificial Sequence
  Description of Artificial Sequence: Synthetic oligonucleotide
uuccaauuaugaccagggg

SEQ ID NO: 1750975 - RNA, 19 nt, Artificial Sequence
  Description of Artificial Sequence: Synthetic oligonucleotide
aaagcuaagguuggcuuug

SEQ ID NO: 1750976 - RNA, 19 nt, Artificial Sequence
  Description of Artificial Sequence: Synthetic oligonucleotide
uccagaacauucacaaagu

SEQ ID NO: 1750977 - RNA, 19 nt, Artificial Sequence
  Description of Artificial Sequence: Synthetic oligonucleotide
gugaauauuuucuaucuaa

SEQ ID NO: 1750978 - RNA, 19 nt, Artificial Sequence
  Description of Artificial Sequence: Synthetic oligonucleotide
uccauggugggccaaagau

SEQ ID NO: 1750979 - RNA, 19 nt, Artificial Sequence
  Description of Artificial Sequence: Synthetic oligonucleotide
agguccaauagagagguuc

SEQ ID NO: 1750980 - RNA, 19 nt, Artificial Sequence
  Description of Artificial Sequence: Synthetic oligonucleotide
uuacugccaaggaagaaaa

SEQ ID NO: 1750981 - RNA, 19 nt, Artificial Sequence
  Description of Artificial Sequence: Synthetic oligonucleotide
ugucgcuugcaacagauuu

SEQ ID NO: 1750982 - RNA, 19 nt, Artificial Sequence
  Description of Artificial Sequence: Synthetic oligonucleotide
agcucgauuuguuuccagg

SEQ ID NO: 1750983 - RNA, 19 nt, Artificial Sequence
  Description of Artificial Sequence: Synthetic oligonucleotide
auuggaaacgggucgauua

SEQ ID NO: 1750984 - RNA, 19 nt, Artificial Sequence
  Description of Artificial Sequence: Synthetic oligonucleotide
acaaaguuguaccaguaua

SEQ ID NO: 1750985 - RNA, 19 nt, Artificial Sequence
  Description of Artificial Sequence: Synthetic oligonucleotide
uuugucgcuugcaacagau

SEQ ID NO: 1750986 - RNA, 19 nt, Artificial Sequence
  Description of Artificial Sequence: Synthetic oligonucleotide
agacauaaacccacaauag

SEQ ID NO: 1750987 - RNA, 19 nt, Artificial Sequence
  Description of Artificial Sequence: Synthetic oligonucleotide
gaaagauccaaaacaagaa

SEQ ID NO: 1750988 - RNA, 19 nt, Artificial Sequence
  Description of Artificial Sequence: Synthetic oligonucleotide
gauuugcugguaaacauca

SEQ ID NO: 1750989 - RNA, 19 nt, Artificial Sequence
  Description of Artificial Sequence: Synthetic oligonucleotide
ucuuguacuguuccaguuc

SEQ ID NO: 1750990 - RNA, 19 nt, Artificial Sequence
  Description of Artificial Sequence: Synthetic oligonucleotide
auaaacccacaauagugga

SEQ ID NO: 1750991 - RNA, 19 nt, Artificial Sequence
  Description of Artificial Sequence: Synthetic oligonucleotide
ugccucaucucagaggccg

SEQ ID NO: 1750992 - RNA, 19 nt, Artificial Sequence
  Description of Artificial Sequence: Synthetic oligonucleotide
uagaauaauagucgucuuu

SEQ ID NO: 1750993 - RNA, 19 nt, Artificial Sequence
  Description of Artificial Sequence: Synthetic oligonucleotide
uucuaucuaaaagacucca

SEQ ID NO: 1750994 - RNA, 19 nt, Artificial Sequence
  Description of Artificial Sequence: Synthetic oligonucleotide
ucuugcauaucaccuuucu

SEQ ID NO: 1750995 - RNA, 19 nt, Artificial Sequence
  Description of Artificial Sequence: Synthetic oligonucleotide
ugguaugcuuaugaggucc

SEQ ID NO: 1750996 - RNA, 19 nt, Artificial Sequence
  Description of Artificial Sequence: Synthetic oligonucleotide
aaagacuccagaacauuca

SEQ ID NO: 1750997 - RNA, 19 nt, Artificial Sequence
  Description of Artificial Sequence: Synthetic oligonucleotide
uauguguauuccaaagcua

SEQ ID NO: 1750998 - RNA, 19 nt, Artificial Sequence
  Description of Artificial Sequence: Synthetic oligonucleotide
gucgauuaacucacgaucc

SEQ ID NO: 1750999 - RNA, 19 nt, Artificial Sequence
  Description of Artificial Sequence: Synthetic oligonucleotide
agugugcugauacucuuug

SEQ ID NO: 1751000 - RNA, 19 nt, Artificial Sequence
  Description of Artificial Sequence: Synthetic oligonucleotide
ucugauccacacauauuga

SEQ ID NO: 1751001 - RNA, 19 nt, Artificial Sequence
  Description of Artificial Sequence: Synthetic oligonucleotide
uccagcucgauuuguuucc

SEQ ID NO: 1751002 - RNA, 19 nt, Artificial Sequence
  Description of Artificial Sequence: Synthetic oligonucleotide
uugauaacaccacgaauuu

SEQ ID NO: 1751003 - RNA, 19 nt, Artificial Sequence
  Description of Artificial Sequence: Synthetic oligonucleotide
uaccaguauaagaaauaga

SEQ ID NO: 1751004 - RNA, 19 nt, Artificial Sequence
  Description of Artificial Sequence: Synthetic oligonucleotide
uguccucaagguaucauau

SEQ ID NO: 1751005 - RNA, 19 nt, Artificial Sequence
  Description of Artificial Sequence: Synthetic oligonucleotide
ugguuuauucugauccaca

SEQ ID NO: 1751006 - RNA, 19 nt, Artificial Sequence
  Description of Artificial Sequence: Synthetic oligonucleotide
ugaacucucaucucaucaa

SEQ ID NO: 1751007 - RNA, 19 nt, Artificial Sequence
  Description of Artificial Sequence: Synthetic oligonucleotide
gaggcuccguaauaaugcg

SEQ ID NO: 1751008 - RNA, 19 nt, Artificial Sequence
  Description of Artificial Sequence: Synthetic oligonucleotide
ccaaagaucauuagguuug

SEQ ID NO: 1751009 - RNA, 19 nt, Artificial Sequence
  Description of Artificial Sequence: Synthetic oligonucleotide
uaaagaguccaauccugcu

SEQ ID NO: 1751010 - RNA, 19 nt, Artificial Sequence
  Description of Artificial Sequence: Synthetic oligonucleotide
accacgaauuuucaguagu

SEQ ID NO: 1751011 - RNA, 19 nt, Artificial Sequence
  Description of Artificial Sequence: Synthetic oligonucleotide
accuuagaauaauagucgu

SEQ ID NO: 1751012 - RNA, 19 nt, Artificial Sequence
  Description of Artificial Sequence: Synthetic oligonucleotide
aauccugcugugauaaaca

SEQ ID NO: 1751013 - RNA, 19 nt, Artificial Sequence
  Description of Artificial Sequence: Synthetic oligonucleotide
cgaauuuucaguaguagag

SEQ ID NO: 1751014 - RNA, 19 nt, Artificial Sequence
  Description of Artificial Sequence: Synthetic oligonucleotide
auucacaaaguuguaccag

SEQ ID NO: 1751015 - RNA, 19 nt, Artificial Sequence
  Description of Artificial Sequence: Synthetic oligonucleotide
ugacacuccacaucuucug

SEQ ID NO: 1751016 - RNA, 19 nt, Artificial Sequence
  Description of Artificial Sequence: Synthetic oligonucleotide
gugauugguaugcuuauga

SEQ ID NO: 1751017 - RNA, 19 nt, Artificial Sequence
  Description of Artificial Sequence: Synthetic oligonucleotide
ggaauagcuuuucauacac

SEQ ID NO: 1751018 - RNA, 19 nt, Artificial Sequence
  Description of Artificial Sequence: Synthetic oligonucleotide
ugguugauaacaccacgaa

SEQ ID NO: 1751019 - RNA, 19 nt, Artificial Sequence
  Description of Artificial Sequence: Synthetic oligonucleotide
acaaaccgcagcgucuugc

SEQ ID NO: 1751020 - RNA, 19 nt, Artificial Sequence
  Description of Artificial Sequence: Synthetic oligonucleotide
ggaaagauccaaaacaaga

SEQ ID NO: 1751021 - RNA, 19 nt, Artificial Sequence
  Description of Artificial Sequence: Synthetic oligonucleotide
acugucgggaacaggaggg

SEQ ID NO: 1751022 - RNA, 19 nt, Artificial Sequence
  Description of Artificial Sequence: Synthetic oligonucleotide
acauuucaacuuucuucac

SEQ ID NO: 1751023 - RNA, 19 nt, Artificial Sequence
  Description of Artificial Sequence: Synthetic oligonucleotide
uggauugccuucagugugc

SEQ ID NO: 1751024 - RNA, 19 nt, Artificial Sequence
  Description of Artificial Sequence: Synthetic oligonucleotide
guauguguauuccaaagcu

SEQ ID NO: 1751025 - RNA, 19 nt, Artificial Sequence
  Description of Artificial Sequence: Synthetic oligonucleotide
ugauccacacauauugauu

SEQ ID NO: 1751026 - RNA, 19 nt, Artificial Sequence
  Description of Artificial Sequence: Synthetic oligonucleotide
uccacacauauugauuugc

SEQ ID NO: 1751027 - RNA, 19 nt, Artificial Sequence
  Description of Artificial Sequence: Synthetic oligonucleotide
gaacucucaucucaucaac

SEQ ID NO: 1751028 - RNA, 19 nt, Artificial Sequence
  Description of Artificial Sequence: Synthetic oligonucleotide
uaacaccacgaauuuucag

SEQ ID NO: 1751029 - RNA, 19 nt, Artificial Sequence
  Description of Artificial Sequence: Synthetic oligonucleotide
accgaaugccaacugguug

SEQ ID NO: 1751030 - RNA, 19 nt, Artificial Sequence
  Description of Artificial Sequence: Synthetic oligonucleotide
caaaguuguaccaguauaa

SEQ ID NO: 1751031 - RNA, 19 nt, Artificial Sequence
  Description of Artificial Sequence: Synthetic oligonucleotide
acuuccgugacuuuuccuu

SEQ ID NO: 1751032 - RNA, 19 nt, Artificial Sequence
  Description of Artificial Sequence: Synthetic oligonucleotide
ucaauaccgaaugccaacu

SEQ ID NO: 1751033 - RNA, 19 nt, Artificial Sequence
  Description of Artificial Sequence: Synthetic oligonucleotide
agacaccuuagaauaauag

SEQ ID NO: 1751034 - RNA, 19 nt, Artificial Sequence
  Description of Artificial Sequence: Synthetic oligonucleotide
gaaacgggucgauuaacuc

SEQ ID NO: 1751035 - RNA, 19 nt, Artificial Sequence
  Description of Artificial Sequence: Synthetic oligonucleotide
cuggauugccuucagugug

SEQ ID NO: 1751036 - RNA, 19 nt, Artificial Sequence
  Description of Artificial Sequence: Synthetic oligonucleotide
uuccguauguguauuccaa

SEQ ID NO: 1751037 - RNA, 19 nt, Artificial Sequence
  Description of Artificial Sequence: Synthetic oligonucleotide
ucucuucucgggaucaaaa

SEQ ID NO: 1751038 - RNA, 19 nt, Artificial Sequence
  Description of Artificial Sequence: Synthetic oligonucleotide
gacaccuuagaauaauagu

SEQ ID NO: 1751039 - RNA, 19 nt, Artificial Sequence
  Description of Artificial Sequence: Synthetic oligonucleotide
gucaauaccgaaugccaac

SEQ ID NO: 1751040 - RNA, 19 nt, Artificial Sequence
  Description of Artificial Sequence: Synthetic oligonucleotide
cucgggaucaaaauccuga

SEQ ID NO: 1751041 - RNA, 19 nt, Artificial Sequence
  Description of Artificial Sequence: Synthetic oligonucleotide
uccauuggagaaugggccu

SEQ ID NO: 1751042 - RNA, 19 nt, Artificial Sequence
  Description of Artificial Sequence: Synthetic oligonucleotide
cacccaguucccaaaagug

SEQ ID NO: 1751043 - RNA, 19 nt, Artificial Sequence
  Description of Artificial Sequence: Synthetic oligonucleotide
gacauaaacccacaauagu

SEQ ID NO: 1751044 - RNA, 19 nt, Artificial Sequence
  Description of Artificial Sequence: Synthetic oligonucleotide
augcuuaugagguccaaua

SEQ ID NO: 1751045 - RNA, 19 nt, Artificial Sequence
  Description of Artificial Sequence: Synthetic oligonucleotide
ggggauuggaaacgggucg

SEQ ID NO: 1751046 - RNA, 19 nt, Artificial Sequence
  Description of Artificial Sequence: Synthetic oligonucleotide
guugauaacaccacgaauu

SEQ ID NO: 1751047 - RNA, 19 nt, Artificial Sequence
  Description of Artificial Sequence: Synthetic oligonucleotide
uuuggugggaauagcuuuu

SEQ ID NO: 1751048 - RNA, 19 nt, Artificial Sequence
  Description of Artificial Sequence: Synthetic oligonucleotide
gauuaacucacgauccgga

SEQ ID NO: 1751049 - RNA, 19 nt, Artificial Sequence
  Description of Artificial Sequence: Synthetic oligonucleotide
uugacauaaagaguccaau

SEQ ID NO: 1751050 - RNA, 19 nt, Artificial Sequence
  Description of Artificial Sequence: Synthetic oligonucleotide
uuggaaacgggucgauuaa

SEQ ID NO: 1751051 - RNA, 19 nt, Artificial Sequence
  Description of Artificial Sequence: Synthetic oligonucleotide
augccaacugguugauaac

SEQ ID NO: 1751052 - RNA, 19 nt, Artificial Sequence
  Description of Artificial Sequence: Synthetic oligonucleotide
gaauuugucuuccccagcu

SEQ ID NO: 1751053 - RNA, 19 nt, Artificial Sequence
  Description of Artificial Sequence: Synthetic oligonucleotide
uaagguuggcuuugcuggc

SEQ ID NO: 1751054 - RNA, 19 nt, Artificial Sequence
  Description of Artificial Sequence: Synthetic oligonucleotide
uuagaauaauagucgucuu

SEQ ID NO: 1751055 - RNA, 19 nt, Artificial Sequence
  Description of Artificial Sequence: Synthetic oligonucleotide
uugcucuugucaauaccga

SEQ ID NO: 1751056 - RNA, 19 nt, Artificial Sequence
  Description of Artificial Sequence: Synthetic oligonucleotide
cauuagguuuggaaagauc

SEQ ID NO: 1751057 - RNA, 19 nt, Artificial Sequence
  Description of Artificial Sequence: Synthetic oligonucleotide
aguccaauccugcugugau

SEQ ID NO: 1751058 - RNA, 19 nt, Artificial Sequence
  Description of Artificial Sequence: Synthetic oligonucleotide
ugccaacugguugauaaca

SEQ ID NO: 1751059 - RNA, 19 nt, Artificial Sequence
  Description of Artificial Sequence: Synthetic oligonucleotide
cacgaauuuucaguaguag

SEQ ID NO: 1751060 - RNA, 19 nt, Artificial Sequence
  Description of Artificial Sequence: Synthetic oligonucleotide
aaacagugguuuauucuga

SEQ ID NO: 1751061 - RNA, 19 nt, Artificial Sequence
  Description of Artificial Sequence: Synthetic oligonucleotide
auuaacucacgauccggau

SEQ ID NO: 1751062 - RNA, 19 nt, Artificial Sequence
  Description of Artificial Sequence: Synthetic oligonucleotide
cauucacaaaguuguacca

SEQ ID NO: 1751063 - RNA, 19 nt, Artificial Sequence
  Description of Artificial Sequence: Synthetic oligonucleotide
ugcauaucaccuuucucuu

SEQ ID NO: 1751064 - RNA, 19 nt, Artificial Sequence
  Description of Artificial Sequence: Synthetic oligonucleotide
aagcuaagguuggcuuugc

SEQ ID NO: 1751065 - RNA, 19 nt, Artificial Sequence
  Description of Artificial Sequence: Synthetic oligonucleotide
ucacuuccgugacuuuucc

SEQ ID NO: 1751066 - RNA, 19 nt, Artificial Sequence
  Description of Artificial Sequence: Synthetic oligonucleotide
cuucacucuccgcauacug

SEQ ID NO: 1751067 - RNA, 19 nt, Artificial Sequence
  Description of Artificial Sequence: Synthetic oligonucleotide
uucaguaguagagcuucug

SEQ ID NO: 1751068 - RNA, 19 nt, Artificial Sequence
  Description of Artificial Sequence: Synthetic oligonucleotide
uuuugucgcuugcaacaga

SEQ ID NO: 1751069 - RNA, 19 nt, Artificial Sequence
  Description of Artificial Sequence: Synthetic oligonucleotide
uccaaagcuaagguuggcu

SEQ ID NO: 1751070 - RNA, 19 nt, Artificial Sequence
  Description of Artificial Sequence: Synthetic oligonucleotide
agauuucuccuauauuaua

SEQ ID NO: 1751071 - RNA, 19 nt, Artificial Sequence
  Description of Artificial Sequence: Synthetic oligonucleotide
gaagacauaaacccacaau

SEQ ID NO: 1751072 - RNA, 19 nt, Artificial Sequence
  Description of Artificial Sequence: Synthetic oligonucleotide
aaccgcagcgucuugcaua

SEQ ID NO: 1751073 - RNA, 19 nt, Artificial Sequence
  Description of Artificial Sequence: Synthetic oligonucleotide
ucaagaguccagcucgauu

SEQ ID NO: 1751074 - RNA, 19 nt, Artificial Sequence
  Description of Artificial Sequence: Synthetic oligonucleotide
aacucucaucucaucaacu

SEQ ID NO: 1751075 - RNA, 19 nt, Artificial Sequence
  Description of Artificial Sequence: Synthetic oligonucleotide
aauuugucuuccccagcuu

SEQ ID NO: 1751076 - RNA, 19 nt, Artificial Sequence
  Description of Artificial Sequence: Synthetic oligonucleotide
cugguugauaacaccacga

SEQ ID NO: 1751077 - RNA, 19 nt, Artificial Sequence
  Description of Artificial Sequence: Synthetic oligonucleotide
cuugcauaucaccuuucuc

SEQ ID NO: 1751078 - RNA, 19 nt, Artificial Sequence
  Description of Artificial Sequence: Synthetic oligonucleotide
guuguaccaguauaagaaa

SEQ ID NO: 1751079 - RNA, 19 nt, Artificial Sequence
  Description of Artificial Sequence: Synthetic oligonucleotide
ucucgggaucaaaauccug

SEQ ID NO: 1751080 - RNA, 19 nt, Artificial Sequence
  Description of Artificial Sequence: Synthetic oligonucleotide
augucuuuugguguguuau

SEQ ID NO: 1751081 - RNA, 19 nt, Artificial Sequence
  Description of Artificial Sequence: Synthetic oligonucleotide
cuucagugugcugauacuc

SEQ ID NO: 1751082 - RNA, 19 nt, Artificial Sequence
  Description of Artificial Sequence: Synthetic oligonucleotide
ugugauugguaugcuuaug

SEQ ID NO: 1751083 - RNA, 19 nt, Artificial Sequence
  Description of Artificial Sequence: Synthetic oligonucleotide
uugauuugcucuugucaau

SEQ ID NO: 1751084 - RNA, 19 nt, Artificial Sequence
  Description of Artificial Sequence: Synthetic oligonucleotide
ucccugucaagacaccuua

SEQ ID NO: 1751085 - RNA, 19 nt, Artificial Sequence
  Description of Artificial Sequence: Synthetic oligonucleotide
acccuauuugacauaaaga

SEQ ID NO: 1751086 - RNA, 19 nt, Artificial Sequence
  Description of Artificial Sequence: Synthetic oligonucleotide
uuccaaugucacugucggg

SEQ ID NO: 1751087 - RNA, 19 nt, Artificial Sequence
  Description of Artificial Sequence: Synthetic oligonucleotide
ugcucuugucaauaccgaa

SEQ ID NO: 1751088 - RNA, 19 nt, Artificial Sequence
  Description of Artificial Sequence: Synthetic oligonucleotide
aauguccucaagguaucau

SEQ ID NO: 1751089 - RNA, 19 nt, Artificial Sequence
  Description of Artificial Sequence: Synthetic oligonucleotide
aacccacaauaguggacca

SEQ ID NO: 1751090 - RNA, 19 nt, Artificial Sequence
  Description of Artificial Sequence: Synthetic oligonucleotide
gaggggacccuauuugaca

SEQ ID NO: 1751091 - RNA, 19 nt, Artificial Sequence
  Description of Artificial Sequence: Synthetic oligonucleotide
uccggaugguccuucugca

SEQ ID NO: 1751092 - RNA, 19 nt, Artificial Sequence
  Description of Artificial Sequence: Synthetic oligonucleotide
uugcaauuucccagagagu

SEQ ID NO: 1751093 - RNA, 19 nt, Artificial Sequence
  Description of Artificial Sequence: Synthetic oligonucleotide
auaugugauugguaugcuu

SEQ ID NO: 1751094 - RNA, 19 nt, Artificial Sequence
  Description of Artificial Sequence: Synthetic oligonucleotide
uccguauguguauuccaaa

SEQ ID NO: 1751095 - RNA, 19 nt, Artificial Sequence
  Description of Artificial Sequence: Synthetic oligonucleotide
acagcuccauuggagaaug

SEQ ID NO: 1751096 - RNA, 19 nt, Artificial Sequence
  Description of Artificial Sequence: Synthetic oligonucleotide
ucgcuugcaacagauuuuc

SEQ ID NO: 1751097 - RNA, 19 nt, Artificial Sequence
  Description of Artificial Sequence: Synthetic oligonucleotide
acaucagugaggcuccgua

SEQ ID NO: 1751098 - RNA, 19 nt, Artificial Sequence
  Description of Artificial Sequence: Synthetic oligonucleotide
gaauugggaaggaagacau

SEQ ID NO: 1751099 - RNA, 19 nt, Artificial Sequence
  Description of Artificial Sequence: Synthetic oligonucleotide
cagcgucuugcauaucacc

SEQ ID NO: 1751100 - RNA, 19 nt, Artificial Sequence
  Description of Artificial Sequence: Synthetic oligonucleotide
auguccucaagguaucaua

SEQ ID NO: 1751101 - RNA, 19 nt, Artificial Sequence
  Description of Artificial Sequence: Synthetic oligonucleotide
augugauugguaugcuuau

SEQ ID NO: 1751102 - RNA, 19 nt, Artificial Sequence
  Description of Artificial Sequence: Synthetic oligonucleotide
uuugcuggcucgucccugu

SEQ ID NO: 1751103 - RNA, 19 nt, Artificial Sequence
  Description of Artificial Sequence: Synthetic oligonucleotide
guguuaugucccuuuguuc

SEQ ID NO: 1751104 - RNA, 19 nt, Artificial Sequence
  Description of Artificial Sequence: Synthetic oligonucleotide
ucagugaggcuccguaaua

SEQ ID NO: 1751105 - RNA, 19 nt, Artificial Sequence
  Description of Artificial Sequence: Synthetic oligonucleotide
gcuugcaacagauuuucca

SEQ ID NO: 1751106 - RNA, 19 nt, Artificial Sequence
  Description of Artificial Sequence: Synthetic oligonucleotide
aggaggggacccuauuuga

SEQ ID NO: 1751107 - RNA, 19 nt, Artificial Sequence
  Description of Artificial Sequence: Synthetic oligonucleotide
aaagaucauuagguuugga

SEQ ID NO: 1751108 - RNA, 19 nt, Artificial Sequence
  Description of Artificial Sequence: Synthetic oligonucleotide
ucacgauccggaugguccu

SEQ ID NO: 1751109 - RNA, 19 nt, Artificial Sequence
  Description of Artificial Sequence: Synthetic oligonucleotide
aggggacccuauuugacau

SEQ ID NO: 1751110 - RNA, 19 nt, Artificial Sequence
  Description of Artificial Sequence: Synthetic oligonucleotide
ucauuagguuuggaaagau

SEQ ID NO: 1751111 - RNA, 19 nt, Artificial Sequence
  Description of Artificial Sequence: Synthetic oligonucleotide
aacaaaccgcagcgucuug

SEQ ID NO: 1751112 - RNA, 19 nt, Artificial Sequence
  Description of Artificial Sequence: Synthetic oligonucleotide
uaugcuuaugagguccaau

SEQ ID NO: 1751113 - RNA, 19 nt, Artificial Sequence
  Description of Artificial Sequence: Synthetic oligonucleotide
gcuuaugagguccaauaga

SEQ ID NO: 1751114 - RNA, 19 nt, Artificial Sequence
  Description of Artificial Sequence: Synthetic oligonucleotide
cuugcaacagauuuuccau

SEQ ID NO: 1751115 - RNA, 19 nt, Artificial Sequence
  Description of Artificial Sequence: Synthetic oligonucleotide
gaagcuuuccaaugucacu

SEQ ID NO: 1751116 - RNA, 19 nt, Artificial Sequence
  Description of Artificial Sequence: Synthetic oligonucleotide
uuccauggugggccaaaga

SEQ ID NO: 1751117 - RNA, 19 nt, Artificial Sequence
  Description of Artificial Sequence: Synthetic oligonucleotide
uggugggaauagcuuuuca

SEQ ID NO: 1751118 - RNA, 19 nt, Artificial Sequence
  Description of Artificial Sequence: Synthetic oligonucleotide
caauagagagguuccucca

SEQ ID NO: 1751119 - RNA, 19 nt, Artificial Sequence
  Description of Artificial Sequence: Synthetic oligonucleotide
cugcugugauaaacagugg

SEQ ID NO: 1751120 - RNA, 19 nt, Artificial Sequence
  Description of Artificial Sequence: Synthetic oligonucleotide
cugucaagacaccuuagaa

SEQ ID NO: 1751121 - RNA, 19 nt, Artificial Sequence
  Description of Artificial Sequence: Synthetic oligonucleotide
aaacaucagugaggcuccg

SEQ ID NO: 1751122 - RNA, 19 nt, Artificial Sequence
  Description of Artificial Sequence: Synthetic oligonucleotide
caccacgaauuuucaguag

SEQ ID NO: 1751123 - RNA, 19 nt, Artificial Sequence
  Description of Artificial Sequence: Synthetic oligonucleotide
cauuaucacuuugucuaug

SEQ ID NO: 1751124 - RNA, 19 nt, Artificial Sequence
  Description of Artificial Sequence: Synthetic oligonucleotide
caauaccgaaugccaacug

SEQ ID NO: 1751125 - RNA, 19 nt, Artificial Sequence
  Description of Artificial Sequence: Synthetic oligonucleotide
uuuccauggugggccaaag

SEQ ID NO: 1751126 - RNA, 19 nt, Artificial Sequence
  Description of Artificial Sequence: Synthetic oligonucleotide
ugauacucuuuggugggaa

SEQ ID NO: 1751127 - RNA, 19 nt, Artificial Sequence
  Description of Artificial Sequence: Synthetic oligonucleotide
cuccguaauaaugcgcaac

SEQ ID NO: 1751128 - RNA, 19 nt, Artificial Sequence
  Description of Artificial Sequence: Synthetic oligonucleotide
aggcuccguaauaaugcgc

SEQ ID NO: 1751129 - RNA, 19 nt, Artificial Sequence
  Description of Artificial Sequence: Synthetic oligonucleotide
ccguauguguauuccaaag

SEQ ID NO: 1751130 - RNA, 19 nt, Artificial Sequence
  Description of Artificial Sequence: Synthetic oligonucleotide
uugguaugcuuaugagguc

SEQ ID NO: 1751131 - RNA, 19 nt, Artificial Sequence
  Description of Artificial Sequence: Synthetic oligonucleotide
gauuuuccauggugggcca

SEQ ID NO: 1751132 - RNA, 19 nt, Artificial Sequence
  Description of Artificial Sequence: Synthetic oligonucleotide
aacaggaggggacccuauu

SEQ ID NO: 1751133 - RNA, 19 nt, Artificial Sequence
  Description of Artificial Sequence: Synthetic oligonucleotide
aaugcgcaacaaaccgcag

SEQ ID NO: 1751134 - RNA, 19 nt, Artificial Sequence
  Description of Artificial Sequence: Synthetic oligonucleotide
cuuccguauguguauucca

SEQ ID NO: 1751135 - RNA, 19 nt, Artificial Sequence
  Description of Artificial Sequence: Synthetic oligonucleotide
cguauguguauuccaaagc

SEQ ID NO: 1751136 - RNA, 19 nt, Artificial Sequence
  Description of Artificial Sequence: Synthetic oligonucleotide
ucgggaacaggaggggacc

SEQ ID NO: 1751137 - RNA, 19 nt, Artificial Sequence
  Description of Artificial Sequence: Synthetic oligonucleotide
aagacaccuuagaauaaua

SEQ ID NO: 1751138 - RNA, 19 nt, Artificial Sequence
  Description of Artificial Sequence: Synthetic oligonucleotide
cagaagguaagaaaauaau

SEQ ID NO: 1751139 - RNA, 19 nt, Artificial Sequence
  Description of Artificial Sequence: Synthetic oligonucleotide
uaccgaaugccaacugguu

SEQ ID NO: 1751140 - RNA, 19 nt, Artificial Sequence
  Description of Artificial Sequence: Synthetic oligonucleotide
uggcucgucccugucaaga

SEQ ID NO: 1751141 - RNA, 19 nt, Artificial Sequence
  Description of Artificial Sequence: Synthetic oligonucleotide
accgcagcgucuugcauau

SEQ ID NO: 1751142 - RNA, 19 nt, Artificial Sequence
  Description of Artificial Sequence: Synthetic oligonucleotide
gguguguuaugucccuuug

SEQ ID NO: 1751143 - RNA, 19 nt, Artificial Sequence
  Description of Artificial Sequence: Synthetic oligonucleotide
aaaccgcagcgucuugcau

SEQ ID NO: 1751144 - RNA, 19 nt, Artificial Sequence
  Description of Artificial Sequence: Synthetic oligonucleotide
uggaaacgggucgauuaac

SEQ ID NO: 1751145 - RNA, 19 nt, Artificial Sequence
  Description of Artificial Sequence: Synthetic oligonucleotide
caagguaucauaugugauu

SEQ ID NO: 1751146 - RNA, 19 nt, Artificial Sequence
  Description of Artificial Sequence: Synthetic oligonucleotide
gggaauagcuuuucauaca

SEQ ID NO: 1751147 - RNA, 19 nt, Artificial Sequence
  Description of Artificial Sequence: Synthetic oligonucleotide
gugggccaaagaucauuag

SEQ ID NO: 1751148 - RNA, 19 nt, Artificial Sequence
  Description of Artificial Sequence: Synthetic oligonucleotide
ccuuagaauaauagucguc

SEQ ID NO: 1751149 - RNA, 19 nt, Artificial Sequence
  Description of Artificial Sequence: Synthetic oligonucleotide
gcuccauuggagaaugggc

SEQ ID NO: 1751150 - RNA, 19 nt, Artificial Sequence
  Description of Artificial Sequence: Synthetic oligonucleotide
acauguugccacagaaggu

SEQ ID NO: 1751151 - RNA, 19 nt, Artificial Sequence
  Description of Artificial Sequence: Synthetic oligonucleotide
caaugucacugucgggaac

SEQ ID NO: 1751152 - RNA, 19 nt, Artificial Sequence
  Description of Artificial Sequence: Synthetic oligonucleotide
gugagcaaugucuuuuggu

SEQ ID NO: 1751153 - RNA, 19 nt, Artificial Sequence
  Description of Artificial Sequence: Synthetic oligonucleotide
caguucccaaaagugagca

SEQ ID NO: 1751154 - RNA, 19 nt, Artificial Sequence
  Description of Artificial Sequence: Synthetic oligonucleotide
uuccaaagcuaagguuggc

SEQ ID NO: 1751155 - RNA, 19 nt, Artificial Sequence
  Description of Artificial Sequence: Synthetic oligonucleotide
auacucuuuggugggaaua

SEQ ID NO: 1751156 - RNA, 19 nt, Artificial Sequence
  Description of Artificial Sequence: Synthetic oligonucleotide
gcauacuguggaucucggg

SEQ ID NO: 1751157 - RNA, 19 nt, Artificial Sequence
  Description of Artificial Sequence: Synthetic oligonucleotide
aguucccaaaagugagcaa

SEQ ID NO: 1751158 - RNA, 19 nt, Artificial Sequence
  Description of Artificial Sequence: Synthetic oligonucleotide
agaguccaauccugcugug

SEQ ID NO: 1751159 - RNA, 19 nt, Artificial Sequence
  Description of Artificial Sequence: Synthetic oligonucleotide
guaucauaugugauuggua

SEQ ID NO: 1751160 - RNA, 19 nt, Artificial Sequence
  Description of Artificial Sequence: Synthetic oligonucleotide
ggcuccguaauaaugcgca

SEQ ID NO: 1751161 - RNA, 19 nt, Artificial Sequence
  Description of Artificial Sequence: Synthetic oligonucleotide
caaaccgcagcgucuugca

SEQ ID NO: 1751162 - RNA, 19 nt, Artificial Sequence
  Description of Artificial Sequence: Synthetic oligonucleotide
agcuaagguuggcuuugcu

SEQ ID NO: 1751163 - RNA, 19 nt, Artificial Sequence
  Description of Artificial Sequence: Synthetic oligonucleotide
gauugccuucagugugcug

SEQ ID NO: 1751164 - RNA, 19 nt, Artificial Sequence
  Description of Artificial Sequence: Synthetic oligonucleotide
cauauugauuugcucuugu

SEQ ID NO: 1751165 - RNA, 19 nt, Artificial Sequence
  Description of Artificial Sequence: Synthetic oligonucleotide
uuccgugacuuuuccuuuu

SEQ ID NO: 1751166 - RNA, 19 nt, Artificial Sequence
  Description of Artificial Sequence: Synthetic oligonucleotide
ggaugguccuucugcauga

SEQ ID NO: 1751167 - RNA, 19 nt, Artificial Sequence
  Description of Artificial Sequence: Synthetic oligonucleotide
gguaucauaugugauuggu

SEQ ID NO: 1751168 - RNA, 19 nt, Artificial Sequence
  Description of Artificial Sequence: Synthetic oligonucleotide
uuggugggaauagcuuuuc

SEQ ID NO: 1751169 - RNA, 19 nt, Artificial Sequence
  Description of Artificial Sequence: Synthetic oligonucleotide
gucuuuugguguguuaugu

SEQ ID NO: 1751170 - RNA, 19 nt, Artificial Sequence
  Description of Artificial Sequence: Synthetic oligonucleotide
ggagaaugggccugaagcu

SEQ ID NO: 1751171 - RNA, 19 nt, Artificial Sequence
  Description of Artificial Sequence: Synthetic oligonucleotide
gccgcuuuggaauuugucu

SEQ ID NO: 1751172 - RNA, 19 nt, Artificial Sequence
  Description of Artificial Sequence: Synthetic oligonucleotide
cacauauugauuugcucuu

SEQ ID NO: 1751173 - RNA, 19 nt, Artificial Sequence
  Description of Artificial Sequence: Synthetic oligonucleotide
ccacaauaguggaccaggc

SEQ ID NO: 1751174 - RNA, 19 nt, Artificial Sequence
  Description of Artificial Sequence: Synthetic oligonucleotide
ggucuuggaagaauuucuc

SEQ ID NO: 1751175 - RNA, 19 nt, Artificial Sequence
  Description of Artificial Sequence: Synthetic oligonucleotide
ccgaaugccaacugguuga

SEQ ID NO: 1751176 - RNA, 19 nt, Artificial Sequence
  Description of Artificial Sequence: Synthetic oligonucleotide
acgauccggaugguccuuc

SEQ ID NO: 1751177 - RNA, 19 nt, Artificial Sequence
  Description of Artificial Sequence: Synthetic oligonucleotide
uggugggccaaagaucauu

SEQ ID NO: 1751178 - RNA, 19 nt, Artificial Sequence
  Description of Artificial Sequence: Synthetic oligonucleotide
cugauccacacauauugau

SEQ ID NO: 1751179 - RNA, 19 nt, Artificial Sequence
  Description of Artificial Sequence: Synthetic oligonucleotide
cuucacauguugccacaga

SEQ ID NO: 1751180 - RNA, 19 nt, Artificial Sequence
  Description of Artificial Sequence: Synthetic oligonucleotide
gaguccaauccugcuguga

SEQ ID NO: 1751181 - RNA, 19 nt, Artificial Sequence
  Description of Artificial Sequence: Synthetic oligonucleotide
gauacucuuuggugggaau

SEQ ID NO: 1751182 - RNA, 19 nt, Artificial Sequence
  Description of Artificial Sequence: Synthetic oligonucleotide
uugucgcuugcaacagauu

SEQ ID NO: 1751183 - RNA, 19 nt, Artificial Sequence
  Description of Artificial Sequence: Synthetic oligonucleotide
caucagugaggcuccguaa

SEQ ID NO: 1751184 - RNA, 19 nt, Artificial Sequence
  Description of Artificial Sequence: Synthetic oligonucleotide
caccuuucucuucucggga

SEQ ID NO: 1751185 - RNA, 19 nt, Artificial Sequence
  Description of Artificial Sequence: Synthetic oligonucleotide
gaggccgcuuuggaauuug

SEQ ID NO: 1751186 - RNA, 19 nt, Artificial Sequence
  Description of Artificial Sequence: Synthetic oligonucleotide
auucugauccacacauauu

SEQ ID NO: 1751187 - RNA, 19 nt, Artificial Sequence
  Description of Artificial Sequence: Synthetic oligonucleotide
gaacauucacaaaguugua

SEQ ID NO: 1751188 - RNA, 19 nt, Artificial Sequence
  Description of Artificial Sequence: Synthetic oligonucleotide
ggugggaauagcuuuucau

SEQ ID NO: 1751189 - RNA, 19 nt, Artificial Sequence
  Description of Artificial Sequence: Synthetic oligonucleotide
cgauuaacucacgauccgg

SEQ ID NO: 1751190 - RNA, 19 nt, Artificial Sequence
  Description of Artificial Sequence: Synthetic oligonucleotide
gguugauaacaccacgaau

SEQ ID NO: 1751191 - RNA, 19 nt, Artificial Sequence
  Description of Artificial Sequence: Synthetic oligonucleotide
gaugguccuucugcaugac

SEQ ID NO: 1751192 - RNA, 19 nt, Artificial Sequence
  Description of Artificial Sequence: Synthetic oligonucleotide
caaagcuaagguuggcuuu

SEQ ID NO: 1751193 - RNA, 19 nt, Artificial Sequence
  Description of Artificial Sequence: Synthetic oligonucleotide
cagcuccauuggagaaugg

SEQ ID NO: 1751194 - RNA, 19 nt, Artificial Sequence
  Description of Artificial Sequence: Synthetic oligonucleotide
gaaugggccugaagcuuuc

SEQ ID NO: 1751195 - RNA, 19 nt, Artificial Sequence
  Description of Artificial Sequence: Synthetic oligonucleotide
gccaaagaucauuagguuu

SEQ ID NO: 1751196 - RNA, 19 nt, Artificial Sequence
  Description of Artificial Sequence: Synthetic oligonucleotide
cuccgcauacuguggaucu

SEQ ID NO: 1751197 - RNA, 19 nt, Artificial Sequence
  Description of Artificial Sequence: Synthetic oligonucleotide
ccugucaagacaccuuaga

SEQ ID NO: 1751198 - RNA, 19 nt, Artificial Sequence
  Description of Artificial Sequence: Synthetic oligonucleotide
cacaaaguuguaccaguau

SEQ ID NO: 1751199 - RNA, 19 nt, Artificial Sequence
  Description of Artificial Sequence: Synthetic oligonucleotide
gcucgauuuguuuccaggu

SEQ ID NO: 1751200 - RNA, 19 nt, Artificial Sequence
  Description of Artificial Sequence: Synthetic oligonucleotide
cagugaggcuccguaauaa

SEQ ID NO: 1751201 - RNA, 19 nt, Artificial Sequence
  Description of Artificial Sequence: Synthetic oligonucleotide
gagaaugggccugaagcuu

SEQ ID NO: 1751202 - RNA, 19 nt, Artificial Sequence
  Description of Artificial Sequence: Synthetic oligonucleotide
cauuggagaaugggccuga

SEQ ID NO: 1751203 - RNA, 19 nt, Artificial Sequence
  Description of Artificial Sequence: Synthetic oligonucleotide
cucuucucgggaucaaaau

SEQ ID NO: 1751204 - RNA, 19 nt, Artificial Sequence
  Description of Artificial Sequence: Synthetic oligonucleotide
ggaggggacccuauuugac

SEQ ID NO: 1751205 - RNA, 19 nt, Artificial Sequence
  Description of Artificial Sequence: Synthetic oligonucleotide
aacucacgauccggauggu

SEQ ID NO: 1751206 - RNA, 19 nt, Artificial Sequence
  Description of Artificial Sequence: Synthetic oligonucleotide
uccgcauacuguggaucuc

SEQ ID NO: 1751207 - RNA, 19 nt, Artificial Sequence
  Description of Artificial Sequence: Synthetic oligonucleotide
gggacccuauuugacauaa

SEQ ID NO: 1751208 - RNA, 19 nt, Artificial Sequence
  Description of Artificial Sequence: Synthetic oligonucleotide
caagacaccuuagaauaau

SEQ ID NO: 1751209 - RNA, 19 nt, Artificial Sequence
  Description of Artificial Sequence: Synthetic oligonucleotide
gguaugcuuaugaggucca

SEQ ID NO: 1751210 - RNA, 19 nt, Artificial Sequence
  Description of Artificial Sequence: Synthetic oligonucleotide
uugguguguuaugucccuu

SEQ ID NO: 1751211 - RNA, 19 nt, Artificial Sequence
  Description of Artificial Sequence: Synthetic oligonucleotide
cgcaacaaaccgcagcguc

SEQ ID NO: 1751212 - RNA, 19 nt, Artificial Sequence
  Description of Artificial Sequence: Synthetic oligonucleotide
ggaaacgggucgauuaacu

SEQ ID NO: 1751213 - RNA, 19 nt, Artificial Sequence
  Description of Artificial Sequence: Synthetic oligonucleotide
gggauuggaaacgggucga

SEQ ID NO: 1751214 - RNA, 19 nt, Artificial Sequence
  Description of Artificial Sequence: Synthetic oligonucleotide
acgggucgauuaacucacg

SEQ ID NO: 1751215 - RNA, 19 nt, Artificial Sequence
  Description of Artificial Sequence: Synthetic oligonucleotide
guccaauccugcugugaua

SEQ ID NO: 1751216 - RNA, 19 nt, Artificial Sequence
  Description of Artificial Sequence: Synthetic oligonucleotide
cggaugguccuucugcaug

SEQ ID NO: 1751217 - RNA, 19 nt, Artificial Sequence
  Description of Artificial Sequence: Synthetic oligonucleotide
uugcuggcucgucccuguc

SEQ ID NO: 1751218 - RNA, 19 nt, Artificial Sequence
  Description of Artificial Sequence: Synthetic oligonucleotide
auuggagaaugggccugaa

SEQ ID NO: 1751219 - RNA, 19 nt, Artificial Sequence
  Description of Artificial Sequence: Synthetic oligonucleotide
ggugggccaaagaucauua

SEQ ID NO: 1751220 - RNA, 19 nt, Artificial Sequence
  Description of Artificial Sequence: Synthetic oligonucleotide
ccauuggagaaugggccug

SEQ ID NO: 1751221 - RNA, 19 nt, Artificial Sequence
  Description of Artificial Sequence: Synthetic oligonucleotide
cccugucaagacaccuuag

SEQ ID NO: 1751222 - RNA, 19 nt, Artificial Sequence
  Description of Artificial Sequence: Synthetic oligonucleotide
gggucgauuaacucacgau

SEQ ID NO: 1751223 - RNA, 19 nt, Artificial Sequence
  Description of Artificial Sequence: Synthetic oligonucleotide
gauuggaaacgggucgauu

SEQ ID NO: 1751224 - RNA, 19 nt, Artificial Sequence
  Description of Artificial Sequence: Synthetic oligonucleotide
cgcauacuguggaucucgg

SEQ ID NO: 1751225 - RNA, 19 nt, Artificial Sequence
  Description of Artificial Sequence: Synthetic oligonucleotide
cuuccgugacuuuuccuuu

SEQ ID NO: 1751226 - RNA, 19 nt, Artificial Sequence
  Description of Artificial Sequence: Synthetic oligonucleotide
guaugcuuaugagguccaa

SEQ ID NO: 1751227 - RNA, 19 nt, Artificial Sequence
  Description of Artificial Sequence: Synthetic oligonucleotide
cgcagcgucuugcauauca

SEQ ID NO: 1751228 - RNA, 19 nt, Artificial Sequence
  Description of Artificial Sequence: Synthetic oligonucleotide
gcagcgucuugcauaucac

SEQ ID NO: 1751229 - RNA, 19 nt, Artificial Sequence
  Description of Artificial Sequence: Synthetic oligonucleotide
ccuggauugccuucagugu

SEQ ID NO: 1751230 - RNA, 19 nt, Artificial Sequence
  Description of Artificial Sequence: Synthetic oligonucleotide
guagagcuucugauuugcu

SEQ ID NO: 1751231 - RNA, 19 nt, Artificial Sequence
  Description of Artificial Sequence: Synthetic oligonucleotide
gaucucgggcaggguccug

SEQ ID NO: 1751232 - RNA, 19 nt, Artificial Sequence
  Description of Artificial Sequence: Synthetic oligonucleotide
ccaaagcuaagguuggcuu

SEQ ID NO: 1751233 - RNA, 19 nt, Artificial Sequence
  Description of Artificial Sequence: Synthetic oligonucleotide
caacaaaccgcagcgucuu

SEQ ID NO: 1751234 - RNA, 19 nt, Artificial Sequence
  Description of Artificial Sequence: Synthetic oligonucleotide
ggccgcuuuggaauuuguc

SEQ ID NO: 1751235 - RNA, 19 nt, Artificial Sequence
  Description of Artificial Sequence: Synthetic oligonucleotide
agaggccgcuuuggaauuu

SEQ ID NO: 1751236 - RNA, 19 nt, Artificial Sequence
  Description of Artificial Sequence: Synthetic oligonucleotide
cacuuccgugacuuuuccu

SEQ ID NO: 1751237 - RNA, 19 nt, Artificial Sequence
  Description of Artificial Sequence: Synthetic oligonucleotide
gcuccguaauaaugcgcaa

SEQ ID NO: 1751238 - RNA, 19 nt, Artificial Sequence
  Description of Artificial Sequence: Synthetic oligonucleotide
aggccgcuuuggaauuugu

SEQ ID NO: 1751239 - RNA, 19 nt, Artificial Sequence
  Description of Artificial Sequence: Synthetic oligonucleotide
cagugugcugauacucuuu

SEQ ID NO: 1751240 - RNA, 19 nt, Artificial Sequence
  Description of Artificial Sequence: Synthetic oligonucleotide
ccacccaguucccaaaagu

SEQ ID NO: 1751241 - RNA, 19 nt, Artificial Sequence
  Description of Artificial Sequence: Synthetic oligonucleotide
gcucaagaguccagcucga

SEQ ID NO: 1751242 - RNA, 19 nt, Artificial Sequence
  Description of Artificial Sequence: Synthetic oligonucleotide
ccguaauaaugcgcaacaa

SEQ ID NO: 1751243 - RNA, 19 nt, Artificial Sequence
  Description of Artificial Sequence: Synthetic oligonucleotide
cgggucgauuaacucacga

SEQ ID NO: 1751244 - RNA, 19 nt, Artificial Sequence
  Description of Artificial Sequence: Synthetic oligonucleotide
ggauugccuucagugugcu

SEQ ID NO: 1751245 - RNA, 19 nt, Artificial Sequence
  Description of Artificial Sequence: Synthetic oligonucleotide
gcaauuucccagagaguuu

SEQ ID NO: 1751246 - RNA, 19 nt, Artificial Sequence
  Description of Artificial Sequence: Synthetic oligonucleotide
cgggaucaaaauccugaaa

SEQ ID NO: 1751247 - RNA, 19 nt, Artificial Sequence
  Description of Artificial Sequence: Synthetic oligonucleotide
cucaagaguccagcucgau

SEQ ID NO: 1751248 - RNA, 19 nt, Artificial Sequence
  Description of Artificial Sequence: Synthetic oligonucleotide
ggauuggaaacgggucgau

SEQ ID NO: 1751249 - RNA, 19 nt, Artificial Sequence
  Description of Artificial Sequence: Synthetic oligonucleotide
ggacccuauuugacauaaa

SEQ ID NO: 1751250 - RNA, 19 nt, Artificial Sequence
  Description of Artificial Sequence: Synthetic oligonucleotide
ccaauccugcugugauaaa

SEQ ID NO: 1751251 - RNA, 19 nt, Artificial Sequence
  Description of Artificial Sequence: Synthetic oligonucleotide
ggaucucgggcaggguccu

SEQ ID NO: 1751252 - RNA, 19 nt, Artificial Sequence
  Description of Artificial Sequence: Synthetic oligonucleotide
cucgggcaggguccuggau

SEQ ID NO: 1751253 - RNA, 19 nt, Artificial Sequence
  Description of Artificial Sequence: Synthetic oligonucleotide
gcgcaacaaaccgcagcgu

SEQ ID NO: 1751254 - RNA, 19 nt, Artificial Sequence
  Description of Artificial Sequence: Synthetic oligonucleotide
ccucaucucagaggccgcu

SEQ ID NO: 1751255 - RNA, 19 nt, Artificial Sequence
  Description of Artificial Sequence: Synthetic oligonucleotide
ccggaugguccuucugcau

SEQ ID NO: 1751256 - RNA, 19 nt, Artificial Sequence
  Description of Artificial Sequence: Synthetic oligonucleotide
cgucccugucaagacaccu

SEQ ID NO: 1751257 - RNA, 19 nt, Artificial Sequence
  Description of Artificial Sequence: Synthetic oligonucleotide
cgauccggaugguccuucu

SEQ ID NO: 1751258 - RNA, 19 nt, Artificial Sequence
  Description of Artificial Sequence: Synthetic oligonucleotide
ccgcagcgucuugcauauc

SEQ ID NO: 1751259 - RNA, 19 nt, Artificial Sequence
  Description of Artificial Sequence: Synthetic oligonucleotide
aauguaucuugucuuaugc

SEQ ID NO: 1751260 - RNA, 19 nt, Artificial Sequence
  Description of Artificial Sequence: Synthetic oligonucleotide
aaauuuauauuucucagcu

SEQ ID NO: 1751261 - RNA, 19 nt, Artificial Sequence
  Description of Artificial Sequence: Synthetic oligonucleotide
aagaguaucauuuucagaa

SEQ ID NO: 1751262 - RNA, 19 nt, Artificial Sequence
  Description of Artificial Sequence: Synthetic oligonucleotide
aaagauucacuuuuaauug

SEQ ID NO: 1751263 - RNA, 19 nt, Artificial Sequence
  Description of Artificial Sequence: Synthetic oligonucleotide
uuuuaauuggcucauuaag

SEQ ID NO: 1751264 - RNA, 19 nt, Artificial Sequence
  Description of Artificial Sequence: Synthetic oligonucleotide
aaaucugacugaucuauac

SEQ ID NO: 1751265 - RNA, 19 nt, Artificial Sequence
  Description of Artificial Sequence: Synthetic oligonucleotide
aaucugacugaucuauacc

SEQ ID NO: 1751266 - RNA, 19 nt, Artificial Sequence
  Description of Artificial Sequence: Synthetic oligonucleotide
agaaaugggaacuugggag

SEQ ID NO: 1751267 - RNA, 19 nt, Artificial Sequence
  Description of Artificial Sequence: Synthetic oligonucleotide
aaguccggcaucuuuaagg

SEQ ID NO: 1751268 - RNA, 19 nt, Artificial Sequence
  Description of Artificial Sequence: Synthetic oligonucleotide
ugaacaauggaaaaccccu

SEQ ID NO: 1751269 - RNA, 19 nt, Artificial Sequence
  Description of Artificial Sequence: Synthetic oligonucleotide
gaaaugggaacuugggagg

SEQ ID NO: 1751270 - RNA, 19 nt, Artificial Sequence
  Description of Artificial Sequence: Synthetic oligonucleotide
uccggcaucuuuaaggagg

SEQ ID NO: 1751271 - RNA, 19 nt, Artificial Sequence
  Description of Artificial Sequence: Synthetic oligonucleotide
ucuuggaugagacagucac

SEQ ID NO: 1751272 - RNA, 19 nt, Artificial Sequence
  Description of Artificial Sequence: Synthetic oligonucleotide
aagaauucucaaugcugcc

SEQ ID NO: 1751273 - RNA, 19 nt, Artificial Sequence
  Description of Artificial Sequence: Synthetic oligonucleotide
acugauugugcauggaggg

SEQ ID NO: 1751274 - RNA, 19 nt, Artificial Sequence
  Description of Artificial Sequence: Synthetic oligonucleotide
ugcacuaacaguagaauuc

SEQ ID NO: 1751275 - RNA, 19 nt, Artificial Sequence
  Description of Artificial Sequence: Synthetic oligonucleotide
uugaacaauggaaaacccc

SEQ ID NO: 1751276 - RNA, 19 nt, Artificial Sequence
  Description of Artificial Sequence: Synthetic oligonucleotide
aauuggcucauuaagcaag

SEQ ID NO: 1751277 - RNA, 19 nt, Artificial Sequence
  Description of Artificial Sequence: Synthetic oligonucleotide
ucuccuguaauguaucuug

SEQ ID NO: 1751278 - RNA, 19 nt, Artificial Sequence
  Description of Artificial Sequence: Synthetic oligonucleotide
uauauuucucagcugggca

SEQ ID NO: 1751279 - RNA, 19 nt, Artificial Sequence
  Description of Artificial Sequence: Synthetic oligonucleotide
aaaucugauugcuucagaa

SEQ ID NO: 1751280 - RNA, 19 nt, Artificial Sequence
  Description of Artificial Sequence: Synthetic oligonucleotide
aacccuauucuaauggugg

SEQ ID NO: 1751281 - RNA, 19 nt, Artificial Sequence
  Description of Artificial Sequence: Synthetic oligonucleotide
uaucaacgaguuuugaaca

SEQ ID NO: 1751282 - RNA, 19 nt, Artificial Sequence
  Description of Artificial Sequence: Synthetic oligonucleotide
ucuuaugcugauuuucuga

SEQ ID NO: 1751283 - RNA, 19 nt, Artificial Sequence
  Description of Artificial Sequence: Synthetic oligonucleotide
aaagcgugaaacuucugaa

SEQ ID NO: 1751284 - RNA, 19 nt, Artificial Sequence
  Description of Artificial Sequence: Synthetic oligonucleotide
aaccugacgcgccuggugg

SEQ ID NO: 1751285 - RNA, 19 nt, Artificial Sequence
  Description of Artificial Sequence: Synthetic oligonucleotide
agaauucucaaugcugccc

SEQ ID NO: 1751286 - RNA, 19 nt, Artificial Sequence
  Description of Artificial Sequence: Synthetic oligonucleotide
ugaauauucugcaucuguc

SEQ ID NO: 1751287 - RNA, 19 nt, Artificial Sequence
  Description of Artificial Sequence: Synthetic oligonucleotide
uuaagcaaggaucgguugu

SEQ ID NO: 1751288 - RNA, 19 nt, Artificial Sequence
  Description of Artificial Sequence: Synthetic oligonucleotide
uguucauucuucccacuag

SEQ ID NO: 1751289 - RNA, 19 nt, Artificial Sequence
  Description of Artificial Sequence: Synthetic oligonucleotide
uguucuacaggauuggguu

SEQ ID NO: 1751290 - RNA, 19 nt, Artificial Sequence
  Description of Artificial Sequence: Synthetic oligonucleotide
uguguuuggacaacaccgc

SEQ ID NO: 1751291 - RNA, 19 nt, Artificial Sequence
  Description of Artificial Sequence: Synthetic oligonucleotide
uagaccuacgucaggugcg

SEQ ID NO: 1751292 - RNA, 19 nt, Artificial Sequence
  Description of Artificial Sequence: Synthetic oligonucleotide
uuuugaguucacaggggag

SEQ ID NO: 1751293 - RNA, 19 nt, Artificial Sequence
  Description of Artificial Sequence: Synthetic oligonucleotide
ucuaaucuucugaaauuga

SEQ ID NO: 1751294 - RNA, 19 nt, Artificial Sequence
  Description of Artificial Sequence: Synthetic oligonucleotide
uuaggcauaucaacgaguu

SEQ ID NO: 1751295 - RNA, 19 nt, Artificial Sequence
  Description of Artificial Sequence: Synthetic oligonucleotide
aacgaguuuugaacaaugg

SEQ ID NO: 1751296 - RNA, 19 nt, Artificial Sequence
  Description of Artificial Sequence: Synthetic oligonucleotide
uggcaaguugcccaagucc

SEQ ID NO: 1751297 - RNA, 19 nt, Artificial Sequence
  Description of Artificial Sequence: Synthetic oligonucleotide
uaacccuauucuaauggug

SEQ ID NO: 1751298 - RNA, 19 nt, Artificial Sequence
  Description of Artificial Sequence: Synthetic oligonucleotide
uaauguaucuugucuuaug

SEQ ID NO: 1751299 - RNA, 19 nt, Artificial Sequence
  Description of Artificial Sequence: Synthetic oligonucleotide
aucaucucuaaucuucuga

SEQ ID NO: 1751300 - RNA, 19 nt, Artificial Sequence
  Description of Artificial Sequence: Synthetic oligonucleotide
aggaugacggacucucuac

SEQ ID NO: 1751301 - RNA, 19 nt, Artificial Sequence
  Description of Artificial Sequence: Synthetic oligonucleotide
auguuugucacugauugug

SEQ ID NO: 1751302 - RNA, 19 nt, Artificial Sequence
  Description of Artificial Sequence: Synthetic oligonucleotide
guagaaaugggaacuuggg

SEQ ID NO: 1751303 - RNA, 19 nt, Artificial Sequence
  Description of Artificial Sequence: Synthetic oligonucleotide
agggucggagagcaggucc

SEQ ID NO: 1751304 - RNA, 19 nt, Artificial Sequence
  Description of Artificial Sequence: Synthetic oligonucleotide
gaaaaucugauugcuucag

SEQ ID NO: 1751305 - RNA, 19 nt, Artificial Sequence
  Description of Artificial Sequence: Synthetic oligonucleotide
uaaaggggaaccugucucc

SEQ ID NO: 1751306 - RNA, 19 nt, Artificial Sequence
  Description of Artificial Sequence: Synthetic oligonucleotide
gggacgaccuacuaggugg

SEQ ID NO: 1751307 - RNA, 19 nt, Artificial Sequence
  Description of Artificial Sequence: Synthetic oligonucleotide
gcuaacccuauucuaaugg

SEQ ID NO: 1751308 - RNA, 19 nt, Artificial Sequence
  Description of Artificial Sequence: Synthetic oligonucleotide
aaauucaaaaucagaccca

SEQ ID NO: 1751309 - RNA, 19 nt, Artificial Sequence
  Description of Artificial Sequence: Synthetic oligonucleotide
uucugaaauugaauauucu

SEQ ID NO: 1751310 - RNA, 19 nt, Artificial Sequence
  Description of Artificial Sequence: Synthetic oligonucleotide
ugcugauuuucugaggugc

SEQ ID NO: 1751311 - RNA, 19 nt, Artificial Sequence
  Description of Artificial Sequence: Synthetic oligonucleotide
gaugagacagucacuauuc

SEQ ID NO: 1751312 - RNA, 19 nt, Artificial Sequence
  Description of Artificial Sequence: Synthetic oligonucleotide
acccuauucuaaugguggc

SEQ ID NO: 1751313 - RNA, 19 nt, Artificial Sequence
  Description of Artificial Sequence: Synthetic oligonucleotide
uuucugaggaugacggacu

SEQ ID NO: 1751314 - RNA, 19 nt, Artificial Sequence
  Description of Artificial Sequence: Synthetic oligonucleotide
ugcauggagggcuucagac

SEQ ID NO: 1751315 - RNA, 19 nt, Artificial Sequence
  Description of Artificial Sequence: Synthetic oligonucleotide
accuacgucaggugcgugc

SEQ ID NO: 1751316 - RNA, 19 nt, Artificial Sequence
  Description of Artificial Sequence: Synthetic oligonucleotide
ugucgagaggcaaaggaau

SEQ ID NO: 1751317 - RNA, 19 nt, Artificial Sequence
  Description of Artificial Sequence: Synthetic oligonucleotide
uucaugggcacuuucugaa

SEQ ID NO: 1751318 - RNA, 19 nt, Artificial Sequence
  Description of Artificial Sequence: Synthetic oligonucleotide
uacuagguggaaaucugac

SEQ ID NO: 1751319 - RNA, 19 nt, Artificial Sequence
  Description of Artificial Sequence: Synthetic oligonucleotide
acgaguuuugaacaaugga

SEQ ID NO: 1751320 - RNA, 19 nt, Artificial Sequence
  Description of Artificial Sequence: Synthetic oligonucleotide
ucauuaagcaaggaucggu

SEQ ID NO: 1751321 - RNA, 19 nt, Artificial Sequence
  Description of Artificial Sequence: Synthetic oligonucleotide
gaucgguuguccccgauac

SEQ ID NO: 1751322 - RNA, 19 nt, Artificial Sequence
  Description of Artificial Sequence: Synthetic oligonucleotide
ucucugaacaucugcugug

SEQ ID NO: 1751323 - RNA, 19 nt, Artificial Sequence
  Description of Artificial Sequence: Synthetic oligonucleotide
agccauuguggcaaguugc

SEQ ID NO: 1751324 - RNA, 19 nt, Artificial Sequence
  Description of Artificial Sequence: Synthetic oligonucleotide
ucuggaguguucauucuuc

SEQ ID NO: 1751325 - RNA, 19 nt, Artificial Sequence
  Description of Artificial Sequence: Synthetic oligonucleotide
ucuugcacguucugcagug

SEQ ID NO: 1751326 - RNA, 19 nt, Artificial Sequence
  Description of Artificial Sequence: Synthetic oligonucleotide
ugucacugauugugcaugg

SEQ ID NO: 1751327 - RNA, 19 nt, Artificial Sequence
  Description of Artificial Sequence: Synthetic oligonucleotide
agcgugaaacuucugaaaa

SEQ ID NO: 1751328 - RNA, 19 nt, Artificial Sequence
  Description of Artificial Sequence: Synthetic oligonucleotide
cucuaaucuucugaaauug

SEQ ID NO: 1751329 - RNA, 19 nt, Artificial Sequence
  Description of Artificial Sequence: Synthetic oligonucleotide
cugacugaucuauaccagc

SEQ ID NO: 1751330 - RNA, 19 nt, Artificial Sequence
  Description of Artificial Sequence: Synthetic oligonucleotide
uuugacucccgcuuccaga

SEQ ID NO: 1751331 - RNA, 19 nt, Artificial Sequence
  Description of Artificial Sequence: Synthetic oligonucleotide
guggaaaucugacugaucu

SEQ ID NO: 1751332 - RNA, 19 nt, Artificial Sequence
  Description of Artificial Sequence: Synthetic oligonucleotide
aagcgugaaacuucugaaa

SEQ ID NO: 1751333 - RNA, 19 nt, Artificial Sequence
  Description of Artificial Sequence: Synthetic oligonucleotide
gaugacggacucucuacug

SEQ ID NO: 1751334 - RNA, 19 nt, Artificial Sequence
  Description of Artificial Sequence: Synthetic oligonucleotide
acuagguggaaaucugacu

SEQ ID NO: 1751335 - RNA, 19 nt, Artificial Sequence
  Description of Artificial Sequence: Synthetic oligonucleotide
aauccuagcaucaucucua

SEQ ID NO: 1751336 - RNA, 19 nt, Artificial Sequence
  Description of Artificial Sequence: Synthetic oligonucleotide
cagaagguuaggcauauca

SEQ ID NO: 1751337 - RNA, 19 nt, Artificial Sequence
  Description of Artificial Sequence: Synthetic oligonucleotide
ggcauagcagucuuuacug

SEQ ID NO: 1751338 - RNA, 19 nt, Artificial Sequence
  Description of Artificial Sequence: Synthetic oligonucleotide
aaaccugacgcgccuggug

SEQ ID NO: 1751339 - RNA, 19 nt, Artificial Sequence
  Description of Artificial Sequence: Synthetic oligonucleotide
auuauucccagguuucuuu

SEQ ID NO: 1751340 - RNA, 19 nt, Artificial Sequence
  Description of Artificial Sequence: Synthetic oligonucleotide
uguuccucgagagcuaucu

SEQ ID NO: 1751341 - RNA, 19 nt, Artificial Sequence
  Description of Artificial Sequence: Synthetic oligonucleotide
aguccggcaucuuuaagga

SEQ ID NO: 1751342 - RNA, 19 nt, Artificial Sequence
  Description of Artificial Sequence: Synthetic oligonucleotide
uugucacugauugugcaug

SEQ ID NO: 1751343 - RNA, 19 nt, Artificial Sequence
  Description of Artificial Sequence: Synthetic oligonucleotide
caacgaguuuugaacaaug

SEQ ID NO: 1751344 - RNA, 19 nt, Artificial Sequence
  Description of Artificial Sequence: Synthetic oligonucleotide
aggcauaucaacgaguuuu

SEQ ID NO: 1751345 - RNA, 19 nt, Artificial Sequence
  Description of Artificial Sequence: Synthetic oligonucleotide
ugcuguaggcauucguuca

SEQ ID NO: 1751346 - RNA, 19 nt, Artificial Sequence
  Description of Artificial Sequence: Synthetic oligonucleotide
uuuacugagcccguguuuu

SEQ ID NO: 1751347 - RNA, 19 nt, Artificial Sequence
  Description of Artificial Sequence: Synthetic oligonucleotide
ucccagguuucuuuguagc

SEQ ID NO: 1751348 - RNA, 19 nt, Artificial Sequence
  Description of Artificial Sequence: Synthetic oligonucleotide
auucuaaugguggcuuuuc

SEQ ID NO: 1751349 - RNA, 19 nt, Artificial Sequence
  Description of Artificial Sequence: Synthetic oligonucleotide
ggcaaguugcccaaguccg

SEQ ID NO: 1751350 - RNA, 19 nt, Artificial Sequence
  Description of Artificial Sequence: Synthetic oligonucleotide
ugucacagucacaggaaaa

SEQ ID NO: 1751351 - RNA, 19 nt, Artificial Sequence
  Description of Artificial Sequence: Synthetic oligonucleotide
aaaugggaacuugggaggu

SEQ ID NO: 1751352 - RNA, 19 nt, Artificial Sequence
  Description of Artificial Sequence: Synthetic oligonucleotide
cauuguggcaaguugccca

SEQ ID NO: 1751353 - RNA, 19 nt, Artificial Sequence
  Description of Artificial Sequence: Synthetic oligonucleotide
uguggcaaguugcccaagu

SEQ ID NO: 1751354 - RNA, 19 nt, Artificial Sequence
  Description of Artificial Sequence: Synthetic oligonucleotide
ggcaucuuuaaggaggucc

SEQ ID NO: 1751355 - RNA, 19 nt, Artificial Sequence
  Description of Artificial Sequence: Synthetic oligonucleotide
auuggcucauuaagcaagg

SEQ ID NO: 1751356 - RNA, 19 nt, Artificial Sequence
  Description of Artificial Sequence: Synthetic oligonucleotide
cucaaugcugcccaagaca

SEQ ID NO: 1751357 - RNA, 19 nt, Artificial Sequence
  Description of Artificial Sequence: Synthetic oligonucleotide
uguuuggacaacaccgcuu

SEQ ID NO: 1751358 - RNA, 19 nt, Artificial Sequence
  Description of Artificial Sequence: Synthetic oligonucleotide
agacccaagaguaucauuu

SEQ ID NO: 1751359 - RNA, 19 nt, Artificial Sequence
  Description of Artificial Sequence: Synthetic oligonucleotide
caaggaucgguuguccccg

SEQ ID NO: 1751360 - RNA, 19 nt, Artificial Sequence
  Description of Artificial Sequence: Synthetic oligonucleotide
augacggacucucuacugu

SEQ ID NO: 1751361 - RNA, 19 nt, Artificial Sequence
  Description of Artificial Sequence: Synthetic oligonucleotide
gaacuugggaggugucgag

SEQ ID NO: 1751362 - RNA, 19 nt, Artificial Sequence
  Description of Artificial Sequence: Synthetic oligonucleotide
agcuaacccuauucuaaug

SEQ ID NO: 1751363 - RNA, 19 nt, Artificial Sequence
  Description of Artificial Sequence: Synthetic oligonucleotide
aucaacgaguuuugaacaa

SEQ ID NO: 1751364 - RNA, 19 nt, Artificial Sequence
  Description of Artificial Sequence: Synthetic oligonucleotide
ggcucauuaagcaaggauc

SEQ ID NO: 1751365 - RNA, 19 nt, Artificial Sequence
  Description of Artificial Sequence: Synthetic oligonucleotide
ugauugcuucagaagguua

SEQ ID NO: 1751366 - RNA, 19 nt, Artificial Sequence
  Description of Artificial Sequence: Synthetic oligonucleotide
accuacuagguggaaaucu

SEQ ID NO: 1751367 - RNA, 19 nt, Artificial Sequence
  Description of Artificial Sequence: Synthetic oligonucleotide
cauucguucaguuucuccu

SEQ ID NO: 1751368 - RNA, 19 nt, Artificial Sequence
  Description of Artificial Sequence: Synthetic oligonucleotide
gagagcuaucugcucuucc

SEQ ID NO: 1751369 - RNA, 19 nt, Artificial Sequence
  Description of Artificial Sequence: Synthetic oligonucleotide
guagcuaacccuauucuaa

SEQ ID NO: 1751370 - RNA, 19 nt, Artificial Sequence
  Description of Artificial Sequence: Synthetic oligonucleotide
auaccagccauuguggcaa

SEQ ID NO: 1751371 - RNA, 19 nt, Artificial Sequence
  Description of Artificial Sequence: Synthetic oligonucleotide
uccccgauaccuuugcuuu

SEQ ID NO: 1751372 - RNA, 19 nt, Artificial Sequence
  Description of Artificial Sequence: Synthetic oligonucleotide
guuagaccuacgucaggug

SEQ ID NO: 1751373 - RNA, 19 nt, Artificial Sequence
  Description of Artificial Sequence: Synthetic oligonucleotide
gaauggaugcuuuccugaa

SEQ ID NO: 1751374 - RNA, 19 nt, Artificial Sequence
  Description of Artificial Sequence: Synthetic oligonucleotide
ugucuuggaugagacaguc

SEQ ID NO: 1751375 - RNA, 19 nt, Artificial Sequence
  Description of Artificial Sequence: Synthetic oligonucleotide
ucccgcuuccagaaaugcc

SEQ ID NO: 1751376 - RNA, 19 nt, Artificial Sequence
  Description of Artificial Sequence: Synthetic oligonucleotide
ugcgugcugaugaauggau

SEQ ID NO: 1751377 - RNA, 19 nt, Artificial Sequence
  Description of Artificial Sequence: Synthetic oligonucleotide
uucuggaguguucauucuu

SEQ ID NO: 1751378 - RNA, 19 nt, Artificial Sequence
  Description of Artificial Sequence: Synthetic oligonucleotide
ucuuuguagcuaacccuau

SEQ ID NO: 1751379 - RNA, 19 nt, Artificial Sequence
  Description of Artificial Sequence: Synthetic oligonucleotide
ugcuaaaggggaaccuguc

SEQ ID NO: 1751380 - RNA, 19 nt, Artificial Sequence
  Description of Artificial Sequence: Synthetic oligonucleotide
ggugcgugcugaugaaugg

SEQ ID NO: 1751381 - RNA, 19 nt, Artificial Sequence
  Description of Artificial Sequence: Synthetic oligonucleotide
aauucucaaugcugcccaa

SEQ ID NO: 1751382 - RNA, 19 nt, Artificial Sequence
  Description of Artificial Sequence: Synthetic oligonucleotide
gcaaaggaauccuagcauc

SEQ ID NO: 1751383 - RNA, 19 nt, Artificial Sequence
  Description of Artificial Sequence: Synthetic oligonucleotide
aaguugcccaaguccggca

SEQ ID NO: 1751384 - RNA, 19 nt, Artificial Sequence
  Description of Artificial Sequence: Synthetic oligonucleotide
auugaauauucugcaucug

SEQ ID NO: 1751385 - RNA, 19 nt, Artificial Sequence
  Description of Artificial Sequence: Synthetic oligonucleotide
ggugucgagaggcaaagga

SEQ ID NO: 1751386 - RNA, 19 nt, Artificial Sequence
  Description of Artificial Sequence: Synthetic oligonucleotide
auuguggcaaguugcccaa

SEQ ID NO: 1751387 - RNA, 19 nt, Artificial Sequence
  Description of Artificial Sequence: Synthetic oligonucleotide
ucaacgaguuuugaacaau

SEQ ID NO: 1751388 - RNA, 19 nt, Artificial Sequence
  Description of Artificial Sequence: Synthetic oligonucleotide
ggaaaaucugauugcuuca

SEQ ID NO: 1751389 - RNA, 19 nt, Artificial Sequence
  Description of Artificial Sequence: Synthetic oligonucleotide
ugacggacucucuacuguc

SEQ ID NO: 1751390 - RNA, 19 nt, Artificial Sequence
  Description of Artificial Sequence: Synthetic oligonucleotide
ugagcccguguuuucuccc

SEQ ID NO: 1751391 - RNA, 19 nt, Artificial Sequence
  Description of Artificial Sequence: Synthetic oligonucleotide
uucuacaggauuggguuua

SEQ ID NO: 1751392 - RNA, 19 nt, Artificial Sequence
  Description of Artificial Sequence: Synthetic oligonucleotide
agaagguuaggcauaucaa

SEQ ID NO: 1751393 - RNA, 19 nt, Artificial Sequence
  Description of Artificial Sequence: Synthetic oligonucleotide
accugacgcgccugguggc

SEQ ID NO: 1751394 - RNA, 19 nt, Artificial Sequence
  Description of Artificial Sequence: Synthetic oligonucleotide
aaggggaaccugucuccca

SEQ ID NO: 1751395 - RNA, 19 nt, Artificial Sequence
  Description of Artificial Sequence: Synthetic oligonucleotide
aacuugggaggugucgaga

SEQ ID NO: 1751396 - RNA, 19 nt, Artificial Sequence
  Description of Artificial Sequence: Synthetic oligonucleotide
caucugcuaaaggggaacc

SEQ ID NO: 1751397 - RNA, 19 nt, Artificial Sequence
  Description of Artificial Sequence: Synthetic oligonucleotide
uacgucaggugcgugcuga

SEQ ID NO: 1751398 - RNA, 19 nt, Artificial Sequence
  Description of Artificial Sequence: Synthetic oligonucleotide
uggaaaucugacugaucua

SEQ ID NO: 1751399 - RNA, 19 nt, Artificial Sequence
  Description of Artificial Sequence: Synthetic oligonucleotide
caaguugcccaaguccggc

SEQ ID NO: 1751400 - RNA, 19 nt, Artificial Sequence
  Description of Artificial Sequence: Synthetic oligonucleotide
cuacuagguggaaaucuga

SEQ ID NO: 1751401 - RNA, 19 nt, Artificial Sequence
  Description of Artificial Sequence: Synthetic oligonucleotide
cugagcccguguuuucucc

SEQ ID NO: 1751402 - RNA, 19 nt, Artificial Sequence
  Description of Artificial Sequence: Synthetic oligonucleotide
cugaggugcuucaugggca

SEQ ID NO: 1751403 - RNA, 19 nt, Artificial Sequence
  Description of Artificial Sequence: Synthetic oligonucleotide
gcaaggaucgguugucccc

SEQ ID NO: 1751404 - RNA, 19 nt, Artificial Sequence
  Description of Artificial Sequence: Synthetic oligonucleotide
cugauugugcauggagggc

SEQ ID NO: 1751405 - RNA, 19 nt, Artificial Sequence
  Description of Artificial Sequence: Synthetic oligonucleotide
agucacuauucuguuuucu

SEQ ID NO: 1751406 - RNA, 19 nt, Artificial Sequence
  Description of Artificial Sequence: Synthetic oligonucleotide
uuaagccggaucacccuuu

SEQ ID NO: 1751407 - RNA, 19 nt, Artificial Sequence
  Description of Artificial Sequence: Synthetic oligonucleotide
uaaggagguccaggaaagc

SEQ ID NO: 1751408 - RNA, 19 nt, Artificial Sequence
  Description of Artificial Sequence: Synthetic oligonucleotide
ggaugcuuuccugaaauuc

SEQ ID NO: 1751409 - RNA, 19 nt, Artificial Sequence
  Description of Artificial Sequence: Synthetic oligonucleotide
ccuacuagguggaaaucug

SEQ ID NO: 1751410 - RNA, 19 nt, Artificial Sequence
  Description of Artificial Sequence: Synthetic oligonucleotide
ugcgccagggcaggaaacc

SEQ ID NO: 1751411 - RNA, 19 nt, Artificial Sequence
  Description of Artificial Sequence: Synthetic oligonucleotide
cacugacucgcuugucagc

SEQ ID NO: 1751412 - RNA, 19 nt, Artificial Sequence
  Description of Artificial Sequence: Synthetic oligonucleotide
cgaguuuugaacaauggaa

SEQ ID NO: 1751413 - RNA, 19 nt, Artificial Sequence
  Description of Artificial Sequence: Synthetic oligonucleotide
cagguuucuuuguagcuaa

SEQ ID NO: 1751414 - RNA, 19 nt, Artificial Sequence
  Description of Artificial Sequence: Synthetic oligonucleotide
uaagccggaucacccuuuc

SEQ ID NO: 1751415 - RNA, 19 nt, Artificial Sequence
  Description of Artificial Sequence: Synthetic oligonucleotide
uggaggcuaccgaugcuuc

SEQ ID NO: 1751416 - RNA, 19 nt, Artificial Sequence
  Description of Artificial Sequence: Synthetic oligonucleotide
ucccacuagcuuucucuga

SEQ ID NO: 1751417 - RNA, 19 nt, Artificial Sequence
  Description of Artificial Sequence: Synthetic oligonucleotide
uauuucucagcugggcauu

SEQ ID NO: 1751418 - RNA, 19 nt, Artificial Sequence
  Description of Artificial Sequence: Synthetic oligonucleotide
aggugcgugcugaugaaug

SEQ ID NO: 1751419 - RNA, 19 nt, Artificial Sequence
  Description of Artificial Sequence: Synthetic oligonucleotide
gaggaugacggacucucua

SEQ ID NO: 1751420 - RNA, 19 nt, Artificial Sequence
  Description of Artificial Sequence: Synthetic oligonucleotide
uacugagcccguguuuucu

SEQ ID NO: 1751421 - RNA, 19 nt, Artificial Sequence
  Description of Artificial Sequence: Synthetic oligonucleotide
aguugcccaaguccggcau

SEQ ID NO: 1751422 - RNA, 19 nt, Artificial Sequence
  Description of Artificial Sequence: Synthetic oligonucleotide
uuggacaacaccgcuucuu

SEQ ID NO: 1751423 - RNA, 19 nt, Artificial Sequence
  Description of Artificial Sequence: Synthetic oligonucleotide
cagaggaucuggggcauag

SEQ ID NO: 1751424 - RNA, 19 nt, Artificial Sequence
  Description of Artificial Sequence: Synthetic oligonucleotide
gcuaccgaugcuucucuug

SEQ ID NO: 1751425 - RNA, 19 nt, Artificial Sequence
  Description of Artificial Sequence: Synthetic oligonucleotide
cccggagugcuucucaggg

SEQ ID NO: 1751426 - RNA, 19 nt, Artificial Sequence
  Description of Artificial Sequence: Synthetic oligonucleotide
cuaacccuauucuaauggu

SEQ ID NO: 1751427 - RNA, 19 nt, Artificial Sequence
  Description of Artificial Sequence: Synthetic oligonucleotide
ucaggugcgugcugaugaa

SEQ ID NO: 1751428 - RNA, 19 nt, Artificial Sequence
  Description of Artificial Sequence: Synthetic oligonucleotide
gaggcuaccgaugcuucuc

SEQ ID NO: 1751429 - RNA, 19 nt, Artificial Sequence
  Description of Artificial Sequence: Synthetic oligonucleotide
uugcccaaguccggcaucu

SEQ ID NO: 1751430 - RNA, 19 nt, Artificial Sequence
  Description of Artificial Sequence: Synthetic oligonucleotide
uggggacgaccuacuaggu

SEQ ID NO: 1751431 - RNA, 19 nt, Artificial Sequence
  Description of Artificial Sequence: Synthetic oligonucleotide
ggcauaucaacgaguuuug

SEQ ID NO: 1751432 - RNA, 19 nt, Artificial Sequence
  Description of Artificial Sequence: Synthetic oligonucleotide
uaggcauaucaacgaguuu

SEQ ID NO: 1751433 - RNA, 19 nt, Artificial Sequence
  Description of Artificial Sequence: Synthetic oligonucleotide
acguucugcagugcgccag

SEQ ID NO: 1751434 - RNA, 19 nt, Artificial Sequence
  Description of Artificial Sequence: Synthetic oligonucleotide
ccuucaucguccaggauca

SEQ ID NO: 1751435 - RNA, 19 nt, Artificial Sequence
  Description of Artificial Sequence: Synthetic oligonucleotide
uguccccgauaccuuugcu

SEQ ID NO: 1751436 - RNA, 19 nt, Artificial Sequence
  Description of Artificial Sequence: Synthetic oligonucleotide
aggcuaccgaugcuucucu

SEQ ID NO: 1751437 - RNA, 19 nt, Artificial Sequence
  Description of Artificial Sequence: Synthetic oligonucleotide
cucccgcuuccagaaaugc

SEQ ID NO: 1751438 - RNA, 19 nt, Artificial Sequence
  Description of Artificial Sequence: Synthetic oligonucleotide
ucuacaggauuggguuuac

SEQ ID NO: 1751439 - RNA, 19 nt, Artificial Sequence
  Description of Artificial Sequence: Synthetic oligonucleotide
cauuaagcaaggaucgguu

SEQ ID NO: 1751440 - RNA, 19 nt, Artificial Sequence
  Description of Artificial Sequence: Synthetic oligonucleotide
aaggaucgguuguccccga

SEQ ID NO: 1751441 - RNA, 19 nt, Artificial Sequence
  Description of Artificial Sequence: Synthetic oligonucleotide
uuggcucauuaagcaagga

SEQ ID NO: 1751442 - RNA, 19 nt, Artificial Sequence
  Description of Artificial Sequence: Synthetic oligonucleotide
agguggaaaucugacugau

SEQ ID NO: 1751443 - RNA, 19 nt, Artificial Sequence
  Description of Artificial Sequence: Synthetic oligonucleotide
guuaggcauaucaacgagu

SEQ ID NO: 1751444 - RNA, 19 nt, Artificial Sequence
  Description of Artificial Sequence: Synthetic oligonucleotide
guccggcaucuuuaaggag

SEQ ID NO: 1751445 - RNA, 19 nt, Artificial Sequence
  Description of Artificial Sequence: Synthetic oligonucleotide
gcacuaacaguagaauuca

SEQ ID NO: 1751446 - RNA, 19 nt, Artificial Sequence
  Description of Artificial Sequence: Synthetic oligonucleotide
ggaaaucugacugaucuau

SEQ ID NO: 1751447 - RNA, 19 nt, Artificial Sequence
  Description of Artificial Sequence: Synthetic oligonucleotide
uagcaucaucucuaaucuu

SEQ ID NO: 1751448 - RNA, 19 nt, Artificial Sequence
  Description of Artificial Sequence: Synthetic oligonucleotide
gugucgagaggcaaaggaa

SEQ ID NO: 1751449 - RNA, 19 nt, Artificial Sequence
  Description of Artificial Sequence: Synthetic oligonucleotide
uccuagcaucaucucuaau

SEQ ID NO: 1751450 - RNA, 19 nt, Artificial Sequence
  Description of Artificial Sequence: Synthetic oligonucleotide
cuaccgaugcuucucuugu

SEQ ID NO: 1751451 - RNA, 19 nt, Artificial Sequence
  Description of Artificial Sequence: Synthetic oligonucleotide
agguuucuuuguagcuaac

SEQ ID NO: 1751452 - RNA, 19 nt, Artificial Sequence
  Description of Artificial Sequence: Synthetic oligonucleotide
gucagccuuaagccggauc

SEQ ID NO: 1751453 - RNA, 19 nt, Artificial Sequence
  Description of Artificial Sequence: Synthetic oligonucleotide
gacggacucucuacuguca

SEQ ID NO: 1751454 - RNA, 19 nt, Artificial Sequence
  Description of Artificial Sequence: Synthetic oligonucleotide
gaucuauaccagccauugu

SEQ ID NO: 1751455 - RNA, 19 nt, Artificial Sequence
  Description of Artificial Sequence: Synthetic oligonucleotide
agacaaggagaaauuuaua

SEQ ID NO: 1751456 - RNA, 19 nt, Artificial Sequence
  Description of Artificial Sequence: Synthetic oligonucleotide
cuugcacguucugcagugc

SEQ ID NO: 1751457 - RNA, 19 nt, Artificial Sequence
  Description of Artificial Sequence: Synthetic oligonucleotide
aggugucgagaggcaaagg

SEQ ID NO: 1751458 - RNA, 19 nt, Artificial Sequence
  Description of Artificial Sequence: Synthetic oligonucleotide
agaccuacgucaggugcgu

SEQ ID NO: 1751459 - RNA, 19 nt, Artificial Sequence
  Description of Artificial Sequence: Synthetic oligonucleotide
gccauuguggcaaguugcc

SEQ ID NO: 1751460 - RNA, 19 nt, Artificial Sequence
  Description of Artificial Sequence: Synthetic oligonucleotide
gccuuaagccggaucaccc

SEQ ID NO: 1751461 - RNA, 19 nt, Artificial Sequence
  Description of Artificial Sequence: Synthetic oligonucleotide
acgaccuacuagguggaaa

SEQ ID NO: 1751462 - RNA, 19 nt, Artificial Sequence
  Description of Artificial Sequence: Synthetic oligonucleotide
uuguuccucgagagcuauc

SEQ ID NO: 1751463 - RNA, 19 nt, Artificial Sequence
  Description of Artificial Sequence: Synthetic oligonucleotide
cucgcuugucagccuuaag

SEQ ID NO: 1751464 - RNA, 19 nt, Artificial Sequence
  Description of Artificial Sequence: Synthetic oligonucleotide
gguuagaccuacgucaggu

SEQ ID NO: 1751465 - RNA, 19 nt, Artificial Sequence
  Description of Artificial Sequence: Synthetic oligonucleotide
ccggaucacccuuuccucc

SEQ ID NO: 1751466 - RNA, 19 nt, Artificial Sequence
  Description of Artificial Sequence: Synthetic oligonucleotide
cggagugcuucucaggggc

SEQ ID NO: 1751467 - RNA, 19 nt, Artificial Sequence
  Description of Artificial Sequence: Synthetic oligonucleotide
gaccuacuagguggaaauc

SEQ ID NO: 1751468 - RNA, 19 nt, Artificial Sequence
  Description of Artificial Sequence: Synthetic oligonucleotide
ggggacgaccuacuaggug

SEQ ID NO: 1751469 - RNA, 19 nt, Artificial Sequence
  Description of Artificial Sequence: Synthetic oligonucleotide
gcaaguugcccaaguccgg

SEQ ID NO: 1751470 - RNA, 19 nt, Artificial Sequence
  Description of Artificial Sequence: Synthetic oligonucleotide
aaccugucucccagguggu

SEQ ID NO: 1751471 - RNA, 19 nt, Artificial Sequence
  Description of Artificial Sequence: Synthetic oligonucleotide
guguuuggacaacaccgcu

SEQ ID NO: 1751472 - RNA, 19 nt, Artificial Sequence
  Description of Artificial Sequence: Synthetic oligonucleotide
uaccgaugcuucucuugua

SEQ ID NO: 1751473 - RNA, 19 nt, Artificial Sequence
  Description of Artificial Sequence: Synthetic oligonucleotide
guugcccaaguccggcauc

SEQ ID NO: 1751474 - RNA, 19 nt, Artificial Sequence
  Description of Artificial Sequence: Synthetic oligonucleotide
cgugaaacuucugaaaaga

SEQ ID NO: 1751475 - RNA, 19 nt, Artificial Sequence
  Description of Artificial Sequence: Synthetic oligonucleotide
ggaaccugucucccaggug

SEQ ID NO: 1751476 - RNA, 19 nt, Artificial Sequence
  Description of Artificial Sequence: Synthetic oligonucleotide
gcauagcagucuuuacuga

SEQ ID NO: 1751477 - RNA, 19 nt, Artificial Sequence
  Description of Artificial Sequence: Synthetic oligonucleotide
gcacguucugcagugcgcc

SEQ ID NO: 1751478 - RNA, 19 nt, Artificial Sequence
  Description of Artificial Sequence: Synthetic oligonucleotide
cuuggaugagacagucacu

SEQ ID NO: 1751479 - RNA, 19 nt, Artificial Sequence
  Description of Artificial Sequence: Synthetic oligonucleotide
caggugcacuaacaguaga

SEQ ID NO: 1751480 - RNA, 19 nt, Artificial Sequence
  Description of Artificial Sequence: Synthetic oligonucleotide
ugacucccgcuuccagaaa

SEQ ID NO: 1751481 - RNA, 19 nt, Artificial Sequence
  Description of Artificial Sequence: Synthetic oligonucleotide
guaggcauucguucaguuu

SEQ ID NO: 1751482 - RNA, 19 nt, Artificial Sequence
  Description of Artificial Sequence: Synthetic oligonucleotide
ugacgcgccugguggcaga

SEQ ID NO: 1751483 - RNA, 19 nt, Artificial Sequence
  Description of Artificial Sequence: Synthetic oligonucleotide
ggagugcuucucaggggcg

SEQ ID NO: 1751484 - RNA, 19 nt, Artificial Sequence
  Description of Artificial Sequence: Synthetic oligonucleotide
gacccaagaguaucauuuu

SEQ ID NO: 1751485 - RNA, 19 nt, Artificial Sequence
  Description of Artificial Sequence: Synthetic oligonucleotide
ccaucugcuaaaggggaac

SEQ ID NO: 1751486 - RNA, 19 nt, Artificial Sequence
  Description of Artificial Sequence: Synthetic oligonucleotide
cuccuguaauguaucuugu

SEQ ID NO: 1751487 - RNA, 19 nt, Artificial Sequence
  Description of Artificial Sequence: Synthetic oligonucleotide
gacgcgccugguggcagag

SEQ ID NO: 1751488 - RNA, 19 nt, Artificial Sequence
  Description of Artificial Sequence: Synthetic oligonucleotide
ggaucauguuugucacuga

SEQ ID NO: 1751489 - RNA, 19 nt, Artificial Sequence
  Description of Artificial Sequence: Synthetic oligonucleotide
ucagaagguuaggcauauc

SEQ ID NO: 1751490 - RNA, 19 nt, Artificial Sequence
  Description of Artificial Sequence: Synthetic oligonucleotide
cagccuuaagccggaucac

SEQ ID NO: 1751491 - RNA, 19 nt, Artificial Sequence
  Description of Artificial Sequence: Synthetic oligonucleotide
cuacgucaggugcgugcug

SEQ ID NO: 1751492 - RNA, 19 nt, Artificial Sequence
  Description of Artificial Sequence: Synthetic oligonucleotide
guucuacaggauuggguuu

SEQ ID NO: 1751493 - RNA, 19 nt, Artificial Sequence
  Description of Artificial Sequence: Synthetic oligonucleotide
ccggagugcuucucagggg

SEQ ID NO: 1751494 - RNA, 19 nt, Artificial Sequence
  Description of Artificial Sequence: Synthetic oligonucleotide
cuuaagccggaucacccuu

SEQ ID NO: 1751495 - RNA, 19 nt, Artificial Sequence
  Description of Artificial Sequence: Synthetic oligonucleotide
gccggaucacccuuuccuc

SEQ ID NO: 1751496 - RNA, 19 nt, Artificial Sequence
  Description of Artificial Sequence: Synthetic oligonucleotide
ggaugacggacucucuacu

SEQ ID NO: 1751497 - RNA, 19 nt, Artificial Sequence
  Description of Artificial Sequence: Synthetic oligonucleotide
acucgcuugucagccuuaa

SEQ ID NO: 1751498 - RNA, 19 nt, Artificial Sequence
  Description of Artificial Sequence: Synthetic oligonucleotide
aggaucgguuguccccgau

SEQ ID NO: 1751499 - RNA, 19 nt, Artificial Sequence
  Description of Artificial Sequence: Synthetic oligonucleotide
gguggaaaucugacugauc

SEQ ID NO: 1751500 - RNA, 19 nt, Artificial Sequence
  Description of Artificial Sequence: Synthetic oligonucleotide
cugaucuauaccagccauu

SEQ ID NO: 1751501 - RNA, 19 nt, Artificial Sequence
  Description of Artificial Sequence: Synthetic oligonucleotide
guccccgauaccuuugcuu

SEQ ID NO: 1751502 - RNA, 19 nt, Artificial Sequence
  Description of Artificial Sequence: Synthetic oligonucleotide
gcgugcugaugaauggaug

SEQ ID NO: 1751503 - RNA, 19 nt, Artificial Sequence
  Description of Artificial Sequence: Synthetic oligonucleotide
acgucaggugcgugcugau

SEQ ID NO: 1751504 - RNA, 19 nt, Artificial Sequence
  Description of Artificial Sequence: Synthetic oligonucleotide
ggugcacuaacaguagaau

SEQ ID NO: 1751505 - RNA, 19 nt, Artificial Sequence
  Description of Artificial Sequence: Synthetic oligonucleotide
cccacuagcuuucucugaa

SEQ ID NO: 1751506 - RNA, 19 nt, Artificial Sequence
  Description of Artificial Sequence: Synthetic oligonucleotide
cuauucuaaugguggcuuu

SEQ ID NO: 1751507 - RNA, 19 nt, Artificial Sequence
  Description of Artificial Sequence: Synthetic oligonucleotide
gcauaucaacgaguuuuga

SEQ ID NO: 1751508 - RNA, 19 nt, Artificial Sequence
  Description of Artificial Sequence: Synthetic oligonucleotide
cacguucugcagugcgcca

SEQ ID NO: 1751509 - RNA, 19 nt, Artificial Sequence
  Description of Artificial Sequence: Synthetic oligonucleotide
gaccuacgucaggugcgug

SEQ ID NO: 1751510 - RNA, 19 nt, Artificial Sequence
  Description of Artificial Sequence: Synthetic oligonucleotide
caggaaaccugacgcgccu

SEQ ID NO: 1751511 - RNA, 19 nt, Artificial Sequence
  Description of Artificial Sequence: Synthetic oligonucleotide
gauugugcauggagggcuu

SEQ ID NO: 1751512 - RNA, 19 nt, Artificial Sequence
  Description of Artificial Sequence: Synthetic oligonucleotide
caggggcgcucuuucugga

SEQ ID NO: 1751513 - RNA, 19 nt, Artificial Sequence
  Description of Artificial Sequence: Synthetic oligonucleotide
cacuaacaguagaauucau

SEQ ID NO: 1751514 - RNA, 19 nt, Artificial Sequence
  Description of Artificial Sequence: Synthetic oligonucleotide
ccgaugcuucucuuguaga

SEQ ID NO: 1751515 - RNA, 19 nt, Artificial Sequence
  Description of Artificial Sequence: Synthetic oligonucleotide
cugcccaagacaccuucau

SEQ ID NO: 1751516 - RNA, 19 nt, Artificial Sequence
  Description of Artificial Sequence: Synthetic oligonucleotide
cagggucggagagcagguc

SEQ ID NO: 1751517 - RNA, 19 nt, Artificial Sequence
  Description of Artificial Sequence: Synthetic oligonucleotide
ggacgaccuacuaggugga

SEQ ID NO: 1751518 - RNA, 19 nt, Artificial Sequence
  Description of Artificial Sequence: Synthetic oligonucleotide
gacgaccuacuagguggaa

SEQ ID NO: 1751519 - RNA, 19 nt, Artificial Sequence
  Description of Artificial Sequence: Synthetic oligonucleotide
gacucgcuugucagccuua

SEQ ID NO: 1751520 - RNA, 19 nt, Artificial Sequence
  Description of Artificial Sequence: Synthetic oligonucleotide
ggaggcuaccgaugcuucu

SEQ ID NO: 1751521 - RNA, 19 nt, Artificial Sequence
  Description of Artificial Sequence: Synthetic oligonucleotide
acgcgccugguggcagagg

SEQ ID NO: 1751522 - RNA, 19 nt, Artificial Sequence
  Description of Artificial Sequence: Synthetic oligonucleotide
ggggcgcucuuucuggagu

SEQ ID NO: 1751523 - RNA, 19 nt, Artificial Sequence
  Description of Artificial Sequence: Synthetic oligonucleotide
cucccauuauucccagguu

SEQ ID NO: 1751524 - RNA, 19 nt, Artificial Sequence
  Description of Artificial Sequence: Synthetic oligonucleotide
ccacaggugcacuaacagu

SEQ ID NO: 1751525 - RNA, 19 nt, Artificial Sequence
  Description of Artificial Sequence: Synthetic oligonucleotide
cccagguuucuuuguagcu

SEQ ID NO: 1751526 - RNA, 19 nt, Artificial Sequence
  Description of Artificial Sequence: Synthetic oligonucleotide
ccuuaagccggaucacccu

SEQ ID NO: 1751527 - RNA, 19 nt, Artificial Sequence
  Description of Artificial Sequence: Synthetic oligonucleotide
cccguguuuucucccauua

SEQ ID NO: 1751528 - RNA, 19 nt, Artificial Sequence
  Description of Artificial Sequence: Synthetic oligonucleotide
gccaucugcuaaaggggaa

SEQ ID NO: 1751529 - RNA, 19 nt, Artificial Sequence
  Description of Artificial Sequence: Synthetic oligonucleotide
cccaagacaccuucaucgu

SEQ ID NO: 1751530 - RNA, 19 nt, Artificial Sequence
  Description of Artificial Sequence: Synthetic oligonucleotide
cgaccuacuagguggaaau

SEQ ID NO: 1751531 - RNA, 19 nt, Artificial Sequence
  Description of Artificial Sequence: Synthetic oligonucleotide
ccaggaaagcgugaaacuu

SEQ ID NO: 1751532 - RNA, 19 nt, Artificial Sequence
  Description of Artificial Sequence: Synthetic oligonucleotide
ccggcaucuuuaaggaggu

SEQ ID NO: 1751533 - RNA, 19 nt, Artificial Sequence
  Description of Artificial Sequence: Synthetic oligonucleotide
cuacaggauuggguuuacu

SEQ ID NO: 1751534 - RNA, 19 nt, Artificial Sequence
  Description of Artificial Sequence: Synthetic oligonucleotide
gggucggagagcagguccu

SEQ ID NO: 1751535 - RNA, 19 nt, Artificial Sequence
  Description of Artificial Sequence: Synthetic oligonucleotide
ggcuucagacaaggagaaa

SEQ ID NO: 1751536 - RNA, 19 nt, Artificial Sequence
  Description of Artificial Sequence: Synthetic oligonucleotide
cccuauucuaaugguggcu

SEQ ID NO: 1751537 - RNA, 19 nt, Artificial Sequence
  Description of Artificial Sequence: Synthetic oligonucleotide
caacaccgcuucuucccuu

SEQ ID NO: 1751538 - RNA, 19 nt, Artificial Sequence
  Description of Artificial Sequence: Synthetic oligonucleotide
ccuacgucaggugcgugcu

SEQ ID NO: 1751539 - RNA, 19 nt, Artificial Sequence
  Description of Artificial Sequence: Synthetic oligonucleotide
cgucaggugcgugcugaug

SEQ ID NO: 1751540 - RNA, 19 nt, Artificial Sequence
  Description of Artificial Sequence: Synthetic oligonucleotide
cgagagcuaucugcucuuc

SEQ ID NO: 1751541 - RNA, 19 nt, Artificial Sequence
  Description of Artificial Sequence: Synthetic oligonucleotide
caggugcgugcugaugaau

SEQ ID NO: 1751542 - RNA, 19 nt, Artificial Sequence
  Description of Artificial Sequence: Synthetic oligonucleotide
ggaucacccuuuccuccuu

SEQ ID NO: 1751543 - RNA, 19 nt, Artificial Sequence
  Description of Artificial Sequence: Synthetic oligonucleotide
ggcagaggaucuggggcau

SEQ ID NO: 1751544 - RNA, 19 nt, Artificial Sequence
  Description of Artificial Sequence: Synthetic oligonucleotide
caccuucaucguccaggau

SEQ ID NO: 1751545 - RNA, 19 nt, Artificial Sequence
  Description of Artificial Sequence: Synthetic oligonucleotide
ggcuaccgaugcuucucuu

SEQ ID NO: 1751546 - RNA, 19 nt, Artificial Sequence
  Description of Artificial Sequence: Synthetic oligonucleotide
gcgccagggcaggaaaccu

SEQ ID NO: 1751547 - RNA, 19 nt, Artificial Sequence
  Description of Artificial Sequence: Synthetic oligonucleotide
gcagaggaucuggggcaua

SEQ ID NO: 1751548 - RNA, 19 nt, Artificial Sequence
  Description of Artificial Sequence: Synthetic oligonucleotide
gcagugcgccagggcagga

SEQ ID NO: 1751549 - RNA, 19 nt, Artificial Sequence
  Description of Artificial Sequence: Synthetic oligonucleotide
cuucaucguccaggaucau

SEQ ID NO: 1751550 - RNA, 19 nt, Artificial Sequence
  Description of Artificial Sequence: Synthetic oligonucleotide
gcgcucuuucuggaguguu

SEQ ID NO: 1751551 - RNA, 19 nt, Artificial Sequence
  Description of Artificial Sequence: Synthetic oligonucleotide
ccccgauaccuuugcuuuu

SEQ ID NO: 1751552 - RNA, 19 nt, Artificial Sequence
  Description of Artificial Sequence: Synthetic oligonucleotide
cgguuguccccgauaccuu

SEQ ID NO: 1751553 - RNA, 19 nt, Artificial Sequence
  Description of Artificial Sequence: Synthetic oligonucleotide
gcgccugguggcagaggau

SEQ ID NO: 1751554 - RNA, 19 nt, Artificial Sequence
  Description of Artificial Sequence: Synthetic oligonucleotide
aaaauaacuguauagcugc

SEQ ID NO: 1751555 - RNA, 19 nt, Artificial Sequence
  Description of Artificial Sequence: Synthetic oligonucleotide
aaauuaucaauacaaaacu

SEQ ID NO: 1751556 - RNA, 19 nt, Artificial Sequence
  Description of Artificial Sequence: Synthetic oligonucleotide
agaaaauuaguuuuguaac

SEQ ID NO: 1751557 - RNA, 19 nt, Artificial Sequence
  Description of Artificial Sequence: Synthetic oligonucleotide
aaaauugucacucacuccu

SEQ ID NO: 1751558 - RNA, 19 nt, Artificial Sequence
  Description of Artificial Sequence: Synthetic oligonucleotide
uuaaaugacagaaagaaua

SEQ ID NO: 1751559 - RNA, 19 nt, Artificial Sequence
  Description of Artificial Sequence: Synthetic oligonucleotide
uuaguuuuguaacugaacc

SEQ ID NO: 1751560 - RNA, 19 nt, Artificial Sequence
  Description of Artificial Sequence: Synthetic oligonucleotide
aagacaacaaucaacacuc

SEQ ID NO: 1751561 - RNA, 19 nt, Artificial Sequence
  Description of Artificial Sequence: Synthetic oligonucleotide
aaagcuucacaauugugac

SEQ ID NO: 1751562 - RNA, 19 nt, Artificial Sequence
  Description of Artificial Sequence: Synthetic oligonucleotide
acaaucuuuauacaggcac

SEQ ID NO: 1751563 - RNA, 19 nt, Artificial Sequence
  Description of Artificial Sequence: Synthetic oligonucleotide
uuuaauguuaccuuacuga

SEQ ID NO: 1751564 - RNA, 19 nt, Artificial Sequence
  Description of Artificial Sequence: Synthetic oligonucleotide
acaaucaacacucuuuugg

SEQ ID NO: 1751565 - RNA, 19 nt, Artificial Sequence
  Description of Artificial Sequence: Synthetic oligonucleotide
aacauaacacaggaaagcc

SEQ ID NO: 1751566 - RNA, 19 nt, Artificial Sequence
  Description of Artificial Sequence: Synthetic oligonucleotide
ugucaaauuaucaauacaa

SEQ ID NO: 1751567 - RNA, 19 nt, Artificial Sequence
  Description of Artificial Sequence: Synthetic oligonucleotide
aauguuaccuuacugagau

SEQ ID NO: 1751568 - RNA, 19 nt, Artificial Sequence
  Description of Artificial Sequence: Synthetic oligonucleotide
aucucuaagacuuacuuag

SEQ ID NO: 1751569 - RNA, 19 nt, Artificial Sequence
  Description of Artificial Sequence: Synthetic oligonucleotide
uguacacugaucuauauac

SEQ ID NO: 1751570 - RNA, 19 nt, Artificial Sequence
  Description of Artificial Sequence: Synthetic oligonucleotide
agaaaauugucacucacuc

SEQ ID NO: 1751571 - RNA, 19 nt, Artificial Sequence
  Description of Artificial Sequence: Synthetic oligonucleotide
aaacauuucucucauccag

SEQ ID NO: 1751572 - RNA, 19 nt, Artificial Sequence
  Description of Artificial Sequence: Synthetic oligonucleotide
aaagcacgagaauaaauag

SEQ ID NO: 1751573 - RNA, 19 nt, Artificial Sequence
  Description of Artificial Sequence: Synthetic oligonucleotide
uuaacauaacacaggaaag

SEQ ID NO: 1751574 - RNA, 19 nt, Artificial Sequence
  Description of Artificial Sequence: Synthetic oligonucleotide
aaaauuaggcagcucacug

SEQ ID NO: 1751575 - RNA, 19 nt, Artificial Sequence
  Description of Artificial Sequence: Synthetic oligonucleotide
gucacuauaaaaccgaagc

SEQ ID NO: 1751576 - RNA, 19 nt, Artificial Sequence
  Description of Artificial Sequence: Synthetic oligonucleotide
ucaugauacacacacacac

SEQ ID NO: 1751577 - RNA, 19 nt, Artificial Sequence
  Description of Artificial Sequence: Synthetic oligonucleotide
uuuguaugcacuuuaauua

SEQ ID NO: 1751578 - RNA, 19 nt, Artificial Sequence
  Description of Artificial Sequence: Synthetic oligonucleotide
ugcacuuuaauuaaauagu

SEQ ID NO: 1751579 - RNA, 19 nt, Artificial Sequence
  Description of Artificial Sequence: Synthetic oligonucleotide
uggauaaagagcaacacaa

SEQ ID NO: 1751580 - RNA, 19 nt, Artificial Sequence
  Description of Artificial Sequence: Synthetic oligonucleotide
uuuauaucccuuuucauaa

SEQ ID NO: 1751581 - RNA, 19 nt, Artificial Sequence
  Description of Artificial Sequence: Synthetic oligonucleotide
augauacacacacacacac

SEQ ID NO: 1751582 - RNA, 19 nt, Artificial Sequence
  Description of Artificial Sequence: Synthetic oligonucleotide
ugcauggguaagaagaagg

SEQ ID NO: 1751583 - RNA, 19 nt, Artificial Sequence
  Description of Artificial Sequence: Synthetic oligonucleotide
cucacagucacuauaaaac

SEQ ID NO: 1751584 - RNA, 19 nt, Artificial Sequence
  Description of Artificial Sequence: Synthetic oligonucleotide
guuaacauaacacaggaaa

SEQ ID NO: 1751585 - RNA, 19 nt, Artificial Sequence
  Description of Artificial Sequence: Synthetic oligonucleotide
agaaauacugugucagccc

SEQ ID NO: 1751586 - RNA, 19 nt, Artificial Sequence
  Description of Artificial Sequence: Synthetic oligonucleotide
uguucuaaaugucaaauua

SEQ ID NO: 1751587 - RNA, 19 nt, Artificial Sequence
  Description of Artificial Sequence: Synthetic oligonucleotide
aaaauuaguuuuguaacug

SEQ ID NO: 1751588 - RNA, 19 nt, Artificial Sequence
  Description of Artificial Sequence: Synthetic oligonucleotide
uaagugguuaacauaacac

SEQ ID NO: 1751589 - RNA, 19 nt, Artificial Sequence
  Description of Artificial Sequence: Synthetic oligonucleotide
augacagaaagaauaaagc

SEQ ID NO: 1751590 - RNA, 19 nt, Artificial Sequence
  Description of Artificial Sequence: Synthetic oligonucleotide
uguuaccuuacugagaucc

SEQ ID NO: 1751591 - RNA, 19 nt, Artificial Sequence
  Description of Artificial Sequence: Synthetic oligonucleotide
gauacacacacacacacac

SEQ ID NO: 1751592 - RNA, 19 nt, Artificial Sequence
  Description of Artificial Sequence: Synthetic oligonucleotide
uuuaaaacacaguauugcu

SEQ ID NO: 1751593 - RNA, 19 nt, Artificial Sequence
  Description of Artificial Sequence: Synthetic oligonucleotide
aagugguuaacauaacaca

SEQ ID NO: 1751594 - RNA, 19 nt, Artificial Sequence
  Description of Artificial Sequence: Synthetic oligonucleotide
cauaacacaggaaagccag

SEQ ID NO: 1751595 - RNA, 19 nt, Artificial Sequence
  Description of Artificial Sequence: Synthetic oligonucleotide
uugaauaccucacagucac

SEQ ID NO: 1751596 - RNA, 19 nt, Artificial Sequence
  Description of Artificial Sequence: Synthetic oligonucleotide
uauucgugaacacacaauc

SEQ ID NO: 1751597 - RNA, 19 nt, Artificial Sequence
  Description of Artificial Sequence: Synthetic oligonucleotide
uuaagugguuaacauaaca

SEQ ID NO: 1751598 - RNA, 19 nt, Artificial Sequence
  Description of Artificial Sequence: Synthetic oligonucleotide
aaucuuuauacaggcacac

SEQ ID NO: 1751599 - RNA, 19 nt, Artificial Sequence
  Description of Artificial Sequence: Synthetic oligonucleotide
ucacaauugugacucaugc

SEQ ID NO: 1751600 - RNA, 19 nt, Artificial Sequence
  Description of Artificial Sequence: Synthetic oligonucleotide
ucauuauuagaaauacugu

SEQ ID NO: 1751601 - RNA, 19 nt, Artificial Sequence
  Description of Artificial Sequence: Synthetic oligonucleotide
uaggauguguucuaaaugu

SEQ ID NO: 1751602 - RNA, 19 nt, Artificial Sequence
  Description of Artificial Sequence: Synthetic oligonucleotide
gaaaauaacuguauagcug

SEQ ID NO: 1751603 - RNA, 19 nt, Artificial Sequence
  Description of Artificial Sequence: Synthetic oligonucleotide
acaauugugacucaugcaa

SEQ ID NO: 1751604 - RNA, 19 nt, Artificial Sequence
  Description of Artificial Sequence: Synthetic oligonucleotide
augaauacaaagcacgaga

SEQ ID NO: 1751605 - RNA, 19 nt, Artificial Sequence
  Description of Artificial Sequence: Synthetic oligonucleotide
cuuacugagauccugagga

SEQ ID NO: 1751606 - RNA, 19 nt, Artificial Sequence
  Description of Artificial Sequence: Synthetic oligonucleotide
cuucuauagugcaugaggc

SEQ ID NO: 1751607 - RNA, 19 nt, Artificial Sequence
  Description of Artificial Sequence: Synthetic oligonucleotide
auuuguagcugauuccacg

SEQ ID NO: 1751608 - RNA, 19 nt, Artificial Sequence
  Description of Artificial Sequence: Synthetic oligonucleotide
uguauagcugcauugaaua

SEQ ID NO: 1751609 - RNA, 19 nt, Artificial Sequence
  Description of Artificial Sequence: Synthetic oligonucleotide
ucuauauacuguuucuaug

SEQ ID NO: 1751610 - RNA, 19 nt, Artificial Sequence
  Description of Artificial Sequence: Synthetic oligonucleotide
ugguuaacauaacacagga

SEQ ID NO: 1751611 - RNA, 19 nt, Artificial Sequence
  Description of Artificial Sequence: Synthetic oligonucleotide
uacauguugaguuuuaauu

SEQ ID NO: 1751612 - RNA, 19 nt, Artificial Sequence
  Description of Artificial Sequence: Synthetic oligonucleotide
acagcuacggaggaaauac

SEQ ID NO: 1751613 - RNA, 19 nt, Artificial Sequence
  Description of Artificial Sequence: Synthetic oligonucleotide
uacacacacacacacacac

SEQ ID NO: 1751614 - RNA, 19 nt, Artificial Sequence
  Description of Artificial Sequence: Synthetic oligonucleotide
cacgagaauaaauaggaug

SEQ ID NO: 1751615 - RNA, 19 nt, Artificial Sequence
  Description of Artificial Sequence: Synthetic oligonucleotide
aauacuguccacccaugug

SEQ ID NO: 1751616 - RNA, 19 nt, Artificial Sequence
  Description of Artificial Sequence: Synthetic oligonucleotide
acugaaccuggauacauuc

SEQ ID NO: 1751617 - RNA, 19 nt, Artificial Sequence
  Description of Artificial Sequence: Synthetic oligonucleotide
aggauuuguagcugauucc

SEQ ID NO: 1751618 - RNA, 19 nt, Artificial Sequence
  Description of Artificial Sequence: Synthetic oligonucleotide
ucauauugcuuuaaaugac

SEQ ID NO: 1751619 - RNA, 19 nt, Artificial Sequence
  Description of Artificial Sequence: Synthetic oligonucleotide
auggguaagaagaagggac

SEQ ID NO: 1751620 - RNA, 19 nt, Artificial Sequence
  Description of Artificial Sequence: Synthetic oligonucleotide
uaacauaacacaggaaagc

SEQ ID NO: 1751621 - RNA, 19 nt, Artificial Sequence
  Description of Artificial Sequence: Synthetic oligonucleotide
ugucacucacuccugaagc

SEQ ID NO: 1751622 - RNA, 19 nt, Artificial Sequence
  Description of Artificial Sequence: Synthetic oligonucleotide
ucacuauaaaaccgaagca

SEQ ID NO: 1751623 - RNA, 19 nt, Artificial Sequence
  Description of Artificial Sequence: Synthetic oligonucleotide
aauucagggcaccugauua

SEQ ID NO: 1751624 - RNA, 19 nt, Artificial Sequence
  Description of Artificial Sequence: Synthetic oligonucleotide
aaauuaggcagcucacuga

SEQ ID NO: 1751625 - RNA, 19 nt, Artificial Sequence
  Description of Artificial Sequence: Synthetic oligonucleotide
ugaaccuggauacauucac

SEQ ID NO: 1751626 - RNA, 19 nt, Artificial Sequence
  Description of Artificial Sequence: Synthetic oligonucleotide
agccauuuggauaaagagc

SEQ ID NO: 1751627 - RNA, 19 nt, Artificial Sequence
  Description of Artificial Sequence: Synthetic oligonucleotide
aguuuuguaacugaaccug

SEQ ID NO: 1751628 - RNA, 19 nt, Artificial Sequence
  Description of Artificial Sequence: Synthetic oligonucleotide
cacagucacuauaaaaccg

SEQ ID NO: 1751629 - RNA, 19 nt, Artificial Sequence
  Description of Artificial Sequence: Synthetic oligonucleotide
cacuauaaaaccgaagcag

SEQ ID NO: 1751630 - RNA, 19 nt, Artificial Sequence
  Description of Artificial Sequence: Synthetic oligonucleotide
auaaaaccgaagcagaaua

SEQ ID NO: 1751631 - RNA, 19 nt, Artificial Sequence
  Description of Artificial Sequence: Synthetic oligonucleotide
acaguauugcugcuucccc

SEQ ID NO: 1751632 - RNA, 19 nt, Artificial Sequence
  Description of Artificial Sequence: Synthetic oligonucleotide
cuaaaugucaaauuaucaa

SEQ ID NO: 1751633 - RNA, 19 nt, Artificial Sequence
  Description of Artificial Sequence: Synthetic oligonucleotide
aucaacacucuuuuggugu

SEQ ID NO: 1751634 - RNA, 19 nt, Artificial Sequence
  Description of Artificial Sequence: Synthetic oligonucleotide
gaaaauugucacucacucc

SEQ ID NO: 1751635 - RNA, 19 nt, Artificial Sequence
  Description of Artificial Sequence: Synthetic oligonucleotide
agugguuaacauaacacag

SEQ ID NO: 1751636 - RNA, 19 nt, Artificial Sequence
  Description of Artificial Sequence: Synthetic oligonucleotide
aagcacgagaauaaauagg

SEQ ID NO: 1751637 - RNA, 19 nt, Artificial Sequence
  Description of Artificial Sequence: Synthetic oligonucleotide
ugaucuauauacuguuucu

SEQ ID NO: 1751638 - RNA, 19 nt, Artificial Sequence
  Description of Artificial Sequence: Synthetic oligonucleotide
gaaucuucuauagugcaug

SEQ ID NO: 1751639 - RNA, 19 nt, Artificial Sequence
  Description of Artificial Sequence: Synthetic oligonucleotide
auacuguccacccaugugu

SEQ ID NO: 1751640 - RNA, 19 nt, Artificial Sequence
  Description of Artificial Sequence: Synthetic oligonucleotide
uguucuauagugugugugu

SEQ ID NO: 1751641 - RNA, 19 nt, Artificial Sequence
  Description of Artificial Sequence: Synthetic oligonucleotide
aauugugacucaugcaaau

SEQ ID NO: 1751642 - RNA, 19 nt, Artificial Sequence
  Description of Artificial Sequence: Synthetic oligonucleotide
cagaaaauuaguuuuguaa

SEQ ID NO: 1751643 - RNA, 19 nt, Artificial Sequence
  Description of Artificial Sequence: Synthetic oligonucleotide
gaggaaauacuguccaccc

SEQ ID NO: 1751644 - RNA, 19 nt, Artificial Sequence
  Description of Artificial Sequence: Synthetic oligonucleotide
cacacacacacacacacgc

SEQ ID NO: 1751645 - RNA, 19 nt, Artificial Sequence
  Description of Artificial Sequence: Synthetic oligonucleotide
uauagugugugugugugug

SEQ ID NO: 1751646 - RNA, 19 nt, Artificial Sequence
  Description of Artificial Sequence: Synthetic oligonucleotide
ugauuaaaauucagaaaau

SEQ ID NO: 1751647 - RNA, 19 nt, Artificial Sequence
  Description of Artificial Sequence: Synthetic oligonucleotide
aaaacacuuaagugguuaa

SEQ ID NO: 1751648 - RNA, 19 nt, Artificial Sequence
  Description of Artificial Sequence: Synthetic oligonucleotide
uguuucuaugucauugccu

SEQ ID NO: 1751649 - RNA, 19 nt, Artificial Sequence
  Description of Artificial Sequence: Synthetic oligonucleotide
uacugugucagcccugugc

SEQ ID NO: 1751650 - RNA, 19 nt, Artificial Sequence
  Description of Artificial Sequence: Synthetic oligonucleotide
uguugaguuuguaugcacu

SEQ ID NO: 1751651 - RNA, 19 nt, Artificial Sequence
  Description of Artificial Sequence: Synthetic oligonucleotide
uguugaguuuuaauugaga

SEQ ID NO: 1751652 - RNA, 19 nt, Artificial Sequence
  Description of Artificial Sequence: Synthetic oligonucleotide
uuuguagcugauuccacgu

SEQ ID NO: 1751653 - RNA, 19 nt, Artificial Sequence
  Description of Artificial Sequence: Synthetic oligonucleotide
ggauuguugaguuuguaug

SEQ ID NO: 1751654 - RNA, 19 nt, Artificial Sequence
  Description of Artificial Sequence: Synthetic oligonucleotide
ucucuaagacuuacuuagg

SEQ ID NO: 1751655 - RNA, 19 nt, Artificial Sequence
  Description of Artificial Sequence: Synthetic oligonucleotide
aaauacuguccacccaugu

SEQ ID NO: 1751656 - RNA, 19 nt, Artificial Sequence
  Description of Artificial Sequence: Synthetic oligonucleotide
ucuauagugugugugugug

SEQ ID NO: 1751657 - RNA, 19 nt, Artificial Sequence
  Description of Artificial Sequence: Synthetic oligonucleotide
cucuaagacuuacuuaggc

SEQ ID NO: 1751658 - RNA, 19 nt, Artificial Sequence
  Description of Artificial Sequence: Synthetic oligonucleotide
aaaggcauacacaccaucu

SEQ ID NO: 1751659 - RNA, 19 nt, Artificial Sequence
  Description of Artificial Sequence: Synthetic oligonucleotide
uguuaggucaauucauuau

SEQ ID NO: 1751660 - RNA, 19 nt, Artificial Sequence
  Description of Artificial Sequence: Synthetic oligonucleotide
acccuuaucauauugcuuu

SEQ ID NO: 1751661 - RNA, 19 nt, Artificial Sequence
  Description of Artificial Sequence: Synthetic oligonucleotide
accauguuaggucaauuca

SEQ ID NO: 1751662 - RNA, 19 nt, Artificial Sequence
  Description of Artificial Sequence: Synthetic oligonucleotide
uaguuuuguaacugaaccu

SEQ ID NO: 1751663 - RNA, 19 nt, Artificial Sequence
  Description of Artificial Sequence: Synthetic oligonucleotide
gaaaauuaguuuuguaacu

SEQ ID NO: 1751664 - RNA, 19 nt, Artificial Sequence
  Description of Artificial Sequence: Synthetic oligonucleotide
aacaaucaacacucuuuug

SEQ ID NO: 1751665 - RNA, 19 nt, Artificial Sequence
  Description of Artificial Sequence: Synthetic oligonucleotide
uauauacuguuucuauguc

SEQ ID NO: 1751666 - RNA, 19 nt, Artificial Sequence
  Description of Artificial Sequence: Synthetic oligonucleotide
uacggaggaaauacugucc

SEQ ID NO: 1751667 - RNA, 19 nt, Artificial Sequence
  Description of Artificial Sequence: Synthetic oligonucleotide
uguguucuaaaugucaaau

SEQ ID NO: 1751668 - RNA, 19 nt, Artificial Sequence
  Description of Artificial Sequence: Synthetic oligonucleotide
aauugucacucacuccuga

SEQ ID NO: 1751669 - RNA, 19 nt, Artificial Sequence
  Description of Artificial Sequence: Synthetic oligonucleotide
uugucacucacuccugaag

SEQ ID NO: 1751670 - RNA, 19 nt, Artificial Sequence
  Description of Artificial Sequence: Synthetic oligonucleotide
uggguaagaagaagggaca

SEQ ID NO: 1751671 - RNA, 19 nt, Artificial Sequence
  Description of Artificial Sequence: Synthetic oligonucleotide
agcacgagaauaaauagga

SEQ ID NO: 1751672 - RNA, 19 nt, Artificial Sequence
  Description of Artificial Sequence: Synthetic oligonucleotide
uucgugaacacacaaucuu

SEQ ID NO: 1751673 - RNA, 19 nt, Artificial Sequence
  Description of Artificial Sequence: Synthetic oligonucleotide
aauuaucaauacaaaacuu

SEQ ID NO: 1751674 - RNA, 19 nt, Artificial Sequence
  Description of Artificial Sequence: Synthetic oligonucleotide
uauugcuuuaaaugacaga

SEQ ID NO: 1751675 - RNA, 19 nt, Artificial Sequence
  Description of Artificial Sequence: Synthetic oligonucleotide
aagaaaauugucacucacu

SEQ ID NO: 1751676 - RNA, 19 nt, Artificial Sequence
  Description of Artificial Sequence: Synthetic oligonucleotide
aaucuucuauagugcauga

SEQ ID NO: 1751677 - RNA, 19 nt, Artificial Sequence
  Description of Artificial Sequence: Synthetic oligonucleotide
aggucaauucauuauuaga

SEQ ID NO: 1751678 - RNA, 19 nt, Artificial Sequence
  Description of Artificial Sequence: Synthetic oligonucleotide
ugauuagugaccacccuua

SEQ ID NO: 1751679 - RNA, 19 nt, Artificial Sequence
  Description of Artificial Sequence: Synthetic oligonucleotide
ucuauagugcaugaggcau

SEQ ID NO: 1751680 - RNA, 19 nt, Artificial Sequence
  Description of Artificial Sequence: Synthetic oligonucleotide
uaaaaccgaagcagaauaa

SEQ ID NO: 1751681 - RNA, 19 nt, Artificial Sequence
  Description of Artificial Sequence: Synthetic oligonucleotide
cugaucuauauacuguuuc

SEQ ID NO: 1751682 - RNA, 19 nt, Artificial Sequence
  Description of Artificial Sequence: Synthetic oligonucleotide
ugaacacacaaucuuuaua

SEQ ID NO: 1751683 - RNA, 19 nt, Artificial Sequence
  Description of Artificial Sequence: Synthetic oligonucleotide
aacuguauagcugcauuga

SEQ ID NO: 1751684 - RNA, 19 nt, Artificial Sequence
  Description of Artificial Sequence: Synthetic oligonucleotide
uuauucgugaacacacaau

SEQ ID NO: 1751685 - RNA, 19 nt, Artificial Sequence
  Description of Artificial Sequence: Synthetic oligonucleotide
aaauaggauguguucuaaa

SEQ ID NO: 1751686 - RNA, 19 nt, Artificial Sequence
  Description of Artificial Sequence: Synthetic oligonucleotide
agauccugaggauuguuga

SEQ ID NO: 1751687 - RNA, 19 nt, Artificial Sequence
  Description of Artificial Sequence: Synthetic oligonucleotide
uucuauagugcaugaggca

SEQ ID NO: 1751688 - RNA, 19 nt, Artificial Sequence
  Description of Artificial Sequence: Synthetic oligonucleotide
acuauaaaaccgaagcaga

SEQ ID NO: 1751689 - RNA, 19 nt, Artificial Sequence
  Description of Artificial Sequence: Synthetic oligonucleotide
agggcaccugauuagugac

SEQ ID NO: 1751690 - RNA, 19 nt, Artificial Sequence
  Description of Artificial Sequence: Synthetic oligonucleotide
ucacuccugaagcuggcag

SEQ ID NO: 1751691 - RNA, 19 nt, Artificial Sequence
  Description of Artificial Sequence: Synthetic oligonucleotide
uaagacuuacuuaggcuau

SEQ ID NO: 1751692 - RNA, 19 nt, Artificial Sequence
  Description of Artificial Sequence: Synthetic oligonucleotide
gcaaauaccauguuagguc

SEQ ID NO: 1751693 - RNA, 19 nt, Artificial Sequence
  Description of Artificial Sequence: Synthetic oligonucleotide
aaauaucucuuccuuccuu

SEQ ID NO: 1751694 - RNA, 19 nt, Artificial Sequence
  Description of Artificial Sequence: Synthetic oligonucleotide
caaagcacgagaauaaaua

SEQ ID NO: 1751695 - RNA, 19 nt, Artificial Sequence
  Description of Artificial Sequence: Synthetic oligonucleotide
caaauaccauguuagguca

SEQ ID NO: 1751696 - RNA, 19 nt, Artificial Sequence
  Description of Artificial Sequence: Synthetic oligonucleotide
aaaacacaguauugcugcu

SEQ ID NO: 1751697 - RNA, 19 nt, Artificial Sequence
  Description of Artificial Sequence: Synthetic oligonucleotide
ugacuuuaauguuaccuua

SEQ ID NO: 1751698 - RNA, 19 nt, Artificial Sequence
  Description of Artificial Sequence: Synthetic oligonucleotide
cuaagacuuacuuaggcua

SEQ ID NO: 1751699 - RNA, 19 nt, Artificial Sequence
  Description of Artificial Sequence: Synthetic oligonucleotide
ucuaccuccaugacuuuaa

SEQ ID NO: 1751700 - RNA, 19 nt, Artificial Sequence
  Description of Artificial Sequence: Synthetic oligonucleotide
uuguucuauagugugugug

SEQ ID NO: 1751701 - RNA, 19 nt, Artificial Sequence
  Description of Artificial Sequence: Synthetic oligonucleotide
auaucucuuccuuccuuuc

SEQ ID NO: 1751702 - RNA, 19 nt, Artificial Sequence
  Description of Artificial Sequence: Synthetic oligonucleotide
cacccaugugucaugauac

SEQ ID NO: 1751703 - RNA, 19 nt, Artificial Sequence
  Description of Artificial Sequence: Synthetic oligonucleotide
uaugcacuuuaauuaaaua

SEQ ID NO: 1751704 - RNA, 19 nt, Artificial Sequence
  Description of Artificial Sequence: Synthetic oligonucleotide
ugauacacacacacacaca

SEQ ID NO: 1751705 - RNA, 19 nt, Artificial Sequence
  Description of Artificial Sequence: Synthetic oligonucleotide
guuuuguaacugaaccugg

SEQ ID NO: 1751706 - RNA, 19 nt, Artificial Sequence
  Description of Artificial Sequence: Synthetic oligonucleotide
auaucuuuaaagacaacaa

SEQ ID NO: 1751707 - RNA, 19 nt, Artificial Sequence
  Description of Artificial Sequence: Synthetic oligonucleotide
auaaauaggauguguucua

SEQ ID NO: 1751708 - RNA, 19 nt, Artificial Sequence
  Description of Artificial Sequence: Synthetic oligonucleotide
auaacuguauagcugcauu

SEQ ID NO: 1751709 - RNA, 19 nt, Artificial Sequence
  Description of Artificial Sequence: Synthetic oligonucleotide
cugaggauuguugaguuug

SEQ ID NO: 1751710 - RNA, 19 nt, Artificial Sequence
  Description of Artificial Sequence: Synthetic oligonucleotide
uaccauguuaggucaauuc

SEQ ID NO: 1751711 - RNA, 19 nt, Artificial Sequence
  Description of Artificial Sequence: Synthetic oligonucleotide
auauugcuuuaaaugacag

SEQ ID NO: 1751712 - RNA, 19 nt, Artificial Sequence
  Description of Artificial Sequence: Synthetic oligonucleotide
ccaucuuuaggauuuguag

SEQ ID NO: 1751713 - RNA, 19 nt, Artificial Sequence
  Description of Artificial Sequence: Synthetic oligonucleotide
cuauauacuguuucuaugu

SEQ ID NO: 1751714 - RNA, 19 nt, Artificial Sequence
  Description of Artificial Sequence: Synthetic oligonucleotide
uaccuuacugagauccuga

SEQ ID NO: 1751715 - RNA, 19 nt, Artificial Sequence
  Description of Artificial Sequence: Synthetic oligonucleotide
cuacggaggaaauacuguc

SEQ ID NO: 1751716 - RNA, 19 nt, Artificial Sequence
  Description of Artificial Sequence: Synthetic oligonucleotide
aauaccucacagucacuau

SEQ ID NO: 1751717 - RNA, 19 nt, Artificial Sequence
  Description of Artificial Sequence: Synthetic oligonucleotide
uaccucacagucacuauaa

SEQ ID NO: 1751718 - RNA, 19 nt, Artificial Sequence
  Description of Artificial Sequence: Synthetic oligonucleotide
accacccuuaucauauugc

SEQ ID NO: 1751719 - RNA, 19 nt, Artificial Sequence
  Description of Artificial Sequence: Synthetic oligonucleotide
auacccuuauucgugaaca

SEQ ID NO: 1751720 - RNA, 19 nt, Artificial Sequence
  Description of Artificial Sequence: Synthetic oligonucleotide
aggauuguugaguuuguau

SEQ ID NO: 1751721 - RNA, 19 nt, Artificial Sequence
  Description of Artificial Sequence: Synthetic oligonucleotide
accugauuagugaccaccc

SEQ ID NO: 1751722 - RNA, 19 nt, Artificial Sequence
  Description of Artificial Sequence: Synthetic oligonucleotide
agcccugugccuuuauauc

SEQ ID NO: 1751723 - RNA, 19 nt, Artificial Sequence
  Description of Artificial Sequence: Synthetic oligonucleotide
uugccagaaaaugaaacau

SEQ ID NO: 1751724 - RNA, 19 nt, Artificial Sequence
  Description of Artificial Sequence: Synthetic oligonucleotide
caugaauacaaagcacgag

SEQ ID NO: 1751725 - RNA, 19 nt, Artificial Sequence
  Description of Artificial Sequence: Synthetic oligonucleotide
ugugugugugugugugugg

SEQ ID NO: 1751726 - RNA, 19 nt, Artificial Sequence
  Description of Artificial Sequence: Synthetic oligonucleotide
auugagaaaauaacuguau

SEQ ID NO: 1751727 - RNA, 19 nt, Artificial Sequence
  Description of Artificial Sequence: Synthetic oligonucleotide
ucccuugccagaaaaugaa

SEQ ID NO: 1751728 - RNA, 19 nt, Artificial Sequence
  Description of Artificial Sequence: Synthetic oligonucleotide
aauaacuguauagcugcau

SEQ ID NO: 1751729 - RNA, 19 nt, Artificial Sequence
  Description of Artificial Sequence: Synthetic oligonucleotide
acggaggaaauacugucca

SEQ ID NO: 1751730 - RNA, 19 nt, Artificial Sequence
  Description of Artificial Sequence: Synthetic oligonucleotide
uuuaggauuuguagcugau

SEQ ID NO: 1751731 - RNA, 19 nt, Artificial Sequence
  Description of Artificial Sequence: Synthetic oligonucleotide
cuguuucuaugucauugcc

SEQ ID NO: 1751732 - RNA, 19 nt, Artificial Sequence
  Description of Artificial Sequence: Synthetic oligonucleotide
auagcugcauugaauaccu

SEQ ID NO: 1751733 - RNA, 19 nt, Artificial Sequence
  Description of Artificial Sequence: Synthetic oligonucleotide
gacuuuaauguuaccuuac

SEQ ID NO: 1751734 - RNA, 19 nt, Artificial Sequence
  Description of Artificial Sequence: Synthetic oligonucleotide
cacacacacacacacgcac

SEQ ID NO: 1751735 - RNA, 19 nt, Artificial Sequence
  Description of Artificial Sequence: Synthetic oligonucleotide
uucuauagugugugugugu

SEQ ID NO: 1751736 - RNA, 19 nt, Artificial Sequence
  Description of Artificial Sequence: Synthetic oligonucleotide
uuaccuuacugagauccug

SEQ ID NO: 1751737 - RNA, 19 nt, Artificial Sequence
  Description of Artificial Sequence: Synthetic oligonucleotide
ugacucaugcaaauaccau

SEQ ID NO: 1751738 - RNA, 19 nt, Artificial Sequence
  Description of Artificial Sequence: Synthetic oligonucleotide
ucuuuaggauuuguagcug

SEQ ID NO: 1751739 - RNA, 19 nt, Artificial Sequence
  Description of Artificial Sequence: Synthetic oligonucleotide
acagucacuauaaaaccga

SEQ ID NO: 1751740 - RNA, 19 nt, Artificial Sequence
  Description of Artificial Sequence: Synthetic oligonucleotide
aagggacaugcaccguguc

SEQ ID NO: 1751741 - RNA, 19 nt, Artificial Sequence
  Description of Artificial Sequence: Synthetic oligonucleotide
cacacacacacacgcaccc

SEQ ID NO: 1751742 - RNA, 19 nt, Artificial Sequence
  Description of Artificial Sequence: Synthetic oligonucleotide
agucauacccuuauucgug

SEQ ID NO: 1751743 - RNA, 19 nt, Artificial Sequence
  Description of Artificial Sequence: Synthetic oligonucleotide
ugugccuuuauaucccuuu

SEQ ID NO: 1751744 - RNA, 19 nt, Artificial Sequence
  Description of Artificial Sequence: Synthetic oligonucleotide
aguuuguaugcacuuuaau

SEQ ID NO: 1751745 - RNA, 19 nt, Artificial Sequence
  Description of Artificial Sequence: Synthetic oligonucleotide
aggcaugaauacaaagcac

SEQ ID NO: 1751746 - RNA, 19 nt, Artificial Sequence
  Description of Artificial Sequence: Synthetic oligonucleotide
ucgugaacacacaaucuuu

SEQ ID NO: 1751747 - RNA, 19 nt, Artificial Sequence
  Description of Artificial Sequence: Synthetic oligonucleotide
uccuuguucuauagugugu

SEQ ID NO: 1751748 - RNA, 19 nt, Artificial Sequence
  Description of Artificial Sequence: Synthetic oligonucleotide
gauguguucuaaaugucaa

SEQ ID NO: 1751749 - RNA, 19 nt, Artificial Sequence
  Description of Artificial Sequence: Synthetic oligonucleotide
gaaauacugugucagcccu

SEQ ID NO: 1751750 - RNA, 19 nt, Artificial Sequence
  Description of Artificial Sequence: Synthetic oligonucleotide
acacacacacacacgcacc

SEQ ID NO: 1751751 - RNA, 19 nt, Artificial Sequence
  Description of Artificial Sequence: Synthetic oligonucleotide
acaugcaccgugucuucuc

SEQ ID NO: 1751752 - RNA, 19 nt, Artificial Sequence
  Description of Artificial Sequence: Synthetic oligonucleotide
guauagcugcauugaauac

SEQ ID NO: 1751753 - RNA, 19 nt, Artificial Sequence
  Description of Artificial Sequence: Synthetic oligonucleotide
acauuucucucauccagaa

SEQ ID NO: 1751754 - RNA, 19 nt, Artificial Sequence
  Description of Artificial Sequence: Synthetic oligonucleotide
uagugugugugugugugug

SEQ ID NO: 1751755 - RNA, 19 nt, Artificial Sequence
  Description of Artificial Sequence: Synthetic oligonucleotide
aauaccauguuaggucaau

SEQ ID NO: 1751756 - RNA, 19 nt, Artificial Sequence
  Description of Artificial Sequence: Synthetic oligonucleotide
uaccuccaugacuuuaaug

SEQ ID NO: 1751757 - RNA, 19 nt, Artificial Sequence
  Description of Artificial Sequence: Synthetic oligonucleotide
cuauaaaaccgaagcagaa

SEQ ID NO: 1751758 - RNA, 19 nt, Artificial Sequence
  Description of Artificial Sequence: Synthetic oligonucleotide
caccugauuagugaccacc

SEQ ID NO: 1751759 - RNA, 19 nt, Artificial Sequence
  Description of Artificial Sequence: Synthetic oligonucleotide
gaccacccuuaucauauug

SEQ ID NO: 1751760 - RNA, 19 nt, Artificial Sequence
  Description of Artificial Sequence: Synthetic oligonucleotide
ugccuuuauaucccuuuuc

SEQ ID NO: 1751761 - RNA, 19 nt, Artificial Sequence
  Description of Artificial Sequence: Synthetic oligonucleotide
auugaauaccucacaguca

SEQ ID NO: 1751762 - RNA, 19 nt, Artificial Sequence
  Description of Artificial Sequence: Synthetic oligonucleotide
gagauccugaggauuguug

SEQ ID NO: 1751763 - RNA, 19 nt, Artificial Sequence
  Description of Artificial Sequence: Synthetic oligonucleotide
ugaggauuguugaguuugu

SEQ ID NO: 1751764 - RNA, 19 nt, Artificial Sequence
  Description of Artificial Sequence: Synthetic oligonucleotide
accuuacugagauccugag

SEQ ID NO: 1751765 - RNA, 19 nt, Artificial Sequence
  Description of Artificial Sequence: Synthetic oligonucleotide
caugauacacacacacaca

SEQ ID NO: 1751766 - RNA, 19 nt, Artificial Sequence
  Description of Artificial Sequence: Synthetic oligonucleotide
gcaugcauggguaagaaga

SEQ ID NO: 1751767 - RNA, 19 nt, Artificial Sequence
  Description of Artificial Sequence: Synthetic oligonucleotide
accccauuucucucucuac

SEQ ID NO: 1751768 - RNA, 19 nt, Artificial Sequence
  Description of Artificial Sequence: Synthetic oligonucleotide
uuucccacuccucccuccc

SEQ ID NO: 1751769 - RNA, 19 nt, Artificial Sequence
  Description of Artificial Sequence: Synthetic oligonucleotide
gaaccuggauacauucacc

SEQ ID NO: 1751770 - RNA, 19 nt, Artificial Sequence
  Description of Artificial Sequence: Synthetic oligonucleotide
acuguauagcugcauugaa

SEQ ID NO: 1751771 - RNA, 19 nt, Artificial Sequence
  Description of Artificial Sequence: Synthetic oligonucleotide
ucagggcaccugauuagug

SEQ ID NO: 1751772 - RNA, 19 nt, Artificial Sequence
  Description of Artificial Sequence: Synthetic oligonucleotide
ugucauugccuaggguagg

SEQ ID NO: 1751773 - RNA, 19 nt, Artificial Sequence
  Description of Artificial Sequence: Synthetic oligonucleotide
ggaggaaauacuguccacc

SEQ ID NO: 1751774 - RNA, 19 nt, Artificial Sequence
  Description of Artificial Sequence: Synthetic oligonucleotide
aaauugucacucacuccug

SEQ ID NO: 1751775 - RNA, 19 nt, Artificial Sequence
  Description of Artificial Sequence: Synthetic oligonucleotide
auguuaggucaauucauua

SEQ ID NO: 1751776 - RNA, 19 nt, Artificial Sequence
  Description of Artificial Sequence: Synthetic oligonucleotide
aaauaacuguauagcugca

SEQ ID NO: 1751777 - RNA, 19 nt, Artificial Sequence
  Description of Artificial Sequence: Synthetic oligonucleotide
cauacccuuauucgugaac

SEQ ID NO: 1751778 - RNA, 19 nt, Artificial Sequence
  Description of Artificial Sequence: Synthetic oligonucleotide
auguugaguuuuaauugag

SEQ ID NO: 1751779 - RNA, 19 nt, Artificial Sequence
  Description of Artificial Sequence: Synthetic oligonucleotide
agucacuauaaaaccgaag

SEQ ID NO: 1751780 - RNA, 19 nt, Artificial Sequence
  Description of Artificial Sequence: Synthetic oligonucleotide
agcaugcauggguaagaag

SEQ ID NO: 1751781 - RNA, 19 nt, Artificial Sequence
  Description of Artificial Sequence: Synthetic oligonucleotide
uaacugaaccuggauacau

SEQ ID NO: 1751782 - RNA, 19 nt, Artificial Sequence
  Description of Artificial Sequence: Synthetic oligonucleotide
caugacuuuaauguuaccu

SEQ ID NO: 1751783 - RNA, 19 nt, Artificial Sequence
  Description of Artificial Sequence: Synthetic oligonucleotide
cccuuauucgugaacacac

SEQ ID NO: 1751784 - RNA, 19 nt, Artificial Sequence
  Description of Artificial Sequence: Synthetic oligonucleotide
acacugaucuauauacugu

SEQ ID NO: 1751785 - RNA, 19 nt, Artificial Sequence
  Description of Artificial Sequence: Synthetic oligonucleotide
caugcaccgugucuucucc

SEQ ID NO: 1751786 - RNA, 19 nt, Artificial Sequence
  Description of Artificial Sequence: Synthetic oligonucleotide
gagucauacccuuauucgu

SEQ ID NO: 1751787 - RNA, 19 nt, Artificial Sequence
  Description of Artificial Sequence: Synthetic oligonucleotide
acauaacacaggaaagcca

SEQ ID NO: 1751788 - RNA, 19 nt, Artificial Sequence
  Description of Artificial Sequence: Synthetic oligonucleotide
augcaccgugucuucuccc

SEQ ID NO: 1751789 - RNA, 19 nt, Artificial Sequence
  Description of Artificial Sequence: Synthetic oligonucleotide
gugacucaugcaaauacca

SEQ ID NO: 1751790 - RNA, 19 nt, Artificial Sequence
  Description of Artificial Sequence: Synthetic oligonucleotide
auccagaaauucagggcac

SEQ ID NO: 1751791 - RNA, 19 nt, Artificial Sequence
  Description of Artificial Sequence: Synthetic oligonucleotide
uaggguaggcagcaugcau

SEQ ID NO: 1751792 - RNA, 19 nt, Artificial Sequence
  Description of Artificial Sequence: Synthetic oligonucleotide
uuugguguuccuuguucua

SEQ ID NO: 1751793 - RNA, 19 nt, Artificial Sequence
  Description of Artificial Sequence: Synthetic oligonucleotide
aaauacugugucagcccug

SEQ ID NO: 1751794 - RNA, 19 nt, Artificial Sequence
  Description of Artificial Sequence: Synthetic oligonucleotide
uuguagcugauuccacguc

SEQ ID NO: 1751795 - RNA, 19 nt, Artificial Sequence
  Description of Artificial Sequence: Synthetic oligonucleotide
auucgugaacacacaaucu

SEQ ID NO: 1751796 - RNA, 19 nt, Artificial Sequence
  Description of Artificial Sequence: Synthetic oligonucleotide
uccagaaauucagggcacc

SEQ ID NO: 1751797 - RNA, 19 nt, Artificial Sequence
  Description of Artificial Sequence: Synthetic oligonucleotide
gguguuccuuguucuauag

SEQ ID NO: 1751798 - RNA, 19 nt, Artificial Sequence
  Description of Artificial Sequence: Synthetic oligonucleotide
auguguucuaaaugucaaa

SEQ ID NO: 1751799 - RNA, 19 nt, Artificial Sequence
  Description of Artificial Sequence: Synthetic oligonucleotide
auaacacaggaaagccagg

SEQ ID NO: 1751800 - RNA, 19 nt, Artificial Sequence
  Description of Artificial Sequence: Synthetic oligonucleotide
uguguguguguguguggug

SEQ ID NO: 1751801 - RNA, 19 nt, Artificial Sequence
  Description of Artificial Sequence: Synthetic oligonucleotide
agggacaugcaccgugucu

SEQ ID NO: 1751802 - RNA, 19 nt, Artificial Sequence
  Description of Artificial Sequence: Synthetic oligonucleotide
ugugugugugugguguaca

SEQ ID NO: 1751803 - RNA, 19 nt, Artificial Sequence
  Description of Artificial Sequence: Synthetic oligonucleotide
uacccuuauucgugaacac

SEQ ID NO: 1751804 - RNA, 19 nt, Artificial Sequence
  Description of Artificial Sequence: Synthetic oligonucleotide
ugguguacacugaucuaua

SEQ ID NO: 1751805 - RNA, 19 nt, Artificial Sequence
  Description of Artificial Sequence: Synthetic oligonucleotide
acgcacgcagagucauacc

SEQ ID NO: 1751806 - RNA, 19 nt, Artificial Sequence
  Description of Artificial Sequence: Synthetic oligonucleotide
cucccuugccagaaaauga

SEQ ID NO: 1751807 - RNA, 19 nt, Artificial Sequence
  Description of Artificial Sequence: Synthetic oligonucleotide
cuggauacauucaccaucu

SEQ ID NO: 1751808 - RNA, 19 nt, Artificial Sequence
  Description of Artificial Sequence: Synthetic oligonucleotide
auagugugugugugugugu

SEQ ID NO: 1751809 - RNA, 19 nt, Artificial Sequence
  Description of Artificial Sequence: Synthetic oligonucleotide
auaaagcuggaaucuucua

SEQ ID NO: 1751810 - RNA, 19 nt, Artificial Sequence
  Description of Artificial Sequence: Synthetic oligonucleotide
uuacugagauccugaggau

SEQ ID NO: 1751811 - RNA, 19 nt, Artificial Sequence
  Description of Artificial Sequence: Synthetic oligonucleotide
ccuggauacauucaccauc

SEQ ID NO: 1751812 - RNA, 19 nt, Artificial Sequence
  Description of Artificial Sequence: Synthetic oligonucleotide
ugugugugugugugugugu

SEQ ID NO: 1751813 - RNA, 19 nt, Artificial Sequence
  Description of Artificial Sequence: Synthetic oligonucleotide
agaauaaagcuggaaucuu

SEQ ID NO: 1751814 - RNA, 19 nt, Artificial Sequence
  Description of Artificial Sequence: Synthetic oligonucleotide
ugugguguacacugaucua

SEQ ID NO: 1751815 - RNA, 19 nt, Artificial Sequence
  Description of Artificial Sequence: Synthetic oligonucleotide
cacaauugugacucaugca

SEQ ID NO: 1751816 - RNA, 19 nt, Artificial Sequence
  Description of Artificial Sequence: Synthetic oligonucleotide
cacgucugcacuuaaauuu

SEQ ID NO: 1751817 - RNA, 19 nt, Artificial Sequence
  Description of Artificial Sequence: Synthetic oligonucleotide
aaagccagguacagaguau

SEQ ID NO: 1751818 - RNA, 19 nt, Artificial Sequence
  Description of Artificial Sequence: Synthetic oligonucleotide
ugaauaccucacagucacu

SEQ ID NO: 1751819 - RNA, 19 nt, Artificial Sequence
  Description of Artificial Sequence: Synthetic oligonucleotide
augcauggguaagaagaag

SEQ ID NO: 1751820 - RNA, 19 nt, Artificial Sequence
  Description of Artificial Sequence: Synthetic oligonucleotide
uucagggcaccugauuagu

SEQ ID NO: 1751821 - RNA, 19 nt, Artificial Sequence
  Description of Artificial Sequence: Synthetic oligonucleotide
agugaccacccuuaucaua

SEQ ID NO: 1751822 - RNA, 19 nt, Artificial Sequence
  Description of Artificial Sequence: Synthetic oligonucleotide
auguuaccuuacugagauc

SEQ ID NO: 1751823 - RNA, 19 nt, Artificial Sequence
  Description of Artificial Sequence: Synthetic oligonucleotide
acacacacacacacacacg

SEQ ID NO: 1751824 - RNA, 19 nt, Artificial Sequence
  Description of Artificial Sequence: Synthetic oligonucleotide
gugugugugugugugugug

SEQ ID NO: 1751825 - RNA, 19 nt, Artificial Sequence
  Description of Artificial Sequence: Synthetic oligonucleotide
cuccaugacuuuaauguua

SEQ ID NO: 1751826 - RNA, 19 nt, Artificial Sequence
  Description of Artificial Sequence: Synthetic oligonucleotide
cacuuaaauuucuacucua

SEQ ID NO: 1751827 - RNA, 19 nt, Artificial Sequence
  Description of Artificial Sequence: Synthetic oligonucleotide
agugugugugugugugugu

SEQ ID NO: 1751828 - RNA, 19 nt, Artificial Sequence
  Description of Artificial Sequence: Synthetic oligonucleotide
caauugugacucaugcaaa

SEQ ID NO: 1751829 - RNA, 19 nt, Artificial Sequence
  Description of Artificial Sequence: Synthetic oligonucleotide
caucucuaagacuuacuua

SEQ ID NO: 1751830 - RNA, 19 nt, Artificial Sequence
  Description of Artificial Sequence: Synthetic oligonucleotide
cucacugaaugauuaaaau

SEQ ID NO: 1751831 - RNA, 19 nt, Artificial Sequence
  Description of Artificial Sequence: Synthetic oligonucleotide
aagcuggcagacagcuacg

SEQ ID NO: 1751832 - RNA, 19 nt, Artificial Sequence
  Description of Artificial Sequence: Synthetic oligonucleotide
uuaggauuuguagcugauu

SEQ ID NO: 1751833 - RNA, 19 nt, Artificial Sequence
  Description of Artificial Sequence: Synthetic oligonucleotide
agcucacugaaugauuaaa

SEQ ID NO: 1751834 - RNA, 19 nt, Artificial Sequence
  Description of Artificial Sequence: Synthetic oligonucleotide
acccuuauucgugaacaca

SEQ ID NO: 1751835 - RNA, 19 nt, Artificial Sequence
  Description of Artificial Sequence: Synthetic oligonucleotide
ucauacccuuauucgugaa

SEQ ID NO: 1751836 - RNA, 19 nt, Artificial Sequence
  Description of Artificial Sequence: Synthetic oligonucleotide
ugguguuccuuguucuaua

SEQ ID NO: 1751837 - RNA, 19 nt, Artificial Sequence
  Description of Artificial Sequence: Synthetic oligonucleotide
gugugugugugguguacac

SEQ ID NO: 1751838 - RNA, 19 nt, Artificial Sequence
  Description of Artificial Sequence: Synthetic oligonucleotide
acccaugugucaugauaca

SEQ ID NO: 1751839 - RNA, 19 nt, Artificial Sequence
  Description of Artificial Sequence: Synthetic oligonucleotide
cacgcacgcagagucauac

SEQ ID NO: 1751840 - RNA, 19 nt, Artificial Sequence
  Description of Artificial Sequence: Synthetic oligonucleotide
guucuaaaugucaaauuau

SEQ ID NO: 1751841 - RNA, 19 nt, Artificial Sequence
  Description of Artificial Sequence: Synthetic oligonucleotide
ggauacauucaccaucucu

SEQ ID NO: 1751842 - RNA, 19 nt, Artificial Sequence
  Description of Artificial Sequence: Synthetic oligonucleotide
auugugacucaugcaaaua

SEQ ID NO: 1751843 - RNA, 19 nt, Artificial Sequence
  Description of Artificial Sequence: Synthetic oligonucleotide
accuggauacauucaccau

SEQ ID NO: 1751844 - RNA, 19 nt, Artificial Sequence
  Description of Artificial Sequence: Synthetic oligonucleotide
cagggcaccugauuaguga

SEQ ID NO: 1751845 - RNA, 19 nt, Artificial Sequence
  Description of Artificial Sequence: Synthetic oligonucleotide
guguacacugaucuauaua

SEQ ID NO: 1751846 - RNA, 19 nt, Artificial Sequence
  Description of Artificial Sequence: Synthetic oligonucleotide
aacugaaccuggauacauu

SEQ ID NO: 1751847 - RNA, 19 nt, Artificial Sequence
  Description of Artificial Sequence: Synthetic oligonucleotide
aagacuuacuuaggcuauu

SEQ ID NO: 1751848 - RNA, 19 nt, Artificial Sequence
  Description of Artificial Sequence: Synthetic oligonucleotide
acuguccacccauguguca

SEQ ID NO: 1751849 - RNA, 19 nt, Artificial Sequence
  Description of Artificial Sequence: Synthetic oligonucleotide
uguguguguguguggugua

SEQ ID NO: 1751850 - RNA, 19 nt, Artificial Sequence
  Description of Artificial Sequence: Synthetic oligonucleotide
ucagcccugugccuuuaua

SEQ ID NO: 1751851 - RNA, 19 nt, Artificial Sequence
  Description of Artificial Sequence: Synthetic oligonucleotide
ccccauuucucucucuacc

SEQ ID NO: 1751852 - RNA, 19 nt, Artificial Sequence
  Description of Artificial Sequence: Synthetic oligonucleotide
ccaugugucaugauacaca

SEQ ID NO: 1751853 - RNA, 19 nt, Artificial Sequence
  Description of Artificial Sequence: Synthetic oligonucleotide
auacacacacacacacaca

SEQ ID NO: 1751854 - RNA, 19 nt, Artificial Sequence
  Description of Artificial Sequence: Synthetic oligonucleotide
caggcacacaaaggcauac

SEQ ID NO: 1751855 - RNA, 19 nt, Artificial Sequence
  Description of Artificial Sequence: Synthetic oligonucleotide
caccaucucuaagacuuac

SEQ ID NO: 1751856 - RNA, 19 nt, Artificial Sequence
  Description of Artificial Sequence: Synthetic oligonucleotide
gugaccacccuuaucauau

SEQ ID NO: 1751857 - RNA, 19 nt, Artificial Sequence
  Description of Artificial Sequence: Synthetic oligonucleotide
cagacagcuacggaggaaa

SEQ ID NO: 1751858 - RNA, 19 nt, Artificial Sequence
  Description of Artificial Sequence: Synthetic oligonucleotide
aguccauucuucaggugaa

SEQ ID NO: 1751859 - RNA, 19 nt, Artificial Sequence
  Description of Artificial Sequence: Synthetic oligonucleotide
uggauacauucaccaucuc

SEQ ID NO: 1751860 - RNA, 19 nt, Artificial Sequence
  Description of Artificial Sequence: Synthetic oligonucleotide
guaugcacuuuaauuaaau

SEQ ID NO: 1751861 - RNA, 19 nt, Artificial Sequence
  Description of Artificial Sequence: Synthetic oligonucleotide
cauguuaggucaauucauu

SEQ ID NO: 1751862 - RNA, 19 nt, Artificial Sequence
  Description of Artificial Sequence: Synthetic oligonucleotide
cuguauagcugcauugaau

SEQ ID NO: 1751863 - RNA, 19 nt, Artificial Sequence
  Description of Artificial Sequence: Synthetic oligonucleotide
cgcacgcagagucauaccc

SEQ ID NO: 1751864 - RNA, 19 nt, Artificial Sequence
  Description of Artificial Sequence: Synthetic oligonucleotide
agacuuacuuaggcuauuu

SEQ ID NO: 1751865 - RNA, 19 nt, Artificial Sequence
  Description of Artificial Sequence: Synthetic oligonucleotide
gcaugaauacaaagcacga

SEQ ID NO: 1751866 - RNA, 19 nt, Artificial Sequence
  Description of Artificial Sequence: Synthetic oligonucleotide
gcaugaggcaugaauacaa

SEQ ID NO: 1751867 - RNA, 19 nt, Artificial Sequence
  Description of Artificial Sequence: Synthetic oligonucleotide
uucccacuccucccuccca

SEQ ID NO: 1751868 - RNA, 19 nt, Artificial Sequence
  Description of Artificial Sequence: Synthetic oligonucleotide
gcacuuaaauuucuacucu

SEQ ID NO: 1751869 - RNA, 19 nt, Artificial Sequence
  Description of Artificial Sequence: Synthetic oligonucleotide
acacucuuuugguguuccu

SEQ ID NO: 1751870 - RNA, 19 nt, Artificial Sequence
  Description of Artificial Sequence: Synthetic oligonucleotide
cacugguuguucagcaaaa

SEQ ID NO: 1751871 - RNA, 19 nt, Artificial Sequence
  Description of Artificial Sequence: Synthetic oligonucleotide
accucacagucacuauaaa

SEQ ID NO: 1751872 - RNA, 19 nt, Artificial Sequence
  Description of Artificial Sequence: Synthetic oligonucleotide
gauuagugaccacccuuau

SEQ ID NO: 1751873 - RNA, 19 nt, Artificial Sequence
  Description of Artificial Sequence: Synthetic oligonucleotide
cacugaucuauauacuguu

SEQ ID NO: 1751874 - RNA, 19 nt, Artificial Sequence
  Description of Artificial Sequence: Synthetic oligonucleotide
ggcaccugauuagugacca

SEQ ID NO: 1751875 - RNA, 19 nt, Artificial Sequence
  Description of Artificial Sequence: Synthetic oligonucleotide
gugguguacacugaucuau

SEQ ID NO: 1751876 - RNA, 19 nt, Artificial Sequence
  Description of Artificial Sequence: Synthetic oligonucleotide
acacacacacacacacgca

SEQ ID NO: 1751877 - RNA, 19 nt, Artificial Sequence
  Description of Artificial Sequence: Synthetic oligonucleotide
ggcagcaugcauggguaag

SEQ ID NO: 1751878 - RNA, 19 nt, Artificial Sequence
  Description of Artificial Sequence: Synthetic oligonucleotide
ccucccuugccagaaaaug

SEQ ID NO: 1751879 - RNA, 19 nt, Artificial Sequence
  Description of Artificial Sequence: Synthetic oligonucleotide
gccuaggguaggcagcaug

SEQ ID NO: 1751880 - RNA, 19 nt, Artificial Sequence
  Description of Artificial Sequence: Synthetic oligonucleotide
auuccacgucugcacuuaa

SEQ ID NO: 1751881 - RNA, 19 nt, Artificial Sequence
  Description of Artificial Sequence: Synthetic oligonucleotide
cugauuagugaccacccuu

SEQ ID NO: 1751882 - RNA, 19 nt, Artificial Sequence
  Description of Artificial Sequence: Synthetic oligonucleotide
gcucacugaaugauuaaaa

SEQ ID NO: 1751883 - RNA, 19 nt, Artificial Sequence
  Description of Artificial Sequence: Synthetic oligonucleotide
gacagcuacggaggaaaua

SEQ ID NO: 1751884 - RNA, 19 nt, Artificial Sequence
  Description of Artificial Sequence: Synthetic oligonucleotide
guguguguguguguggugu

SEQ ID NO: 1751885 - RNA, 19 nt, Artificial Sequence
  Description of Artificial Sequence: Synthetic oligonucleotide
ccucacagucacuauaaaa

SEQ ID NO: 1751886 - RNA, 19 nt, Artificial Sequence
  Description of Artificial Sequence: Synthetic oligonucleotide
aggcacacaaaggcauaca

SEQ ID NO: 1751887 - RNA, 19 nt, Artificial Sequence
  Description of Artificial Sequence: Synthetic oligonucleotide
gaagggacaugcaccgugu

SEQ ID NO: 1751888 - RNA, 19 nt, Artificial Sequence
  Description of Artificial Sequence: Synthetic oligonucleotide
gacuuacuuaggcuauuuu

SEQ ID NO: 1751889 - RNA, 19 nt, Artificial Sequence
  Description of Artificial Sequence: Synthetic oligonucleotide
gugugugugugugguguac

SEQ ID NO: 1751890 - RNA, 19 nt, Artificial Sequence
  Description of Artificial Sequence: Synthetic oligonucleotide
gcauugaauaccucacagu

SEQ ID NO: 1751891 - RNA, 19 nt, Artificial Sequence
  Description of Artificial Sequence: Synthetic oligonucleotide
caguauugcugcuuccccu

SEQ ID NO: 1751892 - RNA, 19 nt, Artificial Sequence
  Description of Artificial Sequence: Synthetic oligonucleotide
agacaacaaucaacacucu

SEQ ID NO: 1751893 - RNA, 19 nt, Artificial Sequence
  Description of Artificial Sequence: Synthetic oligonucleotide
cuuguucuauagugugugu

SEQ ID NO: 1751894 - RNA, 19 nt, Artificial Sequence
  Description of Artificial Sequence: Synthetic oligonucleotide
acacacacacacgcaccca

SEQ ID NO: 1751895 - RNA, 19 nt, Artificial Sequence
  Description of Artificial Sequence: Synthetic oligonucleotide
gaggauuguugaguuugua

SEQ ID NO: 1751896 - RNA, 19 nt, Artificial Sequence
  Description of Artificial Sequence: Synthetic oligonucleotide
caacacucuuuugguguuc

SEQ ID NO: 1751897 - RNA, 19 nt, Artificial Sequence
  Description of Artificial Sequence: Synthetic oligonucleotide
cucuuuugguguuccuugu

SEQ ID NO: 1751898 - RNA, 19 nt, Artificial Sequence
  Description of Artificial Sequence: Synthetic oligonucleotide
cuauagugugugugugugu

SEQ ID NO: 1751899 - RNA, 19 nt, Artificial Sequence
  Description of Artificial Sequence: Synthetic oligonucleotide
gguuaacauaacacaggaa

SEQ ID NO: 1751900 - RNA, 19 nt, Artificial Sequence
  Description of Artificial Sequence: Synthetic oligonucleotide
ccagguacagaguauaauu

SEQ ID NO: 1751901 - RNA, 19 nt, Artificial Sequence
  Description of Artificial Sequence: Synthetic oligonucleotide
gaaauucagggcaccugau

SEQ ID NO: 1751902 - RNA, 19 nt, Artificial Sequence
  Description of Artificial Sequence: Synthetic oligonucleotide
cugauuccacgucugcacu

SEQ ID NO: 1751903 - RNA, 19 nt, Artificial Sequence
  Description of Artificial Sequence: Synthetic oligonucleotide
ugaccacccuuaucauauu

SEQ ID NO: 1751904 - RNA, 19 nt, Artificial Sequence
  Description of Artificial Sequence: Synthetic oligonucleotide
cuaggguaggcagcaugca

SEQ ID NO: 1751905 - RNA, 19 nt, Artificial Sequence
  Description of Artificial Sequence: Synthetic oligonucleotide
ccuuauucgugaacacaca

SEQ ID NO: 1751906 - RNA, 19 nt, Artificial Sequence
  Description of Artificial Sequence: Synthetic oligonucleotide
gcagcucacugaaugauua

SEQ ID NO: 1751907 - RNA, 19 nt, Artificial Sequence
  Description of Artificial Sequence: Synthetic oligonucleotide
guguguguguguguguggu

SEQ ID NO: 1751908 - RNA, 19 nt, Artificial Sequence
  Description of Artificial Sequence: Synthetic oligonucleotide
uccacccaugugucaugau

SEQ ID NO: 1751909 - RNA, 19 nt, Artificial Sequence
  Description of Artificial Sequence: Synthetic oligonucleotide
auuaggcagcucacugaau

SEQ ID NO: 1751910 - RNA, 19 nt, Artificial Sequence
  Description of Artificial Sequence: Synthetic oligonucleotide
guuaccuuacugagauccu

SEQ ID NO: 1751911 - RNA, 19 nt, Artificial Sequence
  Description of Artificial Sequence: Synthetic oligonucleotide
cuaugucauugccuagggu

SEQ ID NO: 1751912 - RNA, 19 nt, Artificial Sequence
  Description of Artificial Sequence: Synthetic oligonucleotide
guccacccaugugucauga

SEQ ID NO: 1751913 - RNA, 19 nt, Artificial Sequence
  Description of Artificial Sequence: Synthetic oligonucleotide
ggacaugcaccgugucuuc

SEQ ID NO: 1751914 - RNA, 19 nt, Artificial Sequence
  Description of Artificial Sequence: Synthetic oligonucleotide
gguguacacugaucuauau

SEQ ID NO: 1751915 - RNA, 19 nt, Artificial Sequence
  Description of Artificial Sequence: Synthetic oligonucleotide
gcuacggaggaaauacugu

SEQ ID NO: 1751916 - RNA, 19 nt, Artificial Sequence
  Description of Artificial Sequence: Synthetic oligonucleotide
gggcaccugauuagugacc

SEQ ID NO: 1751917 - RNA, 19 nt, Artificial Sequence
  Description of Artificial Sequence: Synthetic oligonucleotide
gacaugcaccgugucuucu

SEQ ID NO: 1751918 - RNA, 19 nt, Artificial Sequence
  Description of Artificial Sequence: Synthetic oligonucleotide
cagcaugcauggguaagaa

SEQ ID NO: 1751919 - RNA, 19 nt, Artificial Sequence
  Description of Artificial Sequence: Synthetic oligonucleotide
cacgcagagucauacccuu

SEQ ID NO: 1751920 - RNA, 19 nt, Artificial Sequence
  Description of Artificial Sequence: Synthetic oligonucleotide
cacccuuaucauauugcuu

SEQ ID NO: 1751921 - RNA, 19 nt, Artificial Sequence
  Description of Artificial Sequence: Synthetic oligonucleotide
ccacccuuaucauauugcu

SEQ ID NO: 1751922 - RNA, 19 nt, Artificial Sequence
  Description of Artificial Sequence: Synthetic oligonucleotide
ggaaucuucuauagugcau

SEQ ID NO: 1751923 - RNA, 19 nt, Artificial Sequence
  Description of Artificial Sequence: Synthetic oligonucleotide
ccacccaugugucaugaua

SEQ ID NO: 1751924 - RNA, 19 nt, Artificial Sequence
  Description of Artificial Sequence: Synthetic oligonucleotide
cagcuacggaggaaauacu

SEQ ID NO: 1751925 - RNA, 19 nt, Artificial Sequence
  Description of Artificial Sequence: Synthetic oligonucleotide
ugucagcccugugccuuua

SEQ ID NO: 1751926 - RNA, 19 nt, Artificial Sequence
  Description of Artificial Sequence: Synthetic oligonucleotide
cacucuuuugguguuccuu

SEQ ID NO: 1751927 - RNA, 19 nt, Artificial Sequence
  Description of Artificial Sequence: Synthetic oligonucleotide
gcaccugauuagugaccac

SEQ ID NO: 1751928 - RNA, 19 nt, Artificial Sequence
  Description of Artificial Sequence: Synthetic oligonucleotide
ggguaagaagaagggacau

SEQ ID NO: 1751929 - RNA, 19 nt, Artificial Sequence
  Description of Artificial Sequence: Synthetic oligonucleotide
acgcacgcacgcagaguca

SEQ ID NO: 1751930 - RNA, 19 nt, Artificial Sequence
  Description of Artificial Sequence: Synthetic oligonucleotide
cccuugccagaaaaugaaa

SEQ ID NO: 1751931 - RNA, 19 nt, Artificial Sequence
  Description of Artificial Sequence: Synthetic oligonucleotide
ggaaagccagguacagagu

SEQ ID NO: 1751932 - RNA, 19 nt, Artificial Sequence
  Description of Artificial Sequence: Synthetic oligonucleotide
ccugauuagugaccacccu

SEQ ID NO: 1751933 - RNA, 19 nt, Artificial Sequence
  Description of Artificial Sequence: Synthetic oligonucleotide
gcacgcagagucauacccu

SEQ ID NO: 1751934 - RNA, 19 nt, Artificial Sequence
  Description of Artificial Sequence: Synthetic oligonucleotide
ccuccaugacuuuaauguu

SEQ ID NO: 1751935 - RNA, 19 nt, Artificial Sequence
  Description of Artificial Sequence: Synthetic oligonucleotide
gcacgagaauaaauaggau

SEQ ID NO: 1751936 - RNA, 19 nt, Artificial Sequence
  Description of Artificial Sequence: Synthetic oligonucleotide
ccagaaauucagggcaccu

SEQ ID NO: 1751937 - RNA, 19 nt, Artificial Sequence
  Description of Artificial Sequence: Synthetic oligonucleotide
ccacgucugcacuuaaauu

SEQ ID NO: 1751938 - RNA, 19 nt, Artificial Sequence
  Description of Artificial Sequence: Synthetic oligonucleotide
gugucagcccugugccuuu

SEQ ID NO: 1751939 - RNA, 19 nt, Artificial Sequence
  Description of Artificial Sequence: Synthetic oligonucleotide
gucagcccugugccuuuau

SEQ ID NO: 1751940 - RNA, 19 nt, Artificial Sequence
  Description of Artificial Sequence: Synthetic oligonucleotide
gcacgcacgcagagucaua

SEQ ID NO: 1751941 - RNA, 19 nt, Artificial Sequence
  Description of Artificial Sequence: Synthetic oligonucleotide
cgcacgcacgcagagucau

SEQ ID NO: 1751942 - RNA, 19 nt, Artificial Sequence
  Description of Artificial Sequence: Synthetic oligonucleotide
aaaacuaaagauuagaggg

SEQ ID NO: 1751943 - RNA, 19 nt, Artificial Sequence
  Description of Artificial Sequence: Synthetic oligonucleotide
aaaaguuagauuaaaggcc

SEQ ID NO: 1751944 - RNA, 19 nt, Artificial Sequence
  Description of Artificial Sequence: Synthetic oligonucleotide
ugaaaugggaccuugaggg

SEQ ID NO: 1751945 - RNA, 19 nt, Artificial Sequence
  Description of Artificial Sequence: Synthetic oligonucleotide
aauagugugacggaagucc

SEQ ID NO: 1751946 - RNA, 19 nt, Artificial Sequence
  Description of Artificial Sequence: Synthetic oligonucleotide
guucaaaugaccuaagagg

SEQ ID NO: 1751947 - RNA, 19 nt, Artificial Sequence
  Description of Artificial Sequence: Synthetic oligonucleotide
uaaauggggaccuuggugg

SEQ ID NO: 1751948 - RNA, 19 nt, Artificial Sequence
  Description of Artificial Sequence: Synthetic oligonucleotide
aagauuagagggcauaugu

SEQ ID NO: 1751949 - RNA, 19 nt, Artificial Sequence
  Description of Artificial Sequence: Synthetic oligonucleotide
ucaaaguugacccaaggaa

SEQ ID NO: 1751950 - RNA, 19 nt, Artificial Sequence
  Description of Artificial Sequence: Synthetic oligonucleotide
uaaaggccaacgaagacag

SEQ ID NO: 1751951 - RNA, 19 nt, Artificial Sequence
  Description of Artificial Sequence: Synthetic oligonucleotide
aaggagguggaacuugccc

SEQ ID NO: 1751952 - RNA, 19 nt, Artificial Sequence
  Description of Artificial Sequence: Synthetic oligonucleotide
aguccuaggguugagaagc

SEQ ID NO: 1751953 - RNA, 19 nt, Artificial Sequence
  Description of Artificial Sequence: Synthetic oligonucleotide
aacggaggcagaaaggugc

SEQ ID NO: 1751954 - RNA, 19 nt, Artificial Sequence
  Description of Artificial Sequence: Synthetic oligonucleotide
gacgaauuggaagugaggg

SEQ ID NO: 1751955 - RNA, 19 nt, Artificial Sequence
  Description of Artificial Sequence: Synthetic oligonucleotide
aaagcugccauccuccucu

SEQ ID NO: 1751956 - RNA, 19 nt, Artificial Sequence
  Description of Artificial Sequence: Synthetic oligonucleotide
uuagauuaaaggccaacga

SEQ ID NO: 1751957 - RNA, 19 nt, Artificial Sequence
  Description of Artificial Sequence: Synthetic oligonucleotide
gauccugacuacuagauca

SEQ ID NO: 1751958 - RNA, 19 nt, Artificial Sequence
  Description of Artificial Sequence: Synthetic oligonucleotide
gaaaggcucaaaaugacag

SEQ ID NO: 1751959 - RNA, 19 nt, Artificial Sequence
  Description of Artificial Sequence: Synthetic oligonucleotide
aaaguuagauuaaaggcca

SEQ ID NO: 1751960 - RNA, 19 nt, Artificial Sequence
  Description of Artificial Sequence: Synthetic oligonucleotide
cucaaaaugacagucacug

SEQ ID NO: 1751961 - RNA, 19 nt, Artificial Sequence
  Description of Artificial Sequence: Synthetic oligonucleotide
aaggggacgaauuggaagu

SEQ ID NO: 1751962 - RNA, 19 nt, Artificial Sequence
  Description of Artificial Sequence: Synthetic oligonucleotide
gaagugaggguucaaauga

SEQ ID NO: 1751963 - RNA, 19 nt, Artificial Sequence
  Description of Artificial Sequence: Synthetic oligonucleotide
uguggauguuguuagagga

SEQ ID NO: 1751964 - RNA, 19 nt, Artificial Sequence
  Description of Artificial Sequence: Synthetic oligonucleotide
gauuagagggcauauguga

SEQ ID NO: 1751965 - RNA, 19 nt, Artificial Sequence
  Description of Artificial Sequence: Synthetic oligonucleotide
auuaaaggccaacgaagac

SEQ ID NO: 1751966 - RNA, 19 nt, Artificial Sequence
  Description of Artificial Sequence: Synthetic oligonucleotide
guuagauuaaaggccaacg

SEQ ID NO: 1751967 - RNA, 19 nt, Artificial Sequence
  Description of Artificial Sequence: Synthetic oligonucleotide
ugacuacuagaucagggcc

SEQ ID NO: 1751968 - RNA, 19 nt, Artificial Sequence
  Description of Artificial Sequence: Synthetic oligonucleotide
uagauuaaaggccaacgaa

SEQ ID NO: 1751969 - RNA, 19 nt, Artificial Sequence
  Description of Artificial Sequence: Synthetic oligonucleotide
cacguuucagauaaauggg

SEQ ID NO: 1751970 - RNA, 19 nt, Artificial Sequence
  Description of Artificial Sequence: Synthetic oligonucleotide
uuaaaggccaacgaagaca

SEQ ID NO: 1751971 - RNA, 19 nt, Artificial Sequence
  Description of Artificial Sequence: Synthetic oligonucleotide
auaaauggggaccuuggug

SEQ ID NO: 1751972 - RNA, 19 nt, Artificial Sequence
  Description of Artificial Sequence: Synthetic oligonucleotide
uuuuggagaacggaggcag

SEQ ID NO: 1751973 - RNA, 19 nt, Artificial Sequence
  Description of Artificial Sequence: Synthetic oligonucleotide
uuucagauaaauggggacc

SEQ ID NO: 1751974 - RNA, 19 nt, Artificial Sequence
  Description of Artificial Sequence: Synthetic oligonucleotide
ccacguuucagauaaaugg

SEQ ID NO: 1751975 - RNA, 19 nt, Artificial Sequence
  Description of Artificial Sequence: Synthetic oligonucleotide
uguuguuagaggaaagcaa

SEQ ID NO: 1751976 - RNA, 19 nt, Artificial Sequence
  Description of Artificial Sequence: Synthetic oligonucleotide
uuuugagcagaggugaaag

SEQ ID NO: 1751977 - RNA, 19 nt, Artificial Sequence
  Description of Artificial Sequence: Synthetic oligonucleotide
ucccaaauggacgaaagcc

SEQ ID NO: 1751978 - RNA, 19 nt, Artificial Sequence
  Description of Artificial Sequence: Synthetic oligonucleotide
aaggagauguccccaaaca

SEQ ID NO: 1751979 - RNA, 19 nt, Artificial Sequence
  Description of Artificial Sequence: Synthetic oligonucleotide
auggacgaaagccuuuugg

SEQ ID NO: 1751980 - RNA, 19 nt, Artificial Sequence
  Description of Artificial Sequence: Synthetic oligonucleotide
gguucaaaugaccuaagag

SEQ ID NO: 1751981 - RNA, 19 nt, Artificial Sequence
  Description of Artificial Sequence: Synthetic oligonucleotide
auaggugggaccugggauc

SEQ ID NO: 1751982 - RNA, 19 nt, Artificial Sequence
  Description of Artificial Sequence: Synthetic oligonucleotide
gaugucuccaggcaucacc

SEQ ID NO: 1751983 - RNA, 19 nt, Artificial Sequence
  Description of Artificial Sequence: Synthetic oligonucleotide
agugcgagcgaacuggaag

SEQ ID NO: 1751984 - RNA, 19 nt, Artificial Sequence
  Description of Artificial Sequence: Synthetic oligonucleotide
gaucaaaguugacccaagg

SEQ ID NO: 1751985 - RNA, 19 nt, Artificial Sequence
  Description of Artificial Sequence: Synthetic oligonucleotide
uuguuagaggaaagcaaag

SEQ ID NO: 1751986 - RNA, 19 nt, Artificial Sequence
  Description of Artificial Sequence: Synthetic oligonucleotide
cugacuacuagaucagggc

SEQ ID NO: 1751987 - RNA, 19 nt, Artificial Sequence
  Description of Artificial Sequence: Synthetic oligonucleotide
caggaaaggcucuucagcc

SEQ ID NO: 1751988 - RNA, 19 nt, Artificial Sequence
  Description of Artificial Sequence: Synthetic oligonucleotide
gugaaagcccaucagggag

SEQ ID NO: 1751989 - RNA, 19 nt, Artificial Sequence
  Description of Artificial Sequence: Synthetic oligonucleotide
aucaccauagccuggguga

SEQ ID NO: 1751990 - RNA, 19 nt, Artificial Sequence
  Description of Artificial Sequence: Synthetic oligonucleotide
gacggaaguccccaagugg

SEQ ID NO: 1751991 - RNA, 19 nt, Artificial Sequence
  Description of Artificial Sequence: Synthetic oligonucleotide
gauguuguuagaggaaagc

SEQ ID NO: 1751992 - RNA, 19 nt, Artificial Sequence
  Description of Artificial Sequence: Synthetic oligonucleotide
agagacagcagggagcugg

SEQ ID NO: 1751993 - RNA, 19 nt, Artificial Sequence
  Description of Artificial Sequence: Synthetic oligonucleotide
uuuccuuaguccuaggguu

SEQ ID NO: 1751994 - RNA, 19 nt, Artificial Sequence
  Description of Artificial Sequence: Synthetic oligonucleotide
aaaggcucaaaaugacagu

SEQ ID NO: 1751995 - RNA, 19 nt, Artificial Sequence
  Description of Artificial Sequence: Synthetic oligonucleotide
auuuccugccuccugcggg

SEQ ID NO: 1751996 - RNA, 19 nt, Artificial Sequence
  Description of Artificial Sequence: Synthetic oligonucleotide
ucagauguccacacuugcc

SEQ ID NO: 1751997 - RNA, 19 nt, Artificial Sequence
  Description of Artificial Sequence: Synthetic oligonucleotide
uggacgaaagccuuuugga

SEQ ID NO: 1751998 - RNA, 19 nt, Artificial Sequence
  Description of Artificial Sequence: Synthetic oligonucleotide
gaaagccuuuuggagaacg

SEQ ID NO: 1751999 - RNA, 19 nt, Artificial Sequence
  Description of Artificial Sequence: Synthetic oligonucleotide
uccauagaugucuccaggc

SEQ ID NO: 1752000 - RNA, 19 nt, Artificial Sequence
  Description of Artificial Sequence: Synthetic oligonucleotide
uaaucaugucugaggacag

SEQ ID NO: 1752001 - RNA, 19 nt, Artificial Sequence
  Description of Artificial Sequence: Synthetic oligonucleotide
uguggggaucugcacacgg

SEQ ID NO: 1752002 - RNA, 19 nt, Artificial Sequence
  Description of Artificial Sequence: Synthetic oligonucleotide
agcaaagaugcacucuguc

SEQ ID NO: 1752003 - RNA, 19 nt, Artificial Sequence
  Description of Artificial Sequence: Synthetic oligonucleotide
ucucaguacccucagccca

SEQ ID NO: 1752004 - RNA, 19 nt, Artificial Sequence
  Description of Artificial Sequence: Synthetic oligonucleotide
agcccaaaacacuggcucc

SEQ ID NO: 1752005 - RNA, 19 nt, Artificial Sequence
  Description of Artificial Sequence: Synthetic oligonucleotide
uguuagaggaaagcaaaga

SEQ ID NO: 1752006 - RNA, 19 nt, Artificial Sequence
  Description of Artificial Sequence: Synthetic oligonucleotide
accuaagaggaucaggagu

SEQ ID NO: 1752007 - RNA, 19 nt, Artificial Sequence
  Description of Artificial Sequence: Synthetic oligonucleotide
cuagaucagggccacgucc

SEQ ID NO: 1752008 - RNA, 19 nt, Artificial Sequence
  Description of Artificial Sequence: Synthetic oligonucleotide
uuaguccuaggguugagaa

SEQ ID NO: 1752009 - RNA, 19 nt, Artificial Sequence
  Description of Artificial Sequence: Synthetic oligonucleotide
ucaagauucuuuccuuagu

SEQ ID NO: 1752010 - RNA, 19 nt, Artificial Sequence
  Description of Artificial Sequence: Synthetic oligonucleotide
aguuagauuaaaggccaac

SEQ ID NO: 1752011 - RNA, 19 nt, Artificial Sequence
  Description of Artificial Sequence: Synthetic oligonucleotide
aaagauuagagggcauaug

SEQ ID NO: 1752012 - RNA, 19 nt, Artificial Sequence
  Description of Artificial Sequence: Synthetic oligonucleotide
gauuaaaggccaacgaaga

SEQ ID NO: 1752013 - RNA, 19 nt, Artificial Sequence
  Description of Artificial Sequence: Synthetic oligonucleotide
uccagauguccacauuucc

SEQ ID NO: 1752014 - RNA, 19 nt, Artificial Sequence
  Description of Artificial Sequence: Synthetic oligonucleotide
guuucagauaaauggggac

SEQ ID NO: 1752015 - RNA, 19 nt, Artificial Sequence
  Description of Artificial Sequence: Synthetic oligonucleotide
cuaaucaugucugaggaca

SEQ ID NO: 1752016 - RNA, 19 nt, Artificial Sequence
  Description of Artificial Sequence: Synthetic oligonucleotide
cauaugugaucaaaguuga

SEQ ID NO: 1752017 - RNA, 19 nt, Artificial Sequence
  Description of Artificial Sequence: Synthetic oligonucleotide
ugaucaaaguugacccaag

SEQ ID NO: 1752018 - RNA, 19 nt, Artificial Sequence
  Description of Artificial Sequence: Synthetic oligonucleotide
guuuuccugaaaugggacc

SEQ ID NO: 1752019 - RNA, 19 nt, Artificial Sequence
  Description of Artificial Sequence: Synthetic oligonucleotide
caucauccaggauggaagg

SEQ ID NO: 1752020 - RNA, 19 nt, Artificial Sequence
  Description of Artificial Sequence: Synthetic oligonucleotide
uccauugggaggagggaag

SEQ ID NO: 1752021 - RNA, 19 nt, Artificial Sequence
  Description of Artificial Sequence: Synthetic oligonucleotide
uggugggcuaaucaugucu

SEQ ID NO: 1752022 - RNA, 19 nt, Artificial Sequence
  Description of Artificial Sequence: Synthetic oligonucleotide
gugacugcagcacacgccc

SEQ ID NO: 1752023 - RNA, 19 nt, Artificial Sequence
  Description of Artificial Sequence: Synthetic oligonucleotide
agauaaauggggaccuugg

SEQ ID NO: 1752024 - RNA, 19 nt, Artificial Sequence
  Description of Artificial Sequence: Synthetic oligonucleotide
uuuugcauguguccccugu

SEQ ID NO: 1752025 - RNA, 19 nt, Artificial Sequence
  Description of Artificial Sequence: Synthetic oligonucleotide
uucagauaaauggggaccu

SEQ ID NO: 1752026 - RNA, 19 nt, Artificial Sequence
  Description of Artificial Sequence: Synthetic oligonucleotide
ugugacggaaguccccaag

SEQ ID NO: 1752027 - RNA, 19 nt, Artificial Sequence
  Description of Artificial Sequence: Synthetic oligonucleotide
uagagggcauaugugauca

SEQ ID NO: 1752028 - RNA, 19 nt, Artificial Sequence
  Description of Artificial Sequence: Synthetic oligonucleotide
aagcccaucagggagcucu

SEQ ID NO: 1752029 - RNA, 19 nt, Artificial Sequence
  Description of Artificial Sequence: Synthetic oligonucleotide
aagugaggguucaaaugac

SEQ ID NO: 1752030 - RNA, 19 nt, Artificial Sequence
  Description of Artificial Sequence: Synthetic oligonucleotide
gugcgagcgaacuggaagg

SEQ ID NO: 1752031 - RNA, 19 nt, Artificial Sequence
  Description of Artificial Sequence: Synthetic oligonucleotide
uucccaaauggacgaaagc

SEQ ID NO: 1752032 - RNA, 19 nt, Artificial Sequence
  Description of Artificial Sequence: Synthetic oligonucleotide
agaggugaaagcccaucag

SEQ ID NO: 1752033 - RNA, 19 nt, Artificial Sequence
  Description of Artificial Sequence: Synthetic oligonucleotide
uccugauccaugaucugga

SEQ ID NO: 1752034 - RNA, 19 nt, Artificial Sequence
  Description of Artificial Sequence: Synthetic oligonucleotide
auagugugacggaaguccc

SEQ ID NO: 1752035 - RNA, 19 nt, Artificial Sequence
  Description of Artificial Sequence: Synthetic oligonucleotide
uccuauguggggaucugca

SEQ ID NO: 1752036 - RNA, 19 nt, Artificial Sequence
  Description of Artificial Sequence: Synthetic oligonucleotide
ugugaucaaaguugaccca

SEQ ID NO: 1752037 - RNA, 19 nt, Artificial Sequence
  Description of Artificial Sequence: Synthetic oligonucleotide
cucaguacacucucaguac

SEQ ID NO: 1752038 - RNA, 19 nt, Artificial Sequence
  Description of Artificial Sequence: Synthetic oligonucleotide
ugacccaaggaauuagaaa

SEQ ID NO: 1752039 - RNA, 19 nt, Artificial Sequence
  Description of Artificial Sequence: Synthetic oligonucleotide
aauggacgaaagccuuuug

SEQ ID NO: 1752040 - RNA, 19 nt, Artificial Sequence
  Description of Artificial Sequence: Synthetic oligonucleotide
acuacuagaucagggccac

SEQ ID NO: 1752041 - RNA, 19 nt, Artificial Sequence
  Description of Artificial Sequence: Synthetic oligonucleotide
caacuuuugcauguguccc

SEQ ID NO: 1752042 - RNA, 19 nt, Artificial Sequence
  Description of Artificial Sequence: Synthetic oligonucleotide
acguuucagauaaaugggg

SEQ ID NO: 1752043 - RNA, 19 nt, Artificial Sequence
  Description of Artificial Sequence: Synthetic oligonucleotide
gaaggagauguccccaaac

SEQ ID NO: 1752044 - RNA, 19 nt, Artificial Sequence
  Description of Artificial Sequence: Synthetic oligonucleotide
gaaguccccaagugguggg

SEQ ID NO: 1752045 - RNA, 19 nt, Artificial Sequence
  Description of Artificial Sequence: Synthetic oligonucleotide
ugacggaaguccccaagug

SEQ ID NO: 1752046 - RNA, 19 nt, Artificial Sequence
  Description of Artificial Sequence: Synthetic oligonucleotide
cuggcaugggacaggaaag

SEQ ID NO: 1752047 - RNA, 19 nt, Artificial Sequence
  Description of Artificial Sequence: Synthetic oligonucleotide
ccuaagaggaucaggagug

SEQ ID NO: 1752048 - RNA, 19 nt, Artificial Sequence
  Description of Artificial Sequence: Synthetic oligonucleotide
guccauagaugucuccagg

SEQ ID NO: 1752049 - RNA, 19 nt, Artificial Sequence
  Description of Artificial Sequence: Synthetic oligonucleotide
aagaggaucaggagugucu

SEQ ID NO: 1752050 - RNA, 19 nt, Artificial Sequence
  Description of Artificial Sequence: Synthetic oligonucleotide
gaaaggugcggucuccuca

SEQ ID NO: 1752051 - RNA, 19 nt, Artificial Sequence
  Description of Artificial Sequence: Synthetic oligonucleotide
caaugugaauagugugacg

SEQ ID NO: 1752052 - RNA, 19 nt, Artificial Sequence
  Description of Artificial Sequence: Synthetic oligonucleotide
auguuguuagaggaaagca

SEQ ID NO: 1752053 - RNA, 19 nt, Artificial Sequence
  Description of Artificial Sequence: Synthetic oligonucleotide
gaauccuccagauguccac

SEQ ID NO: 1752054 - RNA, 19 nt, Artificial Sequence
  Description of Artificial Sequence: Synthetic oligonucleotide
aaugaccuaagaggaucag

SEQ ID NO: 1752055 - RNA, 19 nt, Artificial Sequence
  Description of Artificial Sequence: Synthetic oligonucleotide
aaaguugacccaaggaauu

SEQ ID NO: 1752056 - RNA, 19 nt, Artificial Sequence
  Description of Artificial Sequence: Synthetic oligonucleotide
guuguuagaggaaagcaaa

SEQ ID NO: 1752057 - RNA, 19 nt, Artificial Sequence
  Description of Artificial Sequence: Synthetic oligonucleotide
agcguuuuccugaaauggg

SEQ ID NO: 1752058 - RNA, 19 nt, Artificial Sequence
  Description of Artificial Sequence: Synthetic oligonucleotide
uuagagggcauaugugauc

SEQ ID NO: 1752059 - RNA, 19 nt, Artificial Sequence
  Description of Artificial Sequence: Synthetic oligonucleotide
ggguugagaagcuugagga

SEQ ID NO: 1752060 - RNA, 19 nt, Artificial Sequence
  Description of Artificial Sequence: Synthetic oligonucleotide
caggcaucaccauagccug

SEQ ID NO: 1752061 - RNA, 19 nt, Artificial Sequence
  Description of Artificial Sequence: Synthetic oligonucleotide
acuagaucagggccacguc

SEQ ID NO: 1752062 - RNA, 19 nt, Artificial Sequence
  Description of Artificial Sequence: Synthetic oligonucleotide
cacacuguggcagugcgag

SEQ ID NO: 1752063 - RNA, 19 nt, Artificial Sequence
  Description of Artificial Sequence: Synthetic oligonucleotide
cuggggaccaccaaugaca

SEQ ID NO: 1752064 - RNA, 19 nt, Artificial Sequence
  Description of Artificial Sequence: Synthetic oligonucleotide
aggguauguggguacaccu

SEQ ID NO: 1752065 - RNA, 19 nt, Artificial Sequence
  Description of Artificial Sequence: Synthetic oligonucleotide
uggucagauguccacacuu

SEQ ID NO: 1752066 - RNA, 19 nt, Artificial Sequence
  Description of Artificial Sequence: Synthetic oligonucleotide
augaccuaagaggaucagg

SEQ ID NO: 1752067 - RNA, 19 nt, Artificial Sequence
  Description of Artificial Sequence: Synthetic oligonucleotide
uggaagugaggguucaaau

SEQ ID NO: 1752068 - RNA, 19 nt, Artificial Sequence
  Description of Artificial Sequence: Synthetic oligonucleotide
agcagcguuuuccugaaau

SEQ ID NO: 1752069 - RNA, 19 nt, Artificial Sequence
  Description of Artificial Sequence: Synthetic oligonucleotide
cacuguggcagugcgagcg

SEQ ID NO: 1752070 - RNA, 19 nt, Artificial Sequence
  Description of Artificial Sequence: Synthetic oligonucleotide
agcacccauaggugggacc

SEQ ID NO: 1752071 - RNA, 19 nt, Artificial Sequence
  Description of Artificial Sequence: Synthetic oligonucleotide
ucgccagcaguccauuuca

SEQ ID NO: 1752072 - RNA, 19 nt, Artificial Sequence
  Description of Artificial Sequence: Synthetic oligonucleotide
uacuagaucagggccacgu

SEQ ID NO: 1752073 - RNA, 19 nt, Artificial Sequence
  Description of Artificial Sequence: Synthetic oligonucleotide
uaguccuaggguugagaag

SEQ ID NO: 1752074 - RNA, 19 nt, Artificial Sequence
  Description of Artificial Sequence: Synthetic oligonucleotide
aauuggaagugaggguuca

SEQ ID NO: 1752075 - RNA, 19 nt, Artificial Sequence
  Description of Artificial Sequence: Synthetic oligonucleotide
ugcucaguccucaguacac

SEQ ID NO: 1752076 - RNA, 19 nt, Artificial Sequence
  Description of Artificial Sequence: Synthetic oligonucleotide
ugagcuggccucuggaauc

SEQ ID NO: 1752077 - RNA, 19 nt, Artificial Sequence
  Description of Artificial Sequence: Synthetic oligonucleotide
uuugcggcugccacguuuc

SEQ ID NO: 1752078 - RNA, 19 nt, Artificial Sequence
  Description of Artificial Sequence: Synthetic oligonucleotide
gucagauguccacacuugc

SEQ ID NO: 1752079 - RNA, 19 nt, Artificial Sequence
  Description of Artificial Sequence: Synthetic oligonucleotide
aaguggugggcuaaucaug

SEQ ID NO: 1752080 - RNA, 19 nt, Artificial Sequence
  Description of Artificial Sequence: Synthetic oligonucleotide
guuagaggaaagcaaagau

SEQ ID NO: 1752081 - RNA, 19 nt, Artificial Sequence
  Description of Artificial Sequence: Synthetic oligonucleotide
cacgugcagagacagcagg

SEQ ID NO: 1752082 - RNA, 19 nt, Artificial Sequence
  Description of Artificial Sequence: Synthetic oligonucleotide
uggggcaacuuuugcaugu

SEQ ID NO: 1752083 - RNA, 19 nt, Artificial Sequence
  Description of Artificial Sequence: Synthetic oligonucleotide
caguacacucucaguaccc

SEQ ID NO: 1752084 - RNA, 19 nt, Artificial Sequence
  Description of Artificial Sequence: Synthetic oligonucleotide
gggcuaaucaugucugagg

SEQ ID NO: 1752085 - RNA, 19 nt, Artificial Sequence
  Description of Artificial Sequence: Synthetic oligonucleotide
uucgccagcaguccauuuc

SEQ ID NO: 1752086 - RNA, 19 nt, Artificial Sequence
  Description of Artificial Sequence: Synthetic oligonucleotide
gucugcucagccaagaguc

SEQ ID NO: 1752087 - RNA, 19 nt, Artificial Sequence
  Description of Artificial Sequence: Synthetic oligonucleotide
gugaauagugugacggaag

SEQ ID NO: 1752088 - RNA, 19 nt, Artificial Sequence
  Description of Artificial Sequence: Synthetic oligonucleotide
ugggcuaaucaugucugag

SEQ ID NO: 1752089 - RNA, 19 nt, Artificial Sequence
  Description of Artificial Sequence: Synthetic oligonucleotide
cagcccaaaacacuggcuc

SEQ ID NO: 1752090 - RNA, 19 nt, Artificial Sequence
  Description of Artificial Sequence: Synthetic oligonucleotide
cucagcccaaaacacuggc

SEQ ID NO: 1752091 - RNA, 19 nt, Artificial Sequence
  Description of Artificial Sequence: Synthetic oligonucleotide
uguggguacaccucacuuu

SEQ ID NO: 1752092 - RNA, 19 nt, Artificial Sequence
  Description of Artificial Sequence: Synthetic oligonucleotide
aagccuuuuggagaacgga

SEQ ID NO: 1752093 - RNA, 19 nt, Artificial Sequence
  Description of Artificial Sequence: Synthetic oligonucleotide
ucagcccaaaacacuggcu

SEQ ID NO: 1752094 - RNA, 19 nt, Artificial Sequence
  Description of Artificial Sequence: Synthetic oligonucleotide
aguugacccaaggaauuag

SEQ ID NO: 1752095 - RNA, 19 nt, Artificial Sequence
  Description of Artificial Sequence: Synthetic oligonucleotide
ccugacuacuagaucaggg

SEQ ID NO: 1752096 - RNA, 19 nt, Artificial Sequence
  Description of Artificial Sequence: Synthetic oligonucleotide
cauggugacugcagcacac

SEQ ID NO: 1752097 - RNA, 19 nt, Artificial Sequence
  Description of Artificial Sequence: Synthetic oligonucleotide
aagaguccuauguggggau

SEQ ID NO: 1752098 - RNA, 19 nt, Artificial Sequence
  Description of Artificial Sequence: Synthetic oligonucleotide
ugucuggggcaacuuuugc

SEQ ID NO: 1752099 - RNA, 19 nt, Artificial Sequence
  Description of Artificial Sequence: Synthetic oligonucleotide
agauuagagggcauaugug

SEQ ID NO: 1752100 - RNA, 19 nt, Artificial Sequence
  Description of Artificial Sequence: Synthetic oligonucleotide
aaauggacgaaagccuuuu

SEQ ID NO: 1752101 - RNA, 19 nt, Artificial Sequence
  Description of Artificial Sequence: Synthetic oligonucleotide
uccugcgggagccugggcu

SEQ ID NO: 1752102 - RNA, 19 nt, Artificial Sequence
  Description of Artificial Sequence: Synthetic oligonucleotide
aaggugcggucuccucagc

SEQ ID NO: 1752103 - RNA, 19 nt, Artificial Sequence
  Description of Artificial Sequence: Synthetic oligonucleotide
guccucaguacacucucag

SEQ ID NO: 1752104 - RNA, 19 nt, Artificial Sequence
  Description of Artificial Sequence: Synthetic oligonucleotide
ugaggguucaaaugaccua

SEQ ID NO: 1752105 - RNA, 19 nt, Artificial Sequence
  Description of Artificial Sequence: Synthetic oligonucleotide
agccuuuuggagaacggag

SEQ ID NO: 1752106 - RNA, 19 nt, Artificial Sequence
  Description of Artificial Sequence: Synthetic oligonucleotide
agaggaucaggagugucug

SEQ ID NO: 1752107 - RNA, 19 nt, Artificial Sequence
  Description of Artificial Sequence: Synthetic oligonucleotide
ggcuaaucaugucugagga

SEQ ID NO: 1752108 - RNA, 19 nt, Artificial Sequence
  Description of Artificial Sequence: Synthetic oligonucleotide
gacauggugacugcagcac

SEQ ID NO: 1752109 - RNA, 19 nt, Artificial Sequence
  Description of Artificial Sequence: Synthetic oligonucleotide
gacuacuagaucagggcca

SEQ ID NO: 1752110 - RNA, 19 nt, Artificial Sequence
  Description of Artificial Sequence: Synthetic oligonucleotide
cuauguggggaucugcaca

SEQ ID NO: 1752111 - RNA, 19 nt, Artificial Sequence
  Description of Artificial Sequence: Synthetic oligonucleotide
agugauguguuuuccucuu

SEQ ID NO: 1752112 - RNA, 19 nt, Artificial Sequence
  Description of Artificial Sequence: Synthetic oligonucleotide
uuuccugccuccugcggga

SEQ ID NO: 1752113 - RNA, 19 nt, Artificial Sequence
  Description of Artificial Sequence: Synthetic oligonucleotide
agguccugauccaugaucu

SEQ ID NO: 1752114 - RNA, 19 nt, Artificial Sequence
  Description of Artificial Sequence: Synthetic oligonucleotide
cauguguccccuguggaug

SEQ ID NO: 1752115 - RNA, 19 nt, Artificial Sequence
  Description of Artificial Sequence: Synthetic oligonucleotide
cagauaaauggggaccuug

SEQ ID NO: 1752116 - RNA, 19 nt, Artificial Sequence
  Description of Artificial Sequence: Synthetic oligonucleotide
ggcagugcgagcgaacugg

SEQ ID NO: 1752117 - RNA, 19 nt, Artificial Sequence
  Description of Artificial Sequence: Synthetic oligonucleotide
uccugacuacuagaucagg

SEQ ID NO: 1752118 - RNA, 19 nt, Artificial Sequence
  Description of Artificial Sequence: Synthetic oligonucleotide
gggaccaccaaugacagga

SEQ ID NO: 1752119 - RNA, 19 nt, Artificial Sequence
  Description of Artificial Sequence: Synthetic oligonucleotide
auuagagggcauaugugau

SEQ ID NO: 1752120 - RNA, 19 nt, Artificial Sequence
  Description of Artificial Sequence: Synthetic oligonucleotide
ugcgagcgaacuggaaggg

SEQ ID NO: 1752121 - RNA, 19 nt, Artificial Sequence
  Description of Artificial Sequence: Synthetic oligonucleotide
gguauguggguacaccuca

SEQ ID NO: 1752122 - RNA, 19 nt, Artificial Sequence
  Description of Artificial Sequence: Synthetic oligonucleotide
ugcggucuccucagcagug

SEQ ID NO: 1752123 - RNA, 19 nt, Artificial Sequence
  Description of Artificial Sequence: Synthetic oligonucleotide
caaaguugacccaaggaau

SEQ ID NO: 1752124 - RNA, 19 nt, Artificial Sequence
  Description of Artificial Sequence: Synthetic oligonucleotide
gauaaauggggaccuuggu

SEQ ID NO: 1752125 - RNA, 19 nt, Artificial Sequence
  Description of Artificial Sequence: Synthetic oligonucleotide
agauguccacacuugccaa

SEQ ID NO: 1752126 - RNA, 19 nt, Artificial Sequence
  Description of Artificial Sequence: Synthetic oligonucleotide
ccuuuuggagaacggaggc

SEQ ID NO: 1752127 - RNA, 19 nt, Artificial Sequence
  Description of Artificial Sequence: Synthetic oligonucleotide
ucagcagcguuuuccugaa

SEQ ID NO: 1752128 - RNA, 19 nt, Artificial Sequence
  Description of Artificial Sequence: Synthetic oligonucleotide
ucccauuguggggugagcu

SEQ ID NO: 1752129 - RNA, 19 nt, Artificial Sequence
  Description of Artificial Sequence: Synthetic oligonucleotide
ccaccaaugacaggaaggg

SEQ ID NO: 1752130 - RNA, 19 nt, Artificial Sequence
  Description of Artificial Sequence: Synthetic oligonucleotide
uagaugucuccaggcauca

SEQ ID NO: 1752131 - RNA, 19 nt, Artificial Sequence
  Description of Artificial Sequence: Synthetic oligonucleotide
acguccauagaugucucca

SEQ ID NO: 1752132 - RNA, 19 nt, Artificial Sequence
  Description of Artificial Sequence: Synthetic oligonucleotide
gaauagugugacggaaguc

SEQ ID NO: 1752133 - RNA, 19 nt, Artificial Sequence
  Description of Artificial Sequence: Synthetic oligonucleotide
aguacacucucaguacccu

SEQ ID NO: 1752134 - RNA, 19 nt, Artificial Sequence
  Description of Artificial Sequence: Synthetic oligonucleotide
accauagccugggugaccu

SEQ ID NO: 1752135 - RNA, 19 nt, Artificial Sequence
  Description of Artificial Sequence: Synthetic oligonucleotide
ggaaguccccaaguggugg

SEQ ID NO: 1752136 - RNA, 19 nt, Artificial Sequence
  Description of Artificial Sequence: Synthetic oligonucleotide
cuuuccuuaguccuagggu

SEQ ID NO: 1752137 - RNA, 19 nt, Artificial Sequence
  Description of Artificial Sequence: Synthetic oligonucleotide
acuuuugcauguguccccu

SEQ ID NO: 1752138 - RNA, 19 nt, Artificial Sequence
  Description of Artificial Sequence: Synthetic oligonucleotide
acgugcagagacagcaggg

SEQ ID NO: 1752139 - RNA, 19 nt, Artificial Sequence
  Description of Artificial Sequence: Synthetic oligonucleotide
aaguugacccaaggaauua

SEQ ID NO: 1752140 - RNA, 19 nt, Artificial Sequence
  Description of Artificial Sequence: Synthetic oligonucleotide
cauuguggggugagcuggc

SEQ ID NO: 1752141 - RNA, 19 nt, Artificial Sequence
  Description of Artificial Sequence: Synthetic oligonucleotide
ccugaaaugggaccuugag

SEQ ID NO: 1752142 - RNA, 19 nt, Artificial Sequence
  Description of Artificial Sequence: Synthetic oligonucleotide
cugggcucaucccauugug

SEQ ID NO: 1752143 - RNA, 19 nt, Artificial Sequence
  Description of Artificial Sequence: Synthetic oligonucleotide
uguggcagugcgagcgaac

SEQ ID NO: 1752144 - RNA, 19 nt, Artificial Sequence
  Description of Artificial Sequence: Synthetic oligonucleotide
gccaagaguccuauguggg

SEQ ID NO: 1752145 - RNA, 19 nt, Artificial Sequence
  Description of Artificial Sequence: Synthetic oligonucleotide
acaggguauguggguacac

SEQ ID NO: 1752146 - RNA, 19 nt, Artificial Sequence
  Description of Artificial Sequence: Synthetic oligonucleotide
gaggcagaaaggugcgguc

SEQ ID NO: 1752147 - RNA, 19 nt, Artificial Sequence
  Description of Artificial Sequence: Synthetic oligonucleotide
gaaagcaaagaugcacucu

SEQ ID NO: 1752148 - RNA, 19 nt, Artificial Sequence
  Description of Artificial Sequence: Synthetic oligonucleotide
cagcacacgcccuggcugc

SEQ ID NO: 1752149 - RNA, 19 nt, Artificial Sequence
  Description of Artificial Sequence: Synthetic oligonucleotide
aucagggagcucucgccca

SEQ ID NO: 1752150 - RNA, 19 nt, Artificial Sequence
  Description of Artificial Sequence: Synthetic oligonucleotide
uguccauugggaggaggga

SEQ ID NO: 1752151 - RNA, 19 nt, Artificial Sequence
  Description of Artificial Sequence: Synthetic oligonucleotide
gaaggagguggaacuugcc

SEQ ID NO: 1752152 - RNA, 19 nt, Artificial Sequence
  Description of Artificial Sequence: Synthetic oligonucleotide
caagaguccuaugugggga

SEQ ID NO: 1752153 - RNA, 19 nt, Artificial Sequence
  Description of Artificial Sequence: Synthetic oligonucleotide
gugaucaaaguugacccaa

SEQ ID NO: 1752154 - RNA, 19 nt, Artificial Sequence
  Description of Artificial Sequence: Synthetic oligonucleotide
ccaagaguccuaugugggg

SEQ ID NO: 1752155 - RNA, 19 nt, Artificial Sequence
  Description of Artificial Sequence: Synthetic oligonucleotide
cauugggaggagggaaggg

SEQ ID NO: 1752156 - RNA, 19 nt, Artificial Sequence
  Description of Artificial Sequence: Synthetic oligonucleotide
cagcaggucccgaagcuuc

SEQ ID NO: 1752157 - RNA, 19 nt, Artificial Sequence
  Description of Artificial Sequence: Synthetic oligonucleotide
ggccagcacccauaggugg

SEQ ID NO: 1752158 - RNA, 19 nt, Artificial Sequence
  Description of Artificial Sequence: Synthetic oligonucleotide
caggguauguggguacacc

SEQ ID NO: 1752159 - RNA, 19 nt, Artificial Sequence
  Description of Artificial Sequence: Synthetic oligonucleotide
augucugaggacagcaggu

SEQ ID NO: 1752160 - RNA, 19 nt, Artificial Sequence
  Description of Artificial Sequence: Synthetic oligonucleotide
auccugacuacuagaucag

SEQ ID NO: 1752161 - RNA, 19 nt, Artificial Sequence
  Description of Artificial Sequence: Synthetic oligonucleotide
auguguccccuguggaugu

SEQ ID NO: 1752162 - RNA, 19 nt, Artificial Sequence
  Description of Artificial Sequence: Synthetic oligonucleotide
ggugggcuaaucaugucug

SEQ ID NO: 1752163 - RNA, 19 nt, Artificial Sequence
  Description of Artificial Sequence: Synthetic oligonucleotide
cagaggugaaagcccauca

SEQ ID NO: 1752164 - RNA, 19 nt, Artificial Sequence
  Description of Artificial Sequence: Synthetic oligonucleotide
ucagggagcucucgcccac

SEQ ID NO: 1752165 - RNA, 19 nt, Artificial Sequence
  Description of Artificial Sequence: Synthetic oligonucleotide
acugcagcacacgcccugg

SEQ ID NO: 1752166 - RNA, 19 nt, Artificial Sequence
  Description of Artificial Sequence: Synthetic oligonucleotide
ccaaugugaauagugugac

SEQ ID NO: 1752167 - RNA, 19 nt, Artificial Sequence
  Description of Artificial Sequence: Synthetic oligonucleotide
uccccuguggauguuguua

SEQ ID NO: 1752168 - RNA, 19 nt, Artificial Sequence
  Description of Artificial Sequence: Synthetic oligonucleotide
ggagguggaacuugcccug

SEQ ID NO: 1752169 - RNA, 19 nt, Artificial Sequence
  Description of Artificial Sequence: Synthetic oligonucleotide
gguggucagauguccacac

SEQ ID NO: 1752170 - RNA, 19 nt, Artificial Sequence
  Description of Artificial Sequence: Synthetic oligonucleotide
cacguccauagaugucucc

SEQ ID NO: 1752171 - RNA, 19 nt, Artificial Sequence
  Description of Artificial Sequence: Synthetic oligonucleotide
ggacgaauuggaagugagg

SEQ ID NO: 1752172 - RNA, 19 nt, Artificial Sequence
  Description of Artificial Sequence: Synthetic oligonucleotide
cugaggacagcaggucccg

SEQ ID NO: 1752173 - RNA, 19 nt, Artificial Sequence
  Description of Artificial Sequence: Synthetic oligonucleotide
agggagcuggcaugggaca

SEQ ID NO: 1752174 - RNA, 19 nt, Artificial Sequence
  Description of Artificial Sequence: Synthetic oligonucleotide
cgaagacaggguauguggg

SEQ ID NO: 1752175 - RNA, 19 nt, Artificial Sequence
  Description of Artificial Sequence: Synthetic oligonucleotide
agggccacguccauagaug

SEQ ID NO: 1752176 - RNA, 19 nt, Artificial Sequence
  Description of Artificial Sequence: Synthetic oligonucleotide
acgcccuggcugcucaguc

SEQ ID NO: 1752177 - RNA, 19 nt, Artificial Sequence
  Description of Artificial Sequence: Synthetic oligonucleotide
guugacccaaggaauuaga

SEQ ID NO: 1752178 - RNA, 19 nt, Artificial Sequence
  Description of Artificial Sequence: Synthetic oligonucleotide
uggguacaccucacuuucu

SEQ ID NO: 1752179 - RNA, 19 nt, Artificial Sequence
  Description of Artificial Sequence: Synthetic oligonucleotide
ccauuguggggugagcugg

SEQ ID NO: 1752180 - RNA, 19 nt, Artificial Sequence
  Description of Artificial Sequence: Synthetic oligonucleotide
gggacgaauuggaagugag

SEQ ID NO: 1752181 - RNA, 19 nt, Artificial Sequence
  Description of Artificial Sequence: Synthetic oligonucleotide
ucacuggccagcacccaua

SEQ ID NO: 1752182 - RNA, 19 nt, Artificial Sequence
  Description of Artificial Sequence: Synthetic oligonucleotide
gccaaugugaauaguguga

SEQ ID NO: 1752183 - RNA, 19 nt, Artificial Sequence
  Description of Artificial Sequence: Synthetic oligonucleotide
acggaggcagaaaggugcg

SEQ ID NO: 1752184 - RNA, 19 nt, Artificial Sequence
  Description of Artificial Sequence: Synthetic oligonucleotide
gagggcauaugugaucaaa

SEQ ID NO: 1752185 - RNA, 19 nt, Artificial Sequence
  Description of Artificial Sequence: Synthetic oligonucleotide
guacacucucaguacccuc

SEQ ID NO: 1752186 - RNA, 19 nt, Artificial Sequence
  Description of Artificial Sequence: Synthetic oligonucleotide
ggaaaggggacgaauugga

SEQ ID NO: 1752187 - RNA, 19 nt, Artificial Sequence
  Description of Artificial Sequence: Synthetic oligonucleotide
aaguuagauuaaaggccaa

SEQ ID NO: 1752188 - RNA, 19 nt, Artificial Sequence
  Description of Artificial Sequence: Synthetic oligonucleotide
cacuggccagcacccauag

SEQ ID NO: 1752189 - RNA, 19 nt, Artificial Sequence
  Description of Artificial Sequence: Synthetic oligonucleotide
gaaaggggacgaauuggaa

SEQ ID NO: 1752190 - RNA, 19 nt, Artificial Sequence
  Description of Artificial Sequence: Synthetic oligonucleotide
cuugagggaaaggggacga

SEQ ID NO: 1752191 - RNA, 19 nt, Artificial Sequence
  Description of Artificial Sequence: Synthetic oligonucleotide
gaggacagcaggucccgaa

SEQ ID NO: 1752192 - RNA, 19 nt, Artificial Sequence
  Description of Artificial Sequence: Synthetic oligonucleotide
ucgcccacacacuguggca

SEQ ID NO: 1752193 - RNA, 19 nt, Artificial Sequence
  Description of Artificial Sequence: Synthetic oligonucleotide
gaucugcacacggcccagg

SEQ ID NO: 1752194 - RNA, 19 nt, Artificial Sequence
  Description of Artificial Sequence: Synthetic oligonucleotide
ccccaaacaugucaucacc

SEQ ID NO: 1752195 - RNA, 19 nt, Artificial Sequence
  Description of Artificial Sequence: Synthetic oligonucleotide
gcuaaucaugucugaggac

SEQ ID NO: 1752196 - RNA, 19 nt, Artificial Sequence
  Description of Artificial Sequence: Synthetic oligonucleotide
aagcugccauccuccucug

SEQ ID NO: 1752197 - RNA, 19 nt, Artificial Sequence
  Description of Artificial Sequence: Synthetic oligonucleotide
ccuguggauguuguuagag

SEQ ID NO: 1752198 - RNA, 19 nt, Artificial Sequence
  Description of Artificial Sequence: Synthetic oligonucleotide
cuuuuggagaacggaggca

SEQ ID NO: 1752199 - RNA, 19 nt, Artificial Sequence
  Description of Artificial Sequence: Synthetic oligonucleotide
caucccauuguggggugag

SEQ ID NO: 1752200 - RNA, 19 nt, Artificial Sequence
  Description of Artificial Sequence: Synthetic oligonucleotide
gguccacgugcagagacag

SEQ ID NO: 1752201 - RNA, 19 nt, Artificial Sequence
  Description of Artificial Sequence: Synthetic oligonucleotide
gacagcaggucccgaagcu

SEQ ID NO: 1752202 - RNA, 19 nt, Artificial Sequence
  Description of Artificial Sequence: Synthetic oligonucleotide
cugcucaguccucaguaca

SEQ ID NO: 1752203 - RNA, 19 nt, Artificial Sequence
  Description of Artificial Sequence: Synthetic oligonucleotide
cauagaugucuccaggcau

SEQ ID NO: 1752204 - RNA, 19 nt, Artificial Sequence
  Description of Artificial Sequence: Synthetic oligonucleotide
acuaaagauuagagggcau

SEQ ID NO: 1752205 - RNA, 19 nt, Artificial Sequence
  Description of Artificial Sequence: Synthetic oligonucleotide
ggucagauguccacacuug

SEQ ID NO: 1752206 - RNA, 19 nt, Artificial Sequence
  Description of Artificial Sequence: Synthetic oligonucleotide
gugaggguucaaaugaccu

SEQ ID NO: 1752207 - RNA, 19 nt, Artificial Sequence
  Description of Artificial Sequence: Synthetic oligonucleotide
cuuaguccuaggguugaga

SEQ ID NO: 1752208 - RNA, 19 nt, Artificial Sequence
  Description of Artificial Sequence: Synthetic oligonucleotide
caaguggugggcuaaucau

SEQ ID NO: 1752209 - RNA, 19 nt, Artificial Sequence
  Description of Artificial Sequence: Synthetic oligonucleotide
gauguguuuuccucuuguu

SEQ ID NO: 1752210 - RNA, 19 nt, Artificial Sequence
  Description of Artificial Sequence: Synthetic oligonucleotide
cuuuugcauguguccccug

SEQ ID NO: 1752211 - RNA, 19 nt, Artificial Sequence
  Description of Artificial Sequence: Synthetic oligonucleotide
ccaacgaagacaggguaug

SEQ ID NO: 1752212 - RNA, 19 nt, Artificial Sequence
  Description of Artificial Sequence: Synthetic oligonucleotide
aagaugcacucuguccauu

SEQ ID NO: 1752213 - RNA, 19 nt, Artificial Sequence
  Description of Artificial Sequence: Synthetic oligonucleotide
cguuuuccugaaaugggac

SEQ ID NO: 1752214 - RNA, 19 nt, Artificial Sequence
  Description of Artificial Sequence: Synthetic oligonucleotide
ggguucaaaugaccuaaga

SEQ ID NO: 1752215 - RNA, 19 nt, Artificial Sequence
  Description of Artificial Sequence: Synthetic oligonucleotide
ggauccugacuacuagauc

SEQ ID NO: 1752216 - RNA, 19 nt, Artificial Sequence
  Description of Artificial Sequence: Synthetic oligonucleotide
cacucucaguacccucagc

SEQ ID NO: 1752217 - RNA, 19 nt, Artificial Sequence
  Description of Artificial Sequence: Synthetic oligonucleotide
aggggacgaauuggaagug

SEQ ID NO: 1752218 - RNA, 19 nt, Artificial Sequence
  Description of Artificial Sequence: Synthetic oligonucleotide
gagguggaacuugcccugc

SEQ ID NO: 1752219 - RNA, 19 nt, Artificial Sequence
  Description of Artificial Sequence: Synthetic oligonucleotide
uuuccugaaaugggaccuu

SEQ ID NO: 1752220 - RNA, 19 nt, Artificial Sequence
  Description of Artificial Sequence: Synthetic oligonucleotide
aggagugucuggggcaacu

SEQ ID NO: 1752221 - RNA, 19 nt, Artificial Sequence
  Description of Artificial Sequence: Synthetic oligonucleotide
guggggaucugcacacggc

SEQ ID NO: 1752222 - RNA, 19 nt, Artificial Sequence
  Description of Artificial Sequence: Synthetic oligonucleotide
ccuugagggaaaggggacg

SEQ ID NO: 1752223 - RNA, 19 nt, Artificial Sequence
  Description of Artificial Sequence: Synthetic oligonucleotide
guccuauguggggaucugc

SEQ ID NO: 1752224 - RNA, 19 nt, Artificial Sequence
  Description of Artificial Sequence: Synthetic oligonucleotide
ccuauguggggaucugcac

SEQ ID NO: 1752225 - RNA, 19 nt, Artificial Sequence
  Description of Artificial Sequence: Synthetic oligonucleotide
ucagauaaauggggaccuu

SEQ ID NO: 1752226 - RNA, 19 nt, Artificial Sequence
  Description of Artificial Sequence: Synthetic oligonucleotide
guauguggguacaccucac

SEQ ID NO: 1752227 - RNA, 19 nt, Artificial Sequence
  Description of Artificial Sequence: Synthetic oligonucleotide
gugacggaaguccccaagu

SEQ ID NO: 1752228 - RNA, 19 nt, Artificial Sequence
  Description of Artificial Sequence: Synthetic oligonucleotide
cucaguacccucagcccaa

SEQ ID NO: 1752229 - RNA, 19 nt, Artificial Sequence
  Description of Artificial Sequence: Synthetic oligonucleotide
aaagcccaucagggagcuc

SEQ ID NO: 1752230 - RNA, 19 nt, Artificial Sequence
  Description of Artificial Sequence: Synthetic oligonucleotide
aggccaacgaagacagggu

SEQ ID NO: 1752231 - RNA, 19 nt, Artificial Sequence
  Description of Artificial Sequence: Synthetic oligonucleotide
auguggggaucugcacacg

SEQ ID NO: 1752232 - RNA, 19 nt, Artificial Sequence
  Description of Artificial Sequence: Synthetic oligonucleotide
gugggcuaaucaugucuga

SEQ ID NO: 1752233 - RNA, 19 nt, Artificial Sequence
  Description of Artificial Sequence: Synthetic oligonucleotide
guccauugggaggagggaa

SEQ ID NO: 1752234 - RNA, 19 nt, Artificial Sequence
  Description of Artificial Sequence: Synthetic oligonucleotide
ucaucccauugugggguga

SEQ ID NO: 1752235 - RNA, 19 nt, Artificial Sequence
  Description of Artificial Sequence: Synthetic oligonucleotide
cccaaacaugucaucacca

SEQ ID NO: 1752236 - RNA, 19 nt, Artificial Sequence
  Description of Artificial Sequence: Synthetic oligonucleotide
uuucgccagcaguccauuu

SEQ ID NO: 1752237 - RNA, 19 nt, Artificial Sequence
  Description of Artificial Sequence: Synthetic oligonucleotide
ggaagggaagaaaggcuca

SEQ ID NO: 1752238 - RNA, 19 nt, Artificial Sequence
  Description of Artificial Sequence: Synthetic oligonucleotide
agaucagggccacguccau

SEQ ID NO: 1752239 - RNA, 19 nt, Artificial Sequence
  Description of Artificial Sequence: Synthetic oligonucleotide
ccaaguggugggcuaauca

SEQ ID NO: 1752240 - RNA, 19 nt, Artificial Sequence
  Description of Artificial Sequence: Synthetic oligonucleotide
gcugcucaguccucaguac

SEQ ID NO: 1752241 - RNA, 19 nt, Artificial Sequence
  Description of Artificial Sequence: Synthetic oligonucleotide
ccugauccaugaucuggag

SEQ ID NO: 1752242 - RNA, 19 nt, Artificial Sequence
  Description of Artificial Sequence: Synthetic oligonucleotide
ggcagaaaggugcggucuc

SEQ ID NO: 1752243 - RNA, 19 nt, Artificial Sequence
  Description of Artificial Sequence: Synthetic oligonucleotide
uugagggaaaggggacgaa

SEQ ID NO: 1752244 - RNA, 19 nt, Artificial Sequence
  Description of Artificial Sequence: Synthetic oligonucleotide
gguccugauccaugaucug

SEQ ID NO: 1752245 - RNA, 19 nt, Artificial Sequence
  Description of Artificial Sequence: Synthetic oligonucleotide
cuacuagaucagggccacg

SEQ ID NO: 1752246 - RNA, 19 nt, Artificial Sequence
  Description of Artificial Sequence: Synthetic oligonucleotide
ccuccacugcuguuccugg

SEQ ID NO: 1752247 - RNA, 19 nt, Artificial Sequence
  Description of Artificial Sequence: Synthetic oligonucleotide
gcguuuuccugaaauggga

SEQ ID NO: 1752248 - RNA, 19 nt, Artificial Sequence
  Description of Artificial Sequence: Synthetic oligonucleotide
gagggaaaggggacgaauu

SEQ ID NO: 1752249 - RNA, 19 nt, Artificial Sequence
  Description of Artificial Sequence: Synthetic oligonucleotide
uugcggcugccacguuuca

SEQ ID NO: 1752250 - RNA, 19 nt, Artificial Sequence
  Description of Artificial Sequence: Synthetic oligonucleotide
augaucuggaggacaucau

SEQ ID NO: 1752251 - RNA, 19 nt, Artificial Sequence
  Description of Artificial Sequence: Synthetic oligonucleotide
auuggaagugaggguucaa

SEQ ID NO: 1752252 - RNA, 19 nt, Artificial Sequence
  Description of Artificial Sequence: Synthetic oligonucleotide
ugaggacagcaggucccga

SEQ ID NO: 1752253 - RNA, 19 nt, Artificial Sequence
  Description of Artificial Sequence: Synthetic oligonucleotide
cugcagcacacgcccuggc

SEQ ID NO: 1752254 - RNA, 19 nt, Artificial Sequence
  Description of Artificial Sequence: Synthetic oligonucleotide
cguccauagaugucuccag

SEQ ID NO: 1752255 - RNA, 19 nt, Artificial Sequence
  Description of Artificial Sequence: Synthetic oligonucleotide
ccuggggaccaccaaugac

SEQ ID NO: 1752256 - RNA, 19 nt, Artificial Sequence
  Description of Artificial Sequence: Synthetic oligonucleotide
guggugggcuaaucauguc

SEQ ID NO: 1752257 - RNA, 19 nt, Artificial Sequence
  Description of Artificial Sequence: Synthetic oligonucleotide
ccgaagcuucucuuucuug

SEQ ID NO: 1752258 - RNA, 19 nt, Artificial Sequence
  Description of Artificial Sequence: Synthetic oligonucleotide
gcagaaaggugcggucucc

SEQ ID NO: 1752259 - RNA, 19 nt, Artificial Sequence
  Description of Artificial Sequence: Synthetic oligonucleotide
ggugagcuggccucuggaa

SEQ ID NO: 1752260 - RNA, 19 nt, Artificial Sequence
  Description of Artificial Sequence: Synthetic oligonucleotide
agguccacgugcagagaca

SEQ ID NO: 1752261 - RNA, 19 nt, Artificial Sequence
  Description of Artificial Sequence: Synthetic oligonucleotide
uccuaggguugagaagcuu

SEQ ID NO: 1752262 - RNA, 19 nt, Artificial Sequence
  Description of Artificial Sequence: Synthetic oligonucleotide
ggguauguggguacaccuc

SEQ ID NO: 1752263 - RNA, 19 nt, Artificial Sequence
  Description of Artificial Sequence: Synthetic oligonucleotide
caaauggacgaaagccuuu

SEQ ID NO: 1752264 - RNA, 19 nt, Artificial Sequence
  Description of Artificial Sequence: Synthetic oligonucleotide
ggccaacgaagacagggua

SEQ ID NO: 1752265 - RNA, 19 nt, Artificial Sequence
  Description of Artificial Sequence: Synthetic oligonucleotide
caccaaugacaggaaggga

SEQ ID NO: 1752266 - RNA, 19 nt, Artificial Sequence
  Description of Artificial Sequence: Synthetic oligonucleotide
ccacgugcagagacagcag

SEQ ID NO: 1752267 - RNA, 19 nt, Artificial Sequence
  Description of Artificial Sequence: Synthetic oligonucleotide
ggggaccaccaaugacagg

SEQ ID NO: 1752268 - RNA, 19 nt, Artificial Sequence
  Description of Artificial Sequence: Synthetic oligonucleotide
gcagaggugaaagcccauc

SEQ ID NO: 1752269 - RNA, 19 nt, Artificial Sequence
  Description of Artificial Sequence: Synthetic oligonucleotide
acacacuguggcagugcga

SEQ ID NO: 1752270 - RNA, 19 nt, Artificial Sequence
  Description of Artificial Sequence: Synthetic oligonucleotide
gaucagggccacguccaua

SEQ ID NO: 1752271 - RNA, 19 nt, Artificial Sequence
  Description of Artificial Sequence: Synthetic oligonucleotide
ggugaccugucugcucagc

SEQ ID NO: 1752272 - RNA, 19 nt, Artificial Sequence
  Description of Artificial Sequence: Synthetic oligonucleotide
ggggcaacuuuugcaugug

SEQ ID NO: 1752273 - RNA, 19 nt, Artificial Sequence
  Description of Artificial Sequence: Synthetic oligonucleotide
gugcggucuccucagcagu

SEQ ID NO: 1752274 - RNA, 19 nt, Artificial Sequence
  Description of Artificial Sequence: Synthetic oligonucleotide
gucacuggccagcacccau

SEQ ID NO: 1752275 - RNA, 19 nt, Artificial Sequence
  Description of Artificial Sequence: Synthetic oligonucleotide
ggaggcagaaaggugcggu

SEQ ID NO: 1752276 - RNA, 19 nt, Artificial Sequence
  Description of Artificial Sequence: Synthetic oligonucleotide
guggucagauguccacacu

SEQ ID NO: 1752277 - RNA, 19 nt, Artificial Sequence
  Description of Artificial Sequence: Synthetic oligonucleotide
gcccaaaacacuggcucca

SEQ ID NO: 1752278 - RNA, 19 nt, Artificial Sequence
  Description of Artificial Sequence: Synthetic oligonucleotide
cuuugcggcugccacguuu

SEQ ID NO: 1752279 - RNA, 19 nt, Artificial Sequence
  Description of Artificial Sequence: Synthetic oligonucleotide
cgagcgaacuggaagggaa

SEQ ID NO: 1752280 - RNA, 19 nt, Artificial Sequence
  Description of Artificial Sequence: Synthetic oligonucleotide
ggggacgaauuggaaguga

SEQ ID NO: 1752281 - RNA, 19 nt, Artificial Sequence
  Description of Artificial Sequence: Synthetic oligonucleotide
gggugaccugucugcucag

SEQ ID NO: 1752282 - RNA, 19 nt, Artificial Sequence
  Description of Artificial Sequence: Synthetic oligonucleotide
gggccacguccauagaugu

SEQ ID NO: 1752283 - RNA, 19 nt, Artificial Sequence
  Description of Artificial Sequence: Synthetic oligonucleotide
cagcacccauaggugggac

SEQ ID NO: 1752284 - RNA, 19 nt, Artificial Sequence
  Description of Artificial Sequence: Synthetic oligonucleotide
gggacaggaaaggcucuuc

SEQ ID NO: 1752285 - RNA, 19 nt, Artificial Sequence
  Description of Artificial Sequence: Synthetic oligonucleotide
gggauccugacuacuagau

SEQ ID NO: 1752286 - RNA, 19 nt, Artificial Sequence
  Description of Artificial Sequence: Synthetic oligonucleotide
cacggcccagguccugauc

SEQ ID NO: 1752287 - RNA, 19 nt, Artificial Sequence
  Description of Artificial Sequence: Synthetic oligonucleotide
ccaaauggacgaaagccuu

SEQ ID NO: 1752288 - RNA, 19 nt, Artificial Sequence
  Description of Artificial Sequence: Synthetic oligonucleotide
gcacccauaggugggaccu

SEQ ID NO: 1752289 - RNA, 19 nt, Artificial Sequence
  Description of Artificial Sequence: Synthetic oligonucleotide
cacccauaggugggaccug

SEQ ID NO: 1752290 - RNA, 19 nt, Artificial Sequence
  Description of Artificial Sequence: Synthetic oligonucleotide
ugcgggagccugggcugug

SEQ ID NO: 1752291 - RNA, 19 nt, Artificial Sequence
  Description of Artificial Sequence: Synthetic oligonucleotide
ccacguccauagaugucuc

SEQ ID NO: 1752292 - RNA, 19 nt, Artificial Sequence
  Description of Artificial Sequence: Synthetic oligonucleotide
cagugcgagcgaacuggaa

SEQ ID NO: 1752293 - RNA, 19 nt, Artificial Sequence
  Description of Artificial Sequence: Synthetic oligonucleotide
cggaaguccccaaguggug

SEQ ID NO: 1752294 - RNA, 19 nt, Artificial Sequence
  Description of Artificial Sequence: Synthetic oligonucleotide
gcauguguccccuguggau

SEQ ID NO: 1752295 - RNA, 19 nt, Artificial Sequence
  Description of Artificial Sequence: Synthetic oligonucleotide
ccuccagauguccacauuu

SEQ ID NO: 1752296 - RNA, 19 nt, Artificial Sequence
  Description of Artificial Sequence: Synthetic oligonucleotide
ggguacaccucacuuucuu

SEQ ID NO: 1752297 - RNA, 19 nt, Artificial Sequence
  Description of Artificial Sequence: Synthetic oligonucleotide
caggagugucuggggcaac

SEQ ID NO: 1752298 - RNA, 19 nt, Artificial Sequence
  Description of Artificial Sequence: Synthetic oligonucleotide
gggcaacuuuugcaugugu

SEQ ID NO: 1752299 - RNA, 19 nt, Artificial Sequence
  Description of Artificial Sequence: Synthetic oligonucleotide
caguccauuucagcagcgu

SEQ ID NO: 1752300 - RNA, 19 nt, Artificial Sequence
  Description of Artificial Sequence: Synthetic oligonucleotide
cuguggcagugcgagcgaa

SEQ ID NO: 1752301 - RNA, 19 nt, Artificial Sequence
  Description of Artificial Sequence: Synthetic oligonucleotide
gcagugcgagcgaacugga

SEQ ID NO: 1752302 - RNA, 19 nt, Artificial Sequence
  Description of Artificial Sequence: Synthetic oligonucleotide
gccaacgaagacaggguau

SEQ ID NO: 1752303 - RNA, 19 nt, Artificial Sequence
  Description of Artificial Sequence: Synthetic oligonucleotide
gcgagcgaacuggaaggga

SEQ ID NO: 1752304 - RNA, 19 nt, Artificial Sequence
  Description of Artificial Sequence: Synthetic oligonucleotide
caguacccucagcccaaaa

SEQ ID NO: 1752305 - RNA, 19 nt, Artificial Sequence
  Description of Artificial Sequence: Synthetic oligonucleotide
guccuaggguugagaagcu

SEQ ID NO: 1752306 - RNA, 19 nt, Artificial Sequence
  Description of Artificial Sequence: Synthetic oligonucleotide
ggccacguccauagauguc

SEQ ID NO: 1752307 - RNA, 19 nt, Artificial Sequence
  Description of Artificial Sequence: Synthetic oligonucleotide
ggcugccacguuucagaua

SEQ ID NO: 1752308 - RNA, 19 nt, Artificial Sequence
  Description of Artificial Sequence: Synthetic oligonucleotide
gccccagguccacgugcag

SEQ ID NO: 1752309 - RNA, 19 nt, Artificial Sequence
  Description of Artificial Sequence: Synthetic oligonucleotide
cccuguggauguuguuaga

SEQ ID NO: 1752310 - RNA, 19 nt, Artificial Sequence
  Description of Artificial Sequence: Synthetic oligonucleotide
ccauagccugggugaccug

SEQ ID NO: 1752311 - RNA, 19 nt, Artificial Sequence
  Description of Artificial Sequence: Synthetic oligonucleotide
cagggagcucucgcccaca

SEQ ID NO: 1752312 - RNA, 19 nt, Artificial Sequence
  Description of Artificial Sequence: Synthetic oligonucleotide
cacugccaaugugaauagu

SEQ ID NO: 1752313 - RNA, 19 nt, Artificial Sequence
  Description of Artificial Sequence: Synthetic oligonucleotide
ggaggacaucauccaggau

SEQ ID NO: 1752314 - RNA, 19 nt, Artificial Sequence
  Description of Artificial Sequence: Synthetic oligonucleotide
cagcagcguuuuccugaaa

SEQ ID NO: 1752315 - RNA, 19 nt, Artificial Sequence
  Description of Artificial Sequence: Synthetic oligonucleotide
cgaaagccuuuuggagaac

SEQ ID NO: 1752316 - RNA, 19 nt, Artificial Sequence
  Description of Artificial Sequence: Synthetic oligonucleotide
guccccuguggauguuguu

SEQ ID NO: 1752317 - RNA, 19 nt, Artificial Sequence
  Description of Artificial Sequence: Synthetic oligonucleotide
cacgcccuggcugcucagu

SEQ ID NO: 1752318 - RNA, 19 nt, Artificial Sequence
  Description of Artificial Sequence: Synthetic oligonucleotide
gcucucgcccacacacugu

SEQ ID NO: 1752319 - RNA, 19 nt, Artificial Sequence
  Description of Artificial Sequence: Synthetic oligonucleotide
cugcgggagccugggcugu

SEQ ID NO: 1752320 - RNA, 19 nt, Artificial Sequence
  Description of Artificial Sequence: Synthetic oligonucleotide
ccuuugcggcugccacguu

SEQ ID NO: 1752321 - RNA, 19 nt, Artificial Sequence
  Description of Artificial Sequence: Synthetic oligonucleotide
aauaauaagagauucauag

SEQ ID NO: 1752322 - RNA, 19 nt, Artificial Sequence
  Description of Artificial Sequence: Synthetic oligonucleotide
aauaauuccguccaaacuc

SEQ ID NO: 1752323 - RNA, 19 nt, Artificial Sequence
  Description of Artificial Sequence: Synthetic oligonucleotide
aaaucaauaacuucaacuc

SEQ ID NO: 1752324 - RNA, 19 nt, Artificial Sequence
  Description of Artificial Sequence: Synthetic oligonucleotide
uaauaagagauucauaggg

SEQ ID NO: 1752325 - RNA, 19 nt, Artificial Sequence
  Description of Artificial Sequence: Synthetic oligonucleotide
aaaauaguccuccuguggg

SEQ ID NO: 1752326 - RNA, 19 nt, Artificial Sequence
  Description of Artificial Sequence: Synthetic oligonucleotide
uguaauguugauuggacgg

SEQ ID NO: 1752327 - RNA, 19 nt, Artificial Sequence
  Description of Artificial Sequence: Synthetic oligonucleotide
aagagauucauagggagcc

SEQ ID NO: 1752328 - RNA, 19 nt, Artificial Sequence
  Description of Artificial Sequence: Synthetic oligonucleotide
uucaucuguagauaaaggg

SEQ ID NO: 1752329 - RNA, 19 nt, Artificial Sequence
  Description of Artificial Sequence: Synthetic oligonucleotide
acuuguaugguauaaucac

SEQ ID NO: 1752330 - RNA, 19 nt, Artificial Sequence
  Description of Artificial Sequence: Synthetic oligonucleotide
aauaacaucugaccgccgg

SEQ ID NO: 1752331 - RNA, 19 nt, Artificial Sequence
  Description of Artificial Sequence: Synthetic oligonucleotide
ucuagugaagugaugacag

SEQ ID NO: 1752332 - RNA, 19 nt, Artificial Sequence
  Description of Artificial Sequence: Synthetic oligonucleotide
aggaaauaacaucugaccg

SEQ ID NO: 1752333 - RNA, 19 nt, Artificial Sequence
  Description of Artificial Sequence: Synthetic oligonucleotide
acaaggaauaauuccgucc

SEQ ID NO: 1752334 - RNA, 19 nt, Artificial Sequence
  Description of Artificial Sequence: Synthetic oligonucleotide
uccuucuuagguuucaucg

SEQ ID NO: 1752335 - RNA, 19 nt, Artificial Sequence
  Description of Artificial Sequence: Synthetic oligonucleotide
agaacaggaauuaagaauc

SEQ ID NO: 1752336 - RNA, 19 nt, Artificial Sequence
  Description of Artificial Sequence: Synthetic oligonucleotide
aagggcagcgguuucaugg

SEQ ID NO: 1752337 - RNA, 19 nt, Artificial Sequence
  Description of Artificial Sequence: Synthetic oligonucleotide
uuucauggugacaucaggg

SEQ ID NO: 1752338 - RNA, 19 nt, Artificial Sequence
  Description of Artificial Sequence: Synthetic oligonucleotide
gaagaagugaccaagggug

SEQ ID NO: 1752339 - RNA, 19 nt, Artificial Sequence
  Description of Artificial Sequence: Synthetic oligonucleotide
uuaaccacaaugguguugg

SEQ ID NO: 1752340 - RNA, 19 nt, Artificial Sequence
  Description of Artificial Sequence: Synthetic oligonucleotide
aaauaguccuccugugggc

SEQ ID NO: 1752341 - RNA, 19 nt, Artificial Sequence
  Description of Artificial Sequence: Synthetic oligonucleotide
uauaaucacacuuggcucc

SEQ ID NO: 1752342 - RNA, 19 nt, Artificial Sequence
  Description of Artificial Sequence: Synthetic oligonucleotide
cuuagcugcacuuguaugg

SEQ ID NO: 1752343 - RNA, 19 nt, Artificial Sequence
  Description of Artificial Sequence: Synthetic oligonucleotide
uuucccauuaaccuugaca

SEQ ID NO: 1752344 - RNA, 19 nt, Artificial Sequence
  Description of Artificial Sequence: Synthetic oligonucleotide
auagacuucguagaagggc

SEQ ID NO: 1752345 - RNA, 19 nt, Artificial Sequence
  Description of Artificial Sequence: Synthetic oligonucleotide
guuucaucggacuaccagg

SEQ ID NO: 1752346 - RNA, 19 nt, Artificial Sequence
  Description of Artificial Sequence: Synthetic oligonucleotide
acucagaugaccaauuaac

SEQ ID NO: 1752347 - RNA, 19 nt, Artificial Sequence
  Description of Artificial Sequence: Synthetic oligonucleotide
gaaauaacaucugaccgcc

SEQ ID NO: 1752348 - RNA, 19 nt, Artificial Sequence
  Description of Artificial Sequence: Synthetic oligonucleotide
uccguccaaacucagauga

SEQ ID NO: 1752349 - RNA, 19 nt, Artificial Sequence
  Description of Artificial Sequence: Synthetic oligonucleotide
ucaauccaaggaaauaaca

SEQ ID NO: 1752350 - RNA, 19 nt, Artificial Sequence
  Description of Artificial Sequence: Synthetic oligonucleotide
aaagugcgcuuccucaaac

SEQ ID NO: 1752351 - RNA, 19 nt, Artificial Sequence
  Description of Artificial Sequence: Synthetic oligonucleotide
agugaugacagaaggaccg

SEQ ID NO: 1752352 - RNA, 19 nt, Artificial Sequence
  Description of Artificial Sequence: Synthetic oligonucleotide
augguauaaucacacuugg

SEQ ID NO: 1752353 - RNA, 19 nt, Artificial Sequence
  Description of Artificial Sequence: Synthetic oligonucleotide
gaagugaugacagaaggac

SEQ ID NO: 1752354 - RNA, 19 nt, Artificial Sequence
  Description of Artificial Sequence: Synthetic oligonucleotide
uaagagauucauagggagc

SEQ ID NO: 1752355 - RNA, 19 nt, Artificial Sequence
  Description of Artificial Sequence: Synthetic oligonucleotide
aagugcgcuuccucaaacc

SEQ ID NO: 1752356 - RNA, 19 nt, Artificial Sequence
  Description of Artificial Sequence: Synthetic oligonucleotide
cucaucacaaucagaacag

SEQ ID NO: 1752357 - RNA, 19 nt, Artificial Sequence
  Description of Artificial Sequence: Synthetic oligonucleotide
cagaugaccaauuaaccac

SEQ ID NO: 1752358 - RNA, 19 nt, Artificial Sequence
  Description of Artificial Sequence: Synthetic oligonucleotide
auguaauguugauuggacg

SEQ ID NO: 1752359 - RNA, 19 nt, Artificial Sequence
  Description of Artificial Sequence: Synthetic oligonucleotide
aucaaagcucugcaggugg

SEQ ID NO: 1752360 - RNA, 19 nt, Artificial Sequence
  Description of Artificial Sequence: Synthetic oligonucleotide
ugagagcuucccaaugugg

SEQ ID NO: 1752361 - RNA, 19 nt, Artificial Sequence
  Description of Artificial Sequence: Synthetic oligonucleotide
aauaagagauucauaggga

SEQ ID NO: 1752362 - RNA, 19 nt, Artificial Sequence
  Description of Artificial Sequence: Synthetic oligonucleotide
aagggcacggcaugggacg

SEQ ID NO: 1752363 - RNA, 19 nt, Artificial Sequence
  Description of Artificial Sequence: Synthetic oligonucleotide
aaucacacuuggcuccugg

SEQ ID NO: 1752364 - RNA, 19 nt, Artificial Sequence
  Description of Artificial Sequence: Synthetic oligonucleotide
auaacaucugaccgccggc

SEQ ID NO: 1752365 - RNA, 19 nt, Artificial Sequence
  Description of Artificial Sequence: Synthetic oligonucleotide
caucggacuaccaggaucc

SEQ ID NO: 1752366 - RNA, 19 nt, Artificial Sequence
  Description of Artificial Sequence: Synthetic oligonucleotide
cucagaugaccaauuaacc

SEQ ID NO: 1752367 - RNA, 19 nt, Artificial Sequence
  Description of Artificial Sequence: Synthetic oligonucleotide
agugcuucuugguuggagg

SEQ ID NO: 1752368 - RNA, 19 nt, Artificial Sequence
  Description of Artificial Sequence: Synthetic oligonucleotide
accagguacacagacaagg

SEQ ID NO: 1752369 - RNA, 19 nt, Artificial Sequence
  Description of Artificial Sequence: Synthetic oligonucleotide
ugccucaccagguacacag

SEQ ID NO: 1752370 - RNA, 19 nt, Artificial Sequence
  Description of Artificial Sequence: Synthetic oligonucleotide
ugaagugaugacagaagga

SEQ ID NO: 1752371 - RNA, 19 nt, Artificial Sequence
  Description of Artificial Sequence: Synthetic oligonucleotide
ucaaaccucuggcuggagg

SEQ ID NO: 1752372 - RNA, 19 nt, Artificial Sequence
  Description of Artificial Sequence: Synthetic oligonucleotide
gaugucaggacaccuuugc

SEQ ID NO: 1752373 - RNA, 19 nt, Artificial Sequence
  Description of Artificial Sequence: Synthetic oligonucleotide
ugggcuauacugcaggcca

SEQ ID NO: 1752374 - RNA, 19 nt, Artificial Sequence
  Description of Artificial Sequence: Synthetic oligonucleotide
aggcaaaucuuccucaucu

SEQ ID NO: 1752375 - RNA, 19 nt, Artificial Sequence
  Description of Artificial Sequence: Synthetic oligonucleotide
auuaaccuugacaaagagg

SEQ ID NO: 1752376 - RNA, 19 nt, Artificial Sequence
  Description of Artificial Sequence: Synthetic oligonucleotide
aagaaucuccaugaaauaa

SEQ ID NO: 1752377 - RNA, 19 nt, Artificial Sequence
  Description of Artificial Sequence: Synthetic oligonucleotide
ggaaauaacaucugaccgc

SEQ ID NO: 1752378 - RNA, 19 nt, Artificial Sequence
  Description of Artificial Sequence: Synthetic oligonucleotide
caauuaaccacaauggugu

SEQ ID NO: 1752379 - RNA, 19 nt, Artificial Sequence
  Description of Artificial Sequence: Synthetic oligonucleotide
uucuuauucucugauuggc

SEQ ID NO: 1752380 - RNA, 19 nt, Artificial Sequence
  Description of Artificial Sequence: Synthetic oligonucleotide
ucuggaugugagaaucugc

SEQ ID NO: 1752381 - RNA, 19 nt, Artificial Sequence
  Description of Artificial Sequence: Synthetic oligonucleotide
caucaauaauaagagauuc

SEQ ID NO: 1752382 - RNA, 19 nt, Artificial Sequence
  Description of Artificial Sequence: Synthetic oligonucleotide
guauaaucacacuuggcuc

SEQ ID NO: 1752383 - RNA, 19 nt, Artificial Sequence
  Description of Artificial Sequence: Synthetic oligonucleotide
gauguaauguugauuggac

SEQ ID NO: 1752384 - RNA, 19 nt, Artificial Sequence
  Description of Artificial Sequence: Synthetic oligonucleotide
aacucagaugaccaauuaa

SEQ ID NO: 1752385 - RNA, 19 nt, Artificial Sequence
  Description of Artificial Sequence: Synthetic oligonucleotide
ugagggcaaagguaaagug

SEQ ID NO: 1752386 - RNA, 19 nt, Artificial Sequence
  Description of Artificial Sequence: Synthetic oligonucleotide
caugggacggucagaaggg

SEQ ID NO: 1752387 - RNA, 19 nt, Artificial Sequence
  Description of Artificial Sequence: Synthetic oligonucleotide
caucuguagauaaagggca

SEQ ID NO: 1752388 - RNA, 19 nt, Artificial Sequence
  Description of Artificial Sequence: Synthetic oligonucleotide
uuucgauugucaaaucaau

SEQ ID NO: 1752389 - RNA, 19 nt, Artificial Sequence
  Description of Artificial Sequence: Synthetic oligonucleotide
uccugcgucaucuagugaa

SEQ ID NO: 1752390 - RNA, 19 nt, Artificial Sequence
  Description of Artificial Sequence: Synthetic oligonucleotide
ugcugacacggccaggagg

SEQ ID NO: 1752391 - RNA, 19 nt, Artificial Sequence
  Description of Artificial Sequence: Synthetic oligonucleotide
accaauuaaccacaauggu

SEQ ID NO: 1752392 - RNA, 19 nt, Artificial Sequence
  Description of Artificial Sequence: Synthetic oligonucleotide
aaccacaaugguguugggg

SEQ ID NO: 1752393 - RNA, 19 nt, Artificial Sequence
  Description of Artificial Sequence: Synthetic oligonucleotide
auguugauuggacggcugg

SEQ ID NO: 1752394 - RNA, 19 nt, Artificial Sequence
  Description of Artificial Sequence: Synthetic oligonucleotide
ucaaagcucugcagguggg

SEQ ID NO: 1752395 - RNA, 19 nt, Artificial Sequence
  Description of Artificial Sequence: Synthetic oligonucleotide
auccaaggaaauaacaucu

SEQ ID NO: 1752396 - RNA, 19 nt, Artificial Sequence
  Description of Artificial Sequence: Synthetic oligonucleotide
aguggagcuacggugagag

SEQ ID NO: 1752397 - RNA, 19 nt, Artificial Sequence
  Description of Artificial Sequence: Synthetic oligonucleotide
uugauuggacggcugggcc

SEQ ID NO: 1752398 - RNA, 19 nt, Artificial Sequence
  Description of Artificial Sequence: Synthetic oligonucleotide
gcuagucucacagagacag

SEQ ID NO: 1752399 - RNA, 19 nt, Artificial Sequence
  Description of Artificial Sequence: Synthetic oligonucleotide
gagggcaaagguaaagugc

SEQ ID NO: 1752400 - RNA, 19 nt, Artificial Sequence
  Description of Artificial Sequence: Synthetic oligonucleotide
gaugacagaaggaccguag

SEQ ID NO: 1752401 - RNA, 19 nt, Artificial Sequence
  Description of Artificial Sequence: Synthetic oligonucleotide
aggaacucccaggagacac

SEQ ID NO: 1752402 - RNA, 19 nt, Artificial Sequence
  Description of Artificial Sequence: Synthetic oligonucleotide
cauuaaccuugacaaagag

SEQ ID NO: 1752403 - RNA, 19 nt, Artificial Sequence
  Description of Artificial Sequence: Synthetic oligonucleotide
caaggaauaauuccgucca

SEQ ID NO: 1752404 - RNA, 19 nt, Artificial Sequence
  Description of Artificial Sequence: Synthetic oligonucleotide
uggagcuacggugagagcu

SEQ ID NO: 1752405 - RNA, 19 nt, Artificial Sequence
  Description of Artificial Sequence: Synthetic oligonucleotide
gguauaaucacacuuggcu

SEQ ID NO: 1752406 - RNA, 19 nt, Artificial Sequence
  Description of Artificial Sequence: Synthetic oligonucleotide
ucaucggacuaccaggauc

SEQ ID NO: 1752407 - RNA, 19 nt, Artificial Sequence
  Description of Artificial Sequence: Synthetic oligonucleotide
ucucacagagacagaaccu

SEQ ID NO: 1752408 - RNA, 19 nt, Artificial Sequence
  Description of Artificial Sequence: Synthetic oligonucleotide
cagcuagucucacagagac

SEQ ID NO: 1752409 - RNA, 19 nt, Artificial Sequence
  Description of Artificial Sequence: Synthetic oligonucleotide
ugguauaaucacacuuggc

SEQ ID NO: 1752410 - RNA, 19 nt, Artificial Sequence
  Description of Artificial Sequence: Synthetic oligonucleotide
uucgauugucaaaucaaua

SEQ ID NO: 1752411 - RNA, 19 nt, Artificial Sequence
  Description of Artificial Sequence: Synthetic oligonucleotide
uuagguuucaucggacuac

SEQ ID NO: 1752412 - RNA, 19 nt, Artificial Sequence
  Description of Artificial Sequence: Synthetic oligonucleotide
ucuuagguuucaucggacu

SEQ ID NO: 1752413 - RNA, 19 nt, Artificial Sequence
  Description of Artificial Sequence: Synthetic oligonucleotide
gcaugggacggucagaagg

SEQ ID NO: 1752414 - RNA, 19 nt, Artificial Sequence
  Description of Artificial Sequence: Synthetic oligonucleotide
gauugucaaaucaauaacu

SEQ ID NO: 1752415 - RNA, 19 nt, Artificial Sequence
  Description of Artificial Sequence: Synthetic oligonucleotide
gaugugagaaucugcugca

SEQ ID NO: 1752416 - RNA, 19 nt, Artificial Sequence
  Description of Artificial Sequence: Synthetic oligonucleotide
uguaugguauaaucacacu

SEQ ID NO: 1752417 - RNA, 19 nt, Artificial Sequence
  Description of Artificial Sequence: Synthetic oligonucleotide
aucacacuuggcuccuggc

SEQ ID NO: 1752418 - RNA, 19 nt, Artificial Sequence
  Description of Artificial Sequence: Synthetic oligonucleotide
caaggaacucccaggagac

SEQ ID NO: 1752419 - RNA, 19 nt, Artificial Sequence
  Description of Artificial Sequence: Synthetic oligonucleotide
ccaauuaaccacaauggug

SEQ ID NO: 1752420 - RNA, 19 nt, Artificial Sequence
  Description of Artificial Sequence: Synthetic oligonucleotide
uaucacacacaggacaugu

SEQ ID NO: 1752421 - RNA, 19 nt, Artificial Sequence
  Description of Artificial Sequence: Synthetic oligonucleotide
caucccucaaggaacuccc

SEQ ID NO: 1752422 - RNA, 19 nt, Artificial Sequence
  Description of Artificial Sequence: Synthetic oligonucleotide
ggggcgaaaccucagaugc

SEQ ID NO: 1752423 - RNA, 19 nt, Artificial Sequence
  Description of Artificial Sequence: Synthetic oligonucleotide
uguccugcgucaucuagug

SEQ ID NO: 1752424 - RNA, 19 nt, Artificial Sequence
  Description of Artificial Sequence: Synthetic oligonucleotide
ucaucugaugagcuuucga

SEQ ID NO: 1752425 - RNA, 19 nt, Artificial Sequence
  Description of Artificial Sequence: Synthetic oligonucleotide
ugaccagaugucaggacac

SEQ ID NO: 1752426 - RNA, 19 nt, Artificial Sequence
  Description of Artificial Sequence: Synthetic oligonucleotide
cuggaguggagcuacggug

SEQ ID NO: 1752427 - RNA, 19 nt, Artificial Sequence
  Description of Artificial Sequence: Synthetic oligonucleotide
acuucaacucucuucuuau

SEQ ID NO: 1752428 - RNA, 19 nt, Artificial Sequence
  Description of Artificial Sequence: Synthetic oligonucleotide
aggccauccagcccauacc

SEQ ID NO: 1752429 - RNA, 19 nt, Artificial Sequence
  Description of Artificial Sequence: Synthetic oligonucleotide
cuuguaugguauaaucaca

SEQ ID NO: 1752430 - RNA, 19 nt, Artificial Sequence
  Description of Artificial Sequence: Synthetic oligonucleotide
ugagagccgagccagggau

SEQ ID NO: 1752431 - RNA, 19 nt, Artificial Sequence
  Description of Artificial Sequence: Synthetic oligonucleotide
ugcgucaucuagugaagug

SEQ ID NO: 1752432 - RNA, 19 nt, Artificial Sequence
  Description of Artificial Sequence: Synthetic oligonucleotide
uaagaaucuccaugaaaua

SEQ ID NO: 1752433 - RNA, 19 nt, Artificial Sequence
  Description of Artificial Sequence: Synthetic oligonucleotide
aaugcugcugacacggcca

SEQ ID NO: 1752434 - RNA, 19 nt, Artificial Sequence
  Description of Artificial Sequence: Synthetic oligonucleotide
gguuucaucggacuaccag

SEQ ID NO: 1752435 - RNA, 19 nt, Artificial Sequence
  Description of Artificial Sequence: Synthetic oligonucleotide
uagugaagugaugacagaa

SEQ ID NO: 1752436 - RNA, 19 nt, Artificial Sequence
  Description of Artificial Sequence: Synthetic oligonucleotide
aaacucagaugaccaauua

SEQ ID NO: 1752437 - RNA, 19 nt, Artificial Sequence
  Description of Artificial Sequence: Synthetic oligonucleotide
ugaccaaggguguccugcg

SEQ ID NO: 1752438 - RNA, 19 nt, Artificial Sequence
  Description of Artificial Sequence: Synthetic oligonucleotide
ugcugacuccauugcaggg

SEQ ID NO: 1752439 - RNA, 19 nt, Artificial Sequence
  Description of Artificial Sequence: Synthetic oligonucleotide
acuucguagaagggcagcg

SEQ ID NO: 1752440 - RNA, 19 nt, Artificial Sequence
  Description of Artificial Sequence: Synthetic oligonucleotide
guaauguugauuggacggc

SEQ ID NO: 1752441 - RNA, 19 nt, Artificial Sequence
  Description of Artificial Sequence: Synthetic oligonucleotide
cacacuuggcuccuggcag

SEQ ID NO: 1752442 - RNA, 19 nt, Artificial Sequence
  Description of Artificial Sequence: Synthetic oligonucleotide
uggacugggcuauacugca

SEQ ID NO: 1752443 - RNA, 19 nt, Artificial Sequence
  Description of Artificial Sequence: Synthetic oligonucleotide
gucagaagggucccugcgg

SEQ ID NO: 1752444 - RNA, 19 nt, Artificial Sequence
  Description of Artificial Sequence: Synthetic oligonucleotide
agugcgcuuccucaaaccu

SEQ ID NO: 1752445 - RNA, 19 nt, Artificial Sequence
  Description of Artificial Sequence: Synthetic oligonucleotide
accaaggguguccugcguc

SEQ ID NO: 1752446 - RNA, 19 nt, Artificial Sequence
  Description of Artificial Sequence: Synthetic oligonucleotide
accgaagauggcuggugac

SEQ ID NO: 1752447 - RNA, 19 nt, Artificial Sequence
  Description of Artificial Sequence: Synthetic oligonucleotide
agaaggaccguagugcuga

SEQ ID NO: 1752448 - RNA, 19 nt, Artificial Sequence
  Description of Artificial Sequence: Synthetic oligonucleotide
uacggugagagcuucccaa

SEQ ID NO: 1752449 - RNA, 19 nt, Artificial Sequence
  Description of Artificial Sequence: Synthetic oligonucleotide
uucuuagguuucaucggac

SEQ ID NO: 1752450 - RNA, 19 nt, Artificial Sequence
  Description of Artificial Sequence: Synthetic oligonucleotide
agugcugacuccauugcag

SEQ ID NO: 1752451 - RNA, 19 nt, Artificial Sequence
  Description of Artificial Sequence: Synthetic oligonucleotide
ggcagcuagucucacagag

SEQ ID NO: 1752452 - RNA, 19 nt, Artificial Sequence
  Description of Artificial Sequence: Synthetic oligonucleotide
agcgguuucauggugacau

SEQ ID NO: 1752453 - RNA, 19 nt, Artificial Sequence
  Description of Artificial Sequence: Synthetic oligonucleotide
gaugcgaggguggugggcc

SEQ ID NO: 1752454 - RNA, 19 nt, Artificial Sequence
  Description of Artificial Sequence: Synthetic oligonucleotide
aucuagugaagugaugaca

SEQ ID NO: 1752455 - RNA, 19 nt, Artificial Sequence
  Description of Artificial Sequence: Synthetic oligonucleotide
acaucugaccgccggccac

SEQ ID NO: 1752456 - RNA, 19 nt, Artificial Sequence
  Description of Artificial Sequence: Synthetic oligonucleotide
gaagggguuccccggacug

SEQ ID NO: 1752457 - RNA, 19 nt, Artificial Sequence
  Description of Artificial Sequence: Synthetic oligonucleotide
gugaccagaugucaggaca

SEQ ID NO: 1752458 - RNA, 19 nt, Artificial Sequence
  Description of Artificial Sequence: Synthetic oligonucleotide
auaauuccguccaaacuca

SEQ ID NO: 1752459 - RNA, 19 nt, Artificial Sequence
  Description of Artificial Sequence: Synthetic oligonucleotide
ggcagaaccucucuggaug

SEQ ID NO: 1752460 - RNA, 19 nt, Artificial Sequence
  Description of Artificial Sequence: Synthetic oligonucleotide
aauuaaccacaaugguguu

SEQ ID NO: 1752461 - RNA, 19 nt, Artificial Sequence
  Description of Artificial Sequence: Synthetic oligonucleotide
agaugccuccuucuuaggu

SEQ ID NO: 1752462 - RNA, 19 nt, Artificial Sequence
  Description of Artificial Sequence: Synthetic oligonucleotide
auuaaccacaaugguguug

SEQ ID NO: 1752463 - RNA, 19 nt, Artificial Sequence
  Description of Artificial Sequence: Synthetic oligonucleotide
agaaccuuagcugcacuug

SEQ ID NO: 1752464 - RNA, 19 nt, Artificial Sequence
  Description of Artificial Sequence: Synthetic oligonucleotide
cauugcagggcuccgcagc

SEQ ID NO: 1752465 - RNA, 19 nt, Artificial Sequence
  Description of Artificial Sequence: Synthetic oligonucleotide
caucacaaucagaacagga

SEQ ID NO: 1752466 - RNA, 19 nt, Artificial Sequence
  Description of Artificial Sequence: Synthetic oligonucleotide
uaaagugcgcuuccucaaa

SEQ ID NO: 1752467 - RNA, 19 nt, Artificial Sequence
  Description of Artificial Sequence: Synthetic oligonucleotide
uaacaucugaccgccggcc

SEQ ID NO: 1752468 - RNA, 19 nt, Artificial Sequence
  Description of Artificial Sequence: Synthetic oligonucleotide
aacaucugaccgccggcca

SEQ ID NO: 1752469 - RNA, 19 nt, Artificial Sequence
  Description of Artificial Sequence: Synthetic oligonucleotide
ugauuggacggcugggccu

SEQ ID NO: 1752470 - RNA, 19 nt, Artificial Sequence
  Description of Artificial Sequence: Synthetic oligonucleotide
agggcuggaaugguggccg

SEQ ID NO: 1752471 - RNA, 19 nt, Artificial Sequence
  Description of Artificial Sequence: Synthetic oligonucleotide
gguaaagugcgcuuccuca

SEQ ID NO: 1752472 - RNA, 19 nt, Artificial Sequence
  Description of Artificial Sequence: Synthetic oligonucleotide
uagguuucaucggacuacc

SEQ ID NO: 1752473 - RNA, 19 nt, Artificial Sequence
  Description of Artificial Sequence: Synthetic oligonucleotide
aaggguguccugcgucauc

SEQ ID NO: 1752474 - RNA, 19 nt, Artificial Sequence
  Description of Artificial Sequence: Synthetic oligonucleotide
augacagaaggaccguagu

SEQ ID NO: 1752475 - RNA, 19 nt, Artificial Sequence
  Description of Artificial Sequence: Synthetic oligonucleotide
gguguuggggaacuguggc

SEQ ID NO: 1752476 - RNA, 19 nt, Artificial Sequence
  Description of Artificial Sequence: Synthetic oligonucleotide
aucugaugagcuuucgauu

SEQ ID NO: 1752477 - RNA, 19 nt, Artificial Sequence
  Description of Artificial Sequence: Synthetic oligonucleotide
aaggaauaauuccguccaa

SEQ ID NO: 1752478 - RNA, 19 nt, Artificial Sequence
  Description of Artificial Sequence: Synthetic oligonucleotide
aaauaacaucugaccgccg

SEQ ID NO: 1752479 - RNA, 19 nt, Artificial Sequence
  Description of Artificial Sequence: Synthetic oligonucleotide
augagcuuucgauugucaa

SEQ ID NO: 1752480 - RNA, 19 nt, Artificial Sequence
  Description of Artificial Sequence: Synthetic oligonucleotide
uccccggacuggaagaagu

SEQ ID NO: 1752481 - RNA, 19 nt, Artificial Sequence
  Description of Artificial Sequence: Synthetic oligonucleotide
cccauuaaccuugacaaag

SEQ ID NO: 1752482 - RNA, 19 nt, Artificial Sequence
  Description of Artificial Sequence: Synthetic oligonucleotide
augcccaucccucaaggaa

SEQ ID NO: 1752483 - RNA, 19 nt, Artificial Sequence
  Description of Artificial Sequence: Synthetic oligonucleotide
guugauuggacggcugggc

SEQ ID NO: 1752484 - RNA, 19 nt, Artificial Sequence
  Description of Artificial Sequence: Synthetic oligonucleotide
uggccgaggugacagggca

SEQ ID NO: 1752485 - RNA, 19 nt, Artificial Sequence
  Description of Artificial Sequence: Synthetic oligonucleotide
ccuucuuagguuucaucgg

SEQ ID NO: 1752486 - RNA, 19 nt, Artificial Sequence
  Description of Artificial Sequence: Synthetic oligonucleotide
guaugguauaaucacacuu

SEQ ID NO: 1752487 - RNA, 19 nt, Artificial Sequence
  Description of Artificial Sequence: Synthetic oligonucleotide
uccaaacucagaugaccaa

SEQ ID NO: 1752488 - RNA, 19 nt, Artificial Sequence
  Description of Artificial Sequence: Synthetic oligonucleotide
agaagugaccaaggguguc

SEQ ID NO: 1752489 - RNA, 19 nt, Artificial Sequence
  Description of Artificial Sequence: Synthetic oligonucleotide
uuccguccaaacucagaug

SEQ ID NO: 1752490 - RNA, 19 nt, Artificial Sequence
  Description of Artificial Sequence: Synthetic oligonucleotide
agcuuucgauugucaaauc

SEQ ID NO: 1752491 - RNA, 19 nt, Artificial Sequence
  Description of Artificial Sequence: Synthetic oligonucleotide
caauccaaggaaauaacau

SEQ ID NO: 1752492 - RNA, 19 nt, Artificial Sequence
  Description of Artificial Sequence: Synthetic oligonucleotide
uuaucacacacaggacaug

SEQ ID NO: 1752493 - RNA, 19 nt, Artificial Sequence
  Description of Artificial Sequence: Synthetic oligonucleotide
agugggcccaggaaguggg

SEQ ID NO: 1752494 - RNA, 19 nt, Artificial Sequence
  Description of Artificial Sequence: Synthetic oligonucleotide
accuuagcugcacuuguau

SEQ ID NO: 1752495 - RNA, 19 nt, Artificial Sequence
  Description of Artificial Sequence: Synthetic oligonucleotide
uucucugauuggcuucccu

SEQ ID NO: 1752496 - RNA, 19 nt, Artificial Sequence
  Description of Artificial Sequence: Synthetic oligonucleotide
aucuguagauaaagggcag

SEQ ID NO: 1752497 - RNA, 19 nt, Artificial Sequence
  Description of Artificial Sequence: Synthetic oligonucleotide
cuucguagaagggcagcgg

SEQ ID NO: 1752498 - RNA, 19 nt, Artificial Sequence
  Description of Artificial Sequence: Synthetic oligonucleotide
agacaaggaauaauuccgu

SEQ ID NO: 1752499 - RNA, 19 nt, Artificial Sequence
  Description of Artificial Sequence: Synthetic oligonucleotide
cagcccauacccuggcggg

SEQ ID NO: 1752500 - RNA, 19 nt, Artificial Sequence
  Description of Artificial Sequence: Synthetic oligonucleotide
gcuuucgauugucaaauca

SEQ ID NO: 1752501 - RNA, 19 nt, Artificial Sequence
  Description of Artificial Sequence: Synthetic oligonucleotide
gaaguggggaagggguucc

SEQ ID NO: 1752502 - RNA, 19 nt, Artificial Sequence
  Description of Artificial Sequence: Synthetic oligonucleotide
guaaagugcgcuuccucaa

SEQ ID NO: 1752503 - RNA, 19 nt, Artificial Sequence
  Description of Artificial Sequence: Synthetic oligonucleotide
ggucccugcgguuaacugc

SEQ ID NO: 1752504 - RNA, 19 nt, Artificial Sequence
  Description of Artificial Sequence: Synthetic oligonucleotide
ggucagaagggucccugcg

SEQ ID NO: 1752505 - RNA, 19 nt, Artificial Sequence
  Description of Artificial Sequence: Synthetic oligonucleotide
cuggaugugagaaucugcu

SEQ ID NO: 1752506 - RNA, 19 nt, Artificial Sequence
  Description of Artificial Sequence: Synthetic oligonucleotide
ugcuccauucuugguuggg

SEQ ID NO: 1752507 - RNA, 19 nt, Artificial Sequence
  Description of Artificial Sequence: Synthetic oligonucleotide
ucuugguuggaggcaaauc

SEQ ID NO: 1752508 - RNA, 19 nt, Artificial Sequence
  Description of Artificial Sequence: Synthetic oligonucleotide
ugcgguuaacugccucacc

SEQ ID NO: 1752509 - RNA, 19 nt, Artificial Sequence
  Description of Artificial Sequence: Synthetic oligonucleotide
aagugaccaaggguguccu

SEQ ID NO: 1752510 - RNA, 19 nt, Artificial Sequence
  Description of Artificial Sequence: Synthetic oligonucleotide
uccugugggcagcuagucu

SEQ ID NO: 1752511 - RNA, 19 nt, Artificial Sequence
  Description of Artificial Sequence: Synthetic oligonucleotide
ucugauuggcuucccucuu

SEQ ID NO: 1752512 - RNA, 19 nt, Artificial Sequence
  Description of Artificial Sequence: Synthetic oligonucleotide
gauggcuggugaccagaug

SEQ ID NO: 1752513 - RNA, 19 nt, Artificial Sequence
  Description of Artificial Sequence: Synthetic oligonucleotide
gucccugcgguuaacugcc

SEQ ID NO: 1752514 - RNA, 19 nt, Artificial Sequence
  Description of Artificial Sequence: Synthetic oligonucleotide
caggccauccagcccauac

SEQ ID NO: 1752515 - RNA, 19 nt, Artificial Sequence
  Description of Artificial Sequence: Synthetic oligonucleotide
gacuucguagaagggcagc

SEQ ID NO: 1752516 - RNA, 19 nt, Artificial Sequence
  Description of Artificial Sequence: Synthetic oligonucleotide
auaaucacacuuggcuccu

SEQ ID NO: 1752517 - RNA, 19 nt, Artificial Sequence
  Description of Artificial Sequence: Synthetic oligonucleotide
cuuagguuucaucggacua

SEQ ID NO: 1752518 - RNA, 19 nt, Artificial Sequence
  Description of Artificial Sequence: Synthetic oligonucleotide
ggauguaauguugauugga

SEQ ID NO: 1752519 - RNA, 19 nt, Artificial Sequence
  Description of Artificial Sequence: Synthetic oligonucleotide
agagggaccugaaggcagg

SEQ ID NO: 1752520 - RNA, 19 nt, Artificial Sequence
  Description of Artificial Sequence: Synthetic oligonucleotide
cugauuggcuucccucuug

SEQ ID NO: 1752521 - RNA, 19 nt, Artificial Sequence
  Description of Artificial Sequence: Synthetic oligonucleotide
agguaagggcacggcaugg

SEQ ID NO: 1752522 - RNA, 19 nt, Artificial Sequence
  Description of Artificial Sequence: Synthetic oligonucleotide
uagaagggcagcgguuuca

SEQ ID NO: 1752523 - RNA, 19 nt, Artificial Sequence
  Description of Artificial Sequence: Synthetic oligonucleotide
cgauugucaaaucaauaac

SEQ ID NO: 1752524 - RNA, 19 nt, Artificial Sequence
  Description of Artificial Sequence: Synthetic oligonucleotide
cacggcaugggacggucag

SEQ ID NO: 1752525 - RNA, 19 nt, Artificial Sequence
  Description of Artificial Sequence: Synthetic oligonucleotide
ggcagaguuucccauuaac

SEQ ID NO: 1752526 - RNA, 19 nt, Artificial Sequence
  Description of Artificial Sequence: Synthetic oligonucleotide
ugggacggucagaaggguc

SEQ ID NO: 1752527 - RNA, 19 nt, Artificial Sequence
  Description of Artificial Sequence: Synthetic oligonucleotide
augaccaauuaaccacaau

SEQ ID NO: 1752528 - RNA, 19 nt, Artificial Sequence
  Description of Artificial Sequence: Synthetic oligonucleotide
gauuggacggcugggccuc

SEQ ID NO: 1752529 - RNA, 19 nt, Artificial Sequence
  Description of Artificial Sequence: Synthetic oligonucleotide
cugggcuauacugcaggcc

SEQ ID NO: 1752530 - RNA, 19 nt, Artificial Sequence
  Description of Artificial Sequence: Synthetic oligonucleotide
agggcagcgguuucauggu

SEQ ID NO: 1752531 - RNA, 19 nt, Artificial Sequence
  Description of Artificial Sequence: Synthetic oligonucleotide
agacacaaugcugcugaca

SEQ ID NO: 1752532 - RNA, 19 nt, Artificial Sequence
  Description of Artificial Sequence: Synthetic oligonucleotide
uucaucggacuaccaggau

SEQ ID NO: 1752533 - RNA, 19 nt, Artificial Sequence
  Description of Artificial Sequence: Synthetic oligonucleotide
uggaugcgagggugguggg

SEQ ID NO: 1752534 - RNA, 19 nt, Artificial Sequence
  Description of Artificial Sequence: Synthetic oligonucleotide
gcgguuaacugccucacca

SEQ ID NO: 1752535 - RNA, 19 nt, Artificial Sequence
  Description of Artificial Sequence: Synthetic oligonucleotide
ucguagaagggcagcgguu

SEQ ID NO: 1752536 - RNA, 19 nt, Artificial Sequence
  Description of Artificial Sequence: Synthetic oligonucleotide
guaagggcacggcauggga

SEQ ID NO: 1752537 - RNA, 19 nt, Artificial Sequence
  Description of Artificial Sequence: Synthetic oligonucleotide
cacaaugguguuggggaac

SEQ ID NO: 1752538 - RNA, 19 nt, Artificial Sequence
  Description of Artificial Sequence: Synthetic oligonucleotide
ggaagguaacccggcaggg

SEQ ID NO: 1752539 - RNA, 19 nt, Artificial Sequence
  Description of Artificial Sequence: Synthetic oligonucleotide
cuagugaagugaugacaga

SEQ ID NO: 1752540 - RNA, 19 nt, Artificial Sequence
  Description of Artificial Sequence: Synthetic oligonucleotide
acaaugcugcugacacggc

SEQ ID NO: 1752541 - RNA, 19 nt, Artificial Sequence
  Description of Artificial Sequence: Synthetic oligonucleotide
gguuggaggcaaaucuucc

SEQ ID NO: 1752542 - RNA, 19 nt, Artificial Sequence
  Description of Artificial Sequence: Synthetic oligonucleotide
cagagacagaaccuuagcu

SEQ ID NO: 1752543 - RNA, 19 nt, Artificial Sequence
  Description of Artificial Sequence: Synthetic oligonucleotide
ucccucuuggacugggcua

SEQ ID NO: 1752544 - RNA, 19 nt, Artificial Sequence
  Description of Artificial Sequence: Synthetic oligonucleotide
accagaugucaggacaccu

SEQ ID NO: 1752545 - RNA, 19 nt, Artificial Sequence
  Description of Artificial Sequence: Synthetic oligonucleotide
cguagugcugacuccauug

SEQ ID NO: 1752546 - RNA, 19 nt, Artificial Sequence
  Description of Artificial Sequence: Synthetic oligonucleotide
agagccgagccagggaugu
